United States Patent Application Publication US 2007/0067865 A1 - sequence listing, part 29

SEQ ID NO: 180576 - DNA, 171 bp, Arabidopsis thaliana columbia
aaacgcgttgggcataggaaaaagtttattgtgacttttttcctctaaaaggggctgggggtttctaattgtgtggggaggtcttcattttacggatcaatccagtgttagaaacaaagggggttgaaggtgaaaactttggtggctctgcggttgatccgactcttttac

SEQ ID NO: 180577 - DNA, 320 bp, Arabidopsis thaliana columbia
caaaatcatcattaactctaaattcttttttttcatttcattcttacaaattcgtgacgagtacaacttaatcgctgggggcataattattatactctaaaaattaaattttttcctaataatccctctatttcttatttcaatctcatattaaacctattcttattatattacctaatttacactctattaaatctaaaattttcaacacatcatgattaactacaaatcacactctttcactttctatccttctaacccctatatccttatataacaactcatctatattaataaatactatttacctaataaccttc

SEQ ID NO: 180578 - DNA, 107 bp, Arabidopsis thaliana columbia
caatttttggtggtctgataaaacgtggttttacaatggaacaccaaacttgctgaaaacgtttgagtcgcttgtatcggatccggcgttacaaaaaccttgtgttg

SEQ ID NO: 180579 - DNA, 202 bp, Arabidopsis thaliana columbia
ttaaatctcgtgaacctaaaaacctcgtggaaaaccgtattaattgcgcccgaaggcgggaaaaaacccggttgggaggaaccaactttccaggaggccggggggggggaatcaaaaggccgggaagctccgggggggaaaaacccaaaggccggaaggaagctcccaacggagcttggtcccggaggcgccaggagaaaaa

SEQ ID NO: 180580 - DNA, 445 bp, Arabidopsis thaliana columbia
  unsure (1)..(445): unsure at all n locations
cttcgtgattgagagaatcttcaacgaaagaaagcaactttttttgggtgaaattcacagaacaaccaaggtttttcttcttcttcttcttctccagttcctacagaatcatgcctgacaagaacatcgtagaggacgttatcggtgatttggtggataacttcacggagactgttcagaagaacaaacatggttcctccttcttcgaacaagaagattccgtcagttctcgtttcaaccgtttgtttgatcgccagaagccaattcatcatgtcttaggcggtggcaaatgtaagaattcgtatacaggaacataaatatgagattggtttttcttgtaattgagtattgagagattccttcagctgcttgatgtgttgtatggaggaacaagaagatctctgcaagtgntttgatgggagcttccgcaatttgggtgcttttt

SEQ ID NO: 180581 - DNA, 177 bp, Arabidopsis thaliana columbia
ttgcgagcaagatatgtctcctcttctctttttttttgatcttaatttttctcatgtgcgggccaattttttgccaaggggaccttacatttttctcaattccatatctatatcatagataagttaaaaccattttaagtttatttttcatctttttaatcttatattgttgctcta

SEQ ID NO: 180582 - DNA, 182 bp, Arabidopsis thaliana columbia
aaacgagcaaaagaagaagagaaacaacaataagtttttatgtctacctctatcctctcattcagcgcttttgttacatccgggaggagcacccaccattttctacaccatataccttcttaaaattaaaccataaacatcttaattatctttcattactattaattttcttttaatttaca

SEQ ID NO: 180583 - DNA, 210 bp, Arabidopsis thaliana columbia
attgcactttcgataaataaatctagccctttattctatatatcattgcaggatgccttggtcggggcaattctataaactgtatgcgatgtctttaatatatttaatagacctcatacttccatagaaatagatccaaataccgatgtttaagatttttaccaacaaagttacactgtaatacccaatctaaacttgtattctctacca

SEQ ID NO: 180584 - DNA, 205 bp, Arabidopsis thaliana columbia
attctctctggatatcatataactatctctcgatctcaaataccataaatggctgacatgatgggcacaatcctaataaagggggacaaatcaataaggcttttaaatgctagagtacttccacagacaaatgactcaccacccatggttaagaactatccaacaacaccaccctgtgcatgacatacattttttatattgacac

SEQ ID NO: 180585 - DNA, 232 bp, Arabidopsis thaliana columbia
ttggaaaaagatcttgatggagtacatacacatataatggggacaccaaacatattaggggggtctgattctatatctaataatcaatataataaatgatctaacttaaataattttgatatcatttttatgtagttacatatttattcatttaagacatgaattttaaaatatccagatttattcataattattattgttacttattatattaatttattttgattaattt

SEQ ID NO: 180586 - DNA, 260 bp, Arabidopsis thaliana columbia
gggaggaatgggaggcatgggcggcatgtgttagtgaatgggtgagaatggtgaggaatgggttggaatgtttatgtattaattagtagaggtttttttctttattatttaatattattatatcatatatatatttatttattttgcttattattacatttaatattattcttaaattttcttataagaaattatattattatataaattttatttttttaatatttttaaatttatttattataaattaatattttatt

SEQ ID NO: 180587 - DNA, 239 bp, Arabidopsis thaliana columbia
tcgcgactttctattagaccctaatctatccagactacctttttctcacagcttctttaattcgtctaggttctcgcatggtcgacttcccgcgggagattcaagcctgtttgggtgagaggaagttcagtaatcagcgaagctctcgtttgaaacgccgtgagggacgctgttcggtctgaacgtataaaatcaaagcgaggggtaatggactggatcgaacagtggagatgcaaact

SEQ ID NO: 180588 - DNA, 422 bp, Arabidopsis thaliana columbia
  unsure (1)..(422): unsure at all n locations
gaaagctaatgagaggctaattcnaatcttttattttctgtctgaatcacgtatatctggaacgggtgtctttgttgacgcgcgcgaccatataattcgtcctcttgctttgatcatagctaaagagttgctcattgtacagacttttgattttgtcctatataaacatatttgcattgaatcattgtttctaatcttataaaaacttattcctagtagatattttcttgattttccatatcaataacctctttttacttcctattattcttatttttttcttttacttaattattttcctccgttcaggtggtttatacttatcaacaatctatttcttatgttgatagtttttttatttttttaattatttacttatttttttcttctattttatacctttgccaaatttatagtttttt

SEQ ID NO: 180589 - DNA, 214 bp, Arabidopsis thaliana columbia
  unsure (1)..(214): unsure at all n locations
gctccaaaattcttctccntctttctttcttttccttccaataaagccttatatcggccgattcttatcaacaactatgcggtcaaaacatcttcttatttattaacccatcaatattacttaaaacctttaactttttttattttttttttttctaattttactaaaanacaatcaactctataaccaaaatttttatccttcatattatttt

SEQ ID NO: 180590 - DNA, 458 bp, Arabidopsis thaliana columbia
  unsure (1)..(458): unsure at all n locations
cacaaacataattatcctcctatttattttttcaataaatacnatcccttccttggggcgttttaaaaacaatatgggcggaccaaaaataaaattctttttatcacaaactccaacatanaaaaaattttaatatttacactaatcaatattaatctccattactatatacccccctcacccattttccttctatcttaaattttcttcttcatatcttttcttattaatctttaactattactcatatttatcattatttcttaacattttattcatcatatctattttcttctacctctttaaaacctacatcataaattttatctattttttatatttttaattaattttatttaacaattattatttctattcatttattctttttaatattttttatcactttattcctaatattatttctttatatattttttttttttcaatttttattt

SEQ ID NO: 180591 - DNA, 201 bp, Arabidopsis thaliana columbia
gcctgctttcgtattcaattctcatattcttctcaaccatggccctgctcttcggggatcgccttattttaccgtgggtacggccacaaatacatcttttaagccaatttctttcttcttcaactccatctcttctatattattattcctttacttatgatttttcttcttatttcttcccttcttatcacatatttattc

SEQ ID NO: 180592 - DNA, 139 bp, Arabidopsis thaliana columbia
  unsure (1)..(139): unsure at all n locations
ggccgacccagcgcgtccgtttaaaacctataattaaaaanatctccttttttttttttttcgctactcactccactgtcatgctatcatacacaaatcgcatgcactctaacccaaaaccttacccctactccatcta

SEQ ID NO: 180593 - DNA, 286 bp, Arabidopsis thaliana columbia
  unsure (1)..(286): unsure at all n locations
aaatcttaaacgttttactttatttttttttactcaacctcaatggccncctcagcaagggctctatactaccctgggttgaccaataataccaacaatcttaccccctctacattttaagtccttgtaagcttctctctaacaattattattactgttgtcaatccaaacagcccatcaagcatcccattatacttatcttaccttgtcaatttacaaatttccatacttttactaatcacctttctaccttatcttataatttcttacattctacatattttac

SEQ ID NO: 180594 - DNA, 496 bp, Arabidopsis thaliana columbia
  unsure (1)..(496): unsure at all n locations
aatcaataatgccataaatgagaaattttattttaaaatgaagggaatttntttatggactgagtattttttagtgggtacggactatattaanacaacatttcaagcattttcgattccaaggctttgattgcatttatctacaattttgttaattttttttcattttactacaactaatttggttacagttctcttttcttttaccttatcatcacattttaaattcctatatttacactcttctatagtttttattttatttattttttacattttttttaataatataaaatttgtgttgggagatactcgtatttttttattttattattaaactttattatcaatattttttttcatatatttttttatattatttctactttatttatttattaatcttttatataattattctttatttatctatattatttatatttataatcttatcacataatattatatctttctcttaatatttaattaataa

SEQ ID NO: 180595 - DNA, 414 bp, Arabidopsis thaliana columbia
atctcttatctatctctcactctccacttttttatctaccgacgattcaacaaatcatacgggaagacaaatcaaattcttgtttggtccttatttactccttttacagattatctcaatcttacagagcaccatggatcgttgtatttattgctgctccgacattactatcttcttcttcttcttcttcctcctcaattcatcctttttaaaatctgttcatcacaacataactggttcgtttcatattaactcaaactcctttctctttttcttctcctattattttttttacacttaactcgtctggcttttttataattctcttcttttccaaactctcttaaaacttcaatttttcttacaatattacttttttcttcctttcaattttacacatttactttacctttt

SEQ ID NO: 180596 - DNA, 430 bp, Arabidopsis thaliana columbia
atctttcataccttcgtccacagttctctttttcctaaatttccaatcaaccttgagtgcgtgatattaccactctgtcggggaataatctaaatgattttgtagatagtcagatgaagtactggcgtcaaatagcctaatctcttggtttcgatatcgatgatgttccagtaccaagaggaaccagagctgtactgtggtctgtcgactgtaaacacccacattttaagcttaaggcttttttacccaacatttattctattgtttgtcttaacctttacaatttgctcatggtgacaaacttcgagcaccttgagttactaaaaaacaacgagttaatgaactgtgtgtgctcttactatataacttctgttgtagtatatctttctatccagctacatataactttttatatatcatgtgatgaaaa

SEQ ID NO: 180597 - DNA, 273 bp, Arabidopsis thaliana columbia
gtcggatcattaaccttctatcatcaccatttttttttacaaatatcgaccttcaatctgttgcaactcctcattctacgcgacaaacttttactcttcattctccaacaacatcttttccctcaccatcacataaagaagaccttaacttttttatgactatcatttttatctacaatcgttcttatttcaccatttaaataatccttttctataattgatctttctttattaaaaaattttttatattttttatttaatatcacccattta

SEQ ID NO: 180598 - DNA, 187 bp, Arabidopsis thaliana columbia
aaacccggcccgacccacgcgtccgactctttcactctctctttacaattttttttttaccattaacattaaaccctccagctggttatttattcaatctgggtcctacaaatcatcaaactttctttccaacccaaacattatctacacaatttctcgcttctctttgcttaccaaacccacaatc

SEQ ID NO: 180599 - DNA, 219 bp, Arabidopsis thaliana columbia
attaattttccctttactctcttttttttttttcataaaaaacaaccacacattgggtggtaacaaaaacaactgtgccgcacaaataaaaaatccttaatatacacatatttttttacatatacttccttatacttatatttctctatccatataccaattccactcttacctcaccttaaacatataatccactttttacaaaacctaactttacta

SEQ ID NO: 180600 - DNA, 244 bp, Arabidopsis thaliana columbia
gttttattttaactcatatacataacaatttttctacacattcttttcacaaacatctctgcgagttataacaataaccgggaacttactacaatttaacaattcaatctcttatctcctctttacttctcatcacattatcaactattcatcttttcatccaacttttcttctaactacctttatatactttacctctttttttttctctatctcaaacaaattatttctttttttttaatat

SEQ ID NO: 180601 - DNA, 136 bp, Arabidopsis thaliana columbia
atcgagacaaataaaaaaaactaatttttttttctctaataaattataaatttatcgcttattttccaaatattctatgccacaccaaatacacccctataaattattcatcaatttttttaaccacttttattat

SEQ ID NO: 180602 - DNA, 292 bp, Arabidopsis thaliana columbia
atctatcttctatttactctcttttacatttatcttcaaaaagtatcctacattggatgggatcaaatacaactgctggtcaaaaatcaaaaatcacttatataaacattatcttcttcagattctactttatgcttctatttctctatccttgtaccagtttcactttcaccacaacagaatcttatgaatcacttgatccatattcaaacattactataaaattcccaattatcagctggactgttcatagttatctttctgttgtaacaatttctaatctccaacaatt

SEQ ID NO: 180603 - DNA, 111 bp, Arabidopsis thaliana columbia
cactattctccaatatctcttacatttttttacactctctaaccatccaaaaaggtaacgtttaaattaacattgtgctcgttctaaacaatatctcttaaaaatcaccca

SEQ ID NO: 180604 - DNA, 314 bp, Arabidopsis thaliana columbia
aaacccggcccgacccacgcgtccgctaaaatatggtgcacgtttgctacttcctatactatggaaagaccttcaagggagccggtttccttacgagagtgagcgtctttattctgaattgaagctggttggtgagtatggtctgcgtaacaagctttttgctctttagagagctttactttttttttcttttttcccaatttcttctatgttttcttttttctttttttgaaatatttttcaaatttgttctattttatctcacttctttcatttttttctatttttctcttttttcctttatttttttattt

SEQ ID NO: 180605 - DNA, 54 bp, Arabidopsis thaliana columbia
aaaaaaattaaccgtctaactctttctctttattttctcataacattaattttc

SEQ ID NO: 180606 - DNA, 357 bp, Arabidopsis thaliana columbia
gaccaaaaattacttaacaaccatcgcctctttctttttaaaaactatcctctcaaattcgccggctctttccattcaccaggtccctaataaatcacacatcctcaacgtctgctccttctccgtctctttgatcgaataaagtctcttactctatcttcaagcttttctttaccgatcccgatggatacaagcacgacatcaattgactctataaccaaactctccttctttcacacactcacacttgtctgattgatccatcattccatatatagtatcacatcaaagcttgctcatctgagtgcgaaatttatatctcttttcaatttcttcctaagctccctcttcgttctt

SEQ ID NO: 180607 - DNA, 131 bp, Arabidopsis thaliana columbia
  unsure (1)..(131): unsure at all n locations
ggaaancccggggcgacccaacatccgttcacaatcaaattttcctatgattttattttctactcttcctacatctacacacgtggaattaatatttagtctggtgatcaaattactttttccatttaaaa

SEQ ID NO: 180608 - DNA, 227 bp, Arabidopsis thaliana columbia
cactataaatcaactcatactctatctttttcctcaattactacaaccaaaaattgagcgttatacttataagtgggcggggccttacaaatatctctttataaccacaaaaacttttacactcttccctaacatctaacttaaatcataaccatataacctaactatttcttactatttcctcacattaacatctccaacttatttcagcctatttttaattctaa

SEQ ID NO: 180609 - DNA, 262 bp, Arabidopsis thaliana columbia
  unsure (1)..(262): unsure at all n locations
cggcccggcccacgcgaccgaaagcttcttccttcttttttccttttcgttataagagacatacggnaatcaatgttcgtaattctttcaaacaccgccggacacaataacaacaaggttctccagaataaggtcactattatcctccctcctctctcccttaagcttaatgtgttaagagcatattctgaaaacaaaccaaggtcgttaggatttcttatggactattttttttcttttttgattcttaaagcactatcac

SEQ ID NO: 180610 - DNA, 275 bp, Arabidopsis thaliana columbia
gacccacgcgtcccaaaattttttacagaaaacttttagtctaaccaaaaaaatccaactgggtggattctaagagagaccggggccctactacatcacacacatacaacctaaacaaatgtaccaatacagcacttattactacactagtattcccgtctcaaaatctatctctcctaacaccttcacattggcaacactaacaagtcaccttacttcatctaaataaaccctactagaaactaacctgtcataaatactcctgaacttcccat

SEQ ID NO: 180611 - DNA, 301 bp, Arabidopsis thaliana columbia
aaacacccccattttcctcacacaaaacctttttcttcaactacacagttgcataacgaggcgcggtctcacaccagctcgtaccgcaacaacaaaccttgtctactctactatcgattgctctaaacctctttatgataagatcattgagattgctcccaaagacactattttaaatgatcttattatatgtttccagacacagctagagcctttggtcactcttcttttatatctcgcgcttacctcaccgtcattcttccttttctgatttttatttctaacacctgatatttttttt

SEQ ID NO: 180612 - DNA, 295 bp, Arabidopsis thaliana columbia
  unsure (1)..(295): unsure at all n locations
ccctactcactcttctccnagtatttaacatcatagacacattcggttcccaaagccgggattctacctatcttggtactcatctataatacttctctcgaaactcctgcttctgaaagttatcttcttaatggaaacttctaagagtcaccaaagaaaacctacatgaaaaaaacagttctactaagcaaaaacacctttcccgaatgggaaaccacccgtttcgtctagtacattgcctgctgtccttaaccattgaagcatttacattaccattggcttatttaaatccacg

SEQ ID NO: 180613 - DNA, 104 bp, Arabidopsis thaliana columbia
ccggccctcaatataagaaaacttgacaaagaataaacacattgtcttttgctcataaaattttgagagactcctaatcaattgcggtgtatatagtttgtttt

SEQ ID NO: 180614 - DNA, 157 bp, Arabidopsis thaliana columbia
ctctattcaccattttatctgatatttatttttgcagacatcctcaatcaaatccgtgggggagccttttcaactgtcgtgagcacatttttaaaaccttctattatactttttcctttaaacattttttcaatatatttatattttatacctataa

SEQ ID NO: 180615 - DNA, 61 bp, Arabidopsis thaliana columbia
cttccctttcttttctttctttttctccgcggaaggaatctttttttctgtttgcgtttga

SEQ ID NO: 180616 - DNA, 236 bp, Arabidopsis thaliana columbia
ttccaaaaatcaatagtttgtttttataataattatggaacaaacaataatttatttctattataataatttaaccaaaaaaaaattaaattctacaaaaaaattcaacaaaatatataaattataaccctctaaaaattaaaaaaaaaatttttaacacaattactttttaacacataaaattatttatctaaacaaataaactttttaaaaactaaaaatactttatttaaatt

SEQ ID NO: 180617 - DNA, 270 bp, Arabidopsis thaliana columbia
  unsure (1)..(270): unsure at all n locations
ctttttaaaaacttctactcattgncatcaatcaatcgccggaaaattanaatagaatgttgcttctccngaatctgctgttaaatacaatctaatatttaantattccacctctttcaagcttataaaatccattttttgctaataatctcattatcttttttttttttttcacttcattttattaataaattatttttttttatcaaaatttttttttataaatatatttcttttctatttcctaaattttttttccatatttttttt

SEQ ID NO: 180618 - DNA, 141 bp, Arabidopsis thaliana columbia
cgcgtccgaagaacacaaactctgcttcaaagttgtattttttaatgaaagtcaccctgacaatactgatgactttatatacctaagggctgaacaccacccaagcattgtacacatctccaatgcccatgaagttaaaac

SEQ ID NO: 180619 - DNA, 231 bp, Arabidopsis thaliana columbia
cccacgcgtcgacaacagagggtgacactgcgactgtcttaccaacgggtgggacgccatggctaacccgctaccaactttggtgggcagggacgtgctgattttagcgggactggcggactggtcatcctataccagcgtttgcgcctccgtttggctggtttggctgggtgggttacaaaaagatggagaacttgacttactgactgttggtcttgggtttgttaaccg

SEQ ID NO: 180620 - DNA, 379 bp, Arabidopsis thaliana columbia
  unsure (1)..(379): unsure at all n locations
cggactccttttctgacccgtggtctttattagtggatggatgtcttatanaatgaagatatcattctatgtttctgtggtccttatccctttttccaaatcttaaagttttccacattttatcatctgtttcctctccttaattatttgaagacactcaatttctatttgatctgtgactataatttttatttctgtttcatacaaaattatattttcctttctctttcccctttgattttcaataatattaatccttatgatcaaaatatgtaatctacatcttatctggtcaagctcttcattttcattattttatatgacacatattaacaactacttcattagttttttttcatttttcgatatttttttttta

SEQ ID NO: 180621 - DNA, 274 bp, Arabidopsis thaliana columbia
  unsure (1)..(274): unsure at all n locations
gcgacgaggncgaanacgancnncttacctcngncgacagnncngaannaanancagggggcanngncnnccgancgcgcggncncncnnnggcnncnnccaancnaannncagngannnacccgnnaagaanncaccnnnngagaggcccagnnnngaaananggcnggccaaaacgcgcgnnngaangnggnncccacngnnaccangcncggggnnangaaagcncgncnngnnggcgccacaagaggncangcccnccncaagaaaaaga

SEQ ID NO: 180622 - DNA, 297 bp, Arabidopsis thaliana columbia
  unsure (1)..(297): unsure at all n locations
gggngagccaancccttttatcaagcgacangcngcggcngagagcggggggaacccngagggganggcggaagngccanggnanggaancgaacaagaanacacnnngnngcagaaggangngaacnggccncnnggacggcccannggnggcnncccnggcccncagggaccanacnacngcagnannggagcngacaaancnnnnggaagagacanngnngangcncacnacaaagccncnnngnaggcnggaaacaacancagngggancaaaggagaaggcaagccgggaca

SEQ ID NO: 180623 - DNA, 305 bp, Arabidopsis thaliana columbia
ggccaacccgggcgaccgactcgtcttttcattctttgattctcatcttctcaactatttgcttgaggcaaatcgcgagagtgggcgcaacctgctacatgcacacctggaaaaggatttgctgtgtgagtcatggaccatgaaagctttgcagcatcaactagaacgttggaccaacgctacctcgggctttttcacgccctgggctttcagcctaggggtatctttcaaagacttgaccaaagagtcgaggtagctttcgtgtatctgagaaggagagtcttccggataagtgcagggaccgt

SEQ ID NO: 180624 - DNA, 289 bp, Arabidopsis thaliana columbia
accagcttcacatcttcttctccgttttgtacttctctcgtttctagatctcctacgatcgttatatcaaatccgagcggttaattctctcaatcacacaaaaacctaaaaccaaaaaaaaaccatgtcttttgagaagatcaaggtggcaaatcccatcttctagattgatggttatcaaattaccactgttatttttaagtctattaattttaatcttattactcccttttgtgctaatcatttttatttatctttaatcttttattatttctaacctttatttttt

SEQ ID NO: 180625 - DNA, 443 bp, Arabidopsis thaliana columbia
  unsure (1)..(443): unsure at all n locations
gaannccggccgacccagcgnccgnaaaaaaaaaaaaaaaaaaaaaaaaaattttaaaaaaaaaaaaaaaaaaaaaaggagggaaaaaaaaaaaaaggggaggaaaaaaaaaaaagggccccccccccaaaaaacccaaaccaaccncccccgcccacccaccaaaaaacccaacaaaagggccccccaaaaccaaaccaccgccccccgnnnaacaacccccgcaccggaaaaaccccgcccgaccccaaccaaaacccccggcaacaaaacccccnnaccccaacgggccaaaaaaccaaaaagcccccaccaaaccccccgcccaacaaaggcccaacccaaaagccaaaagggcccccccccgaacccccccaaaaaacccccccggggggggggaaaccccccagggaccccccaaccgcgccaaaccccaagccccc

SEQ ID NO: 180626 - DNA, 389 bp, Arabidopsis thaliana columbia
  unsure (1)..(389): unsure at all n locations
aatcattttgaancanaaatcgattttctttatatggctcttgttcaatccanaacttgtggccaccttaacactccggtgtggccnattctatcctccctccatgctccgtcttctctctttatccggagggaaatccgaccggtatccgtgcctttctcctccttcaccttctgaaacttgcccttctcgccgttgactcttcctctaaagcttttctgtcctctccactccttcaagtttgacagagaagattatcttttgaagaaattgtcagctcaataacttcaagaactggtgaaaggagatatttatgttccacttattgtttatttttatgctacatgtttgttgaccttgaatctatattttccctttaaccataaaat

SEQ ID NO: 180627 - DNA, 413 bp, Arabidopsis thaliana columbia
  unsure (1)..(413): unsure at all n locations
gcgtccggncagaggtttacgctgccgttccagtgaatcccttcgatgccttccccaatgctagcaattgttactagtccgtggcttgcgagcgttgctaaaagtttccctggaaaggccgttggagtacaattcggtggctctgctgctgcttcttcagctgttgaagcttatgcacctgcagcttcagctgatgatgatgatgtcttggatctctttggtttcgatacccttattttttttttagctttatcttttatggtttcttctataatatttctcatatttttttctttttttctgtttttttgttgggtggggttttttttatctttttctaattttttctttttttatacctatcttattttttttcctccacttatttcttcttctctctacaactttttttt

SEQ ID NO: 180628 - DNA, 111 bp, Arabidopsis thaliana columbia
  unsure (1)..(111): unsure at all n locations
gcgtacgaaatttanacaaaaaataaatattgttttttttacctcaggttatcnaccaaacgtctgcctttattataatacggatagtacctaaaaaataccttctctatt

SEQ ID NO: 180629 - DNA, 301 bp, Arabidopsis thaliana columbia
gccgccggaacccgtcgacccacctcgcaccattgaggtaacttatacacagatcttttgaaattggattcatctagggcacttgttatgggtgtacaataccaaactctgtgccttgttcttgttaggcttttgcttttgactgaagttaaaaaagttaccaaacaaactactaaatcttagaggatgaaaagtacaaacccacctgatggaagtgttaaatcatttaaacccctgtcaagtagcgttttcggtaccacccaaaacttttaggtctattgggccgacatttgactcctaa

SEQ ID NO: 180630 - DNA, 234 bp, Arabidopsis thaliana columbia
ccggaaggaagcccgactcgacccacccaatcgctatctatcgactactgctctctctttgaactcggagactgaagaccgaaaccaaggtagtccccatgaaaccgtggggtggttctctcgaacaatctataccaatctccgacgatctgatcgggatgagtaacatcgacctgattgggatgagtaaccgctatctgatcgctttaatcgagatgtcgcagacacaggaat

SEQ ID NO: 180631 - DNA, 449 bp, Arabidopsis thaliana columbia
gataaatcgtcgcagagcgtggcggttacctttgtgacttcgggcgtggattctgcggtggacgttgaggtagacgtggccgggatcttttttctagttgtttatcttaacatttattttttatcttttaatattctaatttactttaagtataattaactatattaattttttatttataaatttaatttttttaatttttaatatatattatttatatttattattaatatttttaattatttatatttatacaatatattaattattatttatatttaattattatattataattttttattttattttaattgtatttatatttaaatattttaatttattatatattataatctttctatattaatattatatatattatatttagatatatttggtattttatattattattatttaatttatattgatatgaattatttttt

SEQ ID NO: 180632 - DNA, 357 bp, Arabidopsis thaliana columbia
ctccaaaatatgaatcttcagttgtctctaatctccttactcttcttcacttccggcgagtagctgaaaccttcaaaaggctctgttctcatccacagttcccttgtaaacctcctcattttatctcttatcccttctgcaatgtctctttatccataaaacaacgtgctatttctctcgtcttccttctcattctcccagagaagataggtcagctctcaaacacatcttcttcagtaccccttctttgtattcctccgtaccagtttttgttattattttcttctttatcttttttattactatatccgtgattttttccttaatcaatttaattattttttcatattttatctt

SEQ ID NO: 180633 - DNA, 121 bp, Arabidopsis thaliana columbia
ctcagcagccaacgacagttatcaaattttatgccctttaaaattttaatccttcaggcgagatcctattaaaaaataggaagaaccttaaatttatattattcatatcttcattatatat

SEQ ID NO: 180634 - DNA, 59 bp, Arabidopsis thaliana columbia
gagcccgaaatcaaaaacagcaatattttactatctgcaagaaaatgactcttcctctc

SEQ ID NO: 180635 - DNA, 356 bp, Arabidopsis thaliana columbia
  unsure (1)..(356): unsure at all n locations
gnccgatatatcgnnaccagagaaagagagtttagagatttagttagcttaatttttctggggggtttttaatgaangaagggggttttttaaatttattttaatttttatttattttttttatttntttttttattttatgttgatatttatttttgattttttttatatttgtatgtattttttgtattttatagttttttttatttggttttttttttttttttttttttttatttttataattgttttttttgttttttattttttttttttttaattatttttgattttttaagtattttattttatttttttttattttttttttttatgtttttttttttatttttttt

SEQ ID NO: 180636 - DNA, 254 bp, Arabidopsis thaliana columbia
tgtccctccacttagagagaagcagtctgtttcttatctaaaatcgagaaaaatggcaaacagtggttataggtaaagtggtgtgtgtaacattagccttcttttacattgtcttattgcttgtcatgtttcttcttattttttgtttaactttgtttaatgtcttttattctttatttatctttgttttttcgtatattatttcatcttttatttattctgtcttttctttttatttttctatcattcatttt

SEQ ID NO: 180637 - DNA, 256 bp, Arabidopsis thaliana columbia
cacaaactcatttctttccaagaaacacaattttatgttttcaaaaaatcatcatcatgtggtcaggattccatgctctgttgcgggtcctttttctttcagttagaacatataaatgtgtttcttcatctacttcttcttcttcttttttctcattcttttcattatcttcttcgtcttcttctcaaactactaatttgcctttaattacccgatttaccctatctgatcttctactcatcttcttacttttatt

SEQ ID NO: 180638 - DNA, 59 bp, Arabidopsis thaliana columbia
cggacgcgtggtgtgacagtgaggtgcaaagttactttgcatagagcttctcaatcaac

SEQ ID NO: 180639 - DNA, 275 bp, Arabidopsis thaliana columbia
  unsure (1)..(275): unsure at all n locations
accgggccggcccacgcgtccgaaataatcaaagacaaataccaaacactacatcaaattttccagacgatttgaatttgatgcgtctctaataaactgcgggncggagaatatggacaaattgaagatagcagaatggggagagaagctgaagactggtggagctcatatgagcagaatggatgattgtgttagtgaatagatatgcgtttaagctttaaccttagtaattccaaatacggtttcttgaaagctcaatctttattttctatttt

SEQ ID NO: 180640 - DNA, 139 bp, Arabidopsis thaliana columbia
ctctagataaaaaaccaataagaagaaaatccctcatactttcttcgatttctcaaggagctctgtcttttatcttaaacggaagggtttctaccccatcttaatcttcatactctaatttatattaagatttcttttc

SEQ ID NO: 180641 - DNA, 410 bp, Arabidopsis thaliana columbia
gttaaaaatagattagtgcctaatactggtatgtgaaggcatttttttcttgcgtgttattgtcaattttttcatgagtcctgatctattgtttaactagtccatttgtattaggttttagtgtttatattaattcatttactttttattatattatattttttttttttttttttttcctttcttatttactttattatttttattattctcttttttatttcattatttttattctttttttattatttttttatttattttttattttatatatttttttttatttattaatattatgttggtttttatttcatatttattatatttctattttattaattttctttttttattttatacatatttttataatttctttatatatattttttatttatattttttta

SEQ ID NO: 180642 - DNA, 555 bp, Arabidopsis thaliana columbia
  unsure (1)..(555): unsure at all n locations
cgacgccacgtccgtccgcttttcatcctcatgaaaggaatgggnnctcaaacccatgtcctgcnnttatcttcagtgggcgtcatccgtccggcgcatgtgttttgagtgaaccaagtagcgccttggtggctcattcccataatgttcaatccattctcttnncctctctggataaccctctccgtgttgcacctatccattctatggatgaccatatcattcnngttcctctcgctttctcttcataaccccaataatccaatagcnttngctcctataaaagggggttgagaagcccgaagatgcaaggggttgaggggatggcatctttggaaccgtnnctggtgggattggggtttcaccaaagggcgaatggagcctattcnngttggtcgtgttgggctatgatcgnnngtttcgctgcatttcgttgctttggtggaggggcgttgaccgggataaaaggggatatttagctcaagctgatatctggtagacagggaataccgatttaccgaatgcagagccatntggcttctctttcttcaatct

SEQ ID NO: 180643 - DNA, 386 bp, Arabidopsis thaliana columbia
cttattgctcctgcaccaggactgttataaccgagctcttcaggttcaagcacggggtggggaagctctagtgcggggaaagatgcaacacaaagagttcatcattttatgcctcgaagatagcagtgactggagcattgcaaccactcgaaggatagtgatgcaagttgatcctgagctttctaggacaattgttgtttctacaaagcttgacactaaaatccctcaattctcatgttcatctgacgtggaagtctttctctcacctcctgcaagcgcacttgacagctccttagggggcgattctccttttttcacgtctgtgccttttggaagagttggctatggacaggattcagtgtataagtttaatgactagttcaaac

SEQ ID NO: 180644 - DNA, 203 bp, Arabidopsis thaliana columbia
  unsure (1)..(203): unsure at all n locations
aaatcctactgccgtcaaaatcgattcattgttataccagagattgaatggaaaatccagctggtcctaattcaagatccgaatttaatccaaaaccaanacncttcaaatctatctatgaatgccaagacatgattcctaggaattttcgaaacccaataatcaaattttttatgtatcctaataataaatctcctttttta

SEQ ID NO: 180645 - DNA, 306 bp, Arabidopsis thaliana columbia
  unsure (1)..(306): unsure at all n locations
aaataatcaggncttttactcaggtcgtttttctcatataacatgctgattcaccaaagacttctctttacacatctctaccaacaaaaaatatcttccttttttaattattcaatataatatctattatctttaccaactatataacacttttatctccttcttattaaaactatttcctttcatttcctatttctacttattttataatacttaattttttttcctttttatttttttattttctattctaattttttctctttcttcttatttttttcttttttattaaatctttttatattt

SEQ ID NO: 180646 - DNA, 274 bp, Arabidopsis thaliana columbia
  unsure (1)..(274): unsure at all n locations
aaaaaccggcccgggccgaaggcaccaatttttttttttttcaatatcatctaaaactccttcaatctcaatttcncaaaattccttgcaagtttatcaaaatctttgtcgacacattcccaagaatccntccttttttttcttaaaattttctttataattaataatttatttttttttccttttttttttttttttttctcctcttttttttaaatttttcattactttttatttcttcttctttctttctacttttttttttctttttttt

SEQ ID NO: 180647 - DNA, 190 bp, Arabidopsis thaliana columbia
  unsure (1)..(190): unsure at all n locations
caggaactcancataaatgcaggtctttgctagaagacagtgtaccccttanagcgtctgtcatcttatagaatcggttagcacaaaacttgcttcaaattctctcacttcaaaatcatacttcaactgatcaattattcatcaatttaaggagtggcttttttttttccttattatcttcacttcttct

SEQ ID NO: 180648 - DNA, 355 bp, Arabidopsis thaliana columbia
  unsure (1)..(355): unsure at all n locations
ccgaaaanccgggccggaccgacccatccggcaaaaggttgaaaaaggaaaatatgtctctgtttccactccacacaattcttcatccgacgaccgatntttttagccgcctagggagaaacactctcccacaaacctcaaaaacttcttggtttctcccaactcaatcttttcctccaaaaaggcagatatttgaacaagactttaatgtttaaaaactaccaaatactctgcttcttctggagtcaccgacactctctcaagtgactgtcttagaccattctttctttgtttcagctccaatggctttgagttcattaatgaacataaacttgagttggaatcctttttttct

SEQ ID NO: 180649 - DNA, 52 bp, Arabidopsis thaliana columbia
ctgattcgaaatggcgaaaatgtaccggtattttttcactctgcggaggtga

SEQ ID NO: 180650 - DNA, 173 bp, Arabidopsis thaliana columbia
  unsure (1)..(173): unsure at all n locations
aaaaaaacaaaatcataactcctaacaaatcaaccnctacctcaataccataaacaatcaccccgagcattttttaaaaaacaccggctgacaacccacnnaatnncnaaaatcactcccctaaatcccctaanctaccaattccttcactcaccctccctaatctaccattt

SEQ ID NO: 180651 - DNA, 299 bp, Arabidopsis thaliana columbia
  unsure (1)..(299): unsure at all n locations
cagctacactttggcttgatcagacatcatcaacaacatcaaaggagatcacagtgtcgataggtcttgagaagaggaaggtccttgntttttacctctggttcgtcaagaacgttaaaaggtttagtcttttatcttcatttttacttttgggtttctctggtgaatattaaaaaagaggtttgacgaagagttgaagaaaggtgtgaatagacaaattgaagactctacaaaaaattaaagaagagtgaaagtgctcatcctcttttttctttttagttcattgcttttcaaggggt

SEQ ID NO: 180652 - DNA, 383 bp, Arabidopsis thaliana columbia
acccgtccgatctttacttcaatcatcccctttgaatctcttcctacttgtcacataaaaacattggggaggtcttttatagattggatgcgatactccagcttattcaatctccgaatgagaccttcctcaatcctatcttcttcctctcattcttaccaagctcataaaaaataaactgattcttataatcttcaaccaaacaagcgtgacaatcaatccgatattccgaagactatattttcaccagatgatactcccaagactcatcttcccagtattatatttacgccaacacatcatatggatataggttgagatgcaccacatggcttcatatgttcgttatgaaccacaatccaagataggcattattaccttta

SEQ ID NO: 180653 - DNA, 191 bp, Arabidopsis thaliana columbia
  unsure (1)..(191): unsure at all n locations
tcttcttcactcttttcctctctctctctcttttcctcttccattaaatcttngggggtcgcttttattgtttggagactggnctctacttcanatagtntaaaaatatacatatctaaattctctttttttcttctcatcattactaaaatgaaaaaattatatctatttctaattactataaataaaca

SEQ ID NO: 180654 - DNA, 78 bp, Arabidopsis thaliana columbia
  unsure (1)..(78): unsure at all n locations
ctttactataaggccgtttactaatacttgcgagagcaccctnatataatcaacnatcttctcaatgttcttactctt

SEQ ID NO: 180655 - DNA, 178 bp, Arabidopsis thaliana columbia
  unsure (1)..(178): unsure at all n locations
aactcttcttcactcttttcctctctctcttatcttccctcttccattaaatctttcgggttgtcttttattaatttgagactgtgctctacttcnnaaaatntanaaagagacacacctaaagtctctgtctttcttctcatcacgactaaaaggaaaaaattaaatctattgctaa

SEQ ID NO: 180656 - DNA, 467 bp, Arabidopsis thaliana columbia
  unsure (1)..(467): unsure at all n locations
ccggnncggaaancccggcccgaccgcacgcgtacgcggatccaaacactatagacatcctatagttttctgattctccaatgtttgtctagacatgagattctttgatggtgaaggataaacnatacncacatcatattcacagggttttacttctttttttggagacacaatatctatgatttcctttatttagagactttttattctattgctaacacttcctgctttatcattgtgagccttaattatattcccatctatgaagctcaatttttatcttcttctataatataatttgcttcacagttgcaccaatttatattacatgtagtgtttagatgttattttattactttatattttctactttttcctttttctttaatttatttttcatttttttttatttaatattttttatttattattttttattactttttatattttttttttttttttta

SEQ ID NO: 180657 - DNA, 371 bp, Arabidopsis thaliana columbia
  unsure (1)..(371): unsure at all n locations
gtttcaaagcccttttctcgcananntctccgtcccctttaccccgatnntcgtttaggtcttttgggtgtngtcgcttttcgaccgagggaatggaagaagtgtaagataccttgagcttaccctagtttcaaccaatattggttgctataatcatcaatatcctgtacggattnttgcatcacnaacaatggttattagtgaaagatgaagaaggaaggttcagtgagttgaacctttatgtgnggtctaagaattcgatactgcagaagaagctcgtgagttctacaacgcttacgctgctaggacggngtttaaggttaggactggtcagttgtatagatcaagaactgatggtacggtttcgtcta

SEQ ID NO: 180658 - DNA, 81 bp, Arabidopsis thaliana columbia
  unsure (1)..(81): unsure at all n locations
gaaaacccgggccgacccactcatccacagtcacattaattcccttttttcctttattcttaaancgcataactaactcaa

SEQ ID NO: 180659 - DNA, 165 bp, Arabidopsis thaliana columbia
  unsure (1)..(165): unsure at all n locations
atctacaactgtcaaactcaaatcttttttttttaaactactaacaaatactactggcgctatttttatatacaaaagttagttaacaaaaanattctaactttaaattctacatctattacaactctctatctttccaacccttattatccttccatatatctt

SEQ ID NO: 180660 - DNA, 92 bp, Arabidopsis thaliana columbia
aaaaaaaaaaaaaaaaaaaaaaaaaaaaaattttttttaaaaaaaaaaaataaaaaaaaaagaggagggaaaaaaaaaaaaaataggaggaa

SEQ ID NO: 180661 - DNA, 79 bp, Arabidopsis thaliana columbia
tcccgacgtaccgtccgaattcggcgcccacgcgtcgataaaaacagtggagcttaaaacgagaggaagagaaaaggcg

SEQ ID NO: 180662 - DNA, 260 bp, Arabidopsis thaliana columbia
accacgctcgctgagttggccctgagtactttttaccatcacaggtaaagtacgggaggccaagcttgggggacacctcctgactgtgcccatctttacttgctgtttcaaggctgcaagtgtacagtattcaacttctttttttctaaatttccactacaaggaatataccactaagctgtgtccacctgattactgcagcctgccttgtatgacttgaggtaaaactcagcttatgtgcttctgaactgatactttct

SEQ ID NO: 180663 - DNA, 355 bp, Arabidopsis thaliana columbia
gtccaacacggcggaattagatcgtacggtttcgatgccgagcgtgccaccgccgcggtggggagtctccaaaacctaattgaagagtgggagagagggaagagaggagagatatgtaatgtaaataaggcgggaagcgatgtaatcgttgtgagagatccgtataaaccgtctactattactaattttgattaatgtaaatttagattgttttctaataatttttaattgttattgtttcattcatttatatttattttatatcgtttgtgtttttttttatatattttatattgtatttatttttttaattaatactatacatatattttttaaatctgttatacatattttt

SEQ ID NO: 180664 - DNA, 455 bp, Arabidopsis thaliana columbia
gaaaaagaaagaaaggaaattaaagaaagagaagaaatcccttgaacagaagtattccacaaccaagacagtctcatatgaatccgaacagcttgagaaatcttgtttaacagaagaatttgagcaacctcaggttggatatttgtctgatggtagccagaacagtaagaagagaagaagggaaacttctcctgctgttgttgagagtcaaatcaaagctacacctgtagctggtaaaccactacggattcgtattgttttcaagaaaccgaaagaagctgaagctgtacctcaagaggatcctgtttgttccacttcagggactcagagacctagcgaattaccaagttctgtctctcttccaagtatctgtgatcatgatgtggctgtaccctcaacttctcttgagagtggcaaggtagcaattatttccgaatcaaagaagagaaagaaac

SEQ ID NO: 180665 - DNA, 285 bp, Arabidopsis thaliana columbia
attgaattagagcaactacattattttttttttacaattacattttactctactatacgggttttctactattggaggtgggcttatctatatcctaatcctttattaatcttataattcttgcaactaccttctctcttaatcctttttaattaatcaccattcataatataatacagcttcttactattgcttatttcttatccatattttctatctctcaataattcatatataattattatttttatacactttgattacttaaaaattcttactttctta

SEQ ID NO: 180666 - DNA, 283 bp, Arabidopsis thaliana columbia
ccgtccgattccgggtcgacccacctcagaaacacaaatgaaggtccgtctgttcatcggcgcaggacggccaccacgagctcggtgaaatcggatgctatttgcggcggtaggagaacacagaccaaccactttcattcgaccaagaactctttgtagtacttcattcaaacggccaccgttctgagaaggaatcgtcgacctacgatcataccgcttttactgtcctgagcagccgattgtcgtcttcttttttcgcattggtgactgacaacctaaactg

SEQ ID NO: 180667 - DNA, 328 bp, Arabidopsis thaliana columbia
  unsure (1)..(328): unsure at all n locations
gtcttttttcgctctgcttgtcgtagatcgttttaaccctaaaatacgtagagagatcagacctgaaaacaaccaatcaatcatggagtacgctgtgggaaatagaaggcgcttgaaggcttacaaactatatgcccgattcgttacgtattatatgcgccattttgggaacgggctgggatacggtataagcttgggaccacatgtgggacattgaagactttggtggtaaggcgagaggaagagctttttttgatctttagaccaagcagatggaattcagtgttgatcaactntttttttgtgataaataaatatggatgtcata

SEQ ID NO: 180668 - DNA, 296 bp, Arabidopsis thaliana columbia
aaaaattcagatttgtgtaagcactgatttttaaaggggttctggatacaaagccatactggcaaaggagtgcagttaacagagggggtgttacgggactattttacagaggcatggggaccactgggggacagtttggcttagccgtttatggttcatgccatgcttgggcaccactacgtgatgttctgtcaatttacccgtgtaaacaacggcctgagagtacgacagtgtgtctagaacatatgtgggatgatggactgcacttaatactgttgcaattttactgacaatta

SEQ ID NO: 180669 - DNA, 129 bp, Arabidopsis thaliana columbia
gaagaatcaagaaaatgcaccaattggatacatataaatagttcttacggggactaccagggggggagctctattcaaaacccaaaacaagtaaccaggtgtgttgactcacagaacatctcactgatc

SEQ ID NO: 180670 - DNA, 101 bp, Arabidopsis thaliana columbia
aaaccattcctccctatcatcacacacttatttttaccaacaaccaactacatcacatcgaagcatttttttataacaatatccaccatcaatccaccctc

SEQ ID NO: 180671 - DNA, 167 bp, Arabidopsis thaliana columbia
aagaagcaacaaaaccacctaactcaaattgtcttctatatacaagaaacataatcataatgataaattgttatgaggttatgcgacgcctccaactaaagaagtgttggacttactgacgagaaacggaaagttgtttctagaatcttctgataagcagtaatttc

SEQ ID NO: 180672 - DNA, 67 bp, Arabidopsis thaliana columbia
  unsure (1)..(67): unsure at all n locations
tcttccanttataaataaaagaacattaatcatttttctataacactntaccatacattcatacaaa

SEQ ID NO: 180673 - DNA, 238 bp, Arabidopsis thaliana columbia
ggggaaatgtaaaaaaaaaaccccaagaagcaaatggccctaaaaaggataaaaaaagtgggggggttaaaaaatttctaaaaaactaaccttggggtttcttttttttggtaaaaaaggatttgccccgtttcaaaaaggaccccttttaaaaaatggggtgtttaatatttcaaatgggagggttaaaaactataaaattttctttatgtaaaaatggtggaaagcccttatttta

SEQ ID NO: 180674 - DNA, 240 bp, Arabidopsis thaliana columbia
gaaaaagcatatattaccgtctttaagcttgaaataaaaggaaccataaaccatttctccttaggtttaggagttgttgccacatggagagctccctaggctcttcttcattagtggccaaaaacatctccatttctttttttctttttttaagttaactatgaaattttaagattatgtgacgtatcattcgagaagtcatatggtttatgttgactgcattagctaataaaactctac

SEQ ID NO: 180675 - DNA, 125 bp, Arabidopsis thaliana columbia
cccactcgtccgatagaggaagagagagcttttttacacgtaacgagtctacaaataagcagagctttttaaacatcacgtagccacatcaattttttactctttatattctacaataatcccac

SEQ ID NO: 180676 - DNA, 202 bp, Arabidopsis thaliana columbia
aataatttgaactcaaaaaaactcgaaatcaacatgccttctaaggttgagcattgtgacagggcgatccacacatgcatgggaatacagaagtgacaataaggctctaattgtatgatagattgcgggtacaatgacaaaagattgctcaaactttgaaataagctgctgtaacaagccaaatgaactcatgaagatgaac

SEQ ID NO: 180677 - DNA, 81 bp, Arabidopsis thaliana columbia
aaaaaaaaaacgaccaggcgctccaactattcttaaatgctattcacaatttttattttttactccaataaatcttaacac

SEQ ID NO: 180678 - DNA, 405 bp, Arabidopsis thaliana columbia
tttttaatattatatatatttttttggttaggtattattaaaaattgtttgttttttattaattttaatttatataataatttttttatattataaaaaacaaatttacaattttatttttttataaaaaaataaatttttttagaaataaataaatataaaaaaaaaaaattgtcttttaataaaattaaaaaaaattcaattttcaaatttaatattataaaattaaaaaaaattaaaataataactacattaacatatataataattaaaagtttttttttttaaaaatacccatttttaattaattattattattaatatttaatttcatttttttattttttcttttttcttttaaaaaaaaaaaatattttttttttattttatatagatttatatttt

SEQ ID NO: 180679 - DNA, 427 bp, Arabidopsis thaliana columbia
gagaactgtaggctctagatctgtgtctggtgctagttccgttcgaagcaggacttcatctgagagctcctgggatggatcaactacaagggggtcaaagccagctaaggatagacggaataggaaagttgtgtctggggccgcatctacactgtatggaaaaggaaagagtgttcctgagcactcaatccagattgatgatgataacagagaatggattcctgtatctagcaatgaaataatagatagagatctggggcctcgtcctactgtcccttcatttcaagttcagaggcatcaaatacatggtcatgaactagctcaggcaagtggatcagagtccacagtgtctcttgctccgtttatccttggccatggcatgcaacaaaaacgaggttgataattctggatatacgttttatcccac

SEQ ID NO: 180680 - DNA, 561 bp, Arabidopsis thaliana columbia
  unsure (1)..(561): unsure at all n locations
cggtccggannattcccgggtgcgacgccaancgcgtccgcttctcgcttttaggctctctcggaattgggtgttttgtcagaaacgtgctcttcaaatctgaacctcgagaaagagtctctcgagtgtcgtatagtcttgcggtccgtttgagcccaatgnngcgttggtcaatgccacatccatacaanngggaaaccaaagnngtgccaataaggggcgacttattgcgtgnncagagtatgcgnnggtgtgaagaaatcgaggagtccgcagaccttttcagattgggcgtcacttaatncaagtcacttgagttctcttaagaatgaactctctattggaaaagggttctctgtgcttgagaactctctgaagggtcccatattttgagagcatatgctcattgcgccgatatagtgagctcgtaaggaatggtagacaaactctttgaatgggatcctccctttattgaaataacgctcacaattgagcaatggatncgatttcttcctcaattggagattgaatgctaaccatgttgaagtggtttgcttcaag

SEQ ID NO: 180681 - DNA, 468 bp, Arabidopsis thaliana columbia
aaaagaatggcgaatccttggtgggtagggaatgttgcgatcggtggagttgagagtccggtgacgtcatcagctggttggttgcaccacagaaacagtaacaacaacaacccaccgactatgactcgttcggatccaagattggaccatgacttcaccaccaacaacagtggaagccctaatacccagactcagagccaagaagaacagaacagcagagacgagcaaccagctgttgaacccggatccggatccgggtctacgggtcgtcgtcctagaggtagacctcctggttccaagaacaaaccaaagagtccagttgttgttaccaaagaaagccctaactctctccagagccatgttcttgagattgctacgggagctgacgtggcggaaagcttaaacgcctttgctcgtagacgcggccggggcgtttcggtgctgagcggtagtggtttggttactaat

SEQ ID NO: 180682 - DNA, 212 bp, Arabidopsis thaliana columbia
gcgacggcgaacggccgccacgcgtcgcgtttctataccgggggtttttgtaggtctctccaggggagatttattggggtgtacctactgtgggtgccctataggactatcacctacttatcttttctacattcaacgtgagcatacttcttcacccaaatcgtgctttttgaatcaggtcgtctctagctctgtcctcattcttgcctttt

SEQ ID NO: 180683 - DNA, 146 bp, Arabidopsis thaliana columbia
tgccaagatagacgatgtaaacggtttttttttagatcggaaagcaatgtgtgagggggttttttgggcgattaccgggggaggatgaggtatctacttgtttcttttttgaatacaaagtttaagcttgtatctgtgccatcggt

SEQ ID NO: 180684 - DNA, 316 bp, Arabidopsis thaliana columbia
  unsure (1)..(316): unsure at all n locations
cacgcanacgcaaacatgttgaacatgcaagtagtttttttttaagagaaaaagcgcttgcatagggggggagtcaccataatacatggaaaaactcaactaaaatgggttcttaaacattcatggaccctaacaatccgtattgtggttggagttggctataacgttttattgtctttctacctaacgaaaaccactcactcacaccatattatgctgaaaaagacttttttgctagtattgtaacaagccgtgccatgttttagatgatttcacgagtcaaaaaccttcctccattatgaaagacagcaaacag

SEQ ID NO: 180685 - DNA, 355 bp, Arabidopsis thaliana columbia
gcgtccggttcggtcgccacgcgcgtgctcagagaggagcgggtgacgcttttagcgtttatctacaagggacggatcaaccaaaggggtgcaaaaggagactcaaaaccggtgttctaaaaatatccaagctagaaaggcgctttatttaggaagacaccacttgctcaaagagaagagactataagactaccaagaacattcatgtaccactaacacatgatgctggtaaagaataaccggttttaagagccgttattaagagcagggaggttatagacgcaaggctgttaggagcacagtgaatcaatcgaggccttaagagctaccagttagggggtgtttgaaaattgaa

SEQ ID NO: 180686 - DNA, 178 bp, Arabidopsis thaliana columbia
aacacacccagacacaactaatggattcttttattacataaatggacttctcgggcggggtcctatactctgatgagtgatcacaactctacccatctcattttctttgtgcttgcgacacattattcaaattcctgtcttatcaactatcgaaggtgggcttggggtctaccattaa

SEQ ID NO: 180687 - DNA, 429 bp, Arabidopsis thaliana columbia
aaaagactatatttcaccgacaaacacttgtacaggcaactatgctggcgttatcctgggagaaccttactccaaaccttaccttggttacgtccgtgatgtttctagatacctatggaactttatggcagataaaacatctgtccaaaagggaaatacaacctcagtttgtttaaaaggagtctgtagcaaaactgacgaagtgtgcatcaaagcagagagcaacaaggaaggaacatgtgttgtttacacaaccagactatgttgcagtttattcaactagattgaagtataacgatggagcttggacaattctaccacagaactgatcagattctatggggatggttgatccagtgtggaccgaaagcaactgtgacactttaagggtgcatgtgtacacagtccagcactcaccatacgacaatg

SEQ ID NO: 180688 - DNA, 248 bp, Arabidopsis thaliana columbia
accgacacatccaagactttttgattttttttcacccccgacaaaaatgttcccggaggaaactcaaaaatctctgaggactcttcaacagcacacatctcttaaaacaagagcaaaataacactcttgacacaactattttatcaacaccctcctaccctccactgctaatcttactatattcctcaccactctcccaccgctatgaacatcaaatattgactactccgcattacttgataaagttc

SEQ ID NO: 180689 - DNA, 348 bp, Arabidopsis thaliana columbia
accaaaaacatacaagactttttcttttttctatggcggcgacaaaaagcgtcgccgagggtgaatacatgatgtagcgggactatcaagacaagcgttactaatagattataaattcatgaaacaatttgttacatacaactactttagcaaaagagcttatcgtctaaataggaatcttctttatttctaacaaaatcataatcttatgaatacaagacttttagcagatcgcatttttttttaagtatattgaacagcataagaagaacgacaagcacttctcttttattatggatgacgttttaaaagttatatctgatctttattttgttactctttaatttt

SEQ ID NO: 180690 - DNA, 81 bp, Arabidopsis thaliana columbia
  unsure (1)..(81): unsure at all n locations
gccggacagatccaaaacantaacattatttttgggcggcggcgaaaaagttgacggggggggaaacctaagaagtcgggg

SEQ ID NO: 180691 - DNA, 266 bp, Arabidopsis thaliana columbia
cacacgcgcacgtccagaggcaaaacatttctatatttggccaagtgatccgccatgggagaagagaagactgtgcttcagctccctatttttccttaacttaagacctctgatttcgctctcaccgaataacctctatggacgctggtgaacaacgtgtcttcctatcgtcagagaggaaacaacgagaagccgtggcgcttttaccaattttgctgctctttccggagcgattaggagagatcggtgagaatctacatttaacg

SEQ ID NO: 180692 - DNA, 437 bp, Arabidopsis thaliana columbia
  unsure (1)..(437): unsure at all n locations
gaaaancggcggacccacacacctctttgctctatctcttctcaactcttttttattagcaaagttctcctcccttccagggggctactattgttcagctggggaacaaccttctataacctttctacttattcaaccttatcaagttcctaaacactatacacgttaatctcttctacgctaacccaaaaatcctcgccgcgttaaacggcaccgacattaccttattcgttatggtcccaaactatcttctcgtcaacatctccataatcttattactctccgtcgtctgtattcgatccatcatccttccgttttacccaaccaccaagatccgttacctccttgtcggtatcgagatcctctctttactagactctgagcacatatcttcactctttaccctatttgcctattacctacctttcttaaaaatt

SEQ ID NO: 180693 - DNA, 161 bp, Arabidopsis thaliana columbia
gccatctcatacccaacatataaatttttttttcatggctgcatctctcactgtcgcgggtattttattgtaaaaaggggggataccctaatctgaccttttccaagatcattcctgtaagagctcaatcatggccaagttaacaagtttctcatacactt

SEQ ID NO: 180694 - DNA, 153 bp, Arabidopsis thaliana columbia
tcgctaatttattaccactgacgattaggcatattttgtgtaagggacccaaagaaaaacaaaggagaggggtggccgttttaaaggatccaagtttacatacggttgaatgcaaggcaatagtttttcaatagagtaacctaaattaaatta

SEQ ID NO: 180695 - DNA, 231 bp, Arabidopsis thaliana columbia
accaagttgacccacctattgcgcttggtttttaccacccagacaatcttaatacaaggggattcttctctttgttcgacgtactctttaagcaagattcgcttgagagctgtcccgatggttctaaatgatttactacaaatgcaaatttgctgactaaaactttcctcgtaccttgacactagcgttcctaatctattttttcattattcaatggttactgcatgatgc

SEQ ID NO: 180696 - DNA, 243 bp, Arabidopsis thaliana columbia
gactagactgcccttcttttgggaattttttaggattcctcgttccttcaaaatgggcgggttattaatcttacagggggcatttacctcctgaagtatatactcttttaaacaggtgatccataaccagataattgcttgtagaaagcttgtactgctgatctatttgtcaaacacaacttgttactattttacgtcagacttgaataatgaattgcattaagcatgtgaagattgcatgca

SEQ ID NO: 180697 - DNA, 299 bp, Arabidopsis thaliana columbia
gttcatcttctacgactaagcaaagcttcttttctaaaattccacaggagatgagagggcgggttgatttacgaagctgggggaaaatatgtgaagcagaccacccagggtgggattagcggcagccgaatgggttcaggtcttgatgggtagtggttcgacattcccgccttactcctacgctcttaaatttgaacggggtgttagacattatcatgtcacgatccttggcgttgcttgcgatttgagtgaaaacatcaatcttcttcctgtttactccatttacaagcttcttccat

SEQ ID NO: 180698 - DNA, 105 bp, Arabidopsis thaliana columbia
cccgggccgcgcacgcgtccggttttttgttagctaaaaaaaattatgattttttatttttagaaacattccgactaatcttggggctgcttgtatgactaatgg

SEQ ID NO: 180699 - DNA, 236 bp, Arabidopsis thaliana columbia
ttttttttattatttattctgggggtttatattaacaaatgaggcttcccctcacacaaatcatctattttatcaaatactaccaccccacccgggaaaaaaacaaccccaacacaaatttttaaaaaccccaaaaaaaaaatcctttctaaacaaaaaagccacaaaaaccaaaagtctcaaaaaaaaacactccaaaaaaaaaaacatctcccctttaatacccctttaccccc

SEQ ID NO: 180700 - DNA, 242 bp, Arabidopsis thaliana columbia
cgtcaatgttcttgtgagatctaactttctctttgttttttcagaagcttagctttttttaggagggttttttttgcacattgagggggacataccctaattttatattttaagttctatcgatggcttcactactatctcgcatttcgttcattgctctccgagctctacatctcgctttttcagggcaaggtttacagatatctcatctttgttgtcttacagtctcctgctatatctta

SEQ ID NO: 180701 - DNA, 220 bp, Arabidopsis thaliana columbia
cccacgcgtacgcttatatttttatttttttttttagttttatttttaaataacaaatgcttcttatccgggtggtgtttttacataaatcgtgcgttacccaaaaaaaaatacatcatattcacaccttacacacaattatttaattcacaaaacaaaactaactaataacaaaaaccatattttaaattaaacttaatcaactttaactttttaactt

SEQ ID NO: 180702 - DNA, 433 bp, Arabidopsis thaliana columbia
cacgcgtccggaaacacatctgatggaatatcatctgtgattattttcacgaatgattttctaccatacgggggaggaactacttcttcctgtgggaaccaatccgggtggcgctacgtgccaaccatcacagaggaaatgaaactaacttcagatgtgatgggaagccgtctgggaaaaccgccatcttccatggaaagctcacctcctttcatatggtcaggtttaagttccacaaagatccaaatccagccattatccacaaccgaaataccgctgcagatatcatgtttctctccaggtatctacgatctgtcttcatatgaacttaactgggagctatctgagcatgaaagtgcaacatcatcagggacatgccaaggttatccttattaccttactgttcttcagtctgagtgagctattatagttc

SEQ ID NO: 180703 - DNA, 161 bp, Arabidopsis thaliana columbia
taccaattaaagccacaactaagaaatttttttatgcttaaaaccccccaccatctggcgggttatatactatcccctggggcactctaaaccattttatttaatctttttactatcttaaaaaaatcttttacctattcaataaatttcattcacctcca

SEQ ID NO: 180704 - DNA, 314 bp, Arabidopsis thaliana columbia
  unsure (1)..(314): unsure at all n locations
tcaggccccggcgacgtactgactganttaaagaatacctnnttttcttctctgtgntattnnaggtctcnntctcttcgtggcgttcgtctgggggtcccctcgcttaggaccccccannaaatnncgatccttggaagggagggcctngnncggcnntcagcntnncgggaagggtctttcgtcttacctgtcaacccgtctcccccatacaaaaggcgagatnaatttccaactggggttggtttcttgggattgttccttggtggggttggttaaagggaaccactattgcnnctcttcgtcttctcttt

SEQ ID NO: 180705 - DNA, 159 bp, Arabidopsis thaliana columbia
tcggaattacaaacaaaaatgcttactttttatttttactttcattgagctgatatttgggcgggccattttagactatcgagcaagatccatatatacctatttgcataccttcaaacaaactaatccatacaagattccctgaattaatcattaaat

SEQ ID NO: 180706 - DNA, 408 bp, Arabidopsis thaliana columbia
aagatgtcgaccggtttagctctgaatcgctgttcagtttcggtatgtagaacggccgttgctttacttaaccggccaactggctccgttgccaggagtttgaaattcagtcgccggctaatcggaaactgctcgatagcgccggcggatccttatgttgtggcggacgacgataagtacggtaacaaacaagttatcagtctcactcctcgcctttacgactatgtcctctccaacgtccgcgagcctaagattttgaggcaacttcgggaagagacttccaaaatgcgaggtagccaaatgcaggtgtcgcctgatcaagcgcagttgcttgcaatgcttgtacagatgcttgcagcagaaagatgtattgaatttggagtttacacggggtattctttaatggct

SEQ ID NO: 180707 - DNA, 412 bp, Arabidopsis thaliana columbia
acgcgtgccggcaacactcatctactggtgatatggcctcggatttatcatctcatcaccaaccaaactccttctctgggatcgcgggtttaaaactcaacatggggagcgccacataaccactttgtagacttcgccgtgtgcatctgggaggaatgagtctacttgctttgagaggaacttggttgaggagacgatttgaacgtggtaggatttgggctgatcggatggctagctccgtcgagcattccagcgataaatgggaagagcctgacgggtctcttcttcgatagcatcggaactgagctcgctcacttcccgactcctacagctctcactttacagttctgtctgattgtgtttacgtggcacttatgcttctttctctgtctcactttcttactatatttat

SEQ ID NO: 180708 - DNA, 91 bp, Arabidopsis thaliana columbia
cgggtccggcccacgcgtgccgtgttaaccggctcaaggtacgggtaggatcagtatccagtatcatccgtccatttcgtatcccataaaa

SEQ ID NO: 180709 - DNA, 52 bp, Arabidopsis thaliana columbia
ctaatggtttacacatatacatttattatttttattctctattatcctattt

SEQ ID NO: 180710 - DNA, 107 bp, Arabidopsis thaliana columbia
aaataaacgaaaaactttcggttcttttaaaaaaaaaattttccagggcttaaagttttcataaaccaatcttttattatgggggaaaactcactttcctaaacctt

SEQ ID NO: 180711 - DNA, 333 bp, Arabidopsis thaliana columbia
agacccctttaaccaaactcttaaaaaaaattgactcaactatctcctcaaaagatctcgggccaacatactacgtgctaggggatcttctcgttcgctaacctagaccacaaatcaaaacttttataaacttcacatgttcaaaccaggagccgcatcatcaaactttaccacttatatcaaacacatagcctatacagccctcattactaagatccgcatacttttctccactactaatatgaggcactcccatacaccatacttatatcgttatcacaccaaccactttcacttattattatacatcatgcacagaggcttacacttctc

SEQ ID NO: 180712 - DNA, 344 bp, Arabidopsis thaliana columbia
  unsure (1)..(344): unsure at all n locations
cggaannccggggcggccccagccgtccgggataattttgtcccgccggttcctaactttaaattttttactcctcctcctccacagtggggctaaaacaccaataccgaaccaggtttgaatccatttccgaatttggattttacctcaaatttttaccccattttttggcggagggggttttttttttcccccacaaaaaaaaggggggggggggtcctctgcccacaattaattgcttattattaactcccccccccaaccaaaagttttttttttttctcgaaaaaaaaaatgttgtttttaaattttttttttcttttagggtaaaaataaaaaggggg

SEQ ID NO: 180713 - DNA, 322 bp, Arabidopsis thaliana columbia
cggacggaacaacaacggaaaaatcgggaagggaaggggaaaaagaaagggagaggaaaaaggaccagagagagaagaggagccaagaaggggagaagaaggggcaaaaagggaaaagaagggaacaagaaaagggaaggagggggagagcaaagggaggaagaaaaggggacacgaggggggaaggcgggaagggaaaagaaaaaggggggaaaggggggaaaaggaggaaggccagaaaggaaaaaaggggagggaaaaaaaaccaggaagaaaagaaagggacaaaaaaaaaagaaaggaaagaagggggaaggggagg

SEQ ID NO: 180714 - DNA, 260 bp, Arabidopsis thaliana columbia
cgggccgacccagccgtccgttaaagcttggaatggcaatctactattttttttacatttttccaccggtaagggatgaaagggggtcttttcactcaaagggatccaccaaccataatgatgaataatcccccccccggggggtactttcaagataacgctcttcttcctattgggaacaaacattccggtaccaaacaccctaacggaaaggatggagctgttcaacaataacaccaaatggggaatctttaaggggt

SEQ ID NO: 180715 - DNA, 180 bp, Arabidopsis thaliana columbia
tttattaaacctaccaagggttttggttaagctaaaactggataaagaacataacttcagaccacagttttatccacgaaaaaggccgcctggcctgtggtgtgtaccaaagcctttagttttggggggccctccccccaaggcctgggccagtggtgggtccctgaaaatccggggggt

SEQ ID NO: 180716 - DNA, 328 bp, Arabidopsis thaliana columbia
cgaacaactttctgggcccatggcaggctcttttctgttttggctttggcaaaaccaacaggggggaatttctttttttggagcagcaacaccattggagccatccaaatttttttgattttggagctttgggctttttggtcctgaatttgggttcctctaaccctatttgggggattcttgggaccactaccaaaaccaatccatttcccatggggaaccaaccaaattccaggggaaaccccaaaacggaattacccgcaatggtttttagtcctggaagcaggaacccttccttttggaacgcttttaaaaaaactgtttttaa

SEQ ID NO: 180717 - DNA, 204 bp, Arabidopsis thaliana columbia
accttctttttttttttgatcccgaaaacccaaaaggggggaggtctcgtttttggggggagaaacaccaccaacccaacccaatcataaggagttagaaagctcggggctctatagtccgccatctgggaaagaaaaaccaaaatggcgggatagcataggtaccacgacaaaaaccaatcaatttccaaataggacccaccg

SEQ ID NO: 180718 - DNA, 414 bp, Arabidopsis thaliana columbia
  unsure (1)..(414): unsure at all n locations
acccggnccggaatcccggggcggcccacacccgtccgttccgatccagccaccggaggattctccgtgttttttttgcccccccactttcaagggcggtggctgggaacgctcaaactccatggttttccgggcattttcattgggggaaggaggtgaaccaggccccaggtccaaagcctgttgaagggaaagagggggccccagaggttcctccccaggctgaaggggttaaaacggaccaggctaaggaggaatttcttgtgggggaaccggtttttgtagttgaagagaagtttgaatttgttcctgaatcaacggaggtggcttctggggctcctgctgcaccggaggacattgctgaaaagactcctgttgctgttgaagaaattattgccaaaacccctggtgaag

SEQ ID NO: 180719 - DNA, 56 bp, Arabidopsis thaliana columbia
  unsure (1)..(56): unsure at all n locations
aaaaaaaaanaaaaataaatattaaaanaaaaaaaggagaaaaaaaaagaagggag

SEQ ID NO: 180720 - DNA, 305 bp, Arabidopsis thaliana columbia
gggatgttttaaaggaagaatggtaggatttcagcttcagtggtttaacctggaaagcgttcagttcttttgggggttggggctcttttgataaagttcattaaagggaaggaaggaccgccccaattaaaccttgaaggggaatggggggtgaaaatcttttttccttcttcagggaccaaagtccttatcacctttaaaggcggttcattggattgggtgactaaagtttcaaaaggattaccacccatttttctatgaggttttaaggattccaagttttaactcctaccactttgtttaac

SEQ ID NO: 180721 - DNA, 441 bp, Arabidopsis thaliana columbia
  unsure (1)..(441): unsure at all n locations
gaannncggggnggacccagccttccgaccaaattttttcacaccaccacaaccactttttttttttttccacacacaaccgaaccatgggcaatggccattctaacttgggcccaacttttctttccttaaaccaacctacttccgccgaaccattttaactaattggtttggttttttccacctcctcttcaaccaccgcggattttgccgtttaaaccacaaacgcctccgccccaattgcctaaaccggaacctttttcgactgtttggagacccatttggtaattaaaaacttaagccaggccgccggggagcacacggagatacctcattcagatttccggggaagccgccgggaaacgtggttccgtttttttttcctgggggaaaccaatttcccccgaggtattttaagtttttgacattttttggattaaa

SEQ ID NO: 180722 - DNA, 413 bp, Arabidopsis thaliana columbia
  unsure (1)..(413): unsure at all n locations
cccgaaaaaaacaaaacaaaaaaaagggcgggggcaaggctaaaagggccaccccgggaccaggagagggggcaaccggaccaaaaggcaagacaagangggggggccccccaaacaaagggggaaaggaaaggccaaaaggaaacgggaccaccaaccgggaaaaaaggaggaaggcaggagncacaacgggccagggaccaaggaaagggaaaccaaaaagggccccaaaaaaaccggcaaagcgaaaaggaatcaaaataaaaaaccgaacaggaacggccgggagaaaaaaaaagcaggggaaaaagcctcggaggcggcagggaggggaaacaaagcccaaaaggaggggccaaaaaacaaaagaagcgagaaaagggcagggggcagcaaaacggcccgggggaaaa

SEQ ID NO: 180723 - DNA, 427 bp, Arabidopsis thaliana columbia
  unsure (1)..(427): unsure at all n locations
cggggccgccccacccgncgcggaaaagggaccaacccccggaggnncccaccaaagggcagccgagggggaaaacgnnaccgannccgggggagggagggcaccggcccgcccaaaaacacaagacccnaacaacaccgnggaaaaaaaggggnacaanggacggaccccaggaanaccccnaaccgaaggagggggagcagggcccgaaggggggcagggaaaggaaggggcggggaaggggacaaacggaggggaagaaaagaagggcaaaaacaccaacccggacaaagaaagggggccccaaggggaaacaaccgggggggggccccccaaaagaagagaaacccccggggcggcaaagggaaaaaccaaggggaaagggggaggggaaaaaaaaaaggaccccgaaacaaacgggggacca

SEQ ID NO: 180724 - DNA, 340 bp, Arabidopsis thaliana columbia
  unsure (1)..(340): unsure at all n locations
ccaacccgcgagggcaccaacaaccgnggnaaaggcaggccagaccnccgccggcgggggaaacccaaccgnggggggggaaacccacccgccaaagggaanaaagggaccagcagcgggcccagggggggcncccacgggaaccaaggaggcccnggagcggagggagggaggaccggccacccngggaaggggggaaccaaaggcggngggcaaggggaacaacacaaccggcccagcacnaangggaagggacccaaccaagcagacggcaanggccaacncaagggcccaggaacnggccggaccccaaaacggggggggggggggcaggcaaaag

SEQ ID NO: 180725 - DNA, 390 bp, Arabidopsis thaliana columbia
  unsure (1)..(390): unsure at all n locations
gggnggaccaaggcgacggaggagagagacgaagcaagaaaaaccagactgggttaacggaaggaaaaaaaaaaaaaggggggggggggccaaaaaggaggggggagaagaaaaagaaccacgaaacaacaaggaagaaaggggggaagaaccgaaaggagacgnggaagggaacagaaacaacggggaaaaaaaccaaccgggggggggaaaaaagggaaagaggaaaaagggggggaaccggggacaggaaaaaaaaggggaaacaaaggaaaagggaacaagaaagggcaaaaaaagccaggaaaaaccaggcaaccagcaagggaagggaaggaaaaagagggggaaacaaaacaaggagggagggaaagaaaaaaaaggccaaaa

SEQ ID NO: 180726 - DNA, 452 bp, Arabidopsis thaliana columbia
  unsure (1)..(452): unsure at all n locations
gggantnccggggtggcccaaggcgtcggaccacttttaaaaaactttccggatcaatctttttggcttcctttaactggacctaatccgcatgggattaaaggccaccccaaaccggttccgaggtcgtggaactaacagggttggggaaaccccagaggaggtttaaggatttaatggttccatttccaaggggcaagggttggggaccagttgggattttaacccattccgggggccactgggggcaggatggtttcttggagggtttttttaacgttaaggaccttttcgaggcacgaccaactgatttcttggtttgtggttccccaaaaaccggtccaactgggttaaaggcattaacttacgcaatggtaaatggttttggttccgacgaccgccgaaaccaattcttaaaacgaaaccttaacgggttggtcctttacgttggg

SEQ ID NO: 180727 - DNA, 319 bp, Arabidopsis thaliana columbia
  unsure (1)..(319): unsure at all n locations
gggncgggaannccggggcggaccacagcgnccgaccaaaggnaaaccgaaacccgaaccaaacaaggggggngggaaaaaacccaagggcgaagaggaacaaaaggaaagnggggggggcaacaaaggcaaaaaacgggggggggncccccggaaacgaggccaagccaaaggcgaaccccccggcggaaaagccggcaaggngnaacccggcggaagacgcaaaaaagccgaaggaaaaaaaacccaggccaaagccaaccaagcaaaaagccagcacaacccaaggaacggggagagaaaaaccggcgggagaacc

SEQ ID NO: 180728 - DNA, 395 bp, Arabidopsis thaliana columbia
  unsure (1)..(395): unsure at all n locations
ccggggcgcggccagggggccggaaggacggagggaacggcacggaaaagggaaaaaaaaggccacggggaagaacccggggaacgaaggaaggaagggggcgggacgggggcgggacaanaaagggcgacaaaggggggcgcgggaaggggggaggaaggaggggcaaaggacaaggaaaggnggggagangggggaaaagggggggggggaggaaaacggccaaacgaaacggaaccagggcgcgaaggcaccaaagacggagcaacaaagaaggggggacaaacagggggaaaagaaggccggcccaggggggggggggggggcaacaaaaccaaaccccaggggaacgcgaaaggaggaaccgacggggcgaggggaacggaaaaaggggc

SEQ ID NO: 180729 - DNA, 232 bp, Arabidopsis thaliana columbia
  unsure (1)..(232): unsure at all n locations
gcgggaacccgggcgccccgccgccccaccanacggggcccccaccncagggcctggcccgggaccccccgggcccccaggggagggggcaccggtaacccaattgggggccggacaaccacggaaacatctaaccggcgggaaacacccaagggccggcccggcggaagagtccaagggggcgggcgggcccgagggccacaacaaagggaagcgccggggaggagaaaaa

SEQ ID NO: 180730 - DNA, 364 bp, Arabidopsis thaliana columbia
aaaagaataaaataaaaaagtaaaaaaaaagtataaaaaaaaaaaaaaaaaaaaaaaaaaaaaaaaagaaaaaaaaaaaaaaaaaaagaaaaaagaaaggagaaaaaaaaaaaaaaaaaaaaaaaaaaaaaaaaaaaaaaaaaaaaaaaaaaaaaaaaaaaaaaaaaaaaaaaaaaagaaaaaagagaaaaaaaagaaaaaaaataaaagaaagaaaaaaaaaaaagaaaaaaaaaaaaaaaaaaaaacaaaaaaaaaagaaaaaaaaaaagaaaaggaaaaaaaaaaaaaaagaaaaaaaataaaaaaaaaaaaaagaaaaaatagagaaaaaaaaaaaaaaggaaaaaagaagaaaaaaaaa

SEQ ID NO: 180731 - DNA, 287 bp, Arabidopsis thaliana columbia
ggaccagattttttgaaacggggctggaccaataaattccttaaggaccaagggcggaggagcttcgaggtcggaaaccaaaaggcaactcgattttgtgtaaacaccgggggttccctgggaggttccgccacaaggaatctcggtcttaatggtaacgggaaccttggtctaaaacaaaaccaacattcctcctcaataaaatcaacggtggaattttcccttctggaactttctcggcggcaacaacaatgggaaatcttatctcggacaatcctcccatacgt

SEQ ID NO: 180732 - DNA, 382 bp, Arabidopsis thaliana columbia
aaaaaaaaaagacaaaaaaaaaaccgaaaataaaaaagaaaaaggcgaaaaaaaaaagagagaaagagaaaagaaaaaaaaagaaagaaaaaaaaaaaaaaaaaaaaaaaaaaaagaaaagaaaagaaaaaaaaaaaaaaaaaaacaaaagaaaaaaaaaagaaaaaaaaaaagaaaaaaaaaaaaaaaagaaaaaaaaaaaaaagaaaaagaagaaaaaaaaaaaaagaacaaaaaaacaagaggaaaaaaaagaagaaaaaaaaaaaagaaacggacaaaaaaaagagaaagaaaaaaaaaagaaaacaaaaaaaaaaaagaaaacaaaaaaaaaaaagaaaacagaaaaaagaaaaaaaagaaaaaaaacaaaaaaaag

SEQ ID NO: 180733 - DNA, 434 bp, Arabidopsis thaliana columbia
  unsure (1)..(434): unsure at all n locations
cggggcggacccaggcgncggccaccccaaaggaggagccccgggcaaccttttcacccaacccccgggagggggccggccgaggcggaaagggagcgggaggcccccgcccacccaaaaaccgaaaaaggaaacgcccggccacaacaaccaggggcaaggaggcgggaaaaccggaacccaaaggaggcggggaacaagaccagaaacgccgggcggaggctggcggggaacccacggcggaaccaagcccccttggggacgccagggagggggccggggggggaaaaaccaacaagggccgcacaaaacaggaccaaggcggcgagggacgggacccccggaccccccgaccggaaaaaccgaggggggaccaggatgggccaccagaccaaggccccgtaggagggggcggggccggcggccggggaagg

SEQ ID NO: 180734 - DNA, 448 bp, Arabidopsis thaliana columbia
  unsure (1)..(448): unsure at all n locations
cgggaccggaaggccggggccgacccacccgnccgagaaaagggcgacgggaccagggaaaggcccaaagcccgtggccgccgacccccgccaccacaggcagggccgcctggcgccgaccaccgcaaaggagcccccaaagggccaaaaagaggccacggcccgggccaaaaggacaggcccccccggcggacccgaccgtaaaaaaaggaagaccaggaggggcccccgaaaacgaaggaccacaaaacctgccaagggaccaagcaacacccgggccccacccaaaaccaccgggcgaccggaccggggaaggaacccacacaagacgaaccggggagcggcggaataagcccgccggagggaaaaggaaggggacccacccccaaaggccaggaccaagaggagggcaaccccggagcccccaaagggggggaggcccaaagcc

SEQ ID NO: 180735 - DNA, 448 bp, Arabidopsis thaliana columbia
gggccgggaaacccggggcggcccacggcgccggcggaaaggcccggacaacggtcaacgggacaatcggcccaaccgcgggggtgggccggggcccaacaatcccggccgccgcaaacgggcaaaacccaataaaatcccggaagggagtggattggggggcgagatcctccggggggaacacggggccggcccagaattccgaaatggaccccccaaccgaggggaataggggaggaccgaccaccagatggtggaaaaggagcaggcaaggggggttttgggaactggacctggtttgggggaatggggtgggggagaaggtaaatcccagggacgaaaagggggtaaaaccccaaatcaagggcccaaaaagggaaaacccggacctcgggaaagggcaaacggaacaggaacagcctccggaggcagggggtcaaaacccggg

SEQ ID NO: 180736 - DNA, 305 bp, Arabidopsis thaliana columbia
gaaacggggcggaccagcgaccgccgggaaccgaaccaccccaggccaaggaaaggaaggaaggaaaacgggggggggcggagaggaaggaggaccaggaaaacgggggaagaagagacgggacaggggaaaagcgcgagggaaaaaaaagggaacccaaaaaccaaagcgggaaggaaggaggacggaaacccaacgggggaaaacggggggagaaaaggagaaaaggacaaccgaagggaaaggacccgaagggaggacaagaggcggggaagaaaaagaaggggaggggaaaaaggccacgc

SEQ ID NO: 180737 - DNA, 169 bp, Arabidopsis thaliana columbia
aaaaaaaagaaaaaaaaaaaaaaaaaaaaagaaaaaaggaaaaaagagaaagaagccgaaaaaaggaaggagaaaaaacagaaaacaaagaaagacaaaaagagaaacaaaaacaaaaaagaaaaaaaaaaaaaagaaaagaaaaaaaagaaaaaaagagagatagaac

SEQ ID NO: 180738 - DNA, 399 bp, Arabidopsis thaliana columbia
aggggacggaaaacaagggaaaaggcgggcgggggaaaaaggcaataaatccggaaaggcacacaggggggaggaatggaaaaaagggaggcggggaaacggaggagaagggaacggccctgggggtaaacggggaacacaaaactaaaggagattaaaaaggagaaaacggaaaaaaaactggacaagtaaacaaaggaaggaggataaaagggaaggagagggggaaggaaaaaaacccggaaacgttaatggaaaacaaagaggaagcggcacgaagaaaagagggcggggaggagggggcaaaggagggagcggaagggggggctaaaaagggggaaacggaaaaaaggaggggaactaaaagacaggcaaggggggaaaaaaaaaaggggaacc

SEQ ID NO: 180739 - DNA, 151 bp, Arabidopsis thaliana columbia
ccccgggcggccccacgctaccggtttttcggggaaaaaaacaaatttttttttttttcatttttaaccgccattaaagcaccggtggatttgtctcaagaggatgcaccctataaagcttaaatttcggccgattttttttcaaccgtcc

SEQ ID NO: 180740 - DNA, 253 bp, Arabidopsis thaliana columbia
gttatttctttttacccatggctgatgggcacattacgcataaactagggtccccacaaatttacacgatcttattcttctcttttcgctatattttccccgcacaatcttgggtggatattctcttataaccaatgccactgactccagatcttattatctttaataatgggtgagtctagttgtgtggaaaaccagaagcttgtcagactatggtagtatgtgtttttacttggggaggacgagggttggt

SEQ ID NO: 180741 - DNA, 359 bp, Arabidopsis thaliana columbia
  unsure (1)..(359): unsure at all n locations
ggaataangggcccgacccactcgttcgtagtctcgtgggctcttacacactttttttttttaccttctttaacttcattatgggggggcttctaatccaatccaccgtttcactcccttagaactttatcactctacagatgttattctgccgtcgttgttatctcaacagttccttcctatgttctatttcttcattcttcgtgatgcatcacatcgctaaatttttaaaatcccatgatctctgtcgagctttctctggtttcacttccactcgtttcttgtcacggagcaatcctccctcttcaaatcttctttttccgttgccgtgtcgtggggcacactcatcctcctatttt

SEQ ID NO: 180742 - DNA, 70 bp, Arabidopsis thaliana columbia
gtaatagagagtcatcggcatccctatctttcttctaatccgagcgattcgtctcaaaaaacgggccaag

SEQ ID NO: 180743 - DNA, 80 bp, Arabidopsis thaliana columbia
atattgtgggggcaagcttacaaacgcgtgcgtgctaaaataataaattttatataaaagaaacctaaattaaattcaca

SEQ ID NO: 180744 - DNA, 289 bp, Arabidopsis thaliana columbia
ggaaacaatattttaatctatcagtaacatgatcggcaacttatgaacctaaggccggcttgttgggtcccggcgcctaacagtggagtcctgcaaatggggggagagagggtttcgaccgtgtctatgctcaatcttaatctaacaaaaggtcgtgtcaaacgtttgtgtcagggaagctcccaaagacctttagctcgctaagccaggggggaggcacctggggactcggagacatgtgctcacgagaccatggggcggagagccgagtgaaagcggacttggggag

SEQ ID NO: 180745 - DNA, 255 bp, Arabidopsis thaliana columbia
cgacccactcagaagactgacgagagaagattgactttggagaaaaggagtcagggatatatgattgataaaaggatagatcgattgtgatgaaggtctgtgttggacaggatccagatacactttcgttttttgtcctggtttctccgcatgcaaatgtcggagtatcttacgacactccccgtaaagttatggtgtctggttgactccaaggtccttgactgttacgcttgtcatgggctttcatgtataagt

SEQ ID NO: 180746 - DNA, 405 bp, Arabidopsis thaliana columbia
  unsure (1)..(405): unsure at all n locations
gacccacgcttctcttatgaattcaagaggtttttaactatttcttcaatgcgcccgttnaaagattccatggttattataaaagtatccaaataaccaacaatctttacacattctccttttataatattctatcgtatgtccaacaatattacctcatcttataatggatatatgtttttgttcaagcttttttcattttttccactatctcattttctagctcatatataattttattactccattctatactgtttttcacttttacactccacatgatttataatattaatatggcttctttttaagcaaatatattattatttatttcctctgtgattccttttttttgtttttcaagaatactcgtgttaatatttaaacacttttatcactcccaat

SEQ ID NO: 180747 - DNA, 355 bp, Arabidopsis thaliana columbia
ttattaaaataaatttataagttttataggcttactttttagcattaagaaatttaaataacttcaaaacacacactactatagatcaatggaaacaatcttaatgaatccaagtacagctcataaattgaaaaagtacacctaggaccctaaaagcacacacttttattcacatcacacaaaattatatagatttcatgaaccagaagaaataaaaaacaattgttgacactataaaaaaagctttcagatacacagtttttcttgaatagaaaggaataatcctatttatctagttctaaatcacccactgcccttttataaaattcaagcttacttactctttcatatccac

SEQ ID NO: 180748 - DNA, 412 bp, Arabidopsis thaliana columbia
ggctgcttctcaggttcaggcagcatttcgtgggacaggtggaaacaaaacatctgtctcggagggtgtcgaggcatctgttatatatgttcgcttcaaggctgctgcaaatgagcttaaacctgtattggaggagattgagagtaggtcagcaagaaaggaatatgtccaaatccttgcagaatgccacagactatactgtgaacaacggctctcgcttgtcaaaggcatagtgcaccaacgagtatctgatttcgccaagaaagaggcactgccatctttaactagatcgggttgtgcatatctgatgcaggtttgtcatatggagcatcaactgtttactcatttctttccagcatcgtcagaagaagtttcgagtctggcacctttagtggatcctttgtctacgtac

SEQ ID NO: 180749 - DNA, 264 bp, Arabidopsis thaliana columbia
gaatctcgacccacgctcgtgcacgctctatgacttgcaaaggcctggcggctttggactaatgctaaatgccaagacgacgacgatacggtcctgcatacaattttatttacaaacgtgaagctaccgaagcaaaggtaaggggagacggattgcctgccgtggtgaccagactgtgattaagagtgcgtctgccggcctgcttattggaggtcaaccactcttgggaatacatcatgagcattgtgacataatgctaattac

SEQ ID NO: 180750 - DNA, 455 bp, Arabidopsis thaliana columbia
cggacgcgtgggttcgaattctcatctctaaccatgagcgcaatctatctcctccgcaaaggttccacgaaaactccttcacgatttcacagaagcctcttcttctccactttctccaaggattcaccaccagatttatctcgaaccacctcaattcgccatttatcatcaagccagagattcgtctcttcgtccatttactgtttcccccaatcaaagattttaccaaatcgattttccgagaagacgacgggaatctccgtaagacaattctcaacatccgttgaaactaatctcagtgacaagagtttcgagagaattcatgttcaaagtgatgcaattttagaaaggatacacaaaaacgaagaagaagtagaaacagtttctattggtagtgagaaagttgtgagagaagagagtgaagctgagaaagaagcgtggaggattttggaaaa

SEQ ID NO: 180751 - DNA, 334 bp, Arabidopsis thaliana columbia
aaaataaaaaaaaaataaaaataaatttatttataaaaaaaaaaaaaaatgtgtgaaataaaaaaaaggggaataaataaaaaaaaaaaaataaaataagaataaaataaaaaataaaaaataaaaaaaaaaaaaataaaaaaaaaaaaaaaatataataataaaaaaaaaaaaaatataaaaaaaaaaaaaaaaaaataaaaaaaaaaataaaatataataaaaaaaataataaaataaaaaaagaaaaataattaaaaaataaaaaaaaaaataataaaaataaagaaaattaataaatattaatataaataaattaattaaattataatat

SEQ ID NO: 180752 - DNA, 399 bp, Arabidopsis thaliana columbia
gggcggcccacgcaaacggaatgagcattctaaacactctatgctttttttatgctacttggaccctctcaaatttcgtcggtttctattcacactgtggcttttaccaataccatactgcactctcagaccttgaacacctgatacattctacttatgaataaattttaactataatcattttattctctctcttacctctaccaaggcacaaattacaaaattcaatttctcatttaatcatacttttattcctacactctactatcttcttcagcatcaataaccatctgtgcttattactatcctttaatttattggttacattatcacttatgattatctttatcacacattttgttattattcatgtcgcccttcttatcctatttattcttt

SEQ ID NO: 180753 - DNA, 456 bp, Arabidopsis thaliana columbia
cggaaagaaacagtagaatcgccatggcagttatatgtagaagaaaacaaaaaagaagaagaggagggagaagcatcaatcttccgacatctctttcaagccttcttcagacgtaaaaggactcaaattcggcggccaaataatcgtcaaatcattcacaatccgacgagcaagaacattcgagcttcttaaactcctctctctcccttcttcatcatcaccgccgcttctttccacggcggcttaccttccgacaaacttcacaatccttgcacaccacgcatggtacacactaacactaggtcttggaacaagaaagtccaaagttgtggtcttcgtgttcgaaacagaggcgatgaaattatccgttgtggcggcggaaggaggaatctggccatcggagattccattgggagatgtgaacaagaagatgatcagaaagttaaagaactggga

SEQ ID NO: 180754 - DNA, 231 bp, Arabidopsis thaliana columbia
atttttatttttcctatttgggggggttttaggggagaaagtggggctttgcttaatgacaaatcatacaaagtctcgcaaatttacatttaaaagttttaaaccatcacatacaacctattttttttccttatgatttctactcgaattcaaaacactgaatgaaaatctatatacaaacttgttaaacttggtttacttttcgggaacaataatggttgcaaaggccca

SEQ ID NO: 180755 - DNA, 437 bp, Arabidopsis thaliana columbia
  unsure (1)..(437): unsure at all n locations
ggccattcgaacgctatgtgcttttctaagagcgttgagatattgaaaccagtgggtggtaaggaaaagagaacaggtgatttanttagtaacgctcagccctcagatagagaggagaaaagtagcatttcctcaagatttcaaattgggcaacttgggaagtatgtgcagttggctgaagctcaagagaaggcttgcttaagcgttttacaatgtagatactgagaaaatttgtgagccgccagaggaagaattgccacctcgaaggccacatgggtttgatctaaatgtagtttcagtgccagacttgaatgaggagttcactccacctgattcttctggaggtgaagacaatggagtgccgcttaattcgcttgctgaggctgatggtggtgatcatgatgataactgtgatgatgctgtgtctaacggtagac

SEQ ID NO: 180756 - DNA, 317 bp, Arabidopsis thaliana columbia
gaaatggtttcggactcggacctcttgttcttatctccgggaaattctccttagctgcggcctattttcttcgactgcggggagcgttcgccgtcagctggaggtgtatttcggcgtcgtattaaccgatatgaaagctttcgttagggaacaaatcgtttcttttcttgaaagcgatgctttgttagtagcaaacccgtcaagaataataagactgtaatggcgatcaaaacgatgaatagggaagtgataacgatgatgtttagaccgaactaccggttaaggctaagaaacgtggaggtgggtttaacattaat

SEQ ID NO: 180757 - DNA, 415 bp, Arabidopsis thaliana columbia
caacttccctattttctgcttctttttgttcaactcctacacactccaatcacacaattcacaacccattgagaaaccaataaaataacctcaatcaaaaaaaaaaaaaaaaaaaaaaaaggatgaaaatctcaatttagtaaaggagaaaaaagccatttcgaataacttgaaaaggttttggttttgcagagaaaatgaaggaaaggcggagagtggtggaggagtaggatacgtgagagcagatcagatagatttaaagagtctggacgagcaattgcagagacacttaattaaagcatggacgatggtgaagaggaagagtttgagtgatggtgaagataactgcaataacacccgtcataaccagaacaactttggacatcgacagcttgtgtttcagaggccgtttttt

SEQ ID NO: 180758 - DNA, 253 bp, Arabidopsis thaliana columbia
  unsure (1)..(253): unsure at all n locations
ggcaganntctcccctttacaagaaataatttttttttggcttcgatcgaatttgccgcaggtgggttcattttcttccgagaacagtcatcttcttcctcataagtctctcccagtgttgaagcagtgagctaagctaaagaacaaggaacaaaaccaaattatgtgtttgcgagatcagtctcatagctcatgagatgtagagtgtttaatcttgatattgagatgctatactgtagtcagcttgaggagt

SEQ ID NO: 180759 - DNA, 304 bp, Arabidopsis thaliana columbia
  unsure (1)..(304): unsure at all n locations
cgacccacgcgtcctcttttagtctgatctattacaagattttttttttacattaacaacccataattgcgggggatgttttcaaaacagaggataggacctacaatttataccttcataactcgctttaccactaagctttttatctatgtcaccaatgcttaggaactcttaagcttaacaattacaatcttctttaaatatncactactgttacctcatctttatctaaacttttatatatctcttatcctttaaaaatgcttattatggtctcctaatatagagtaacttgttatgcctt

SEQ ID NO: 180760 - DNA, 192 bp, Arabidopsis thaliana columbia
gttctatgatcagctatcttatctctcgcgatttatttctagtgctaatcttctaaaatgaggtgcgtacatatatgtatctgagctacttattaagaaacagtcctattttattagatctcttcatatatttaatttctagtaattcatacttctaccttctattgttctttttattaattctactttccc

SEQ ID NO: 180761 - DNA, 298 bp, Arabidopsis thaliana columbia
ctccgagatcgtaaaatatggagatatttttctacagctgatacttaatttaccgaggacttcttccaacactcgggctttccaaatatccaaacacatctttagtctctttcctctttcgtaactcctcatcttacccatcaaaactcgctatctccgattcctataccgacaattccttaaccttcttcaattcaaaccgccgtctcttgactcgctcactgattccaccgtttaggtattcgttaaaactacttcatgttgattttcgctccttacttttaccattttcctctct

SEQ ID NO: 180762 - DNA, 427 bp, Arabidopsis thaliana columbia
gcgtccgcaaagttgccgcttcgattccaaggagtttcctatctgagaaaatgggattctggggaggggaagtgaaacctgggaagcctggagcttattatccaaaaaatgaacaaggaaagattcacgtgacccaagcaactctaggtacgggtttgagcaaagaaaagagagtgattcagtgttcaataagagacaaggtcctattgcttgtgttcattgttgccaaacaaaatcgaatgttgccctctgaatcttgagtttgacgatgatgatgagccagtggaattcaccgtgactggtgacagaagtatccacttgtctggattcttggagtattatcaagacgattaagatgattattagcatgatgaagatgattcaaatggtattgatggtggtgagtctgaggaagacgattcgagtg

SEQ ID NO: 180763 - DNA, 202 bp, Arabidopsis thaliana columbia
gtctccagttaattctaatgaggaaaaagattttcaggctcaacctgcgccatctgtaggatccggagatacaatatgggttgaggggcttgttcctggcattgacttttgcaaccatgatttgaagcctgtggcgacttgggaaggtgatgggatccgatcaatttctaagggtcctttctccatgtaccttttttttgtt

SEQ ID NO: 180764 - DNA, 67 bp, Arabidopsis thaliana columbia
  unsure (1)..(67): unsure at all n locations
ccgattctcaatagtgccctctctttttaaaaccatattctgnnctctcttccaacttacctctctc

SEQ ID NO: 180765 - DNA, 267 bp, Arabidopsis thaliana columbia
tcgttatttgtcggtctagaatttgatccggggaacaaggtcagtttagtttatatatacccttttttctcaagtttaaaaactacattgaaccataccaccagtatgaacgaacatgacccaatgatcaagtcaggaaggaacgaaccaactcactcgcaggtcttttcgtacagattgatacataaaaacaattccattaaagtttctgtcttgggaacatgattttatactctacttgggttggtttaaaatctttcctttttt

SEQ ID NO: 180766 - DNA, 314 bp, Arabidopsis thaliana columbia
gtccgaattgctacaaactctaattaattttttctttcttttcataaaaaaaacccaaccataaaccgtggaactctgtcctttttttgcctccttgtaactttccttgttaaaaatcaatggcgtcatctagcatcacataccggagctcaagctcttccgacggtggtattaataacccgtcggactccgtcttcaccttctactaacgaaaacttaaataaatgttattcgaaccaatgattttttacctttagtctattgattccttatactgtatacacttttctttcattctttactatttctatatt

SEQ ID NO: 180767 - DNA, 243 bp, Arabidopsis thaliana columbia
agcttttgacccttctattttaacgggcttagaatcatctttcttctcttcttcgtcctccatcagattctttctttcctattacctttgccttcttcttcttcctttcctctttctctatcttcctctcaattcttttactggttattttctttgtaatcaacaacaagtttacctcttcttcttcttttcttatcaaaaaccgtagtttctcaaatctttgttttgatacttaacaaagag

SEQ ID NO: 180768 - DNA, 239 bp, Arabidopsis thaliana columbia
ctctccctctctcaaattctctaaaattttctttgagcagatgaaaagaatctccatcttgttctctatctcttggctatctctctctctaaactattcactcacacagtcattcttcgtcttcttctgtttcatgcaagattcaaaggcctcacctgcatgtactcaatcatcatctatagaaaagagatgtgtgagtgtgacataaaaaaggttatggcaaacataaaaccttgttc

SEQ ID NO: 180769 - DNA, 319 bp, Arabidopsis thaliana columbia
cccgagagccgactcgcaagaaaagacttggggattgacctaggtgggattggaatcgttttgggcgttggattggggattggccttggcggcggttcggcctccggtgctgcagcaggttctgcatcaggttcaggttccaaatcatcatctagctccagctcattatcaagttcgagttctagtggttcgggtggttcatctggttcatctgccggttcatttgcttgctctagagctggatcaggatctggtaactaaattataaaaattacttttcgacttaaagtgtgaaacaaatagtatgttttatgttttt

SEQ ID NO: 180770 - DNA, 203 bp, Arabidopsis thaliana columbia
tataatctcaaacctcaaatctttttttcttatcacaaaatcttcctatatctgtgggatttttacaaccgacatctccacctccatcctcctcttctccaccacctccacaaaagcctcaaccacaaacattcaccccccattcaacaaaatcaacgccttccaagattttttcaccttacacctaacactaacccttcatc

SEQ ID NO: 180771 - DNA, 348 bp, Arabidopsis thaliana columbia
cttcttcttcttcttcttcttcttctttggtttttgtgagctaataaacagagaggaatggccataaaaaaacctactttgtctttcaacaccgaaattaaaggaaatctctttttctctattgagcttttttcttcagcggtgaaatctcccttccttgtctctcaatagtgatttttacatacagctccgctctcaagtttcttcctcttttgattctgtttccgctctttttgggtttacttcggatttttaatcttaaaattgaccaaaccctaatttgatttcagttttagaaacggcgagggggtatttattttgttttccccaccactcttttttcttctt

SEQ ID NO: 180772 - DNA, 204 bp, Arabidopsis thaliana columbia
cgtacatttcattttattctcaaacttcaaatctcttttccttatcacaattcctccctctatctggacctttttcacaacccccatcttcctcttattcctacaattctacaccatctccacatttttttcttttccaaacattcacctaccattcatcaaaaactacaccttctcatattctttcaccgtctccttaaactt

SEQ ID NO: 180773 - DNA, 195 bp, Arabidopsis thaliana columbia
ctaattcatacttttaaactgcgagtggctcattaaaaaaacggacaactcaacatttttactactaatcagacaacctcaattattttatatcttcttctttctacacacccaagctaatgtcacaaaccctattattatacacaagctataagcttcctaactcttttttttaaccacatcaccgttttcacc

SEQ ID NO: 180774 - DNA, 179 bp, Arabidopsis thaliana columbia
  unsure (1)..(179): unsure at all n locations
attagattcaagttcaccaaaaaaatatatttttattttttangcaaaccccttttaatatggagagaatttacaattattctaaattacaaataacctttttaaaaccttttttttattgatattaaaaatagatatttgatataaaaataaagaatctattctctttttttttatta

SEQ ID NO: 180775 - DNA, 125 bp, Arabidopsis thaliana columbia
gaccacgcgtcgccaagatccaaacaaagagggttccttcaccagcaagctgactcccgggaggcgtgaggatgcaactttctactcaaatccaaggagccacccttatctgtctagctccgggg

SEQ ID NO: 180776 - DNA, 376 bp, Arabidopsis thaliana columbia
cctctctctttaccgcatttattactttttctgagaacaacaacatctgggcttttggaacttatacaactaactttcactcctatgtttcttattaatcaatgcactatctatattacaacattgccgacttctctgataacattaccaactcctattactacttttattcttactctcatttttttatttcattaataaattttaaatgatgtattgttaacaaattctttttaatgtctttctttacataaaacaattttttttatcatatacataatctctatttttattatgtatctggatcggggatctttttttttcttctattccttaactataatcatcttacttattaccctattttattattttt

SEQ ID NO: 180777 - DNA, 327 bp, Arabidopsis thaliana columbia
  unsure (1)..(327): unsure at all n locations
aatggggggtggccgacgcgtccgataaaccatcatctctacttncttttttcttctactacatcaaacacttccgagtgcacggcttaatttatacggatactaattcaaatctnnttctctttctctaccattctacaccttttcaatctcttaactttccacttgattctcctattactactttacatctcttatcaatttcattcatctacatcaatctaatttatacacacttccaaaaacctttctaaacccttataaattactctatgttaatctataagacacttttagatctagccacaactctcattttttcagggg

SEQ ID NO: 180778 - DNA, 429 bp, Arabidopsis thaliana columbia
  unsure (1)..(429): unsure at all n locations
gcgtccgnatctgccaatttcaccgtgatagttttgatccttctcaggaacttccttcnagggggaagtgttttcctataggcaattatttcctctatgccaaagtggttcaagatcatctcttctcaatggtctaaaggcaagatgtataccttttaatccccaataaccatcatcttcctaaaatcttaatagttttttccgatttacttacatgtaaagatttgtttacacaatacacatcatgtcttatgataaatatattaaggcatcttcaacagacactgccaccatctactttggcctgagacaggtggaacgctgtaaccctaacagcatctctctctccaatccatgctttccttctaaattcaatccaatccaatctttctgtttatttttacagttttttaagctctgttttcacca

SEQ ID NO: 180779 - DNA, 284 bp, Arabidopsis thaliana columbia
ggagctgacaggcttcttcttttgcagtcttcgttttgttacggctttcaccaagcgctctctcgacgaatgctcttcgcgtaaaacggggagctgcgctggaactgtactggtcggaaatctgaccggaaaactacgctaaaccgtactagaggaatctggctaagagagtcagcgaatttacagtcaaaggacagaaagatgatgggatgggagggcaaaccagggtggggcggagagaatcgcctatacagcaaaactataaccggctgacttcatgtctt

SEQ ID NO: 180780 - DNA, 395 bp, Arabidopsis thaliana columbia
  unsure (1)..(395): unsure at all n locations
aaaattttattattttaaaaaaaaaaaatataaaagantagttaaaaaaaaaaaataaaatataaatattttttaaaaaaaaataaaataaaaataaaaaatataatttaaaaaaaaaaagaaataaaaaataaaaaaaaaaaaataataataaaaaaaaaaaaatttataataataaataaaataaaaataattataaaaaaaaataaaaaaaatataagtataataaaaaaaaataataattaaatttaaaagaaattaaaaagagagagggagggggaaaaaaaataaaaaaaatattaattaatataattataataaaaaataaaaattttaatataatttaaataaataaataaaaaaaataaatataatatataataaaaatatttaat

SEQ ID NO: 180781 - DNA, 423 bp, Arabidopsis thaliana columbia
ttaataattttaaattttaatatataatatataaaaaaaaaaaataatataaaattaaaaataaaaaattataaaaaaaaaaaaaatataaataaagaaaatataataaaatataaaaaaataaaaaaaaaataaaaaaaataaaaattaaaaaaaaataaaataatataatataaataatataaaataaaaattaataaataaaaaaaaataaataaataattaaatgataaaaaaatatataatatattaaattataattatattaaaatagagaaagaaaaaaaaaatttaaaaaaataatataaaaaaaataataaaaaattaaattattaaataaatattaaataaaaaaataaaaataaatataattataaaataaaaaataaaaaaataaaaaattatataaaaattaaaaataaa

SEQ ID NO: 180782 - DNA, 447 bp, Arabidopsis thaliana columbia
cgtgcggactaagatcaccactttgatccagttgaatctgaatttgagatttcttacggcaattcggtgggggattcaaaatggcaagtgagggagcaaaggatccatggaaaggagaagagtggggaactgagaatgagaagacgaagaagccaacaacaagtggtgtgaaaacggtgacgagagcgaggaaacaaataccgaggggacttgaagacaagtacgaagcttacttcctcccgcgaaagccatggccaagggctcttgcctactatggaagtttcatccttggtgggatcggtgctggtatggttattgaagcttggatcaacaaaaaagtcaaagaagatggaggagtcatttgggaattcgacaagtgatgatagataagtatgtaaggaacatctagagagagtgtctcccttaacacaaatccgtagattggat

SEQ ID NO: 180783 - DNA, 203 bp, Arabidopsis thaliana columbia
ctaccatacatatcctctcttcatcttacatccatatactattcacaatacaaataatacaaaatctaattctataacattctttatcttttatacatttcatttattaataaaaaacctatcttttaaccacttttttacacaatcttccaaaaccaaatcttcacctattataatcttctaaatactattttttatctcaa

SEQ ID NO: 180784 - DNA, 378 bp, Arabidopsis thaliana columbia
  unsure (1)..(378): unsure at all n locations
ataaaaaaaaaatattttagtattaataattaaatattaaaaaaaaaaaaaataataaaaaaaataaaaaaaataaaaaaaaaataaaaaataaaataaaataaaaaaaataaaaaataaaataatatataataaaaaaaataaaaaaaaaaaaataaataaaaaaaaaatataataaaaaaataaaaaataaaaatataataaaataaaaaaattaaaaaaaaaaaaaataaaaataagaaaaaaaaaaaaattnttattaatataattataataaaaataaaaaaaaatataaaattaaaaaaaaaaaaaaaataaaataaaataaaaaaaataaaaaaataaaaaaaaaaataaataaaaaaaaatataattaat

SEQ ID NO: 180785 - DNA, 198 bp, Arabidopsis thaliana columbia
aagctttgcaaacaatcatcgccacctacatcattcaagaaaagaatgatcgctacacgatggggtgttttacgctaaactcagggacatcctaaccagaaagcacgctgaagatcgataccctccctacgtggataacgtttctcttaatcacactgagatcattaaaactgccacccatacccaaaacgttcttag

SEQ ID NO: 180786 - DNA, 432 bp, Arabidopsis thaliana columbia
cacgggttccctcctttcattgactttttttggagttacttctcatcaactgggggagggactgaagctctcggggggttgaaggctatgacctcgaataactttccatatatatcagtggttctgcgtgtattcgaaactatgatgaagtctgcaagacacagtgaagcacaagatttactttctatgtgcccaaactatatccgtaataatccggatgttctagaactctttaataccatgaaacccaacgaatctgctgtagaataacctttggctgcttttgcttagcttcagttgtagtttacattccttcaagtcttttaggtttctgggcatttgattcaaataatttggccagaatattttctgctgttcccttttgtttacatgtattactctccagtcatccagtaactttcttcatcaacc

SEQ ID NO: 180787 - DNA, 362 bp, Arabidopsis thaliana columbia
taaaaaaaaaattaataaaataataaaaaataaataatataaatataaaataaaatatataaattataataaaaaaaatataaaattaaaaataaaaataatataaaaaaaaaaaaaaaaaaaatataaaaataataaataaaataataaataaaatataaaaataattaatataataaaataaataaaaaatattaataataaaatataataaaaaaattaaaataaaataaaaataaaaaaaaataataaaattaaataataaattaaaaaaataatatataaaataaaaataaaaatataatataaatttaaaaataaataataaaaaatataataaaattaaaaatataaaaaaataa

SEQ ID NO: 180788 - DNA, 59 bp, Arabidopsis thaliana columbia
  unsure (1)..(59): unsure at all n locations
ccgacccactcgtccgcattgcttcatctttctctgncccttctattataatggaagaa

SEQ ID NO: 180789 - DNA, 246 bp, Arabidopsis thaliana columbia
atatctcatcctcacaattcgctcctacactctccataacgtttaatctctacatcgccatctcaatcatctccattctataaaaccatattcctaaacatctatcaataaccctcacactcattaatatcaacgacacaacctctaacacctttaaagcgccttaccctgatcataacaccattatttctaatcattttcacaccatatatgtctcttccattcattacttcattcatttacaca

SEQ ID NO: 180790 - DNA, 431 bp, Arabidopsis thaliana columbia
  unsure (1)..(431): unsure at all n locations
gcgggtagttgtggagttctttgcttttctaaatggtatataaccggaggaggaggcggggggaatttacatgcgggaacattgntcttcgatatccttaaggtcgagtggtctgtagcaagcatctcctctcaatcttctgtcacatccaacaagggatttagtctagttcttctgcaacacaaggataaagatttccttgtagcttttggaggaacgaaaaaagatccttcaaatcaggtcgatgcttttaccattgacaagaacaagagtgtatcaccaacacatccgcaaacaacttccaagaaaaaccccggccgtttactgtttggaaaaagatcttcttcctcggcagttttaacctctgatgaatcggttaaagcctcttcacagaggcttgatgattcagttgccagacagaaactttgctt

SEQ ID NO: 180791 - DNA, 89 bp, Arabidopsis thaliana columbia
ttcatcatctacttctccacttattttctttttatacacacgtcaattctttggggtgagatatcattatttacaggttctcccttctt

SEQ ID NO: 180792 - DNA, 130 bp, Arabidopsis thaliana columbia
attattatattattaattattattatcttatatataattaattttttattttattacatttttctttatacatatatatatcttattattaatttatatatattattatattcatatattaccttatata

SEQ ID NO: 180793 - DNA, 63 bp, Arabidopsis thaliana columbia
gcggacgcgtatcatgatttgctagaggtattactttttctatggaaactcccgattcgagaa

SEQ ID NO: 180794 - DNA, 187 bp, Arabidopsis thaliana columbia
gccgttctgatcgggggcatatctattgtctgtacgtttcactttgttataagtctggggattttgtgtggcgcctgggggtcaacgtggggcgattgctaagaagcggaccaacttatgggactcgtgggatctcgctagggagatggaaggctaattaccctgtctaatgtagctgggagagctc

SEQ ID NO: 180795 - DNA, 206 bp, Arabidopsis thaliana columbia
acctcgtgatgagcatatcaacgaccatctcactccatcggcggaaggggaccgtgaaaaggggccatcactacaaggccgagacacggaaactacacacaacactgatcataacgaccagacaaagattcaatattcaagacacttagatcatcgtctaccacgaacaacagacctactacagctgtctaccaattaccgtctac

SEQ ID NO: 180796 - DNA, 267 bp, Arabidopsis thaliana columbia
  unsure (1)..(267): unsure at all n locations
cgcatacgtaaaaactnataattaacgttctttttttatactctcgtcctacacaccataacgggggtggtctttattaaagggggggcaccccctactcccgtagtagactttactgatgaatacaaccattattatcaaaaggagactttttgtttgtacttaacgaccgttaagtcaacaattcctactaacaatcttttatgacttcttttaaagatatcaaataaagagatccaatttatttttgtttctttatacaacatt

SEQ ID NO: 180797 - DNA, 308 bp, Arabidopsis thaliana columbia
taaaactaaaaaaaaagatggtattttattatataaagctttactctattctctctgtgtgtgttttctatatctttcgtgcgtctcttcccttccatccttccaaaccctattccccaattctcattccctttcttgagcttctcccgttttattccaacccttctcctactcctagtcacttctataatccttatttgaatcctgatccgtctccgagtcttttttcttccattactctaaaccttgaccacattcattctctttcttccaacaaaacaccccactatctattcacttttcgtctc

SEQ ID NO: 180798 - DNA, 454 bp, Arabidopsis thaliana columbia
cgcgtgcgctcagacgactagcagcaagactataccgtttaactttgatgctactgatcctggggtgggcctagaatcaaccactgctactggtctgttcgtggatcctcttgaagaatttgctgctacagtcagctctcaggggataaaaccatcaaatacttcacatacttctacaaaactcaagcctccgcctaaaccaacacaaaaagtgaacagaggtaagagtgtaggaatgtcttcaatagacgaacttgaagactttgccatgggtactatgcgacgtagtgccttcgcttctgacactgctagtaaatatagagaagctgaagatgctgcaacgaagaataaacaagttggtgtagatgaccttgactccttttttagcgctcggtccagcagtgtactcgaatcacgtaccactactgaaacatcttccaagcaagctttcaac

SEQ ID NO: 180799 - DNA, 255 bp, Arabidopsis thaliana columbia
atcaccctacttctctctctggggctgtatttttaaaaatggggagcctccttatactttatgtactctttatctcactctcgatagccatgtctgcaaggaggggaaatattgtaaagaatacaattattatttcaaggtaacacctactgtgtcatttgcaaattccttttctagactcctgaattcttctacaacatacccgtagcaaccgttaatctatcatgctatgacaggttatacaaatttaatatt

SEQ ID NO: 180800 - DNA, 257 bp, Arabidopsis thaliana columbia
  unsure (1)..(257): unsure at all n locations
acgcacaagttcaatcaatggctttcttctatagttattctctatgcttgaacgcctttagnccatggcgcgagttcttcgctctatctaccagttgtctctccatcccttccatactcctctaccccatctcttctctccaagaatttcgcatgctcccagtgtttctcctcctttaccggaccgccattaacctgcctcctctctattctcctcgcgtcttctctaatctcttaaaaaccaaaaaccctaccctc

SEQ ID NO: 180801 - DNA, 444 bp, Arabidopsis thaliana columbia
aaagatcgcaagaactcaagctatgtaacattgcagaaagaggtaactaattttaaacggggtataaaaaaagaaattccttgaaaaatatgtacaaccaaaattaattcctctaaatattgaataaaagctttgtagaacaaattaaaatgctcagatttgttttggtctatatccctgtttcgttatagttttctttagtatacagtagaaggatcgtcttacatcataaaagtccagactaatttcagctggaacagcaagatcttgatgaatttcactggtgaatactgattaaagggttgtatcacacacactttgcatatctctattcattatctgctcaacacgtcacacgtgcttttcaaaaagatatacatgtttgttgaaaccattgtttttgtttttttatttccttcagaattagaaactatttttaaaact

SEQ ID NO: 180802 - DNA, 393 bp, Arabidopsis thaliana columbia
gaatacccggccgaccgacgcgtccgatggcttttattggaatgagaaacctggtgtctctttatatcatactccgcaaagggggcattgctgtaaatgagtatccttctctctcataccacaagtgtgattacatggcgaacactctattctatacttctctcctgtatcacgataccacagagcacagattagcactaaccgaattttgcggcatgtggagttatgcccaataacggagcatgctagcgtgtcggacccaaatagagtttccacattacatcactggacttcaccttatgttgatgatgatgctaatgctgagcgcgaggacagtgcctctgagctcgaaatcttatagctaaaagcgataggctgttaaagagctaaagc

SEQ ID NO: 180803 - DNA, 316 bp, Arabidopsis thaliana columbia
aaaaaaaggggggtggagaaaaaaaaatataaaaaaataaatataaaaaaaataatataaaaaaaaaattattaaaaataaaataaaaaaaaaaaaaaataatatattataaataaataataaaaaaaaattaaactataaaaaaaaaattaaaataataataaataataaaataataataaaatatatacaaatatattaatataataaaaaaaaatataaaatttaaaaggaaaaggagagaataaataaaaaataaattattaaaaaaaattaatataataaaattataattaaataaataatataatataaa

SEQ ID NO: 180804 - DNA, 468 bp, Arabidopsis thaliana columbia
  unsure (1)..(468): unsure at all n locations
ttctctttctctcttttatttaatccaatcatgngttnatctccncgagcacgcgtttttaatttcgggggagccacatcccattgttataatgatttagcctctatatcgttgatctcccactatctcgtaactcttttattttcttgatgatgtggatggctctttttttcatcacttaccatctttattatctgttcaagatgtgatatccattcgatataccattgcttgtccctgtaaagtttcatattacttaacttctacaacaggtaactacatcaatctgctttctatggtcctataagctatcctgcatttgcttcaaggacttctgcttttctatactttttctacatttgtcttcatgaagaagtacattttcatcttttattactatttctttctttcttaatgatctcattttaaaagctgatatctctcttgtatcacacatcaataaccttt

SEQ ID NO: 180805 - DNA, 382 bp, Arabidopsis thaliana columbia
  unsure (1)..(382): unsure at all n locations
ggggcgaccgacgcgtgcgccctactgagatgaataccagatttatatttattcgatgatcgagtaantcattgcaccgtgttcataacattatctgtagtctgcacattggttcagctagcttgagctctggattccaaactggaacaagagctttaactccagagtatgaacaagtccattggtcttctacaagagagagtttgaactctgaataatgaggagaaacaacaaggggttaaattctgctgccactttcttccttttttaggtttcaggattgtatgttttgttaattgattgtaccagtttctcgaagaggcgagagttttgatgaaaggtttaagatacatttctatatacttgtgtgaaagaagctaca

SEQ ID NO: 180806 - DNA, 230 bp, Arabidopsis thaliana columbia
atatcattaccaatttataaatatattattccatggctgcatctttctctggcgccctgtattataatggaagaagaacgcacattcaaatcaaacatttctataattcatacatctataatctcacaaatgttcaatctaacaatgctcccctacactttccttaactatttatctctacttatccatttcaatcaatgctattcttttaactacatatcttaataaac

SEQ ID NO: 180807 - DNA, 301 bp, Arabidopsis thaliana columbia
gcgtccggtcaaatctcattatttagattacacaaattttactttaattaagccatatggaaatcggggtggttttaaaatcaaggtggcaaatgactacactttctgtgatatcttacttacaaccactggttaatcaaaacctcaaggaggcaaaaatctccaccgaggcagaatagaataactatggttacacacataattgatttcactgtccctactacaccacacattatctacttcaaatactcataaactgatgcgccattcaattatgtgaatcctttcatccccaatacaa

SEQ ID NO: 180808 - DNA, 64 bp, Arabidopsis thaliana columbia
gggcgaccgacgcatacatttacctcaatactacaaccaatttatatttttccatcaattcact

SEQ ID NO: 180809 - DNA, 298 bp, Arabidopsis thaliana columbia
ggaaaaaaaaaaaaaaaaaaaaacttttttataaataaaattttacaaccccaaaacccaaaaaaaaaaaaatttggataaaaaaccaaatttttaattttggcttggaacaaaaaaggtaaaaaaaccttttttttttttttaaaaaaaaaaaaaaaaattggttttaaaaaaaagaaataaaattatttttttttaaaaaaaaatttacaggaaatctttttttttaaaaaaaaattttttaaacaaaagttaataataattcttctatcaaaaattttttgattaaaacaaaaat

SEQ ID NO: 180810 - DNA, 365 bp, Arabidopsis thaliana columbia
cggtagcgttttatatatggcgtgttttactcaatactctttaaaatatttttacttatttcaatatatttcattcactttcttaaaacaaacaaaacaactcccactttttaataaaaaccatacctataaaaaacgcttttatattttcttctaaaaacctataaaaatacacaacacaactcccaatatatttaacaccccaacaccccccaaaaaaaaaatacttgacaaaaaacaatttctcttggctctaaaccccacaaaaaaaacccctcacaaaatttttaacccccataaaaataaaacccccccctcctcaaataatctcaaaagaaaaaaaaaaaacatcccccacccccccc

SEQ ID NO: 180811 - DNA, 188 bp, Arabidopsis thaliana columbia
ccagataaatatttggtttatactaacaacgatatcaaacctcgcccgctttttttaaaaacgcgcgcgactcctctttaactcaatataaccattacacataaccaccctctcatctatatccctgatattgaaccaattgatcataccattatctacatcattaactcaacttatcctgacaatca

SEQ ID NO: 180812 - DNA, 370 bp, Arabidopsis thaliana columbia
tttaattatttatttttttacacaatacttcatactcaaccgcggccattttatcagtgcactaacaccaaattctcctacaaacatccaatactccatgccttcatacaaaaaaccttaacacaaacaatctaaaagaattcaatccacacataaataattatctaaactacaaccacatacaattatattatacatctaaaaacccaactcgacaccacaatcgtgtaatagtaaacaatactataattatcactcacaatcaaacaacttcaaacaaagatatgagcctaaaaacaaattacattaaaagcttaaattacacacagctctaatacaaacataatatccactcaaatatcaatacttc

SEQ ID NO: 180813 - DNA, 449 bp, Arabidopsis thaliana columbia
  unsure (1)..(449): unsure at all n locations
aaacccgggccgaccgacgcgtccggtccaatcactttattaccacacaatttcataagctgatgccangaacacccaaacgccgcgtttttttcaacgagagcaccgcgataaacaacccaaaaaagacacaagatcacaacctggcaaagaaaaagactgcgcaccaccaaagtactacacaaactaaacctcctaaaccgctcacagctcacaaacaatcacctagggaggaaccaaattcttgaaaccaacagaagcatgaatcctcacccaaaacaaactaagactaccttgacgctcctgctgcaaacccaaacaagcctgcagaggccactgcntaatgctaaaaaaatacaaccaaaaacgctcctaaagaagctccctaaaacacacctgacaacatcaagctcgaaacacctcccaacttatacccctcaccatacaac

SEQ ID NO: 180814 - DNA, 418 bp, Arabidopsis thaliana columbia
gcccaatacacatatacctatacaattttatattcactaaccccataaaacctaaacgcggtgtttttttactcgggagcgttcaaacttacaccccaaaccaaacctaaacactatacaattaaacgctacataaactcaaacaacaatttacaacaatacacgataatgcaacccgtatattccttatcatctatctatcacaaatatgatccacaccgtaaaaaacaacaaaaaactcctcactccctaaatgtaacaaaggtgcacacatgttgttctcttaatacaacaaaactctagtaaagatgctgctacaacttaaacaaaatattacaacgatcaactacttacaaatactttcataacacccactgcttacataaccttattaccaacccttccccttaccgatttt

SEQ ID NO: 180815 - DNA, 426 bp, Arabidopsis thaliana columbia
cagagattgtgaagattggagtcatgggtatattaagttacgccgtcgccggcggtggaggggcagtaatcggcgcgtgggagtcactggactcatcgaacctggatccgaattcatcttctggtactgctgattcatcttcccctatggctcagatcagagcttcgccgccaaaatctgttggatcatcttccatccccgtagctttgctttcgtctctgtttattgcgaactcgtttttctccttcttcagctcaatcggatctcgcgatcgggtcgggtcaatgatccagttacagatcgtggcagtggcagtactattcctatattacgccattctaacatatctggtcaactccaaaaacgctgtctttgttgcacttccgtcttcgattacaactttattgcttctctttggcttcattg

SEQ ID NO: 180816 - DNA, 212 bp, Arabidopsis thaliana columbia
  unsure (1)..(212): unsure at all n locations
aaccaataaaaaaactaaacacatattcctataaaaccacaaaacaaacaccaaccgccgccttttaaaaaaaacagcgccaccccccccaaacaaaataacctncaacccaaccaccaccacaaccacgaccaaacaaaaaatcccacaacaccactcataactccttctcacaaatacactccacaatatttaaaacacaaatacccccc

SEQ ID NO: 180817 - DNA, 381 bp, Arabidopsis thaliana columbia
  unsure (1)..(381): unsure at all n locations
agctcacaaaaaaagaatanaaaattttcattctcatcnnaaaatccatnactccccgcccgttttttaaaaaaataacgccccccacacaaacnaanattataaccttaagtgtcatatccaaggcaaccatctcacccccaccacaaatctccaccaacacaccattacactgctctcataccgccaaacctcctcactccaatcctcaaaaaatccatctgaaccaaccaacacctaaaacaccccgtcttacttcccccaaccagacaatttctacgaccctaaaaatacatctctatccaacgacaacaaagcactcttatcccaaccaagaaccaacctctatttctcactatcaagaatacaaaccaatcttta

SEQ ID NO: 180818 - DNA, 206 bp, Arabidopsis thaliana columbia
  unsure (1)..(206): unsure at all n locations
aaaaaaaaaaaaaaanaannaannannaattttntttaataaaaaaaaaaaaaaaaaaacccccgctcttagnttattgnaaaacaccccnncccccaacccaaaanaaaaaaaaaaanaaaaaaaaaaaacacaaaaaaaaaaacaaaaaacaacaaaaaaaaaaaaacaaaacaaaaaaaaaacaaaaaaacaaaaccaacacc

SEQ ID NO: 180819 - DNA, 184 bp, Arabidopsis thaliana columbia
  unsure (1)..(184): unsure at all n locations
acccaaagccattacacagttttatttgtagacctctccatttctcncctctgcggcacgggttttatatttgcgagagaacgcaacacncaacaacccaacgaagaagaatgaaaaaggatttgaggattacatttgtagtcgatttaagctatatcgacgaaacgtcttcgctcgtttcgaa

SEQ ID NO: 180820 - DNA, 292 bp, Arabidopsis thaliana columbia
tccgaaaaaaaaaaaaaaaaaaaaaaaaaaaaaaattaataaaaaaaaaacaaaaaaacaaaaacccccgccctaataaaaaaaaaaaaaaccccccacaccaaaaaaaaaaaaaaccaaaaaacaccccaaaaaacctaattgaccccccaacacaaacacccaaagccaccacaccaccacccatcaccacccaacaccaacgacaaaaaccaccaaaccacccacctaaaacatcctacacccaataaacccaaacaaacaaacccaaaaccacaaacccaccaaccaa

SEQ ID NO: 180821 - DNA, 479 bp, Arabidopsis thaliana columbia
  unsure (1)..(479): unsure at all n locations
cggaatggaaggcccggcgcgacccacgcgtacgaaaaacacacacnacccatcgcgatctatatctaggcgagaggaaactgtggtttgggcgcttttttattatgtttctcacgccgcgaccaagcacaggatccttgcagagcttgcccgcgttgaacaggaagtcgctttcttggagaaagagttgaaggaggtcgagaacacagatattgtatcaaccgtgtgtgaggagctgctatctgtcatcgagaaaggacccgatcctctgttgccactaaccaatggacctttgaacttaggatgggaccggtggtttgaaggaccaaatggaggagaaggctgcagatgcttaatactttgattcgctagacagaataacttttggccacatccaccctccatgatacacacacgctagtttcgaggatcagaatacatacatacctatgtttattatatagatagaacgataatgg

SEQ ID NO: 180822 - DNA, 432 bp, Arabidopsis thaliana columbia
agaaaaatcaaatctttctctctctctcttttgttgaaaacccatttctgtattgtgggcgagctactttactactaagaagaagtgaagcaaaaacagaggtttttgaaaatggagaaaaaacaaggctttttctctgctctcagacacgaagttgtgagaggtctttcgccgtcacgatccagagcaaggtctcgttccgttagtcccgctaggtctagttcacccatgtcagctctcacttggggaagaaagaacttaactggaggaggcggtggtggtggtggcggaggttactatttagcgcaaccagagcagttaattgggagatccggaagtttgagacctgtaatggaaggtcctgatccagatgaaggaggaggaggtggtaatataggaaaatctaaacgactcgggtcgggtttaggtcac

SEQ ID NO: 180823 - DNA, 355 bp, Arabidopsis thaliana columbia
  unsure (1)..(355): unsure at all n locations
aaaagaaaaaaatnttgacaacacnctatattcacaaaaaccccaaaccccccaacccggcaccttataaaaagggcgcggccccccacaaaaaaanaaaccaataaaaacccgcacaaaaaccacgccgaacacccgacccccaaacccgcagaccaccaaccaccggaacaggcacaacccagaccaccacatcaacccagcagaacggacagatctaagccacccaccacaacgaagaacagagaaccaaagaactcaacccgaagcaaccacccccacagatacaaaacacaaaccgcgggacggacaaagagaccaaacaaacaaaccctaaacaaaaaaacccctacac

SEQ ID NO: 180824 - DNA, 73 bp, Arabidopsis thaliana columbia
atttaaaatttttggaaaaaggaaaaaaaaaaagggtgaaaagagggggaaaaaggggggggggggggggggg

SEQ ID NO: 180825 - DNA, 369 bp, Arabidopsis thaliana columbia
gaacagccaaatatgccaacaagggcacccttatttttttttgaagcaaaccgaataatcggggaatggctaaactaatggtgcgacgcccattcgcacttatctctctacaacacaaccacagctgccttatcacattttcaaaaatccacctctcttcttactccccgacccactcaaccagattcacaattctagcactccaaacccacagtttgctagactatatacctatctcccaagtccgcttcacctgtatctctatctaccaaaaaccccttatccgaatccaaacaaagcattccttgcttgcggtaaaatagccaatacatgtgctcactcatgtctgaattaataatttcacaagcc

SEQ ID NO: 180826 - DNA, 436 bp, Arabidopsis thaliana columbia
  unsure (1)..(436): unsure at all n locations
aaaaagggacggcgcgacgcgggcgaaaaaatagagtggaagaagagagaaagagatgttagttttatgcaacaaaaaaaatanagggggaatggtgttacagggaagggtggcagaaacaatccatgtcttgaatcacgatcctgaatcttccaatagagttgctgctaaccaatggcttgttcaattccagcttacttctgcttcttgggacgactccacttctctcctcacttctccgaatgtttctcttttctaccttcaattcttcgccgctcaaattctccgccgaaagattcagaacgaagcatcgaatcttcaatctacagctaaagatgctcttctcaatgcccttcttcttgctgctaaaaaatatagctcccgtgttcctcacctttgacgcaaatatgtttagctctctctgcgcttcttcttt

SEQ ID NO: 180827 - DNA, 259 bp, Arabidopsis thaliana columbia
  unsure (1)..(259): unsure at all n locations
aaaaaaaaaaaganggacgcgngcggnaaaaaaaccatttttattctcgacgctctttaacttttccacatcgaaaanaaaacctgcgatcgttaaaactttgagaaggcgccacaccaaaatcanaatnaaaaaagaaacccaacttccattctttattaaattcactctttcaatgtataccctcaaaacctcttttaacagacaactccagaactacaactaataatacattcagaccaactcctttttttcctat

SEQ ID NO: 180828 - DNA, 211 bp, Arabidopsis thaliana columbia
ttttataaaacatacatacaaaaaaagggcactgtttaacactgatggatcctatgcactcatttatttaacattacattgtttaaaatattcaaaatctgcttgactcaatgaacaagcttcgagttataccttccagatcaccttctaattccaaaaaaaaccctatcattattatcgattttgaaatgccactttattgtaaaaacta

SEQ ID NO: 180829 - DNA, 99 bp, Arabidopsis thaliana columbia
  unsure (1)..(99): unsure at all n locations
aaaaaaaaaaagnngggggggggggaaaaaaaacgcaaaacaaaaaaaatttaatatttatacaaacacaaaaaaaaaaccgcacccgttcaaatttaa

SEQ ID NO: 180830 - DNA, 126 bp, Arabidopsis thaliana columbia
  unsure (1)..(126): unsure at all n locations
aaaaaaaaaanggagggggcgnaaaaaaaaaacanaattacaaacaaatttttnttttcaaaaaaaaacaaaaaaaacgcggacccggcaatagtaccaacggccccggcccaacaaaaacaaaaa

SEQ ID NO: 180831 - DNA, 102 bp, Arabidopsis thaliana columbia
  unsure (1)..(102): unsure at all n locations
aaaaanntnaaaaaaaaaaaaaaatttacaatttacacaaaaaaaaaaaaaaacgcaacgccaaaattaaccccccaaacccccaaaaaaaaaaaaaaaaca

SEQ ID NO: 180832 - DNA, 261 bp, Arabidopsis thaliana columbia
  unsure (1)..(261): unsure at all n locations
aaaaaaaaaaaaagggccgaaacaaacaanactgctaaaaaaaaaaaaaaattttaatttaataaaaaaacaaaaaaaaaatgcatccgtttaatataaaaacaccgccccccccccnaacaacaaaataatatcctatactttcacacccaccacatttaatccaatctataccaactcattaatcaccaacaaaacccttatccaaaatcttatatcaaaaattcattctttcaaatcctccaacacccttcttacatt

SEQ ID NO: 180833 - DNA, 270 bp, Arabidopsis thaliana columbia
  unsure (1)..(270): unsure at all n locations
aaaaangaaaaaaaaaaaaaaaaaatttaaatttaaaaaaagaaaaaaaanacgcaaaccgttaaaaaaaaaggggggggggcccaaaaaaaaaaaaaaaataaaaaaaaaacacaaaaataataaaaaaaaaaaaaacataaaataaaaaaaaaaataaaaaacacaaacaataaaacaaaaaaaaacaaaaaaaataaaaaaaaataataataaaaacaaaaaataaaaaaaaaaaaaaaaaaaaaaaaaaaattgttgggggggggg

SEQ ID NO: 180834 - DNA, 264 bp, Arabidopsis thaliana columbia
caaacagcggaggccaatatctcctctttatgccttcgctcgctctatgggctttgtttacctaaatggggcgcgctctaagaaactgaacttgttacgaaggagaaaaacagggctgctgctgttgcaatgaatgctgagatccgccggaccaaggcacgattgtcagaggaagttcccaagttgcaaagacttgctgtcaagcgtgttaagtgccttacaaccgaagagcttgctgtgagaaatgaatttgttctcgctctt

SEQ ID NO: 180835 - DNA, 316 bp, Arabidopsis thaliana columbia
tctttatttctttctccctcccaatcattttatttgtccatatgagaatggttttaagaccactatcgagtacaaattcaaccatgaagaaaatattgttaagataactacttacacacatatccacaagctaacttcttctctactcaacaaactagccatttatattaggaactttcctaagttctgatactcagtcaatttgtaaacttttatccatctcactatcgtttctacccaaaagatccttctctaactacccctagcttcttttaccaaatcttattaattaaattcaacatgatatttcttttct

SEQ ID NO: 180836 - DNA, 51 bp, Arabidopsis thaliana columbia
  unsure (1)..(51): unsure at all n locations
aaaaaaaaaaagaggggaaaaaaanaaaaaaaaaaaataataagaaaaaaa

SEQ ID NO: 180837 - DNA, 168 bp, Arabidopsis thaliana columbia
  unsure (1)..(168): unsure at all n locations
aaaaaaaaaacactaccattctcaattaataacaaaacacaacaaaaaaaaaccgcaaacgcgcaaaaataaaaaaaggcggcacgagcaaaanaaaaaaaaaaaaaaataaaaaacaaaaacacaccacaaaaacaaaaataaccactaaaacaaaaaaaaaccaac

SEQ ID NO: 180838 - DNA, 204 bp, Arabidopsis thaliana columbia
aaaacaacaaaaaaaaaccgtcactttttaaattaaaactctcgcctccccaaatcaaaaaaaacaaaccaaaatttcaaatttctcatctttttatcatatcatttataacaatttttacattttctttttattacttactcactcattaaaatttctattatattcttaataacaccttcttcattttcaacatttcatcat

SEQ ID NO: 180839 - DNA, 323 bp, Arabidopsis thaliana columbia
  unsure (1)..(323): unsure at all n locations
aaaaaaaaaataaattaaaaaaaaagaaaaaaaataataagaataaaaaaaatataaaaaaaaataattataaaatnaaaaatagaaaaaaagaaaaaaaaaataaataaaaataaaagattaaaaaaaataaaaaaaaaaaaaaaattataatgaaaaaaataaatagaaaaaaaaaaaaaaataaaaaagagggggggaggggggggggggggagggggataaataaaaataataaaataataaattaaaatgaaagtaaaaaaaaatatatataaaataaaataaataaaatatatataaaaaaaatattaaaaaaataa

SEQ ID NO: 180840 - DNA, 216 bp, Arabidopsis thaliana columbia
  unsure (1)..(216): unsure at all n locations
aaaaatanaaaaaaataaaaaaaaaaataaaaaaaaataaaaaataaaataataaaaaaaaaaaaataataaaaaaaaataaaaataaaaaaaaaataaaaaaaaaataaaaaaataaaaaaaaaataataaaaaaaaaaaaataaaaaaaaaaaaaaaaaaaaaaaaaaaataaaaaaaaaaaaaaaaataagtggggggggggggggggggagt

SEQ ID NO: 180841 - DNA, 334 bp, Arabidopsis thaliana columbia
  unsure (1)..(334): unsure at all n locations
aaaaaaaaaaccggccgcacgcaaaaaaaagccaaacaaccaanaaaaaattttttttttaaaaacaacaaaaaaaaaaaaacgttttcgtttaatataacaatttcgtcccacccaccaaccaaaccatttatttatactttatattatttttcattttaatacaattaattatcctatactcaatcaaacataactataaacactacaacacacatatcttaacccaacacaanacaccctccattatatttttttattatttcttcactcctaaaccataaattatatttcatttcttctcttttttttttttccccccttttttttcccc

SEQ ID NO: 180842 - DNA, 390 bp, Arabidopsis thaliana columbia
  unsure (1)..(390): unsure at all n locations
acaccnancacaatcttttttcttataacnacattcatcaaacccgcgcctgttacttctacaagtaggccagttccttaaaacctacaaacaacactttttcctttaattcttctaataattattatcttcaatatatttcacacaattttcattctttcactctttctataaaaaagactggagccgcccctgcataagtcaccactaccaaagcctaaccttcttaaactaattcctataattttatcatcatttttttcatattttttatacccatcaaagaggctacaccaagacggacttttaaaacttttttacaacaaacctctatctattttttacttacaatacataatattcacctctatatattaaactcatcttttt

SEQ ID NO: 180843 - DNA, 203 bp, Arabidopsis thaliana columbia
ttctgttgcaggggcaccaacactaactgctatcattgcccttatcattatgagaaaacgtatgagaggatacagtgcagttgctagaagaaagcgatcttccaaagcttctttgaaaatcgaaggtgtgaagagcttcacttatgctgagttggctttggctacagacaattttaatagatccattcaaattgggtaagggg

SEQ ID NO: 180844 - DNA, 352 bp, Arabidopsis thaliana columbia
  unsure (1)..(352): unsure at all n locations
ttttacaaaaacaaaaaaaaaaaaagcgtcatgtggtaaattttcacaggggcccgccccacaaataacaaancaagtcgcttacaatgtattctccattcaaaccccttgtcacagccactgaagatctcacctccgtcaactctccacctccactctcaaacctcacgcaagaagaactcaataaaacctccgcttataaatccatccaattcatccaatctcgaaatcgtatctttcttcgcactgcctccacctctaaacactctcgggctcgtatcagcaagctttttcccaaaaagaaaacctcactcatataatcccaatcctctctttaaccacaacccattaa

SEQ ID NO: 180845 - DNA, 247 bp, Arabidopsis thaliana columbia
  unsure (1)..(247): unsure at all n locations
aaaaaaaaaaagcaaaaagaattttattttatactcaaaaaatatcacaaatncgggtattgttttatttttaaagcaagtggcggcgcncanaacacacatacaaagtgaaacaaagtgtgccaataaggcacttattgcttcaaagtatgcgtgtgtgaatatcgtcgagtccgcatactttcatattgtcttcactaacaagtcaccggacgttcttaatatgaaccctattggaaaggaccct

SEQ ID NO: 180846 - DNA, 407 bp, Arabidopsis thaliana columbia
  unsure (1)..(407): unsure at all n locations
aaaaaanaaaaaaaaattttaantttttgaaaaaaaaaaaaaaaaaaggaagcggtttatttaaaaaaggggggggctaaaaaaataaaaaaaaaaaaatataaaaaaaatattaaaaattaaaaaaaaattaatacaaaaaaataattaaataaaatataaaaaaataaaaaaaaaaaataatataaaaaataataaatataaaaaaaaataaaaaaaaaaattattaataaatttaaataaaataataaaaaaaaaaaaatcataaaaaataaaaaaaaatataattaaaatatttaataaaaaataatataaaatattataaaaaaatattaataataaaaaaaaatatttataataaaaaaaaattaattataaaaattaaattataaataaaaattaaaata

SEQ ID NO: 180847 - DNA, 155 bp, Arabidopsis thaliana columbia
ctgatttttgcattatttagagagacaacttttattatatacgggaataataaatttaatcgactgtgtcttaataatgacggggctgaaacaaacttgggcaaacattttatttctagccaaggtggagatcctagacagagctggccccatta

SEQ ID NO: 180848 - DNA, 365 bp, Arabidopsis thaliana columbia
aaaaactgacattttagatcttatgttttcttggtctatataccggggggtatcttacctaagagggaacaaacgcttacagagctgatacaggcttaaaagcatggacactgatcggtctcttaaccgcccgagacgtacgtgattgctctgagatactgatttcacagtttaagtaagaaagtatctctcttttaaccgtcggcaccccggtagacgggtcggtcattccctcttctcctcgtcctcaccgggaagtgacaactcgctccactcaatcttgtcagaccggttgcttgtcagcaataacaagcggacgtgattactgacggcgtttgggctaaaccaaactcgagtgtgagttg

SEQ ID NO: 180849 - DNA, 216 bp, Arabidopsis thaliana columbia
  unsure (1)..(216): unsure at all n locations
aaagagaaaagcccntcaaaacattaattaaaaaaatacaaattctttcaaattttacatttaaacaagcttttttttttctttcacactcactaatcaaacactgaatcaaaatacaaataaaacttttttcacttaccattaacaaaattttatgcaataacccatactattttattaacttaatctgccaaattttcaacaattttcattatt

SEQ ID NO: 180850 - DNA, 454 bp, Arabidopsis thaliana columbia
acgctctctttatggactcaactaaattactatctgttacatacgcctccaaaacaacccgcctgataatcaagaaatctgagagaccgaaacctcacaattatcacaaagctaccgatatagaaatacccagaacataattcgtatataccctgattcttttgcatatactctaaaccaactcataaacccagatcctcacgaagacaacaataactctacctactttcaagaaaatgggtccttcactacaggaagaaaaccaaacgctcatgataacaatttcatcgcaataccaatcaagcaagcctgtttgacaccacaacaaactcatccaactatattcacccataagctactattgacttttcaagaccctgttaataaacccaaaaaaccaattcatatccctcacatatacttcaacgtacttttctacctcatatccctgaca

SEQ ID NO: 180851 - DNA, 311 bp, Arabidopsis thaliana columbia
ccggggcgacccacacttcacttacttttcatcattttatctaaactctaataattaccacgaagaatactacaccaccgaggcttataacaaagagagagggtgagatcacaaaatatcttattttacacaatcttcttcatatggaagatttctgtttctctacactcttatattcaaaaatctttgtatctgattaccatatctctattcttcccacttcaatgctaaaacatcaaatctttttccaatcacttttattctaacaaaaacttatcttccatcttaattaactttagatttcttttatt

SEQ ID NO: 180852 - DNA, 471 bp, Arabidopsis thaliana columbia
  unsure (1)..(471): unsure at all n locations
cttattcactcgaaaatcaggtagagatccttatttttttctgttataagatggggttctcgtcaggagtatttgttggtcaggatgaccgangtctacttgctctcaaagctgcacaaagattgatggcaacaaacgatcccatcaaagtcgtggtcaaaggagttgtcttgcttaatactagcttatcaaggtaagtattttcagcttttgcatgaatacttctgcacacattactttggaagaagcacctttgtcgcccttttttattcactgatatatctcattttgtaaattgccgtgcgggtgggggaggggtctatatcactacatattttcttatgctatatattctttcttttcacttttattgttttgttttaagttctttatgattattgtattcttttttttcaaaaattttttttcctctaaatttcatttttttttaaaaaatactttttttttttt

SEQ ID NO: 180853 - DNA, 386 bp, Arabidopsis thaliana columbia
  unsure (1)..(386): unsure at all n locations
gtacagctccaaggatataggttttctccaagatgataggtatgtagtaggatggttattatagtcgcttgggcctnatccantgtgaacgcgctgaggacgcatcctggatggtggcaccgtgagctccaggaggtgagaggacaatcttcttcatataccgcccagagctttggttttcactaaattctactcaaatgtaaagaagttaaggttttgctttatctcgtgtcaagtcaaattacgcttgattttctattttcttaaagtatttggataggcgagaaataaaatttttctttatttttgccctaaacttaatatttgactattttcctaaagtgctatctctcttttttatatgttgattccttttaaaccttaat

SEQ ID NO: 180854 - DNA, 214 bp, Arabidopsis thaliana columbia
  unsure (1)..(214): unsure at all n locations
tccggtcttgttttgtaccgccannttagattgaactcctatataaacctctnnattattggnnattggatccatcatgcnnttatatagctccaacgccctgtgtcgcgcgaatttcactctttttggtttcttttccctttcnntggtaagaaatccccgctcnttctttcnnnctctttcttntnntttcttcagtgatggtacccgtcat

SEQ ID NO: 180855 - DNA, 53 bp, Arabidopsis thaliana columbia
acgtctctcgccacttttccactctcactcatttatcctaaagcacccccaaa

SEQ ID NO: 180856 - DNA, 451 bp, Arabidopsis thaliana columbia
ttccagtttgttgaggaaggtaaatggacattagatgctgaaaatttgaagtttaagaggggttttggtgaagcaaaagcgaaggagctgaaggtgaagcaagcacaactggctaaggcaaacgatgatataaatccaaatttgatagaggtatccgaacgtgtcccgagaaaagagaagcccaaggagccaattccagatgttgagtggtgggatgcaaatgtcctcaccaatggcgaatacggcgaaataactgatggcaccattactgaaagccatctgaagatagaaaaacttactcattacattgagcatcctcgtcccatagagccacctgcagaggcagctcctccaccaccccaacctcttaaactgacaaagaaggaacagaagaaactgcgaacccagaggcgtctagcaaaagaaaaggagaaacaggagatgatcagac

SEQ ID NO: 180857 - DNA, 507 bp, Arabidopsis thaliana columbia
  unsure (1)..(507): unsure at all n locations
cgggcgcggccgcacgcgtcacgcacacctaacaatctctctctttcttatctcttctttttctctcttcccannatccttgttgtcgtgagtctgtattctaaccagtgtgcggggangacnncaagccgtcaccagagaagaaccttctcagagnncgtttttccgatctccncttgancgatctctccgatatctcttctcgcagcaaatcctccttccaccgttcctactaacccgccacgtcaccagatccctccgccgtctcctgcagctcctccggctaaccgtagcaacaatgacgacaatgttagcaaagatcaccatgggaacgcctcttctaattaatatcgcttttttttgtctttggttttaatataagtttcagccttttaattatcgcataagcctttcttttctcttaataatcagattttgtctttctttactattgtatgataatcccatgaatcaatcgtagtttcgtatttcgggtttatggtggta

SEQ ID NO: 180858 - DNA, 221 bp, Arabidopsis thaliana columbia
  unsure (1)..(221): unsure at all n locations
aaaaaacatatntcacttaaccaatttaattttataaanaaacaacataaaaaatgggtgttttatttaaaaaattgggcgcgccccaaaaacatccatcttaataaacaattcccaaaataaccaaataaccacactatttttctatattaatacactaaataattatcatatacactccacttaatcaactcccactaccatattttattacactcttt

SEQ ID NO: 180859 - DNA, 225 bp, Arabidopsis thaliana columbia
  unsure (1)..(225): unsure at all n locations
gcgtccaaaaaggcgataggattgcttataagcggtactcttttgtatcaccatttcgctaatctcaacgctactcttctctcgcgtcatctccgacctnctcatctttctcttatcttcactcgccattctctgccttctttttcgtcacctcaatttctcggtaccttttgatccattagagttccaaatatcacaagacacatccttttacaatttcgcgct

SEQ ID NO: 180860 - DNA, 275 bp, Arabidopsis thaliana columbia
  unsure (1)..(275): unsure at all n locations
cggaaaacccgggncggccgacgcgtacgccaaaacaaaaagaaagaacaatggccaaatcncttagccttacaatctttctctttgtctggatatcttccaatgtcggagccgctcgacttctcnatgaggttcaaactcatccacatttagtcccccaggtacctgaagatgaagatgttattccacattccttaacaacaactccaacaccaattcctctcccatgaccctccactgtagtaccctagccaatcctaaattatctttattct

SEQ ID NO: 180861 - DNA, 86 bp, Arabidopsis thaliana columbia
  unsure (1)..(86): unsure at all n locations
aaaaccctaaanaattttttttaatcatcattaccacatcatcttgagcgctttctaaaaaaagagggacctcaaatacaccttaa

SEQ ID NO: 180862 - DNA, 291 bp, Arabidopsis thaliana columbia
  unsure (1)..(291): unsure at all n locations
ttcccccaccttcaccatttttattttatatttcaccgcaaananttactaatagttggttcatttacaaacgtgagggcgatttctcactcctaattcttcaattaatgtcatcttaatcacaaacttatcttcttcttaaaccacctctaaacctattctcatattttataataacaatcatacatctactctaattttaaaagatatctcccatacttatcctcaatttaatcccttgttatcttattacctcctctttatcgatatttctatcttattattctccta

SEQ ID NO: 180863 - DNA, 468 bp, Arabidopsis thaliana columbia
  unsure (1)..(468): unsure at all n locations
gaaaaaggcaaaaagttatactctatcttcttttctttctctcctcctcacatccaccaactgctgccttctctcaccgcgagaggaaccnanagacatgattctgataaactctaattctccgacgctaatctcagccgttagattcgtgggctcatctccgttcaccactcgggggctttctcagtccactgtctcaatctctagaaacaaaagcttcttcttccacttcaccgagacgaaggagaagaacgcaagaagagattatttgagagtatcaatcgtgtgtgacgcangagggatgtttccggtggatccatgggctccaaccattgattcacagagcatagcatcacaactcttcgctgtatctctgtttccttacattggctttctctatttcctcactaaatccaaatcagctccaaaactcacacttttcggtttctacttcttgcttgccttcgt

SEQ ID NO: 180864 - DNA, 198 bp, Arabidopsis thaliana columbia
gcccactcggaagaactatggaaagttggagccgccggagattagcgggactataagaccggccagtcttattgatggacgctaaagaagggctttcagacgttgaagtgaccctctctttatctacgttgcagatgtcaatagccgtctgtgctgcgaatgcggggtggatctgtatgtggcctggggtgactatct

SEQ ID NO: 180865 - DNA, 431 bp, Arabidopsis thaliana columbia
gacctaactaaccacatcacttcaccggattaaacctccaccgtcttcttccgccccaagggctggctccatggccggcgggaacctacagctccgtcacgcatactccatagctcaattcgttccaactgtttcttctcctcctcctcttcctactcagcgagttcgcctcgggacttcaccctctcgtgttctattatgcaatctccgagctaattccgccgccgctccaatcctgcgaactactcgccgttcagttattgtttcggcgtcttccgtatcctcagccgtcgattcggattcggtggtggaagatcgtgatgacttggggaggatcccgttgcttgaagttagggatttgagagcagtgattgctgaatcgagacaagagatactgaaaggcgtcaatttggttgtctacgaaggagagg

SEQ ID NO: 180866 - DNA, 411 bp, Arabidopsis thaliana columbia
  unsure (1)..(411): unsure at all n locations
gcgtccgttaccgggttgggatcccgtggttgcggtttggataggagtggcggtttcgtttancgagcatggggaagttttgccgtgggacgggaaagganaggcgataatggttgtgatcgatagggaaaagaagacggtggaagctgataatggatactactaccttgttgtggctgatggtgggatgaagttggatagaggattggtgttgaaggagaaaggagtgaatgagagcttatgaatgggtgttttggtcgttggccccctagagatgatgattaatagtggctgatatatgatggagatggggagggggttataatttccaaaataattaaacaaatgcttatatgctcttgcatctgcatatatgtaattattctcattgaatggttttattctataaat

SEQ ID NO: 180867 - DNA, 212 bp, Arabidopsis thaliana columbia
  unsure (1)..(212): unsure at all n locations
ccgggagcttattgaatgaatgaaggaacttttcttttggtttccaagctttnctacnacgatgcgctttatatttggccgcgcccccctaattaacatatctattacattctttacttgaccaccacaatgctagatctttcaaccatactatcagcaaccaccattatccaactctcactacagagaaaaaacatcaacactttttttac

SEQ ID NO: 180868 - DNA, 84 bp, Arabidopsis thaliana columbia
ttgttccctttcgaatcaagtgatcatgtcttaagtttagatacagaaacccactgcctctggtcgagtgtttaaagaggaaac

SEQ ID NO: 180869 - DNA, 227 bp, Arabidopsis thaliana columbia
actacacctgtccagatctcgccttataagttttattttatgccatgtctccagctaaaggggatagtaccaataataatggggcgagggccaactccttaaaggcggcaaaagctgtcaaatttttacaagcctttaagaataaagacatattgtataggacctaagttatcctttcacaatacttagactcttactaagccttgtactgagaagtactcaaaaat

SEQ ID NO: 180870 - DNA, 341 bp, Arabidopsis thaliana columbia
gtgtattaccctgcaggaggaaccatttacttttctcctctcccatccacaacatctgtgcaggcaccttataaaccgcgggggaactcccaaaaataaaccctatctctttaattcttaacagcatcttactcttacactttcaacaatctaaacattcatcattactagtaacatcacatattcatattcatcctatactttctacccctattatcccaagatcctcttaacatcacaaactctactccaaactccaaatatgtccctaaaactatccttcatttttcaataacttcatatatcgtgtcggatcaatacaacacctttatacccaataa

SEQ ID NO: 180871 - DNA, 148 bp, Arabidopsis thaliana columbia
  unsure (1)..(148): unsure at all n locations
ccggccggaanncccggtcgaccgcgcgtcacgattctctaccgttttcaagctcaaccttaatttccactacgatctcttcttcttctgtaatgtcattttaaaaaggcagggtgtcattcaaaccttcntcttctttataaatgtt

SEQ ID NO: 180872 - DNA, 340 bp, Arabidopsis thaliana columbia
  unsure (1)..(340): unsure at all n locations
gagcgcgtacgcgagaccagatgnttttacaactctgaccgtaatatgtagtcacccgcaggaaatctggttaccattcgtggacgggaggtgttaaaagcgtgagggagtgacgtcaaacccaaatacgtatagagacccttgnnnagttcgtatttctgctgnnngagttatgtnncaatcagtatgtgagtctaagtccccaaaatnngttctgttnngcgttttcaattttaatgttcacagtttaatttaatctttcttctttcaatggtaacgaatctcatggagtcaaagtaataaatggttaagacttatgtttgctgaataaaaacgaatt

SEQ ID NO: 180873 - DNA, 476 bp, Arabidopsis thaliana columbia
cttgaaccaaataattcataaaaaaaatctttaagggaatgaaaccggcagaaaaaatgcaggcaagttcatttaaggaagagacagaggaacctcagtttggaaaatctccccaacagtttgtttagcttggccatgagaagcaaggaggagacaaaacggcaagtcatatatcggcatcaggctcgtgtttttcgagttctattgatttgattttggtggtatagtggatcttgaaatgtttaagattcattttctaccgaaagaatcatttttaaataatattatttacaatattaaataaattatatgtgggggggtcttttatttattttattttttcctttctttttatattttaattttttccttttatacgttttcctcattttttcttttttttattttttttgtatatatttttttatttttttttttctatttgttcttttattttatttttcttttttcttttt

SEQ ID NO: 180874 - DNA, 74 bp, Arabidopsis thaliana columbia
atcttatgattcatacgggtttaggggcgccagaatcgccaaacctgttagtgacaccagtgttctaataatcc

SEQ ID NO: 180875 - DNA, 296 bp, Arabidopsis thaliana columbia
acaaattactacttcagaatagatacctaacatactttagcctgagttcagcactctgcgagacgatatctttatactactgggccctaatattttagcgattgatcagttgaagggcttaggtaattccgctgagcagtgccctaaaagccttagcaaaccttggggagaggatcatgaccttcaactcagggttatattcttaaagtgattcgcatctattttgggagtctaccgtattttcatagaaaacaaattttttagcactgatgctttttttaatagactgtctcgtt

SEQ ID NO: 180876 - DNA, 51 bp, Arabidopsis thaliana columbia
ttttgaaagctgatggattggtctatattccttatatctccgatgagaatg

SEQ ID NO: 180877 - DNA, 207 bp, Arabidopsis thaliana columbia
aaaaatgattgtccgacaaaaaaaaaaaaaataatatttaacattttttaatataatattattctaaaacaaacttatcaaaataccccctatttatactacaattattaacaaaaaataatttaaaaatttttatttataaatatacctaatctttttatcaataaactatatcttaaatatatatataaacatatataatattat

SEQ ID NO: 180878 - DNA, 385 bp, Arabidopsis thaliana columbia
cggggcgaccgacagcgtacggagaaatcaaataaaaaggtaatcctatttctaccaagcatttcttagtctcctcgggcttgttttatattttacggtgtggtgaccaccatactaaattatattcttcaaagcaatcaactttacagtcattttttcatcgataggtaatttaattttactattcacctacttatgttttccctaaatacttttaatatcttaatactgatcaatacatatctttttaaaatctttattccttttctttatatattttttcttcttatttaattttttaattatattttttttaattttattgggttgggggtgtaatctatttttatattctttttttttatttttatttttttattctttt

SEQ ID NO: 180879 - DNA, 469 bp, Arabidopsis thaliana columbia
acagaacataactaaaatcgagaaaaatggtataacagtggtgaaggtaaagtggtgtgtgggcattatcctacggttggatcgcctcattactcgtcaagttcctacttatccgtggctacactgttaaggcctacgtccgagatcccagttatccgataaatacacaatacttagtttcactagaaggttcaatgtaaatactttacttgtacaaagcatactcttttgtactagtgttctttttactctgctatttttaattcccattgtttttttctcactacttttattacatttacttatttatgcgtggggggggtttttttcaattttattttattttactttctctttttctattatttcatgttattttattttttctctttctattccttttcactcttcataatttttttaatttttactttttcttctttctttttctttattttttatttttctt

SEQ ID NO: 180880 - DNA, 215 bp, Arabidopsis thaliana columbia
ggtcgaccacgcgtccgctaaagaacaataactagaaataaattatttctttagttatcagagtccacaccttatggctggctttcataaaaaagacacgcggatccgatgtccatagctccaacaccatagcccacctttcgagcgaaatccatccaaatggagaaatctcatatcttccgtgagaacttcaaatggtcttaccgcatctaaag

SEQ ID NO: 180881 - DNA, 442 bp, Arabidopsis thaliana columbia
  unsure (1)..(442): unsure at all n locations
accgcggaccgccgtgggtagaacttatggcaatacttcttaaatgaagccaatccatgccttacacggggtgctgttctctctgttgtggtggcggcgactgncctctagctanctcgccttcgcccatttatccatagtcanntctcaggctgtgtttgccctcgctcgttcttgatgattgttatactcgaccatcagtagtagcttagattcctttggctctaagagtgaggagctcatcctgattctctcagtccttgttcatatgtcggtgatgatcaccggaggtaggagccttaaaccagtacgtattggctctgtatccttcaaaatgccctcttctttattggctattcaaacgatcgagggctgatgatgtttacactaaagctangtatgttctacgtgaccaatgaggtaccatattgcttttgttttg

SEQ ID NO: 180882 - DNA, 315 bp, Arabidopsis thaliana columbia
gggcgagcgtcgaacactaagctaccactctagctttggtgatctgaatcattattctcacgaggtgggttacatgctggctaggtcccggtagctcaactctgactgggaagctcgaggaacctattctttctgtctcactttatggtggtttgcccctctacctccgggtctagcagaccggcctactgtcctgagctgcccacagatgggatcaagacatgaggcgcagaacccggccacggcggacctaactgctggcagttcgtgcagagagcacaagaagggcggcgatgtaacgtcagacaaaacttt

SEQ ID NO: 180883 - DNA, 404 bp, Arabidopsis thaliana columbia
  unsure (1)..(404): unsure at all n locations
ttcggaatttcccgggtgcgacgccatcgtcgtccgtccntggccagtagtcaatattgcttgtcttcaatatgtattaagnnccatgcccatgtgtnnaagtatgagacggggaattcagtatctggtgagaacgtggcgagattnggctcatnnntaaatcnnagttatttagtttggtttgganntggtaacctacctacntnncggataacnncgtagtatatttcttaganngctaatatcgtgcatacataatcccctgtacttatgtgaaagggacccgcatttattatgataataaggggtcgacgcgggcctcttgcccgttgcttctgatgtattcaatgataaccctcgacggattcgcatgtgcctcttgtgctggcgacccgcatcattca

SEQ ID NO: 180884 - DNA, 66 bp, Arabidopsis thaliana columbia
tgggttctgggttttgattatttcttcatatgtaaccacatttttcactttccggagatggatctt

SEQ ID NO: 180885 - DNA, 279 bp, Arabidopsis thaliana columbia
  unsure (1)..(279): unsure at all n locations
aanannanatttatanccattaaacggaggatttttttatacaggtgtggggggcccattttcttcctttttcacacaaaaacacattttttcccaaatatttttacaacctcataaaacacgattctataaaccctccaagtttctttgattttattccaaaacacatcttttttttaaaaatcccctttttcacaagacagctaaaattttccctatggctattaaaatatacattgaaatttaccactttttaaccctatataaaaaatttatttt

SEQ ID NO: 180886 - DNA, 293 bp, Arabidopsis thaliana columbia
  unsure (1)..(293): unsure at all n locations
cggaaaanccgggccgacgcacgcgtccgcaaaacatcatcatatattctattgtctgtttaattncttctaagtgcaaaagancagaaattgtattcaatgaagatgaggctcatagtggtgtttatggttgctattgtggctttctccgccgtaggaaacttggctgcgcagtctgaggctcctgctccaagtcctactttctattctgttatttttgtcccgtcattgtttgcatttttagctgttttttcttcagtttttctcttttaataccaatcttcacatttcat

SEQ ID NO: 180887 - DNA, 470 bp, Arabidopsis thaliana columbia
tcgttgactcgtgtgtcgaaatctctcttttttagaagaggagagacgaaactgttgggttagtttcctacgccgggaaggtgggaactccggtgaacagagaatggggctgcatttggctgctctgtttttcatcatttcaccactcttcgttttctcctctcaagtccagcagcagatcggttctaatcagaacttgatcaatgatctggactcagctaagctcagaatatctcaattggaagctgttcttgaggcgacaatacataagttggatggtaagaccctttacttgaaagagcgtgagaagttgatccaagttgctgaaactcagatccttgatttgcaatctgcttcatacattgacaagagcggcttacctttggttcaaaagaggataagcgagttagaagaataggtgaaacttttatgggctggcttgagaacaaccacctttgatcttcaccttt

SEQ ID NO: 180888 - DNA, 94 bp, Arabidopsis thaliana columbia
  unsure (1)..(94): unsure at all n locations
acaattttaaatttcttntttttaataccacccctttaaaaaatttttaattttacttttaattaaattaaataaaatactaatctcttttttt

SEQ ID NO: 180889 - DNA, 57 bp, Arabidopsis thaliana columbia
  unsure (1)..(57): unsure at all n locations
ttnccttctcatattctcntttcactatttcagtaaacaantagatggttttgacaa

SEQ ID NO: 180890 - DNA, 185 bp, Arabidopsis thaliana columbia
acgtggttcaaggccggcacaattaccgagatgctactgggcgccgctggcccgctaagcattaccaggctactagtatctagagctgtgaaggctacagcccggatggtccatggagaagcaggactgtttacccagggagttgaccatggcctgtctgaccccgggcttgagagtgagggaag

SEQ ID NO: 180891 - DNA, 205 bp, Arabidopsis thaliana columbia
cgcgaccgccaattcccgtcgacccacctcgttctcccatttttatcttcttcctgtctgaatttgatggtgttttttaggaaaagccatgtaggatattaccacttgttggacaatggaactggaatgggaagctgtttgtgtgatatccccggagcaggtccaagattgtggcgcctggccactgtgtatggtggatggtcag

SEQ ID NO: 180892 - DNA, 325 bp, Arabidopsis thaliana columbia
ctctctatacccatttcaacttttctctctactttacccaaaatactttctattaaacttatcaaaaacaaacttacattttccacaccataatcatttactatcattccaccaacactcccttaccttttcctatcacatatccaactctcctttccaatacccaaatcattattcaacatctactataaccatatcaatttttcctgcattcaagcttccaaattactcttctatattttttttatccaacatatcatcctctttctattaatttattaaaaaacatttcccattttcatatctttaatattcctatccctaa

SEQ ID NO: 180893 - DNA, 393 bp, Arabidopsis thaliana columbia
gcaagcgcttgcctgactgaaatgtgaagccggatggtatatatctgtttgatgtcttcgaggagtggtatccgcatcaagccggagatattttagctgtaataatattaagaagtgaaactctggtctgaatcagtcgccggaaaatacactccaactcgatctcaagctcctcaacagtgatctctgcagcctccaaccttgtacttgcgctccgcatcgctacttcgtcccacgcatcatcaaagcagcaaaactgcatcgtaaagatagaagaaaatgaccctatgctcggttttctctggagccaaggaacacatactagtgagaacagagactcaaccatagtcacaacggctcttctcacttctttcaaaacctcagcaacaaaca

SEQ ID NO: 180894 - DNA, 394 bp, Arabidopsis thaliana columbia
  unsure (1)..(394): unsure at all n locations
ttcataaatggcnaaatcttgcatttcgtctagatcttatnaatcggggcggggcttatttacgaggcggttcctncacaaangtccagataccgtggaagagcttctcgaaagacatctatcgaagaaagagaaaccaataatcgatcactatgaggcttattttctgaatagacagcgtctgactagcacgctccgtgaagcgtttattttgtacagagacatattacgagcgactctgttcttcacgttgattgatttcagtttaaatttatttaagtaccttttgagtgagagcgcgaggaattaatttaaacttctccattttatactgattccttagttttctcaagtctttttattattattaacctctccctttttatctttttta

SEQ ID NO: 180895 - DNA, 312 bp, Arabidopsis thaliana columbia
cggccgaacccggcgaccgacctcgagaaaactctcttttttgttctccttatcctggaataaaggcgggctttcagatttgtatcatcatctaagtaaaaggtgatcaagttacaccactattgccaaaagctgcgcgtatgcttcaaggtttcaggcttaagtggtaccagagctctatttaaagctcacctacgactctcatctgattaatttctcgcatccgtgtgcacactgtttccggttgccacccagagagaaggtactacttgcctgactttatgggggtttgtgcgctcaaacgtgtgtcta

SEQ ID NO: 180896 - DNA, 245 bp, Arabidopsis thaliana columbia
ctctttcaattaatgacatttttttctcactaaccaactggactgtgagaatgcagcatctctctcttcatacactcatcacctttccatcgacttattctccactgataaaacacggattaaggatggagaccctaaaccaaaggtctctactacaaagggggctggatttcgcagagacgcggctgttgaagcaacgcaactttttgctggccagctcactgcaccttttgggagcatgtcgt

SEQ ID NO: 180897 - DNA, 57 bp, Arabidopsis thaliana columbia
aaagagtatagcatatctccgaaaatgacatccttattcaagaagaacattaagaag

SEQ ID NO: 180898 - DNA, 186 bp, Arabidopsis thaliana columbia
cataaggttggtaagtaatactctcttttctctaggttctaccacttcaaacccgaatcagtttcaaaagaagaggtggatcctatctcacaaaaaacactatctatatacttaacacatgctattttctactattaatctacccatatactttatcttttataaatttttattttatctttattt

SEQ ID NO: 180899 - DNA, 75 bp, Arabidopsis thaliana columbia
  unsure (1)..(75): unsure at all n locations
cggaangggggggcgacccacgcgnccgagagancnnaacacaaaacaaagcaaacaccaaaaaaaacaggagag

SEQ ID NO: 180900 - DNA, 328 bp, Arabidopsis thaliana columbia
aactatctttttttttttttcacttttttcattttctgtgttttttttttttttttgcgggggggaagaaaagaaatttattaatgggtgtaaacaacaaaagccccacggatttgtaaaaatcgcacccccccaaaaaaaacaataacgtaaattcctgggtacataaaaaacctacatgacaaagtttaaaggccatgcatccccctcaggccccaaccaaaaccagcctgcacttttggggggtcccacccgcaccacagttagaaagcgaaatggttatggatgagatcacccaagttttgcaagcttacatgggggcctcaca

SEQ ID NO: 180901 - DNA, 429 bp, Arabidopsis thaliana columbia
tgtgctgctagtttttgtgaacgatcagattcaattatgcaccgtgtacatctactggagaaccgtttacatatcaacccactagacgaagagaaatgggttcctggcatgggcaccatccactcagctttgaatcggaaatgtctccctttgtgctccactcacatcagtgatgtatacttgggtaaaataacccttcaggatgttgatagtagttcattcatcgatctcaggtgatgtctgttactctcttctacaattggttataacatctgcacgagagtaagaagtaaaaatggccattgctgagatcaggcgaaaatgcgtgccaacagggtgtatcacatacacattttgtcttgatttcatcatgataggaaaatgaatgaatacttcataagcaactgtctggctgcgcaatggcatagt

SEQ ID NO: 180902 - DNA, 311 bp, Arabidopsis thaliana columbia
gctaggagagctggtgacttgaaagtgatcaagacgtttgggagacaggtgagaagttatcgcttgaccggtgggactcaccctgtgcttgtaacagcggatggtggactgcaactggagggacatgaaagctcaagcctggagacagactggtggctacatgcgagcagagacatggaattacccaagaactcatcatggatgagctggaagaggctgtcagacagaacacagtctggaggacctgtcttttttttgagaccgttttactttggtttagctcatggccaacacttcgagcagatcacaga

SEQ ID NO: 180903 - DNA, 383 bp, Arabidopsis thaliana columbia
  unsure (1)..(383): unsure at all n locations
cggacgcgtggggaaattttgaaggttactgttttttctctttggggtcaaaattttaacagaaaggaggggaaatttgtgtctgaaaaatgtggtgtgcttgctatcatcagccattacctgccagttccgtcgtgttgaatcagcaggcgaagcaagaagagagtctgagaagaaaacaagtgttcttcttcttatcctcatcatctccttcaagcttaagcaccaaacatcaatggcaaatcagtaattatcctaaaaatgggttcagactaaaaccaaaagcgagtgtgttgcctncttctgagtctggtgatatcactacattcctctttggtagtggagcaatgatctccatgtatttggtaaccaattttctggtt

SEQ ID NO: 180904 - DNA, 383 bp, Arabidopsis thaliana columbia
  unsure (1)..(383): unsure at all n locations
gatttccttgacgtggggaaatgctttgtcaccatggggaagcgtaagatacgtgacatggacgataaggaaagcattgtgaacatattgggggataatgaaatggatggattgctgggaatggacgctgaagaggtcgattgaaagtgccagggggtcgtctgaagaacgatgtggcaggaagagaatctaagaagggatgactatacactgtgattgatgatgcactgaaaagcggtaaagcttactactaatttctatatatacaaaagccggtgtaattgtttgggtgacccaatttaactntttgcgatatattctaaacagataatatgactggctcttttttgggatccatcaagagataataaatctaatatttt

SEQ ID NO: 180905 - DNA, 204 bp, Arabidopsis thaliana columbia
gaaacgggaagcacgaaatgtcttatcgacgccaggagctaagcgtctggcaaacggggaggctgtgcttgaatctaaaattcacctttcatactattgcgactgcaaccctaacattctggccgtcattaagacatcaacgacactggagacgcttcggaccgatacacaaccgatgaagggataagagcctgcagggggttt

SEQ ID NO: 180906 - DNA, 343 bp, Arabidopsis thaliana columbia
gcgccgccattcgtcgccacgcgtcaagcttaacctaccgtaattttcgacatgccaccaaaacatccgggtggatcaagaagaggcttaccccaaccacttaggcgggctcgtggttatctgcttgatcttgctcgcgctcagctcgatgcttacagacactgcatggacaccctcttcggctgtcgcgtgcttactatgcttcgctttgcgtgcttgtgcgctacattcgggccttaccctgcgtccttgggttactcgggtactactctctcgggatcttcggatgtactttggtcgcgcgtgttctctagctgcacgtgcagcatcagcgtcgctttgc

SEQ ID NO: 180907 - DNA, 364 bp, Arabidopsis thaliana columbia
gacgctcggtcaacgatcccttttgcattagttagttgatcgaatgattgaaatgggtcggtggatgcttgaggagaacttggcactgattccctcatggctcaatcgagttgatggcgaattgacgaaccccatgtcttcgccagggagtgtcattgcagctctaaaaggcctaaaagcagggctgctgggatcatatagttcttatggcccataagcttccagtgaacggctctttaaagctcggaagaaacagctaccattacaggaggtactgagtgccatagcttggaactgtattctatggatgctgtgattcgtgcatgttgaccaactctaactcacatgctttaatgacagagta

SEQ ID NO: 180908 - DNA, 381 bp, Arabidopsis thaliana columbia
  unsure (1)..(381): unsure at all n locations
gcgccgccattcccgtcgacgacgcgtcatccttgtgttgctaaccctacattttttgcggaattgctagctcggggtggaacatctgagccagctaaagaaccacaccaccaaaactagccaaaccggcgtcacatttgaaagctccaacctaaacgatctggagagcgaagcaacgggagctaacaacataggacttaaggggtccacagaagtgatggtcgtcaaaagacatgacctattaatacaaagactggagagagccgcagaaccatncttactggaaaactgtgggagaaacatgcaggctgatgctgatcttgacatgagacactttttcaacattctacacagagcacggtgtttggtgtgagactgaca

SEQ ID NO: 180909 - DNA, 187 bp, Arabidopsis thaliana columbia
gcgccgccaattcccgtcgaccgactcgcaaagatgagaagctatggaatctctcaatggaagactaagtgtaacgcattggaaacggtgcagtttggaaccggtaaaaaacagagcggaatgtgagagaataattggattcagactgtgcttgtcgagttttagggagactgcatcgagcggtaga

SEQ ID NO: 180910 - DNA, 351 bp, Arabidopsis thaliana columbia
  unsure (1)..(351): unsure at all n locations
gcgaccggccggaatgccgggtgaccgagcgtcgtgttttacatggatgtactgttgaggatgataccttaggatggtcgacactggtggtggtgtgggaaaagctgntggtgtgtggcactgacacaaaacaccaaattctttggaaggatgggggaaacccacaggttctagaagctactgataggaatgtttatcttagcagacaaactctaaacctgccaggctacctgcaaaagcaagcttaatgtgatgattcaaagtctccagaagatcttaaagcaggattgactatgctggataggggaaactcacagacttactcctacacatctgctgtaagaccacgtc

SEQ ID NO: 180911 - DNA, 459 bp, Arabidopsis thaliana columbia
  unsure (1)..(459): unsure at all n locations
aattctcttttccctttnataactttttatcctttcnananacacnccctcccatggcccaagttctcttttaaatataggagggcccccctctcctcctctctctttctcctaccttccttatctcctctcccctcttctttccctttctcttttttcttatttttctcttactccttcattcatctattatccttcttttctttctcttctttttcccacatctccattttacctccatctttcatactcccttcctctttattctccctcccacctttttctttttctctatctgtattagccattcattccttccttttccttcttccccctattcttctccttcttctttctctccctcccccttncttttcttcccccccttcccctttcctcttattctcttcctcttctccttcctacccccttatatattatctttctctccttactttt

SEQ ID NO: 180912 - DNA, 357 bp, Arabidopsis thaliana columbia
  unsure (1)..(357): unsure at all n locations
gcgtccggtatatatgcatcctgatatttatgtggtttttctttcatatgnagatcactatgtataaaacatttttttactgggagccgtcttcatatagttcttcactagcttctttgataaagcaaagtcctatttagagatattactaaaaagatgcttggccctccattaacggtccttgatccaaatgcatactgtgtgaccaatggctggcgctcctaattgtatcaaactcatacgccagttttctcatattttcaccactcataactttacagttctactcccataatcgacaactgttgtggtgggggggccattcccttttatcctttacttattctctaatacctt

SEQ ID NO: 180913 - DNA, 274 bp, Arabidopsis thaliana columbia
gccgaattcggtcgaccgactccaaaaagagataaaaatggagagctgaaaatcgctaaagagtggcaaacacccatggttcacttggctgatgaggcaaatacaaactttatcgatcgatggttgtcagaagagagacagtaacggagacggtactatgacattcctacacgcttatccataaagagcctttctgctgttggctatcgggatcaagataagagctgtggcaatcggctgcaatgaatgagctgataatttgcttttgctgtag

SEQ ID NO: 180914 - DNA, 246 bp, Arabidopsis thaliana columbia
  unsure (1)..(246): unsure at all n locations
agctctgtcttagctcttccttctttcaccatttattacnacaatgtattaaactgaatacagatcttatacaaccgggcgggccctacgtttctcaataataaattcattctcaatttaaagtcagaactcattatcccatcataatctaatcaactcaccatcaaaatttcactttccaaattaataattcgtgagctttacaatcaaatattttctcacattgatcatttcccttcttgtcca

SEQ ID NO: 180915 - DNA, 404 bp, Arabidopsis thaliana columbia
  unsure (1)..(404): unsure at all n locations
cctcttttttctctctctctcctccttttcttctttccacgctnncccnccagggctagttcttttttgaaaaggggttcccccctcctcccctttctttttaatccctcctctttcatctattttctctcccctcttccatttttcattcctctccatcttcttccttccttttctccccttcctcattctttccttctccttttacttttttctctttctctcctttttttcctctacccttcttaactcttctttctctcccttttatctccccttttcttcttcctctctctctctcttctctaattgtgctttcctccttcctttcttctctcattcacctttcctttcttccttccctctcttttttctttcatttcccctattcctccctccttcct

SEQ ID NO: 180916 - DNA, 472 bp, Arabidopsis thaliana columbia
  unsure (1)..(472): unsure at all n locations
gcggcgagctanagactctctaatagagagaaagagagagaaacacaaacacgcacacataacgagtgatggtanagagagatagagatctggaaggtnacgtcgtatgagattatggcggcggttaggagaagagaacgagatgtggttgaagagaatggagttacgacgacgacggtgaaacgaatgaagatggaggaggaagtggatttagtggaatctaggataattctgtctccgtgtgtacaggcgacgaatcgcggtggaattgtggcgagaaattcaacatgagcgtctgataccaagtgtgttatagtacgacggcnaaattctcctccggttgaagaacagtgtcaaatcgaaaaagaaaattcggcggtttcgtgttgttctacattggaagagaaatcgaaacggagaatcgaatttgtagatcttgaggaaaataacggtgacgatcgtgaaacaaaaa

SEQ ID NO: 180917 - DNA, 447 bp, Arabidopsis thaliana columbia
  unsure (1)..(447): unsure at all n locations
ttctcatnccaatttctctccgagcgtctggcgtactccgatcaatgctggaaagttttcttaacacctcatcgaccatgatcgagtttccatncgatctaatcaatcaatcatcagatttgatcttctcaagaagatgagcttgaagggtacgatcgtattactagggctcttatggagcttccaggctacgttagggattagattcgtgatagaccgtgaagaatgtttctcccacaaggctgaatatgaaggtgatacgcttcatgtctctttcgtcgtcatcaagtctgactctcaatggcattttaacgaggatggtgtagatcttgtgatacatggcccaacaggcgaacaaattcatgacttcagggagcagataagcgcaaagcatgattttagtgtccaaaaaaaaggggtttacagattctgtttcacaaacaagtc

SEQ ID NO: 180918 - DNA, 293 bp, Arabidopsis thaliana columbia
acgtactcgtgcttgctatatcaaagagacgggtttatgtaaaagggtgatccataatgtatgaaaaagcacacacaacaagcttttcttttttttttaatttctaaaactccattgtcgggcgggcgttttaagtactgtggccagttctgtttatgaagaacgtttgatcccttagtccttagcgcacggatgaaaatctgaatggtgaaggcggggctctccgccgtggttgataatacgaggccttcgaggtgcaaacggggaatcaagctgaaactcacctttgagtg

SEQ ID NO: 180919 - DNA, 154 bp, Arabidopsis thaliana columbia
tggaaacgagcacgagcaccaggagagttaccgttagattctggtttgattttttgtttctgtatcaacgttttgggattatgatgttgaaattgtgagacttggtttctcttttgcgttttattttcaatggttattggataatgtttctact

SEQ ID NO: 180920 - DNA, 299 bp, Arabidopsis thaliana columbia
ttattttttttttttttcgggttgtatattatatatttttgcggtgtttttaaatttatttttttttttttttacagagaaatggataaaaaaaacaaattgttacggaaaaaatttacaaaccaatacaaatattttatggactaatgaacctatacattataatattaaaaacaaaaagtataattatctaatcaaacaactaaaaaaataaaaaccggttagaaaataaacaattttaaaaaaactaatatgcgggggggggggggcggggtatttaaaaataatatttttaaata

SEQ ID NO: 180921 - DNA, 373 bp, Arabidopsis thaliana columbia
gatttcttccccaatcttcttcttcatatccttgaaggagagagtatagagaatccgatccaaaggccctaaaccccatttcccgcggattttctcccaagctgatacggagatcaaatgggagatccgttggagaggttgggttctcaggcatcaatggctactgagtctgtcatgaaggaggacttgtgtttagagatcgatcctcccttaactgaatccgttgccaccgctgaagattggcgtcgtgctctcggtaaggttgttcccgccgtcgttgtactccgcacaacggcttgtcgcgcctttgataccgagtcccccggtgctagctatgctactggttttatcgttgataagcgacgtgggatca

SEQ ID NO: 180922 - DNA, 230 bp, Arabidopsis thaliana columbia
gcgccgccgacccgggcccacgcgtcgtttagggcttggccactttctccaaaacctttttaaactgttcgaaattaagcggtgttcctttaggtttgttattgtcaggacccaacttaactatagacgtcctaaaaaggggttgtatcaccatatgtcaacatctaagagtacagcttttgtctcgcaaccgcattaacatgaactgagggcttcactactccaccttt

SEQ ID NO: 180923 - DNA, 365 bp, Arabidopsis thaliana columbia
ccgccccgtttttttttttttccggcccggtttttttttttttttttttcccccccctaaaaaatttttttcccttttcctcaacctttttttgttaaattttccaaaaccaatttcattcaaaaccttccaaccatttttttttccctaaaggtttcaccccttaaaaatttttttaaccaaaaccaatttccttaaatcccccctctttttttttttttcaaccataatttctttaatccgccctggggggggggaaccactttttttttttttttaaaaacaagttttttccccctaacaacaaatttgttcgtacacccctctttccctttttttcttaaaacccaacccccctcttttaa

SEQ ID NO: 180924 - DNA, 366 bp, Arabidopsis thaliana columbia
catgcggctatgttgaactctcagtatatgttgttgtgttcagcaccggacctatcctgtgggtgggaaagatcctggaacctgtctgggattccacggagtaccttaagtacatctttgtggcgaactgccttacgcatctgtgtgttatcgttacactacatagccttatactacataacgaggctgaaagttgacctatatatgcccttagctggtattcatggtgtattgtgaggccttcttgtttggataaagcagataatacctgtccaggacatattgctggtcaagataaatgcagagtggatgccctcaattatgctaattatgacaatagcctcaagctacatcacactagattca

SEQ ID NO: 180925 - DNA, 470 bp, Arabidopsis thaliana columbia
  unsure (1)..(470): unsure at all n locations
acacctttgaagaagttatctgaaggagattctttttttgaagttgctattaatctaaatctggagagttctgtagcagctctcaattttgttttgaaggacgaagaaactggggcgtggtatcagcacaaagggagagactttaaggttcctcttgtagacgatgttcctgataatggaaatttgatcggagctaagaaaggatttggtgcccttgggcagctttcaaacatccctctcaaacaagataagtccagtgcagagactgattctattgaagaaagaaaaggtcttcaagagttttacgaggagatgccaataagtaaacgtgttgccgatgataactcagtcagtgtcactgcaaggaaatgccctgaaacatctaagaacattgtattaaattgaaaccgatttaaccgngtgacgttactgtccactggggagtttgcaaaaacggcactaagaaatgg

SEQ ID NO: 180926 - DNA, 121 bp, Arabidopsis thaliana columbia
agattaaaaaaaaattcgattatatattgaaagagtagtatgagataaggaagaggtgtttcaaatgatatcttacctattcgggcacatttcagcgtcacaaactttgttttcacaccgt

SEQ ID NO: 180927 - DNA, 387 bp, Arabidopsis thaliana columbia
tttacgccacgaggccgcgtccgggttccaggtcgcgcccgcgtccggggaaaaatcagaaaaatgggaaccctaggtctagcgattcacactgtgggtaatcggattcgtggaactgcccaagcccaagctcgcgttggttctcttcttcaaggaagccaccacatcgagaaacatctgtcgaggcatcggacgttgattactgtggctccgaacgcttctgtgattgctgatgtgcagagcaataaaggctcgctcattacgtatgcaagtgcgtctcgtgtatcgcagtatcctcgtgcaatgggaatgggacaggtccggagatttatcggagatgtttctcacatgcctgaaatggaagactctgacgttctgaatgcattc

SEQ ID NO: 180928 - DNA, 408 bp, Arabidopsis thaliana columbia
attaacgttaacgttgaggcagaggaagaagaaggcggtgacggtggtagctcaaccaacgtggaggtttctcgatctggtaaccaaccggattgtgaagctatgagtttctccaatcagatggaaatcggcgttcgcaatacatattaccagtttctagagtcgaattcagattctggatcggattctatgtatgcagaacctgaattcatcgatttcttcgatcgagagtcgtacgaggtcgacacggtccgtgaggtttgtgtaagttcgaatcagagggttagtactccaggttatttcaatatttgggatcaggatgtagatttagggcttggaatcgggttaggttcaaggtcgggttcgggtcagttacctggtgattcaggtggggttggggtcgaagtt

SEQ ID NO: 180929 - DNA, 124 bp, Arabidopsis thaliana columbia
agcagtccagattttctctaggataaaaattcagtctatcttttctccagatcagtctctttcattagatcaggataaaccatacatacgatcccatttatttcctcttcctatgtttctaggc

SEQ ID NO: 180930 - DNA, 457 bp, Arabidopsis thaliana columbia
gtctctgcaaacaaaggaagaagaatcaagatggctctggaaatctgtgtgaaagctgctggtggtgctcctgatcatctcggcgactgtccgttcagccaacgggctcttctcacactcgaggagaagagtcttacctacaaaatccatctgattaacctctctgacaaaccccagtggttcttggacattagtcctcaagggaaaggaccagtgcttaagatcgacgacaagtgggtgactggttccgacgtcatcgttgggatactcgaggaggagtatcccgatccaccactcaagacctccgctggatttgcctcttgtggatcccacatttttgggtacctttggggacattcttggaaagccaaaacctcaatggaccgatctgaacattccccggtttgttgagctagaaactttggaaaaccatctttagaggtacgatgggcccttt

SEQ ID NO: 180931 - DNA, 56 bp, Arabidopsis thaliana columbia
  unsure (1)..(56): unsure at all n locations
atcttcttcatctttgagtcagctncttttttgaaacttgatatccccgtaatggg

SEQ ID NO: 180932 - DNA, 418 bp, Arabidopsis thaliana columbia
cttcaaaagaccaaaactagtggaacccatataccgtaccatgggggcacgctcttgtgttattgccataacagaacccatcatccttctgatttgtttaccttaagccacaacttaaaccctaaacctccatatttcaaacccttttctctcctacatgtatcactgcttcacttccacttttcatcaacctcacgttcccaagccctaactatatgtatatataaataactctatatttgattcattaatttagggacaccaaatctattcaacctaaaagccttcttttcccctatattgaccaactgtttagcgaatcagaagaggaatggatgaggtttttcgttcttatacaccgcaatttctatcaagtgatcatcagcactattaccattaaaacgctggacgaccaaaa

SEQ ID NO: 180933 - DNA, 101 bp, Arabidopsis thaliana columbia
tcattgctcttctaactcgggggttatttttatagatccaacctttcccatatttacacatttcctataaaatttaaatatacttaaatttatcatcttct

SEQ ID NO: 180934 - DNA, 394 bp, Arabidopsis thaliana columbia
tttcttctccggagaatctgaaatcgaacaatttagtgtctttttctcagacattgtttacttctgagaaagcttaggtctttagactctcattacatgtcggaagtttcagctccggcttctttttcaggttgtgtattgtggagataaatctttggaaacaaagatgagggtgatgaagaacaaacacaacaagaaagcaacgtttttgcgttgttcaccgtttggtttagtatctacagttgtgggatgtgttttcatgattcatttaaccatgttatatagcagaagttatagtgtagatcttgatctttcacctcagttacttatccatcatccgattgtccgtgagctcgaacgcgttgaagaagagaatatccatatgccgccttct

SEQ ID NO: 180935 - DNA, 394 bp, Arabidopsis thaliana columbia
aaagaaagtagaaaaaaagagaaatagatatttccccattaatcttgtaaaattttcctttgcataatcctccgatcttttagtaaaaatttgataaaaacgaacagagagatgatgactcttaacacgctaacctgatccgaaattttctttcttttttgtttttcatcacagaaaaaaagaggattgattctttgatctcaaacaaaaactcttactttggtcactgtgatttttgattccatttattcttctttttgaagcgaatctgagttttgttttcatgtccgcgaggatttcatttctgaaaaatcccgatccgtgcaatcactttattgattataagcttagatatggtactgatggttacaaatctttcaataacttggttaga

SEQ ID NO: 180936 - DNA, 52 bp, Arabidopsis thaliana columbia
tttcttcctttgcttactgagacggatggtcaagagtttcatccagattcag

SEQ ID NO: 180937 - DNA, 92 bp, Arabidopsis thaliana columbia
  unsure (1)..(92): unsure at all n locations
cacgccccgtccggaccaannnagaaggatnncatcctcnntgatcanntgaggataggtatacccacgaaccacanngactctngaaagag

SEQ ID NO: 180938 - DNA, 165 bp, Arabidopsis thaliana columbia
cttacaacaattcaatgggagacccatttgttttagttgttactggtaccaacaaagggatggtttttgatgatagaaggcagctatctaacaatgggatttactgtggttttaactgtgagagatgaatacaaggatattgctggtgatcaaaagctccagact

SEQ ID NO: 180939 - DNA, 131 bp, Arabidopsis thaliana columbia
cgcctgcacgtaccgactcggagttcgggtcggcctacgcgtgcgcgcgagcggacgtccttaaaaaaaaaattttatgttttatataaaaaaaaaaaaaaaaaaaaaagtttaaaaaaaaaaaagggggg

SEQ ID NO: 180940 - DNA, 422 bp, Arabidopsis thaliana columbia
aaagatttgtctatatttctgctgcggatttcggattattcaactacttgttgagaggatactatgagggaaagcgagctgctgagaccgagctgctcacaagatttgcatatggaggtataatcttgcgacctggttttatatatggaactcgcagtgttgggagcatgaagatcccgttaggagtatttggttcacccatggagatggttcttcaacaagcaaaacctctgaaccagctttcattagtcggacctttgttcacaccttcggtgaatgttgaatcggttgcaaaagtcgcagttagagcagccacagatccagtgttccctcccgggattgtggatgtccatggaatacaacgttacagccaacataaatcgagataagtccgttttgaaaagcttaagtatgctcaatgt

SEQ ID NO: 180941 - DNA, 421 bp, Arabidopsis thaliana columbia
gtgattatggacaagttgatgaccatgtcgaatacattgcggataataatgacaagacaattgtcgccggcaatgggaccgatgactctgccgccactgatcttgtggatggagaggaacaaaagaagaaggaaccttttgcagtgcctactgctggagctttctatatgcatgatgacagatttcaggaattggatgccgcctctaataggcgaatgcgtggtggtaggaggctctggcaatccagagatgaaagaaagtggggacatgacaaattcgaggaaatgaatacacagaaacagcaatatgataggaggacttcgagaggccgaggcagaggtcgtggtcagggtaggggtcaggaccgtggacagtctcgggggaacaattctaaagaatttactggcaatggacaccaaaa

SEQ ID NO: 180942 - DNA, 61 bp, Arabidopsis thaliana columbia
  unsure (1)..(61): unsure at all n locations
cgtaannaatcagaattaccaaaccaaaaatggggttttgctaaaagtctnntcctctcat

SEQ ID NO: 180943 - DNA, 301 bp, Arabidopsis thaliana columbia
gttggaggctccgagttatctggtgtcaagggacttaccatcttcatgtgaggaagagagcaagtggatatacaatgcacactgtgtgcttcagctctccctaaggaagcgtttgttggatgatactgatgtagaaggaagttccgctaagaaaatgttacgggttgatcatggaagcagaggtgaatctgacaagattacagatagtcttcagcttgctaaaacctatcagagctctaaccagagtcaacaaggtggtggtggtgatcaacagagttcaccagttactcggcttgaccaa

SEQ ID NO: 180944 - DNA, 353 bp, Arabidopsis thaliana columbia
  unsure (1)..(353): unsure at all n locations
aaaaaagcttcctttttgggacgaagtttcttagagaatttgtgattccgattcttagggttttcaccaagcgttccttcgcgacgagctctcaatttttgagtctcgttggcggcgcaatcatcatagactttgggggatcgcttgtaatgagacgaatttcaaagtttggtatcttttacttgcctgaattgaccaattcgacttttatatagagacgtctattagggttttgtgttgctaaggaggtgggattattgtgtactagagggttcttttagcttctangaacatgtctggtggaactccagttggtggtggtggtaacatagggcaaagacatagccaaggtt

SEQ ID NO: 180945 - DNA, 327 bp, Arabidopsis thaliana columbia
  unsure (1)..(327): unsure at all n locations
gcgtnnccggcgtcctgggtcggattgtcggaacggagcnaatctcgtgttcgctcgatcaggattcggaggcgtgtgacacgagcgcgggattactggtctgacggcgctaanngcccgggcttttttgatacccgcttgggtggagacccgtcgctttgccgtgaatctgtngtgtctgctagctacgccgcccttaacgagcgtggccttcggcatttcagctgtgcatcctgggctgtctggccctgtgtggctttccccaaattcgacccgttcttgtgaacaacggactcaaggaagttctgtacatgggtgttgcgagtc

SEQ ID NO: 180946 - DNA, 234 bp, Arabidopsis thaliana columbia
  unsure (1)..(234): unsure at all n locations
gcgtccggagggctcttgaggtgatctcanntgggtagatgggctantgtttgtggagccttttggggttgcatttaacccgctgaaggttcattcataaaggtgggtccccgtgtggacccttcaaagatactcagtcttggttcaaagctcggtttcacaaatacttttctcgtaaggcggttttggactatcttaggcaaacccaaactctattccatgctcagagcattt

SEQ ID NO: 180947 - DNA, 93 bp, Arabidopsis thaliana columbia
ccggacggaagggccggcccacgcgtccgcgtacgcacaaacacatatatatagacaaagaatgttatatgtaaatggccaaagaccgtggaa

SEQ ID NO: 180948 - DNA, 97 bp, Arabidopsis thaliana columbia
  unsure (1)..(97): unsure at all n locations
gggggcggccctttttttttttttttgagggggtctattaaacggaccggnaatggtctggtatttaattctttacaatacaaggctttttttttta

SEQ ID NO: 180949 - DNA, 395 bp, Arabidopsis thaliana columbia
cttttgctcagtgacgtctcaagcaatgatttgtgtggaacaatcccaacaaacggaccctttgctcacattcctttacagaagtaagtttcttctttcacttagccaacaaagcttcttcataacgtttcctctgcattttgcattttttgtctcttgtaagtagtctttgatacagacatcaattgaatcatatgtttcgtataataaactgataaagttgcatatgagcatttgtacctaataacacaaaacaatggtgcagctttgagaacaacccgagattggagggaccggaattactcggtcttgcaagctacgacactaactgcacctgaaacaactggcaaaacctgaaaatgaagaattggggggtgaccttggaagaacccttc

SEQ ID NO: 180950 - DNA, 250 bp, Arabidopsis thaliana columbia
ccgacaccgaatgtttgagtttttgttgtggttgtgagcagaaagttgagatcaaggtggatataaactgtggaaaatgcaacagcgcaatcatggaagcagtcacagagatagaaggtaatgaacgaaaaaagactcaagaaatatgtgctcttaagtcttaacatatcatcttgaacatgagatttggtgcaggtgtgaatcatatttcattagatgaaggaaatagtatacttaccgtggtggtgac

SEQ ID NO: 180951 - DNA, 157 bp, Arabidopsis thaliana columbia
tcgatccgtcgaccacgcgtcgtagacacacactattaacaaaagatcgatttgggatcaatcgaggaagagatgacggggcgatgatagggaagccaggaagcattaggttccaacttaagtgagcccatgtgaaccgcctccaatgacccgttct

SEQ ID NO: 180952 - DNA, 97 bp, Arabidopsis thaliana columbia
gcgaattcaattcaccgactaaagacattctccggtggagaccccgatgcaatccactcatataagcggcggaagtagcggtggtggtggtggagga

SEQ ID NO: 180953 - DNA, 125 bp, Arabidopsis thaliana columbia
gtgtgagcatgcctttcttattcccgaaagacggcgaactataccggagcttttttaagccagtggaaacgtgtctcaaaatcctaaaatatttcttcatccttatcaatatattgacatgttaa

SEQ ID NO: 180954 - DNA, 461 bp, Arabidopsis thaliana columbia
attttatcggcgagctccactgtgagagctgccttagatacacaacctagacttccctacaaccctaatgcgccgcgaaaagttaagaaaatccctaacggtaattcattcttaccgccgccgtcacctgcaccgtctccaggaatcagcatctccgtcgccgatttgctcaagcgtccttcaagtaaagagataactgttgacgttgatgatacttatatgggatatgagacatggtctccaagtccaccaaagttggagaaaccaagatcagtcttcaatcctgcttctttagcctttataggcgattccatttatgagctatatgctcgtaggcattttcttttccctccgcttagtattgaagattataacgatcgtgttagagctgtggtgcgctgtgaagctcagtatgctttgctgaataaacttgttgatgatgactttctaacaaaggaagt

SEQ ID NO: 180955 - DNA, 143 bp, Arabidopsis thaliana columbia
cgtccgatatatcgttaccagagaaagagagctcagagatttagttagcttaatttttcttttcgttttgaaattaaggaagtgattgttatcaccggaggagagagagaaaatgttgggaattttcagtggatctatagtat

SEQ ID NO: 180956 - DNA, 229 bp, Arabidopsis thaliana columbia
actgaatacacttttctcatatatgcatctttttttggagattaccataaggtaagctcaggcttgaacctcaaagttgatcagtgagtatcaccgagcccattcaggtggaacggtgggcgttaagagctgcacaaactattccctagttgtgatattgttactcttagcaaagttcagcgcttttcttatgatgtaccctgctattttgaatcttcttacttcggta

SEQ ID NO: 180957 - DNA, 106 bp, Arabidopsis thaliana columbia
gcgtccgtgcagttgttactggttccaacacagggattgggtttttgattttcaggcaactagcttacaatgggataactgtgggtttaactgggagaggttaaaa

SEQ ID NO: 180958 - DNA, 240 bp, Arabidopsis thaliana columbia
cacaaagtctcatttctcgttaatttccattttcgttatctctctctctcgccgatcaaaccctaggtgtatcaattcgttcagattcccggcggttggtctcactgtcatgtaggtttgattcatcttctcttctggatcttgagtgactaagagagatgagatcttgtgtttttttagagagatattttctttttttggttttccttttcttttttgtagactatttgtttttttttt

SEQ ID NO: 180959 - DNA, 215 bp, Arabidopsis thaliana columbia
gaatttggggccttctattcccaaaaaattctttttaaccaaagggttcctgccttgattgcggctcaaaaaccaccccctggaaaccctatttttcccggggggggggttcccccggggaacccccctttaagggacctttgcttttgctggggggggcccaaaaaccacaccggtttctttgtggggccgggatggcccccctttttaaatat

SEQ ID NO: 180960 - DNA, 323 bp, Arabidopsis thaliana columbia
cttgtagagatttggtagatattaatactgttgagagccagtctcaggctgccggaaaaagcaagagcaatgatctcatgtcaatggaaatcgatgaaggtgtcttaacatctgtcactatatcttccgagccattgtattgtggcctaagtgttctttccaatgttattgtggaaacccctacagaaatctcacgaaagggctcaggagatcaaggtgctacaatgcctaaatttagttcaaagaatcaagatggagtgatgcaagctgcaaacagaaccagaaattcttgccttggacctgaaagtgcacctttcaggttc

SEQ ID NO: 180961 - DNA, 103 bp, Arabidopsis thaliana columbia
ctgaaatcattttgaagcagaaatcgatttccaaaatggctcttgttcaatccagaacttttccacacctcaacactccgttatcgcccattctatcctccct

SEQ ID NO: 180962 - DNA, 451 bp, Arabidopsis thaliana columbia
atttcccgcggcttcatagagatgattaaatccatatagcaatttcaaaaccacaactacatcagtgtctcagtaaaattcaactattcataaaaccattgaaaatggttaccctagatgtgtcaaaggtaaacaacacttgccaaaataaacttgggctttactagtagagatattcaacacatggaaacagatatcagacattagcaattaatattcgttgagtgtgatactctgagattcaaacttgggctcaaatttctgatcttacaaactagtttggatattatggacaaagagtgacatttgtcagagacatatagaaactatcatacggaactatgaagagagacaagaatgacccacagatattaatgatgagcatatgatgcatatatacatgattcattatcattattcactttgttttgcaaaaatcttttggtacatt

SEQ ID NO: 180963 - DNA, 345 bp, Arabidopsis thaliana columbia
ggatttgcttttacgaacagagagcgagccagatagagtgagtaagagagaatgacgagcgtgagtgggtgtggttcaactagatcaataacttaccgctgtgcttttttaccaaaccaattttaacaacgacacttttttgtcaaaccttactcttcctcctctatctactccgctcttgtaagtcatttaagttcttctgatccacctcaagagaacaatctatggtctatttggtcacactatctaatgttatcttcttatagtttattttttttttattttataatcattgatttattatttcttatatttgttatacgttttattattctatttttctta

SEQ ID NO: 180964 - DNA, 176 bp, Arabidopsis thaliana columbia
cccgccacgctccccgccagttggggagcgtgtgtttgttccacccgccggcttttgagggtgtcccccggtgggaaggattctaggggctactcggcccttctccttgaaaaacacggccaaaggatgtgtcgggggagaaggaggttgccaaaaggagggttccctttgttttt

SEQ ID NO: 180965 - DNA, 203 bp, Arabidopsis thaliana columbia
ctctgctcgagattttagtaggaggcaagctcgattgcttgcaattagatccatggatgaagaagaactcacactttctcgcgcgtttttagctcaaggagatttttgaagaagtggtcgttttcgaattgtcaacttcagaagaagaatcaactttgggttttttttttaccttgtctgtatagctttgaaggaggcgcttt

SEQ ID NO: 180966 - DNA, 107 bp, Arabidopsis thaliana columbia
cgcaaaattacgccattggtagcacggtataaatttaatagcaatgtgaaatttttatgtgctacattggactatgatgcaacattctcacctctgtgttattttca

SEQ ID NO: 180967 - DNA, 123 bp, Arabidopsis thaliana columbia
aaagatgccaaaagacaaagtttgttagatgcaatggttcgtgagtttgaagccgttaccgagggtgtgtaaacaactggaagatgatgggcgataccaaagctgaaggaaacaacaattttg

SEQ ID NO: 180968 - DNA, 91 bp, Arabidopsis thaliana columbia
agaaaataaattttcaatctttcgtcggaaaatttaagaagaagaagcagagctgggtttaggggttttactagaagcaaagggatcaata

SEQ ID NO: 180969 - DNA, 118 bp, Arabidopsis thaliana columbia
  unsure (1)..(118): unsure at all n locations
aaaaaaacaaaaaaaaaacctaattagttttttctttctgcagagattatggaggtaccggtgattaatagaataagagatttngaagttnnnntaaantnnattaatgatttttatt

SEQ ID NO: 180970 - DNA, 330 bp, Arabidopsis thaliana columbia
  unsure (1)..(330): unsure at all n locations
nnnnnnnnnnnnnnnnnnnnnnntnnnnnnttnnnttnnnnntnnnnnnnttttttttttttttttttttttttttttttttttttttttttttttttttttttttttttttttttttttttttttttttttnttttttttttttttttttttttttttttttttttttttttttttttttttttttttttnttttttttttttttttttttttttttttttttttttntnttttttttttttttttttttttttttttttttttttttttttttttttnnttttttttttttttttntttttttttttttttttttttttttttttttt

SEQ ID NO: 180971 - DNA, 368 bp, Arabidopsis thaliana columbia
  unsure (1)..(368): unsure at all n locations
gcacttcgcaaaatcagagcgacaaaaaaaaataaaaaccaatcctttcgattccaaattttttgttactcactcgcacgagttttatttggtcgttagttatctctttcgttgaataacggttttaatttaaaccgttactttttatcaatggcgacttcgtcaccgtctctgagtaacaatggtctttcctccgtcgtcacgcctcccaaaactctccgtggtctcaataagcctaagtgtattcaatgcggcaatgtagctcgctccaggtgccctttttaatcttgtaaggggntgttgttcaagagcagagaatccctgcccgattcacgttcttaaagtagctttatcgcttgttgagaaga

SEQ ID NO: 180972 - DNA, 399 bp, Arabidopsis thaliana columbia
tcgagccacgcgtacgaatatagagagcgaggaggggattggtgaacatttttttttacagatatctctgcaaaaacggggaataggagaaccaaaaggttggtggtgtcaaaattcacgagtgttagggagctgaattgatggggaaaaaatggggataatatgggcgaaaaaagaataagattttatttggaaagagaagataaaggggttatacgagatgtttcctattgaaagagagatgggtgttgaaagccaaattttttgttgttggaagaggattttttttcaaaactatagtgttagttttaaaaatggttgtttttttttgttaaccttgtgtgttgtgctataaaattatttccagtaatatttttcatgaaatatattctttctatt

SEQ ID NO: 180973 - DNA, 71 bp, Arabidopsis thaliana columbia
gaaggttttgaagcttcagaaggcaaaggaaaattctgcttctaagtgatctagaccctattaggtgttat

SEQ ID NO: 180974 - DNA, 359 bp, Arabidopsis thaliana columbia
gccacctaccgccgctgtagccgcctccgtaggttctgtttccggcgccttgactcctaagaaatccacttatggatacgttagaagttctagcaataggcagagatcaagcactgatcctgttcttaaacccaatcagcttctagacaaggagctaaaggtcgaaggtgcggagacaaagcggttcgtgctggttcatggaggagggtttgtatgcattttgtaattatttttttaactgattcttctttaatcttatcatctttattcagaatttaaaaattattccatccagtctataattattactattactctccttacatacattatcttctgattatattcaatatttactc

SEQ ID NO: 180975 - DNA, 53 bp, Arabidopsis thaliana columbia
aacaaaaacacttaacaacccgccttttctctattgtgttcaacaacaaccac

SEQ ID NO: 180976 - DNA, 69 bp, Arabidopsis thaliana columbia
  unsure (1)..(69): unsure at all n locations
taaaaanaaataaaaccttctatgtacctgtcaaggaaattaagtggacatacaatattctctcctttc

SEQ ID NO: 180977 - DNA, 353 bp, Arabidopsis thaliana columbia
cgaaagccaccatcaccaccaacaacaacagctctatcaccttcaccaacagcaacagcaacagcagcagcagcaacgactcacttctccttacttccaccaccaactacagcaccatcaccaccttccaaccaccgtagcaaccaccgcttctaccggaaacgccgttccatcttccaacaatgggcttttccctccgcaggctcagccacaggaccagcctaatgatgggtcatcttctctcgcggtgtaccctcattcaggtccgtcctcggctgtgacggcgccgatggagccggtaaagaggaagaggggtcgaccaagaaagtatgtgacgccggaacaaggcctaa

SEQ ID NO: 180978 - DNA, 368 bp, Arabidopsis thaliana columbia
gacgatagctcggattccgggatgtacagtggagactactctgtccaagactcccggaaaggatccaacggagcttcctctgagttcacaaggaatgaaaccgagaaccgaaacttcaataaccggcgctactgatccaaaaataggtcaacttatacctaatcatccctcatgcttgagctctttgtacagcattaatgctctctttgaattttttgtgtgaagatacgtttcttgctagccgctacctttagttttgctccataattcccatttgcctcaaaagacttattataggtgagaacagagaaaagcaaccaaaaaagaaaaagaactcataaaagtttttaaagagggatttgaatctt

SEQ ID NO: 180979 - DNA, 259 bp, Arabidopsis thaliana columbia
ggacctcgccggagaaacaaacattcttatctccaccgtcgcttcttcttcttcctgttcttcctccgtgtcgtcaatcgacacaagcctcgattgcgattcgccacgtggcggagatgtagaccacgaattgctccacacggcggtttcggtttcttcgtcggtgtcggtttcttcgtcttcttctgcttcaatccagagagttcttgagcttaatccgatcggaggattgcgattcgaggctgtttgctgctaaaga

SEQ ID NO: 180980 - DNA, 61 bp, Arabidopsis thaliana columbia
gtttttgcagaaagtctctcatctgaactcagattattttcgagttcgtatatcttctccg

SEQ ID NO: 180981 - DNA, 118 bp, Arabidopsis thaliana columbia
  unsure (1)..(118): unsure at all n locations
gctatcgctgcaactgctgttcctgcgctagtgatggctcgtggncacaagatcgagaatgttggggagaggcctcttgaagtgaggggggcccccaaagccgtagtgaaaaccccaa

SEQ ID NO: 180982 - DNA, 130 bp, Arabidopsis thaliana columbia
cgaagttccgttcgactctcttctcgagctatattttctaccgatacaatgattatctcagagggtttccacaaagaaatgtgcaggttcctcttcaaagaatgtatttgcttttctaataaatattttt

SEQ ID NO: 180983 - DNA, 129 bp, Arabidopsis thaliana columbia
  unsure (1)..(129): unsure at all n locations
gaaagaaacagattccttcttttaaagtctcttacggatcttcaccttattactacttacatcatgttctacctgttcttattaaacactcggtcgntgaactagttgtcccgcacggtggatgcttac

SEQ ID NO: 180984 - DNA, 83 bp, Arabidopsis thaliana columbia
  unsure (1)..(83): unsure at all n locations
ntggnaaattttatcttctgaccccaccactggcatctttttatatacacattcatctgtgtaaggggggggaaactaaacac

SEQ ID NO: 180985 - DNA, 211 bp, Arabidopsis thaliana columbia
  unsure (1)..(211): unsure at all n locations
gcgtccgatttttttctttctaggttgcagagttaaaggagaaggttttcaattagggttttgtagagaggggggggagccgaagtttgggagtaccgtttaagcttcttcacgaggccttaggttcatatcgtgacggtgtagcttnnnagcggcgagctttacagaggaagtatgtttgtcttttaagccaacttgatactgtcttttt

SEQ ID NO: 180986 - DNA, 57 bp, Arabidopsis thaliana columbia
  unsure (1)..(57): unsure at all n locations
gccttattcgtctnnttcgttctctagtttttttctcagtctctgctcctaaaaccc

SEQ ID NO: 180987 - DNA, 123 bp, Arabidopsis thaliana columbia
gtttgttgatgacccttctctacacaccttgaatcgcatacgactcgagatcaccgattccatgaagcttcttcttcagctcaggcgtaaaatgctgatatgcgaagaaattagggcgagagg

SEQ ID NO: 180988 - DNA, 124 bp, Arabidopsis thaliana columbia
cgaattttgtgagtttcttcgagagttgaagatatatagactctagaatatggccaacgatacgggcacggatgacttagaagagcgttctcgataaatccttggattatttcaaggatattaa

SEQ ID NO: 180989 - DNA, 94 bp, Arabidopsis thaliana columbia
  unsure (1)..(94): unsure at all n locations
cggacgcgtggggaagaaaaaaagcaaagaacacttgatctttnnctagatagagatggaaggggggggggaggattttcgaggggggggtaac

SEQ ID NO: 180990 - DNA, 53 bp, Arabidopsis thaliana columbia
ggaaagaggaggagaaagcggcgcagatcttgttttttaccgtggtgacttcg

SEQ ID NO: 180991 - DNA, 57 bp, Arabidopsis thaliana columbia
  unsure (1)..(57): unsure at all n locations
acgntttcttttgaactgggagagagtatcacttttttgttgcaaatttattcaact

SEQ ID NO: 180992 - DNA, 127 bp, Arabidopsis thaliana columbia
ggaagaagaataagagaaatcgattcgtggttttttgtattattcaatggcggtttctactgtatgggggggtctattgccatctttgggcgttccaatctcttcttcttcttctaccacactcaaa

SEQ ID NO: 180993 - DNA, 255 bp, Arabidopsis thaliana columbia
  unsure (1)..(255): unsure at all n locations
tcggtcccttaagggtttttaagttcaaaactttctttgaattttcggtttccttccgtaccgttagttttttattggttaagttggaaaatggcatttttaagccgccaaattcaagttcttggcggaattggattgnnggggggtttttctttcaagagaaaacttaatggtaaaggggggacctttattccgaggaggggcttttttggtacaagaacccgtccttttttcacacacacatttggttttctt

SEQ ID NO: 180994 - DNA, 137 bp, Arabidopsis thaliana columbia
cggacgcgtgggaagaggatggtcatccctgatgttcttaaggtgttgaggcttcaagctgggaggagggagtgtttattggggggggttttttttaaagttgtattgtatcatttttacactattaatgtagttgg

SEQ ID NO: 180995 - DNA, 282 bp, Arabidopsis thaliana columbia
  unsure (1)..(282): unsure at all n locations
ctccaactagtcaatcggaattccaaatctctagacggagattctgatgccggaatgccatcaggttccgaggtaattttctctttgcctgtttgttgacatagacacacgcacgcttataggaaacgaaattgcgatcnnncctcgaatgctacatccatcgctcttctctgttttatcgatcaaatcggaactaactgataggatagttaggctgatatgggagtcaaatcggtgaggttctctatctggttcctttacgattgtactgatctagtgttt

SEQ ID NO: 180996 - DNA, 62 bp, Arabidopsis thaliana columbia
cagtgatcgaagttgagagtttgggttgaggtcgtagtctcggatgcctgaataagcctcac

SEQ ID NO: 180997 - DNA, 115 bp, Arabidopsis thaliana columbia
caacccctttctttagagaggatcgccgtttattgtttttccggaggcaatatgttctcactttggggtgtgtacattgtaggggggcatatcaaaggtatgacttcggcgaagg

SEQ ID NO: 180998 - DNA, 247 bp, Arabidopsis thaliana columbia
  unsure (1)..(247): unsure at all n locations
gttagatagctttctgaacaaaaggagagaatttttggatatagatagaatccgccatttaagagcccttccctttgacctggtgagtgttgacaacctgaaaagaaacaaaaaaagaagaagaccgctttattttgtgaacaccacctatgncttattgctttcttttctttttcgacgacttcttttacacatacaaaaggtgcattgattttgaagccttaaagtttttgtttttaattcttaa

SEQ ID NO: 180999 - DNA, 147 bp, Arabidopsis thaliana columbia
ggaagagtgatgctgtgtttctttttctttgtgtggttcaaaatttggtctgcgtcttgtgtgtgtctttctgtctagttcagtgggcactttgaataatgtaagaggacacttccaaaggatacttttacttgttaagttaacact

SEQ ID NO: 181000 - DNA, 52 bp, Arabidopsis thaliana columbia
cgtccgtgccgttgtttgagtatggtggaaatccaccatttttttttctact

SEQ ID NO: 181001 - DNA, 86 bp, Arabidopsis thaliana columbia
cgtccgaatcccggtcgaccacgcgtccggaaatgtttagaaaaggagcttggagataaacttttcaaaccctcatacgccttttt

SEQ ID NO: 181002 - DNA, 143 bp, Arabidopsis thaliana columbia
  unsure (1)..(143): unsure at all n locations
cccacaatggctatagctatggcgatcactctaatcctatctcngcacaacaaaccaacctcgtggtttttttcttcantcctgagtggccttcctccataattctcttcactccttatcaaatcatcatcaaaaaccatatt

SEQ ID NO: 181003 - DNA, 156 bp, Arabidopsis thaliana columbia
cttccccgaagcaaaacccttctccttcttggctgtgttgcggccatttttttcttctttctctcttctattctatctcttagaccctagatttgatctgggtttttcctgatttcatttagggtttttctatttaccttctttttcacttcctca

SEQ ID NO: 181004 - DNA, 52 bp, Arabidopsis thaliana columbia
aaaaaaaaaaaaataaaaaaaaaaaaaaattttttaaaaaaaaaaaagggcg

SEQ ID NO: 181005 - DNA, 219 bp, Arabidopsis thaliana columbia
  unsure (1)..(219): unsure at all n locations
gtttcatgtttacttccatggcacgtcttactctgtttctgtcttttctttctctagctttaggctctgttgaaaactgncgtgttttaagttctgcgtctgaagataacaactcctccatcttggtctccgatggagtccaagacagatccagcaacgactttctcagtcttaatccgccaaatctttccgagagtgcttgcgttcatgtctacggtt

SEQ ID NO: 181006 - DNA, 84 bp, Arabidopsis thaliana columbia
  unsure (1)..(84): unsure at all n locations
canctgcgtccggtagagagggagactctncattgttgacnagtgtgttcacttgtaactttcnntcctcaaaccaacccaatg

SEQ ID NO: 181007 - DNA, 246 bp, Arabidopsis thaliana columbia
  unsure (1)..(246): unsure at all n locations
ggaggactggtggtacgcgttttctgcttttttttttggnttntnagntnttgtactgttggttgtttttattattncgggggtgtttttttcattacttttttatactttttttctttcttctttttcttttttttatttttatttttttttttttttttttatttttttttttttatttttatttttttttttttattttattttattttttttttttttttttattttattttattttttttt

SEQ ID NO: 181008 - DNA, 81 bp, Arabidopsis thaliana columbia
tcagtccggacgatatgtgtctctttatgtagaacatagtcttcactatgctatctttatatctctgtattttgagagaga

SEQ ID NO: 181009 - DNA, 209 bp, Arabidopsis thaliana columbia
ccatcttccaacattttactcagcagctttatatggtgattccaccagcagtgagaccaccacgtctcttcgactgactaaggccttacgtgctgaaaatgcatttcacaaacaagcttgttcacgcacaagtcattcactcactaacaggcatagtggtttgctcatcgagctttcaagagtaagcattgtgagatacaatgtacatc

SEQ ID NO: 181010 - DNA, 60 bp, Arabidopsis thaliana columbia
  unsure (1)..(60): unsure at all n locations
gagaacgccctttttataagcggagancccaaatttgacgctttacaataaagaggaact

SEQ ID NO: 181011 - DNA, 120 bp, Arabidopsis thaliana columbia
  unsure (1)..(120): unsure at all n locations
tttttattattttattggtgggaatattaaaataggngggttgtgttttttatataatttattaatttattattttataataatttatttatttaatttatttattaaataattaatatt

SEQ ID NO: 181012 - DNA, 249 bp, Arabidopsis thaliana columbia
  unsure (1)..(249): unsure at all n locations
gttcgtcgtctctctcgccggacttgttcattcttatttcgtctctctctctctcgtactcttcttcaattttgtcctccgnagagagatcttgagatggcgtcgaggaactccgttgccgtaatcgctttattcgctttcgttatcgccgtcatctttccattcgccggcgctcaattcttatctcctgctcctttccccactagcgacggaacatcttattgatcaaggaatctcgtatttgctaat

SEQ ID NO: 181013 - DNA, 59 bp, Arabidopsis thaliana columbia
aaagtcggagccgcaagactcctttcagagacttacttgcagctatgggtaaagagaag

SEQ ID NO: 181014 - DNA, 54 bp, Arabidopsis thaliana columbia
gtcgacataaaaacatcttttccatccaatatttacctttttcctttcaccgaa

SEQ ID NO: 181015 - DNA, 61 bp, Arabidopsis thaliana columbia
acaggaacaaagcttaaagtcgtcgatcaaagttatgtgagttctctcggaaccttacggg

SEQ ID NO: 181016 - DNA, 60 bp, Arabidopsis thaliana columbia
gaaaatgggtgcgtacaagtatgtatcttatctttttaggaagaaacagtccgatgttat

SEQ ID NO: 181017 - DNA, 435 bp, Arabidopsis thaliana columbia
cgtccgacccataccatactattattcttaaccaaatacttttttttcatccccaacacctccatacgtgtgcggttctccaccacaaccctgcggcttaaaaatcccaccctcaccataatccattcatcttacaccagtcgttacactgacacaccttcaccataccttaatatcttaccacacaccaccaacctactctgcttgttcaaagatatacatcccgtggtcaccaccaccctatgtttacagatccccacctacacccaactacttctcttcttccaatgtccactacaaatcttccccaccacaatatgtctactagcttatcacccacaccatactactctccttctcctataaatactctacaatttctccccaccaccatatgtttactattatcccacatcttctaaacttcaactattt

SEQ ID NO: 181018 - DNA, 55 bp, Arabidopsis thaliana columbia
  unsure (1)..(55): unsure at all n locations
cggtgtgttcttcgtcttcttcttctcagaaaacatggttttgnntaaccgggat

SEQ ID NO: 181019 - DNA, 131 bp, Arabidopsis thaliana columbia
  unsure (1)..(131): unsure at all n locations
gattcagatcacaaagtacaccgagaatgtctnctcactctgccgccgnatccttctcttgctcgtccaccatctcaaagtgggtggggcccctcctacttcccctccttttttaccctcttctgtttcct

SEQ ID NO: 181020 - DNA, 316 bp, Arabidopsis thaliana columbia
cgtccactaggaatacacagtacaaggttcattctttcactcaagaagaagtgaactcgtttgttgatctttctaaatcgggggagaattccttttctttatctcctcttttaaaaatatcttatattcttcactattcttttacatttttttattacatctttattatctatttttcttattttctactattaattattattattatctttcttattttcttttctttatattttttttatttttattctttctattatattctccttatatactccttacttattccttttatttaactttattaatttcactt

SEQ ID NO: 181021 - DNA, 174 bp, Arabidopsis thaliana columbia
cacattcacattcttctttcttctcaaataaataaataaaaaacacttgttcatttacatcagaatgatcactgcaggtgtacggcggacctcatattcacataccaacctatacatccgtcttctccaatgatgtgcttactcattctcctctatacgcctcgcattttattt

SEQ ID NO: 181022 - DNA, 218 bp, Arabidopsis thaliana columbia
gccagtagtcatatgcttgtctcaaagagaaacctattcatggcgacgttggctcaacaattgtcgccgttgagatggtccccacgggtgttcttcttctaggttatcgaggagagcttcgaagaactttccccagaacaaatctgcctctgtttctccgactattgtcgccgcggttgcaatgtctagcggtcaaacaaaggagcgtcttgagctga

SEQ ID NO: 181023 - DNA, 338 bp, Arabidopsis thaliana columbia
gaaacacactatctctctctctctctcaatacatttttcctcacttctgatcagtgtgatcacgtagagtgccttgaaggagaggaaagaaacaaaaagaaataaaaatgggataccttctagaagaaaccttaagctctaactctaaaaccccaattgttatcgatgatgataacgagttgggtttgatggccgtgagactagccaatgctgctgcctttccgatggttcttaaagccgtcctcgagctcggtgtcttatacactctatattcatatgcctttttcattgatcttttttatttttaccattttgtggtaggggttgttatcttctca

SEQ ID NO: 181024 - DNA, 102 bp, Arabidopsis thaliana columbia
  unsure (1)..(102): unsure at all n locations
gatttgttggtcactaaccccaagagaggngcttttgtaatcgcagagaagtcttgcaatggggggggtttgaaggttaaccaaggggatcttaaccgagag

SEQ ID NO: 181025 - DNA, 58 bp, Arabidopsis thaliana columbia
cggacgcgtgggatttattgtcatgtatggtctttctttcttgtactttgatggcttt

SEQ ID NO: 181026 - DNA, 251 bp, Arabidopsis thaliana columbia
attcattctacacactcaatgttacctcctcgttttctgagatctttttccccagattctctacgaagcgctctccccggtgagaagaagaatctctcacaaaattcctctttctctctctctctctgattccccattattagtttctgtgttaaaattgaattgcgacataactctgccaaagtgataagccccgattcacactaattccgagagatttttctgtcttactgttcataacgggtcaagac

SEQ ID NO: 181027 - DNA, 59 bp, Arabidopsis thaliana columbia
acattcacctcttctactttcatagcctcctttttttcatatccatactcttactccca

SEQ ID NO: 181028 - DNA, 127 bp, Arabidopsis thaliana columbia
tcggagcgggcgttcgtccagaagaagtcagagagggtaaacagaattaatgtttttgttatgaacaggaatttgaaggaagggggggggcattttttcaaaggggagggggggtattttaaaaatt

SEQ ID NO: 181029 - DNA, 450 bp, Arabidopsis thaliana columbia
cgaacccgtgcataccttttaatttctgttgaatttctcattgtctttggtatggtcctaatctcaatacgtctctggttctcatccatctctccagggatctgaaatttcttcctctgcatgtgctctcgtggtttcttccttgataattccttgctcattccctgcatgtgactcccgatcatcgtcttcctcttccaagttacgaatcaaaatcatagccgagattcagatttcatagacaatggcgactaaggcggcttcgtcttccagcctccccaaatctggagccatttccaaaggctacaatttcgcttcgacttgggaacagagcgcttctttgacagagcagcaacaagcagctattgtttctttatcccacgcagtcgcttgaccggcattttctggcaatcttggcatgagcatgttcacaagcctgagaatggcttg

SEQ ID NO: 181030 - DNA, 100 bp, Arabidopsis thaliana columbia
agcctaggactgtatgacaaatagttcattttttttccatatgacactaatccatctttatatgatgacattccaaaggagatgggcgagacacttactc

SEQ ID NO: 181031 - DNA, 140 bp, Arabidopsis thaliana columbia
taccgtccttattccctttcgagccacgcgtccgttcatatctctcgcttttctcttcatcactttttttttatctgagttcatcattcaacagacgacatatttctataggaatagggggcatctattttttacattct

SEQ ID NO: 181032 - DNA, 218 bp, Arabidopsis thaliana columbia
cacgcgtccggacctgcttccttgtttcttagactttcgctcatctttaaaccgagagtttatgacaccataatacgaatacttttaataatgatgaaggggacccattatatttctccattattatttacttctatttacttctataaatctcaattataattaccttctcataaacacttattacattatattctattacatattatcttttttac

SEQ ID NO: 181033 - DNA, 307 bp, Arabidopsis thaliana columbia
  unsure (1)..(307): unsure at all n locations
cagaggatagagagatagcgaggctaatggatcattgactcactgagtcagattttacccagtcattgcctccattgagaggctgggttctcanattctacgcttcactgtctcttctccatgtgcgtctcctcctcctccggttcttcagatcttgctttccggtgacggttttaatcttcttctctctggtaacacgtataaagcatgggttacctgacgtgtacatgttactgttaggctatagactcctcttttttaccttttttcttttctagcctttctttagcttcttctttctcttttc

SEQ ID NO: 181034 - DNA, 201 bp, Arabidopsis thaliana columbia
  unsure (1)..(201): unsure at all n locations
cgttgcttccatcgttcgtccgccttacccctacttcaagtttacaatcatacaaattggantgggcaacattggcaatgtgcctcttgttttacttgcggctctttgtagggacacttccaacccttttggtgactccgaaaaatgtagcattgatggcactgcttatatctcctttggtcaatgggttggtgccatcat

SEQ ID NO: 181035 - DNA, 376 bp, Arabidopsis thaliana columbia
  unsure (1)..(376): unsure at all n locations
cattgctgacaataccattaagactgagattgtcttatctcctttcattcagattccactaggaagtacagattacagactcatttggtcttttgattttttatnattttttttttttcttttntatttttcttcctctctccttctttttttttttattgtgctttttttttaccttttttctatttttctttccctctattattttctatttttcttctatttctttttcttacttatttcttcatttttctcatttctctcttctctttttttttatttattatttttttctcttttttctttattattattttctccttatctctttctttttctctttattctatcttttttctaattcttctttcttttt

SEQ ID NO: 181036 - DNA, 55 bp, Arabidopsis thaliana columbia
gatttaagacagctaaaactaaatacaaatattcagttattgctttccttacaca

SEQ ID NO: 181037 - DNA, 80 bp, Arabidopsis thaliana columbia
atacaattcgtcgatatgtgtgatcccactatagtctatggctccagccgaagcacagtgttgcgttctattcaaaagag

SEQ ID NO: 181038 - DNA, 71 bp, Arabidopsis thaliana columbia
  unsure (1)..(71): unsure at all n locations
ggcgagcgtccgaagatctttccatttagcagcaccttattatggtttagccttaaagctaaggncaaggg

SEQ ID NO: 181039 - DNA, 179 bp, Arabidopsis thaliana columbia
agagaatacagttggagactaccgattgtggagttatttttcacggttctccacctatcaagagattgacgacattaggcaccacgttacagttcagacaaagacacgggtttaccaacttgccgtgtatgccagtgtgcaaaatctgatataagagggggtgctgctttaggtttttt

SEQ ID NO: 181040 - DNA, 121 bp, Arabidopsis thaliana columbia
gcggaatattcttcagaatatctgatccgatatcattttctttaagttcgcttgaattccctctgagcaatggcttttttcttgcgcagcgtcaatccaaacaaaatttcttataattcac

SEQ ID NO: 181041 - DNA, 171 bp, Arabidopsis thaliana columbia
atttttccaagatgaagtcaattggaagggtgtttcaacgcggattcactacttgggtgcgcggctcagagatatttcgggctcggttcatctatgccttcatgatctgaggttagaaggagaagtgaacattattcatatcttcttttattggggggtttaaatgttttt

SEQ ID NO: 181042 - DNA, 237 bp, Arabidopsis thaliana columbia
cttattttcccccaccttcaccattttgattctttactggaccgtagagaggtactaggaggtggccattcacaagcatgagaggcgatttctcactccgaaagcttcaattaatggcagcggaatcacaaacggagctgcagcggaaaccacctctaaacctagtcgcaaagggaggaagaagaagcaaacatcgacggtaattgagaaagataacaccgagactgttcctgaatt

SEQ ID NO: 181043 - DNA, 128 bp, Arabidopsis thaliana columbia
taactaatgatcttgcagagatacgtagtactctttttgctcttcaccattcggacacactggggcggtactaattgggccaggggacacttttgaatctgtcgcttgcaatttctacactacaacct

SEQ ID NO: 181044 - DNA, 55 bp, Arabidopsis thaliana columbia
accgtccgaatcccggtcgggcgagcgtccggttaaattgagtttgtgtctcgta

SEQ ID NO: 181045 - DNA, 124 bp, Arabidopsis thaliana columbia
gctcgaaattcaaaaaatgtctcgtcttctccaaactccctttttaccttcaggttccctccccacgaaagcgctatcttacgcgtactgctttgcttttaaatcccataatcattccaattca

SEQ ID NO: 181046 - DNA, 53 bp, Arabidopsis thaliana columbia
  unsure (1)..(53): unsure at all n locations
cccggggaagaatacggatctgnnatgaaatattttaatatgtcaaagggtga

SEQ ID NO: 181047 - DNA, 80 bp, Arabidopsis thaliana columbia
accggccgattcccggtcgggccacgcgtccggatcttacgaagaagcaaatatggcggccccatttctttccaagaagg

SEQ ID NO: 181048 - DNA, 54 bp, Arabidopsis thaliana columbia
gcatacatggatctaatcatgctttatcttttttgctctctcatcttccctgtt

SEQ ID NO: 181049 - DNA, 94 bp, Arabidopsis thaliana columbia
gcgaccgagagaaaaacagaaattaaattagagagtgtgtcttattgaatcaaaactccaacttcagggggggggattttcggagggcgggggg

SEQ ID NO: 181050 - DNA, 54 bp, Arabidopsis thaliana columbia
ccgtccggattcccggtcgggccagcgtccgagagaacatggggagaagaggga

SEQ ID NO: 181051 - DNA, 149 bp, Arabidopsis thaliana columbia
gcgcacacacccactcatggcgtctcggagagtcttatcattttttctccgttcatcttcctccaggtctggcgccaaattagggaacgcggaagcccacacttccttctccttcacccgtgcgacactcacctccatgtaactacctc

SEQ ID NO: 181052 - DNA, 62 bp, Arabidopsis thaliana columbia
tcggcttgcaacccaaatctgtatttgatttctcccattatatctaacgaatcttaaatgcg

SEQ ID NO: 181053 - DNA, 125 bp, Arabidopsis thaliana columbia
ggaattcccggtcgggcgggcgtacgatcgttcctagattcggattccaatactccgtaccggttgttacaaaaggaattaatcatcgggggggagggtcaagggggggggggataagatttcta

SEQ ID NO: 181054 - DNA, 253 bp, Arabidopsis thaliana columbia
cggacgcgtgggctgaaatcgtggtaattggtgatggagaaagacgataacagtgacaaggtttgtctttcagtgaaggagaaatatacgtcagagcagcctgaggaaatggtgacaaatctgaaggcatctgtaagagaattgagtgtgaaagtgaaagaacagaatcagagaaaatgtgatgctaaggataagttgcagcagctgcgagaaagaataagcatggaagttgttgatgttctattttacttat

SEQ ID NO: 181055 - DNA, 309 bp, Arabidopsis thaliana columbia
cggacgcgtgggcacaacttgtaactttatatatattactttcaaagaagagagagagaaagagagattgatatgaacatgaagttgctatatatttatttatttatgctcatatgttattatagttttttattaatttttttaatcatatgtgtttttgtttttatttattttttttttttttgaatttttatatataataatatttattttattttttttttttattattttgtttaattatttaacatattttattgtttttgttattatatttatatattataatgtttattttatatttttatt

SEQ ID NO: 181056 - DNA, 318 bp, Arabidopsis thaliana columbia
acagttctctctttttgtcgacagtcttcttcttcttcttcttcttcgattggatctggaactgaactcaaattgggaagaattttgacatggaggaggaccggtgttcgatcaaggatgatgcatctcaattgattggttacaccccataggtatatctgaacaacattgtggatgtttgttgtagctatctatgtttatttatttttttattatgtacctcttgttttgacttaatttgaccattatttagaatctacatgtctgtttaatattaatcttttatattctaattatcccattatctatctatttatt

SEQ ID NO: 181057 - DNA, 374 bp, Arabidopsis thaliana columbia
tcaaatctcatctctttattctctctctctatctcttctcctcaagaaccctaaaaatctccagaaaaaagatcccaaatttcgtatttcaacgatctgaatctctctctctttcgggtttattttgtttcccgatatggtttagaatttgtgatttaaatggaagctgacgtgtcaatttcctgataaaacccttatcgcgaaatattcctgattaccaataaaaatatgattgagtctttttttgacttgtttgaataagtatcacggttggaatcgctcacctatgtaatgttgctttgcttctcacttatattgttgggtactgtttcatttttatttcatatccctatttattgttattttatattttc

SEQ ID NO: 181058 - DNA, 547 bp, Arabidopsis thaliana columbia
  unsure (1)..(547): unsure at all n locations
gttctagatcantatnnttttaaattttataattttagttaattattattataattatggtgggtaataaaataaattgaagagggtagatttaatttaatatatatatatatattattattatattaaataataaattatttattattattttattaataaatatatatattatatattataattttttaaattaaatattaataatataaattaatataaataaatatatatatatatattaaatttattattatataaaaatattaataattatttatttttatttatatataaaaatataaataatataaatatattaatattataatatatattatagaattataatatttatatttatatatatattaaatatatatatataaatatatatattaatataaatatattaaaatataatatgatattaattattaaattatatatatattatttaatatttttatatatataattttattatatttataatttataaatataattattttaaataaatttaatataaaatataatatttata

SEQ ID NO: 181059 - DNA, 291 bp, Arabidopsis thaliana columbia
  unsure (1)..(291): unsure at all n locations
cccacgcgtncgcgcaagactcctttagattcttactgcagctatggtaagagagttattactacattgtgtggtggttatcattttttttttctatttttttattttttttctttttatggtattatattcttttattttatattttttattatttttatttttatatttaattattttttttttctatttttattttttaaatttattaattttttttttttatattcttttttttatttttttttattttttttttttattttaaaattttatttattttttataatt

SEQ ID NO: 181060 - DNA, 229 bp, Arabidopsis thaliana columbia
ctttaaattagtaggataccctcgagtttgacgattctgtctctggaatgggtgaacaagaagcgagctatgtgtttccggagagctttaaggatttggtggatcgaacagtagctttgcagtgtgattatccgatcaggaagttgtcactaaaatgctatgttgacagggacgacgaacaacgaaaggcttgtgtgaaccgcttgatattgaatgtcttttctcgcgt

SEQ ID NO: 181061 - DNA, 97 bp, Arabidopsis thaliana columbia
tcgatccgtcgaccacgcgtccgtaggggaagaccaaaactcgcgaggatccgatgatgaccgaacttaccggggtactagagactcaagggacttt

SEQ ID NO: 181062 - DNA, 112 bp, Arabidopsis thaliana columbia
ctttctctctctctttttctccgagttaggaatctcttattctggttgcgtttgagtccgtacgaacacataagaaaagtgagaggtggctgaatagaaagaagcttcaatc

SEQ ID NO: 181063 - DNA, 122 bp, Arabidopsis thaliana columbia
  unsure (1)..(122): unsure at all n locations
ctttcctttaattgtagttaacgaaaagatttcttctttgttcagcatcagnctatccagcaatggctgtttcggcggccataacagggtggtcaagcgcctccatacgaactccttccgca

SEQ ID NO: 181064 - DNA, 255 bp, Arabidopsis thaliana columbia
gcaggccatcttaaccttacgattggtgttcttgctttgagcgaaaccctagaatcggcttaacccatttgagcagagatgctggagtagcagaggaggctttttctgttcgagagatatgcgggactcttgtctttccggccataccctttcgtggggcatcttctttccgtttagatctgtccttgagtctctattttaatcttacacggagcgtattgggttgtttttttcattactattttaagtggtttt

SEQ ID NO: 181065 - DNA, 401 bp, Arabidopsis thaliana columbia
  unsure (1)..(401): unsure at all n locations
aggacgcgtgggttaatcaagaagatttattgtttttgacagatagagagaaangatggtgagagaattgtttaagagatgggtgggtatatttttttattattattattttttttttaagttttattagtttttataatattttatgaatttatatttttttaatttttatattttttttttattatattttttttttttttttttttttaatttttatttttttttttttattatttttttttataatttatttattttattaatattattttattatttttatattttttttaatttttttttaatttttgtattttattatttatttagttattattattttattttaattttatattatattgatgtattattatttttttttttaatttttttat

SEQ ID NO: 181066 - DNA, 260 bp, Arabidopsis thaliana columbia
  unsure (1)..(260): unsure at all n locations
gangtagagttctctagttttgaacgaagaattgacgaaagaagaatgcataacgcgaagggattgttgggacgaatcgttcgagataagctatggagatttggtttttggttgagctatttctttttttattgtatttgttttaattttttatttttttattttgttgtattttttaatttgttgatttgtttaatttgtttattttatttttttttgtttattttgttatttgatttttgttatgtttattttttttt

SEQ ID NO: 181067 - DNA, 131 bp, Arabidopsis thaliana columbia
tccgtttcattcttccagtgtcgatgaaaccaatcggcggtggagttggatgtggcgttgcggcttgtgaagtgaatttgaacatttgttgtccatcagctttggaagttaagagagatgggaaagtggtt

SEQ ID NO: 181068 - DNA, 306 bp, Arabidopsis thaliana columbia
agttttaagcagttcttgctggtatctacgctgtttttttttttgacaacaccgttcttaacaaggactaagacctatttctatggtgagtatggccatttactattttcatatgtaagctttatattacctattatcatttattattgtacaaaaactttcgtttttttctatcaataattaatttattatataatttatatatcaatcattttctttttcatcttaattagttaattttatactatttgttatttattaattattatataataatatattacctttaaatttatttttaattta

SEQ ID NO: 181069 - DNA, 257 bp, Arabidopsis thaliana columbia
cgtctttcgagcaaaactatcgaaatctaaatttagattgagaaacaagccaacaagctttttagtataaatcccataccacacaatcacaaatgcggagattcgtgattggccaagctaaaaatctcatagatcagagtcgtcgtcgtcaacttcatcatcacaaaaatctcagctttgtctctcttattcctcctttttctgcttcttccgattcttcatcgtgccacttgtctttttcttcttctttcgatatg

SEQ ID NO: 181070 - DNA, 75 bp, Arabidopsis thaliana columbia
cggacgcgtgggcgcgaaaaccctaattagctttgtggtttagtagaatttaaacttgtaagagggtggtaataa

SEQ ID NO: 181071 - DNA, 206 bp, Arabidopsis thaliana columbia
gttttgaattttgaaattgctcatttccttttctctaccattccccctctctctttccaaatgcgcaaactcattcaacagcggccattgattctctctagagctgacaaatccagaatcggatctcatgagacttgaagctcgcttctcacgatgaatcagtaccacatctacgaagctattggacatggctaatgcacgactgt

SEQ ID NO: 181072 - DNA, 237 bp, Arabidopsis thaliana columbia
ctcgtgttttgttttctttgtctccgatttttttcgcgtctaagaagaagacgagagatagagagagaagtttagaaatcgagggaagctgtaactcatttttagatcttaatttctagggttgtaattctcatcattttataatcttttttaattttctattcttttaattttttttattttaactttacatgttaccttctttgcttaattatattttaattatctaattattat

SEQ ID NO: 181073 - DNA, 87 bp, Arabidopsis thaliana columbia
aacctgtgatctcttctaccccaaccgacacgatcacaggttactctgtccaaatctgaattggagatgggggaagatcaattgtat

SEQ ID NO: 181074 - DNA, 75 bp, Arabidopsis thaliana columbia
agtaccgtccgaatcccggtcgacccagcgtcgtagattgattgaacctaaaatttagagatccttttgaaaaac

SEQ ID NO: 181075 - DNA, 71 bp, Arabidopsis thaliana columbia
atttcaacttctcttggcgtgagatttgaggtctcaactaaattggagttaaagtctgctgctgagattgt

SEQ ID NO: 181076 - DNA, 316 bp, Arabidopsis thaliana columbia
tctgacgcgaacgtttctctcctccgtctctcgatccctctcttgacgtctcgctgatctggggtgctaagattcaagcttgaagaccctaatttctctagccattagcatctatttcagctcaactttagattcaaggaaacaattattagctttttcaagatctttagtgttccgatacaatgtcatttttttttaaattttttctcttatcaactatttttcttattttttaatattaattttcttttttttattttcttctcttttgctaatatttctttgtttctcttttatttttttattcaatcttaat

SEQ ID NO: 181077 - DNA, 271 bp, Arabidopsis thaliana columbia
gaaaattttccctttactctcaaattccttttcgattttcctctcttaaacctccgaaagctcacatggcgtctcgaaactatcggtgggagctcttctcagcttcgttaaccctaaccttagctatgattcacctggtctaagcaaactccgaatgtgatgctcttttcgcttttttctggagttttacagttttcgtctttctttttcttctttcattattcttctttttttttgctactttttcccttttcttcatattttttacttt

SEQ ID NO: 181078 - DNA, 181 bp, Arabidopsis thaliana columbia
aaagtgtggtcttttgacaaaatcatcaaaagggactcagatttgtgaaatcttgtctctttttctttatctgttttgtttttaacgagtcgtaattctcctcaatttccgtgaaaccccttggaaaaacccatttctcgagagagagagagagaaggagagtgtaagaagaagaagatga

SEQ ID NO: 181079 - DNA, 110 bp, Arabidopsis thaliana columbia
ctctgttgtcttcctctttgtcttctatctcgctgcggtgacttcagatctagagtctgaccggagagctttactcgctgttcgtaacagtgtccgtggccgtcctttgc

SEQ ID NO: 181080 - DNA, 426 bp, Arabidopsis thaliana columbia
gcgattatcacagaagaagaagaggatccaaaaaccctaaatccaccgaagaacaaacctaaagactctgactttacgaaatctgaatcaactatgaagaaccctaaaccccaatctcaaaaccctttcccattttggttctactttacagtagtcgtctcactagccacaatcatcttcatatctctctctctgttctcttctcaaaacgatccaagatcttggtttctctcactcccaccagctcttcgtcaacattactcaaatggacgaacaatcaaagtccaagtaaactcaaacgagtcaccaattgaagtctttgtagctgaatcaggttcgattcatacagagactgttgtaatcgttcatgggttaggtctaagttcgtttgcttttaaggaaatggttcaatctcttggatcaaaa

SEQ ID NO: 181081 - DNA, 133 bp, Arabidopsis thaliana columbia
aaagaatctggacatatgctctctcggttgtacttttctacggacatgcaaataactggcgacctaaaattgcaaatggcggttggcatactattacatgagcatctagaattgcaacgacaactgctactac

SEQ ID NO: 181082 - DNA, 160 bp, Arabidopsis thaliana columbia
tcgcttgaatccattacagagggattgtggagtggtttggacacacttcttacaacaaagggtccgatgaactatgagtgtgggcaggatctgtaatcatatccattgtatagagagatatccatctcaattcgaggtagccaaacatgtatatggctta

SEQ ID NO: 181083 - DNA, 304 bp, Arabidopsis thaliana columbia
tcgacgccacgcgtccggcgactgcgagatccatcttcttcttcttctccttcttcttcttcttcttcttcttccaacaaatgttcctatgatctctgtgtatgagcagaatctgtaatcagatccattgtagagagagatagccatttcaattcgaggtagccaaagatgtatatggcttacgggtggccgcaggtgatcccgcttctacctggatcgtgtccgtctttgcagcgagtcgtgtaccttaagctctccggccagctattgctggtcggttcttcggctcacctggagctttggg

SEQ ID NO: 181084 - DNA, 149 bp, Arabidopsis thaliana columbia
attattcttatgcttgtctaaaagattttttcttgtatgtgtaagaataaactaattgggactgggaaaatgagagtgggtgggtgaatcaattataatttgtaagattttaatttctacttttattatttaaatacttttttatttaa

SEQ ID NO: 181085 - DNA, 167 bp, Arabidopsis thaliana columbia
aaaaaaaaaaatataaaaaagaaccaaaatatcaagtattacacaaaaaaaaacaaaaacaagaacaaaaaaacggtcggggggtgggggggatccaaacatacgaacccgaacatccccaaaaacatgcttctcctattttacgacctaaaatcaattccccgccc

SEQ ID NO: 181086 - DNA, 407 bp, Arabidopsis thaliana columbia
ctctctctctcttatacgtatggttttgatctttttcaagatcaaacaaaaacaatggagttagagagtacgagcaatggccgacgtccgccgacaccggcagagattggccgtggggcgtacttgtacgtgtgaagatttgtcgttgcgaagtttaggtataatttctgtttctccattgttactctctagtttatttattcttatttttttttctgttttgagtcttatcttttttctttttttcattgtgctttttacttttggtttttttttttttttatgctttttatgttcttttatatatttttttgtattggatgttctatactcattttttaaattttgtccattttttactctattttatcttttgtttttttttttctttttatgtttttttatat

SEQ ID NO: 181087 - DNA, 99 bp, Arabidopsis thaliana columbia
gttgatctaaccactgggcaagagatcctggccactggtattaagggtggggacaatcttaatcactaccaaaaaggaggaaacattagtttcttactc

SEQ ID NO: 181088 - DNA, 293 bp, Arabidopsis thaliana columbia
cacggacacaaaaattgctcgcaacctttgttccattgtatgtttattgagacatggaaactctgctggcaggtgcatataaggcgtggggggggcaacgaaaatgtattaccggcatttaataacgtcctcttcttatagaatatctaactttcgaaaagagtttatggacgtaatattttttttatattccatcctaaataaattttattgccccgcttttaacaagctacgacctggtaaaacctaatacatgcactattttatttcattggttaaaacatccctttttt

SEQ ID NO: 181089 - DNA, 64 bp, Arabidopsis thaliana columbia
cttctgtcccacagacggcattctcatcttttcttcgagccggaagtgtgtaaagagaggaaag

SEQ ID NO: 181090 - DNA, 430 bp, Arabidopsis thaliana columbia
acgagccgtcttttgctccttcaatctctatcgatcgtatcatctgctctgcgatttcaatggcgagccgttggttgagacctgaggtgtatcctttggtcgctgctaccggagatgacgcttggatttatgcaatttctttggttggaaaagagttcatgaacgtgtatatatgttatcttaaatcaaacttagctattatagttttacttccaaacagctacgaccggatgtaaacttatacatggaggggggtattttaatgttgtagcaaatataaaatggtaagtttttttaaaagcagtttgtgtagttagtaatttttttatatacttatttttttaaaattatatttattctgatatattttattgggtatatagaaatttatctttatatattgaaatttagttgtttatatgtttatata

SEQ ID NO: 181091 - DNA, 186 bp, Arabidopsis thaliana columbia
gttaagttacatatagagtaaggaagagatggtatttaggtgtttagacgaattactgggtgcggtcatattgtgtgaggcggggggcccaacaaagaaggattaaaacaagaatgttcaatctatggataccgatacagtaaattgtcagtaaaagatatatgtatgcatataaaacctgagggt

SEQ ID NO: 181092 - DNA, 388 bp, Arabidopsis thaliana columbia
ccgtccgattccggtcgaccagcgtcgggacgctggctgaaaacgaatcgtcgtttgaccgaaataataaccgtccgggaaagaaacggttgcacgagtgaaggaaacggtacgaaaacggagccgttaatatgcgatgacggagtgacaaaggggaagctgacgatgtgctacgaggtagacgtttacgttgacggtgggaggtgtgaaattatttttaatgttttattattgatatgtttttgtttttttttgttttttttttattttaattatttttaattttttttatttttatatttatttattattggtggggggggggggatgtttttttattttttttaatatttatatgtattatatttttttatattttttttttatt

SEQ ID NO: 181093 - DNA, 206 bp, Arabidopsis thaliana columbia
taaacaacttattaaaaataaaaaactctctcaatttcttttgaaaaaataaaaaacaaccacagttcgggattcttataaaaaccgtgagcaaaaaaactcatattaacaacttcctccaacaaaaaggcatgtgataatgatctctcctctctccaccgatcttcgtcaaaagtacaatttcagatccattccgatccgtaaag

SEQ ID NO: 181094 - DNA, 165 bp, Arabidopsis thaliana columbia
caagaatactggagattctgttagccagcaagtttcggaatgcgggattcctcagcttacgaagtggaaatcttcacttctttacgctgaaaggggagttggagatgcgaagagcgtgagtagaagatctgataatgggactggatcaaatgatccaatgctaaa

SEQ ID NO: 181095 - DNA, 99 bp, Arabidopsis thaliana columbia
  unsure (1)..(99): unsure at all n locations
caatctcgtttaaaactaacataatngtgtctccagcgaagaaaagaatcgccattggaccggtgtcgctctacgggggcgggctaacaacacattctt

SEQ ID NO: 181096 - DNA, 261 bp, Arabidopsis thaliana columbia
caaagaaaacatttttcttaaggaaggataattaaaacagggggggatatttggggccgggggggcgcgaaaatccaaatatttcccccaattaatcttctaaaatacacccatctgttccattataacctgaatctaaaaaacatcaatttggaaaacacccttctacttttttgacttattctatggtatactacaattatattctcccaccatacagttattggtttccacccctaatatttttttttccttattcta

SEQ ID NO: 181097 - DNA, 209 bp, Arabidopsis thaliana columbia
  unsure (1)..(209): unsure at all n locations
cccacgcgtcctaatttattgaaaacctatcgtgatttttctcattaccattatatatctgcgccaatataaaaattgcgtgcggccctnnacaacccacnaattaacnaatatcactcctctaaatcctctaatctaccatttccttcaattaccgtcccttaactaccttttctttctattactctttcctaaactaccactccctt

SEQ ID NO: 181098 - DNA, 192 bp, Arabidopsis thaliana columbia
cttggttttggcagagactctagcacggatggctttgttgttcaccctcactagaatactaagggggaatataaaacggagaacgatgccgccgacaccggagactacatgatcaagccacagagtttcactccagccatcgacactttttaatgggccatgcttcttaataaatttaacccgatcgttttc

SEQ ID NO: 181099 - DNA, 133 bp, Arabidopsis thaliana columbia
  unsure (1)..(133): unsure at all n locations
aattgatagaggaagcaccgtaaagatcaangtgaaaggttttggaccgacacaacaaggcgtgtctatttatatcagggtgggcgatacaccttaacaatctacttatgtaatacacctaatccccaaaatt

SEQ ID NO: 181100 - DNA, 387 bp, Arabidopsis thaliana columbia
  unsure (1)..(387): unsure at all n locations
gccatggccgtcgggaaaaacaagagaatctctatatcgtaggaagggaggaaaaaaccccgcccctttttaaaacccggccccccccccacaaaacatctatacnaacttcccccccctttccccccctcctccccccctctctccctctcctcccctcccccccctcccttccttttttttcctcccccccacccccctatcctcctctctcttcttcccccccccctcccctctctctcccctcccccctccccctctctctccctcccttctcccttacttctctctcccctcccccccccttcccctatccttcatatcctccccctctcccccccccccgcccccttcctttcttccacctctctccttcctcttctcctc

SEQ ID NO: 181101 - DNA, 404 bp, Arabidopsis thaliana columbia
aagttctgcccttatagctgctggtggctcatatccaatccttagagtatgggatcctcgggggccaggaacatccgcgtccggtgtttcaattctcttcacactcatcatggatttccgcctgtaagtggcacaaaagctcttggtttcacttgctctccgcttcctacgacggcaaaatcatgctctgggatctcagaaccgcttggcctttgtcagtaattgatacacacaatgacaaggttttatctgctgactggtggaaaggagagagtgtagtcagccggaggaacatactctaacttgcgaatgtgttgcggaattctaatttcttaaaagaaacacaaactattcatgatccttgtaatgagacttgatgtaagttctgctgaatagagcttatt

SEQ ID NO: 181102 - DNA, 170 bp, Arabidopsis thaliana columbia
  unsure (1)..(170): unsure at all n locations
acggacgcgtggacaacagtcgaagaacttgcnttcatctacgctgatatgaaccttaaaaactgtggcattttcataactggtggtatgactacaactttcttcaaaacacttactgttgaaacagacacttactttcctactttatacaacactatacatcaaacaat

SEQ ID NO: 181103 - DNA, 242 bp, Arabidopsis thaliana columbia
ccggcaattcggagaaacaatggcggtaaaaaacacttttaaaactcactgaacttaaaaaactatgtcgaattcaataaagaatccgtttcaccaataccatcactaaatcgatcaactctactcaaagcttttcaccagactaaaacctgcctgaaacgccttatctaccccttaattacatacatttcttttatatttttcgcaccttcttctactttaacaattccaaaacctctttt

SEQ ID NO: 181104 - DNA, 231 bp, Arabidopsis thaliana columbia
gtcaccggcgctagtggcagaacaggccagattgtgtataagaagctgaaggaggggtcaaacaggtttgtagcaaagggttgtaggtggaagttctcaatgaaaaaacaaaattgtatgatattttttttttttcatcttttatttaactttttcttgtcgccttatcccttctcttttatttatatttattatttatccgtacaccacctgtttacgcttttttagatt

SEQ ID NO: 181105 - DNA, 153 bp, Arabidopsis thaliana columbia
cttcttatctacacacacacaccgtgaaatttaaaaatcatgtttcctcaacaaaaacaaatattacacttattttattcctttccatcttttatcttcttctcattcatccttttccaatcacactatctcttttttttcaactaccaattc

SEQ ID NO: 181106 - DNA, 222 bp, Arabidopsis thaliana columbia
cgcactattgcactcgtcttcttcttcgttcttggtgtgaaccgaaactaaattctatctttttgctctacacgatgaacgagcgtctgaagggttcgtttgagcttcccagaggtcaatcttctacagaaggagatgttgaactaggggaacaccaaggaggggatcaacgatggcaagattttaccgaatggctttagtgatggtcatacagtctgatac

SEQ ID NO: 181107 - DNA, 316 bp, Arabidopsis thaliana columbia
gtatctcatttcaagaagattgaagacgaaggagaagctgagagagaacgacgaagcagattcaaaatcaactctctttcttcttcattcttttttcctgggtttttctgaatgtatcaccacgctttttccctaaaatttcactccttctctcctcactatgcgttatccctctccaatttctccacccaaagccctaatcctctcctcccgccattcgctagagtccctcatgtgaccagctctgtttgcctccgctgccggagcagcgccgctgatgtatctccggatatttacgccgttggctcctccttca

SEQ ID NO: 181108 - DNA, 359 bp, Arabidopsis thaliana columbia
ctttttcataaactctctccagagaaaactataatgagcttgagagaaatgagcgaaacaaaacccaagagagattctgagtacgaaggatcaaacatcaagaggatgagactcgatgatgatgatgacgttttacgctcaccgacgagaactctttcttcttcttcctcttcttctctggcttactcggtttcagattccggaggtttctgcttcgtcgcgttatctgaagacgaattccgtcatcttatttcaagcattagcttctgtttgattcagtatctgatataaacttaattgctattttctttataattttttgattattgatgtttattgtaatttttattttactttat

SEQ ID NO: 181109 - DNA, 53 bp, Arabidopsis thaliana columbia
ggaagaacgatctcagtgagaggacgatcacttttgtcgttttagacatgggt

SEQ ID NO: 181110 - DNA, 373 bp, Arabidopsis thaliana columbia
ctctctctctctgtaagattccttgctctcgcgcttttctctctctctctcgcgttcgttcttatccacgagctctgcaccgtcgcaatctccgtcttctccatttagatccaacacagagccttttctacatgaaattcggcaaagagtttcgtactcacctcgaagaaactttaccagagtggagagacaagttcctttgctataaacctttaaaaaagcttctcaaatattatccttattactccgccgattttggacccgccaattccgatcacaacgattcgcgtccagtatttgctgatactactaacatctcttccgccgccgacgacggcggtgtggttctcggcgttggccatcggtatgattt

SEQ ID NO: 181111 - DNA, 281 bp, Arabidopsis thaliana columbia
cggaaaaatcagaaaaatgggagaccctggacgatgcgattcacactgtgggtaatcggattcgtggaactgcccaagcccaagctcgcgttggttctcttctttaaggaagccaccacatcgagaaacatctgtcgaggcatcggacgttgattactgtggctcctaacgcttttgtgattgttgttgagtaaatcaataatttgttttcttaattttatattgttactattatcaattctaatatttataatatctaatatgtttatatgtttttttat

SEQ ID NO: 181112 - DNA, 254 bp, Arabidopsis thaliana columbia
atataaaaaaattaatataaaaaaaaaaaaaatcttcttttttacaaaaaaaaaatatcataattaaaaatggttaaataaataatgagggggtggattctaataaataaaaaaaaaaataatataatggggccgcccttttttaagtttccaatcatttttccggggggccccaataaaatattcctttttttgtgctcctataatcaaatttactgccctttttttttcaccccaatctcttgtaaaccccc

SEQ ID NO: 181113 - DNA, 203 bp, Arabidopsis thaliana columbia
gttttgcttctaaaattttctggtagatctgagtccacaatcatcagaaatcaactttgtgaattgaaggccgatcactcctttgactttgttcttagggttcatcctcaaaggtgtttaatgatgctctaaaaagctatggaatatggtccttcttattttctgtttactttaaaccttagtctttaagtgttttttattta

SEQ ID NO: 181114 - DNA, 185 bp, Arabidopsis thaliana columbia
cgttacgtagtcaatcaaggaggctattaatgcttttagttttcatccgaacacagagaaaagggtacatacgaaccatgaaattcatgaccaattattcttttttccaggaagcagttcgttttttgttgttttttactctgtgtgagccaatgtttcataggctgagctgaaggagaattttt

SEQ ID NO: 181115 - DNA, 209 bp, Arabidopsis thaliana columbia
cagatctgctcgttttttcgctccatttttgggttcaccattactcagtctttccgttttaaagatgcgcatttatatgtgactgaatgtcggaggttgttcgatatttccaatttcgttcacttttttagttattatttctttttattatctttttaacttttattgtttttttattattgtttttttttattttattattttttttt

SEQ ID NO: 181116 - DNA, 256 bp, Arabidopsis thaliana columbia
cggacgcgtgggcggacgcgtgggcgaattctcttgaacaataactttgatcgttcttttgggtctcttgaattgtaaacagtggcggttgaacttaatcttgaagaattttcacttaatttggatttcagtattgtgtatttttatttttttttttattttgttttaatatttttaatctttacatacatttataatgataattattttttactttcttctaatttgtattttatatttattttatatttttatt

SEQ ID NO: 181117 - DNA, 52 bp, Arabidopsis thaliana columbia
aagacgggtgaacgcaaatactctatctctctatcttttctcgcgtacgcca

SEQ ID NO: 181118 - DNA, 76 bp, Arabidopsis thaliana columbia
ctctattcgtcgtcgacctattttcctcattcatggccgtcggaaaaacagaaatctctagggtaggagggggaag

SEQ ID NO: 181119 - DNA, 467 bp, Arabidopsis thaliana columbia
aaaaaacaaaaaaaaaacctaattagttttttttttctgcagagattatggaggtaccggtgattaatagaataagagattttgaggttttttttattttttttaatgtttttttttatttattttatttattttttattttattttttattttttttttttttgttatatttatttttttatttttttttttatattttattatttttaataattttttatttttttattatttttattttttttatattatattttttttatttatttatttgttattttttttattttttattatttttttattatttatttttttttattgtattatttttttatttttttttttttattttttatatttttttattatatttatttatatttatttttttttttatattattattatatttttttattattttttttttttattttatttatattttttattattttttttt

SEQ ID NO: 181120 - DNA, 146 bp, Arabidopsis thaliana columbia
cgtcccgattcctgtcgaccacgcgtccgatccagaacatggagctttataatctgactctttcttactatgaaattcggaaccttcgaaggcggtcttcaagaatctgatgggcatggcgaatccttcttcgaatttagaatgtc

SEQ ID NO: 181121 - DNA, 357 bp, Arabidopsis thaliana columbia
aaaaaaaaaaaataaaaaaaaaaaaaaaaatttttttatataaaaaaaaaaaaaaaaaaataaaattaaaaaattaataaaggggggggtttataaatttaaatttattttatattttttttttttttttgtttttttttttttttttatttttttttattttttttttttttttttttattttttttttgttttttttttttttttttttttttttttttttttttttttttttttatttttttttttttatttttttttgattttttttttttttttttttttttttctttttttttttttttttttttttttttttttttttttttttattttttttttttttatttttttttt

SEQ ID NO: 181122 - DNA, 51 bp, Arabidopsis thaliana columbia
tatagattacaagcttatatctgtgatttattacaacaagactaacttgtc

SEQ ID NO: 181123 - DNA, 346 bp, Arabidopsis thaliana columbia
ggagtagtaccaaaaagaagaagtctgcagcaaatgagaagcatagagtctcttttgaatcatcttcaagaccttcattttcgtcttctgcacgctcctctagcttctcgtctgcagaagtcagtaccacagcttctcaatttgaccagcctggtgagaatctgatcagagaacagcccaatggtggcttgatgatgccgtatgatctaatggagcccgtcataggctctattaattgtgtaattagttctagtggtgttgattatatcctttttcttatcattcttaattccattttttctttctattatctctgatgtttttttgtactttttatttttttctt

SEQ ID NO: 181124 - DNA, 201 bp, Arabidopsis thaliana columbia
gtggtgacatattactccataggatatgcacccgttgcggaacggttctttaaacagttcttgattatattcttgatccaacaaatggctgctgggatattcaggttcattgcatctacatgtagaaccatgaccatagctaataccggcggtgtccttgttctactagtggtgttcttgactggaggttttcttcttttc

SEQ ID NO: 181125 - DNA, 120 bp, Arabidopsis thaliana columbia
acacgaaattgaaatgatctggcataaaaactcaattgatggtgggcaaaggagaaaaatctgtcaattaaagaatatgagaatgattgttcttttatccttatttgtttataattttaa

SEQ ID NO: 181126 - DNA, 158 bp, Arabidopsis thaliana columbia
aacggaaaatgacataagcaaccgtgtcgccacttagctgtatgaagagagcgttggtagcgcgcggcgttgcttactatggatcgaatgaggctcttacaagacagcaatcagagaatgtgaagtctagggtacagaatacaaatggcgccaaattt

SEQ ID NO: 181127 - DNA, 180 bp, Arabidopsis thaliana columbia
cattcttgaagattatgcgacttcattcaagaattcaacaagtgatggtaattatcaggcgatcgcaagtcttatcagccatgtctcgaacgtcctgcgatgtttaagcaacaccggtctcatattaacgcagcagagattcacaattgctagagaagtctttatctcacacggtgctat

SEQ ID NO: 181128 - DNA, 136 bp, Arabidopsis thaliana columbia
cgtcgatccgtcgaccactcgcatgaaaggcagaaccctagtctattgctcacaaaaaggattcttggaagctcgaattaatgccatttcccactagaatggagggcacaatggatcctgctgttggatcaatgga

SEQ ID NO: 181129 - DNA, 61 bp, Arabidopsis thaliana columbia
gatcttacgaagaagcaaatatggcggtctcattgcttaccaagaaggttgtgaagaagag

SEQ ID NO: 181130 - DNA, 418 bp, Arabidopsis thaliana columbia
gaagattttgccagtaaggtaagcggcattttattattaaatagcaacaatgtatgtattgggggagaataataatatgatgtgggggataattttaaattttattatatcttataattttttatattttatgaattatatgttcataaaattattttaattatatttattttttattatttatatttttatatttttttacttttttatattatttatatttatttattaataatttaatatttatttaattaatatatttttttttttaattattaatattatttatattattatttataatattttttttaatatttatgtttatattatatattatatttttttttattatttaattatattttattattattttaatattatattatattattattattactttaatttatat

SEQ ID NO: 181131 - DNA, 254 bp, Arabidopsis thaliana columbia
  unsure (1)..(254): unsure at all n locations
tgataatgaaggctttgtggcatgtntccttttttttaaagangggncaaagttaggttatgggcggtggtgttgcctttatggtggtttttttaattcttaatttattttttttttttttttttattttttatttttttttttttttttttttttttatgtttttttttttttttttttatttttttttaatttttttttttttttttttttttttttttttttttttttttttttttttttttttttttttt

SEQ ID NO: 181132 - DNA, 211 bp, Arabidopsis thaliana columbia
ggcgaccaaaggctgttatcactcgatcacaatatataaaggaggcaaccgaactaggtaaaaaggcaagagaactaaagaaagcagctgatggacttcatcaggaagaaagaagtggtgctaagggcaggaaatggcggaaaaatgtgaaagcagttgaaaaggagttgctccaattggaggaagatgtgaaccttttagtagagatgtt

SEQ ID NO: 181133 - DNA, 253 bp, Arabidopsis thaliana columbia
ggtgtagtgaaaatggagaagtacttggattgcgtacaggggagatccaggagtgccagatgcagatcaatcgttcgtggtatatgatggctttgtgttctatcataggggttaagtttatattttttttttttttttttatccttgctcgtgtttttttatttttttttttttcactttattattttatttttatttttttttttttttgtttatttattataattgataattttaattattctttttaaat

SEQ ID NO: 181134 - DNA, 70 bp, Arabidopsis thaliana columbia
tggctttagaagaggaggaagagagtcaaaacgctcctttttgtgttcttgaaggtcttttctgtgagga

SEQ ID NO: 181135 - DNA, 173 bp, Arabidopsis thaliana columbia
ttagagaatccataatattagactgtggaataaggatgcctgttacattgaactatacaagacagatcatttaacatactaatttccttcttcgtagcttcaaatcgttcacgagttagtatatactaagtttcttaatattacatgcatctacaatattggaatgacctgaa

SEQ ID NO: 181136 - DNA, 357 bp, Arabidopsis thaliana columbia
gagacacaacagacgtactattaggcttccttatgcttcctccgccgctgggttacatggggggctcagccaccatgggcggtctattcaccggcttgaattattctttgattctcgtacatcttattacttatggtctttatttcatcgtattacttgttaattgtagctgttatttttttttataattattaatttttattcttatttttatttttttttatttttttatatttttttttttatttctaattttttttttatttttatttttatggttaggggtttatttatttttatatttttcttttttttttagtcttttttttatctttattttttattttttcgtttatt

SEQ ID NO: 181137 - DNA, 454 bp, Arabidopsis thaliana columbia
ctttacagttctttcttgctaaacaacaataaagtggtatataataggttaattatgatgaaatctggggctgatttgcaatttccaccaggatttagatttcatcctacggatgaggagctagtcctcatgtatctctgtcgtaaatgcttattttattcgttctctgtttttatattatcttattttgttttacttgtttttttttttttttctttttttattgtttttttatttttattttactttttttattttgatttatttttttttcttatttcttattttttattttctttttattttgtgttattttttttttctctattttttattttctttgtttttattttttatttatttttttttttttttttttatttctattttttttattttctttttctttttattgtttatacttttttattcttttatttttttattattttta

SEQ ID NO: 181138 - DNA, 84 bp, Arabidopsis thaliana columbia
  unsure (1)..(84): unsure at all n locations
cccttgactttctgataggtggtgtttcngcttttctttttcaaaactgctgcttcatcctattgaacgtatatatatcatttt

SEQ ID NO: 181139 - DNA, 451 bp, Arabidopsis thaliana columbia
ctttaccaacacaaacactaagctctatcctccaatggcggcaatcaccggattctccgctctctcaaaccatatctctcctgcttcatcacttccgtcgtcgcgtttactcaattccactcagtgtctgtccagattctcaaatgtgtcttcgtttcccgcgctctctacctttcgccggagaaagatcccgttgactccggcgtgttcttcgatagtcgacggagatgaagaaattgaagcaagaggtgatgatgagaatgagattagagagacattgatgttatcagtctctcctttgcctctcctcctcgttgcttctctccctggagccgaaactgtaagatctgtgtttggacccgttgtggagattgtaaaatccctggatctacctgattggcttgttcattggggacattcagggtaccatgggagtggtctttttgctatt

SEQ ID NO: 181140 - DNA, 192 bp, Arabidopsis thaliana columbia
tcggattagcatacctctcactcgcatcagattttcagttgctttttctatccaaatggactgcaagaagttcatccagatggtcgaggagaagaaacgaagagttcttgagaagcaagaagctcctttgaaatgggagcagaagctagaggcggctgcgaatgccaaagcagtcactgaaactaatgtgaa

SEQ ID NO: 181141 - DNA, 281 bp, Arabidopsis thaliana columbia
gcgtccgaacacattatgtattcccagacccagttatcgagtagcttctctcgaatatgttttctgacgccggcggaggctcaaatcgtcggcgttgggacttaactctttctatcaatatgctttcgttactcttttatgcttattgtatataattttttattcttttcttttatatcttcttatttcttcttctttcttcttttatttatatcatttccgctgattttatattaacttgtattttattatataaccatttttatatctattttatttat

SEQ ID NO: 181142 - DNA, 472 bp, Arabidopsis thaliana columbia
  unsure (1)..(472): unsure at all n locations
cttttctgtatctcccggagctccgggacttgttcggtatagagagatgaggagcttgttgttgtggattgctgntttcttatgctgtggttttttaaaatgtttattttttttattattttattttattttttttttatttttatttatatttaattttttttaatttttgatttatatatttatgttattaaattttattattttttttttatttatttatttattttatttttattaattagatttgttttttattttttttaatatatttttttgatttttatatatttttttaatatgtatttttatatttataatatattttataattattattataattattaatatgtagatatttatttaatgttaattttaatattttttataagtaattaatatatttattttattatttattgttttttatttaaattattaatattatttatattaaattatattttat

SEQ ID NO: 181143 - DNA, 144 bp, Arabidopsis thaliana columbia
tcgtcgccacgctcgtcgggaccgtctgatagcgctagccgaactcgaaagggatccggtaaatgcggccgtacgtgcgggacggaattacttaacgcctactagctccttatatgcgtattcgtgtagcatgtggtggtattg

SEQ ID NO: 181144 - DNA, 298 bp, Arabidopsis thaliana columbia
gtggagattaataattaagaagctgaagctgattcagaagaagaagcagactctctctctctgtttgcttcagcttttgcgcagctctgatctctgaagaagacgaagacttaatctatacaaaaattgctgcgaattcgcgtcaatttagctgcgctttctcgatcttttgcacttcggatgcttaaacgttgaattatttttcattttcaagtttgtttatttctttattttttttactatattttttaattgtatataataatatttatttatttattatttaatcaattatttt

SEQ ID NO: 181145 - DNA, 251 bp, Arabidopsis thaliana columbia
tccgttttattcagccatctagagcttcctgcgaccataccatttctcgatccattcgtgccgaccgcgaaatcttgtcgtttgtaccaccttcttatctctctttcccaaatcttctcgtttctctctcactatctttttttgttcttttttttcctcttcttccttatcttacctttttttcctctttcttctactttttcgtttcttcttttcttctttttctcttttttttcccattcttttttttt

SEQ ID NO: 181146 - DNA, 231 bp, Arabidopsis thaliana columbia
aaaaaaaaaaaaaaaaaaaaaaaaaaaaaatttataaaaaaaaaaaaaaaaaaaaaaaaaaaaagaggaaaaaaaaaaaaaaaaaggagggaaaaaaaaaaaaaaaaaaaaaaaaaaaaaaaaaaaagaaaaaggaaataaaaataaaaaaaatataaaaatggggaaattttattaattataatttttttatgggtaatataaaattttaatttttttttaatgattttg

SEQ ID NO: 181147 - DNA, 280 bp, Arabidopsis thaliana columbia
  unsure (1)..(280): unsure at all n locations
nnnnnnnnnnnggggggntttngtgtgtggggggggttttttntttttttttttnttttgtttttttttttgtttttttttttttttttttttttttttgtttttttttttttttttttttttttttttttttttttttttttttttttttttttttttttttttttttttgttttttgttttttttttttttttttttttttttttttttttttttttttttttttttttttttttttttttttttttttttttttttttttttttttttttttttttt

SEQ ID NO: 181148 - DNA, 51 bp, Arabidopsis thaliana columbia
atcgctcggaacttggaaagcagcgtaatctgtatttagtgatttcagttt

SEQ ID NO: 181149 - DNA, 192 bp, Arabidopsis thaliana columbia
  unsure (1)..(192): unsure at all n locations
tgtatctatgagaactgggagtagattgaaaccaatgttgtgttgtctttgtatatatgtaatgatcaaatggttttggtaaagagaaagatgaagaaagaatggactgttagtgttagctgttaagtacataggacagtatgtagcatctggatcctattctcccatataattgtattgttgctacatant

SEQ ID NO: 181150 - DNA, 313 bp, Arabidopsis thaliana columbia
  unsure (1)..(313): unsure at all n locations
cggaccgcccgtgggcagtnnagtcatatgcctttgtctcatnaagattaagccatgcctatgtgtannagtatgaacccgaattctagactgnntgaaactgnncgaatggctcaaattaaatcagttatttagtttggtttgggatggtaactacttnnactcgganntaacctgtagtnnaattcttaganngctaatatncgtgctaactaaactctccgactttaatggnnaagggactgcctatttattanngataaaagngnntcgacgccgggcctttctgcctcgttgcttctngnnatgattc

SEQ ID NO: 181151 - DNA, 51 bp, Arabidopsis thaliana columbia
gagaaaaccgggtcgacccgggctacggttttttttactatctttaattat

SEQ ID NO: 181152 - DNA, 394 bp, Arabidopsis thaliana columbia
cggacgcgtgggagatgatggaggtatatgagaaaatgaggttaagtggaatcaaagctaatcaaaccatcttaacaactatcatggatgcgtctgggaggtgcaagaatttcggaagtgctcttggttggtataaagagatggagagctgtggggtaccacctgatcagaaagctaagaatgtgcttttatcattggcttcaactcaagatgagctagaggaagctaaggaacttactggtatcagaaatgaaacagcaaccattattgctagagtttatggatctgatgatgatgaagagggggtagaagatataagtagtgaatctagtgacgatgaggatgaaggagatgacgatgatgatgatgcaagagaaactgtgttgtattgata

SEQ ID NO: 181153 - DNA, 113 bp, Arabidopsis thaliana columbia
ccgcggctactcatttctcttttaatctcaggcagtattgtgaaatttttcgatttcgtagatcaaaatggcggcaccattcgcgttgaggaaaatcggtgttttttttaact

SEQ ID NO: 181154 - DNA, 277 bp, Arabidopsis thaliana columbia
gagatatttaagtttagcaaaaaaatcctaagcttctacaatggcgaatcttcccaccgttctcgtcaccggcgctagtggcagaacaggccagattgtgtataagaagctgaaggaggggtcagacatgtctgtagcaaagggtttagtttgatgagcttaaggcaactagaatctttaattagacgctttagtttttattttggtaatctcatttactataacttttttgtattagtttattttgtatttttttttttttattttatttttaatt

SEQ ID NO: 181155 - DNA, 207 bp, Arabidopsis thaliana columbia
ccgaaagcatgttcttcgtatggctaaaagcatcaaagatatttcgacaaagcttgggttgccttggttttcaagcagtttgataactaacaacttatcaaaccttcgggcctgcatgctgatggcttagattttgagatgtaatgatcatttatttacatttcttttttttttttcatattaatatttatatttattttttttttt

SEQ ID NO: 181156 - DNA, 94 bp, Arabidopsis thaliana columbia
tcgatccgtcgaccacgcccgactttgaaattgattcatctaagaagcaacttgttttcatggctgctcaaaccgaccagtcccaagaagagag

SEQ ID NO: 181157 - DNA, 54 bp, Arabidopsis thaliana columbia
atttattattcggaaggcgacaaaaatcaatttatttaaaaaccgagacgaaac

SEQ ID NO: 181158 - DNA, 84 bp, Arabidopsis thaliana columbia
ctcgttatgatatgttagattgggtcgctaaatgcaaactcaatgtttggtaagggtattgctgaaggagctgagatcttagaa

SEQ ID NO: 181159 - DNA, 128 bp, Arabidopsis thaliana columbia
acgctttcacacgatcggataaaatggcggagagatctttagtacatcatcctcggcggcggcggtctgccttaccgcggtgggagtttttatcttgtgtttttctttattttttttttctttttctt

SEQ ID NO: 181160 - DNA, 344 bp, Arabidopsis thaliana columbia
  unsure (1)..(344): unsure at all n locations
cgttaaggaaaacggcgcgggattggttctttgtttttcnnctttgcgnttttctttctttgttgtttttttttttttatttgtgtgttttcttttttgttctttttttattttttctttttttttttttttttttgtcttttttttttttttttttttttttttttctttttttttttttttttttttttttttttttttttttttttttttttttttttttttttttttttttttttttttttttttttttttttttttttttttttttttttttttttttttttttttttttttttttttttttttttttttttttttttttttttttttatttttttttt

SEQ ID NO: 181161 - DNA, 107 bp, Arabidopsis thaliana columbia
tctctctacctctcgtttttggccaacgtcgtcgtctttacgatccacgacgattcagttcttgagttccggcgattatcggtctgtcacttctggttccgttgaac

SEQ ID NO: 181162 - DNA, 241 bp, Arabidopsis thaliana columbia
cttcttcttcctcttcgatattcgtcagtagtagtgtattttggggaaaactttgtgagcaaagagcgagaaaatgagcggagccggtaagaaaatcgcggatgtggctttcaaagcttcatggactatcgattgggacgtgtatgacctttcgttcattgtcattaattattgtttctttaatttatttgttttaaattctatttcttggtattaagatatttggtttaatttttatttt

SEQ ID NO: 181163 - DNA, 314 bp, Arabidopsis thaliana columbia
gaggaggagaaagcggcgcagagcgtggcggtgtccgtggtgacttcgggcgtggattcggcgggggtcgtgtatggtgtttgggtctttttattttgagttgtgtttttgtgtttgtgtttttttatttttttatttttttttttatatttttgttttttttttttttttttttttttttttatattttgttttttttttttttttttttttttttttttttttttttttttatttattttttttttttatttttttttttgtttttttttttttttggtttttttttttttttttgtatttttatttttttt

SEQ ID NO: 181164 - DNA, 309 bp, Arabidopsis thaliana columbia
cgatcctcccggtgaaccaaaccaaccaaccccaaagccaaacaaagttttatagagaccttccatttctccctctcgtgacaaacgcaatttgcagagaagcaacagcaacaacaagaagaagaagaaaaagatttgagattactttgtatcgatttagctattcgagaaactcttgccgtttgaaagttttaattgttaaagatgtcgagttctatggaatgttctgagttcagcgggtgccgtaagttttatctggaagtagccaagctttttttcagatgtagttgttgaatttattcaattttc

SEQ ID NO: 181165 - DNA, 336 bp, Arabidopsis thaliana columbia
  unsure (1)..(336): unsure at all n locations
ctcgcgatgacgacgttttcaacgagctttcttttccttttgntggntttntgattgatcgggttattttattttgatgttgtgatcttttttttgtttttttattttttattttttttttttttttaatttttattttttttttttttttttttttttttttttttttttttttttttttttgttttttttttttttttttttttttttttttttttttttatttttttttttttttttttttttttttttttattttttttttttttgttttttttttttgtttttttttattttttttttttatttttttttttttttttttttgtttttttt

SEQ ID NO: 181166 - DNA, 303 bp, Arabidopsis thaliana columbia
ctttaacaaaaaaaaaatggcaagcgcgaatcctttaaccgccaaacccacgcctgcaacggtggacatggctaatccagaggagcttaagaaagttttcgacctgtttgactttcactgcgtcggctagtatctttgttctttttactttcaatttatttttattgcttgtattcatttcatttttattttttttttctttatttttattatttttggtttattattatttttattttttttaattattgtttcatttttaatttaattctattttcattttttattttatattccttttta

SEQ ID NO: 181167 - DNA, 278 bp, Arabidopsis thaliana columbia
gaaataagcttcttccaagaagactggatttgattacatggactcaaaaaacactcttttataaaccttagaagaagtaaatctttctctctatcaatgctcttctttaccaaaaacatgtattactatgtgttattgcacaccaaacttttgttgtatttgagcttcatagaatcttatggttttgtctatatgcatatcgtcgtgtactgattagtataggcgatatccttatctctgtagcgactcatgttggttcgcactttgtggtgcagttt

SEQ ID NO: 181168 - DNA, 120 bp, Arabidopsis thaliana columbia
ctcgtcaattcagctgcgacaatggatttccaggtcgttattctagccggcggattctctagttatcttgttcccttagtcgccaaggaagttcctaaggcgttgcttcccgaatcgatt

SEQ ID NO: 181169 - DNA, 72 bp, Arabidopsis thaliana columbia
agaaaggggagaagcaaaaatggtttctctgaagctccagaagcggctcgccgcatcagtgatgaattgcgg

SEQ ID NO: 181170 - DNA, 170 bp, Arabidopsis thaliana columbia
  unsure (1)..(170): unsure at all n locations
aaacagaacgnagtttgagtcagactgaagttgagatgtatagcgtggaagctgcttcgtggtgccggggttatctattgtcggttccatttcacattcaaatttcttgttatgattcataaaaatatatctcacttcttattctgttaattaatagtctatatattttt

SEQ ID NO: 181171 - DNA, 364 bp, Arabidopsis thaliana columbia
agagaaagcatgtataaactgtcactgaatcatttgactcttcagtctgtgtctgcaagtgattcaagaaacccctttgtagagcatgcgatacagtatgctatagctgctgctcatttggcaaccgagaaggacaaagaatcattgcacaaactcttattgcaaggtcttgatataacaatattaggctccaatgacttttactcatatcggaaccagatagaatcggctgggcttccattgacaccagaatcgctgggtacccttgcaccgtttgcatcaatcacattcaatgctgcggagtcaaatggtgctaattccaagcctgaagtatcaaaaactggcttaggttcttctgcagcaa

SEQ ID NO: 181172 - DNA, 377 bp, Arabidopsis thaliana columbia
gttcatcaccaagactccatgaatcagcagcatcgacacaatcctaattctagaccacttcatgaaggtcttccctttactatggttacaggtcaaacctgtgatcatcatcagaatcagaacatgtctatgtctgagcaacagaaagctgaaagagagaagaattcagtgagtgatgatgatgaaccaagtttcacagaggatggtggtgacgggggttataggtcctgccaggagaatttttttgcctgttggttttttggatagaacatggattctatagtacttatacggtgtttttgcttgagattattgtttttacccaattttggcttatttattaattctgtttaatctttgttaatgtattaaatttt

SEQ ID NO: 181173 - DNA, 90 bp, Arabidopsis thaliana columbia
gctaaggagaggcgaattcgaatcgagaagatggtgtctgtgtcagggatatgttcaaagcgtgtcgttgttgacacacgtcaccatatg

SEQ ID NO: 181174 - DNA, 56 bp, Arabidopsis thaliana columbia
attcagtcgccacgcgtccggaagatgtatcttaaaacgcagcaggtttttttccc

SEQ ID NO: 181175 - DNA, 61 bp, Arabidopsis thaliana columbia
gcgacgtcttctctctcacggccataaaaacagtgtaccttccatatgttcctcataccgc

SEQ ID NO: 181176 - DNA, 89 bp, Arabidopsis thaliana columbia
gtccaggaaaatcatcttctagctaaggatgttggaatgtgtgaagatgacttctacgggaaccttggtatggatgtagttgtcttggc

SEQ ID NO: 181177 - DNA, 217 bp, Arabidopsis thaliana columbia
cgactctcgtaatagtcgtgatatgttcaataagctttcttcaatggcgtatggttctttcggcgtctcatcaaaagctctagtctattgccgtccctgctatggctccattagagatctccctttctccctccgaacgtcaacaattggtcattgcggctgtgttggagctatcgcagcacctataaatgttgtgaaacctcgcaaggaagaaagt

SEQ ID NO: 181178 - DNA, 384 bp, Arabidopsis thaliana columbia
agagagctgtgttggtttttgaggtaaaagaagagacccaatttcgatttggaggatagagacgaagaagaagacagctccgatggctgatcctgaactagaagctattagacagaggagaatgcaagagctcatggctcgacaaggcatgggtaagcagggcaatcagcagaatccagagcaagagaaacagcaggaagatgctaaaagggaagctgatgaacgtaggcaaatgatgcttagtcaagtattgtctttctcaagcccgagagagaattgcttgaaatggtctggggaaacctgagaaagctagaggttgtggaggatgttatttatttcgctctcattttatattgtcttgtattatttttatctagtattttc

SEQ ID NO: 181179 - DNA, 81 bp, Arabidopsis thaliana columbia
  unsure (1)..(81): unsure at all n locations
cattattccatctctcttatcgccgctacaaacgttttttcttcaacctcgntcagagattaggcggcgttcttttctcat

SEQ ID NO: 181180 - DNA, 433 bp, Arabidopsis thaliana columbia
tttagatccaaaactcttctctgtctctctcaagatttatgttttcgtaactgtaactcatagcaaaaacgagtctaagatctgttcataatgatgatgttcaagagcggtgacatggattacacccagaaaatgaagagatgtcacgaatatgtagaagctctagaagaagaacaaaaaaagattcaagtctttcaacgtgagctccctttatgtttagaacttgtaacccaagctatcgagtcatgtcggaaggagttatcggaatcttcagaacatgttggcggccagtcagaatgttctgagcggacaactagtgaatgcggcggtgccgtgtttgaagagtttatgccaatcaagtggagttctgcttcatctgatgaaaaccgataagatgaagaagctgtgaaaactgagatgatgaccaatgaaa

SEQ ID NO: 181181 - DNA, 402 bp, Arabidopsis thaliana columbia
  unsure (1)..(402): unsure at all n locations
aataccgtttgccagatgattatggggaggagtttttttttttttnnntgtnnnnttnttttgtgttgggtttttttgtgtggggttgggttnttttttttnttttttttttttgttttttttgttttttttttttttttttttttttttttttgttttttttgttttttttttttttttgtttttttttttttgttggtttttttttgttttttttttttttttttttttttttttttttttttttttgtttttttttttttgtttttttttngttttttttttttttttttttttttttctttttttttttgtttgtttttttttttttttgtgtgggtgttgtgttttttttttttttttttttttgtttgttttttgttttttggttgtttttttttt

SEQ ID NO: 181182 - DNA, 298 bp, Arabidopsis thaliana columbia
tcgtttgctccacttttacctttgaaattttgttttttttttaatttttgcgaaatttcaggagtgtgtttggttaatgtgagttgggggtatatatagattttttaatttttttttgtttttgttttttttattgattatttattatttttaatttttttatttatattttatattttattttttatatttttatttttttatttaatttttttattttttatttattttttttttattttttttttttatttttgtttatgtattttgtttgttttttttgttatattattttttt

SEQ ID NO: 181183 - DNA, 233 bp, Arabidopsis thaliana columbia
catcgtcggtgttggtaactgcacatttcatattttatagaaagaagttgctagaatggatattccacatgaagcagaagctggagcttgtgttattctcacttgattattttttatttttaatttcttattgacgtttatttagaatctattatattagttttttgttattttatttattttgtttatatattgttttattgtattatttttatttatacattataattttt

SEQ ID NO: 181184 - DNA, 258 bp, Arabidopsis thaliana columbia
gtcgaccacgcgtccgcaagaacggagattggctatgttcttgatgtttgttaacatacggacaaagccatcgtcactggggcggcgaccgatagagatctgcgctgtccatttgtccgatccaggcaacaacaacgcacggacctatgacaccatatttggtactgaattgtgagcccaggggtaaggggatctgatttaaatcttttttttttgagcttgtgatggaataggtattgattcttgaaatagtgtttg

SEQ ID NO: 181185 - DNA, 196 bp, Arabidopsis thaliana columbia
gaataacagataaaactctctgtgtgagtgagtgagactcaaccatggcgtctttggctcagcagattctcgggattgagatgttccccactctcttcttcttctaggttatcgaggagagcttcgaagaactttccccagaacaaatctgcctctgtttctccgactattgtcgccgcggttgcaatgtctagcg

SEQ ID NO: 181186 - DNA, 266 bp, Arabidopsis thaliana columbia
ctgagcaaaaaaaatggtggagcaagggagatacgctctggtggtagcgactttggactcagagttcgtgaagaaaacttacggaggataccacatcgaaaactaaaaatgtatgattgtccattgttagattttgacttctactttgtagtttatattttttttatttattaatatatatttttattttgttgacatatgtttttttataatattattaagtgattgtatttattttgatattattttattaattataattatat

SEQ ID NO: 181187 - DNA, 421 bp, Arabidopsis thaliana columbia
cgaaaccaattataggatttgggcttctgcagcatgaatccaagatgtcggttctgcattttagcgtaaagaagtatgatggttacgaagcttctattaaaacataagatgagcttatgttccatgttggtttttattatttattttttgtctgttttatttatttgttaatttattatttctttatcgtattttttattcttttttattttgaatttatttttttttcttttttttttttattttgttttatttatttctattttgttatttttatttttttttttttattttttctttttttttattgttttttgtttttaattttattttttttttttttttttttttatttttttttttttgttttatttttttttttttttgtttgtttttttttcaattttgttatttttagttt

SEQ ID NO: 181188 - DNA, 63 bp, Arabidopsis thaliana columbia
cttgccgatccgattagagactcgccgttatagttgaacacacacacagacattttctgcgat

SEQ ID NO: 181189 - DNA, 446 bp, Arabidopsis thaliana columbia
ggagtgatggaaagcttgttactcgaataggaaagaatagtgccaccgttctagcggtgttgaaaacgttggttcgctttggggctcctgataatatattggtcaacggaaagcctcatctaggaacagataagctagttccattactccgtaatttcagacattatcttcaaagtgcgggagtatgttttgaatgagagattgatctatttctctttattacttcttaaagcttttcttttaataatattatctctatccatgtaaatgttgattttaataattttggactattttcatgtttgtattttctatctgtatcctattaaatctctgtttcgttaattttatttatatttcttcttatatgcttaaattataaggctgtataatttgagtttattttatttattttggttttaattatttttaatattaaattattt

SEQ ID NO: 181190 - DNA, 58 bp, Arabidopsis thaliana columbia
cgacccagcgtcgttgatcgaaacctgaaatccgagcttctttgccgcaaagtgaccg

SEQ ID NO: 181191 - DNA, 389 bp, Arabidopsis thaliana columbia
gagaagcactatgctgacatttctgaagatcaatttgatttccactcgtattgtttaaggaaaatgactttgcgttcatatgttgatatgcttaagttccaagaccgattgcactcattcccatatttccacaaagcatcaatcagagctatcaggtgctacccgaaattgcatgactctcccaagtcaactgctggagaagattatttgtcaaagttttttccttattagaattagttatctcaatttcttagatttagtctttatctcatttctatttaaattatttgtctattttacatttcatttgttatatttttctttatgttctaatgtttttctcttcttttttatttattctaatgatttttctttctcttcttttttta

SEQ ID NO: 181192 - DNA, 51 bp, Arabidopsis thaliana columbia
aaattttcaatctttcgtcggaaaaaagattattattaagcagagctggtt

SEQ ID NO: 181193 - DNA, 81 bp, Arabidopsis thaliana columbia
agtttgatacaactaaaaaccgttatctagctgcgggtgatgatttctccatcaagttctgggatatggacgctgtacagg

SEQ ID NO: 181194 - DNA, 234 bp, Arabidopsis thaliana columbia
atctttcttcttttcgatcaaattttagattcaacccaaaatgaagacaaaaatgctgcaacgtactctctagaatctactgaaccaaggacagttcaacccgtccggcttcagccgacctgacggtgcctccgcttgacctttctgggattttattgattttatttttttttatttttttttgtattgtttttttttttttttttattttatttttttattttttttttattt

SEQ ID NO: 181195 - DNA, 352 bp, Arabidopsis thaliana columbia
  unsure (1)..(352): unsure at all n locations
cggacgcgtgggcttccttctcctttctctgtttttttgcttcgttncctcttctttttgtcgattttattcatcttgttgagacttactcttttattttttattattttttttttttttattttcctattgtttttttttttttttttgttttttttttttttttttttttttattttttttttattttttattttatttattttttttttttttattttttttttcattttttttattatttttttattgttttttctttttttttttttttttttttttattatttttatttattttatttttttcttttattgaattatgttttttttattttttttgaatttttttt

SEQ ID NO: 181196 - DNA, 357 bp, Arabidopsis thaliana columbia
caatttgagaccatctccagttcgtcatcgtacgacgactctctctctctctctcctcttctctgtatagtcgaattatattacaagttagatagatagcatgaattggttacctgaagctgaagctgaggatgacttcaaaggtcttctctctggtgatttctttgatgatctcatcaatcaccttgacgtccctcttgatgacattgataccaccaatggtgaaggagattgggttgacaggtttcaagaccttgagcctcctcccatggatatgttccccactttgccttctgacctcacctcttgcggctctggcatggccaaggcccctcgtgtggatattcaaaggaacat

SEQ ID NO: 181197 - DNA, 152 bp, Arabidopsis thaliana columbia
gaatttttcttattttctagtacatataaaatgtaactatgggtcataccaatcaaattacttctttgaaattttaaagaaaacataaatgttaataaaaaggacattctataggaaaaagggtttatactctttaatgaaaaagaatccct

SEQ ID NO: 181198 - DNA, 281 bp, Arabidopsis thaliana columbia
tttttttttttttttttttttttttttttttttttttttttttttttttttttttttttttttttttttttttttttttttttttttttttttttttttttttttttttttttttttttttttttttttttttttttttttttttttttttttttgttttttgttttttgttttttattgtttttttttttttttgtttttttttttttttttttgttttgtatttttgttttttggttatttttttatatattttatttttttttttttatttttttttt

SEQ ID NO: 181199 - DNA, 84 bp, Arabidopsis thaliana columbia
aatcggctatacaatcacatcacatcgttttgtttcactagacggcacatacttggctgctatatgctaatagtaggggttatc

SEQ ID NO: 181200 - DNA, 234 bp, Arabidopsis thaliana columbia
gtttctcttaagcttctctcacatttctctttttatatttcttcgagtctctctcgctctctccgtttcttcgcggtctctctctctcagatctctccgaaacattcttcgtagtgaagcaaaatggggttgagtttcgccaagctgtttatcaggctttttgccaagaaggtgattcaatttcttgtggttggatttgatgctgttatttagactttgatttagtacatgctt

SEQ ID NO: 181201 - DNA, 67 bp, Arabidopsis thaliana columbia
  unsure (1)..(67): unsure at all n locations
cggacgcgngggnnaganccacacacngcggtttttttactgcggagaaaacattccgagagggggg

SEQ ID NO: 181202 - DNA, 62 bp, Arabidopsis thaliana columbia
  unsure (1)..(62): unsure at all n locations
gagaagcggcgcagacgtggcggngaccgtgtgacttgggcgtggattcggcggtggacgtg

SEQ ID NO: 181203 - DNA, 216 bp, Arabidopsis thaliana columbia
ctccacgcaaaggctcaatttttacaaaccatgtttatttcttaagcaaaacaagtctaacatctttttgaattcacccaaaactcaaatcctacctcaaatttcgtatttttcttcttctgcattttctagtttaggatcgacatttttatcctccgaaagattcgtgcttttttctctctgtagattaacgatgttttgtagaattaagaaaaa

SEQ ID NO: 181204 - DNA, 380 bp, Arabidopsis thaliana columbia
cgcacggaggcgcccgcacaggacagcaaccctaggtatcaacagcagaccacaatccgcgtcgctgaacggacgcccactgccccaagggccagcgccccacaccaccgccgcccccttacacctgcggaccagcccaactccccacccctccccccctccctcccccccccccctcctcaccccacaccccccccccccccccttacccaccccccacccaccacccccccccccccccacccccccccccccccccccaccccctcccaccccccaccccccccaccctccctcccacccccccccccacccgcctccctatcccccccccccaccccccacccccccccccccccactccccccccaccccccccc

SEQ ID NO: 181205 - DNA, 380 bp, Arabidopsis thaliana columbia
  unsure (1)..(380): unsure at all n locations
attttaataaaaaaaanaatgaaaaagggaaggaatataaaaaggaagaggagaatattaatataaaaaaaaaaaataaaaataaaaaataaaaaataaaatgataaaaaaaaaaagaataaaaaaaaagaaaaaaaaaaaaaaaaaaaaataaaaaaaaaaaaagataataataaaaaaaaataaaaaaaaaataaaaataaaaaaaaaaaaaaataaataaagatattaataaaaaagaaataagaaaaaaaataatataaaaaattaatgtaataaaaaataaaaaatatagaaaatataataaaaaaaatttttaataaaataaaaattaaagtaaaaaataaaaattaaaaaaaaattaagataatataatatat

SEQ ID NO: 181206 - DNA, 65 bp, Arabidopsis thaliana columbia
  unsure (1)..(65): unsure at all n locations
aanttnngataaatcaatgagacagaattgatttgtctaattcaatgttaataaaatttatataa

SEQ ID NO: 181207 - DNA, 337 bp, Arabidopsis thaliana columbia
aaattatggaaggttttaggaaaaaaaaatttaataaaaaaaaaaaaaaaaaaaaaaaaaaaaaaaaaaaaaaaaaaaaaaaaaaaaaaaaaaaaaaaaaaaaaaaaaaaaaaaaaaaaaaaaaaaaaaaaaaaaaaaaaaaaaaaaaaaaaaaaaaaaaaaaaaaaaaaaaaaaaaaaaaaaaaaaaaaaaaaaaaaaaaaagggggggggctttttaaaaaacaaaaatttacttcccccagtatgcgaaagaatattttttttaatggggcaccaaaaataaaaaaaattgggccgggttataaaaacgattggatggaaaaatcctggggaac

SEQ ID NO: 181208 - DNA, 154 bp, Arabidopsis thaliana columbia
  unsure (1)..(154): unsure at all n locations
cccctgtaagctctagagagaaagagagagagagaaggattttaattttttagaagncagagnccgagcggacaagganccgaagaggcaacctatcgtaacatccacacacagnggcaaggacaacaaagagccaccacccgcgccgatgatc

SEQ ID NO: 181209 - DNA, 116 bp, Arabidopsis thaliana columbia
  unsure (1)..(116): unsure at all n locations
agaaaatatgnggagagcaaagnncccattaaattcaaagaagaaccgaacgagagagagagaggaattcttcggaagtggtaaagaacgtcacggagacaagatagccggaccac

SEQ ID NO: 181210 - DNA, 63 bp, Arabidopsis thaliana columbia
  unsure (1)..(63): unsure at all n locations
ggaaaaatggcgtgtttcgcaaccaaacattcatagttgnagncacaccacctagccaggggg

SEQ ID NO: 181211 - DNA, 255 bp, Arabidopsis thaliana columbia
gaaaaattccattttcctcattgattgtaatagttagatcgaagagagaaggagaaaatgggcatatagagatcatggtatttatatttgtaagatgtgttgttggtatttttttattttttttatttttttttatttttattttttttactttttatttttttagtcattttgatatttttacttcttcttattttttattttttttttattttttttttattgttaatggattttataattttttatttttaa

SEQ ID NO: 181212 - DNA, 343 bp, Arabidopsis thaliana columbia
ggaaaattgatgaagataggctcatataggtaacttgacaaggggaacataaaggggggctactagacaatgtacagtttagaaggaagctggaacgatcgttgaaacttgctttcgacccatcggagagctgaggtggtgaaaaccacttgcaataagaggggtactacaatttttcaagacgttgatcttggagctgtttaagacactcttgctttgcttttttagatgaagctccgtacataataacttttgagataaatgttctttgactaatttttttattttacatgttgatattcttttcaactaattttttttctttgtaattaaatttataatt

SEQ ID NO: 181213 - DNA, 314 bp, Arabidopsis thaliana columbia
  unsure (1)..(314): unsure at all n locations
cttctttcttcgcgaagaagataacccaaaaaccaaaagattaatttgtatatggtgacaacggttttgtattatcccaccgagcctccatnncaatattnngctcatattgtnnatgagcccgtcgtntggtgggtagcctgctttctggcccanatatnnncggttggggtctgggaaatcangtnaggaaatnctatctcataatacctttccaaatnntcggcgtatttcatcnnatcatcatccacatcaccacacgaatggagcccgattcggcaagcattctcaaagcccgaaataggaatggcttt

SEQ ID NO: 181214 - DNA, 396 bp, Arabidopsis thaliana columbia
attgattaatcgatctgagaaagatgggttagttgagtcatttgttgggaaaaattggaatggattgaaggatttctggagtgataggttatcatttttcgaaaattacaccagattcaccaaacgcgacgcgcctcttccttcttggtcttcctccgacgtcccggaatccattgcctccgatcccgctcatggacccaatctgaaaacggatagggaagctgctacgtttgaaggtaccggagctgcacttagagttgactatactgactgtgacgactccttagactacagatggccacatgatgctagatccgacgttttagtgacgtgaggtattacatgcttgcttttcacaagtggtcccataagtcgcagtggatcgttcccagcttg

SEQ ID NO: 181215 - DNA, 358 bp, Arabidopsis thaliana columbia
ccggaatatgagtctatgcctgaggatttcttcttagcagacgacaaaaatcggggtccttcggaagggcaaactagctcgacccacgaaagctccgacatctccatggccaattcccgcaaaacatcaagaagcttggaaggaggtttcatcataggaagccaaccaagatcactctcgtccaagctcgcaaaagaagattgccaagatgaagggtcgcactctggatacggaagaggaagggacccgtgaagctaggttgccacaaaagactgtaatgcgtagatgcgtgtctaggcagctggtgagaaatcagagagacaagaagattgcaagacatgtaccatgacatgacatg

SEQ ID NO: 181216 - DNA, 175 bp, Arabidopsis thaliana columbia
  unsure (1)..(175): unsure at all n locations
atcaatcaatcaggcaancttggctatgttcggtaaacacgaacancaacgccaaatggggaggactagttatacgttggattctggacaatcaagcaccagcgcaacggcatgccactgcagatgtagatattgcagcagctaatgtacactatcactcttttaactgcggtta

SEQ ID NO: 181217 - DNA, 463 bp, Arabidopsis thaliana columbia
cggctatctcggatctcgtcacttatgtacagcttcttaataacgtatgcgtagaaacgctgctctattatgtcatctctcagtgcgacatttttcctccaatcgttctaccggcgacatatgtcccttgctagggttaccacgaacatctgcaatctcgtttcaggatacgacggaaaacgaatgacgtaaaggcgacagttgctaagagtccataaaaatatgcaaaacgaaacaaggttatggctgatcactcagagaccaagtcgacagaagctcatcttcttctacagcaagagcacctgctcgatacgcaagcccggctcgaggaacaaccgcacacatgaaagctgttgtctggggaagaacgaaactgatcaaaagctgctgctgcagaggcggacgtagaataatcggtggacaaagaggaagttatgactgggggcaacctgagccggttatt

SEQ ID NO: 181218 - DNA, 74 bp, Arabidopsis thaliana columbia
agagaagcaaaagaaaaaaaagccagtgtttgaaatgatgacagaagcgagactatggcagaaggatcggggac

SEQ ID NO: 181219 - DNA, 435 bp, Arabidopsis thaliana columbia
tatcaatttctattatgctttttcacaactatcatactttttatcaaccacaaaaacgccagagcgggtttttttaaggtttttttttttttttcagacatcaatctttttcttttatttattttatacttctatgtgcttttttctttttctttcatcttatatatttttctattatatttttctttttttatatttttttttattttcatatctattttttatttttttttttttaattttttatttcttttccttttcttatttaaatattttttttattattaattttttatttttataattattttctatattctttttattttttttttatttatttatatatttattatttatatattttttatttttattcttataattaatttattatattatttatttaatcaattttattcttatttttatatt

SEQ ID NO: 181220 - DNA, 283 bp, Arabidopsis thaliana columbia
ggccgcccttttttttgtaattgagagtgtgaataatatttctggccctaaacaccaaaccgatgatctttattaaggtccgcgggaaacaacaaacacagaaaagggcactgcgcaccaagcggctatgatgggtggagagcactacctcaacaaaccaaagcgagacgggccatgccgagagaatacactgcagcagtgcccagataccatgccagggcacccctataggccccaacacaagaaccggacatagtagagggtcaaccacagcaggagaatc

SEQ ID NO: 181221 - DNA, 81 bp, Arabidopsis thaliana columbia
cggacgcgtgggcgggtatcatggtggataagatacagctccacggccaagagaatcgaaataggtgtgtataagggggtt

SEQ ID NO: 181222 - DNA, 64 bp, Arabidopsis thaliana columbia
tcgtgaagctgatcggagcaactgcgagaccctaattaattaggccgcagaccgcacaaaaccg

SEQ ID NO: 181223 - DNA, 82 bp, Arabidopsis thaliana columbia
  unsure (1)..(82): unsure at all n locations
gccaagctcatcttcaacctctctctaactctagtattcgaccccacaagggcngacaagaggggggggatcgggggggcgg

SEQ ID NO: 181224 - DNA, 115 bp, Arabidopsis thaliana columbia
ccgtccgatcccgtcgacccacctcccaagctctctctcatcaaaccaggaccataattatcgccagcagacttagcgggcttttacaccaactctggtgcacctgacggacaca

SEQ ID NO: 181225 - DNA, 437 bp, Arabidopsis thaliana columbia
ggaggatgatgatgatgatgatgacgatgtatttgtgttgattttttggtaaaatcaccaaaagaagattgtttggaggttaaggaagaagatgttggtgctgcagattcaagaaaggatgatggtgctgtcgacttgaaagaagacaagtatgtggaagaacatatgctcgaactgaatctcgggcaagagacagtgtcagaaatggtctctggggaagagcgaggtcctgttgagggacagccaatggatgttgaggaaaataagaaagaagaggatgaaaggtgggcatggaatggagactctcatgctggttctcattttcttcgccgttgcaatcatagtagtgccagggagggaggcgaagataatcatatagaaggatccatggaaatgggagaagatgaaccaattgaagatgtcgaggaagaggaaac

SEQ ID NO: 181226 - DNA, 187 bp, Arabidopsis thaliana columbia
  unsure (1)..(187): unsure at all n locations
ctctgagataataaggacttgtgaaccnttactacatttaaaggcacaccaaagagacaagggggcattttaagaggcttttcctgccgttgcacctccccccgtagctgagccagcggccaacccagaggacatggactaaaagaccgcattggagtagactcctaagaaagctcgcgcatatgga

SEQ ID NO: 181227 - DNA, 252 bp, Arabidopsis thaliana columbia
  unsure (1)..(252): unsure at all n locations
ctcggcgctctactcaatctctctctcggnaataccatccgagccgcgctctctctgtgtgagctgatctcagccgattgattaatgcctcaccggaataaggaaaacccacctggattcattgattaggcggaagaattcggaaccaattctgaaccagacctgaaatcttcaatggcgcggaagaagccgagtgctccaggtgggtatgctgtgcagcaaccttctgcgtgatctctcggtggtgctgct

SEQ ID NO: 181228 - DNA, 126 bp, Arabidopsis thaliana columbia
gcgaccgaacacggacaaaaaaaaagccaaaagggagcgatatataagcgcaacaagggcgaacgaggaggggggggtagaagggaggccaagggccgcccaaaaaaggagcaggacgaaagaggg

SEQ ID NO: 181229 - DNA, 52 bp, Arabidopsis thaliana columbia
ctctccggctccgaaccaaacacgttctccggcagtaaaggtcaacgccgcc

SEQ ID NO: 181230 - DNA, 168 bp, Arabidopsis thaliana columbia
gcaaaggctcacggaagtggttaagcactcgataaggaaaaggttgtcagggtggccatagtgacattcatgaaccttctttcaaaatgtacaaaccggcgcccagatggttgatcttggacttccacatatgatccacagtctaaaaacgcaagcaacgatggacga

SEQ ID NO: 181231 - DNA, 90 bp, Arabidopsis thaliana columbia
  unsure (1)..(90): unsure at all n locations
gggagtggctaataagctatgtatggnaatttgtttancanggaagacaaggaaagggggtaacaagcattgtaggcataaagcaaagga

SEQ ID NO: 181232 - DNA, 257 bp, Arabidopsis thaliana columbia
tgctctgcgagagaccatccaatctccaccgcgcgaattatttatctacgaagacgaagatatccagcgacttttgctcgctaggttgttcttcttcacaagccaacgctttctctaacgatcaccggtgaccattcgtgagaaagttggaatcagcagaaggtcgtgacaatggccattgagcaggaaaaactcactcaaaggcatgctgtcaattttccaagagagtccgaaagacctaaacctggaaggaggcc

SEQ ID NO: 181233 - DNA, 446 bp, Arabidopsis thaliana columbia
ggagatggccgccattacagctctcactctccgttctcctgtttatctcccatcatctgccacaagccctagattccatggcttcaccaatcaaccaccaccagctcgtctcttctttcctcttaaccccttcccttctctatcaatccaaaaccctaaatccatccgaatttccgcatccgcttcgccgataacaacaccaatcctccagacggagaagtcaacagctcggtcatcgacactcaccgggtccactcggtctctcgctactctcgcggctttagcaatcgctgtaaccagagtcctagctcagaaactctctctcgcaatccagacttcaagtcccgtaatcgccgacgggttacgattctctctcagtaccgccggacctgtcttcttcgcgtctctccgggatcgtccctccggatacttgaacacgccgctga

SEQ ID NO: 181234 - DNA, 403 bp, Arabidopsis thaliana columbia
  unsure (1)..(403): unsure at all n locations
aaaatggaaaccaaaatccctaagtcaatgatcgtcggtgtacagactgtcatgccggtggaagtgacgcaacaccgggaaatccgctccgtatccgtcgtagatcccgtcggagtaggaatattccggcgaacggttaacatagttacgtattacaaagaagcaggtgatagtggtggtgagagagggtggttagtcgccgggtggatcaaggaatctttagggagagccttgacggagcagccgatgctttccggtaggctacggaggaggaagacggcggggaatgatggtttggtgtttgtggccaatgatagtggtgtgaggatggtgtttgattatttttcnattatttgtctttatttttttatttttttatattgtttatatttgttattttatt

SEQ ID NO: 181235 - DNA, 138 bp, Arabidopsis thaliana columbia
  unsure (1)..(138): unsure at all n locations
aatatcttgaataaaattataataacaaactaattatgacttccgcaaaagcatacactcagagggcttcttaagggatttattatcaccaaacacccaccaaangcaaaaggaccagagagccagaaaacgaacaaa

SEQ ID NO: 181236 - DNA, 205 bp, Arabidopsis thaliana columbia
  unsure (1)..(205): unsure at all n locations
aataattttttttttttttttttttttggggggtttttttttaagtttttttttggaaaaaaaaacccatntnaaattgggcaggcaagttaaatcatgaatttggttgagaaaaaaaaaaccaattaactttttttttttgttgaatgcctagaaagaaaataaaaaaaaaatgacaaaattggtcaagttgaggctgttaatc

SEQ ID NO: 181237 - DNA, 53 bp, Arabidopsis thaliana columbia
gacgaagatgtcgttggtatggacggaagcgatgaatcctactcaaaacaacc

SEQ ID NO: 181238 - DNA, 263 bp, Arabidopsis thaliana columbia
  unsure (1)..(263): unsure at all n locations
aaccaacgcaaaacactaactaagagatttagattactggagcgacgaagncggcaagcgaggggcgtggctagacaagattgtttccaccaccaacacacaccgaacgcacnaaagagaatgaggcacacgtcaacaggcaaccagacaagggagaacagcctacatagacccgaggtgcaccacataacacaagaggtgcaacaacgaaaaaactaaacaaaaaaaacaagaaacagaacaacacacagaccgacagcaag

SEQ ID NO: 181239 - DNA, 149 bp, Arabidopsis thaliana columbia
atccgtcgaccacgcgtcgcatgtgacatgacggtgttcttctattcttgctatgtggatggatggtcgatgcaacgaccgatctggttcagtctaagacgtggttagttgttctggggggggtaccggtctggttggggatcgtgttg

SEQ ID NO: 181240 - DNA, 253 bp, Arabidopsis thaliana columbia
aaaaaaaaaaaacaaaaaaaaacaaaaagaaaaaaaaaaacaaaaacaacaaaaaaacacgaaaacaaaaaaaaaaaaaaacaaaaaacccaaaaacaaacaaaaagacgaaaaaaaaagaaaaaaagcataacgaaaaaaaaccacgaaacaaaaaaaaacaaaaaaaaaaaaatcacgaaaaaagcaaaacaagaccacaaaaacaaaaaggaaaaacaaaaaaaaaaaacaaaaaaaaaatagacacaac

SEQ ID NO: 181241 - DNA, 432 bp, Arabidopsis thaliana columbia
gtgaaaacagaaaatctagttggtcagttgaaaggtgaatttgatgtgcagactacatttgagggtgacaataatgtattgatgcagcaggtgagcaaggcgcttttcgctgaatatgtatcgtgtaagaagagaaacaaacctttcaagggactgggattggagcacatgaacagtccacgtcctgtattaccgactcaactcacatcatcaaccctcagatgcagccaattccagacaaatgtgttctgcttaagagagcgagatcttctggagcaatttacttctgaagttgcacagcttcaagggagaggagaaagtcgagaattctctttcctcctgagtcatcaacttgctgaagacttaggtaaagctttcacagagaaagcaatacttcaaaccattttggatgctgaggcaaaactacctact

SEQ ID NO: 181242 - DNA, 247 bp, Arabidopsis thaliana columbia
attaaggcattgcaaaggctgatggtgacgtatgtggttgccgactatgcttcaatcatcttcttatcgactctccattacccaatgctactgtatattcacatcgtattaattatttagctcttactcatttctgccgtttccatcattttctaatatggattttaactacttgataatttactggaagaatgttcatagattattatgctcatatttagtttgtactttttcttatatttttctt

SEQ ID NO: 181243 - DNA, 247 bp, Arabidopsis thaliana columbia
  unsure (1)..(247): unsure at all n locations
tttttttttttttttttttttttttttttttttttttttttttttttttttttttttttttttttttttttttttttttttttttttttttttttttttttttttttttttttttttttttttttttttttttnttnttntttttttttntttttttttttttttnttttttttttttttttttttttttttttttttttttttttttttttttttttttttttttttttttttttttttttttttt

SEQ ID NO: 181244 - DNA, 269 bp, Arabidopsis thaliana columbia
tcccgggtcggccgacccttccgttcttccattgttttcctttaatggaaccaactatgttttcatgggtccaataacaaccacggggacaccttttgggagcacacaggggcggcacattaatcaagaccatcatttatctgccaaccgaaacttgacagtttcattaacatactgaccaagttaaccaaaagaaagggggtcccgatttccaattcaactcccataatacatagatctagcacacacgcccttgattaaactcgatc

SEQ ID NO: 181245 - DNA, 414 bp, Arabidopsis thaliana columbia
atggcgacggagccggtcgtttgctccgacgattgcgggttgaatttaagcagtcgatatgttggatgagcagtggttgcgcaagagcaatggttgggccggattcatccttctcgaaggcggtggtcacgtcgatttgagattacggcagaaggaagacgggttacactttataatggttacctgattatagtggctttaaaatttgatttgagcttcaacaagctacatggaccaaggtttgacagatggcaattagccatgacaatcgtgtaaggactacctctgtggattgcaagctaggatccgcatacttgaagagagggctcaagggagaacttatataagcagcataatgtttgttgtaacgtgtgaactaataatttatttttttcatgaaaactcattatagag

SEQ ID NO: 181246 - DNA, 426 bp, Arabidopsis thaliana columbia
  unsure (1)..(426): unsure at all n locations
cggacgcgtgggtttttttttattaaantatactantttttgagagtgaattataattagagagtgttatttatatataattggtgcctttaaatataattttaataaatcttatataaaatattatatttttttatattattaattaataaattttatatgttgtttaacaattatataaatattttgattagatttatttataaattttttataattaataattacttattattatataaatttatataatattatatagaattttataatttttcctttaatatatattaaaatattttaataatatataataattaattatttattaatattattattattatttaatctttataataaattaatataattttttttatattatttatataatatcttattttattttattaataatttatt

SEQ ID NO: 181247 - DNA, 91 bp, Arabidopsis thaliana columbia
cggacgcgtgggcggacgcgtgggcggactcgatgtcggacgcgtgggtttttcttgaatgaaggaataattacaaacacaaagggttttc

SEQ ID NO: 181248 - DNA, 114 bp, Arabidopsis thaliana columbia
ttcaaacgcatgaacaaggtacagagacttttttttctgcagaacaaccagaatgggtgggcggatttctgtataatgcgaggctgtaactgaaatagacgactcattactgaa

SEQ ID NO: 181249 - DNA, 113 bp, Arabidopsis thaliana columbia
caaaaagtaacagtcccctgtgatacactgacagtcttacttatactcattgcaaaaacccagcggggtttactgacaaaaggagcgtgtttcttctattctttaaaaactat

SEQ ID NO: 181250 - DNA, 282 bp, Arabidopsis thaliana columbia
tttacgaaaacggttttgatccctattgcgcactgtacggagcctctagaagcggtggcgatgattaccgtgttgcgtcgaggtggtgctgacctgacgttagtttctgcttatactcaggttggcgcttttttttctttttggatcaagatggcttctgattcttctttttatttattttttacattgtttcttttttattcttatttatgttttttatgtgttttctttattcttctttcttttcttttatttagtttactttctatttctctctcattt

SEQ ID NO: 181251 - DNA, 64 bp, Arabidopsis thaliana columbia
gaagactactacagacgcttggcactttttgctcttattaaccacagtggcccggaagaaagga

SEQ ID NO: 181252 - DNA, 371 bp, Arabidopsis thaliana columbia
agcccttggacttgcaaactcaacttgcacttggctttttggatcatcttaaggtgggggcctctggtttaacacttaaaaaggacttattgggaaaggggttaagggaaagtttttgcaagtgtggggtggtaaaacaactcttggcggcccaagttgggattgggttggaaggggtggtccaagagaatggtcaaaaaggtggagaggtgatcatgggtactctgtaaaagatggcagaaaaaggggttgtcaattgatctgtgggggcatttccgaatacaaattggatttttttgtgggggaacaacacacgatcttttttttttggggtatcacttatgtttccaacttttttttaaatgggtttt

SEQ ID NO: 181253 - DNA, 149 bp, Arabidopsis thaliana columbia
caactttttaaaatcaagttttaatgaatattttttaccacaacaagatggttttggggagtgttaccaaacaagggaaggcatgggactaatatatttattaaaaccaacaccggttgataaccgccagaataaaactttttttttaa

SEQ ID NO: 181254 - DNA, 215 bp, Arabidopsis thaliana columbia
aataataaaaaaacaacaaaaaaaaaaaaatttttttcttcgcttgccaaaaaacaaaaaaaggtaggggagtttaaaaaaaacatatgaaaaggcttaatgcgcctaagcattggaaaaggggcgcccgttttaggggatccaagtttccgaacccggtcttggaactcaaaagcttttttatggggcccccaaaattaaattcccggcccggg

SEQ ID NO: 181255 - DNA, 77 bp, Arabidopsis thaliana columbia
attctcttcatacgagaagcaatatgctgctgctgtttatgatttgttgggtttggggaagaatggggcttgttatt

SEQ ID NO: 181256 - DNA, 301 bp, Arabidopsis thaliana columbia
gcagaacctaccgacgattccataccaaacatatcccgatctggaaacaactgacctggaaggtgaagtgtatcgctggaaatggggggccttccgggggccgggaggcgtggtccggccaatctaccggacttgtgttcttctctaccggatctttatctccgtttgtctctttttcttctcgcactttctccgtcgtcttaactctttgcatagcctattagacatacatgcggtttggcacgcatatatgcgaggacttttcggctttgttcgggtccatgtaatctaggttggactg

SEQ ID NO: 181257 - DNA, 124 bp, Arabidopsis thaliana columbia
atttttatatatatgaaaaggcaaaaggtaattttatgtttgtaaacatctagaatgagcaacagcgaacggataaatgaataaccttggaacggaaaatgcaaagtaaaaactgataaaagac

SEQ ID NO: 181258 - DNA, 253 bp, Arabidopsis thaliana columbia
cacttttaaggaaaaccctagaatcctcagaaatggcgttgagcaccgtgtttcgtcgagcttcgtcaacagtagccaatcttgctttccgtgcgggtagatctccggttagcttccgcagtggcgctgtctccgccgagaggctggttcgggggctgcaccagatcaggcgtggatcggatagtttattctaagtctctagcattttctaccaaaatgctgatttttttcctttccttaaccatagattatt

SEQ ID NO: 181259 - DNA, 332 bp, Arabidopsis thaliana columbia
cgccggcagaggattcaccttcacaggctattacccatgaaggagagtaacaataacttgaagattgtgtaatcccctccgtttttagttttcatgattctctcttgaatcaattttttttccagtttatccctgaaacggaggctttgaagctgagaaaaatccattttgctataactctttgataaaggttgctctcaataagaacaaaatttcccaggaaattgctttcaaaaaaaaaatacttttcttaataaattctatataattatttataataattacttttataattttatatctttatttttttttcataacttattttaatt

SEQ ID NO: 181260 - DNA, 158 bp, Arabidopsis thaliana columbia
accgatttgttttatgatttgcattctattcggtagcaaaagtgttccttgattattagaatatcacatgatggacaactcataacattgttagcacgactaactcaacagaccacgcactcacttagaagggaataaacatagagcagtgactaaat

SEQ ID NO: 181261 - DNA, 348 bp, Arabidopsis thaliana columbia
cagcgactggcgagaatgcatttttcggtgcctatggcctgaagcctgcaataaatgatgttaccaaactcgttgaagatttttcattgaaaagtcttcttgaaggctcttatgagtgtccttctttgggcaaagacaagatgaagaaatcggagaatactaacaacactttattgagtgtagtcaaaaatgtttggtccattctaccaacaaagaggcctgttcaatcacaaagctctactgaattagacacttgtctcagcagaactctgggttcaccgcctagctctatctttgctacactaccaaatagtgaaaacatcgataaagtaaatgccctggatggag

SEQ ID NO: 181262 - DNA, 288 bp, Arabidopsis thaliana columbia
gttggatgggctccaaaggaatacaatactggttagaaacaaaacactggagggcaggcccagggtgttggggaaattgaatcccagaaagggacttctgctccacagtctggctatgtgtgggatgaagcatctggttattactatgatgcggcttctggatactactacgatggaaattcaggtctctattatgacagcaatagtgggctttggtatctcgttgaccagcaaacacatctaattgctctttgtcctgatctgaacattgagcgttaagtatcagaa

SEQ ID NO: 181263 - DNA, 108 bp, Arabidopsis thaliana columbia
ctcttgttcatcggatctaaagcgccactcaaagtgtttatgaaaaggctagggttttaacagcgactcataaaacagagatggatgttgagattagaaatgctgtta

SEQ ID NO: 181264 - DNA, 165 bp, Arabidopsis thaliana columbia
  unsure (1)..(165): unsure at all n locations
cgtcaattggtaantatactaaacnaaaccaaagaaaaagggacaatgttcgaacctaggtgcgtctccacccacgcaaaataatcaaaagccatatagcctatagagaggcttacaaccaatcaaaatgctcatagggggtccaaatctcatacgtacactcat

SEQ ID NO: 181265 - DNA, 163 bp, Arabidopsis thaliana columbia
  unsure (1)..(163): unsure at all n locations
cgaaccctcgatctcaaggcgaaagcagataatgnatcttccatggcgagaaattcgaattccgaggaggcttactcgtccggggcctgctcaagttcacgaaccaacttcttccactttattcctattcgatggagaaatggactctctcgcaaccgctcca

SEQ ID NO: 181266 - DNA, 169 bp, Arabidopsis thaliana columbia
  unsure (1)..(169): unsure at all n locations
acattgtcggttggaagaggatcccatgccgatnctagagaagttgcatcagttgaaagagcttgaattaaggcgtaaatctttcagtggaaaggaaatggtttgctcgagcggtgggtttccttaattgcagaagctttcaataaaaggactagatgaatggtacgat

SEQ ID NO: 181267 - DNA, 62 bp, Arabidopsis thaliana columbia
  unsure (1)..(62): unsure at all n locations
cggacgcgagggtcttcctaggtttgnaccttaatatatagaagttttgacatatacacaaa

SEQ ID NO: 181268 - DNA, 192 bp, Arabidopsis thaliana columbia
gagtgaagatggcaatggagcagcagtgcaacttttcgtcaacatgatcatgggaagtatgatggcatcattcgcggagggaagacttctaagccagaaagctggactcgatccaaatgtacttggggagggtgattcacagggagctatcaacgcaccaatgtactgacttaagggagcttgaatgctcaa

SEQ ID NO: 181269 - DNA, 67 bp, Arabidopsis thaliana columbia
gattacgcgtaatactatctcccacctgcgaatcaattcataactgtgctaaatcagggggggcaaa

SEQ ID NO: 181270 - DNA, 362 bp, Arabidopsis thaliana columbia
cactttacatctgtatcagggagcgtttgttgacattggaggtgttcatgaaggatgggtacctataaaagtaatgactggttttggatccggcatttcataaaagttgggatgcatgttatcgttgaaatcacggcaaaaagagatccataccggtttcggtttcccttggagttgcgctttgtccatcctaacatagatcacatgatatttaataaatttgacttcccaccaatattccatcgtgatggggatactaatccagatgagatacggctagattgtggaagacctttttaaccttaaaaagatccattgatcaaagccagtggatgatgggctggttctttgatcatccttat

SEQ ID NO: 181271 - DNA, 194 bp, Arabidopsis thaliana columbia
cggacgcgtgggaataccgtatatcagacaagcaagctgataaggcgatcaaagcggatgagggaggcagcactggggaggatacaattatcttccatgcttatactgttggtcagatgatctgttaaggaccggctacggatgcatcacaggagacgaggtgctatgttggagacagcagatgcatcataccc

SEQ ID NO: 181272 - DNA, 68 bp, Arabidopsis thaliana columbia
aagcatgtacttctacaataaataacaggtaaaatctgcattttatattcatctcgccccattatgat

SEQ ID NO: 181273 - DNA, 268 bp, Arabidopsis thaliana columbia
agcaaagtgaagaagctccagaacacgccatagctatggctcttctctgtccttctcttccctctccgaattctcgtcttttcaggtgcaggagcagcaatatttcgagcaagtatcatggagcctcaaaggagctgatgattgctcgttctggtgtgtctaccagatcaatctcttcggaaaaggggcatgctcgtatggatttagagcgaaatgggtctctagcttccgatcacgatctcgtgtcataaggctaatgtcaacgact

SEQ ID NO: 181274 - DNA, 462 bp, Arabidopsis thaliana columbia
gcaaaacaaacagagagcgagtcacgcgccgagttttcctcacttgttctcaataaatctctctctctttcttctctatcgtttcatttttctcctccagatctcgattccaatctctctccctctctacttccttcaacaggtttggtttctccgatccatcgtcactctcttcgttagatctgttcatttttgctttggtagctaatgtaatcactcgtttcgcgatttgaaactagatctgacgctcggacgttgtttccttagatttgtttagcttaattgctcaaatctgattagaaattgatcgaattagattctgtaactggaaaattttggaatcactctgcagaaaatgtgtcggtggaagtgaaactatacatttttttttttttgaaatttgttgcttaatttttcaaattcgatcggaaattgatggaattagatcttgaaactggaatc

SEQ ID NO: 181275 - DNA, 105 bp, Arabidopsis thaliana columbia
gtaggtgtacgttcttcccaagcatttttatgattatggatgcatcacaacacttgggcatgcttgttgctgtcttacaaagctttctaaataccaaactattcc

SEQ ID NO: 181276 - DNA, 326 bp, Arabidopsis thaliana columbia
aaaagaaagaaaaactgataatgaagggtcttcatctccacctcgtcctagtcaccatgacgatcgttgccccatcgccgccgctgcaccggctgctcccggaggagctctggctgatgaatgcaaccaggattttcaaaaggtgactatgagtttggacgttgcgaccgggaaggcaccaattccgtctaagaagagttgtgacactgttgaagatatcaaagaaagagatccaacagagcacgagggagctatacatcatgtgactacaaggggtcatgccgtggattacaactttgaccaaggaagctctgatattcatggca

SEQ ID NO: 181277 - DNA, 253 bp, Arabidopsis thaliana columbia
ccaaccttggttgtatgagagactcatagacattttttctttcctttggcagacccccacaaggggcagtgtggcttcttcaaaagggaaacacacttctagaaaccccaacccaggatcaactaaacatctgttatgtcaatcaaccataaccgtcgagcgcagctctcaaaccgccgactccgacatacaagccacccacgctgccaactacttctattaaaccacccaccacaaaaaccttcgggcaaac

SEQ ID NO: 181278 - DNA, 429 bp, Arabidopsis thaliana columbia
gcgaccaatcatggttttagaccgcccgactttattttatcgtatctagaatctagacatgggatcgtcatgatacaatctcctgagaatagaccgtcaagcactgtatccaagaaagctgctgatatttggtacctgatgaacgaaggacttccaaataaacgtgtcaatttcgtctcaaccgcttggcccgctaaaaactcagctaatagcaattggaaaagtgatctcggtgtgaatgtgaagaagaaggatacttgtgtttctgatgtacagaagagtgttttgaattatagctgttgtgaggaggctaagagtattgctgcagccgctttagctgcggtgcgaaacgcaactgtaacggctgcagctgcattgagcccgggcaagattgaaataaccgaggtcaaagattttgcgggccaagaa

SEQ ID NO: 181279 - DNA, 248 bp, Arabidopsis thaliana columbia
gcgcttatctacagaaatggagacgagcactttaaagtgcttgccgacacgaagagaaacgatgacgacgcattattggacaatgttgtgaccgctaaagacctaccagccatggcccatatgaagactatccttgaatcaatgggcgctgaaacacagattttttagaacgagcccatggcgcaggaagtgaaaggaaccgatctggctgaaatgattgctgatggcaggatctagttagctttaga

SEQ ID NO: 181280 - DNA, 370 bp, Arabidopsis thaliana columbia
aacagagaaaaatatgtgcagggaacttgggatgaggtattatattgtgcgaaagaaaagcagctattgtatctaggtatagacatgatccagccattcttagagaaaagaggggacgattgagatcaggaacactatattgcatacattgctcacgtgaagatgatgattgcaacagtttagagagtaccatgtgcgaggatgaacagggaccaaatatatagagtgcgtgatgcgtacggaagctgctgtaaggacaggtgagagtagcctacgccatgcacagtgcgtacagcgactgagaagccacgagtagagtccaaacgaagatgagtgacagcagtaactagctcaagatctggcttgatca

SEQ ID NO: 181281 - DNA, 498 bp, Arabidopsis thaliana columbia
  unsure (1)..(498): unsure at all n locations
ncgaccactcttcctgtctgttcactggaggttaatttttattnnnttggccgatcggangggagggttttatttattgataggggggaaattttatttaaattataataataaaatttaatttttattaatagatataattatataaataaataatataaaaatatattaatatttaatatattattttttttaatttttaaaataatattttatattttattaaataaattaaaaaattattattatatatttttatattaattttttatataattttttaaaatttatataataattttttaaaatatatttataaataattaataaattattataatatatttattttttaatattataaatttttttaaatttttttaataaattattataatttttttataattaatttattaattttttttataatttttattattaattattataattttataaattaaaattttttaaaatttttttaatttttttttt

SEQ ID NO: 181282 - DNA, 228 bp, Arabidopsis thaliana columbia
  unsure (1)..(228): unsure at all n locations
tttgtgtttcgatcggacgactaacaaattgatccttacagggnaaattctccaagcacctgggctgtttccatagaggttttggggcactctataaaatattctcattattcattttctattactatttttacaccattttttatttctttttcttatttatacatcatttacatatttattattttttccaaacttaatttattattaaaattttttaatttattt

SEQ ID NO: 181283 - DNA, 133 bp, Arabidopsis thaliana columbia
aaaaaaaggaaaagaaaaaggggggaaaaaaacaaaaaaggggggaaaaaaaaaaaaaaaaaaaaagaaggaaaaaaaaaaagagaagaaaagaaaaaaaaaagaaagaaaaaaaaaaaaaaaaaaagaaaaa

SEQ ID NO: 181284 - DNA, 150 bp, Arabidopsis thaliana columbia
tcggagaaaacttcgtctctcttctctgctttgcccgtgtattagctgagagataaaggcggagtgtgtctccagatatgttgctcaggcatcgattcttagagttcaaaatggctctcatgatcagcacccctttattgcgcagaaagc

SEQ ID NO: 181285 - DNA, 149 bp, Arabidopsis thaliana columbia
ggggcaccccttgggagatatttccgcgggttgggtcaaaggcctgaaaggtttttggggttaaattctgggcctttttcatggaaagaaggggaagcccagatctttagccacccgtaccaaaagcgttaagcttttgatatgggttt

SEQ ID NO: 181286 - DNA, 100 bp, Arabidopsis thaliana columbia
ctcgctttataaatccctcaattttgctcactttcacatctctctaagcttctgctctaccaatctaattcctgcttcagcgtcttggttgtgcgcatac

SEQ ID NO: 181287 - DNA, 319 bp, Arabidopsis thaliana columbia
  unsure (1)..(319): unsure at all n locations
ctcggctagatctgtggcaaaacctttcctaatgnttctagttcctcgttaatcgaatcatggtggagaatttgtttccttctcgatttcaatttcatcttcagagactcgcccgaagcgtcgtcttacttctctccttgcttctcacaaaacactcttcacatttctctggatcacttcctttggtttcgattttctactactactaacggtttacaacttatgcttctctttttacatgttctttctcattctaagcttataatttttttttttgatctaattttttatattatatctctttaatttatatcctttt

SEQ ID NO: 181288 - DNA, 111 bp, Arabidopsis thaliana columbia
caagaaagactgaagcattttcctgaaggccaactgtgcgtgttttctgggacactcccgctgaaaacatagtgaagctcacggtcatggctctccgcaggtggatagaca

SEQ ID NO: 181289 - DNA, 78 bp, Arabidopsis thaliana columbia
gtcgtcgaaagctttaccaaaactacgcctgcgattcatggattggttgcctaccccaaggttccacggctacccgag

SEQ ID NO: 181290 - DNA, 176 bp, Arabidopsis thaliana columbia
gggttttcgatcgtattatttgattgtatcgccgccactaaaacgtatataaacatctctgttttctacttgatttatgcttccaaatcttatttaatcgtgtgtgagacctaaaaggaacagattagaagctatggatacgactactggtcaaacagcacgcgagctacatgtac

SEQ ID NO: 181291 - DNA, 110 bp, Arabidopsis thaliana columbia
gttaaatgagtttgtgtctcgtaacttatcttgagcgaaaagggaaagcaactaagcagaaaaaacgctacatccaacttgtagtatcagaccacccaactggcgtgcgg

SEQ ID NO: 181292 - DNA, 61 bp, Arabidopsis thaliana columbia
taaaaaggaaagccagggctgcaactttctctggcccccctatgataatggaagaagaagg

SEQ ID NO: 181293 - DNA, 111 bp, Arabidopsis thaliana columbia
aaaagatgagctgatgcttgatggtattttcaatgttttaacctaacttcttttgtgacgacatggggggaaccagagtgggacaaagtcatcaaggactttattaatgag

SEQ ID NO: 181294 - DNA, 67 bp, Arabidopsis thaliana columbia
tagaaactgggggaaacctccggagaacctttactcattatggagagaaccgttttggttatggaaa

SEQ ID NO: 181295 - DNA, 376 bp, Arabidopsis thaliana columbia
atctccatctcagcctttctcttctcgtgattcttccaagcttgtatcttcacttcctctctcttatacctaattgcacacaaaaaaaaaaaactctcaaacacgaatcacattaacacgtattaaaatcaaccataaatttaaccaattaacgttaatcacctagccatgaatttagcacgttctgcttcatcccaaggcatggctcgagcttccatagcactcataggcttcttactctccacaaaaccattaaccttctcactattattactctctacccttctaaccttcggtaccgtgttcatgacaacccccaccggcttaccacgttgtggaggcctcaccgggggagtgacagggctcctcccaaccg

SEQ ID NO: 181296 - DNA, 77 bp, Arabidopsis thaliana columbia
  unsure (1)..(77): unsure at all n locations
aaagaagcaatttaaggtttggggatttctcgattctcagcancagccgtaagaaagaaaccggggaagaacgatct

SEQ ID NO: 181297 - DNA, 344 bp, Arabidopsis thaliana columbia
aagagagaaagaaagaaagattcaatctttattatccggagatggattcgccaaactgggaactccgtggttgttgtaaccggaatcaaaatactttcctcatcaccatcgagtcttcaccgtagttatccttctgctatggaggacatttctattgactccatttaaactcattacggtgtttttgcacgaagctagtcatgccgttgcttgcaagcttacatgtggagatgtataggggatggaggtcattattctttattattctttttataatatttcgtttctgatttttaaataattaattggttctattctgtatacattttagtccttgttgtttt

SEQ ID NO: 181298 - DNA, 249 bp, Arabidopsis thaliana columbia
ggacgatggaccgatgctgctaccttggccgcaatacatttagaaggatcggattatgccaggggattgcaaaggtgggctgatcatgttctccatgcggagcacaacgtctggcggggcttattttatatgtggctgctggttccctgcaagaggcgcttgcagctctcagagaggtgcaacagcctgatacagtagccatgtttgtcctcgcgtgtcaggagattcattcagaaatcataaccgagc

SEQ ID NO: 181299 - DNA, 177 bp, Arabidopsis thaliana columbia
aaaaaaaggaacccagtttttttttttttaagaatttgggcggggtaaacggccattgaccttttcccaaattttccctcttagcttcccgccttttataaccaaatcgagctttgttttttaagctcttaacatttttgtccaaactcaaaggtttttgggtttcaccaaaaatgg

SEQ ID NO: 181300 - DNA, 96 bp, Arabidopsis thaliana columbia
cccttccgtaaaaagagaaaaagtaaaattgtcctaaagtgtacgggccttacttttctttaccaaaaaaagcttttgtcacacttatccagaaag

SEQ ID NO: 181301 - DNA, 299 bp, Arabidopsis thaliana columbia
gtggaacttgggattcaaggaacactcctggcaaatacagcgcatctatgcctacaccaacaagcaacggtcatgcctctcgcgtgcagattcaagaaccaagaataatgtctcctcttcctccttcttcttctccaatcgccttcaaggaacaacaaggtagaccacctccaacaacacaacaaaccatagcaggaaaactctttagaactcttttcaagggtcttctcttctcacaactaaccttaatctcacttttggtgatcgttctcaccattcgcggtctcatctcagcaagt

SEQ ID NO: 181302 - DNA, 297 bp, Arabidopsis thaliana columbia
cacaaactagtcaatttctcggaaggagttagagagtctgtgagacgtctttcacatgtgacttggatggcagacgaactgcataaagcaacatattatctattcagcaaatctgaccaacgcatatcttgtgttcatacacaaaccgtagagatgcatcaatctggcagtggagctgtaacagcactcatctaccataaaggcttgctctttagtggattctcagatggttcaatcagggtgtggaatgtgaaaatagaaatagctacgcttttatgggacatcaaggagcacaaa

SEQ ID NO: 181303 - DNA, 465 bp, Arabidopsis thaliana columbia
  unsure (1)..(465): unsure at all n locations
aaccgnccggaanccggggggaccaggcgtccgattaatttttttttggggggctttttaaatatttaatttggtttccaattttaataaagggcaccaaattaggttaaccccggtacctgccccaagtttaattttaattcagggtttggttccttaaggttttttaaacaaaatgcttaagtctgcattattagaaccagttttccagtccaaggggttaatgatgcacgtaggtttgttgttttttggctttggcgctctgttttgcggtaacattattttaatatagctcttttggggattacattttggcaaagtcgggccctactttttggaaaaaggaattaaaaaaaaattttttattaaaaggaattattttttttgggtgactttccttccttaatgaaagaaaatttttttttcttacacaaatcaataatttttgttttttttgaaattttt

SEQ ID NO: 181304 - DNA, 288 bp, Arabidopsis thaliana columbia
  unsure (1)..(288): unsure at all n locations
cccccctncccccncaccacccgccctttttttaacctccccccgccgcttaaaaaacaaatttccctaattattgccnttttcatcttccagccaaacccaaaaacaatttcccacccaaattacccattttttttaaagatcctaatcacaaaaaaagccccacaacctattcttccttttatacctaacccatcctatcttcctggggttgtaatccctccacctcctccctacttttaaaacgtccaactctttttaaaaaaatataaattccttctccattcc

SEQ ID NO: 181305 - DNA, 207 bp, Arabidopsis thaliana columbia
ccgggccgaccacacccttccaacacatccacatggttgctgctggttctttttttaaacaaaccacccaattcctttttgaaggggtgtgggaaggaaatccaccaaagttcataaaaaatttaccacattaagttttattttccttttaacattcatcaaaaaatatcttcatttttcctcaaattaacccctaataaattttaa

SEQ ID NO: 181306 - DNA, 328 bp, Arabidopsis thaliana columbia
  unsure (1)..(328): unsure at all n locations
gggccgacccacccttccgacctacaaaaagtaacaaattttttttaccattatttccttttgttccttcttaacactccgcgaattttttttccttttttggcggtgtttccaccaanatctcaacttccctttccatttgttttttcccttcaaacccttttttttccttcccaatctccttttttcccttccgaatttgctcaacccttttccctaacttccacttttcgtcgtacctttctctttctaaccccatccccatttttttttccctgtttggaaatccattcctcttttatttttttatccatattccttttttttt

SEQ ID NO: 181307 - DNA, 359 bp, Arabidopsis thaliana columbia
gggaaaaaaattttttcccaaattaaaggttttgcttttgcctccttcttctcttcaatgggccgggaaattaaataacccaggttttccaataaatttttgttgaggaagattttttgttgtaaagggggtttaattaaatattgcttccaatggaagttgagcttttttctgttaactttctggtataataaaaattttaccgtttaaaccgttatgttaatccttttttgttttttttcatttccatttttttttgtcttttttttctctttgtttttccttctttttatttttattttttaagttattttgatgtttttttttcttttattttatttttattatatttttttttt

SEQ ID NO: 181308 - DNA, 355 bp, Arabidopsis thaliana columbia
  unsure (1)..(355): unsure at all n locations
ggggnggaccaaggggncggaaaaaaaaggggggggggggggggagagagagagggaaaaacgaagaaaaaaaaagaaggggaaggggggagggacncgggggagggggnacaaaaaggggaacaagccnaacggggggaggaagcaaggggaggaaaaaaagccgagaaaaagggaacgaagaaaaaaagagggggaaaggaaaaanagaaaaaagagagaaagggacaaacgaggaaagagggaaaaaangaaaaagacgggaaagcaacaaagggggaaaggagagaacagggaaagggaaaaaacaaaagagggagaaaagggggaaaaaaggaaaaagaaaacgggaggg

SEQ ID NO: 181309 - DNA, 139 bp, Arabidopsis thaliana columbia
aaatacccgggcggcccacacccgtccgtaaaaaaaaaaaaaataaaaaaaaggggcgtccgttttaaaggatccaagtttacttccgggggcttgcaacgtattagttgtgttatagtttaacctaaattaaattaat

SEQ ID NO: 181310 - DNA, 304 bp, Arabidopsis thaliana columbia
gggccgcgcccacccgtacacacaatttacttttttttaaaaaaatattcgaagtttccttatcaaaaacacaaaaatatgctccaaaggcggggatttaacatgtagggaagcgacccaacttatggaacaatgaatcaccccataaccccttacaccaaaattaacttcccacaagccttaaacggaattaaatatgttcattttatttttttaaaaaacgaccaacccaaccaagctcttttttttgtttcaaaagccctgtttttccaaattaatcccttttttattaaccatccaacct

SEQ ID NO: 181311 - DNA, 305 bp, Arabidopsis thaliana columbia
ggcggcccaacccgtccaaatggatgaagccatgaccaacccattattttcaaaagggtttaacccttgttggggtcccggggcctgtaattaaggcggggaacttcgatgggatccttaaaaggcaaggacctgaaattgccaaagtcctaactcttgctatggaggccccaatttgggaggaaggaataactcggccgatgtatccacccttatagtggcaggggttcccataccaaattggttctacctaaaaccccggaggtggtggatattatacggtggagcctctgatccaccttaag

SEQ ID NO: 181312 - DNA, 388 bp, Arabidopsis thaliana columbia
  unsure (1)..(388): unsure at all n locations
ccgnncngaaatncccgggcggccccagccgtccgaaaagaaaaaaaaagccttcttttttttttccaagtttgagaattttttccaaaaccaaagattggtttgtttttccaactgggcattttttttgaggatcccacttccggattttaaaggatcatttggaaggtcgttgttaagtttacggcaggcccaagttgactaataaacagtcgtttccggaggtagtagccaccacgggccaagccccatggaggttggcctagattcgtttaaaagccaagtcgttgggaaattaatcgatctaaacgttttttaaaacaaccttttttttttcgaatggatcggaaagcttcttgattctttcctttgtgtgaaagaaaagttt

SEQ ID NO: 181313 - DNA, 345 bp, Arabidopsis thaliana columbia
gacccagccgtccgtaaatccacctccaaaatctgaaccctttttttttttttttacctccggttccaccctatgccgggaatttcttaaaagtgggtcgcgctaaacattttttgaaccaaatttttaaatcctaatcctaatatcctttcaataccctttttcctgcatataactccttgtttcaaccaaaccttcctttccaaattttgcttaaattaaaaaacctaaaactccttccaaatttaagaccctataaactcttcttttccttatttggtaatctaaatcccccttataaaaaggccaccattttgtcccaattaacctttttttaaaaggttt

SEQ ID NO: 181314 - DNA, 395 bp, Arabidopsis thaliana columbia
  unsure (1)..(395): unsure at all n locations
aaaaangggccgcccaccaaattttttttcccccccaccantttttgttttttatctcataaacttaaacttaaccgcgcccattttaaaaataagtccggactcaaaataatttattaaattttaaatgaatataaaaaccaaacccagtccattatccataaccatgaactaatcaataaaactttccaaatttaaacaccaccaaacccacaacctttcacttttttcaaaaaaccattaaatcaatcttataccctaagccattattaaagtactcctttaacaaaactcaccaccttcctttattttttatacttatcacacaatctctttaccttattctaaccaacaaaaactccaccttttttataatcttaatccacccctccttt

SEQ ID NO: 181315 - DNA, 381 bp, Arabidopsis thaliana columbia
aaaccggggccgcccacaccctacacgtaattttaatctttaaacataaaaccactcttaatccaatccggaaccttaaccctccccgccccattttaaacttcccgcgcgcctcccttaaatcacccttggccttattaattttcaccttcaaccttaaacatgcccgttccaccccctggctccgtttcaatcctctttttttaaaactcaaccacccttcttttttgaaccacaccaagtctaaaacccaaaccttttttcttcttaaaaacctcctaatcaaaacctataaaaccattttggccttctttacctccaacctaaccttacgattcttacttttggattacctttactttctttcccggtttctcctac

SEQ ID NO: 181316 - DNA, 350 bp, Arabidopsis thaliana columbia
ccgtccgaattcctcacaccactggatccaccgttatttttattcaaaaaaaaccctattcccaacgggttagagtttaataatgtgggggggctcttaaattttacggccttgtccattaacctttcctaaccctattcttcctttctttgcctttgattttcaaatattccaaaacttttcttttaaaaaaaacccaagtgttttttgccctttatctcgtttaaatataaacccttcttttcaagtatttccatctttttttattaccaccatttatcttccatccttttattctcatattttcttactttctttctttttcatatttctttatttttatttttttt

SEQ ID NO: 181317 - DNA, 227 bp, Arabidopsis thaliana columbia
gtccgcaaaaaaacaaaaaactttttcaaaacaaactctttttagaaaaaaacaaaaccaaaatggggggggtttttaaacccgccgaggggggatatattaataaccttttttgggttggtcctctccgtatccttggaaatcaaaacaaacccaataatctccccccttaattttaaggaaataacttgccctccgtggtgaattttaacacctttaattttatt

SEQ ID NO: 181318 - DNA, 262 bp, Arabidopsis thaliana columbia
  unsure (1)..(262): unsure at all n locations
gtccaccaaaaatgcttctttaacttttttcancttttatttttttccatcccttacccaatatanttcccccttttttaatatatgctatccgcccccctaattttttttaccacccccaccacttccatttccatttcctcttaccaaaccccctttcccagttttaaaacctctttttctttcttccaacccaccaacccttccaactccttcttttaaaccacccaccacaaaacttcctttcaaccctccaattttt

SEQ ID NO: 181319 - DNA, 329 bp, Arabidopsis thaliana columbia
aaaccgggccggcccacccgtccgcttaataattttggtccttcctgcattaatttttttgtggttaaccttcctcttgcatgggcaaacattgttaaaacacggggcttgtaacctggccttaagcttaaaaaactccaaattaaccaaagggggtctgccaagcattccaagaagcttaatttgtgaaataagtgaaaaaacccttttcttgttttttctaactctaaaggaattgttcttgaaaaaatgcgttttgaggtaaacaaccctacctttcctttcctaaagcttgttaaagtcaagtttataaaaaatgaaaagataat

SEQ ID NO: 181320 - DNA, 380 bp, Arabidopsis thaliana columbia
ccgggccgccccacccttccaattggttttaatttcctcaaatataaaaagtttttcttcattcctaacctaaaaaaatcggggcctttttaatataaacccggcctatttaaaccaaattgttccaaaaaagattccaaaccaaccttgaaaaaatttatccaaaatccttgaatttaaatttctcccccaccaatattaacccacttttactcctttttctttgcccaattctaatttcaaaacttaaaacctttttttaaacaccaccaccacatcttccaatcctaacccaccgttctttttttacctaacaaccttggaacttctccaactaatattccaaaagaaaactttttaaattcggcccaattttccat

SEQ ID NO: 181321 - DNA, 381 bp, Arabidopsis thaliana columbia
  unsure (1)..(381): unsure at all n locations
aaaaaaaataaaatattcgccgggtttaaaaaaaaaaaggtcggcttgaaaaaaaaatnntttttttttntttttatcatttaaaaaaaaataaaaaaaaaaaaaatagggggaaataaaaataattattttaaaaaaaaaaaaaaaaaaaaagataaaaataaataaaaaaaataaaaaaaaaaaaaaaaaaaaataaaaaaaaaataaatttaaaaaaaaaaaaagtaaaaaaaaaaaaaattaaatgaaaaatattaaagaaaaaaaaatataaaaaaaaaaaaataagaaaaaaaaaaagaaaattaaaataagaagaaaaaaaaaaaaaaaaaaaataaaaaaaaaaaaaaataaaagtaaaaaaaatataaataa

SEQ ID NO: 181322 - DNA, 433 bp, Arabidopsis thaliana columbia
catatcaaataaaaaaccccccctttttaacaacccccccccccccaaaataaataatctttttctattctccctcccctcctccccccttcccccctcctcctttctcccccccccccctctctttcttttttttcctccctcccatccccccccccccctcccccatcccccccatcctcccccttccccccccccctccccccccccccccccccccctacccctaacaatcctcccctccccccccctcccccccccccccccctcacatctccccctctcactcccttcctcctcaacctacctctcccctcactcctactcccctccctcctccctatccccccccttctccaacctacccccccaccccccccccttcccactccccactctccaaactcccccccctctcccccccccccccccc

SEQ ID NO: 181323 - DNA, 256 bp, Arabidopsis thaliana columbia
  unsure (1)..(256): unsure at all n locations
ccaaaaaactttaaaccaagaaaaatataaaattttttttacttccgaaacttacttaaccccggtccggtttaaattatatccggccagccactacaaaaccttnaaaaccaaaacccattttttcactaaccccattgcccaccacatccaaaatttcgtttttaacaaattttatcttaattttaacaaatctataagaatttccaactccacatttgatgaaaaaaaccaaattttcaaactaaaaaaccaa

SEQ ID NO: 181324 - DNA, 230 bp, Arabidopsis thaliana columbia
ccaaaaaaaaaaaaaacccctttattttttatcgcccccctccacataaccggccgcttttcatacttttccgggaaagctaataaacctttcccccccattattttaaatctctctaaccacccttttaccaataacaaaaaccgttcccaacccaatttttccttcattaatcccacttacctaacccacccatccaaaaacctcaattccattccttttcaattcac

SEQ ID NO: 181325 - DNA, 186 bp, Arabidopsis thaliana columbia
gggacgaccacgcgttcgataatttttctttcgtgggctttttcaattatttatatggtgtcctattttaataaaaagcagcggaatatgttaaacacagttactgtgccaagtgttatttttattcaggtgttttgctactttaggtcttataaacataatgccttattttgtaatattagtacc

SEQ ID NO: 181326 - DNA, 54 bp, Arabidopsis thaliana columbia
gggaaaaaaaataaataccaaaataaaagattttcattttttcttcttctaaca

SEQ ID NO: 181327 - DNA, 177 bp, Arabidopsis thaliana columbia
taaacataaaaaacaagtggaagctttaaaacttgttttgagagcaaaaatggctacttctgtaacgttttttactgaagtggggctttaataatcatcactttaatactacaagaattggaagaacttgtactcattttttcttttatgctatattttactatatttcaaattgtt

SEQ ID NO: 181328 - DNA, 381 bp, Arabidopsis thaliana columbia
cgtcccaaagaaaaaaaaagctcttctttttttacatgttgagaatttctacagaaacaaaagctgattgttttccactgggcatcttttgaggatccacctcggattttaaggatcatttgaaggtcttgctaatttacggcgagaccaagttacttataacagtctttccggagtagagccaccactagccaagcaccatggaggttgagctagattcttttaaagacagtctctgtaaaatcatcgatctcaatctttttaaacacctttttctttgggggaggggggcttttattctttttttttttctataaagttttagctttttttttaatacttattttaatttctttattttgtcgaccgttgttttatatt

SEQ ID NO: 181329 - DNA, 298 bp, Arabidopsis thaliana columbia
  unsure (1)..(298): unsure at all n locations
gnaatgcagcagcagaatctgaaaccatatttttcatctctagctacggtcgcagcctatggcaggtaagcccttcaagtagatttagctgatcattatttgtatcaaaaatttgaatgcttattctcatatcctttcaatttctattatgttgttatgtctctctttttcaatttttattctgtcttttttttttatttattaagtatttctctattttttattttttactttttttttttttttatatatttttaattttttatttttttataatttctttttatatggatttttt

SEQ ID NO: 181330 - DNA, 65 bp, Arabidopsis thaliana columbia
  unsure (1)..(65): unsure at all n locations
agaacaacaaccaaacactnatttttncacattttgtgagaaaaaaacagagcaagtatatgggg

SEQ ID NO: 181331 - DNA, 244 bp, Arabidopsis thaliana columbia
gcttcttttctctctacacctcctgtctttttttttagatctcgttaaccttaaccttagtgggggttctttgaaaattagggggggaatacatattgatcgtttgatctggaatgtatatcataatcaatatctgtacactaccattaccattgactgatccattaatactttccaagtggtacttcgactgatcctgcattagttttgttgttttataatacattgtattcatttattaccc

SEQ ID NO: 181332 - DNA, 257 bp, Arabidopsis thaliana columbia
gtatttttaatcttaaataacaaaacactgattattcaaatcagaaacataagccaaccagggcgagtttaatccaagcgtggggaggccttaaaagagcctgtgacatattaaatatcaactacgaccagagacatggcctgttcaccccctggcactcgctgtcaacacgctgacattaatctgtaccacccctcctttctgaaacacagcaagggttatagcccaaactcttttactttgaaagatcgactcat

SEQ ID NO: 181333 - DNA, 178 bp, Arabidopsis thaliana columbia
ccaaaagacagataactttctctatactaactcctatatataataagactaatactaacatgaggggtgttttcaattctgcgattgggcatatatttattaccttctcttttatttttcattccactaccttcttaattaatacttcttcttttatctcccccattttttttcactc

SEQ ID NO: 181334 - DNA, 134 bp, Arabidopsis thaliana columbia
acaaaaatggctctctcacttctttcagactttatctttttccatgtctttaccaatgatgtgtgggctgctttaaatgagggatccaactccttatttttttcaccaactccttacactttcattaacttctt

SEQ ID NO: 181335 - DNA, 237 bp, Arabidopsis thaliana columbia
cttaccaccagtcattattttcactccttaccatcatcttctttggcagactctttaccttcattgcacggtttcaccatttctaatcttctacataccaattgacatcaaattctgtcattattctttcaaacactataatttctcttactttgtccataccaaattttcaaccacattataattttttttattttaaatatcttaaatatgaaccatttataacccttcaacata

SEQ ID NO: 181336 - DNA, 54 bp, Arabidopsis thaliana columbia
taaaaaacattattactatttccttccaaactttttttttcataatcctacaat

SEQ ID NO: 181337 - DNA, 355 bp, Arabidopsis thaliana columbia
aataaaataaatattaataattattacatattaatataaaaaaataaatataaaaaaataataaataatataaaaataaatattataaaaaataaatatataaaaataaataaaaaaaaaataaaaaaataaaaaaaaaaataaaaaaatatatataataaaaaataaaaaaatataaaaaaataattaaaaaatataaaaataaattaaaacaataatataaataaaaaatataaaaattaaaaatataaataaaaaataataaaatattttaaaaataataaaataaacactaaatatatataaaaaaaaataaaataaataaaataatatataaataaatattatataatta

SEQ ID NO: 181338 - DNA, 194 bp, Arabidopsis thaliana columbia
  unsure (1)..(194): unsure at all n locations
catacactcttgattccaaaccatacttcttttatttttttantctctcttctgatcttctagggcgagttatatataatggcggctgtcactactcataccacanccttaatttttctaccatttacttcaaagccaacattcctcacctattcttctcttaatttaaactcttacccttcatcttcatcaat

SEQ ID NO: 181339 - DNA, 235 bp, Arabidopsis thaliana columbia
agaaactttaaaacgagagagagagaaagatatgtttacatccgcaacgtacgttactgaggttgcgttttatagatctgtggggaaacactacattatcttttatagctattacctaattttttccttctctcatttccacctcactcaatatgtctttttctacatatgtctttcttctcttcctattaatttcatttttcattttttctacttcttaatattgtttttattt

SEQ ID NO: 181340 - DNA, 309 bp, Arabidopsis thaliana columbia
  unsure (1)..(309): unsure at all n locations
accaaaaaaaaaaaaatacacatttttttttatggccgcctccacaatntctgtcgccttctctaactacgccggaaagactaaaaacctttccccctctgcatttttaagtcctctcaagctacccttttacaattatgaaaactttttccaatccaaattttccatcattcatcccattttacccatcctacccaattaagtacttttttccattcttcttcctgtcaccgatctaccctaccttataatttccccgaaacttcttattttacacccctttactttaaactgttcccgatacattct

SEQ ID NO: 181341 - DNA, 324 bp, Arabidopsis thaliana columbia
  unsure (1)..(324): unsure at all n locations
aaaaaaaaaaaaaaaaaaaannnaannnaannnnnnaaaaaaaaaaaaaaaaagggaaaaggaaaaaaaaaaaaagaggggagggggnnnnaaaaaaaaaaaaaaaaaaaaaaaaaaaaaanaaaaaaaaaaaaaaaaaaaaaaaaaaaaaggaagaagaaaaaaaagaaaaaaaaaaaaaaaaaaaaaaaaaaaaaaaaaaaaaaaaagaaaagnaaaaaaaaaaaaaaaaaaaaaaaaaaaaaaaaaaaagaaaaaaagaaaaaaaaaaaaaaaaaaaaaaaaaaaaaanaaaaaaaaaaaaaaaggggggggagggggggg

SEQ ID NO: 181342 - DNA, 311 bp, Arabidopsis thaliana columbia
  unsure (1)..(311): unsure at all n locations
aaatacaccaattactaattcttacttcattttttttttaagtaaagtacaaaaaatcaacttcttttaacaaaaactacgctgtctgcttccatctnatcctccaaaacaactacacgttcttttctcctacttatctattctttctcctccttaccatcatatacattattctctatattctatcttcaaaccttattaaactcattcttaaaccttctacttacacacatctacttactcagtatctttacacattatttacaacaaactatcttacattttactaacctatcctttttttacctctc

SEQ ID NO: 181343 - DNA, 170 bp, Arabidopsis thaliana columbia
ttccaatcacatatatccacttctcaaaaacatcattttacttcacaaatcctcttttttttcccatttatcctctaaatacttcaactcaaccctttttttctcaatctcatccttataacaaacattttctaacttattccctcctttattcatttcttacactcatc

SEQ ID NO: 181344 - DNA, 137 bp, Arabidopsis thaliana columbia
ttcttcttcggttttcccccctctttttttttctttctttttttttactctctccttatcattttattcttttacttctctttcctctaccacccctttttcccaactttttttttttttttccttttctttttttt

SEQ ID NO: 181345 - DNA, 462 bp, Arabidopsis thaliana columbia
  unsure (1)..(462): unsure at all n locations
aaaaaaaaaangggccgaggcgnncnaaaaaannnaaaaaanaannaaaaaaaaaaatttnattaaatnataaaaaaaaaaaaaaaaaggaagggaaaaaataaaaaaaagggaagggcaacaacaaaaacattntnntanttttcnactttnaaaanaaaataatcnaccttcatactataaatccaaaaaaaaaaaatttaaaaaaaaaaaaaaaaaaaaaantaaaaaaaaacaaaaaaaaaaataaacaaaaaaaaaaaaaacaatataaaaaaaaaaaaataaaaaaaaaaaaaaaaaaaaacaaaaaaaaaaaaaccacataaattactctcaatttaaaaaaaaaataaaaaaaaaaaaaaaaaataaaaaaaaaattaaaaaaaataaaaaaaaaaaaaaaaaaaaaaaaaaataataaaaaaaaaataaaaaaaaaaaaaaaaaaaaaaataa

SEQ ID NO: 181346 - DNA, 334 bp, Arabidopsis thaliana columbia
  unsure (1)..(334): unsure at all n locations
ccgctcttctaattattcctccgccataactacatttcttattctctcaaaaaatacacccagcgcgacaacaaatattcgtcgtgggcctcctccaacnacttcaacttcntataaattccattttctcataatccaacaccaaagtttcttctctcttccccacggcgtctactatatcctccaccaattctaaaccctctgttgtcattatttccaaaacctcctcataaatctaaaacatattatcccataccacataaccaaatcatatgctcttttactaccttaaagaaaacaatctatcacttttaataaacaaattctaatgtat

SEQ ID NO: 181347 - DNA, 289 bp, Arabidopsis thaliana columbia
  unsure (1)..(289): unsure at all n locations
gtccganccatcaatccacaaattttcttcacatttttttttttttcaaacacaaaacaaaaaccgccccgcacatttaaaaaactcttgtccctcacaancatccacaccancaaaatccaaacttcttcttttacatcaccccatcttacacctcactcacccataatcactctttttttcaccaccttatctactccacctacaatcccttggaccactaactccttctcactagaacctctctcctcaccatcttttttttttttcctccttccttcccccctcc

SEQ ID NO: 181348 - DNA, 343 bp, Arabidopsis thaliana columbia
  unsure (1)..(343): unsure at all n locations
caaaaaaaacccccacccacaaaatccaaactcctttctttatatcaccttatcttacatttttttcatctctaaaaatttttttactccccccccnatccttctcatcttcaatttttttttcctcaaactccatttctttatatattctttcnttcaccctctttttctttttctttttttcttcttcttttctttttcttcttttttttttttttctcttcttttcctcttcttctttttttattctctctttttcttttttttttctttcttctccttttctccctttttctttttcttcttttcttatctttcctttcttctttcttcctttttctct

SEQ ID NO: 181349 - DNA, 405 bp, Arabidopsis thaliana columbia
caagaactcaaagagagatccatcaattagattcactaatttctttagaaatttcctgagtgattgcttacaatagcagtgtctgttacaacaacaacaacattgtcgttgttttcgacttcgacaagaccatcatcgacgttgatagcgataattgggtaatcgatgaacttttcttcactgatttgttcaatcaacttctccccaccatgccttggaacacactcatggaccgtatgatgaatgagcttcatgatcaatgcaaaaccattgatgagatcaaacaattctttagaacaattcgcaattgatgcactttttgtcctctgtcatcaaatctttcacaatgatttagggttttgagctttattgattatctatcctaatcttatatattcttttttt

SEQ ID NO: 181350 - DNA, 258 bp, Arabidopsis thaliana columbia
  unsure (1)..(258): unsure at all n locations
tttccttaanccattacctcttaaaccatccaatccttttatttcaactctattcaaaccacacatttcttttctttaaatccctcaaaatacacaacactttcaccattatctctttatacttttcttactttttttatttcttatttttttttatttcctatttcttactcttttttttaatttccccttttttttattaaattttcctcccccccccatggctttcaaaactccccctcaatccttactttttca

SEQ ID NO: 181351 - DNA, 329 bp, Arabidopsis thaliana columbia
  unsure (1)..(329): unsure at all n locations
aaaaaaaaaaaaaaatattattaaaataaaatataatttaaaaaaaaaaaaaaaaaaaaaaaaaaataaaataaataaaaaaaaaataaaaaaataaaaaaaaaaaaaaaaaaataaaaaaaaaaaaaaaaaaaaaataaaaaaataaaaaataaaaaaaaaataatataaatttaaaagagtgttttaantttattaaaaaaaaaaaaaaaaaaaaaaaataaaatataaaaaattaaaaaaaaaaaaaaaataaaaaaaaatataaaaaaaaataaataaataaaaaaaaataaaaaaanttaaaaaaaaaaataataaaaaaataa

SEQ ID NO: 181352 - DNA, 176 bp, Arabidopsis thaliana columbia
ataacaagaactataactttactctcactcaatatctcctttttcgaaaacacaagttgcgcactaacaatcaccattaactttcaactccttatcttataccaattattctatcattccacttttttttaaacctccgacaatataaaccctccccagcgcaaccaccttcacat

SEQ ID NO: 181353 - DNA, 172 bp, Arabidopsis thaliana columbia
  unsure (1)..(172): unsure at all n locations
aaaaaaataaatttttaaaacaaanaaaacacaaaaaaaaaaaaaaaaaaaaaaaaacnaacaaataaaaaaaaaaaaaaaaaaaaaaaaaaaaaaaaaaacaaaataataaaaaaaaaaaaaaaaaaaataaaaaaaaaaaaaaaaaaanggggggggtgccgggaggggt

SEQ ID NO: 181354 - DNA, 190 bp, Arabidopsis thaliana columbia
  unsure (1)..(190): unsure at all n locations
tccccaactccaattannctttttttttttccatcagccaacacacaatcgctctgttatattaaatcattctcctgtcaaannnnacntttcacaaccattnctacatacaanntcaaattcatcacaccaaaacntnaactanaattttattcttactactacttctaccttctttattcttcttaac

SEQ ID NO: 181355 - DNA, 257 bp, Arabidopsis thaliana columbia
  unsure (1)..(257): unsure at all n locations
tctcacatcccctctaaacatacctttttgttgttctagacataaaccananatctacactgttataaatcaacttttgtgtggtncnatnacttnctcaacacnncaatanaanattcatataaagcattatatttatttaaccaaaattcaattataacccttatttttaccctttcatttttcactcaaaataccacctcaaattccatttttttttctattaaatttctatttttaatcccaaaaatttcttt

SEQ ID NO: 181356 - DNA, 426 bp, Arabidopsis thaliana columbia
  unsure (1)..(426): unsure at all n locations
cccacacatccgctcccatccatgccatttcttctccttttttttttcatcacaaaaaactcaaaatctctcactttataacaattttttctcctcccannncaaatacaataaaaaccccccttcttctttttctctctctcataccttctcctttcttttctctctctatttctttttttttcctttcttcctactctctactcttttctttttttaccttccctccttcttcttctctctcttttccttccttttttttttcttcatttttattttctttttcacttttttcataccatatctttctttcctattatctttgatcttcttttcttttccatcttaattatcctttccaattctcttttcttctttctctttctattctcatttatcttctttttttccctttcctttctcttt

SEQ ID NO: 181357 - DNA, 286 bp, Arabidopsis thaliana columbia
  unsure (1)..(286): unsure at all n locations
cgtacgaaaaaaaaaaaaaaaaaaaaaaaaaaattaattttaaaaaaaaaaaaaaaaaaaaacgggcacgggaaaaaaaaaaaaaagggtcgggcccaaaaaaaaaaaaaaaanaaaaaacannntattnccaaactaaaatacaattaaatctaaacctaaattaaaaaaatttattttttttaaacaaancctaaaaaaaaaaaacccttttttaaaaaaaaaaatattcttaaaaaaaaaaaaaattaaaacaatttatttaattaacaataataacctacct

SEQ ID NO: 181358 - DNA, 288 bp, Arabidopsis thaliana columbia
  unsure (1)..(288): unsure at all n locations
aaaaaaannnnanaaaaaaatttttttttttaanaaaaanaaaaaaaaaaaaacgattgtaaaaaaaaaaaaacgccgcccccaaaaaaanacnaaaaaaanacnannatctctcttcacctcaaaactattaactacaaattccctcaaaacacatatttttctaataacnaaatttcacaaaaataaaacccttttcacaacaatattccnaatattattcacacttacaaacctaaatataaatccaacatcataactcaataaataaactatncaaaaaactat

SEQ ID NO: 181359 - DNA, 198 bp, Arabidopsis thaliana columbia
  unsure (1)..(198): unsure at all n locations
tctcatanaccctcatcactttctctccctcaaccacctaccttttttctattaaccccaaccacaaccactcccaaactctccaaccctaaactccccctcacccccattccatctttaccatcactcctttcatctttaaatactttatcatcaatattaatctaaacccttttctttctctccttatatttacaa

SEQ ID NO: 181360 - DNA, 339 bp, Arabidopsis thaliana columbia
  unsure (1)..(339): unsure at all n locations
cccacgcgnacgactctacctcccnatnaagaaccaatttaacttacctcangccgatgatctncacgtgcgcgctacaaaaccaacttgcgtcgccnnnanacanaatcatnnctactttttcaacaatnnnaccaaaaactaaacttcccctcttatttaaaaccttcccnatttttactttatttttccccttcaaaaaaaccaaacaaaatttcccccctattttcttcctttttataaccccccattttattccaccccttttnttattaataaaatcattcttccctttaacatttaaatcatttttattactccctcacccatttatttttt

SEQ ID NO: 181361 - DNA, 431 bp, Arabidopsis thaliana columbia
  unsure (1)..(431): unsure at all n locations
tccgcctcaagaaaatcaaagcagcagttatggctttcgttttaacaaagcaccccatggaagatgaggtgaagaatacggaggctgctggtttggtggnnaagctagagacagacgtggagatcaaggcttcggctgatanagttcaccacatgttcgctgggaaaccacattatgttttcaaagcaagtccaggcaacattcatggatgtgatcttgactaaggctactgtgtcacaatttgctttatcgtctttttgaattaccttcatgatgtggagtcatatgttgtatatgatattatttttgtgttttgtgctgattttatttttttacctttattattttttatggaattttcatattgtatattaattttttttttttttatttatgtttttttaaattcttatttttttttttttttcatt

SEQ ID NO: 181362 - DNA, 344 bp, Arabidopsis thaliana columbia
  unsure (1)..(344): unsure at all n locations
aagaatcacatttacacatcatttatgaagaagaagancncanccgtggaccgcaaaattttaatgcgggggccggacaaatccaatactctnaaccaactacccactcatgtcgctctttttagcagctacactgtcattatccgngctgatccctacctcctatcctatttctcccattccaaagatgagctcaagatcgatttctaaatgactctttcaattttcagcgttgaatccctcagatacatacattatgaatcaatggaagatatctatcttgaatattcatcctgatgactcttaaaacctgaatttccataactctaaggcatctatttctt

SEQ ID NO: 181363 - DNA, 407 bp, Arabidopsis thaliana columbia
  unsure (1)..(407): unsure at all n locations
acaacaaccaccaccccnnataatcctttctttttacactcctcctccaacanacccgcaccgttacaataaccaaccgctcctgccnaaacatnanctactccaccaccaccacatatttttaatcctcaatcttcaacacctccatcatttcaccctcctacctttttctatatcctaactctttttatcttnaacttacactattctatatatcataattttctctactattacttttctcataccaaacacatcctttcttctaaattcattcttaacaatcaaacctttcaattttaatcatactctttcattttattcccatctcattctccttcttaaaaatttttacaaacattcaacaactctcctatccctaacttttctcatcatctttttaaact

SEQ ID NO: 181364 - DNA, 351 bp, Arabidopsis thaliana columbia
  unsure (1)..(351): unsure at all n locations
aaaaaccgggccggcccgacgcgnacgaaaataagaagaaaaaggagaagaacttttatttttcaccaagaacgactnnnanccgcttggttttaatataaattgtgttcgtccccannaaaatnactactaacacncacaacgnaacccaccaccattgtccttctatttctcttattccacccatcaataattttatttttttcaagttcctatctctttcttttcttatcttcagataatcacaaactcattaatcttttctacacatctatcttcatttatataatattatcttcttattttcattaatttttttactactttttatttctctcttcttctaatttt

SEQ ID NO: 181365 - DNA, 264 bp, Arabidopsis thaliana columbia
  unsure (1)..(264): unsure at all n locations
aaaaaaaaaaaaaaatttttttttaaaaaaaaaaaaaaaaaaaaaggaagggaaaaaaaaaaaaaagggcgggaaacnaaaaaaaaaaaaaaaaaaaaaaaaaataaaaattaaaaaaacaaaatacaaaataaaaaaaaaaaaaaaaaataaaaaacaactaaaaaaaaataaaatttttaaataaaaaacaaaaacaaactatatataaataataaaaaaataataaaaaaaaaaaaaaaaaaaaaaaaaaaaaattaaaat

SEQ ID NO: 181366 - DNA, 405 bp, Arabidopsis thaliana columbia
cccggcccggaattcccggtccgcccacacccgtccggaggaggcaggggtttccgccgcctccagcatttgcttaagggctgaaaaggagccagtggattggaaaaaccaggagctggccagttcaatagtaaagccttaacaaaaggaggttccggttgttttaagcaaaacaggccccgaagttgattcaggaggtccctccgaaagggttggggcaggacccgagatagttattggtaaagaagaggagattggaccgattgcaattgagccaaatggaggggaagggttggggattggggcaaaaaaaaggtgaaggattaccagggggcgccttacaaagtgtgcgtgtgggctgtcccatcaaccggggttggtttgtgaatgatttaaaaagtggtt

SEQ ID NO: 181367 - DNA, 229 bp, Arabidopsis thaliana columbia
cggaattccggggcggaccacaggcgtccgaaaggcctttccaaggcctttttttcgaactttttttttaccgttcttaacggtggtttgattaacggccttaataaatcgggggatcttttttggggccgggtccttaataaagctgcctgggtcttccatggtttattcctgcgggggtgggagattttcctgtagacctaccatgtttgttccctgtatggtgttt

SEQ ID NO: 181368 - DNA, 288 bp, Arabidopsis thaliana columbia
ttgcccttttggggccaggtcctaaggcttaagtttggggggttgttttcaggaaggggaggggattgaaggaagcgatgactccattttttgggttcgaagccaggttttaagcttaaccaaaactggtcctagcctttttcccaagggtggctcctttttttatctaaatttggcctggtttaataaatcctctaatggattgacggatggggaaaatttttttttggccatcccctgaaggtttttaacttttttcctagtggagaactttgttatggggttcgc

SEQ ID NO: 181369 - DNA, 359 bp, Arabidopsis thaliana columbia
  unsure (1)..(359): unsure at all n locations
gcccacacccgnccgaaggtcgaattcgccgaatttaagtttttttgttttaaaggagaactccatcctttcctgggggccttttaaaaatgcctggtgaatttaatcaaattcaatgttaaggtaaccaaaaatggttgccaaatattattcaacgacgacttaatttattccaaggaccagggaggggtgaccaaaaggagggtaacggaggttggcttgtcgaagttcagtgcctacgggccactaagggatccaggcaagacaggaaagcctttgctgagaaagttaagggaggggaagatccatatgtggggctgtttacccgacaactttttttgtcctttcaaagaggcttt

SEQ ID NO: 181370 - DNA, 211 bp, Arabidopsis thaliana columbia
  unsure (1)..(211): unsure at all n locations
ccggaattccgggacggactcacccgtccgnggaaaagacaaaatcaagggtttcgccgttttttttactggctgggcctcgttggctgatggggaggcgaaaatggcttgattcaggaatttgcaggattgcttgaccaaagggccaggaaccattgatctaaggaggatgaaggggggcctatacctctttttttttatttttagccat

SEQ ID NO: 181371 - DNA, 102 bp, Arabidopsis thaliana columbia
gctggatggaaacaagggggggccatgctgtgaccttggatggggatggttaaggttggcttgtttcctaaatttttttaggtaattaaatggtctgcggtc

SEQ ID NO: 181372 - DNA, 152 bp, Arabidopsis thaliana columbia
gagaaacggggccagaattaaaacaatatttttccgtttaaacccgaggttggccaagcagttaacaaggggggttgatgatcctggcccccattgacttgttgaagggttctccaatcgacgaaagtttttggagctcttgaccaaggccc

SEQ ID NO: 181373 - DNA, 203 bp, Arabidopsis thaliana columbia
ccgcccgccaaaaaaggcccactatataaactgtatgttaatttctctaatgctttcaaaccaaaaagggggggggatgtccaactcatggaggggccaccccaatgaacgttgttgaaaataacgtaacttagtcccggcaaatggacaattcaattcctattttaccaattcctgttggaaaagggccttgatccccccga

SEQ ID NO: 181374 - DNA, 369 bp, Arabidopsis thaliana columbia
acccgtccggttaattaattctaagtaaaaggttttatttttggtgggttaccaaaacctaaaggcggggcccatgtgtgatggttggttaaattgaacctgttccttgcccaatattgccggtggttcttgttggactgtttaatggcgggaccacgaaaattgctgtcctgctggtatcttccggttgatgaacaaatcggtaggcttttcctaacactggtggaaaattcttaagggtaaacagttataatggattcatgagaactgattttaatggaactttgggtcaatattttctagtttgggataaagtacatattttacagggtcttttattatgatctctaataatttttgtttataata

SEQ ID NO: 181375 - DNA, 426 bp, Arabidopsis thaliana columbia
gggttttccattttttggggccgtaaccgttgccgtgaaaaagctttcctttttttatttccgattttttaactgcaggctcaagggaatggttggtggttaaaaggttctttccccgattggtcggggggggattttggggggttgcttcggcccgaccggggtccactccagcagcagcagttgcttcgacgattcggccgccaccaaatccactcgaggggttttttgggttcgccggaggccaagacgaagataaacctgttgcttttggccggggtgggaaggtttaagagctgcgtttaaggtcatgggaggatcttcagaggctgtgggccgtttttttaaaagggaaaaccatgtggttgacttacggtaagatgcttaaggctaagaaacttgcagtttcctaaccctgaccccatt

SEQ ID NO: 181376 - DNA, 116 bp, Arabidopsis thaliana columbia
  unsure (1)..(116): unsure at all n locations
aaaaggggcggaaaaaggggtaggaaaaataaaaaaaggggaagaaggtttggttgtgggaaagnaggggaggagaagggggggggaaagaaggaagggggaggggaaaaaaagag

SEQ ID NO: 181377 - DNA, 398 bp, Arabidopsis thaliana columbia
ttttaatccataaaaagggaagcggtaccggcgattaagccacttatcaaagtcgttgttttttttggttttttccggaaaacctccttccatcctggtttcctccggcctgcgatggattggccgaaggaatcggttccgggatggcaaatggggtttttagatttataaccgttcccgttaattaacacggatctggaagtcaacggtccttatcctccagtggtggaagctttccgccagaggattttggaagctgatagaatctggttggcttctccggagattaacttctttgtttcagttccacttaagaatgctctggactgggcttaaagaccacctaatgtttgggcggccaaaccagttgttttattaagcaccgggggaggttttgg

SEQ ID NO: 181378 - DNA, 339 bp, Arabidopsis thaliana columbia
ttggtagcaatgccgttttttaatccacagtcgttgtggaatccttttttcgggattaagccccaaggaggaggcatttccacaccaggatggtttttttttaacaggtttttccattttaaggcttccattttttaaatttccaggccaggaatcttaaaacgggtttttaagaatttttttgtagttaaggttgtttaagttaaggctggtagaagggtggtggggggggttgttcaaccataaaaaaaggaggggtggaaggttttgtctcagattattgatcctgttttggggccagttatggtttcttggggtttggtgaaagttttggtgatt

SEQ ID NO: 181379 - DNA, 299 bp, Arabidopsis thaliana columbia
aatctggtcccttttggttttttttactggattaaccaactcggtttttggattggtccgtggaaacctaatttgggtttggttggattccttttaagtcggtttttggatttcgttttttttgatgggttggggggggggatttttatcgaggttggcccttggggttaagatatttaattggatgggggggttggtttaatggaggcttattgttgggaaggttggagtttttttaagttttaaggtggaattattaaaagaaggggaggattttggttgggaagttgggtattttg

SEQ ID NO: 181380 - DNA, 367 bp, Arabidopsis thaliana columbia
cccggcccggaattccggggtggccccagccgtccgggatttaataagcattaagcagccagccgaaacttttaacgacttaccatggaaccaggcttttaatattttccgaccattttttcggataccaattttttctttttggtttttagataagctaaaaaatttttttaacctttttttttttgtggatctaacacctgacctggattttggttcccggacccaccattttgggggatactttttaattaccatggcaccaggaaaggcttggggaatggggcttggtaggttctttaggggcaaagttttaagcgaaaaggaaagagccgttggaaatgttttaattaagaaaatggagcag

SEQ ID NO: 181381 - DNA, 313 bp, Arabidopsis thaliana columbia
accagggttggattttgggaagggaggagtgggtttcgccaaagttgtttaaccaatattttttttttaatcccctggtttttaatatgaggttggggaaggggttggaaataccttaaaccatatggttttcctagaagggattaattttaatccagattttaattgggtttcaaaaaaaaaaaccaaaaataaaaaaaaaaaaaaaaaaaaataaaataaaaaaaaaaaaaaaaaggggggggccgttttaggggatccaggtttacgtccgcgggcttgcgaggtaatagtttttttttggggcccccta

SEQ ID NO: 181382 - DNA, 309 bp, Arabidopsis thaliana columbia
caggagcttgaggttttgttttttaaaggggttggttcatttgggaagggggtggaaagggatgtttttgaaccttccagggaggaacctcttcctgaaaccggggccgttattggaaaacccatgggggaccacgaggtaccacctcaggtgggcccaagggaggttgttaaaaccgcttttgattctcgccgaggggacctcaacccaccaagagtgctgggggccctgtcagtttaagggttccggcctttggggtttgttcgtgaggttgaaggattgggccaggttggggttttagttattgcc

SEQ ID NO: 181383 - DNA, 205 bp, Arabidopsis thaliana columbia
gggaccggaattcccggtcggaccacacccgtccggtttttctctggattaatcccctcttgggtttaaaaaacccctacctctcccttcggtccgcttctttggaagtaggggcgttcgaattctttgaaaggggataaccttttcatatttggtcctctctttttcccgtgtttggattagttttttggaaacctagggtttt

SEQ ID NO: 181384 - DNA, 456 bp, Arabidopsis thaliana columbia
cccggcccggaattccgggtcggccccacccgtccggtacccaatttaagttttccctctaaaccattccaggttttttaagatccctttccttggatcctctttttaccaacctctttttttctgttttcttggacccgtggtaggaaaaatgggtcgttttaaccagtttccgccgttgggggcgtcccattcaggttattttgcccagaaggtttgccacttgcttgtttgggacctccacttccaggaggattttaattcctgaggcagcccctgagaagaaaaccactgttgggcttaaggggcttgatttgctggcccttttaactgctggatggcaaacggctgttttagatccctgggtcattgcaaagcttgagggaggtaatggtgttgatgatcctgggaaaaaatatctggcctttttggttggtttatggggacctgccttag

SEQ ID NO: 181385 - DNA, 173 bp, Arabidopsis thaliana columbia
gttaaccatatggggctttttttctaaggtttttggcctaatatcttcaaggggatcccctcctttaaggcgtggcttggttctttgggctatttggttttttggcaggcgtccataatctaaacaggaatccttcaatagccttttttaaataaaggtcagtggccgaagaa

SEQ ID NO: 181386 - DNA, 158 bp, Arabidopsis thaliana columbia
atccccgggcggacccacccgtccgcggtttccccctaaccttaccccattagattccaaaccggcaccaaggccgggcggggggaaaccacccgaacctgggacggccaaaacaccaccaccaggaaccaccaaacccggcccacaacccctagggg

SEQ ID NO: 181387 - DNA, 311 bp, Arabidopsis thaliana columbia
ataaaataggccaccagctggattcttaataaagggggtggctaaacatcaccaaacatttttttgcaggcttgaattttctcaacgggacctaacttctgctctgataaggaaatccagggtttggttgaacttgtttgtttttaaattttttaaagccttaacaacaaagtctaacacttgttggcttccaagtttgcgcaaatgccggaactttaagacggctttttttcaaatcgtcagttctggctatttgcccactttctacattacttaaaaagcagttgtgaaatcttacttccctggaaaaa

SEQ ID NO: 181388 - DNA, 170 bp, Arabidopsis thaliana columbia
cgaaattccggggccgccccacccgtccgagaaaaccaaaagggttccaatgggtggattctcatttgtcttttccgccggtttttgaaggagggggtaaagatcattggctggggcggccataatggctctggaagagtgtcgttgtttcaatatgttattccttgttg

SEQ ID NO: 181389 - DNA, 452 bp, Arabidopsis thaliana columbia
  unsure (1)..(452): unsure at all n locations
ccgggtccgaccccacgccgnntccgaaaagaccctctcccaatgacctttttnnnctcgtagcttgtctctttattacccgttcnnttcatcgnnttgctttgatgtcacgcgtnnncttatattagtgccggcggaggctctnnntctcgcgccccgcgtccccttcattcnnaagctgcgnnntcggtcttctccatcgcntttcatacctcgcgacgagggttgganngattagccccgctcgagaccacaccaanntgttggaccccctcggaagggggannttccgtcctctaatgccgaaaacctatttattaaaaacctaccatcaaccggagggnnccagttcgaccaaagactaccgattgtagtcgcttagttaccgctcattgactaccgctaaaaccggtcaaggggtggcggagaccgctaaggacgcgtgggtcttt

SEQ ID NO: 181390 - DNA, 287 bp, Arabidopsis thaliana columbia
  unsure (1)..(287): unsure at all n locations
aaaccctatatcgaaatnttttttctttttatacaagaaacacncanncgggacatgttatttttattaacgccccggccaactaaatacttattatttctatccagtcctccttctccaactttaaatcgcctattcaccgctcctttttcatcgatcttttctacaatcgttaccaaaagcctattaactactttcttcgctaacaagaatttcgaaattctgattctttatttaggaaatacatctaaatatgctgcttccaattttggaactcttccaatttc

SEQ ID NO: 181391 - DNA, 286 bp, Arabidopsis thaliana columbia
aaaatttttaacctgatactcattatttttttttttttacccacagcaccaaaaaaagcgccccgtacatatacaccacgccccgctcttaataccaacacaaactttaaacttcaccaacactcctactatccttattcccaatccttgctactctctctatcttaattttctctagtattattaatactcttattgtatgacttattctaaaaatatttctcctccccctcccctgaataaattttacttttttcctagttaaaaacttttctaatctttttcc

SEQ ID NO: 181392 - DNA, 424 bp, Arabidopsis thaliana columbia
  unsure (1)..(424): unsure at all n locations
aaaaaaaaaaaaccgaagggtataaaaaaaagagnggtacggaaaaaaaaaaaataaatnataaaaaatttataaataaaataaaaataaaatttaaataaaaaaaaaaaaaaaaataaagattaaaattataattaaaaaaaaataaaaaaatataaaaaaaataaaaatataaaataaataaaaaataaattaaaaatataaaaaaaaaagaaaaaaaaaaaaaatattaaaaataaaaaataaaaaaaaataatatataataaataaataaatgagagggggggggggggggagggnnanatnnnataaaataaaatataaaaataaaaattaataataaaaaaataataaaaaataaaaaaaaaaaataatataaataataaaaaaaaaaaataaaaaaaaataaaaataaaaaataaaa

SEQ ID NO: 181393 - DNA, 273 bp, Arabidopsis thaliana columbia
atttaactaaatcaattttctacaaaccaacaaaatttctacaccccctctacaataccacccacacaatcaatccaaagacccaaatccaattgatctcttttatacaaaatcttacttcaaccaacataaacacaatctataatttttaacccaacaaccctcatattttctcaaaatattcttacatccccattaccaataataatccaccccggcactatctttttatcacctaactcacctctacataacttctcctcccatactttt

SEQ ID NO: 181394 - DNA, 249 bp, Arabidopsis thaliana columbia
  unsure (1)..(249): unsure at all n locations
aatgtagattatttttattacccatttttttttcaaacaaacccntactacatcggggcgttttaatcttattaaggggtccattcataactatctattttattatccgattttttcatcactccttaatctttaaacaaatatctctctcacagtctccctttagctttatgatttaaaactggatctttgcttcttgattataacacattaaactacttaaacaagaacattcttatcaaccttatt

SEQ ID NO: 181395 - DNA, 187 bp, Arabidopsis thaliana columbia
  unsure (1)..(187): unsure at all n locations
aacataaaaantttaaacctcattcttcttcaccctccatctaccaacaccttcactcacgaaaaccttctaatacttcctccattctcccatccttataaccaagatatccaacttatcaacaatctaaacacacactcctctacaataaatatcccatcttcaacaatatttcctcatctcacaa

SEQ ID NO: 181396 - DNA, 457 bp, Arabidopsis thaliana columbia
  unsure (1)..(457): unsure at all n locations
gaattnnccgggngcgacccagcgcgtncgcatataccttgcataanngagaaggaccacgatcatgtcttcaangattcaaacgcttctgttaactggcaaggggtgagatattttgagagcgcccgcgttnnactgttctacttctctagacaagnnnctgagcatgccacgctgctgannagtttccctnntaatgtgcctttcgtcttagagtgcccttcaaacgtcttttaaccctgctaagattctttgatgaagacacgaggatttacatagaacctctgcttcaaagagacctagcacanttagagctcggttcttgatctatccaatgtaacacaaagtgtgaagatcacaggatcttgtcactttcccaaggtttctttgtgtacgtgttgaacctttgcttgggatgaccgtttactaggagatatcaagcaaaagacaaaagaaa

SEQ ID NO: 181397 - DNA, 252 bp, Arabidopsis thaliana columbia
  unsure (1)..(252): unsure at all n locations
acactgtttccctctcatctttacactttagtattctaatcgatttcaatancnnnggcgccgcgaaacattctaatctcggtcggccgaatataacatcaacatgaatcaacaaaacctctcttcaatttcctgtgggtcaaatcgctcacttcttgaagaaaggcaaatattccttacttgttactgccttatctcctttttacttaactccctatttctataaccacaccctcctttatatttaatatc

SEQ ID NO: 181398 - DNA, 265 bp, Arabidopsis thaliana columbia
  unsure (1)..(265): unsure at all n locations
agaaaaaaaaaaagnnnaaaactcatttcacttatagacacaanacaccccgaaccgttattctaacgggcgcgcgaaattacacccctacaaactctacactaaattcaacaaagtcgtcatcaataaagagaacaacttaaacagcttttacagttacagatcatggcacagacatgcaagacaggtttgttagagatcgtgagattctatcgaaccactctacccacagatcccgcattgatctcttactgtctacgctgat

SEQ ID NO: 181399 - DNA, 197 bp, Arabidopsis thaliana columbia
atcaaattcgcctacatcttgactcctcatttatttcttctcttaacatcacaacaccttgctctacattcttatattgtcgccacaggtacttactttatctatgacataaaaattcaaggttctcgtaacactgcgcctctctcaaactgtcaaagccgccaccacaaagttttacacttgctactctacaaact

SEQ ID NO: 181400 - DNA, 215 bp, Arabidopsis thaliana columbia
acccgtccgcaattttccataaaggggaggaaccaaaacttttttttttaaagttccggagccgtttccccgcttctgggacgaattgcgggaagggcaatgttcgattaaagccaaacaaatgttccaacatttccatggccaattccggccaaaacatcaggaggttaaggagggtgggtttaaccttcaggaggccacccctgatgcatttt

SEQ ID NO: 181401 - DNA, 244 bp, Arabidopsis thaliana columbia
cccaatttctacctgggggttttttggattcaacgtcctggcctcaagggggagttttttcctttcaaatcttggaagggaataaattgatcatttattgcccatggtctccaaaacttaatggttcttgatctcaactgttgtttttaaacaatctttaaagaaggggtttgtacctctagcaacggtttaagtgaccgttatctttggaggaggggggaattttcctcaaatttttttcctg

SEQ ID NO: 181402 - DNA, 210 bp, Arabidopsis thaliana columbia
tttttatttatttccaaaattttttttttaataaaggtggttatttttaaaaaagttggggccccataattatttcgggaaaagaccttctttaccaaaccatttacctgttctggtcaaaatattccggcggggggtttgtttacctttgttgactccaccttgaacccttttaacaaaacaaatttatccaaaaccttactttttaaa

SEQ ID NO: 181403 - DNA, 442 bp, Arabidopsis thaliana columbia
ggcggttcaaggcgtctgccacaccaaaaggcaggattatataccactttgggaacttaagagttccaatagaaagggcgaacctaccgattctttgggattacgggccaagttggttcggaatgggggctagagttgcgttgtgggggaaaggtgttgagtttgaatacagatgggaggttttttttgaaaggagctttttatttattccagtgtattctcatcaacaggaaatatctgtgtttgttccataagggttaaacgggtttgatataattttttaagttagataaattattttttttgtggattattcttttgttatgaatattattttttttcgttttgaattgttttatttgaaatttatatttgttttttttttaggttatattttttttggtacgatatgttttttttatgataaaattttttttttttt

SEQ ID NO: 181404 - DNA, 393 bp, Arabidopsis thaliana columbia
ccggggcggacccacccgtccggccgtgatccctttttttttcctttaaccaaacgcgcctttaatttttaaattttttccacctccaatttctggcaattaactccaccttcttcttaatctcctccttctttctttctcggggatcctagattccgtttttaacgtttctttaaccaattttgggaccctgtttttccagttcacctaaatccacggttgagacctttccctttgacctggtggtaaaacctcttcttctttccgccgccgccaccgaaccaccaacccaacgattccccaccgggaaaccagaaccatcgacggggggctttaccgcaccagggggattttccggcccccctaccagtttagggacgtggtttttccgtt

SEQ ID NO: 181405 - DNA, 340 bp, Arabidopsis thaliana columbia
gaggccggtattggcgaggtcggtttttttccattggactggggactatgtcccgggttccacactttaaaacagccgtggttttttaaacttggtggttcaaggaagaccactggccattttacctggcttttccggtttggataacaaaattgggggtcggaaatttgtccccaatagaagttttttggggggccaggcaagttttggcggttttgggagaaatcctgttttttaaggacttattaagcagggtacccggggaaccaccaggcaaagcggggggggagaggattttgttatcgaaaactttggtttggtggcttaaaaaaaagggcct

SEQ ID NO: 181406 - DNA, 370 bp, Arabidopsis thaliana columbia
cggaaaaccggggcggacccaggcgtccggaaaagaaaggataatttctattttccctttttaccacccatccaaaaggtggcttcctatcttcctttattccttctttttggctctatccatggcctttgttcaggatttttggtttgtaatcttgaaccgcgctgaaaccccggggggttcccctggcttttgtcccatttatgtcaaagctccagctcttggcttcttgggcttaggccttcttggaaacattccaaacattattaactctgtggtcaccacccctttttttgagcccagttcccgggtctgaacggtcaaggtctttctccagttggatttgactaatcttctaagggggggtccc

SEQ ID NO: 181407 - DNA, 396 bp, Arabidopsis thaliana columbia
  unsure (1)..(396): unsure at all n locations
cgccagaacccaagaanccgaaacccccaaggatcccgacaaggggccaggtggttaactagccgggggattttggttctaaaccggggatttaccaaatctttaattaaatcgcgccctaattcctccgaaggattggttggctccgatgccaaatcttcctcctcaaaacctaaacccaggaaagctttttcggcggcggtggccttacttacaatcctcctttcggctccaatgccagcggcggtggatatctaaggttggactcctggcagggcctaaaaaaggttggctaaaggggggaggcaccggaccaggaggttggattctttcttaaggttctacgctctggaatctgccccggttttggtttcatggctaaaatggggaaaccca

SEQ ID NO: 181408 - DNA, 421 bp, Arabidopsis thaliana columbia
tttttggttaagaaaaataaatacctggttcttgggaggtcaattaggattaagaaggggtggttattttataggggaattccgaggattattggggattgaaaccgggggcttgattatggcaaatacctatccattttttccttttatttctggaaaaggtttcttaggccaccaaatccaccctggttttttttgggaacaggcgtgggagttgggtttttaccaccgggaacggttcctgggcctccggggggggggccttttttttaatccaccttctttggaagggggttagtttcatagaactggtctggtttggtaataaacccaagaccaaagcggaggggatttttttcttccttggggccgcttgaacctcccttggggcttgggggcgaaaccttcacgggggccgggg

SEQ ID NO: 181409 - DNA, 166 bp, Arabidopsis thaliana columbia
catccattccttttttataaccaactttttttttccataacattcgccaatttccacagggacttttttctattccaatttggatggccatcataaattcaatcatcaaattttttttttattttataactatctaaaactccaattttattaaaaactttttttt

SEQ ID NO: 181410 - DNA, 462 bp, Arabidopsis thaliana columbia
ccgggccgccccacccgtccgttcaccatttccccaatcctaaggctacctccttggggtccataatcgaaccgcttttggcgattaatcctaatcttttttcaacctccggctccaaattgggtcctttttgggtggaattgggttaaaaccatattctcctttccaattttctggggaaagggaagtttcagtgttgggaaatcctcaaccggggatctgcatagctgatttagcttccagggggctgggatttagattggcctctgaggtaatctccggggattcgagaattagggttggtttttgcacccaaggctttaaagggaaggagatcgcgatccgttgctttccgggacttgccaaatgggagagccatctgttccgatgccccttttccgtttttaaaatcccctccaaattctaaatcgttcgggagtgtaaaattatttgtgggccttc

SEQ ID NO: 181411 - DNA, 391 bp, Arabidopsis thaliana columbia
cggatttgggggtgaaggtggctcggcaagttttttccttggggttttccaacctccttccaggggttgttgaggggatttccaaggtggcttaaatggccctaatccctaaggcttttgttcaaattttggaaggtaaaaggactaaaagtattgtggtttaacttttctagaattaatgggtagtgttttgtaagggatattaacctgggtataggggtttgtgggtaaatccttcaaagccggtaaacatttattattaccagttcttccgggaaagaatggggtttttggaactttggggaaaaaaaccatggtttattcaaaatggttttaccagctgcaaaacctgtgagggcatttttatagaaggggcaaggtttctgttccc

SEQ ID NO: 181412 - DNA, 286 bp, Arabidopsis thaliana columbia
tctgttttactcaatgtcatcgtgttttatatttttacgttttccgggatgagtgtgggttctatctaagcaggtgactctacaacattattgataagaagtggttttattgtcactccattatattccctttcttaagatgaggatgcatttctcttttgttctaaggtaaggtttttttttttttttgtttaacggatgtgtatgttttgatttattttattttttttctttttcatttttagattttatcattttatttattttttttatttttttgtttttt

SEQ ID NO: 181413 - DNA, 181 bp, Arabidopsis thaliana columbia
acacatatagttacaaacactcttattttttacacatatatataaaaatgtgggggtgtaatatagcactattgaggcggcaacaaaatcttctttatacttgtatctcctcactatgtgttgtccactcacttgattcactatgaccactgtttgcatgttatccagcatactttttaac

SEQ ID NO: 181414 - DNA, 226 bp, Arabidopsis thaliana columbia
  unsure (1)..(226): unsure at all n locations
aaaacaaacaaaaaataacaaaaaaaaaaataaaaaaaaaaaaaaataaaaaaaaaaaaaaaaaataaaaaaaaaaaaaacaaaaaaataaatataaaaacaaaaataaaacaaaaacaaaaaaaaaaattaaaaatataaaaaaaaaaaaaaaaaaaaaaaacccnaataaaaaaaaaaaagagaggaaaaaaaaaaacaaaacaaccaaaaaaacacagagaag

SEQ ID NO: 181415 - DNA, 235 bp, Arabidopsis thaliana columbia
aaaaaaccggtccgcgcccacccgaccggggaaagaacttctgttaaaaatccaattttttttacaataacctttcaaaaaaccaggttgcctttattaaaaggggggtgggccgaaccaaataaaaaaaaaattttttccattcaaaaaaatcccgattttcctactccaaaataatggaggccaaacactatatttttaaagtcccttttcataacaattccccggtttgttt

SEQ ID NO: 181416 - DNA, 468 bp, Arabidopsis thaliana columbia
aaaaacccgggccgcccaacccttccgaatttttgtaatcaagccgcaaccaatttttttcaacatttcccgaatgtctttacgggccgataaaatataaatgtttgtggccccaatcaacgcaattgaatccaaccttaacaaaataaaccttaatttatttttactttcaaacttccagaacctcggtttttccttttaatccaaaaaacttcttttcttccccctgaaaaacaaatttttccaaccatttataaccttttaaaccaacctaatttaaaatcaccctttggttaccaccaagcttgaaataaaatccaacttaataaccctttcaataaagtttttaaatttttccataaatatttaattttcaaagaaccatctttaaaggtgtccggttcctttcttttcatgaaaaaataaaaaaattaaccacccggcttcctttattgttgcttccattta

SEQ ID NO: 181417 - DNA, 419 bp, Arabidopsis thaliana columbia
aaaaaacagggccggcccacccttccggaatttttaattgagtaagtccaccaaagtttttttaaactatcttccttaatttttacctgttttaaaaaaaatattaactgctcaaccaaaattaattattccccaaaaccaccaatttttgtaatcctaaatatattaaattcaacctccttttttttaaatcttacccttttttcaaccccttttttattccccaattttccaatatcttccccctttttaaatccaatcttaaattttaccccccaaaaacctttttctttttttttttaaccctttttttgccaaccctctttaatttttctttaaaatttttaatacttttttaaaacaaattcacaattttattttttccaccattaaaaatttccaaaaaatttttccttttt

SEQ ID NO: 181418 - DNA, 401 bp, Arabidopsis thaliana columbia
aaaaaacggaaccgcccacacccttccgcgaccccttgggaaaaaaaaaaaaaaaaaatttttttttaaaaaaaaaaaaaaaaaaaaaaacggggggatttataaaaaaaatttgtttcccctttaaaaaatcccaactttcctaccccttcctttccattttatacttttttttttgttgaccttaatttaattctatttccttcttttttccaccttttcactttaaaaacccttttcttaccccacttaatttccttttcaccaattcccctttttcccactttccttataaccaaaaatcccccaccttttcccctttccaaacaattttcttccttttatttttatttttcccccccctttttcctctcttttaactccctctttatttttgtttc

SEQ ID NO: 181419 - DNA, 386 bp, Arabidopsis thaliana columbia
aaaaaaaccgggccccctaaaatccaattaatttaccccaaattttaattttttttttaaaaaccacctaaaaaattgcccgattaataaaacaaatcgccttccaaaaactccccaaaaatcttaatcccacttcctattcaaattcctcacttttttacccccatcttatttttttttttaccatttctttacaaaattttatccttattatttaatttatatattttaactctctcactttttctatccttttttttttttaacactattcttacccaaaattttcccttatatatttttttcttttccttcctatcccacctttttttctcttttcccttttctctttatttccaactttattttcttcccctttttttttt

SEQ ID NO: 181420 - DNA, 77 bp, Arabidopsis thaliana columbia
  unsure (1)..(77): unsure at all n locations
aaaaccngaaccggcccacccttccgaaaaaatcaatttaaaaaacccaaaaaaaattttttttaaaatgccttttt

SEQ ID NO: 181421 - DNA, 443 bp, Arabidopsis thaliana columbia
  unsure (1)..(443): unsure at all n locations
aaaaccnggaccggcccacccttcacacacaagtttttttccccaaacttttaaaacctttcttatttcctttccgcccaccnntcctcgcccggattaaaaatatcggctgtttggctaaccacttcttcaaacaaccgcaactttaaattccaaaaagggaccaaaaaaagaaattcaagattccttttttactctttttttttccacaccgactttcaagaaattgaaccactttttaaccacggaattcaccaagacctttaccaaaccaaatttcatgcttctctttaaaaatttcaaaaccgtttccacccaaccacatttcttagggaccatggattttaaataacttccaaccaattttcaaggacttttccaacaaatttttgttaatttctttaaccgtccttgacctgttaatttttttggtttcttttttt

SEQ ID NO: 181422 - DNA, 296 bp, Arabidopsis thaliana columbia
gacggaaaaacccgggccgaccgaggcgtccgagaacccttggccaaagtttgttttaaccttttttttccagatttcgaaaaagctttctgggtggtttctttggggttgcccagccgttttaaaatataatttgggggataaagtaattaaagaaatggtggataatttgggttaatgtcccgatggtttaataaaattttaaagttggacctaaaaaaaagaataaaatttttatagtagaaagttcttaccgtcctaaaggcacaaacttggttttttaatttgtaattgaa

SEQ ID NO: 181423 - DNA, 383 bp, Arabidopsis thaliana columbia
  unsure (1)..(383): unsure at all n locations
aaaaccgggccgccccacccttccaaaaaaaacctctaataattaataactttattctaaaaaacctaccccaaaaactatcggccgcaataactaaaaacttggttgtcttccaaacacanacacaacccataaacttaaagttttttccccaccacccaccatttttcatttttttaaaaaccttttttttttaaataacctcaatctttttctccctaattttttttttccaacctccttaccattttttatcgtccattttaatctttttatacccattaaccaatcttaaattttccaccaaccatttttcaaaattccttttcccattttcaaacactcctttaaatcaaatttcattttttttcttcaattttttt

SEQ ID NO: 181424 - DNA, 463 bp, Arabidopsis thaliana columbia
  unsure (1)..(463): unsure at all n locations
aaaaacccgggccgcccacacccttcactattactaagccaagccaccacctaaattttttaaaacaatccttaantaatnnaacgcgggtaataataataaaaatttcgcttgcccttaataaannattatctaatttctttttgaaaaataaattttttaatcttatttttttaaccatttaatttaaacatatttattcattttcatttttaaccttcaaaaaaaatatataaaaattaattaaaaaataaaattaattttatattaatataataatttttttatattatttattatatattatttaaaatatattttttaatttttattctcttatattttattcttccttttttttttatttaactaattttttttccttctttttattttataaatatatattttattttctatttttcttccctaaataattaaatttcctcttttctctcttatt

SEQ ID NO: 181425 - DNA, 461 bp, Arabidopsis thaliana columbia
  unsure (1)..(461): unsure at all n locations
aaacccaaccgcgcccaccctacaacattttcctttggaccaattacccattacccttaaagccaaaaatccccaanntttgctggctttaaaaaacaaatctttttcctaaaaaaaaaacccnccnccntaaaaaatcataaattttttcccttcacacccaccttattccaacccctttttaccattttttttttttaattttcgtacctaaactttcctttttttttccaaaattccaaccccccttttcccaaccaacccactcaatttttgcttaactttcccaaaaccaatattttatttacctttattttctccttagttccttttccaccttttttaccccttttccagcccccaccatccacctcctttaatttgttttttatccctccaacccctaatttaataacttaaccccttttcccctttttctttttcttttaacccacattttc

SEQ ID NO: 181426 - DNA, 363 bp, Arabidopsis thaliana columbia
ccggaccttcccacccgtccaaagggtctgcctgatgaaaaaaattttttgattttttcccctgagtcaatactaccccttggaaggtcctttaataaaacacgtggggcaaatccgaaaataccacctccgtttccgctttttcttccaccacaatgttgattgggaaacctggttgaataaaccaaaatgccataatttgcaggcatgggaaccaccagtttaaacatccaaagggttaaaaccacacaaaatggttcagttaaagcaaccgaggcccaatttccataaaaagtgtcggttccagatgtggaaacccataatttcaatttttttccaaaaaaatttaaagcacccgaggaa

SEQ ID NO: 181427 - DNA, 237 bp, Arabidopsis thaliana columbia
aaaaaaaaaaccgcgccccccgacacaaaaacccttttttaaccctttaaaaaaaatttttatacttcccaacaaactaaaacaaaccgcccaaattatttattaatttttcctccccaaaaaaaaaaaccaaaaattacccattcttttctcttcttctacctttttttttctcttccttttctctaaccaatttttttttcttttttttcttttaatacccatatctatttttct

SEQ ID NO: 181428 - DNA, 326 bp, Arabidopsis thaliana columbia
  unsure (1)..(326): unsure at all n locations
aaaaaaagggccggcccacacaaaaaaaaaataaatgggattaatccccaatttcttttttcaccctctttccaacaaaccctcctgcatataattaaaaaaaaccttcgtccacacaaaaaaaccaatnaacttacccttaaacctcccctccttcctacccttttacttttttatttctccccttaactttttttttttctcctttaaaaccacaatttttccttttcctntctttcctccaatcttttctcccctccttatttcctttccctttttccttcacctccatctccccttttatttcaccctttccttccttttcc

SEQ ID NO: 181429 - DNA, 471 bp, Arabidopsis thaliana columbia
  unsure (1)..(471): unsure at all n locations
aaaaaacagggccgcgcccaccctacaaatcaaccaaaaaggtaaaattttccatttttttttaccaaaataccatccccancccccctggataatttacattatatttttcgtccccaaaaaaccnaccaaaanctttcctcctattttttcttttttttactctttcttttttttttttccttcccaccattttttttttttttttttttctttttcattctttttctttttttctctttttttctttttcttctatttctttcttccttttctctttctccttttctctatcttttttttctttttctttctttttatatttttcttcatatcttctttttctttttctttctttttttcttctttttcttcttccctttcaccctttttcttttttttttattcttatcttctctttttatcttccttttatttcctcatattttattcttttcctctcttcctctc

SEQ ID NO: 181430 - DNA, 320 bp, Arabidopsis thaliana columbia
  unsure (1)..(320): unsure at all n locations
aaaaaattttttaaaaatttttttttctcccaaccaaaaccaaaaactgcccgacacttttataaaaaattttgctcttcaccaaaaaaaaattanncttaaaatttttttcctttcttaatcttttcctaaaaaattctttatttttcttaaatcttttttttttttttttaatttacctcctctttttaatctttttaaattttttcttattcctataattccttttcctttaaaattttttccatttttccaatttatttatctttctccacatttttctttttttacccattttcctaccttaacccttttttttt

SEQ ID NO: 181431 - DNA, 424 bp, Arabidopsis thaliana columbia
  unsure (1)..(424): unsure at all n locations
aaaaaagaaccggcccacccgacacaaaaaaccacaccaatgccttttttttcccttttattttttcttcaatcttttaaaaancccgtttccattccaaaaaataattgctgcctccaaaccanaaaccntttttttttcctttccttaactcaaccttcctccaccattgattcaacctttccaaccgcctccttttcctttaagcttcctaaccccttgaaattattatttaaaaaccctccccattcaacacctccgtttaaaaagaaaaaacccccccccgttaaaaatttcccctccaaagttaaaaaattaaaaccaccgaaaatttttttcaatttccatattccaaaatgatttaatgaaccttggaattttaacacatttctgaataattaaaaacccaatttgaatcctttat

SEQ ID NO: 181432 - DNA, 462 bp, Arabidopsis thaliana columbia
  unsure (1)..(462): unsure at all n locations
aaaaaagggccgcgcccaccctaacattacctcccatgccctccatcaaaacttttttttacacccaaaaaatctccaaancttgtctttattttaaaacaatttttttgccccaaaacaaacccaaanntccaaaccaatcttcnttccaatcctttttttcttctttttaatcttaccccaaccatttctttttttcccaannttnaaaaaaaatcccttcatttttttcccaccaaccttttcattcccatcaccattcttatttttcctccaataaaaaaaattctttcccanctttaaatttcctttcctaaaccatcttttctttttaccaaattttttcccaaccttctttaacctttttatttcctccttttttctttaaaataattatccttantttttttccttcattcctttaacctcaacttcctcaatttcattttatttttcactttt

SEQ ID NO: 181433 - DNA, 266 bp, Arabidopsis thaliana columbia
acccccaacactaaatttaattctctatccttaaacccttccaatttatttttttccaattctttattttaccccttcatttatctttttttttttttatcccttttttttttacatttttttttttcataaatttattttttacctcctttcattatctttcctttcccttcttccttttatctataaactttttattttttttcttttatactctttttttattttcctctctttcttctcttattatattctttcttttttcc

SEQ ID NO: 181434 - DNA, 378 bp, Arabidopsis thaliana columbia
  unsure (1)..(378): unsure at all n locations
aaaaaaagggccggccccctaaaaaactcctngggggattttttccccattttttttttcactcccaaaatataaaacagccccgcaaaattttcaacatatttctgtcctanaaaaaaaacccnccttaanttttttttaaaactttttgttattatttttcctttttaccttttgttccaaaatttatttttttttctattttnctaaataccaataaccttttttttcattacccctcttttttttttttttcttatttaaatttttctcttcctgttcccaaaaccttttccccttccattttttttttaccattttatttttttttattttcttttctttttatattttttatttaaacattttttttttttt

SEQ ID NO: 181435 - DNA, 482 bp, Arabidopsis thaliana columbia
aaaaaccggaccggcccacccttacaaaagtccaccaaggattcctcaattgaaatttttatattcctttgcctttaatctaaaaatggtgggcaatataataaaaaccgttgggccaaatttgaaaaacccattttttaaaccaaaccagaattaacaattatccaaagtttcccttggaaccttaactttattcttattttttttcgtaaccaacaaacattacaaagttaaatttaaaaaggggccattctttaagctttttttttcggtttttaaaaattaaacgaaaccactttttttttttattaaaaatttgaaaactaataattttttgaaaaacaacgttgattctttccaaaacaaacttgccaacattacttcttccaggattacttttagggaaaaattttttaattcccttacttttcaaggttttaaattctttggtaacgttaacactaatttaaaaaccttttaac

SEQ ID NO: 181436 - DNA, 468 bp, Arabidopsis thaliana columbia
  unsure (1)..(468): unsure at all n locations
aaaaaacgaaccgcgcccacccttacacaaaaccatttatttcccacttatcaccaaatttttacccatttaaccttaagacctcactctgctgcgaaatttaaaacacacccgccccctaaaaaaatnccaacccattccaaaaccacaaccccttttcctaatctattccttttccttttaattccatctcccacttttttttctttattccaccaaataactattaacctaaaaccaaatttccaccataagttagaaccaaacccaatccaaaccctgaccttagacctttccttccaaaaaattacgtaaacctcttcacttaattttaaattttcaccttcaaccccactaaaagtttttaaaaatcgtcctccatcgcttaactttttaaaaatgaattctttcaccaccctctttaattcaacttccacgaaaaaatttttttttcttcccttttcaatt

SEQ ID NO: 181437 - DNA, 411 bp, Arabidopsis thaliana columbia
  unsure (1)..(411): unsure at all n locations
aaaacccgaaccggcccacccttaaatttaaaaacacttaaactttattccaaaaattttttttctttttgtttccaaaaaaanccgtgtttataaaaaaatatcttgttgtaataaaaaatnnaaaaaaaaaacaaattttttcttaatataaatttttttccccaatttttttttccctttaaagattttatttttttttttttttaacaaaaaacaaattttttttttctttaaccataaaataatcttaattcacaatttaacataattatttaactttttttcttttttaaccaaatctccatccttttttttcaccctataattcaataacttcattatattaaaacccatatactctttttttttgttttctttttatttaatatttttcctttttatactctt

SEQ ID NO: 181438 - DNA, 409 bp, Arabidopsis thaliana columbia
  unsure (1)..(409): unsure at all n locations
aaaaaaaaaacggcccggccgnaaaaaaacccttttataatcctataaaaaaaanatttttttccatcctcctaacttaancacnncgcgctcgcgacaatataatacaaatttgttcggtccccaaaaaactaanccaaaanttaaccattttttcttttttgaaaactttccnnttcccctcccttttagaaaccaatattttttttttttncttttttnaaaaccaaaaacaaaatttcttcttaaaaatttttaaaacccaaaaaccaagttttagattctcatttttttacctttttttggaattgttttaacaaagccaaataactctttccttcttccttttcttttaacctctttctttcaatcattctttgttatgcctttacctgaaaaatctttttta

SEQ ID NO: 181439 - DNA, 313 bp, Arabidopsis thaliana columbia
caacttcaatttttttttttttttttttcaaatacaccccccttttatatccttcctatttcaatttctctgtttttttaattcttttcccttttctttcttctattttttttttctatccttttccatttctttcctatttactcttttttttttttttttcttctccattttctttttttttaaattttattacttttttcttctttcttcttttctcttttcttaatatttcctcttttcttttttttcttcttatcctctttatttttcttttttctttttttctttctttctttttttttattttttc

SEQ ID NO: 181440 - DNA, 399 bp, Arabidopsis thaliana columbia
  unsure (1)..(399): unsure at all n locations
aaaaaaaaaaccgggccgccccaacnccattaaaacattttttttttaaaaanatttgttttataaaaacaattttcaannnnaaccgtccgatttatcagaaaaccttgctcttccaaaaaaaannntaaaacnncctaaaaattccaattacccaccaccacttccatttttcttcccattcaacccaattccattttcttttatcacaccccaaaaccccaatttcttaccccctttcctttttttttccttaccantttttccattattctcatttaaaaaacccccaaacttttttcccctttttttaatccaacccattcccttttctttttcttgccttaaccttttcccttttttactttcctcttttaattcttttttntcccttaaccc

SEQ ID NO: 181441 - DNA, 367 bp, Arabidopsis thaliana columbia
ttctctctcttttttttttctttttttttggtgtagacactttttttttttttacccccccgaacaaaacaacccctcatttttcttctttttttctttcttcttttcttttttttcttttcttccttctttctttttatttttttatctttttttttctttctctcttttttcttttttttttcatttcttttttttttctgttctttcttttttttttttttttctcttttttttttttgtctttttttttctttttttctcttttctttttttttttctttttcttttttattccttttctttcttttttcttttcttttttttttttcttttttttctttttttttctcttctcctttttttt

SEQ ID NO: 181442 - DNA, 379 bp, Arabidopsis thaliana columbia
tccgaattaacactgggggtaatcggtttctggaaattttccaaccccaacttcccttgggttttttttgtaaagaaaacaaccacttggggaaacatttaacaagccatcgacctttatttcctgtggttccaaccccttttttaattgttattgttcaaatcaataaagcttctttctttccgattccaagggtttttcggaatttccagattcctctgccaatggaaatggaccaggtccgaaaatttaccaaaaatttttttaacatccctaaaatgaaaaactttgatgttttaaatcctttaaaagacttgttgcttccaaattggcctaaccttccttttgctgttgttaaaaatcctaaaaccgcaatttt

SEQ ID NO: 181443 - DNA, 369 bp, Arabidopsis thaliana columbia
  unsure (1)..(369): unsure at all n locations
gaccgaaaaaccggggcggaccaaggcgaccgnaacacagaaccaagaaggaaaaaggacaacggcaagaagaaaaaccgcggaaaaggggacgggggagaaggaggaagcggggggggaaaccaaaagcaaaaaagaacccggcccaagggccaggaaaacgaaaacaaagccgagaacggagggaggaaacggagaaaaggaagggagggaaaaagaaacaagcaggaacggaacaacaaaaaaaacccggggggaacaggccaaggaaaaaaaaacaacaagaaaacgcacgggcagaaacaccggagggggaagaaaaacggacgcaacggcgagacccggaccgggggcccaacaacaacaacg

SEQ ID NO: 181444 - DNA, 315 bp, Arabidopsis thaliana columbia
  unsure (1)..(315): unsure at all n locations
attcccgggtggccacactcgtccaaccgattccnttaaagggtggaaggtttttttttattccaagaaggagtccccgtgggctttaattagaataatggggggggccaccacccttaaagtccattgctttattttaattgcttacaagccccaaattttaaccttaacttaaattttttttttaaaacatcttaatgattaatctttgttaatttaatttccattggcttgggttcttttttttttaatgagacatttcttatcgttttgtcaaatgtcgttttattgaatttgtattttttttattaaatt

SEQ ID NO: 181445 - DNA, 67 bp, Arabidopsis thaliana columbia
cgaaccaaaaacccgggccgcccaacccttccaaaaacccaatttgggggaccataaacttttttta

SEQ ID NO: 181446 - DNA, 252 bp, Arabidopsis thaliana columbia
cacccaatttaaaaatccattttttttaatgaaccatctttgaaagggcggctattaaacatttgggggggttcaaatgattaaaactattttctaattaattaatggccgtctttttaaccaagatttataattccattaaactaatattaatatttggaatagaaaaaaccttaaagtgatctataaggacttaaaatttattccaactcaaacatttttcttaatcctctttaggttttttccaacaaa

SEQ ID NO: 181447 - DNA, 180 bp, Arabidopsis thaliana columbia
ggtcctaaaattttatctttcaaaatctttttcgtccctcgggctccgttttaaaatttggtgggtccgtcaaaccaacctttttgaattcttagtttcacatcaggaattattccttgtcaaatctatttttgtttcaatctttactttttaagttcctttcttactaatttttggttc

SEQ ID NO: 181448 - DNA, 373 bp, Arabidopsis thaliana columbia
ccggggccggccacacccgtccgcaagtttaatattacagtccttttaataaaaatacctttcctgcattaacttggcctattggggtggaaaactaaactgtggggtccaggctaagcctttaaccttgttgtaacaagtttaatcctccgtgtgtggactaatggttaacctttgggagaactttctgtccgttttccaaccaagatccaagaccagccccggtagaccctccactttaaaaaacccccccattgttttaatctgctgaatcgtttttaacttcttcctttttgaactcttaagtcaaaccatctgcactattaatgggtccttccttggcctcataaccaacttaaattcttttttttcc

SEQ ID NO: 181449 - DNA, 356 bp, Arabidopsis thaliana columbia
aaaccgggccgccccacccttccgaaaaacacaaaatgccttcattggttgaattctcctttccttctccgccggttcttaaaggcgccttaaatatcaatgcctccggccgcctaaatacctctgaaaaattgccgttgcctcaaagttttaaccttttctccaaacctcaccaaattgaggaaccttctcccctttccctaattggcctttttcctcctgatttacctgtggcctcgtttgtccagcctttccttcccattccttttccaaccaaagttgcccttcctccacttccttccgttgcccttctctggccaaattcctcaacccaaccaataacctttcctttgcct

SEQ ID NO: 181450 - DNA, 263 bp, Arabidopsis thaliana columbia
gaaaaaccgggccgccccacccgtccgaattaaattaatgaatgtgatgatggccatatttaaaaattaagaaccaaaagccaaattgggtgtaataaatttttggctggggcttttccgaatggtaaaattaaacaaataaactttattttttgtcctaaaaataaaaaaaaaaaaaaaaaaaaaacttaaaaattatataatatataaaaaaaattaaaacattataaaaaattatttaaattcattataatataattata

SEQ ID NO: 181451 - DNA, 361 bp, Arabidopsis thaliana columbia
ttttacctctctttaacctttctctttcccctccctttctctttccattctttctttcctttctttttttttatccccaaacccaaacttcttcttaaaaagttttttatccctaaaaccatctttttgtttttctttttttgttccttttttttctattgttttcccaatcctcaatcaccttttttcttttttctttcttttttttatcccttttcccttcttctttcttttttcactcctttttcccttaataattttttttttctttcctcttttatttcttttctccctctttttcacgtctcttttccttaacccaaaacccccttctccttctctcttcttttcaattcttttt

SEQ ID NO: 181452 - DNA, 390 bp, Arabidopsis thaliana columbia
  unsure (1)..(390): unsure at all n locations
ccgggccgcgcccacccttccgaagtaaaccttgaacctttgacctaaaaaattttcttttttggttttttcgaaaatcctgggtcctcccttaaacttaagggcggttccaaaaccgtttgttccnttgccttaaaccccatccactttcaaaacttttctttttttttttaaaaaaaacccacttcttcttaattccaaggttttttttaaaactaccaataacctccccaattgttttgttcctgccagaaaaatttttttccctattggtcttttgattaaatcaaaaatcccaaagtccttaaccggtaaatttctttgaaattttgtttttaccccatttgtttttgaaaggaaccctgaaaacttttttaattcccaaccttt

SEQ ID NO: 181453 - DNA, 114 bp, Arabidopsis thaliana columbia
aaccaaaccaaaaaaatcccctctcttttccccattaatacacaaaaaaacccggccaaaaattttaaaaaggccggcggccaacacaaaaacccatcccacaacccaatcccc

SEQ ID NO: 181454 - DNA, 471 bp, Arabidopsis thaliana columbia
  unsure (1)..(471): unsure at all n locations
aaaaaacagaccggcccagccttccgatataaacgaaccatccgttgaaccctacatttttttttcaagggaaacatccaaagaagtgcagggttttttaaaaaaagttgtgggaaaaactacaanntaataatcccaaaaccactaaaaataaattaaaaaaaaaaaaaaatttttttttttaaccaaaatggttaataattaaataataatttggaattggaacattcatttttttttgtaacaattacttttcttttttaaaatattatatttacctcttttattctaattttatcctttatttcttaattcaatttaatattttatttaattcttccttttatccttattaaattttatatatattatataattctacttcttttttttatatccaaacattttttatcatatattaattatatattttattacttatttctttatttatatatttaatttaaaatt

SEQ ID NO: 181455 - DNA, 289 bp, Arabidopsis thaliana columbia
aaccgaaatagcgggaccgtctcacccgcccgctaaacctacaacctttttaggactccactaattttaacttttggcaaaaggcaaaaaatcggggagtggaaattgatctaagggcgcgaacttttcttcctctggtcgttgatgtgggtggggaaacctttgtttccaaggataaaaagttgggcgaatgctgtggaagcgaaaccggcaagggctggcaacagttgcttaaaaagacgtgcacgggggaactcgccggcccacgatgcttttttttgccagtctt

SEQ ID NO: 181456 - DNA, 413 bp, Arabidopsis thaliana columbia
aaaactaaaaaaaaaaaaaaattttttttttcaaactaaaaaaaaaaaaaaaaacggccgcgaaaaaaaaaaaaaaagttcgtccgccaaaaaaaactataaaaaaaacatacaaatttataaaaaaaaataaattaaaaaaaaaaaaaaaactatgaaaaaaataaaattaaatataaattaaaattcaaaaaaatatataataataataaaaaaaatacacataaataaaaaaaaatacataaaaaataaaaatataaaaaataaaaaacaaataatataaaaaatagagtgagaaaaaaataaaatataaaaaaataaataaaataataaataaaaaaaaaaaataaaaataataaacaaatattataaaataataaataacataataaatataaatacataataatata

SEQ ID NO: 181457 - DNA, 267 bp, Arabidopsis thaliana columbia
  unsure (1)..(267): unsure at all n locations
gttacaaaaatataaaaatttaaaaattttttttttctaacggaaaaaataaccctgttgtcgctttataataaaaattttgtttcgttnaaaataaccaaactttaatcattccttttttttattttatttcctcaaaaaattctttttccttntccctaactctctttttcctttttttatccaaaaaaattttaaacattttctttctatcttttcctttcaatttcctaaacctttatactttattcctttaacattccaaac

SEQ ID NO: 181458 - DNA, 471 bp, Arabidopsis thaliana columbia
aaaaaaaaaaaaaaggccggccaaaaaacatccaaattttttttaataattttttttttaccttttttttcaaaaactgttctttttaaaaaatttctttttccaaaacctatcttttctattttctctttttcttttctctctttcttccctttttttttctcttttatctctttcttttttttttttttactatttttttttttctttctttttttcttcctttttttttttcctttttccacttctttcttctttttttttcttccctttctttccttttctttctttctttcttttctttttttttttctctccttttttttcttttcttctttatcttcttttctttctcctttctttttttcctttttccttatccctcctttttctttctcttttctcttcttattcctcttttcttcttttctcttttcttcctctttttttctctttttccacctctttttt

SEQ ID NO: 181459 - DNA, 255 bp, Arabidopsis thaliana columbia
  unsure (1)..(255): unsure at all n locations
ccgggccgacccacgcgaacggaaaacagcacgcaaggcagacaacnataaaggttttaaaacaaccacggcantnnaccgagccaggctataacggaaagggaggggagactcccttatnagaagatctccgaagccggcccgcaaacataaggaaaacaggcgacaagccaaagcgaccaacacgcacaccatgaaacggagccgacccgacaaaagcacaagggtccaacctccggcaagcccccgagctac

SEQ ID NO: 181460 - DNA, 326 bp, Arabidopsis thaliana columbia
aagggtctgactgatgaagaagatttcttgattgtattccctgagtccatactacccctctccacgggcctccatgaaacacctcaggcaaatccggagataacacctccgcttccgcctcttactccgacacaatggtggatggggaagctggttgaatcaaccgaaatgccatcacttgcaggcagtggaaacaacagtttcaacattcagagggatgaaaacacacagaatggatcagttcaagcgaacgaggcacaatattcatcagaagtgtcggctacagatggtgataaccataattttttatatttatacagaagaat

SEQ ID NO: 181461 - DNA, 263 bp, Arabidopsis thaliana columbia
  unsure (1)..(263): unsure at all n locations
ctagaacgcnnncnagagagagagggaaggtttatgaagagganggacgaangggagcgagcgagnnccccgagaggcgaccgagacgnacancggcacaaacggacaaagacgacaaggagccaccaccagccccaaacngcgagccaggcgagcccgagccgcggacccccaacagagccggaagcagccgagacagagcccaccaccgganccaaaacanaacagnacagacagggangggagggaagagagcaccaaac

SEQ ID NO: 181462 - DNA, 88 bp, Arabidopsis thaliana columbia
aacgtccgcccactcaacaaccactaagcagagttgccggggacagctaacataggtacggttaccaacacattggcgactaaagcct

SEQ ID NO: 181463 - DNA, 78 bp, Arabidopsis thaliana columbia
gaaaacccggcccgacccacgcgtccgaccatatatacccagtttcatctaactttttatcgttatatcactatacac

SEQ ID NO: 181464 - DNA, 222 bp, Arabidopsis thaliana columbia
gagtttatgagtgagacacattctagttactatggttggtaagatggatttgtgcataggcagaagatttgtggattgtccagacttaggacctgattgtagaggagcttgcatcactggtgtatcgaccggtctagccaccattacagttcacgcccttatccggattaatttaacatttctatgaatcaaccggtgtgttcgtttcagatgctcagtctg

SEQ ID NO: 181465 - DNA, 239 bp, Arabidopsis thaliana columbia
gacgaaaccaagcaaccagcggagccgacgctttgttttccagcccaacatccagaggaggcgacgggctttttcgaaaaggggagggcgattcttcccctgcatcaagcaaagaccacctaagaaccaccgcatacagtgacagagactgcgactaaccaaacaaggtacaggacgcaggatgatgatcgaactcatccatccaccggagcaggacacctcaatccaaacaaagctag

SEQ ID NO: 181466 - DNA, 219 bp, Arabidopsis thaliana columbia
gttacgagaatatgaagaaggaaggtgctttgatcaccgagtggaaagaaaccccggaggcgcttatcatgaagggggtcaaccccaaagctctcctgcccttgaccatgacgttcggggtgtagacaagaaagacaaggagctaaagcattaaccacaaacgttaaagcaaaaacaatgaggcctgaagacaacaaacccccacagacggggaccatg

SEQ ID NO: 181467 - DNA, 267 bp, Arabidopsis thaliana columbia
gcccgaaattccggggcggaccacacccgtccgttggtttttgttcaaaatggcaactttggggtggggattatttaaattaataagttaagcctacctaggttttgttgaggggaattatggtttttaagacctaaataaattggggacctcttataaaaacctttcccaggttaagaaggggtttttttttttaatctaatagcctaatgggattagcccttttggggtttgggcggtatgtgttggggggaacccaactggttt

SEQ ID NO: 181468 - DNA, 302 bp, Arabidopsis thaliana columbia
  unsure (1)..(302): unsure at all n locations
cccgtttaacctatccttgatttcctattcgcaccccaaaacttccaaaaaggaggttttttataaacatttaatgtgttcccaaaaaactttttaanttaaaaaanaaaaaccttaaaaattttctaatcctaaaattaaactttcactcnncaatatccattttttaaaattnaanaaaaaaatcctcttcaaaaccattcctttttttattttttcaccattaatttttttttaaaattaaattacaaaaccttattttttccaatccattttaaccantactcccacttttttttttt

SEQ ID NO: 181469 - DNA, 261 bp, Arabidopsis thaliana columbia
  unsure (1)..(261): unsure at all n locations
tccctgcccacccattaaaccgggggtttttaaaaaaatccgggcggcaaaaaaaccaacctnaatttccattttttccatccttatcctcccctcaatcccacctttttccttaccccacctccttttttttttctatcaccacctatcttaacccttaattttttctctttctttaaattcctttcttccccatcttattcatcccttacccatttccttttctttttttttttcattccccttacctttttctccttc

SEQ ID NO: 181470 - DNA, 323 bp, Arabidopsis thaliana columbia
ccgggcggaccacagccgtccgatcacaaaggagacggttggtttttgcaaaaaacaatcttgttttataaggaatcctaagggggtggaaccaccttgctctgggagggttttttgttaataaaggtcaccctgttgaacatgtaattcgaaggttgtttttgccaattgttgcaaccattgccggccatttttcagtggttgaactaaaggcccttttaattgggttcagttttggggtattagattttgccagggtttatcctttggaaaaggtcttccaagtttttgttaagacttttgttgagcaattttttcaagag

SEQ ID NO: 181471 - DNA, 341 bp, Arabidopsis thaliana columbia
  unsure (1)..(341): unsure at all n locations
cggcccacccaacaaatttttttatacctaaaatttttttaaatttaatttaaaaaaaaccaaattgcccccaggggctctttttaaaattttcctgcccccataaacaactccattttccaacaaaacccctaactccatttaattccatncccttcttcccttccttttaattnnttcttttttttccttacccaaactataaaccacctntaaaaaatcctcctccctttccttaaaacctaacctaaccccttccattctattaattttaaccccatttttttcccttttccttccccctttcttttttttcaacttccaaaaaaaaaacttaccaa

SEQ ID NO: 181472 - DNA, 485 bp, Arabidopsis thaliana columbia
  unsure (1)..(485): unsure at all n locations
acaaacctaaaaccttcttttcctatattctctttacccaaccaaccctaaanaaaatccgcttttttttaagacttgttttgtccaacaaaaaacaatatcntcaaaaaatttatttccttttaccttttttttttaaatccttttttttattcttttctaattttttttttttattttttttttaatattacttttttattttttttttttttttataatttactttttttttttttttctttttattattattttcttttcttttttattttattttttctatatatttattctttattttttttttttctttttttttttattattttttttatttttttttttttttatacttttttttattttatctctttatttttcaattatttttatttttatctttctaatacattattttttttttttttattttttcttttattatatttttctattttttataattttatattattattatt

SEQ ID NO: 181473 - DNA, 224 bp, Arabidopsis thaliana columbia
cccacccccaccccctcccccccccctccctccccccccccccccccttttttccccacccccccacccccccccccccccctccccccaccccccccaccccccctcccccccccccccccctccccccccccccccccccccccccccccctcccccccccccccccccccctcccccctccccctctatccccccccccccccccccccccacctcccccc

SEQ ID NO: 181474 - DNA, 178 bp, Arabidopsis thaliana columbia
  unsure (1)..(178): unsure at all n locations
gggcaaaaaatccnncaaataccacccattttaacctaattttctttatacaaaaaaaaatcctatccaaaggtggttttaaaataatggttgcttccacaaaaacccccttcaacccctcatattcccccttctttaactccaaactcggttcctcctttttggaccaccacctttt

SEQ ID NO: 181475 - DNA, 411 bp, Arabidopsis thaliana columbia
cggggtcgcccacacccgtccgttaaatttaaggcctgatctgatgggttgtttttcccacggggttcctttaacacccaacgggaaccttaaggcgggggctggtggcctttttttaaaactttgaaggggtccgtttaacctccgtttttttttcgcctttggaccgagctagatccatggttgtttttgtttgccaggaaatgaattttcctggggggcttttgcaggtttcggttgctgtggttgagatgagttaaggggcctggaaaagctgtcatcggtcagagattaacccacttgaaactttaagtttattagaaggatgccaaccggatttttaagctccatctggggattcactcagccaggtagagtttcggttggttaattttttgattgggccagttt

SEQ ID NO: 181476 - DNA, 343 bp, Arabidopsis thaliana columbia
  unsure (1)..(343): unsure at all n locations
acctctnccaaaataatgaatttttnttttctttttttctaaccgaacgacataattgggaagggcctacttaaatggggggggaaccttcttctaataaccgtcgttaaacaccgctaaccacatatttttgtttaacaaccttttttctccgaaacctttactttaacacctaaatctgtttcaacaaaaaaaaggagaatttctcccccaccatgaaaaagtttaatatggattttcaaaagttttcaccagaacccacctccgtttttaatggttcctccacagaacaccacccatatgctctgtaaacttataatattttgtccctgatcccacacca

SEQ ID NO: 181477 - DNA, 70 bp, Arabidopsis thaliana columbia
cgccccacccttccataaaaaacctctaaacttctaaaaataatttttttcttttacccaacctaattaa

SEQ ID NO: 181478 - DNA, 254 bp, Arabidopsis thaliana columbia
  unsure (1)..(254): unsure at all n locations
aaacaaattttgaagnataatccacaaattttttattattatctccaaggaaaaaaaaccataagctttattttataatccccaagcgcaaaaaaacactccaaccaaaattttccccacctcaaaaaccacaccacctttaaaaataaccacacctccccaccccattatttaaattccacttaactcctaaaaaaccgtttttcctaataaaaaaacaaattttctattccatttcatcctaaatcctttta

SEQ ID NO: 181479 - DNA, 415 bp, Arabidopsis thaliana columbia
ccgggccgaccacacccttccgttaaagtttttgtttttgaaaattttttttctattggatccaaccaaattaatttagggggggtgatccaccagggggggcggggataacctaataaacaaaattttctatttgaaattaacgcaaaattttcttaaaagccattaaaggaagtgtgagaagtaaatttaatgcaaaaaaatttaaggtaaaaaaggctttcttaaagggaattttgattgttgcttgtacctactcttaaacctcattttttaatctttataagcaattaacctatttccagttcttttttactcttaacgctgttgtttttgtccttaaacctaagcttattttatcccccatttccaattctttgcccaattttttaaaatcttttgattttttttttcc

SEQ ID NO: 181480 - DNA, 443 bp, Arabidopsis thaliana columbia
cggggcggcccaacccttcgaaccaaagaaggtcttaaggggttaattttattgttaaaaaacaaggtaccattggggggggtttttttaataataagggttggatgtccaacttgaaatttggggcccgaggttaaattaggccccgagacctgttacaacgtttgttcaaccgcctgcttccaacgtgacccaagaaagacttcccgatccaaccgcaggtgtccaatccgtgggggcccaaatcctgccagggcaagtggaagtggtttttaaactttatattttaccaaaacccatgcatttggattaaataatgtggtaatctaattaaaaaatcgtttctttggaaaccatatcctgtaattttaatgaagtaattgtacccaataaatattaccagttccaatgttggaattattaccacttgtgctggttgttat

SEQ ID NO: 181481 - DNA, 415 bp, Arabidopsis thaliana columbia
  unsure (1)..(415): unsure at all n locations
ggccacacacacttacaaaaactttaaacttaaccaccaaatttttttatccccaccaacccatccaaanaaccggaagcttttttaaaacaatttgccgcccccaaactaattcaaantcccaantttttacttaaacctcttaaaccctcatttcttaacaatataaccaaacttcccattttttttttctccataccctttaatattatcttaaacccttcctataaatactttaacttcatttaaaaaattactacttttcataactttaccaaatttttaattattctaaactcctccaattcttaccattctacctttcttttttttcctcttcctccaccaattaatcttaatccatcatttaatcttaaccctccttttaaaaaaaacaataaaaattctttttttt

SEQ ID NO: 181482 - DNA, 438 bp, Arabidopsis thaliana columbia
cggggccgccccacccgtccgtcgtaccacgctctgaaagtcctggccgccctttttttgacctgggtggattcgttctccgaccggaaattagggctttggttttgggaaaataacaactgcagaacaaccaacctgggttccagttaaggggggtaacaggcaagggggggctcggatctttggcccatttaaaaagatttcgccccgtgatgtcgccgttaacacaactttaaagccaaggagggaggggcaccacactcaaaaggacctccagaggataaatcttcttgataagcttgaaaagcgtgagaggagacatttttaataaaaggccaaatcttccattgttgatggagaccgcataaaaggaagtcagttttaactgaaagattcgaaaagggatcctgaaaagcggttatttctccgcagggaaaa

SEQ ID NO: 181483 - DNA, 304 bp, Arabidopsis thaliana columbia
  unsure (1)..(304): unsure at all n locations
gaatnccggggccgcccacacccttccggtttagtgattgaaattggtgaagcctatgttatataaccccctaaacaacctaattggtgtggtattttccaaggaaggagaacggtttggtttaagtgttggaaatttgaaaagccttgaccagaaaaaactttgaataatctaatttgatgggaaaggttccaagaaccaagatgtattgtttttgtggttttaatttataaaagtccttccaaaaaaacctttcattcttatttaactttctttttacataatctcccctcttaatcccact

SEQ ID NO: 181484 - DNA, 303 bp, Arabidopsis thaliana columbia
aaatccccgggccgacccacccttccaaacaacctaataaatatccttctaattttattctctaaaattgcctaaacctttccatccggttaatttaaaaaaccatggtgagctacaacaacctacccataacaactttcttatttaattattctttttaaataaaatatttaacttgaaaaaaaatatcactttttttcttttcttccctaccaactattatctcttataatttccttaactatctatactctttattatattatactttcttttttctttttataatttattgtatattta

SEQ ID NO: 181485 - DNA, 458 bp, Arabidopsis thaliana columbia
cggggcggacccagccgtccgcaaaaaaaaaaccaaatcaatctgaccgttattgttttgtttaagttccttcaccgaaccccaaggggaccatctaagggaggaagagggccaaccctcccccaaacttcttcccaaacccgccaaacttgcccaccaccgaaaaaaccattttgttaagtttccacttttaaaaccttaccaacctaaataccaccaaatggttaaccaatttgcaaatcctaccaaaggaaaccctgtttttaattgccaaatgacttattgttaattcctggtttaaaaaggaataaattttgccaatttgtttttttgtaaatttgttttccttaaatgtttccattactttgtttttgtaaattgaacctaatttctttcctatataatctgataatcttttgacttttgtaaaccaaaaattaaattcctttttccatttt

SEQ ID NO: 181486 - DNA, 435 bp, Arabidopsis thaliana columbia
  unsure (1)..(435): unsure at all n locations
gaancccggccggccaacccttcactaaagcccacctatttccaaactaatttcctttttccttaccctctttcaaaattggttggagattttcaatactttggtcgggccttaaanaaaaaattttattcaatttccacacttctccatttttttcttttcgaaaacattttttttaaccaaatttaaattttaaccttcaatttttgtaacctacccaaatcaaaattttcttgaaatccccatttaaatccctccgcttaagttttctaaaatccttcctcttttaattaacaaaaacgaaccttttttttttattaatcttcgaactaatcacttaacctttttatccttttcctaataattaataaatttatcacctcctattttacccctccttttttatatccccctcaataattcattttttttttt

SEQ ID NO: 181487 - DNA, 341 bp, Arabidopsis thaliana columbia
  unsure (1)..(341): unsure at all n locations
gggcggcccaacccatccgttaaccttccccgaaggtaaacaccaatatttttcaaccaccgnatgtttacaattaaccccgaccactatactactaactgggcctataaataaaatacaaatttctaccaccaccaatcttttttaattaacaaccaccaccatacttctaaccttcccctaaggttatctacaaaattcctccacaacaaaattatttaccttcccctaaagttaactccaaaatttcctccccaaccatatttttacacttttctcccccccccacattacttaaccttttctaaaaatatatacctatattttttaaattaaccctc

SEQ ID NO: 181488 - DNA, 386 bp, Arabidopsis thaliana columbia
ttaaaataataaaaggtgggggttggtttgatcgggggtaacatgatattttatgttttatgatccaatgaaaggccagggagtccataaattttttaaaccaggattgttggaattcaaggaaattaggttggcatggttgttgatcttaggatcataattgggcccaaccgaaggttttggaaccttttttttttggtgattaagaaggggcctgtcccaccccagtttgattgtcctttttaaatggaaggggaggggttttgggggaatatctttttaggccttgtcctctagtggaacccaagaatttgtttaatttccttttgtttgtttatagtttgcataacttctcttcttttggtttataaagtctcttgtttaat

SEQ ID NO: 181489 - DNA, 231 bp, Arabidopsis thaliana columbia
  unsure (1)..(231): unsure at all n locations
taaaaaccaaccaaacctttttttttcaacccccctaaaaaaaaaaancgccgcgctttttacgatattttgttgtcccaaaaaaaaccttctnacccaaacctcctcctccttaaaccccacctcccaacctccattcctttctttccctttaatccctttttttcttttttccaactataaacacctcaaaattctaataatattttttcataaaccttcccttcctcc

SEQ ID NO: 181490 - DNA, 331 bp, Arabidopsis thaliana columbia
  unsure (1)..(331): unsure at all n locations
ccggccgcccacacacatccaaaaaccttctttttttttttctcctttttcttttaattccctttaaaataaaaccggggcgtttttcaaataattttggtcgcccaacaatccttaaatttcaaaatnttttttcaatttcacccccccatttttccccaaaatctttccggccantccatccttttttttttttccaagaccttcaaaatcgtttcccatacccctcttatttttcaaaaccatccaccctcctaaacctcctccaatccttcatttaaatttcctccaccatccccattttttccaccacctccttctcccttttttt

SEQ ID NO: 181491 - DNA, 278 bp, Arabidopsis thaliana columbia
  unsure (1)..(278): unsure at all n locations
ggggggccaagacttaaaaaaatccaaaaaacttctttttaaccttttttttttcctcccaccttttaccaataagcgggtcttctttcacaatgtgtgtggcccaaaaaccccaatcattatttcctttaaaaactttgattgttattcttaacttaaccatcctccgtttttttaagaaccacttttacctaatccattgtttctccactctaatcctaaaatctntttaataaccttttatcctcctgttaagtttaatcctttcatttttaaat

SEQ ID NO: 181492 - DNA, 318 bp, Arabidopsis thaliana columbia
gcggaaacccgggccgcaccacacccttccggtttttttttttttaacccatactcttcttttttttaaaatatgcccccccaagttgccaccttctttacaataaacggaggtccataaaccttaaacggttaagaatcagaacttttttaacccccactttaaacttttttgtaaaaaaaagttttaacttttttttaattcccccataccaccaaaaaaaccaccgtttcattaaagtttttttttttaaaaaaaaacaaacaaaccaatgaaaacatatttaaagtttttccttacaacatttttattatcaac

SEQ ID NO: 181493 - DNA, 371 bp, Arabidopsis thaliana columbia
aaccaccaccattggggttttttaaccaacctttttttttttgtaaatccaaactcccacggggctccttccaaatcgccagatttttcccactccgaaaaaccttcccaatccgaatcaccaccggtggaaccgccgccggggcaggattgtcagcccccgaagcttaaagctccgcgatggctttagcagccttcgcgaaaggaaccgccccattggatttaccagtcccagccatcgggaggttcgaccaggttttttaagttccccaggtcctaacctttttggggaatccaccattaaccgtcgggaagaaccgtcaggtcttcgccgccttagtgaaatcgtctgtttttcaatttaacacattt

SEQ ID NO: 181494 - DNA, 446 bp, Arabidopsis thaliana columbia
  unsure (1)..(446): unsure at all n locations
cccacccttaaaaaaaaaccatgattcgttccacttcnccgtttttttttttcacattggcctctaccttgccgatcctctaaaaaacctttcgtcacctanaaccaccattcttacctttctttacctctttatttaatttcnccaccaccaccttttttccaccccttttaaaacctttttttcctccttatncccataattcccttacccacaaacccaccttccttttttccaccnccaaattacccactattttaactcttaaaactttatccttaactaattccccaccacctattttaattcctaaacctttttttaaaaatcttctaattnttcctaatttccctcttccaccttcaatttttaataccaaaccttttcttttcaatcacccaacccctttttttcaccaattatattttttcaattattccaaaacc

SEQ ID NO: 181495 - DNA, 293 bp, Arabidopsis thaliana columbia
aacccgggcgggccaacacgtaccttagaacaaaaccaagccttggtaattttttttaccgttttgaccgaagaaggaaccgcgggaaattcttgctttaagtgtggtaatcaacatctgtccacaaccattttttttgaaaataacttttgccttccaattaactttgttttaactaaaccttcaattaatccaaaacctgattctgtcaacttggtttttaccatatgtccaaaattttatttaaaaaaattaattatccttccgtttcctccacggtttgaaagaaagtt

SEQ ID NO: 181496 - DNA, 513 bp, Arabidopsis thaliana columbia
ggaaaaaccggggcggaccaacccttccggcccgccgcccgtaagaaaggaagttttaaggtgttccggccggggatccttcgacacgacccggttggttcctttgaaaacgggccggtgggggaaattaattatcttatttatgttttaaataattaattatatattattatatttttttattaattaatttaatatctatatattatatattttttttttattaattatattataataataaaatataattacttattattgttttaaatttttattttttatattcatttaataatttataaataatatttttatatttattaaaattataaaattaaaatttttaaattatatttttatattcatattatacttttaaatccattttaaattttttaatattttaatataattatattattttattaaaatttttataaacttatattttatctataattatatatttttatattttatatttatttattaatttataatttattttat

SEQ ID NO: 181497 - DNA, 418 bp, Arabidopsis thaliana columbia
  unsure (1)..(418): unsure at all n locations
aaaccaaaaaagtgggctttttctttcttttaaccaaaaaatcctctcaaaaagccgccctttttaaacaaatttgttttcctaaacaacttaacctttaaacctttcaaccaacctattccctaatnntaaccaattaaaaagccaatcttccaatttttttttcaaaaaacccaaacccaaacaataatatattattaaatttttaaaaaaatttatttcaaaaatctaatcaattttctatcccccaacctttctctaaatttcataaaacctttcattccttcaccctattacccaccataaaaaaccccaccctttttaaccaaaatttttaccaattcataaataattaaaaccttaaaaaattccaatctttttttaaaatcttttccccaacttccccaacccatttaat

SEQ ID NO: 181498 - DNA, 312 bp, Arabidopsis thaliana columbia
ggcgggccacccttccggaaaacttaaccgaaacccttccgtatttttttaaccccaaatcaaccccttttaagcggggcatatttttattcggattgggtaaatcaaggaaattcaatctaatccacggccggtggccaattttcattacttatgaatctttttctgtcaattggttaaccttctttccatttaaaaaccttgccaaggtgaacttttgaatatggatcgcccaatttggggaatccattacctttttctatctctcctttgttttgaaccaaggtgttagttatcggttacatcaatttc

SEQ ID NO: 181499 - DNA, 361 bp, Arabidopsis thaliana columbia
tcccaacctaattttttttttttcatcaacctttttttttttcggtggtgttcctaaaataagccttgggtgaaaaaaccaagtttttttttttcgcccccgttctaaaggattttttcctaaccgtcttcttttccgccattggtttaaatttctttaacttgaccagaattacctcctttgttggaaattcaacttcctttaatttaaatcacttttgaaaaaatttcagtgaaaaaaaaaagcttcctaaccttttagcccctacccggatttccattttttccataatccctaatttaataatggaaaatgccaacttttttcttcccctttttcatccaatttttccaaaattttt

SEQ ID NO: 181500 - DNA, 238 bp, Arabidopsis thaliana columbia
  unsure (1)..(238): unsure at all n locations
tctttttttttttccccccccccctcnnncccccgcccgttttttttcacttttgtcctgccccaaaaaaaccnnnccccatattattcatttctctcctttttttcctccccactccttccctcatcttttttccccctttttttttcttttttttccaaaaccccctccttttccaattttaccaattttcttttctcccctaccttccccctaaatattcaaacctttattccct

SEQ ID NO: 181501 - DNA, 322 bp, Arabidopsis thaliana columbia
  unsure (1)..(322): unsure at all n locations
aaacctattaaatgcccccnaaggcggggattaatcccatttggagtaagccaccttccaaaaacccttttaaggaaaaataaaaacccgaaaaagctccgccgtaaaaaaaaccaaagcccgaaaaaaacttccttaaggaagctgttcccgaagccaccaggaataaaatgtttaaaaagaatattttcaaaacttacaaaatctacattttaaaggtccttaaccaagttcatcccattttcgaattttccaccaaaccaatttgtgttcttgaacagtttcattaacaattttttcaaaaagcttgttcaaaaggctt

SEQ ID NO: 181502 - DNA, 355 bp, Arabidopsis thaliana columbia
  unsure (1)..(355): unsure at all n locations
aaacaaaaaaaccattgccttcaagttcttttttattgccaacccacctaanaaccggctcggcctcctttaaaatttggcggcgccaaaccaccccaaatgncttttnnnntnttttttttgttttttttccaaccaaaaaagccttttccttaacttnccaattttttaaatnttaaaaaaaaaaattnaaagtttttaaaccaatcaacgttaatccattcatctaaatttttaaaactcctttaacataaagccaattaatcggttgttacttttcaaactttctttaatacctaaccgccgtaaaccttttcctccatgtttttaatttatccttccccattcttttttc

SEQ ID NO: 181503 - DNA, 319 bp, Arabidopsis thaliana columbia
  unsure (1)..(319): unsure at all n locations
aaaaaaannnntcctccttataatttnaatttttttttcaacccaacnnaaanttttcccggaggcttttttaataaaatttgccggcaaaaacaaccccnacccttaattttcnnttcccttttttccccttttttttccantttttttttcaccacctttctatcttttttttttctccaaantttccacttcccccctaaccattatcaaacccccctatcctttttcataccttcttattccattctcctttattcttattaaatcccttttttttccaaaatttctcctaaccttttcctcctaataatatttt

SEQ ID NO: 181504 - DNA, 404 bp, Arabidopsis thaliana columbia
  unsure (1)..(404): unsure at all n locations
ganggcccggcccaccccaccctaccaataaaaacttaaaaaacctacccccttttattcaaacctttttaattcccccccaaggatggttttaataacaattgcgcccgccaaaaaaanaaaacctttcttaaacccaccatatttccagaacctttaatctccaatttcatccctcccccaagttccttccttttaactaacaattttatctgccccattcttaaaaccaaattaaaacctccaaaaaaaaaacctattaaccaacccaattttttcaaccttaacaataatttcaaaccttttttccaaggtttaaagaataactcgctttttaactccaaaaccaataataatttctccctcaattttaaccctttctttttaacccaacctactaaccc

SEQ ID NO: 181505 - DNA, 75 bp, Arabidopsis thaliana columbia
cccagcgtccaacaaatttaaacgttcattggcgcactactaacctaaggccgctaacatggctcttctctgctt

SEQ ID NO: 181506 - DNA, 214 bp, Arabidopsis thaliana columbia
caaaaactcttcgacatacaaagtactctttgtatatgtcccggatctagaaaaaggcgacccgatcaattacaccgcgccgccggaaacaatatctaagattgtcgacaactcaaacgcctataccaatcctaagatcacagcaactccaacagacaacacgcccatccctgattacgcttcttcctaatagtttaactctcagctcatttac

SEQ ID NO: 181507 - DNA, 295 bp, Arabidopsis thaliana columbia
aataaatccaactatcatcatataccaccttatcccacaatcacatgtccatctccaaacctataaacatcatctcaaaatatcaactaactcattaaaactataactctctacctctcccgtctactaactcttactctcctcttcacctcctatcctattacatccaaattatcttcttctcatcccacctacatataatctataaacctcaaattcaatccaaataccaacacatactttttcccatacaatatagatcctttcaaacttcatcttccaccaaatttcaacc

SEQ ID NO: 181508 - DNA, 438 bp, Arabidopsis thaliana columbia
  unsure (1)..(438): unsure at all n locations
gtttagtgattgaaatttgtgaaggctagtgctgatgacgccctaaatcatctcatttggtgggtaattttctaagaaatgaggaggtatggttttagtgtttggaatttgagaaggctagtacagaaaaaactatgaatcatctcatctgatgtgtaatgtttcaagaaacgagatggtatggttttggtgtttgaatttgagaaagtgcgtgcagaagaagctctgaatcatatttaactttccttcttcagcatctgccctcataattccacttttttctctttgctctcaacatatacctacccctactaattgagtaagtgtgaatagttttctctctcagatgactattagtctattactattaccatctntcatttaattgtttggtgtacttcaaaagtcgagatttagatacaacaactactctgtaac

SEQ ID NO: 181509 - DNA, 443 bp, Arabidopsis thaliana columbia
aacgaacagatagatatccgtctgattagaatttgtaaaaatggctaatgcttttcagccaatgtaaccaaagaacgagggcggggtacttccattttactataactactctagcagataatcattgttgttatataaaatgaggaacttgtaagaagagtttactgattatcatgagtgacataccaactttcaactcagagattaagctccacaatgagtacgttatacaaatctgacgatcgcttctgtcaataatagctgttgtaattgcactaatacatgtgtcctattacttcatagggttcacaacttagttatttaatctttttattctttttttgtctaagtattgactttatattcttatctctatttacgatactttgatatataattttttttatcttcattcaattattttaaattttagattactatta

SEQ ID NO: 181510 - DNA, 361 bp, Arabidopsis thaliana columbia
  unsure (1)..(361): unsure at all n locations
ggccggcccacacttacatcaccttccccgaaggtacacttctaatcttccttaccaccgaatgncnacagcgcacccccaccattttacgacggacctgcgcttaatttatattacaaatctccactaccaccatacctctatagtttaccaccaccaccatactacttaccttcctctaatctttactacaaatcttctccaccaccatactacttacctttccctcacctttattacaaacttcccttcccaccatattcctacactctttccaccaccaccatcatacttacttatttcaataactgatttcttactcttcacattcaccttccatatttactcttaaattctaatt

SEQ ID NO: 181511 - DNA, 85 bp, Arabidopsis thaliana columbia
ccacgcgccgaaaaacaaaaggcttaatggggcatatattgtgtactccggcggttttgaaggaagcttaaggatcaattcttca

SEQ ID NO: 181512 - DNA, 259 bp, Arabidopsis thaliana columbia
  unsure (1)..(259): unsure at all n locations
cggaacgaaaaccggccgacccacgcgtacgtcatttatctacttacaacctttatttctacttttcacacaataccnccgcggaacaggtatttaataacgtgggggggcgggcntatattttttttaatgtgaaagacgaagaacatattaatgttctgatgctaacattaaactatcacttcggtgattttcatttggtgagaatggatgagaaagtactcatcataagcaataccttatttggatgtttaccatc

SEQ ID NO: 181513 - DNA, 127 bp, Arabidopsis thaliana columbia
aaaccttatacgcaatctcatcttcttcttaaatctttctactctcaaaattctgcggaaacaggtttatttacgagcacgggcgcggcatcaaagaattcgtagctctcaagacctacactcaatc

SEQ ID NO: 181514 - DNA, 437 bp, Arabidopsis thaliana columbia
  unsure (1)..(437): unsure at all n locations
gggaaaaaaaaaaaaaaaaaanaaaaaaaaaaaaanttttttttaaaaaaaaaaaaaaaaaaaagggagggaaaataaaaaaaaagggtgggaaaaaaaaaaaaaataaaaaaaaaaaaaaaaaaaataaataaaagataaaaaaaaataaaaaaaaaaaaaaaaaaaaaaaaaaaaaaaaaagaaaaaaaaaataaaaaaaaaaaaaaaaaaaaatgaaaggaaaaaaaaaatagaaaaaaagaaataaaataaaaaaaagaaaaaaaaaaaaaaaaagaaaaaagaaagaaaaaataaagaaaaaaataaaaaaaaagagaggggggggggggagggagggaaaaaaaataaaataaataaaaaaaaaaaataaagaataaaaaaaataaaaaaaaaatgaaatatagaagtaaaataaaataaaaataatatat

SEQ ID NO: 181515 - DNA, 372 bp, Arabidopsis thaliana columbia
  unsure (1)..(372): unsure at all n locations
gtgaatcttcaatgatnttccccggtgggagctgtatatgtttcgagtttgtatttcgaggttttgcgtgacgaatgacggtaacgagtatgcgtgtggtgatgccttacgaaattgtagattttctttgcatttggtgctgcttaagtttattgggaagtcacattaaagtctttggaaccacaacaagagaagtgtattgtgaagagattaaggtatttgggacttggccacgaaggttcttcttttgtctaaaacacgtgtcaaagaagttgaaacatncgcccgaagttgattctttagccgcgaaactgatggatgcgttggtggagaaactgtgtttaaccatgggaatgagtccttctagtgctg

SEQ ID NO: 181516 - DNA, 240 bp, Arabidopsis thaliana columbia
  unsure (1)..(240): unsure at all n locations
aaaaaaaaaaaaaggggagggataaataaaaagggaggggnnaaaaaaaaanaaatataaaaaaaaaaaaaaaaaaaaaaaaataaataataaaataaaaaaaataaaaaaaaaaataaaaaaaaaaaaaaaataaaaaaaaaaaaaaaaaaaaaaaaaaaaaaataaaaaaaaaaaaaaaaaataaaaaaataataaaaaataaaaaaaaaaaaaaaaataaaaataaaaaaaaataaa

SEQ ID NO: 181517 - DNA, 336 bp, Arabidopsis thaliana columbia
  unsure (1)..(336): unsure at all n locations
acgaaaaaaancgaaanaaanaaaaaaaaattttattttaaaaaaaaaaaaaaaaaaaaaaagggagggggaaaaataaaaaaaaaggagggcgaaaaaaaaaaacaaaaaaaataaatataaaaaaaaaaaaaaaataaataaaaaaaaaaaaaaaaaaaaaaataaaaaataaaaaaaaaaaaaaaaaaaaaaaacaaaaaaaaagaaaacaataaaaaaaaaaagaaaaataaaaaaagaaaaaaaaaaataaaaaaaaaaataaacaaaaaaaaaaaaaaaaaaaaaaaagaaacgaaaataaaattacagggggaggagaggggagaggag

SEQ ID NO: 181518 - DNA, 280 bp, Arabidopsis thaliana columbia
  unsure (1)..(280): unsure at all n locations
aaaaaaannnaaaaaaaaaaaaaaaaaaatttttatttttataaaaaaaaaaaaaaaaaaaaaaaaatcgtatatattaaaaaaataagatttgangagaaaaaaaaaaaaatatattttaatataaaattatatatattaattaagttttataaattatttattatataaaatatttattattttatattattttaaataatattaatataataaaaaaaaaggaaaaaaagaaaaggaatttttttttttttttttttttttttaataaagngnagag

SEQ ID NO: 181519 - DNA, 307 bp, Arabidopsis thaliana columbia
  unsure (1)..(307): unsure at all n locations
aaaaaaaaaaaaaannaaagatttatttaaaanaaaaaaaaaaaaaaaagggggggggaaaaaaaaaaaggggggggggnnannaaaaaaaaaaaaaaaaaaaatttagaaaaatgaaaaagaataaaaaaaaaaaaaaaaaatgaagtgaaaaggaaaaaaaaggaagatatggaacggaagaaaaaaaaaaaaaaaaaacatagtaaaaaaacaaaaggcacacaccaacacaaaccgacaggaccaacgagacaacagaagggaaaaccaataaaaaaaaaaaaagagtggggggggggggggg

SEQ ID NO: 181520 - DNA, 225 bp, Arabidopsis thaliana columbia
aaaaagaaaaaaagaaaaaaaataaaaagaaaaaataaaaaaaaaaaaaaaaaaaaaaaaaaaaaaaaaataataaaaaaaaaaaataaaaaaaaaaaaaaaaaaaaagaagaaaaaaaaaaaaaaatacaaaaaatgaaaaaaaataaaaaaaaaaagtgtaaaaaaaaaaaggagaaaaaaaagaaaaaaataaaaaaaaaaagaaggggggggggggggggg

SEQ ID NO: 181521 - DNA, 54 bp, Arabidopsis thaliana columbia
  unsure (1)..(54): unsure at all n locations
ccgacccacgcgnncganaaaaaataaaaaaaaaaaaaaaatttattttttaag

SEQ ID NO: 181522 - DNA, 413 bp, Arabidopsis thaliana columbia
  unsure (1)..(413): unsure at all n locations
aaaaaaaaaaaaaaaaaanaaanttaatttttaaaaaaaaaaaaaaaaaaaaaagggagggaaaaaaaaaaagaaggggggggggnnaaaananaaaaaaaaaaanaaattntaataaaaataataaaaaaaaaaaaaaaattaaaaaaaaaaaataaaaaaaaaaaaaaaaaaaaaaaaaataaaataaataaaataaataaataataaaaaaaaaaaaaaaataaaaaaaaaaaatataaaaaaaaaaaaaaaaaaaaaataaaaaaataaaaaaataaaaaaaaaaatantgagggggggggggggggggagaaaaaaaaaaaaaaaaaaaaaaaaaataaaataaaaaaaaataaaaaaaaaaaaaaagaataataaataaaaaaaaaaaaaaaaaaaaaaaaagaaat

SEQ ID NO: 181523 - DNA, 216 bp, Arabidopsis thaliana columbia
  unsure (1)..(216): unsure at all n locations
aaaaaccgtcccggcccacgcgaccgaacgacaacacactctttcactaacttattttttcctcaaaaacaccaaacacatcatccgctcaatttaaaaattggtcgcgtcctacanataaattaaaaatctcttattgttattagaaaaaaacagatagttttcaccctctctaatcctatgatcggatttttttttgtttataactacataata

SEQ ID NO: 181524 - DNA, 107 bp, Arabidopsis thaliana columbia
  unsure (1)..(107): unsure at all n locations
cccacgcgnccgcggacgcgngggnncagagcncaanatttatttgaancgaaanggcgaagangnaccgggggttggcacncagcgggggggggggancacaagaa

SEQ ID NO: 181525 - DNA, 336 bp, Arabidopsis thaliana columbia
  unsure (1)..(336): unsure at all n locations
tttttaaaaagaaaaaaaaaaaaaagggggggggtaaaaaaaaaaaaagggagggggnaataannaaaaaaaaaaaaaaaaaaaaagaaaagagaaaataaaaaaaaagatataaaaaaaaaaaaaaaaaaaaaaaaaaaaaaaaagaaaagataaaatataaaaaaaagaaaaaaaaaagaaaataaagaaaaaaaaaaaaagaaagaaaagaaaaaagaaaaaaaaaaaaaaagaaaaaaaataaaagagaaaaataaagaataaaaataaaaaaaaaaaagaagagggggagagggaggtaagtgaaatagaaaaaaaaataagtaagagaat

SEQ ID NO: 181526 - DNA, 170 bp, Arabidopsis thaliana columbia
cacctaaatacagacctcctgtggaggaactttcctttgtaccagagaacgagccgccggcgaaagattgtagatttccccgtcggtgtctgtttacaaaccaccggctaagaaagaggtttcactatctgacccatgttacacgctatcaccaaatgttgtgctttcat

SEQ ID NO: 181527 - DNA, 186 bp, Arabidopsis thaliana columbia
accctaactgtttccaagataatggcttatatttaagctcctagaatgaaggaaaggcgggatgtcatttttggagaggggggctccttctacacagtttcatcacatgtttgccgtgaagccacaccatgtttccaaatcatgttcaggcaacattcatagctgtgatctttacttaggctactg

SEQ ID NO: 181528 - DNA, 110 bp, Arabidopsis thaliana columbia
  unsure (1)..(110): unsure at all n locations
tttccttaaatncctcctaaatagcgcagggtcttttccggccaaaggcgggggcctaccagtttcgccgccgggttctgcgaaatccagttgggtgggattcgggtttt

SEQ ID NO: 181529 - DNA, 334 bp, Arabidopsis thaliana columbia
  unsure (1)..(334): unsure at all n locations
ggaanacccggtccggccacacccttccgttacaaactnnnccngntggaanaaaccttctcttttattataaatgatccttcccaattcttcgcggttttcaaacaaccaacggcgcctatttaacccccaccagttgtttccatacaacctcttccatctccgccaactgtaaccagcaacggaccaccaaacggattgtttattaaaaaacctnaattcaccattcaacttaaccttccttttaaccttccacatcttnactttctccgaattaacttccaatatcacccaacttcccaccaaattttttgtctttattttttttgcccaa

SEQ ID NO: 181530 - DNA, 288 bp, Arabidopsis thaliana columbia
  unsure (1)..(288): unsure at all n locations
ttttaaccttttccacttgggtggggtggaatttattccaaatggttggaaaaccacaacccatgttaaataatggtttcaggttctcacctcaacacctaaggccccttataaatacttgttcctccaaccccaccaatatcttttttcaaaaaannggccccctttcaactggaaaaaaacctctatttcctttgtaaaaaattcttaccctcgtcctttgtttaaaaactggctattgtttaattttttctaaaaaccatttccaaatggattcagttccttttt

SEQ ID NO: 181531 - DNA, 158 bp, Arabidopsis thaliana columbia
  unsure (1)..(158): unsure at all n locations
ggcggaccacacccttccgcacaaaaccacaatnggccggnaanggctttatattttccgccgttgttgaagctgtttggtgaataatggttactcgggggggtcctgttttcaatcccggttaaggtaggataaaatcctttgttgtttttgtaatg

SEQ ID NO: 181532 - DNA, 350 bp, Arabidopsis thaliana columbia
  unsure (1)..(350): unsure at all n locations
cgggccggccacccttccgccattgacgtttaaagttggccattttttctttttaaccgaaaagccttncttcgactggttttaaaacaaaacgtgtttgacaataaaaaaaaattccttaaaaaaaaaaaaaaatcttcaatggccacttcttaaaagaccactcaacggtttccacccaatttatctttttaccattttccttgaaaaagaaatttccataaaattttttttaaatcccttaccaatctaacaaaatacttttttcccctagcttaatgaacttccacacactaaaggaccattttaattcatccgggaggttaaggggcttgaccatttaacctccc

SEQ ID NO: 181533 - DNA, 211 bp, Arabidopsis thaliana columbia
  unsure (1)..(211): unsure at all n locations
aatcctctttaataatttttaaagaactctattctttttgttccctccattcccacccaaatcaaatccaaccattattcttcctcgttaaaattcaaaaaaaaccataccttaatgaatttaccaatttattcccaaacccttgntatttcaatccctacttttccaaaatcctttttcttcaataaaactttttataaagaaaattttt

SEQ ID NO: 181534 - DNA, 435 bp, Arabidopsis thaliana columbia
  unsure (1)..(435): unsure at all n locations
cccgggccggccacccttcacgttctttgccannggnccatcatcaatttcttttatttccaaacccgaaattccaacctccagcaagtttcaaacttaaagggggggnccttcctcctcaacctctaccccatcgaaaagaaattcctctctaaaaaagtttcatccacagttttgaaattaaaaaacctaatctttttcttttttntttctnctccttaaatttcaaaaattcaaaaaaattttgaaccttcctggtaatgtacctttttctaagttccaaaaaactctcctttttttttcccatccatatcaacctaacccgggtaatttcatctccctaaaaatggcttttttttcttaaacaaaaaatccagttttgttcccttttcttcctttttatttttctaaccaaaaaatttttttctaagtttt

SEQ ID NO: 181535 - DNA, 314 bp, Arabidopsis thaliana columbia
taactttcctcctccccaaaaggccaggttttattaatctagcaggcctggccgttaccaatttcccctttcttatgctttattttctaccccattttactcttaaataacccattttagatattttttcattttttttttcaccatattaccaacattttggtccaatcttttacctaatttttttttcctaccttattttttttttttccttttttttttctcttatcttttatttttctttctaaatattttttttccactccctaatatttctctctcttttcttttttatcttttttattctaattttt

SEQ ID NO: 181536 - DNA, 449 bp, Arabidopsis thaliana columbia
  unsure (1)..(449): unsure at all n locations
cttccaaccattgaacctnccatggggcaatgcctttattttttcgttaatctgcctgctaaaccccggaaggtttttccagggtggttgaggcgaccccaaaaaactcaaaacccattttcgcctgttaaaaaagttccgttggctccttcccggaattctaagaatctgaatttggaagtttttccacataaagctgattctgcagccaaattgataagaattgattccggtgggccttttgttgatcttttgaataaaaaaggaaaagggtctgtgaccaatgaaataagtttttttaaaaggcctttgggttttgggcctcccaatttggataaccaaaatcttaaacgttttccagttgtggttggaggaccaatccggtggaggaggattctggatcatttaattggttcctttttccccaccaaaggatcatttctaaattt

SEQ ID NO: 181537 - DNA, 300 bp, Arabidopsis thaliana columbia
  unsure (1)..(300): unsure at all n locations
ttcccagaaatcttaccccagggttggttctttaactaaccgtgttgtccaaacaacatttnacctcaaaaaaacccttccttttaaaatccattaccaaaccttttttataatttaaattcctacctattttattttattcccccancaatttatccttaaaaaaaattatttttatttttttttttcanantctttttttatttctaatcatcctttttccattttttaaaactcttccaattctttattcctaaaatttttttaccttttatctttaccttcaatatacaaatcaaa

SEQ ID NO: 181538 - DNA, 220 bp, Arabidopsis thaliana columbia
  unsure (1)..(220): unsure at all n locations
aaaaaaaagaggcggacaaaaaaaaccccaaaaaaaaaaaaaaatacaaaaaaaaaaaaagggcccccccccttatagaacccaacctacctaccccaaccttccatcttcaaacccnnnaaaaagccaaccctaattcaaatcaactgccccttgnnnaaacctttttacctacaaaaccctctgcacacccaaaccaaacccccttcttcccaacccc

SEQ ID NO: 181539 - DNA, 214 bp, Arabidopsis thaliana columbia
  unsure (1)..(214): unsure at all n locations
gggccggccacagccgtccaaaaaaataactacaaagggtatccnnngccattccttcctcacccaaaaggaaccccttatcgagggttttttaacccctggggtccacctataaaccaaaaatgccaattcccagatgaaccgaacccctttaaagagacccaccaacaatatttacaacttaaaccattccaaaacacctaaaaagcaccaa

SEQ ID NO: 181540 - DNA, 243 bp, Arabidopsis thaliana columbia
  unsure (1)..(243): unsure at all n locations
ccttggtnnnnnnnngntgttnttttatatttttcccttaactgggttcctctaaacgttgtgttttaaaacaaagccatttgtggtcaanccaccatgtaaccttaaaggtttcatcctcatatttaaaccccacaaaaaacccgatttgcccaatcctctaacctttaagtataaaacctggaccaaaatacccaagtttttaaagaaaaatgtccctcgnttggnaagttaccatctttt

SEQ ID NO: 181541 - DNA, 335 bp, Arabidopsis thaliana columbia
  unsure (1)..(335): unsure at all n locations
cccgggcgggccacagccttccgaaaggaggtnnnnnnnnnnataancctttattattatactgtaaggccaaaaaggttaaggggtgtccaacttacaaattgggggagcactattatacctagtaaactgcctttgttaacaccaaaaccgataagctaatttttcctaacatttaacctgtgaagaattttggtttcttgattaaacattgcaacaaaatttttaaaagtcattttccataaaaaaatgttnatcctctctttgttcctttgttggtgaaatggaattcctaaaacttttttccataaaattattccattccattttttttt

SEQ ID NO: 181542 - DNA, 311 bp, Arabidopsis thaliana columbia
  unsure (1)..(311): unsure at all n locations
ttgaaggtttctatttttcctcctcaaaaacctttaccggttggtcttataattaagaagaggggtaaaaactcctcctccaattccaaaaaaaaccaaccccattttttctccaaataatcctaatccctatcctcatcctaatcttcttatttcctcctaaattctannctttaaaatttttccctaattaaaagtaaattaccattattaatccatttttttttttcccaaaacccattttataacctaaaaaataatttcaccacctttttcttctttaaactccttttcctttttccttaattttt

SEQ ID NO: 181543 - DNA, 165 bp, Arabidopsis thaliana columbia
  unsure (1)..(165): unsure at all n locations
ctcttttatttaacctaaatgcccncctaaacaagggttgttttctaaccatactttgtccggaaaaacctccaacctttccccccctccatttaaattcctttaaacctcccttttaccatttataaaaactnttcccaaccttatttttcccttcanccaccc

SEQ ID NO: 181544 - DNA, 99 bp, Arabidopsis thaliana columbia
  unsure (1)..(99): unsure at all n locations
cctttcccttcccatccccccccaagcttaacacctcctttccttccataacaaccaacttctaaaaattaaactctttccatttttgcccttgntttg

SEQ ID NO: 181545 - DNA, 182 bp, Arabidopsis thaliana columbia
  unsure (1)..(182): unsure at all n locations
tttctaatccaaaaannccccgtccggcttattttaaaaataatgtcggcccaaaaaaacaccccaccttcattccttttcccaccaccacctcccaaaatccaccccataaaaccctcacccccacctctttatctcccttctaaaaccccnaaaaaacaaaattttcttcctaccctttt

SEQ ID NO: 181546 - DNA, 200 bp, Arabidopsis thaliana columbia
  unsure (1)..(200): unsure at all n locations
ccgggccggccccccttccaaaaaatttngntnnnnaaacttttttttttttttcctttcaaaaaatcttaaaggggaggttttttattaaaaagggtgggttcaacctaacccccttcttcaccatccaccgccccctcctccatcctctcttcccccgtttccttccatgtcaatttcccttttctttttaccccttt

SEQ ID NO: 181547 - DNA, 378 bp, Arabidopsis thaliana columbia
  unsure (1)..(378): unsure at all n locations
cgggccggccagccgtccaaattataataataannnnaaancttntttttttttttccaccaaacccaantccccaaaatgccaggctttttaccaaagtttgtcacgttaactcccaaaccttccatttttaatccaactcctaaacctccaattatgccatttcccccccccaatggaccccaatttttttcccttcactttacccaaagccnaaataaatttttcgatgaccagattaagtctctaacctaattttattagttccttttaacctttcatcctcatttttttctcaaaaaattctcttaaatgttttttttccttcctgtttgtaaaaaccttttatttttcaccaatttttatttttcccctttt

SEQ ID NO: 181548 - DNA, 251 bp, Arabidopsis thaliana columbia
  unsure (1)..(251): unsure at all n locations
gggccgaccacacaccgtccttgggggccaggaattnnnttnaatttttcttttctcaatccttgaatccaatcctgagagggttttccaaataaaaacagttattcaaccanttaacccaacctttttcccaagaactaaaaataacctttaaatttttccaaaaactattaactcaactaacatttctcaaaaacctaactcaaaccanctttaaactcttttttgattctctatttaccatatttacc

SEQ ID NO: 181549 - DNA, 306 bp, Arabidopsis thaliana columbia
  unsure (1)..(306): unsure at all n locations
gggccgaccacacacttccggcttttattttnnaacccttnnttttttttttattcccatccatcgnaaaaaaaaacgatgcatttatcaacaattttgtttcccaaaaccttttaacctttaataaccttttttttacctttttcccttccaagtaaattaaaaatgaaatcctctggaaagtttatttaaagtgttttcctggggaacctttttatttataacatttttcccatcccattttctttccattctgtttattttaaaaaattttttttctctttctaattttttttatccatattt

SEQ ID NO: 181550 - DNA, 163 bp, Arabidopsis thaliana columbia
gaatggaagacccggcccgacccacgcgtccgcacatttattattgcaaacgaacatattacattttctaagagatcaatatccctggagggaggttgtttgtatgcttggtgggggccttcaatattgcgaccaaaccaatcacattgaacgctgttttaag

SEQ ID NO: 181551 - DNA, 198 bp, Arabidopsis thaliana columbia
aaaaaaaaaaaaaaaaaaaaaaaaaaaaaatataaatattaaaaaaaaaaaaaaaaaaaaaaaaaaaaaaaaaataaaaaaaaaaaaaaaaaaaaaaaaaaaaaaaaaaaataaaaaaaaaaaaaaaataaaaaaaaaaaaaaaattaagtttaattattaatgttattaaaaaaaataaattaaattttattttaaa

SEQ ID NO: 181552 - DNA, 444 bp, Arabidopsis thaliana columbia
  unsure (1)..(444): unsure at all n locations
gtttttgttcctcagctaaaccatatgcacatgctaccagtagtactaaaccgacgcctccgcaatcatacagattaccagggatctccgccgtttccggaaaagagctgataactttccggcagggtacgggcggggggagcccaaaaaaagccaatgcggttgtggcgtcnggaggatatatactgttagacgtgaggccggcttggggaaagagaaaggcacgcgtgaaaaggtttcttacacgtgccactgttcgtgggaagatccaaacaatggggccgatcacgttgctgaagaaaagggattcatttggggatatattggngctttggacgggccaaagattcaccatgatcaatgacgaattcgcccctcgtgtttggagggtggtccggacaagagagtaaagtgctcgtcgtgtgcggtgaaggacctaagtcg

SEQ ID NO: 181553 - DNA, 117 bp, Arabidopsis thaliana columbia
gacccacgcgttcgcacaaaatatggaaagccacaaacggtttttttgccccacaagacaggctctccggcgggggatttccaataacgcgggggggctcacaaaacagggcacaca

SEQ ID NO: 181554 - DNA, 124 bp, Arabidopsis thaliana columbia
cacgcgtccgcacaaactaatttctcaccaccgtctgaatcttagtttggttctaaaggccttttcctttaggttgtgttcaacaacagatcgtgtgtgaatcactcagtcatgtcggttttac

SEQ ID NO: 181555 - DNA, 333 bp, Arabidopsis thaliana columbia
gcaaaatgttagctcagtcgcacttctttttttagtccttcgatctgattccgccacagggtccggtgttgcggtctgcagatccttctcttcgtatctcttcttcttatagtaacagccgcttatcctttctttcttcttctgcaattgctgttcccgtctcccgccgtcggttttgcctgactatggcttcaaactcaaaacggcctaacataagcaacgagtctccttcggaacttagcgacactgagctggatcgattcgccgctgtgggaaatgcattagctgacgctttcggcgagggtatcagaaagtatttcccggtagaaattt

SEQ ID NO: 181556 - DNA, 64 bp, Arabidopsis thaliana columbia
gtaaattcacagaagctagttttcttattgtggaaaactgtttttcaactatagcctttattgc

SEQ ID NO: 181557 - DNA, 84 bp, Arabidopsis thaliana columbia
gtaaattcacagaatgctagttttcttaattgtgtaaaactgttttctcaactattagcctttattgcaaaaaataagaagaac

SEQ ID NO: 181558 - DNA, 74 bp, Arabidopsis thaliana columbia
gtaaattcacagaacgctagatcacttattttgtgcaaaacagctctctcaaccaggaggctttatttcaaaaa

SEQ ID NO: 181559 - DNA, 448 bp, Arabidopsis thaliana columbia
ctggtggtaggtactttgatcgaatgaagggtacatttttgtcttcttcaaaggcttttactgatagtcgtttatttgggagaggtgttaatacttctgctacaattgcaagagaaaacaagcccattggttctgcagataattctcatacctatgctcattctagtcatactaatcctcctgaattcgtggctatgaaatatgtccctaatgaagaggaaaggaacactaataatccagttgtttctgagccaaaaccgagtagagaacctaaaaaatcatggcaccaactgtttgctcgttcaactcctgctcctgtttcctcaaatgttaatactataagtagacctagcacgaatccccagccaaatgttcagagctcacaggttcccagtcaagtttcctcaatacgaacctttgacaatcccatcagttttgggctcccatc

SEQ ID NO: 181560 - DNA, 130 bp, Arabidopsis thaliana columbia
aaaaaaagagagaatcttaaacaaattatgtttagaccatatcaaaaaatatgaatagagggctatttttttatgaaaggagggtttaaactgaattactattcatgattatgaaattgttgatagaaca

SEQ ID NO: 181561 - DNA, 143 bp, Arabidopsis thaliana columbia
ctgccgacgatgacatatccgagcattttcttcagataaagagaggaagacaactgaagaccatgaacattgtgtatgtgagaaaaagcagatctttttttgttctttgaagaacaaagtaaatgatctttttgaatctatgt

SEQ ID NO: 181562 - DNA, 114 bp, Arabidopsis thaliana columbia
agaatcggaatcaacggggtcggatgaatcggtcgtttgggggcttaacatgttcttcagaaggatgagttttacttggcatttgttctcaataccttaatgaggccgcttctt

SEQ ID NO: 181563 - DNA, 420 bp, Arabidopsis thaliana columbia
cccggcccggaattccgggtccgccccacccgtccgaccgggggaccaaaataccatgcgaaggggttccgaagggggggtggggtccggttcaaccgggccatatagttgggttggggttaaagcgtcggttagggggggattcaggggcaggagaggcttttcagaaccaccttcgggaggggaaggagcgtcgccaggcttttagccaggttaaaaatctttaattttttttggaaatcatcctgattggggattggcaataatatcgatggatttgggtggttggggtttggtaggcctagagtggtcccggttcctgttgcggggctgatggggtcctttttggatcctgaacctcaggaaattgagtatgagatcgttgggcttagaggagggttaaccgccaaattttttgcc

SEQ ID NO: 181564 - DNA, 288 bp, Arabidopsis thaliana columbia
aggggccttagaagattaccagataaacctttttgtttgagtgagggagactaacccatggggtttttggctaacaatttttgggaatggaaatgttcccaactctttcttttttctaggtaatcgaggagggcttcaaaaaactttccccagaccaaatctgccttggtttctccgcctatggccgccgcggtggcaatgtctagcggtaaaccaaaggagctttttgagctgaaaaaaatgttcaaagatccttatgaccgatgttaaatttttcctatggaaggg

SEQ ID NO: 181565 - DNA, 109 bp, Arabidopsis thaliana columbia
cgactccagccgtccgaaacataaaaaccaggtgcaggctttaaatttggagggggggggcaaaatcggcgtcaacgggaccttcctttccggttggggtttaaaatga

SEQ ID NO: 181566 - DNA, 255 bp, Arabidopsis thaliana columbia
gaatccccgggcggaccacacgcgtccgttgggaatggttttggcgaaaggtttttattttgaactaagaaaatttccgagtgggattattttttccgttggggcaagggcgttggtaatgcccacatccaagggaaccaaaggggccattatggaactaatggttgtaaagtttgcggtggtgaaaatcgaggatcccgtaacctttaaaaggggctgtattaacaggcaacctttatttctttaaaatgaacc

SEQ ID NO: 181567 - DNA, 272 bp, Arabidopsis thaliana columbia
cccgcccggatccggccgccccgcgccgccttaagctaatttcgccctggagtttaaatcgggaaggacctccatcttttccgggggaaaaacggatccctaaatcggggattttttaaccggggaggattaattccatggggggaggagaaggtcttggtggcccagggttaattcgtggtgtttaccgggatggcggcatttccggtttttggtttaccagggaaaagcttttttttaattttagggggggattaaaggtgtttggtcct

SEQ ID NO: 181568 - DNA, 320 bp, Arabidopsis thaliana columbia
cggcattaagtccaaccactttaatagggcttttattttaaactcaacaaggatctcctaagggttccatttgttgggggggaggttttcctacccggaactatttcttttttcgaggggaatgaccaacttaggacggcctccgttaattttttggcgctgggaaaaaaggttatccttttgggggttctgggggctttgactccaacttgcacatggaaccaggttcttgggttaattgagaaggcaatggatctgatgttaaaggttgttgtttagatacatttgttttagggtgatcaatccgtttgttatgatag

SEQ ID NO: 181569 - DNA, 339 bp, Arabidopsis thaliana columbia
taccggggaatattatgccaccgagttgttttttcattcctaagtggcggggtccggcccggggtttttgggtcttccaaatataaaaaaatttgcgcctgttctggcctaatcctttaacataaagactatggaggaggtaaagccggttccaaggggaaggaagattttcgcagttaaccctgtggtttaaaatcagcccctaagatggaaatccaggggtccttaaattacttttagggcacttgtggatatggtggtggtacactcttctggtccgctttgctattttctgggccacaggggtccgagaccaagaggaggaaagccttattttta

SEQ ID NO: 181570 - DNA, 233 bp, Arabidopsis thaliana columbia
cggataccggggcggacccacccttccgaaaaaaatgccgcggcgaaaggttcttttatggttacccgaaaccttgacctaatagggggggttggaaaatattctgggtctaaaatgtcccaaaggatagtttggtggcctttaaaggccaagaccgttggcgttttccttgttaacgtgttttatccaagggtttcctcttcgtttgagaagcctgccaagttttatccggt

SEQ ID NO: 181571 - DNA, 215 bp, Arabidopsis thaliana columbia
cggaataccgggccggcccaacccgtccgaaagaggcaaaatctgggtaggaattatatttttccggattccttcttttttgaatttccggcctattaacctaattgtttgggtaccaacctattctaatagctttaattttacctccttcttagggaaccccttatttaccactccctcttcatatcgctccactgcttttgtttttttccttt

SEQ ID NO: 181572 - DNA, 402 bp, Arabidopsis thaliana columbia
ccttaagagggaagggggttggggtttcctttggtggagccattctcggggttggttcaagggtgaatggaaaatttgggtcctggttctttaaaaaagtccgacccttcaaaggccggaattgggaatgggcatcggtttatgggggggaatcgttttctttcatgggggtttttcccggacctttttcgggtttttaaggagcaccctccggtggccaaattggtccttggggcttccaccgtgggccccaatggtggatcctccatttttccggttaatgagaggttgtggcgaccacctgttgttggggtgggcattgtggactccagtttccacggtctatcaaccattgttgttgagttctaggatctaaaatcttgccctttgaatgttgggaaa

SEQ ID NO: 181573 - DNA, 273 bp, Arabidopsis thaliana columbia
gggccgcgtggaacccgttgggttaaagcttatcatttgtaagggaggtatttgaaggattacctaaaccaccgggtggttggtgggttgttgttccaaaggggtgggggtttaatttaataggtggtttacccccaggtggtggcattttttctttgggaggtggatttttatattattaaacctggaattcaatattttaattctggtggtgggggttggtttttacttttaaaccatggtatttcttttcaatggttactaaaatttata

SEQ ID NO: 181574 - DNA, 344 bp, Arabidopsis thaliana columbia
ttcctttaacttttttaataatggaaaaaccaaattcaaatggtcttggtaggcgcaccgggtaggtggggccatccccacattggaggggtttggtttggattaataccataatggcttttggggaaaggaggttaggacgcccgtttttatggtttggaaaaccggttgggttaaaaaaaaaccggtttttttaaccgagtcggggcgcatggggttttgcattaaaaccattaacataaccgccgtttggggcgatccgttgaactggaacgggacggccgaagctttgaaggggagccacctggatggggggaaacaaatggtgaaggagtttaggaagg

SEQ ID NO: 181575 - DNA, 326 bp, Arabidopsis thaliana columbia
ccggaattccggacggacccggcgtccgcaggtcctttattgattcgacggttccaattttcaagaactttccggagaaggggacctacctcgggcacacaggctgtggaacctccactataccaaggttttagaaagaaaggattttgggccatgcccgattgtgaggttttcattaccaagaacctgggggtttaattgaatttcacatgggtggtggttagaagaaagaaggccattacaaaatcgttcttgacgggtaaaggaaggaccccaggcttgaagacatgtgttccgagaagttccattttgaggacgttagggtt

SEQ ID NO: 181576 - DNA, 374 bp, Arabidopsis thaliana columbia
gaatcccggggccgccccacccttccgaaccaaaagggttttgtggggggttttctctttttccatctccggcggttctggagggaggtttaaaaatcaatggttccggccgtttaaatggctttgaaagagtggcgttggttaaaaggcttaaactgtttcccagacctaatctaatgggggggccttttttccggtccgtgattggccttgtgcctgttgataacttggggtgctttctttgttcaggctgccctccccaatcctttttcaattcaaagttggctcctcctccattttcttccgggggccttcttgggccagataccttattcccattcatgatgcttttttttgccttttaagtacagttt

SEQ ID NO: 181577 - DNA, 391 bp, Arabidopsis thaliana columbia
ccaggcgtccgttattgggaaaaattttttgttctggagaatcaggtggggttcctaaggagggatttttggacctaatttcgaacctttttatggggtcccgggtcggtttgggatccagaatcgggttcaaccggtgggggccgggttcggggcttagtggtaaggactttggttttaatggggggggtttttttaataaggcgtttaattaattccaccattcgtggggatcacgcccgggtggtttttggttttttaaccggagggaggtttacgggggagcaggcgtaaggagatcctgttatttccttaaccttaggattgttgagtggtccagttgctgaaagggtggatggttaaaaggtttgtgttttggaacaggcttttt

SEQ ID NO: 181578 - DNA, 267 bp, Arabidopsis thaliana columbia
gtccgaaccgttcggtaccaaatacaaataacccttggattcaccgttccaccaatggaaactagggttggttcaaatcaattaagcgcaccgcccccaagggacaacaacaccggagggggcaaatccaaatgggtggaaaccagcatgggagtctcctgtgcataatgcggaaggttaaccggaggagcgggttaaaaaaccccttgacccgaaggatctttccgaagctgattctgctgaaaagccaccacacattcggttttt

SEQ ID NO: 181579 - DNA, 225 bp, Arabidopsis thaliana columbia
ggtacgcccggcgtccgcttgttttaaatggtaagcggtggcctttttttttttttttggagctaaaaaataggcttccttggttttaactgtcaaaaggttggcccgacttttattcccccctgccaaaaagccggttgggggccttcattttgttaacatttttcccctagcaaatttttttatttccgaatttccccctcacggggaaaaaataaggtaatt

SEQ ID NO: 181580 - DNA, 253 bp, Arabidopsis thaliana columbia
gtggatttttggaagaatcctgataggtttattgggttgggggctaaaattcctaagggtggttggtggttgggccaaccggttccgggaaaaaccctttgggttagagttggggttgaagaagttgaagtgccgttcttttggggggctgtttggaagttggtggagcttttggtgggtgggggtgctcttagagtaggggttttttttggtagggcaaatccgtaggctcttggattggggattattgatg

SEQ ID NO: 181581 - DNA, 426 bp, Arabidopsis thaliana columbia
cacggtggagcaaaatcacatgcgaatgggatccgtttggtgtgttgggtccggctcaaactggtcatatagctcgggtgtgagtttaagcgtcggctagagagagattcagaggcaagagaagcttttcagaaacaacttcgtgaagagaaagagcgtcgtcaagctcttagacaagttaaaaatctcttattttttcttgaaatcatactgatttgtgatttgcaattatatcgattgattttggttgtttgggttttgttagtctagagttgtaccggatactgctgcggagctgattgagtactttcttgatactgtacctcaagagattgagtttgagatcgctaggcttagaggaaggtttaacgacgaattctttgcgcagtttcgacttggaatttgacagattcgatttgctgtttc

SEQ ID NO: 181582 - DNA, 491 bp, Arabidopsis thaliana columbia
  unsure (1)..(491): unsure at all n locations
gtccggaatnnntcccgggtcgacgccacgtnnngtccgcctttaatgctcatatcnntcgccactgnngagtctcatatcgtgtgaaagaaatctccactcttcttccggagggaaaagacggatcccgtaagatcggtgaagtttttaatacacgagnaagatatcatattcatatggagggaaggagaaagggcttcttgctgcacagagcttatatcgatgtatgttaaccgagaattgctgcgatttctgattattcgtatannacagtgaagaagcttttgttatatatctagncgaggagattaatagcttgcttgttcctatgttttgaggaaattagagaaaggtaacgaatccgatcatgcgaagataccgttgaaagactttgatgatatttgaaaggaagctattgtgttcagcgaagggattatctcaatattttgtagcccaagggagcaaagatttatctggttgatgggagaggg

SEQ ID NO: 181583 - DNA, 143 bp, Arabidopsis thaliana columbia
ggcccgcccacgcgtcgatggctaccttagtttaagaacaaatttgttgttgttgcagccgtgaacatgatgtgcgtccggcattgtagtgctggggtggtccttgacttctaagctgtgtgtgctgtcactcgttgaggctc

SEQ ID NO: 181584 - DNA, 415 bp, Arabidopsis thaliana columbia
  unsure (1)..(415): unsure at all n locations
aaaacccgggccggcccactcttncttctttagagagaatgtttatcggggtttcttttttccgagacaatctctaggtttgcggaatggttaattgaaaagggggggcctccttctctcaaaaagtcctatcctttcaaagtctgaatttttaatcggcatctgtctatatagaggaatctctttctatcattgaggctattcccagaactttttcgagtatctaaagatgcaacctcctgttgccaaatttgttcttcttgtctccaacgttttccccaatcatagaatctacattcttcctctttacgacaagcttctgtggacatcgggaggatgggtttcttcattttctcctccacttttcactgtcttttcaccattttttttgagtctcttatatcccatattcttc

SEQ ID NO: 181585 - DNA, 197 bp, Arabidopsis thaliana columbia
ggccgacccacgcgtgcgcggactcgttttacccgctgtagtttaagcattactttcttaaaggaagatatataaagattgactagaatcaacgtgatgttctgatgttgttgttacaaatgtgttgttgttttattttataagttttcattaccactttttgttttattttttattattttgttattttatttatt

SEQ ID NO: 181586 - DNA, 269 bp, Arabidopsis thaliana columbia
ccggcgccccgcgtcgctatcaaaaagctctcatttcaatggcgacagcatcagctcttcatcactctttactctactccacaccggaccgtttttatctctttctcacaaatcatcgcttttctctcttctaaccgcgtttatttactctcgcaaagctatcgccgtccgaccatcttttgagcgaacaccgaataccgaatgtcgcttgcccaccatgtccgggatcgcttctcgattcgacaagagcgcagacgagagagacctcc

SEQ ID NO: 181587 - DNA, 112 bp, Arabidopsis thaliana columbia
tatgtgcattatctattctatcgatacaactatcctagaccttgctgagaatgagacactacctacggaacagagtatggagcagccacataccacgtgctcgaaagagagc

SEQ ID NO: 181588 - DNA, 136 bp, Arabidopsis thaliana columbia
taaacataattgcttctatgttcggttttctctgttcatctccggcggttcttgtaggtagcgtgtattatcaatggcggcggcgcgtctcaatggctccgtaagagtttcctgtttctcaaaagtctatactttt

SEQ ID NO: 181589 - DNA, 251 bp, Arabidopsis thaliana columbia
caacccctaccaaggggttccggagtagaagtaaaaaattagaccccgccgccagtcctgttcaacctcccaccgttaacccccgacctaaccctgataacccaattttaacccccccccctaaggtgccaataaggaatgagaggttacccctaacccctgaccaccccaaggaggtgccccaagcgcccgtaaagcttcaaaaatcctcgcccaagaaccctgccaaaaaccctcccatttttgaaaat

SEQ ID NO: 181590 - DNA, 345 bp, Arabidopsis thaliana columbia
ccggttccgttccaactaagagcctagatttctttaatttaaccattaaaacctaaacctaaccctcccccaccaccaattttaatttttccttttccaacattttccaaaaggcaaaaaaataacctccttttcaattcaatgccggccaaaaaaacttcctaaaccgttttttaactttcctttaaccttgcttccggaatttgcccctcgtttgcttactccaacacactttttttaagttctgattccattgtccaagtgtttgttgaaaataataagccaaagaaaaacctttgaaatcattttagaaaaaaagtgataaaacctgtttttttccaggat

SEQ ID NO: 181591 - DNA, 324 bp, Arabidopsis thaliana columbia
tccgttaaacctttttaaacacttcctttgcctctcttctatcaaactttatcctctttcaaaacgaaactcccaccatcctcctgcaaattccccaaacctttcccactccaaaaaaccttcccattccgattcaccaccggtggaacccccgccggaccaggaatgtcagccaccgcagcttcaacctccccaatggctttaccaaacgtcccgaaaggaaccgccccattggatttaccagccccagccttcaaaaagctcaaccaagccttttaaaatccacaagtcctaaactttttcgcgattccaccattaaccgcc

SEQ ID NO: 181592 - DNA, 281 bp, Arabidopsis thaliana columbia
atggccctcttactaagagcctagattttaccttaaagagaagcgaaacaccaaccccatcattcacccccaccaatggaaatttttcccgattccccaattaacaaaccggtcaaattcggttccataattctgcttttttaactctccattaatcctccagaactgcaaaaccaaataaataacctttctagttcctttaaggctccttctccataagtaaccaaagttttttatcctaccaaaaatgtctcggctcaaaggtttttaaaaaatttaat

SEQ ID NO: 181593 - DNA, 400 bp, Arabidopsis thaliana columbia
  unsure (1)..(400): unsure at all n locations
cgccaagaccttgaccaggatgatttagaccttttctttataaccaaggnccccannaaacggcacgagagggaaccccaagggtggggtttgtcccaaaaccattggcttccaaaaaagcaaacaagcttaaccttaaggccacaaacctttgtttggatttccccggaggaccagagaagtccaaagaaaaccaggaggtttctggcgttaaaagtaccaccaagcttggcttggagtcgcctccggccacatggttgaacctaaaataaaaaccctggaaggaatcttcaaatgcacggaatcgtttacccccatccaaaaagccttcaaaggtccgtccatagtaccagaaggattttctaaaaaaaacgggaccaaggcgggggaaaagggaaaa

SEQ ID NO: 181594 - DNA, 163 bp, Arabidopsis thaliana columbia
cccaccccttcctacaaaaccttttatccgaaaaaaaaaaagccctttttcaccttttttttaccaaaccactttttttcaaccctttttccctccctttatcctaaaaatcccctcctaataaaaatccctttttccttatttcccctaaaccccacataaa

SEQ ID NO: 181595 - DNA, 244 bp, Arabidopsis thaliana columbia
  unsure (1)..(244): unsure at all n locations
ccccaaaaccncccacaaaggaaagaacctttttccaaaaaagaaagcccccccaacccccccnannccccaatcttaactgctcaagcccaccccgtccaatcaaagaaccccgggaaccaaaaaaatgaaatgcctcccgtggacccctaaagccattccgataccgttgcctgtaaaaaccttcctcctgctttaaaaaaacctaacccaaaatttaatccgcctggggttaaataaaaac

SEQ ID NO: 181596 - DNA, 358 bp, Arabidopsis thaliana columbia
  unsure (1)..(358): unsure at all n locations
ccaagccggcccacacccttccggttggccagcccattcgttattttaaggatttattttcccgggggggaattttaatccagagaaggtgtccaccgaaaataagtgaaaaggatccnccttggcttacaaccccatcccaaacttcgttttttttaaaaagggtccaaaacctaaacctggccatttaaaaaacactcgaatggtaattccaagttttattccaggccttccgtttttagccaaaactaaaaatccacttaattaaaacaactttcctgttaaccttaaaggcctccaacctaaaaagccacttgctttcagccaagcgaaaccaaatcctaaaaaaatggaagtt

SEQ ID NO: 181597 - DNA, 255 bp, Arabidopsis thaliana columbia
aattgtccttccatccaaaattgccaaattttccaaaaaacctgtggaatttcctaaaaaaaaccaccacctttttttccttgtgtggccttaagggtttgaaaaaggttttcgttgcctttttggccccccttcctgctaaaaatggaatcaattggttgtagtccaaaatccatttaaaaagatattaccagggaaattttaaattctactaaaaaagcttctaaggaattaattttttattgtaaataaaaa

SEQ ID NO: 181598 - DNA, 261 bp, Arabidopsis thaliana columbia
  unsure (1)..(261): unsure at all n locations
accccaatncattataggaaaatgttttttttattgaaaagcccaaccaccttttnnngttaaaaaaatattaagtttccttttttgaccaaccaatttttttttacttctccctttcctttatttttattatttccaaaaaaaataatttgatccacccccaacccttttttattgtaccaaccaccaccgttcctaaaaaattattgtgtttccaattattagaacctataattccccattttcctcttttggttacct

SEQ ID NO: 181599 - DNA, 209 bp, Arabidopsis thaliana columbia
  unsure (1)..(209): unsure at all n locations
aaccccgaaaaaccanngaaaggaaaattttttacataaagagaaaacctacccccaccacctttccttacccaaactaaaccctaaaccttaaaccccctcctaaatgtagcctctcccgaacctcctaattccactatccaaaataacacataatatgtaccttcctttttaatatcatagcacctttttcattacaaattccatat

SEQ ID NO: 181600 - DNA, 312 bp, Arabidopsis thaliana columbia
  unsure (1)..(312): unsure at all n locations
caacccacctaaggaccacctatgacaccgtttttttttttaaggaggtccccnccccaaaggccttttccgggcctccttccggggttcctccacccaaaaaagccttttccttaactgtccaaccttttaattccgccaggccaccatcccaagtagttaacccaatcaacgttaacccatccatcgaaggtttgaaacctccgttaccaccaaccccattatccgcttggtcccttcccaccctccctgattcccttcccgccgtaaaccttttcttccgagtgtggaaagaagcccttccccatgttt

SEQ ID NO: 181601 - DNA, 391 bp, Arabidopsis thaliana columbia
cccttccgttcttttcttaaaaaaccttggccaatcctttgtttcttttgggaatcccaaaaagccagggggggcaattcctaaatccaaagcttctcaaccaaaaccaacctttttaacctttccagaaccaaaaagctttccccggttccttaccaaaaagtaatgtcctcttaccagggctcgtaaccccattattattttcccacccttggttaaaaaaagaaggggtgggttccttacccttgaccctgggcccagccctattgccctaaagaaaaaggcaccccttaaggcttccttaaaggaacctggggatccaaaaaaaattgctgaaaataaggctgccccactgagaaaaaaaatgatggtattggaggaaagccaaaaa

SEQ ID NO: 181602 - DNA, 404 bp, Arabidopsis thaliana columbia
  unsure (1)..(404): unsure at all n locations
ttttcctttctttcctagattttctttcncctttacttttttccaccaaggcccccccnnccnaaggtngccntttaaaaattagggagcccccaccacctccttcctaaaattcccttccactcttcccctgctaaagcctcttcctttagcctaaaagccgcttatttttcttttctccttttaagtagaatcggggggaaacctcctttcttcaatcctttacctgcccaaatattccctaagcctgtaccaccttcacctccttttaaagaaaaacctgctccaaacctaaaatttccaattaacgtttttgaaagaatttttagaaccttttttaggcttcgccttttccaaaaaacctttcctttcaaatttgtttaccttaactccagtgttgtttt

SEQ ID NO: 181603 - DNA, 287 bp, Arabidopsis thaliana columbia
  unsure (1)..(287): unsure at all n locations
cttaaaattcttaancctttaattctatatcccaaaaaccnncccccaaacgaacgctctttaaacatgggagaaggcccaccccatcanncgccctttcaccctaccccactaaaacctctcctccctaatcttaccccaactttaatcttctttttctccaccccagcccccaaaataccttccaccaaaaccactaccaaaaaaccacccactcttcccacccctttccccgttgcctaacctaatcctcccaaactatttacccccccctttgtttcccctaa

SEQ ID NO: 181604 - DNA, 461 bp, Arabidopsis thaliana columbia
ttaaccaagccggcccaacccttccgcaatttatcttcaccaccatttccttcaccttttttttcgaaaccccgccaatttgccttaaaagaaatgtttccaaacccaggtaaggtttcccacctaccactttttccaccctccaaccccaccaccacctgcacctccaccaccaccaccaccaccaccagcctcaccatgcaccggaaggttttcgccaacctcaccaccaccacctttttgatcctattgattccccaattttttttcagcctaaacccaaaatgtcactcaacccccaccaccaaacccctaggaatggtcctggtcctaagcctggccaaccgccaattcattttcaccaccacctctgccaaacctcttcctaattaaaaaagaaaagtggttttttcaagctcctttctttccctattaaaggtttgtgtgccaatcctaaaaag

SEQ ID NO: 181605 - DNA, 318 bp, Arabidopsis thaliana columbia
  unsure (1)..(318): unsure at all n locations
aggaaggccccccnccncctcacccgtcccttccctttccccggaaaacccagttccttcctctcaaccattgccaccaatccctttgtttttaaaccgttggtccataccctcccttggggtttctttaataagccttgggtccaccccttcctcctggtggttccccgttgttttaaccgaaccttccaatttccaaaccttgtttcccccttcctcctcaatgtttgtaatttccgtcctttttttgggtgtccttgttaccttacctccttgttgccatttacctagtgtagcccctgtccttaacccattttc

SEQ ID NO: 181606 - DNA, 353 bp, Arabidopsis thaliana columbia
gaaacccgcccgccccccttccgaatttaaaaaaacctttccagtttttttagatcgggaaccacctaaagaaagactcccctttttcagccggggcctaatcaaagggcctccaacccaccaaattttttgcagttcctgtccaaggcctgccaggggtccaccccttgaaccccaaggaaatgggaccttgggggccaaagggtaacttattcggttaatcaccaaatctattattggtaccgtcaccacccctgttgttgttcgcgggaagattcgaccttgccccttcagccattaggaaggcaccagctgaccttaggttgaaggcccgtacctcaggtctccaaacg

SEQ ID NO: 181607 - DNA, 366 bp, Arabidopsis thaliana columbia
  unsure (1)..(366): unsure at all n locations
ccaagccttcctatttttaaaaccaatattttcccatttttttattaaggcccctnaaaaaanngcagaaagaaggttttgaagcctaaggtggggccaaagncgcccccaaccttattagaaaggtcctaaaatccaccttccaagtattcactaacccgccatttcgaaattttttttttaaaggaggggttaacctttttaggggtttaacctacaagaaaccactttcctttttaaaaatctttttgaaaatttttttcctttcccccgttccttccacttacccccttcgaagaaaaacgttacctgttttgttttttttttttcctcttaaaaaccaagaatatactcttttttatttcg

SEQ ID NO: 181608 - DNA, 356 bp, Arabidopsis thaliana columbia
  unsure (1)..(356): unsure at all n locations
acccccnccccaannnccaaaaggaaccnccccccaacatnaggaggaaccccccccnnccnccccccgnaaggccggaagcccctcccctaaaccccctaacttcccatttcttccggtacccgtccttttcttcccatttcctccgttacccttccttaacctcccatcccttccgttacccttccttaacttcccctttcttcctttacccttccttaactctccctttcccccatttcctttccctaacctccccgttcctcctttaaccttccctaatcttccctttcttccatttcccttccccaatctcccctttcttccattaccattccctaacctcccctttcccc

SEQ ID NO: 181609 - DNA, 364 bp, Arabidopsis thaliana columbia
  unsure (1)..(364): unsure at all n locations
ttttccataaattnaaaaaagaaagaacttattttttaatgtgagacccgaacttttctccaaaaaattcccttccctaaatttttaacctaaagggccggttttaccttttttccctcctaatttttgttgccttaccgtttcctaattcaacaatttctgaatttgggaattcaaaaaccataagaaaaaacctcattcctcggttcccacctgctcgttttaaaaaaatattccaacctaataagaatgttgccaaaatacctttgcacatccctgccttagcctaaaaacctttgaagttttttttgcaaaacctttgtaaccgtccatataaaattacccttaaaaaaggtcccaaaac

SEQ ID NO: 181610 - DNA, 358 bp, Arabidopsis thaliana columbia
  unsure (1)..(358): unsure at all n locations
ggccggcccaagccttccgtcctgccaccgcctttttttaaactttaactctttttaaggtttaaccctttggagaaggaccattcttgccggtggtggagccaacnntncctcctcctgaatttcccaaaaaaagaccgtttaaaaagtttccctcaaaagaatttaacctcaatcctcttttcattttgcctcctaataacctaacaaacctctttttttttcgattccataaaaggtcctctaaaggtttaccaagaaacccaatgcctctaattaaaaacctgaggaaaccaaaaaggaagcccccccaaggtaaaaacccaaacccaataaaaccccacttaagaaccataac

SEQ ID NO: 181611 - DNA, 248 bp, Arabidopsis thaliana columbia
cccccctccccccttttaatccttaataaattcattataagaaaaattattaaaaattccactatttaccttaataattccttctaaattaaactcccctaaacaaaaaactaaacctttaaaatttacccaaaaaaacctaaaaaaacctcctattttttttcttattattccttccacatctgttattaaaattttccaaccaaatcaaattaaaatttcatttcttttattcatacccttcctta

SEQ ID NO: 181612 - DNA, 188 bp, Arabidopsis thaliana columbia
  unsure (1)..(188): unsure at all n locations
ccccanaaccgcccatgtaccattaagaaaaccggtgcccaacccaaagggcccacaagccaccccttgttccgtacccgcccaaacaaaacccttgggcccatccccggccaagcaaccaaccaccctacccgaaaagtcccccgaaacctccgaagggaccaccgctgaccttcacactaacccca

SEQ ID NO: 181613 - DNA, 199 bp, Arabidopsis thaliana columbia
ctggccaaaaaaccacccaagggaaccgccaggaccccaaaaaaccaaattcccacctttgggcccgcttgtccttcccttatccaaaaactcccactcctttggacaggtccgtaaaaaagaatttccccacccccaacctaatccttacctttccgaatttaaacctcccttccaaccatttctggtaccatccggc

SEQ ID NO: 181614 - DNA, 371 bp, Arabidopsis thaliana columbia
  unsure (1)..(371): unsure at all n locations
ccgtccgnaactccacttgtggaggttgtttccccttttaaattaaggaggaacctaaaaaacgaaagaaagtttttatcaatccaaggggaaggatgcctccattaatggctccaactaccaaagcatactaaggggtgggcctgggccctctgccttcctgaccaaagttaaaagtcccacatccagaaaaagtagggggtaaatcctccgtgaccatggctatcccaccaatcctgaactgggccctggaaggtaccaggaaaaaactccaagaaaggccacctagttccaaactaactaccaaagccaataaccgcctccaaaagaggttgaaaaataacaatcctctgaacacgcctttaaaggga

SEQ ID NO: 181615 - DNA, 307 bp, Arabidopsis thaliana columbia
  unsure (1)..(307): unsure at all n locations
ccaaaaggaacctccacggaaaaagaaagcctaactttacccggtggaaaaanccaatttcccaaaatccaaccctttttccaccaatattctccaacctaaacccaatgccaaaaaacccagtccttttcctctttcctgaacctccagaacaaatcgaatatcctcttgtccctataattccaaggggtttaatccttgttcctacccaacctgtattcctccacattttgaatatccctccacctcctaaacctttaaccggttttaaaatgaatttaaccattcctccttccccttttcttaa

SEQ ID NO: 181616 - DNA, 284 bp, Arabidopsis thaliana columbia
  unsure (1)..(284): unsure at all n locations
ccacccttnccttttttttaaaccttcccaaaaattttaacccccatttggacccataaaaattttcccattcttaccataccgccccaaaaccaaaaccacctccccacctcaccattccccccttttacctatctccaaaccaaatgttcccccccttatttccaccctcaaaaataaccaaataaccctcgataataaatttagtaatcaaaaccctatccctaaattaaaaaccaataccaacccccctaataccaccccttctacccattttaattttt

SEQ ID NO: 181617 - DNA, 260 bp, Arabidopsis thaliana columbia
  unsure (1)..(260): unsure at all n locations
ccaccccccccaccctccnccttaaaaaacctccactttttctaaccaccccaccttcccaattccctttccttaaccaaatctttattcccccccaaaaaaccaaatccctccccccccttttttccacccccccccccaaaaaaacctcccttggattcaaccccccctcatctaaccccaaccccaccgtctccattcttcctttaaaccaccagtgtcctcctcctaaaaccccnaatgaaaaattcctccctttt

SEQ ID NO: 181618 - DNA, 288 bp, Arabidopsis thaliana columbia
  unsure (1)..(288): unsure at all n locations
cgaaccacggacncggagcgcagnccncgagacgnnggaancgcccncnncaananncaancccgnacaaggggnnacggagnaggagnagaagannaggacccgncgncagggcngnnncagcncccaacgnngagcnccgnaccggaccngangancncannncnacccnccncncnaagggggcgaanagnganggaggggngacgcnaagcccngagcagcacaaggaggnggcacaaggggccggagagcnncaaaaggacgggggcaaggagccngncaaaa

SEQ ID NO: 181619 - DNA, 370 bp, Arabidopsis thaliana columbia
  unsure (1)..(370): unsure at all n locations
gaccgacccacgcgnncgcgcaaaacccaaaggcgaaccgacngacattttttttttacgaactaaccacgaggaaagaggagggggacattaacatcgggaccggtgcccacggacacaatggaaaggcgcccgcacctatacacgcaagggacatgatgcgtggtgctgaccaacctgtcatccccaccacccagaatggagccacagacacccacaataggaacgagaagaacacataggagatcgacacacgctaacgcctagcgtaaacgtggtatcaccacaaacaatgccctcgggggatgcacaccacccaatgctactgcactggcagtgatgctcctgaccaacgaaagtacataaagaa

SEQ ID NO: 181620 - DNA, 440 bp, Arabidopsis thaliana columbia
  unsure (1)..(440): unsure at all n locations
aaaaaaaaaaaaaaaaaaaggggggggaaaaataaaaaaaaggggaggnnnaaaaaaaaaantaaaataaatnaaaaaaataattaaaaatantaaaaaaaaaaaaaaaataaaaatantaaataaaaaataaaaaaaataaaaaaaaaaaaaaaaaaaaaaaaaaaaaaaatatattaaaaaaaaaatataataataaaaaaaaaaaatatanaattaaaaaaaaaaaaaataaaaaaatatttaaaataaaaaataaaaaatattggtggggggaggatganaaaaagaaaaaaaaaaaaaataaataaaaaaataaaaaagagataataaaatgaaaaaaaaaaaaaaaaaaaatgaaaaaaaaaaataataaaaaaaaagaaaaaaaagaagaaaaaaaagaaggaaaaaatagaaaaaaaaaaagaaaaaaataa

SEQ ID NO: 181621 - DNA, 555 bp, Arabidopsis thaliana columbia
  unsure (1)..(555): unsure at all n locations
aaaaaaggaacggggggggaagaaaaaaaaaanaaaaaaaaagaaaaaaaaataaattaaaaaaaaaaaaaaaaaaaangggggaggggtaaaaaaaaaaaaaagaaggggnnaaaaaaaaaaaannaaaaaaaaaaaaaaaataaatataaaaaataaaaaaaaaaataaaaattaaaaaaataaaaaaaaaaataaaaaaaaaaaaaaaaaaaaaataaaaaaaaaaaaaaaaaaaaaaaaaaaaaaataataaaattaaaaaaaaaaaaaaaaaaaaatattaaaaataaaaaaaaaaaataaaaaaaaaaaaattaatataaaaaataaaaaaaaaaanaaaaaaaaaggaagggggggggggggggaaaaaaaaataaaaaaaaaaaaaaaaaaaaaaaaataagtaaaataaaaggaaaaataaaaataaaaagaaaaaaaaaaaataagaaaaaaatgtaaattaaaaaaaaaaaaaaaaaaaaaaaaaaaatataaaaaaaaaaaaaaaaaaaaaaaaataaaaaaaaaaaaaaaaaaaaaaaataa

SEQ ID NO: 181622 - DNA, 295 bp, Arabidopsis thaliana columbia
  unsure (1)..(295): unsure at all n locations
cgacccacgcgtgccgctcgaatcaaagcagggnnttttgacactatattatttcttatctcgngaagnagtgttatngcatgcggatcgtttaatatatgaaagatgggaggatcataccaagatcgtcgagtcaaccaagagcagcattgaactagatttatcatcaaaactagtcacttttggttcctttcaaccttcgccaaattcgtttgattcttgaagctttcctgggacaatggatcnaactgggatgattgtgttgcatttggatcagcgcaacgtagattggttt

SEQ ID NO: 181623 - DNA, 475 bp, Arabidopsis thaliana columbia
  unsure (1)..(475): unsure at all n locations
aaaaaaaaaaaaaaaggggaaaaaaattttaattttaaaaaaaaaaaaaaaaaaaaagggaaggggtaaaataaaaaaaaggggaggggaaaaaaanaaaaaanaaaaaaaaaaaaaaaaaaaagaaaaaaaaaaataaaaaaaaaaaaaaaaaaaaaagaaaaaataagaaaaaaaaaagaaaaaaaaaaaaaaaataaaaaaagaaaaaaaaaaaaagaaaaaaaaaaataaaagaaatataaaaaaaaaaaaaaaaaaaaaaaaaaaaaaaaaaaaaaaaaaaaaaaaaaagaagggagggggggaaaaaaaaaaaaaaaaaattaaaaaaaagaaaaaaatataataaaataaaagtaaaaaaaaaagaaaaaaaaaaaaaaaaaaaaaaaaaaaaaaaaaaaaaaaaaagaaaataaaaagaaaataaaataaaaataataaaaaagataaaaaaaaaaaaagaagtaaa

SEQ ID NO: 181624 - DNA, 256 bp, Arabidopsis thaliana columbia
cgaagaacacaccaacaaaatttttttagccaagaacaaggggaggttacttgctaagcgggtctaccccaacaacattcttggccagactaaagcctaagcttaaccccttggagtgctcttgatctcaagtcactatggaaagacttgatggaccacaaggagacttaggaccctttcgtaaactcgctacctaccgaaatccgcatatgttggacaccgcgttatcgagacgcgagcttgcaaaacaactttg

SEQ ID NO: 181625 - DNA, 449 bp, Arabidopsis thaliana columbia
ctcgtgtcctaaaagaacagtggcgattccttgttgtattttggaataccgaagaggcacaggctgcaagtgctagatgcaaagcttctcgagcaaaatcaacctatatcagctctacaggatcgaagagctttgcacggatacttgacgaagagtcatgttctcgtgacaaggctcgtaagcgcagtgatgatgtcacagccatgggtgaaaagaggaggggtaggatgcataaccatgaacctggggccagccctagtggcctgaaggaaaaggcagcccttaaggcatccttcaaggaagctgtggatgcaaaagagattgctgaaaatgaggctgccacactgaggaagaagatgatggtaatggaggaaagtcagaaaaagctgcaggaggatttggctaacatgaagaatacagtgagcgccatgcagaaaatgatgtcaaat

SEQ ID NO: 181626 - DNA, 218 bp, Arabidopsis thaliana columbia
  unsure (1)..(218): unsure at all n locations
aaaaaaaaaaaaaaaagggggggaaaaaaaaaaggggggggaaaaaaaaaaaaaaaaaaaaaaaanaaaaaaaaaaaaaaaanaaaaaaaaaaaaaaaaaaaaaaaaaaaaanaaaaaaaaaaaaaaaaaaaaaaaaaaaaaaaaaaaaaaaaaaaaaaaaaaaaaaaaaaaaaaaaaaaaaaaanaaaaaaaaaaaaaaaaaggggggggggggggg

SEQ ID NO: 181627 - DNA, 280 bp, Arabidopsis thaliana columbia
  unsure (1)..(280): unsure at all n locations
aaattttttttttaaaaaaaaaaaaaaaaanaaaaaagaanggggggnaaaaaaaaaaaaggagggggagaaaaaaaaaaaanaaaaanaaaaaaaaaaaaaaaaaaaaaaaaaaaaaaaaaaaanaaaaaaaaaaaaaaaaaaaaaaaaaaananaaaaaaaaaaaaaaaaaaaaaaaaaaanaaaagaaaaaaaaaaaaaaaaaaaaaaaaaaaaaaaaaaaaanaaaaaaaaaaaaaaaaaaaaaaaaaaaaaaaaaaaagggggggggggggggag

SEQ ID NO: 181628 - DNA, 202 bp, Arabidopsis thaliana columbia
  unsure (1)..(202): unsure at all n locations
cggaancccgggccgacccacgcggccgagaagnncgaagacccagcagaaggggaggatacatttttggaaaaaancaagaaannggacgacgggcncaangcnnggagccgggcgnnggaagangaaaccccggaagcngncgagncnccaccgcaaggaaaaaaaanccacagaanngggncgnnnncggagaaagagg

SEQ ID NO: 181629 - DNA, 327 bp, Arabidopsis thaliana columbia
gaaaaaaaaaaataataaaaaattaaaaaaaattttttttaaaaaaaaaaaaaaaaattaaaaaccgccaaattttaaaatatcacggggcccacccaaaaaaccaaaaaaaaaaatgggctccccctctaaaaaaaccaaaattatttacccttcctttcccacataaaaaatttttaaatggccccccaaaataaaataacctgccccctgttaaaaaaactataacaggaaaaaccccggcgttacccaaaaaataaaccttcataaaaaaacccccctttaaaaccatcacctaataataaaaaaaaaaccccaccttatttc

SEQ ID NO: 181630 - DNA, 125 bp, Arabidopsis thaliana columbia
  unsure (1)..(125): unsure at all n locations
aaaaaaaaattttaaatttaaaaaaaaaaaaaaaaaaaaaagggaaaagggaaaaaaaaaaaaatggggggggggatannaaaaaaaaaaanaaaaaaaaaaaaaaaagaaaaatnaaagaaaaa

SEQ ID NO: 181631 - DNA, 320 bp, Arabidopsis thaliana columbia
aaggggaaaaacctaagggaccaagaaaacccaaacaacaacctccaaaacctgggggttccaaaccatttgaaaatacaaataaagaaacctccaccaaaccttacacctaaaaatggaaaaaaatccctgaaaaggtaccaagaacaaccaattccagccaccccacctcaaatcccaacttctaaaccaccaaaattctaatgccccaaaaaaaaaattccaagtaaccaccgcccaaaaaaaaagtaaaccgtccaaaaccaccaaaaaaaaccgacccattcctttgacccaaccgacccaccttcccacaaaac

SEQ ID NO: 181632 - DNA, 235 bp, Arabidopsis thaliana columbia
  unsure (1)..(235): unsure at all n locations
accaacccgnccgaacatattttaaaaccccaacgcccccctcttattttttttttatnccccaacaaaatnctgtcctttgtatatttttaaatggttttcttacaacaaaaacaatttttaacacgtaattttaaaccaaaaacaatttaaaaacccctaaaaaaaccccaaacaatcccctccattgaccaattaaaccacaaacaaattttctaaaaatccccactctaaa

SEQ ID NO: 181633 - DNA, 240 bp, Arabidopsis thaliana columbia
ccttgcgccaaaggtaatgtggttaaggaattaaaaccaacaaaccacggccgtggttgcggattcggcattggctgggaataatcaatcctgggtttttttttcgttttgccctggaccatcggttttttccttcaataattctttaggaacccccttaaaaaaccagaatttttagcttgcccagttggggctgtttttgctaccataatcgcaatctttggacaccgaaaaggatca

SEQ ID NO: 181634 - DNA, 272 bp, Arabidopsis thaliana columbia
ccccccccccacccccccctcccccccccccccccccccctcctcccccccccccccccctcccccccctctacccccactcccaccccccccccccccccccccccccaccccccctctcctccccactccccccccccccccccccccccccccccacccaccccccccctccccccccccccccccccccccccccccctcctcctccctcccccctcccccccccccccccaccccccccctcacactctcccctcaccccccacccc

SEQ ID NO: 181635 - DNA, 171 bp, Arabidopsis thaliana columbia
ctaaaaaaccacttaaaaaatactaggaaaccagcccccccaatcagaaacctcccattgtccaaggcaaaaaggacacctttggatgtaaaacctaacaaccaaccaattcccttaaaactttttttcaaaggttttggaaaaacctcccaagctaaaaacagccccttt

SEQ ID NO: 181636 - DNA, 242 bp, Arabidopsis thaliana columbia
  unsure (1)..(242): unsure at all n locations
gaagccaggaacgccttgatattaaaggtaccccgctttccaaaaaccntnaaattnaaaaaaaaataaaacccaaaaanaccacttaaagaatcctgttggggcccggctaccctttattaaccccaccaatcaaaaccattccaaagggagttttcccaaaaaactgtcctttaaccataaaaattccaacataacctcaataaaccaaggttttaaaggtaccaaaccaaaccattttg

SEQ ID NO: 181637 - DNA, 144 bp, Arabidopsis thaliana columbia
ttaattttaattggcacccaaaccttttttttaatttccttttcctccacaaaatccatcgtttttttttcctccttcctaaaccgccgtttttaatttttaactttcgtaaaaccctaatcaaccgatcccgaacccattttt

SEQ ID NO: 181638 - DNA, 210 bp, Arabidopsis thaliana columbia
caaaaattctaccctaatttcttttaaaaaccataatataactccccagggaaaattttcctttccaaattcaaaaataaaaaaaattaatggaatccattaaatttgtattcctccaccaaccaaccttaaatccttatcgtacccagaaatttaggaatttccctccaattcctaccaaaatccatcactgtcctttaaaccaaaata

SEQ ID NO: 181639 - DNA, 205 bp, Arabidopsis thaliana columbia
ggccgaccaggcgtccgacaaaacaaaaaataatgtttctcaccacttctttaacgccatacccggaacacacacatgatttttttccaactacaagcactctcccttccatcccataaaccaacaaacaatctctccatgatctcaaatcactcaccactcgtggctgacgtttcacatccatcactacatacaaagacaagtt

SEQ ID NO: 181640 - DNA, 186 bp, Arabidopsis thaliana columbia
  unsure (1)..(186): unsure at all n locations
gtggccggttttttaaacaattgggcctccccaaaaaaatnnncaatatatcacttatttttaaaccaaaaccaattaaacactcccacaaaaaaacacaaataaaacccctcattaaacttttaacaccttaacaattcttttcaaaaancccaacctaaaataaaataaaacttttccccaaat

SEQ ID NO: 181641 - DNA, 289 bp, Arabidopsis thaliana columbia
aactcacttttcctagcttttccttccagtttttttttcaacccagagagatatagatgcgtgtggcgttttcaaagaccaacaccggccatccaacaacaagaatcctcctctatagatctatacactaccctaatagtactactgaacaaatccagaacaactaccaaaagcacaaaaggaaccttacaaacaatcaaaacctatgtgttctagcattgaacagatccaaccaatcgataaaaatatcaagcttacacctattaaaaccttaagatgagcacacatg

SEQ ID NO: 181642 - DNA, 287 bp, Arabidopsis thaliana columbia
  unsure (1)..(287): unsure at all n locations
gggcgggcccacacgtacggagtaaacctggttcagctacaccatttatttcttccactcacacatnnaaatccaggcgcgtttttttatataaacatcacacccccccaaacacccctcanactccaccatctttatcatcaccaaattcacctccaccaacacatccaccaccacctacacctacacctacaccttaacctatatctaacaactaaactcaaacaacccctataccataacccttaccttctactataatcatcaaacactcctacaccatactc

SEQ ID NO: 181643 - DNA, 382 bp, Arabidopsis thaliana columbia
accacgcgtccgctctcctaatctgtcaagtccatacctcaattgagtctcagcaattaatacaaatatacctgctgatgtggacttttcatcccatgctagaagagttgatccttcaccaaactcgctctccttgcaggccacaaatatgcctttgatgcaaggaatgatcaagtctgagactgcatatcaaaactgtgctccatacatgtatggtggtgaagcacagtccacagttggagatgtcaccatcgcatctttcagcaatgattccagcaaccaatccctgaatgatcctcttgtcgatccagatgctcctacatttggctcgttaggacaaattcctcagaacttcagcctctctgatctgacagctgatttt

SEQ ID NO: 181644 - DNA, 253 bp, Arabidopsis thaliana columbia
  unsure (1)..(253): unsure at all n locations
gaagaattgattgaagtacacacccatcttataattattacacagacanngaacatcaatcgacttttttatattaatatggggtctcccccacaaaaagactctgcttcttctatattgaatccattacaataccatatctctaatcattcctttgatactccatattatctttttaacattcctaatcttcctgttgaaaccttacattctctactctctctcttctacaatctgcttaaatctaacagct

SEQ ID NO: 181645 - DNA, 342 bp, Arabidopsis thaliana columbia
  unsure (1)..(342): unsure at all n locations
ggccaggcggcgctaacttttccagaaatggcaaaactttttttctattggnggcaacctaaggcatgattgttatcaaactccgctgcacactncatcacatgtttgccgggaagccacaccatgtctccaaagcatgtccagtcaacattcatagctgtgatctgcactaatgcaactgtttcactgtcccctctttcgtcttctggaattactttcacttattctaggcaaatgttgttaatgataaaatctatgactttgacccatttaataacttcatcatcttttatgtttatcacaacgttatccttaatatatcattacaaatatcttttttta

SEQ ID NO: 181646 - DNA, 291 bp, Arabidopsis thaliana columbia
  unsure (1)..(291): unsure at all n locations
cgancacnaaaaccaaaggaatgncccaancagttttattcctcaccgacgncacagctcttcacgcccttgctttaaaattcgcgcgcgcccccaaaccacaccgtaacaccgctgtgccagttccggatcaagacgatgagaagactatttgtaagtacagaactgaagcgtctacagtgcacggaatgacaccgtttggggagcttattgacagccaaacccaggataacagtgatactaattgtctctgttttgcgaaagggtcttgttactgatacctcttacact

SEQ ID NO: 181647 - DNA, 320 bp, Arabidopsis thaliana columbia
aaaaaagagaaggaacaaaaaaaaaaccactctacaaaaaaaataaaaaaaaaaaaaaaaaaaaaaaaaaaaaaaaaaatacaaaaaaaaaaaaaaaaaaaagaaataaaaaataaaataaaaaaaaaaaaaaaaaaaaatataaaaaaaaaataaaaaaatcaaaaaaaaaaaaatatataataaaaaaaaaaaaaaaaaaattaacaaaaaaaaaaaaaaaaataaaaaaaaaaaaatgaaagaaaaaaaaaaaaaaaaaattaaaaaaaaaaggaaaaaaaaaaaaaaaaaattaaaaaaaagaaaaaaaaaataaa

SEQ ID NO: 181648 - DNA, 340 bp, Arabidopsis thaliana columbia
tggaactttcgagctttttttttgccggttttttaaagcttaatacggatcttcaatttgggaggggacttaaaaccctgggtttttcaaaaatcaccaaccttgttttttcctgccaatttttatacctaatttccacctatacccaaggttaatggaccgttggccttttcaactccagaacccacccagctggcctaagtggctcccgtccacattgtttaaattcctgacctgtgcctaaaccagttccagatctggaggctgttaccaaacttgtttttccttcggggttttttttatcaattttggaatccgttttttgatgatagcaagaatt

SEQ ID NO: 181649 - DNA, 430 bp, Arabidopsis thaliana columbia
  unsure (1)..(430): unsure at all n locations
ggggggggaaaaaaaatttaaaanggttaaattaccaaattaatataccccccaaccaaaaaaaaaacgcccgcccttataaaaaaaaatcggcccctttaaaaaaccaaacttaccttccccttccttccaatttataaccttttttttattccccctaaatttaattcaatttcccttcttttaccaccgngggaacaggaaaacccccggccgaccccacttaaaattttttttattttttcccctttcccccaacggcggaaaaaagaaaaagcccccccccaaccccctttccaaaaaangcccaaccctaaatgccaattggaccccccccctttacccccccattaacccctcctttttttttttttccccccaaattaccccttacatttcccaatcccctataccccccttcttttccttt

SEQ ID NO: 181650 - DNA, 300 bp, Arabidopsis thaliana columbia
  unsure (1)..(300): unsure at all n locations
cccagagggtgcgtgaaaaatttttttagttccaataaccaaccggtttaacaacctttttcttgaaaaagtaataattaatgccaaaaccatcccccccttaaacctgaaatctttaagcctaaaaatcggcctttttaaacaaaaaccagctcccnnggaagaaacaaccttcaccaccatctcctttggaaaaaatgggccaactaaatccaaggaaatggagccagcccgaccccaaattgttaacggtttaataaagggntaactctaaggtaccaaaactccattagccaaaaa

SEQ ID NO: 181651 - DNA, 320 bp, Arabidopsis thaliana columbia
  unsure (1)..(320): unsure at all n locations
cgttcaatttgttaaatccaatttccccncaattgttttctctcccaatacaaaaatgggccccgctagttaagaaggaaaaggggcgccttaccctcgtcctgttgttgaacccagccaagttcttaaacctgtccacggggcacttcttccagttccagttaaggccagcggggggggggggggcatgtcctaaggcatgggttaaaccatggctcagggaagggctttgggtcctggaagtgcatttttccacaggcctgnggaataagggaggggcccacaaacaatccagcagggggcggtggaggttgattctg

SEQ ID NO: 181652 - DNA, 387 bp, Arabidopsis thaliana columbia
  unsure (1)..(387): unsure at all n locations
tgggtaatcaccctcccatgttntcttaggattttcccggtccggggtcaattaatggcccccggaaaggcctcggccagcgccagcggaatttgaaaaaggaatggaccgggattttgaccctgttctttccatgcctcctttaacctaaagtagtaggtaaaccaaataggtccatataaaaaagtcttcttggttcttttcaatccaatctaaaatatttcgcctcggctttcctatccacccagcccaaaaaaattaatttttcatcctaaaaattaaaaaagcccaaaaaaaaaaaaaagggccggccgttttaaaggacccaggtttccttcccctgccatccaacgtcatagctttattatagggcaccctaaatccaat

SEQ ID NO: 181653 - DNA, 256 bp, Arabidopsis thaliana columbia
  unsure (1)..(256): unsure at all n locations
aaaaaaaaaanntaatttaccttttccccaccttaatctaaaacttttctctcaaaccaacccacccnttaaaaaaattaaaattttcctttttttttttccacattcaaagccaaaaaccctaacgataggccttaccttaactcacttttcatttaaatacttaacctaagatttttttattttccccctccttaactattattccattttcttttaaaattctcatttttttttttacttttatttttatttt

SEQ ID NO: 181654 - DNA, 444 bp, Arabidopsis thaliana columbia
caacccgtccggaatttttaaaatggattttaattaataattttttttttatggttaccttaaccgacctagtaagatgaattttccagcttccgtttaccaaaaccccaattgataattaatttttaatattttaataatacctacttttatattttccaaaattttgataaaacctttttaaaaaaaattgaaccaggccaatctaaaactgttgttcaattcaattccaattattttttattttatttcaaattttgttgactttttaccaaaaaacaattaaaaaacctgatttgaaaaaaaaaagggattgttaaaaaaaaacccggaattgggttaatttgccctatttgtccaaataaaaatcggccaaatttttctttttactcggggtaaaccttaaacttaaaaattggattaaaaaagggaagaacccctttc

SEQ ID NO: 181655 - DNA, 358 bp, Arabidopsis thaliana columbia
aaaaattggttcccccaacaaacaaaccctatacctttcaatacccttaaccttaatctttatccccctccccttttacatccccatcaaccaatttttcatcccagtcttccaaaacctcaaaacacccaaccgaaaccccaaaaaaaaaacccaagccccaagcccgattttaacctgtttatctaacctttttttattccacttcgaacccccaaaaccccacttccgtttcttccaaacgtacaattaacctacctgcccaattcctaaccaacccccaaaattttaattatcttatccttcaacatcaacttttttaattctcctatccttccttatgaaacaatttttttct

SEQ ID NO: 181656 - DNA, 388 bp, Arabidopsis thaliana columbia
ccaggggccgggaaattttccataatctccaaaaagctcggtattttggcgaacccggttttaaggcgaggggttggttcttgaacggttgggttttaaacaatatcaaagatgttaaaggtgagaaccagaaccacctcctgagggttggtttgcagggccagtcggatcataaaaccaggtttgggggtaccataaactcccatttgcagaggttaacccggggaaaaaggtaatcgaaggcaaggggatctggtattccatagaccgatggatgaatccgtggtccgacctggcaattggcctttgggtccttggaggattgtaaaaaaagaactttggccacattgttaatcgaaagaaaggataatgggttttttggttttgc

SEQ ID NO: 181657 - DNA, 365 bp, Arabidopsis thaliana columbia
  unsure (1)..(365): unsure at all n locations
gggnccgggcaaaaatttttcaaccataaaattgctnggtaaatttttttggcctctaaggtttcctccgcccctaagaacctccatggctcacccatgctttccttccgnggttttaaagaatttaaattatcctgttccacataaatggcaaaaaatgcccggaaataaaccatcttttttaataccggaccaccccccgaaccattaaggaaatccgccctttaggaatttacctaaggtagcccatccggggtaacaaggaaaaagttcagaaccaattaaaatcctcaaaccaattacccttttcaaaattccagcctccattaagctgcttaaattaaaaaaagaatcccccttttccc

SEQ ID NO: 181658 - DNA, 321 bp, Arabidopsis thaliana columbia
  unsure (1)..(321): unsure at all n locations
caaaaaaataaggacccccaaacaaaaaaaaaannaccaaaccaatgaaaaaacaaaccaacgaaaaaaaacccataaaccaagcccccccccgaaccactattctaaatgaaaggggncaaaccacccaccataaaaactccacaccctccaaatccaaccaataaaaaaaaggccaccaaatcccggcccccccaattaaaaccccccccataatccaaaactcaaccccaccccttaaacccaaccaaccacccaaaaacgccaaaggcccaaaaaaaaaaaccaaaacccacccccctccaaaacccaaaactaaca

SEQ ID NO: 181659 - DNA, 443 bp, Arabidopsis thaliana columbia
  unsure (1)..(443): unsure at all n locations
accaaggcttccaaaaacccaacctcccacaatttaaaatttttctcacctaaccttcccccaaaacccaccgttngttgttttgaaaccagaggttccacaacaagaatttccaaaaaaaaaacctttcaaaaaattccccttaaaagaagccaacctcaatctttttttcaccatgtttaccaataatcttgcaaacctctttttttcccgaattcccaaaaggttttttaaagaattaacaaaaaaccctatgcttttaattaaaaaactccccaggccaaaaaaaaagccaccacttgttaaaaacccaaacccagtaaaaaccaacttgaggaccataatcattgtccctgaaataattgaaaccataattgttttgtccaatgaaaaaactttaaaccaattgaaaatcaaccctgaaataattggacatttccttt

SEQ ID NO: 181660 - DNA, 366 bp, Arabidopsis thaliana columbia
  unsure (1)..(366): unsure at all n locations
tttttaacaagagcttccaaaaacaaaagnntaaaaaatttaacaaaccttcatttccaaaactaaaaccaccnggnctggccaatattttaatttatcatcttttaacaaaaaaaaaaaggaaaaaaaaaaaaaacctgaccaaacccaacccaaaaaacaaaatattcttaaatattccaaacctcaaccacccaacattaataatattgctcaaaccttaacaaatttttccacttgtaaatatcacaataaactttaaaacttttttttaaataatttaaaaactcttttattaaaaataactttcctaaattttaacttcaaaaaacctaaaaatttattcaaattttttaaaattttttt

SEQ ID NO: 181661 - DNA, 415 bp, Arabidopsis thaliana columbia
tcttaacaaaaaaatttctacttcttactaattccgcaattctaaaattcccgattccgacccttaacaaataatggttcccccaaaaagccggtttttaaacccaaagaattaaaccctgaatggaaaggcctgcttgtaattgaaggcttgtttgtaacatttttaatacccaataccgttatgaccatgaatcctaaaaaaaatttacctccaaggaaaaaaaaccctttttccaaaaaaaacttaaaccttaaaaacttaaaccaggaattccttttccccgccaattaaattccacttttttaaacatcttgtttttttaacctgtaataacaatttaattgaaacttttgattggaaaagtaccaaacttcctttgttttgttttggtaaaactacaaaaattaaaatt

SEQ ID NO: 181662 - DNA, 310 bp, Arabidopsis thaliana columbia
aaaaaaaaaatttccataccaaattttttccctgtaaagggggttcccatgggatggccggggtattgggtccatcttgatgaatcaatggatcccggcccttaactggcgggaaaattaaggcttacgggataagtagctggttggccagattcaatgtctttataggaattaccagttttggttccttccgcccccgtttttgatccaaggtgtggcaaaggatgtgtctttaaccctttaatgactggttaaggaataaccaattttggggggggtggaaatattctaggggggtctttaaacaaat

SEQ ID NO: 181663 - DNA, 172 bp, Arabidopsis thaliana columbia
  unsure (1)..(172): unsure at all n locations
ccaccccaacccccancaacccccgcncgttattaatattaaagcccttccaaaaaccccaaataacaaaaaaccccgaagttttttaattaattgttaaaaatcaaaaggaaaacccattttatacctaactcttaatccatgaattttaaaccaagtaagncaattagga

SEQ ID NO: 181664 - DNA, 128 bp, Arabidopsis thaliana columbia
  unsure (1)..(128): unsure at all n locations
tttaaaaaaatggggcgtttccaacaaaaaaaannngcccaagcctcaataagccccctaaaactcctacaacgttttttccacctcctccttccaacttaacccttaaaaaacttcccaaaccaacc

SEQ ID NO: 181665 - DNA, 78 bp, Arabidopsis thaliana columbia
caggaaatccccgtaggattaaccacctcaggcaaaaaggagggcccaaaacctcagccaagggttggtaaaatgggg

SEQ ID NO: 181666 - DNA, 381 bp, Arabidopsis thaliana columbia
cccaagaaaaaaaaaagccccgccattttttaaaaaaaggcccggtcctaaaaaaaccgaacctaaaattgggccttccgggaaaaaatgtgccaaaaaaaataataaaaaaaaaacctttaccgaaaataaaaataccgtccccgggtagaaaaagggaccaatgtcaaaccacctttttttcattttttggggacccccaaaagttaaattattctccgccgcaaaaaacccatttgttgttatgacacctcctttggccctgcggcgcttattaacaactctttctacctaaactttcctcccccaatcatttcttccttaagtttatcacatacaatcttctctcttcaacttcttctccttacatttcttccttct

SEQ ID NO: 181667 - DNA, 437 bp, Arabidopsis thaliana columbia
caagaaaacccaaaaaaatcaaaattaaaattctccttccgatccatatatttggctcaccggagcttaaaatcaacctactgcagtttccgaaccgggttttttttttccttccaatcaccggggaattaatctcgggggaagaaaaagggatcctttaccggcggaggatctgccaccaaccggcggaataccaccggaatcgctccttaactcgttaattccgccccatgggctacctttttccatcgccggccgtccccaaaaatggcccctttcaagaccactcctcgcaactgcattggaggcagcccaccatgtaatatccacttttttcctgggattaccagcaatcccaagggcgaatcccatcgttggtgaaaagactgttaacaaactggcttccctttggctggaattccccgggggaagctttg

SEQ ID NO: 181668 - DNA, 211 bp, Arabidopsis thaliana columbia
  unsure (1)..(211): unsure at all n locations
gggcccacaaaaaaaaaaaaaatntcttaaaaaatggctaattcataataaaatacccttttgtttccctattcaatttcgccattgttggcaatcccatgggtacctaatccattggggaggttaagccgggctttttttaggaaacaccgggttttccatggccatggccttgggggggaccgttcagggaagaccaggaaacccattt

SEQ ID NO: 181669 - DNA, 323 bp, Arabidopsis thaliana columbia
  unsure (1)..(323): unsure at all n locations
gggnaaggaaaaaaaaanccaattcttttgccaatgatttattaancccccaacaaaccnaaaccggccctttttttttaaacccggcccacataaaaaaaactttacaaaaacaccacaaaagtaatttaaaattcttaatttgccatccctttaattgttaactcctaattaacctccacgaaaaatgttttccacaaattttaccatttttaacaaccttaaaaactttaattacctgtaaaataataataataaaccaaacctcttgaattgcccattattaaaaatctctaattctctaaaaaattttttaattttta

SEQ ID NO: 181670 - DNA, 349 bp, Arabidopsis thaliana columbia
tttttaaccaagggcaacacccaaaaatacactaacctaatattttttgttcccccactctgaattctttttcttcccatttttttgattgataggtttttaagcccaaaacggcctaaaaaaataactaaattcttatccaattaactcaaactctcttattcttaattttccactttccttcttaaaaactttttttaacaatttaaccccaaacctttttttcaataaaaaatatttttttttaacttacttaaatttaatttatttatatttaatcttatatattacaaaattattatattctttttaaattatataactttttattttttatacatctcatcat

SEQ ID NO: 181671 - DNA, 368 bp, Arabidopsis thaliana columbia
  unsure (1)..(368): unsure at all n locations
ccaagccgnccgaaaaaaaaaaaaaaataaattaaacattttttttatcacccccacaaaaaaaaaaacccgcccgcctaaaaaaaaaaaaaaaaaccccccaaaaaaaaaaaaaaanccccccccccccaaaaaacaccacaaataccccccccgccccccccccataaacccccttcaaaattccccccaaaatcaaaccccctccccctcttttaccaccccctaacccaaaaaaccccctccctcccccacctaaacccccctcaaaacccccccccttccccccttttcttaaatattaaaaaccccccccccaacccccctcccaacaaaaccccccccctaattcgccaaacccccccccc

SEQ ID NO: 181672 - DNA, 217 bp, Arabidopsis thaliana columbia
tttttctttctttttatatttttttttatttttttcttttttctttttttttttttttatctttttttcttttctctttttttttattttttttctttttttttcttttttttatttttatttttttttattcattttttttttttttttcttttttattttttttttcttttttttcttatttttattttttcatctttttaatttctattttttt

SEQ ID NO: 181673 - DNA, 427 bp, Arabidopsis thaliana columbia
  unsure (1)..(427): unsure at all n locations
caaccggaaggccanggccaccccttcccaggtttatatcatttaaaccanccnggggttcccttgtaaataatccattctgggcggggattaaataattggaggaaaaaagagtccattaccaagacttaaaacctcctttaatctcaggggttaataagcctgggataatttaaaaaagaataccctaagttactggggcatggttagaactttcaaccctggcgnnncttttaagtagttattttcctaaaccgaccccaagttcttccttgggagcctggcaaccctaaggcccactcctggttctgcattaaacggaattaagaaccatgtttcccaaaaaaaaaaaaaaataaaaaaaaaggggcggcccttttaaaggatccaagtttacttccccgtgcttgcaaacgaaaaacttttt

SEQ ID NO: 181674 - DNA, 217 bp, Arabidopsis thaliana columbia
  unsure (1)..(217): unsure at all n locations
ccaaaaaagnaaccgacganncgcatacccaaccatttaaaaccctcccnnaaccctccaccacttccttttttcaacatggttaacctaaaatcctgtccttttaacaaacctttaatccttaatttaatccttccactccttttcctttacttaaccgtccttacttcaatctcccacaaaaaccaaaccttcccttttaacgcctttgtttaac

SEQ ID NO: 181675 - DNA, 429 bp, Arabidopsis thaliana columbia
  unsure (1)..(429): unsure at all n locations
aaaaaaaaaaaaaaaaatttttttaaaatttaattatttaacncaaannaannnnnnggccccgcccttttttttaaaatttcggcccttttaaaaaaaacnaaatatttttttattttcttaatttaaattaatttactttcctttttttttataactttttaacttttatttctttttttttacttaatttaattcccttttatatttctcccccaaccccacccgccnnattttcaaattttttttttttttttctcccattttaattttttttccacccngaaggccaangggaactttttttttttttttttttatttcctacaaatatttgtataccccccaaaaaaacccttaattttgcattccctttatcttcctcttcttttctttttttcctttctttattcctttttttttcttttt

SEQ ID NO: 181676 - DNA, 305 bp, Arabidopsis thaliana columbia
  unsure (1)..(305): unsure at all n locations
actccctccaaaagattatgattctaataatcaacatggggcanctanaaccggcccgcgactatanaaaaaccggccgccaccactaanatcatctattaccttcaacgacgttaggcttgttctttattcccctactattttacatgcacattgtacaaattgttatagtacgtctgcatcatatgaaaaatctctatctgaaacccattataataagcctatgccttatttccgtatttaacctctatatctaaacgttttttcaggcaggtcggaacaccaataacacacagacgatttct

SEQ ID NO: 181677 - DNA, 187 bp, Arabidopsis thaliana columbia
  unsure (1)..(187): unsure at all n locations
ctggaaatttgtacataaactccgaaaaagtctcgggtatatttggcgaaacccgtgtattgaagcggaaatggtatctgtatcttggagacggggatcgnggctcttaacatanntatcaaanngatgatannaatgtganngaaacacgnnaagcaactttctctcgagtgggtttgtatttgca

SEQ ID NO: 181678 - DNA, 330 bp, Arabidopsis thaliana columbia
gaatcccgtcgacccacctcgtccatatatataaaatatgctttgttatcgccttaaagcgaaagatggagagcaacataaaaaaaagggggtcttttcactatttcttcttgaatgtttttttctttctttggttcttattgaaattgtgatttttgtgcttttttctaataatatcagcagtttttctaaaaaaaaaaaaaaaaaaggcggcgtctaagaccaacttactacctcatgcactatacttttatggtacctaaatcaattcactgccgcgtttacactctgacggaaacccgcttcccactaatccctgcgacatccctt

SEQ ID NO: 181679 - DNA, 145 bp, Arabidopsis thaliana columbia
  unsure (1)..(145): unsure at all n locations
atnttttttttctttttctttanntttcttattnaaattgctctattcttcctcccttttttctaataatatcacccaatttttctataaaaaaaaaaaaaaaaccccctcccctctaaattatccaatcttacttactcttcca

SEQ ID NO: 181680 - DNA, 237 bp, Arabidopsis thaliana columbia
taaagatatgaaagccgatgttttttatgttttttatcttgatgaagcttccagggctcgttttctttagtctgtgcgaaggctctcttaacttatgggttacatattatacaaaccgtcgttggcaagactggttcctacttgtcttctccatgatttcattgaacatgctttgacaagagataatatggaatagaagagagaactgatcaaacccataccaatagacagaataat

SEQ ID NO: 181681 - DNA, 285 bp, Arabidopsis thaliana columbia
  unsure (1)..(285): unsure at all n locations
aaaaaaaaaaaatntannntnnnnnnttntctcattcccacctcaaaaaaaaaaaaaaaaaaaaaacaaaaaaacaaaataaaaaaaaaaaaaaacccaaccaaaaaaaaaaaacaaaaaaaaaaaaaaaaacacaccaaaaaaaaaaaaaaaaaaaaaaaacaaaaaaaccaaaaaaaaaaaaaaaaacaaaaaaaaacataaaacaaaaaaaaaaaaaaataaccaacaaaaaaaaacaaaaaacaaaacaaaaaaatctaaaaaaaaaaaaaaacaacaaaa

SEQ ID NO: 181682 - DNA, 242 bp, Arabidopsis thaliana columbia
  unsure (1)..(242): unsure at all n locations
aaaatatntcanaatcacaatataatancnttttntttcccattttcattttnacaatctatccaattccattccttccttatacatttttcaacctaatcccctctttttctaataaacaaccnattatacattctcaatttcttcaatctcatcttttacccaattacattatatccatttctcaaagtatccttagcttcacttttttntatcaactttacacttcctctactttttat

SEQ ID NO: 181683 - DNA, 397 bp, Arabidopsis thaliana columbia
  unsure (1)..(397): unsure at all n locations
acccacgcgtacnaaaaaaaaaaaaaaaaaaaaaaaaatttaatttaaaaaaaaaaaaaaaaaaaancccccccgctttatttttattcttccccccgccaaaaaaaaatataaaaaannntcntcccttttttaatttccaaactttcttcccctttctttcaactcaataactttttttttttttcccctaaattaaattccctcccctcccttttacaccttctaaccttaaaaacccctcccttttcccaacttaaactccttaaaaaacttccccctttccccacttttaataataccaaaaaaaccccccccttccccccttcccaataattaatcattttaaatcccaaattccacccccccttttctccttcttatatccccttgtttt

SEQ ID NO: 181684 - DNA, 113 bp, Arabidopsis thaliana columbia
ccggcccgaccacacccgtccggcctttttatctttttttttccgccctggtttttggcgccggaaattaccaacaaaagcggtttccaatcgcctttttttggttttatggc

SEQ ID NO: 181685 - DNA, 229 bp, Arabidopsis thaliana columbia
aaggaatcggtaattttcgtggccggcagcaccggaggggccgggccttaacccggcataaagggcggaaaatattccgtggttgggattaagaaggaacctgaggaaggcagaaaaggaagcgggggaaaccgggaaagagggctttgggccggcggaaaagggctttattccggcggaaaagggataaaaaccgccggaaggggggtttaaaccggtaaaaaaggaa

SEQ ID NO: 181686 - DNA, 377 bp, Arabidopsis thaliana columbia
gcccggcccggaatcccggggtggaccacaggcgtccgaccaggcgtccaagctttcttttatgcctttttcccttaactaaacgccaagccggagaccagggtaattacccttttaattgccccgggttttttccccggtttccgcagaattgatccaaagttggacgttgccgccgattcttcctacaaatcctttttcaaccgggccaattccgtaacccgctcggttttttccaatggttctccaaaagggtccccaaaaggggttgttgccaggatggattccggaaggggaatcgtgggaggaaacgggaattggaacggaattaaggacttaatcgccaagttaatcacggaactcaacagggcaacttt

SEQ ID NO: 181687 - DNA, 205 bp, Arabidopsis thaliana columbia
tccgaaaaaaaaatgaagcgaacctttttgggtttcccttaaccaaaggaacctgaacctggggtggagcctaacacgggcttttggcttgtccatcagctggtgccaaatgttaataaggcaccggttctgtgaaaggaggccttgtccaatttttgtttcaggcctttaaacctcattaccccaagcttgggtgattggaccc

SEQ ID NO: 181688 - DNA, 383 bp, Arabidopsis thaliana columbia
attccttaactaactctttttttttttttaaaaccatagctcaccattaaggacccactaaaaaggatcctttttccttttgttctccggggattaacttcctaaccaatcatggcgtcgccggggggataagcaggcgtggaccctgggccattccgtcaaaccttaaccatcgattcggggttcctttttgattccttttaccacgacagggatttcctcgttaaagcttttaacagatccatttccacttccaccgaatcatctccttttcctccttcatctttcttggacttttaaaccgccgccgcggatttttttcttcctaaaactttttccaccgtttttttgggttaagatccagaaatcccggccgttggggc

SEQ ID NO: 181689 - DNA, 334 bp, Arabidopsis thaliana columbia
aatgggccaaataatggcaggtcctggggttaggttttaacccgggggggggcttggccgaaatcagaaaggcaggagggattaattccaatggaaccatgaaaccggggttggccattgcgatgaaccaatccaggtttttttggactaaatttgttgttaccgaaagggagttggggcagatgtgcatttttggcttttaaggagggaccgttgaaaccaaccaacccggaagggggaaaaattggggggaggaggtaacctcggatcgatgggttttggtttttttgggctttctttaactgaggatccgttatttttaatttagggttcc

SEQ ID NO: 181690 - DNA, 282 bp, Arabidopsis thaliana columbia
  unsure (1)..(282): unsure at all n locations
ggnccggaatcccggggcggaccacacccgtccggccaataaccaactgggtccgcttggaactgttccgttggaaccaccgggaatggttgacctaggcgttgttttggcccaggtaccatttgggtaaagggagcatgtccctcctggagcctcgcttccaatggcctacggaaatatttaatccccattttacagcaacagtttcctggtttttgggagggttccacctttaaaaagtttttgggaaaaattccaaatctaatttaattttacagggga

SEQ ID NO: 181691 - DNA, 281 bp, Arabidopsis thaliana columbia
cctgttttcttgttcccaacctttttttcttcttaaaccggaattgcaaagctttgccaggttcggaaaactttgggtccttccaaaatttccttaccatcaacgggcgttggacccttaaagctttcccttttaaaaacctaggcgggtaacgtttccttaagagccattattggtgaagtttatggcggaaatcccgtgaaaaaaaagcgcataccttaatctggatttggaccatcctattggaaaatttacggtttattaatccattactgggcctt

SEQ ID NO: 181692 - DNA, 272 bp, Arabidopsis thaliana columbia
cccggcctggaattccggggccgccccacccgtccgggggttttggtttaagcgcatggaaccgtttccgaacttttgattgggattttggttccaaatattgggggatcaaggtcaatcctcaggagggggattcctataatggtggttcgggaccgggaggggtttgggggggggggttccactagagcgttttgtttggttgaatttgagagagaatggtttggccattaatcggacctgcctaatttggttgggcccccagggatttt

SEQ ID NO: 181693 - DNA, 383 bp, Arabidopsis thaliana columbia
ccggcggacccggcccggaattccggggcggaccacacccgtccggggatggttttttttttaacaatggggtggtatttctccgaacaacggcttaagatccattcttggggacgttggaatttcccttttaaatattaaatcccgtccagggggttccggattaggagtggaaaattaggactcgtggtcggttttgtttaagttcccaacgttgagttccgaccgggacctgaggacttaatttttaccttcttttttaaggtggcaaatagggatgggggtttgacgttaagccttgagcagaacaggggggtgtgccaggtggccggggggtttaaaaggtcctgggtcagggagcctgccaaaaatcctttaatttt

SEQ ID NO: 181694 - DNA, 236 bp, Arabidopsis thaliana columbia
  unsure (1)..(236): unsure at all n locations
cggccgacccggcccggaancccggggcggaccacacccgtccggtggtttgaactttgcccaaacttgtcctttgttgggaggaggtccatccttccaaacctgaattaaacaagccggtgcggcggcctttgttaataatggtttttattttgcaacttggcaaatttcttgtttttctacaccctattgataatgatccttatgtccggatattgtggggaaataaaactgtt

SEQ ID NO: 181695 - DNA, 388 bp, Arabidopsis thaliana columbia
cggccccgtgggggggttaaaaaccatttagcaaaggattttgtgagggcttaaatattgtcctaaggtccatgaaggttgggggtaaacccaaagggatggttcaaccatcgttgggattgggggtaaacggggctgaattggaatcggtttggcagattcctcctaaggcttcgtgggaatatatagttgaaatggatggagtttaaatggcaccagtttgagtggtggtccgtccagttttggtttaattcccaaatccttaaaattttgggtgtgttaaggttgaggggaaaccaaagggtaaatttttgtttttttgggggtcgttgtgattgaaccggaataaaccggatcaaaatcttcggtttgattaatttattttttt

SEQ ID NO: 181696 - DNA, 350 bp, Arabidopsis thaliana columbia
ccccggtccgccccacccttccgaaaaaaaaaaaaaaaaaaaatatttatatttaaaaaaataaattaaaaaaaggaaaaataaaaaaaaaaagaggggtatataataataaaaataaaattaaataatcatttatttataattaaaattggggcccctccttcttaaattcccaattttttcccccctttcattttttctatatttttttttttttgtccccccaatattaatttctcttccctcttttttaaaatttctatattgtaaaaccttttcctaacccatctttatttccttttattaaattttattggaaacacaaagggtaaattttggttttttttggg

SEQ ID NO: 181697 - DNA, 440 bp, Arabidopsis thaliana columbia
cggggcggaccaacccgtccgaatccaggtaccattttaaaccttttccatttttatttagaaccattagttgggagtggggaaactctgaagtagggaggaacccccaccattggcgtgtttttccccgccaatttttttttaattttttcaaaatcccaatttaattcccaatttttaattctccctcctttcaagaacccgcttttttctctttttccgaactctggcttcctccaccggtggattaacctttccaaccgcctctcgtttcttgaaggctcctgtccctctggaagtattagttaaagagctttcgtattcaacaccgccgtttaaaagggataaaccttctcccgctaaaaattttccctttcaaagttaaaaagatttaaactatcgtagggtgttttaaattccaggtttcatgatgtattaat

SEQ ID NO: 181698 - DNA, 409 bp, Arabidopsis thaliana columbia
  unsure (1)..(409): unsure at all n locations
gcccggaattccggggcggaccacaggcgtccgttttttcttttttttaaggttggaaaaccataaaaaccaaantggttggaaaaaattggggggaaccggaggaaccataaaagtattggggcctttgacctttaaaccaccatggttggatgttgttggacatgcaaaattagtggaataattggggattaaccgccggccgttttcgccggggaattaacgggggccgaacttattcgggggtctggcgggaaggttgggcctaatagccttggttttactaatcctagccggctttaactggggcttggaaacctcgggggttaactccggcaaaggagtgtacgaggaaaaaaagagtcgtttttgttgggaaggcggtttgcgggtcttgcaagtaaaaggt

SEQ ID NO: 181699 - DNA, 238 bp, Arabidopsis thaliana columbia
aaaaaaaaaaaaaaaaagaaaagaaggagaaaaaaaaaaaaaaggaggggaaaaaaaaaaaacaaaaaaaaaaaaaaaaaaaaaagaaaaaaaaaacggaaaaaaagaacaaaaaaaaaaagaaaaaagacaaaaaaagaaaaaaaaaagaaaaaaaaaagaaaaaaaaaagaaaacaaaaagggaccaaaaaagaaaaaaaaagaaacaaaaaaagaaaaaaaaaaaacaaaaaaaa

SEQ ID NO: 181700 - DNA, 354 bp, Arabidopsis thaliana columbia
cgggcccggaatcccggggcggacccacccgtccgaattcctctttttctccttctccttccttttacccgttaagggcggttttgtgggaactaacaagtttaattgggggaatttaaccattcaaatttaaacctaaacctacaccaccaccaaatttaactctcccttctcaaccattttcccaaaggcgaagaaaggttctggttatcaaataatgggcggtggaagaaacttcttaaaccgttttttaattttcctttgagctggtttccgggattggtccctggttggttaactccaccacattttttttaagttcggagtccatggggcaggtgtttgtggaaaata

SEQ ID NO: 181701 - DNA, 248 bp, Arabidopsis thaliana columbia
  unsure (1)..(248): unsure at all n locations
gggaaggaacccggggggcccacgcgccgaaaccacacnggaacaaaattggaacccnaaaaaaaaaggagagaaggaaggaggaaaaaaacaggaggggcacaaaaaaacnggacaagccaaagggggaaaagagggaccaaaccgggcacaaaaaagaaagcaggaaaaaagggggcaccagggaaaagggaaccagggagaaccccaggaccaaagggccaaaaccaaaaaaaagccaaaggacc

SEQ ID NO: 181702 - DNA, 284 bp, Arabidopsis thaliana columbia
ctttttcttttttttaaggtgggaaaaccataaaaaccaaaccggttggaaaaaggcggggggaaccagaagaaccgtgaaaaaattgcggcctttgggctttaaacaaacatggttggatgaagttggccttgccaaataagtaaaatatttggggattaaccgaccgccattttggccggggcattaaccgtggccgacctaattggggggcctggcggcgatgttaggcttaatagccttggcttaactaatcctacctggttttaattgggcctggcaaa

SEQ ID NO: 181703 - DNA, 382 bp, Arabidopsis thaliana columbia
  unsure (1)..(382): unsure at all n locations
ccggcccggaancccggggcggaccacacccgtccggggggttttttttttgtatccagctaaaaccgggggaagaacgtttggaggaaaggggattctttttcttaaccggggggggttaaaccagatcgttgcaggaaatccctacaacggggagtttaagccacgggttttgggccggttaggcttcattcccaaagtaggaccggtcggatatcctggtttaacggttaagaattagctaacggggactttttttccatgctaacccaagggtttacggcaccctttccaaaaccgttcaggacatttcttaaaaccaaatttaacttgttggggcaaacctttctttggtcaaaattgatagggaatggaaggtaaa

SEQ ID NO: 181704 - DNA, 243 bp, Arabidopsis thaliana columbia
gacagggacttcaagggctggttatacggggagcatttaaggctgtccttgaaggaagttaacggatcaacggttaaaaccgttggaccatttaaggagtttgggtggggtttaaaagaaccggcctggggatcagggttaacaaaaacgggtaagtcccaaaaagtagtcgccggccatggattggactcgtggcggttgtttaagccgggggttcatccgttaaagttgtttttgcctaat

SEQ ID NO: 181705 - DNA, 273 bp, Arabidopsis thaliana columbia
  unsure (1)..(273): unsure at all n locations
ggggnggaccaaaacgnccgaggggaatctatttgatgccgcattgccccctccaaggcccccttccgccgtgggggttccatccctgccccagggcaccaggttccttccattaaccgtttgtaagtcatcctgtggaattccgggtaaccgtaaggaccaacagggccttaacttctatccaaggcatcggtttaggagtttgttcaataaaggtgggcccactaatgggtaggaaatattttaatattctatcttcccacccgtgcctaa

SEQ ID NO: 181706 - DNA, 382 bp, Arabidopsis thaliana columbia
cccggcccggaattccgcgggccgccccacccgtccgcaaggggaggaaccagaggaaatcaatcttttttttagttccagcccctaaatcctaggtttggaggtttggttcctttagtaatttggccaggtttggggcctggggtggggattttccggacctgggtttctggacccagctccattttttaaaaattccttctttaaatccccatggtggtaggtcttaaagaaaaaggaggatgcctggtggtttctctggttggaatcctcgacccagggccataaaagccgccattgataccgctcgatgcacctttggttcccaacccgattcatcagttcatggaggggatccaccaggaccagagccgattccggg

SEQ ID NO: 181707 - DNA, 343 bp, Arabidopsis thaliana columbia
cccttaagaaaaggaggaggaggaaggaaaaaggggaaggagaaggaaaaaaggggggggaaaaaaaaaaaggggggggcgggaaagggaacaaaggaacgaaggagagagggaaagaaaaaaaaggcaagggggaaaaaaaaaaaaagggggggggggaaaaaacgacagaacgggaaaaacaagggcgcaaccaaaaaaaaaggggtggaagaaaaaacacaagggaaagagggatgaaaggggaaaagggccaaacaaaaaggctaagcaaaaaggggggaaaccggaaggggaatgggaacaccccctgaaaggggaaaaaaaaggggggggggggggg

SEQ ID NO: 181708 - DNA, 274 bp, Arabidopsis thaliana columbia
gtccgaattatcttaaaccaaagaggaacctgttttttttttagatccgatccaatccaatcaacgaggggttccgattgatcggggaaaatccaccaaatttttaaggatcgaaccatataattgaggatgagcgacgtttttgaggggtccaagcgtaaatactgcaggctttaaaccaatctttttagaaaatgtaactttgaatcggttttttccaacggaaaggagaagaaggggaggattgctgaaatcaagtttggaatagacaaac

SEQ ID NO: 181709 - DNA, 300 bp, Arabidopsis thaliana columbia
  unsure (1)..(300): unsure at all n locations
cggccaaggtttttttttttttaaaaatttctttttcttttttttccatcctctcgaaaggagcgtgggttgaatctttgaagagttttggacctnccatctttgttccatttttacctcccccaattaatcgaatccggtttgatttttccttttcccaaatttacccttccttaatcttaccacccatttcttttgccccacttttttggaacctttgcttaatcgttgcccaaatattttccctccaatcctctaactatttaacttttgaccttttaaccatggccttttttgccc

SEQ ID NO: 181710 - DNA, 421 bp, Arabidopsis thaliana columbia
  unsure (1)..(421): unsure at all n locations
ggggccgcccacacccgtccacccctaaaataattccttttcccctttttttttttttcctccccgccncaacttgtttttgtttcttaacaacaatggatggttcttttaattttttatcaattcaacttaaaacaaacttcctcaacttcttttaatttttccaccaaccacaaactatcttttaatttaacccgattggttcttaattaacaaccaccaaacccaaatccttatccaccccgttttttttaaattaattttaaccattatttttaaaccttaattttcaaaacactttcttcccttaccaccccaaaaactccaaaaccttaccattaattcaattcaaccccaactaatcccaagtccccgaaatcttcccaagaatccttttccccttcaaaggattcaataaatc

SEQ ID NO: 181711 - DNA, 165 bp, Arabidopsis thaliana columbia
cctccacctcccatttttcaaaagccaccaaaaaaaagttttcctccatttttttatttccccatgcctgttaataccaaaatgaatctcctaaccaaaaaacctttgtttttaaaaccatcttttcaaaaaaaccaacccactcccaataattttgtttttttc

SEQ ID NO: 181712 - DNA, 397 bp, Arabidopsis thaliana columbia
  unsure (1)..(397): unsure at all n locations
atgaccattttttccttaaaagtgccttttttgtttaaggaggcctgaanttccaaagggcccgggaaggaacccaattggaaggggatccaagatttactggatcgcagtaccgttgaaataaaaaccaaattttttaagtttacagggagacgtgattaaagtgcccgacttgcaaagaacctggattacttaaattttaagttgagtgccaaaaaggatcagcttccaattagttaatttaaaagtgaggaaaataaggttggttccaggaccccccagattaaaaggctccaccaaattaaaattatttttttgattgttcgaaccattgttacttaagcgtaacgctcggaagccaaggtttttactttaagtgctgttaggcggaaagggc

SEQ ID NO: 181713 - DNA, 280 bp, Arabidopsis thaliana columbia
  unsure (1)..(280): unsure at all n locations
aaaaactctntttttaaccggttttccttgcccccataattttcaattcctgccctaatattggaaccaattccttttcctttaattaccattggggtttttccattttttggccttaacaaaaccccacccttaattttaaatttattcgtttctgaagccaaaaccatccccccggaaccctttttttccttaccttttaaaattgggaattttcctgcctttttaaaaatttccaacttttttaatttaatttcatgtaccattgaacttgaatttt

SEQ ID NO: 181714 - DNA, 307 bp, Arabidopsis thaliana columbia
  unsure (1)..(307): unsure at all n locations
acgccaaacccnacaccggtgggattatcaatataactggcggtccaaaaaactccattcttccccacatttatcctaagctcgactcttccgaccaatccttctaccaatccttcttttaccgcatcaattcctctacccatctcgtttcttcctattcttcttctaaacgctcccccacaagtgttgtatccatgactttatccggaaagggaaactacgaaggaaactggaattataacttcactaacgacttcatcggcaagcttatctccgaactcaacaacgcaaccttggaagcagatgt

SEQ ID NO: 181715 - DNA, 273 bp, Arabidopsis thaliana columbia
  unsure (1)..(273): unsure at all n locations
cggcccgacccacgcgtacgtaaaacacataaattttacttactactttttctttgcaccacatgaaccttatcctgggggggtgccatacaacgctcctgtgtatatccatcanccaagacagaaagcaatcaacgcatccatcttgacaatgaggccttctaccatctactcttcaacactcttaaactcactaccccaacttacatgatttgcaccacttcatatctgctactatgtccggcgtgactctctgactgaggttaacaagac

SEQ ID NO: 181716 - DNA, 128 bp, Arabidopsis thaliana columbia
gcgaacgatgtttcctgaattaatcatctattttttttaacgaaaacaaacctgcccgcttggtttacttagcgggcggcccaaaaacctaccaaccacaggcggtggacgcagaagccctccccttt

SEQ ID NO: 181717 - DNA, 410 bp, Arabidopsis thaliana columbia
  unsure (1)..(410): unsure at all n locations
ccgggccgacccacgcgtaccgggacctcttgggtgggttttaaaccatatattatttgattatgtgaaggcatagattatgtgctggggtccatgaaggctggaggtaaacgcanagtgattgttccaccatcgttaggatttggtgtagacggtgctgaattggaatcgggtttgcagattcctcctaatgcttcgttggaatatatagttgagattgatagagtctcaattgcaccagcttgagttgttgtacgtacagctttggtttcattcccaaatccttcaaatatttggttgtataagtatgagtggaaaacaaagtgtaaatttttgtttcttttggggtcgatgtgattgaaccgagataaaccggatcaaaatcttcggtttgatttatttatttattt

SEQ ID NO: 181718 - DNA, 363 bp, Arabidopsis thaliana columbia
cggaaaaaaaaaaaaattttatcaaaaattttttttcaccaccaaaaaaaaaaaaaacggggtcgttgtgtttaaaaaaaagggggggcccaaaaaaaaaaaaaaaaaaaaaaaaaaaaaaaaaaaaaaaaaagggggcggccccttaaaggaacccaagctaccccccccgaccctccaacgtaaaaccttttttaaggggcccccaaaatcaaatcccccgcccggggtttaccaccgtccagccgggaaaaccccgggcattcccaaactaaatcccctggaaaaaaaccccctttcccccagagggcgaaagtgcaaaaagcccccccccaatcccctttccaaacatttgcccaccct

SEQ ID NO: 181719 - DNA, 94 bp, Arabidopsis thaliana columbia
aataaataaaaaaaaaattaattaaacaacgtcacttttccaacccccaaaaaaaaaaaaaccgccgccgctaaaaaaaaaaaaggcccgcccc

SEQ ID NO: 181720 - DNA, 235 bp, Arabidopsis thaliana columbia
  unsure (1)..(235): unsure at all n locations
tttttaaagagggggggccacaaaaaacaaanacgacgaacnctcaacatcccactactctcgaagagacaaaggcgaaaacgaggcgacagngaagagcaaganctgaggagtttttttttttttttttttatcatttgaaacgaccggggacactcttatgactcatttgcccctgggcatgtaatctgngggatcgatacaaaagtggagaaggaccgtgactaaatttttt

SEQ ID NO: 181721 - DNA, 203 bp, Arabidopsis thaliana columbia
acccacgcgtccggggggattgacttttggattcagctacttacttttcaagaacggttgggagagatggggggcgtgattttttaccggggggggctgatacatagcgctgcatgacatgactacgacggtgatctgcaggcacagcttttgagtctgattggcatgcatgcccaagcagagacagttagagatgctggata

SEQ ID NO: 181722 - DNA, 142 bp, Arabidopsis thaliana columbia
  unsure (1)..(142): unsure at all n locations
actctcacggaactatcaagagtctcgtcttttttttaaatttttttcgccccaaaataaaaaattatanaaaacactaccaccaagaccagcacccacaccnncaaaacaccanaggcaggcttttttttttttttttttt

SEQ ID NO: 181723 - DNA, 101 bp, Arabidopsis thaliana columbia
  unsure (1)..(101): unsure at all n locations
acccaccaaaaaaagaaaaaagccttttttttttttttttttttttttttttaacnaaaaaaaaaacccaaagttaaccgngagaaagccttttttttttt

SEQ ID NO: 181724 - DNA, 96 bp, Arabidopsis thaliana columbia
  unsure (1)..(96): unsure at all n locations
gcannaacgctgagatgaaaaccaaattttctcagtctacagggagacgtgattcaagtgccctacttgcagagaagctnggatactncaattcta

SEQ ID NO: 181725 - DNA, 366 bp, Arabidopsis thaliana columbia
ccaaacttccagaaccttagaattggaaatttccaaggaccccgccaaggggcctggtggttaattatccgggggaatttggttttaaacccgggatttaccaaatttttaattaaatccgaccttaaatcttccgaaggattggtttgttccgatgccaaatcttcttcttccacacttaaatccatgaaggttttttcggccgcggtggcctttttttcaatcctcttttttgttcttatgccagttgtggttgttatttaaggttggactccttgcagggcctcaaaacagttggttaaaggggggaggcaccggatcaggaggctggaatctttttttaagctttacgctcctgaatttgcc

SEQ ID NO: 181726 - DNA, 231 bp, Arabidopsis thaliana columbia
aacggttatttcttggggcacatgttattttattccgtaacctaccagggttcggggcttctttcttttctgtggttttccccatcgccgtaactgggttaagttttggataacggcgcaggctatataggccggaaaaacctttatgcatttattttggtccttgggagcacttaaacatgggggcttggggtttcaaggctggaggttaactaaccttgggataacgcg

SEQ ID NO: 181727 - DNA, 382 bp, Arabidopsis thaliana columbia
aaatcctctccctccttttttttcttttccttcttcttctccctggggcctttttaaatttccgcttttggtttttccagtttggggcctaaaacccaccgttgtcgggtccaagaccagagtttttttaagggcttacggttggaactttagccatggaggaatgggggggaaggcggttgtttttggcgtggccggggctgaccctgaaggcaggggggacccaaagcctgtggtggttgttgttccaggggataaactaccgtgggaatcgaaggaggctaaggggaaacggttttgggaattgaggctgaagatgaagctggccaaaaggattaggctacgcaggaaccgtttggttcgtaggcttaagatgaggaaa

SEQ ID NO: 181728 - DNA, 429 bp, Arabidopsis thaliana columbia
gggaattccggggcggccccaggcgtccggggccgcgggggctaaaactttttaaccaccaccatgggggttttttaaccaaactttatgtttttttaaatccaaactccaaccatcctctttccaaatggccggatttttcccactccgaaaaaccttcccaatccgaataaccaccgggggaaccgccgccggggcaggatggtaagccaccgaagcttaaagctccgcgagggctttggcggccgtggggaaaggaaccgccccatgggatttaccggtcccggccttggggaggctggaccaggttttttcagatccccaggtcctaaactttttggggaatccaccattaaccgtcgggaggaaccgtcaggtcatcgccgccttagggaaatcgtgcgtttttaaatttaacccatttaactt

SEQ ID NO: 181729 - DNA, 286 bp, Arabidopsis thaliana columbia
gcagttggttctttttaatgggcccaagggttgaatttttgaattgggaggggccagggaaaaagggggttgtttttgaaggcatccatcgttccaaagaggacctccctggctggtttgcttatgaaggccatatttactggccttggaagatccggtcgggggcccgaggatctgtccgatcagttttccagtagggccataaaaagggttttgaccagatggcccagggggggggtggttgcttgaaaccaggggttaaggcgggccagggccctttccttga

SEQ ID NO: 181730 - DNA, 157 bp, Arabidopsis thaliana columbia
cgggccggacccaggcgtccgttctaatcctaagaaggatgggctacaaaccttgctttttacttaaggcgcaaccgccggcggtttttttgggaccaggagcggtctgaccaaccccaaagtcaaccatcttttcctcttggtaaactttctggtg

SEQ ID NO: 181731 - DNA, 189 bp, Arabidopsis thaliana columbia
  unsure (1)..(189): unsure at all n locations
aacgggaccggaaacccggggcggaccacagcgnccgacgggcccggaaaggaccaggcaaaaggggcaagaccccaaggaaacaagggaggggggggaaaaaagggacaaaggggaaagggcccaggaggggcgaacaagggaaagcgaggagggaggaaggaagaacgccaaagaagcggcaagggg

SEQ ID NO: 181732 - DNA, 398 bp, Arabidopsis thaliana columbia
cccggcccggaattccggggcggccccacccgtccggtttaccatcttctccttcttcctttcggattttcttcggggggggattttgggggaaacctttgtgggcaaagagcgggaaaatgaccgggcccggtaggaaaatcggggttggggttttcaaggtttaagggcctatcgatggggagggtttggttaaggtcctggtcccagatgaggctggtggggggttttttacccttcgtggggctttcgatggggttaccacacagttccagaccaaatttagtcaggaccctgaccctatggatggggattcctttaggaggcttttgccagctttgagattccaaagtccgtggccaaagttcctcctgattccaggccaaggttggtggttt

SEQ ID NO: 181733 - DNA, 366 bp, Arabidopsis thaliana columbia
  unsure (1)..(366): unsure at all n locations
ccgggtccgccccacgcgtccgatcaaatgggaacttgggtagccaaacttgttttttttttaaatggattcctattccgtggggtggcatgttaaacaaggtgaaaaagggctaaggattagttagcactacctcttgcggtttaaggaaaaattttgggtggccgccacggtatttgacggagccgcgaccttcaaggaaggcggggccaaaaacaggctcttttgggattaaggccagcggggaaccttctgaacaacgcatgtaggagcttcganggttaaaaccggggttaaggttggtcctattaggggaggtcccaagggtggaataaaaataattccatactagctgatcccgcggtg

SEQ ID NO: 181734 - DNA, 332 bp, Arabidopsis thaliana columbia
  unsure (1)..(332): unsure at all n locations
gggatggaaaccggccgaccaccncggaaaaaacaagaaaggccccaaaaattggaggcagaacggcgggcagggggaaaagaagggaaacacaaaaaccagggacaggaggacggggggaaagggggggaaaaaaaaaaagaaaaccggagcaaacgggaaggaacaccccaacaagaaaaagaccccaagcaggagggggacccgagggggaagggaaggacggcggcaaacccaaaggcggaaggagaaaaacgagaacgaaagcgagaacgcacaaaaagaggggaaaccaacaaaggaaaaaccgggaggcccaaacaggaaaggga

SEQ ID NO: 181735 - DNA, 377 bp, Arabidopsis thaliana columbia
aagcgggtgaaaaaccaacggtatgtttttaccaccaccttggaaagttccccgtcgggtttcccagccaaatcctcaaaccaccgccttatctgtttcggttgggacagcttctgcggttccaccgatttccatcattacgcctcggggaatctgtggtccaaacggtgttgggctgcccaaacctggggggcaggaccgcagggggccggaacccaaggcaggcaggggcttgtaccggttagtacatggggccggaaatgaacgctaaaggaccggtattttggcccggccactttaaaggtcccggggggtagatctgggttttcaaggctggaccaggccattccggctggcctttttggcaggtcaaaaac

SEQ ID NO: 181736 - DNA, 272 bp, Arabidopsis thaliana columbia
gtctattgtatcctgcttaaaaggcggggttttaatttaaaacgaattaagcagagtcgaagttgtttggtgtatccaaaaaaaaaaggcctggctttattgtttcaacttcgaccggaaaagccattattccggacagttttttaaggctgacggaccccatccttggtctttctatgggttggtcctcaggggtaaagaaaaaggtggggggtggacgttaagagaggacaagggatgccacagtttaaatcatgggataaagttaaccg

SEQ ID NO: 181737 - DNA, 229 bp, Arabidopsis thaliana columbia
  unsure (1)..(229): unsure at all n locations
gaaaccggggcggccccaagcgaccgaaaagaaccaaaaggaaggaaaccaaaacttggccaagaggggaagggcncccacaaaaaagaaaaaaaaaaaaaaaaaaaaaaaaaaaaaaaaaaaaaaaaaaaaaaaaaaaaaaaaaaaaagaaaaaaaaaaaaaaaaaaaaaaaaaaagaaagaaaaaaacaaaaaaaaaaaaaaaaaacaaaaaggaaaagggagaagg

SEQ ID NO: 181738 - DNA, 391 bp, Arabidopsis thaliana columbia
ggcggaccgggcccggaattccggggcggcccacagccgtccgggccaaagatggccggaaacctggccggactttaggggggctgggggggaccagggggggttccatcctggggggtaaggcagggatcgtcggtccgttcaaatccgccaccttaccacccataaccgatgctttggcagccgcccttaataccactggaccaggggagggttccttggtattctccgcaggagagggggcttttgaagattatatggtggttcccatcaccaaaaagaccttaatgcttttgggggaggggatcaataggacgttttttccggggacccatatggtggtggttggtgggcctccttttaatggttcgggcttcgttgtggttggggg

SEQ ID NO: 181739 - DNA, 211 bp, Arabidopsis thaliana columbia
cgaaaaaaaaacacaaaaaggacaaagggccgcccaaacaagggcggcgacccccccggcaggggcgggaaagggagggaaccaccccccagcggcaaaaaaggaccagggaagcggccgagggacaaagaggaaaaaagcggccaagccaaaggggcaaaaaggcaacccaggggagggacccgaccaaggaaagaccaggggcccaacc

SEQ ID NO: 181740 - DNA, 255 bp, Arabidopsis thaliana columbia
gaatcccggggcggccccacccttccggttattaaattggatctaactaccttttctttttcataggcggggaaggaccaaagggaattttgtcctgttggtgggaccaaattggtcccctgtcctgtttaataaagtaccatgttaaagaaaggtggtatttttttggacctggcctttttggaagctaccaattggtgggggttggtgtaaaggtattttaataaatttggctgggcctgctttaggggactc

SEQ ID NO: 181741 - DNA, 345 bp, Arabidopsis thaliana columbia
cgacccacccgtccgataataaaaaacctccatttgttattaagtcaacgagaagtggggaacgggcggttcttaccggaggtatggaatgcccttgaagagggcgaggacttcttcacttgaagagaggacctccaccaggaattgcaccacctggggctgtgtgtcaaactgaacatgggggacaaccggaaactgcggagcaaattttacgggttcaaaatggtttttagggatcaaaaattggggaaaaaaagggttcaatgctaaaacattgaggggggggtttggatcaaaaacatgaccggtgcggggcttttgaattatatcaagatcaggcttttt

SEQ ID NO: 181742 - DNA, 269 bp, Arabidopsis thaliana columbia
aatccggggcggacccacccgtccgatcgtcaacggaaaaaaaccaaatttgtttttttcgatgtcctcttccctttctggggcgggttggctacggtctcggccgtaccttctcccaaatatgacccaaactgggattccactttttacttaaaaaccggttctacttgtaaagccgtatccgattctatcataagcccatgaattaactataggtgccttttactacttcggaatctaaaaccttaaagctttggtctggtttaagg

SEQ ID NO: 181743 - DNA, 366 bp, Arabidopsis thaliana columbia
ggtaaggttgttttagccttggttatggcggctttttttatccaatcttttccgttttctttaaatagcaccaccgcaaggccccggtttattagttcaggatcgttcggcggattcaaaggccaaattggggtctttccattgggggcggtgggtttaagttcaggcctgggaggtggaaggaaatttttttggatttgtaactcaccctttaccgcgaaatgcagggaaggccaaccccagaccgttactggggggtaaccgcctttaacacaggctctggtccactttagggggaaataaccaggcttagacgatggaggggccggtttccaaccgcaggatgttggaattggtggtggagga

SEQ ID NO: 181744 - DNA, 328 bp, Arabidopsis thaliana columbia
ttaccataaaacggagggggtttaaggattttttccattgaggaattactcgaaaaaggaatttgtagggcaaggcaggcttggacctttcttggtttttgggcctcttaatgagttggttaaagctcctgaaccagcaccaaccacggtacctcttcaacaaacggggttttttccagggccagcaaaaccacttccaccaattgcttaacctccggttccatttaacaggccaacttcggttgtacccatttttccaccaccaccccgggtggcttttcctctttaaaccgtggttctggttccggggctttccgttgaattaact

SEQ ID NO: 181745 - DNA, 220 bp, Arabidopsis thaliana columbia
agggttttctttcctggctacattttattttaacctcaacacaaaattcaaggggcgggttttaatttaccttcgagcaggccaaatataaaaaaagtgcctcccaagtaagtaccttgaggaatttggtaaccaaaaatgggggaggcatacttttaattttcaggctggggccaggggaacctaaggtgatgatttgggccacaagcatggaactggc

SEQ ID NO: 181746 - DNA, 250 bp, Arabidopsis thaliana columbia
atcccggggcggccccagccgtccgggaggctccctgttccagcaacaatttttcttataagacattaaagccgccgcctgttaagggttctttaactggcaggatgcgtctaactattaaagattttctgtattggtattaataatataaattcttatcttaatttagccatgggggtaaatttgttttttttgtctactattcttatttattccttcttatttgtaattattatttagtattaattta

SEQ ID NO: 181747 - DNA, 323 bp, Arabidopsis thaliana columbia
  unsure (1)..(323): unsure at all n locations
ggacactacggaggaggtttaggacactatttttgaggtggaggacactacggaggggggggtgtattatacagaggtggaggacactacaaaagtnttanatgatgatactgatgtttattattacatttttaaaaattatttttttttttaatctaacatgtttatacttttctttttttctaaaattttcttaatattattaatttcaattctattattcttctattatcgtattgtacatttttatattatataatcttatctatattcttattatatttttatttatccctattctaattttataaattctctatata

SEQ ID NO: 181748 - DNA, 287 bp, Arabidopsis thaliana columbia
gagaatatacaaaacagcatctcattgattaacaatcaccattctcacttaacatcaatctttaactgtctttttactgaactaccgactatctgacccgagacccgattttgatgacatgccgattactggggagcgccacacagacccattacgttgtggacattacacggcagtccgttgtagcagacggttgtccaccgaaaacgggacctcccaccaagggcagccacggtacggataacggattcattggctggtgctggaacagcgttttggcgattaag

SEQ ID NO: 181749 - DNA, 423 bp, Arabidopsis thaliana columbia
gttttacatcttcttcttcttcctcttcgatattcgtcagtgtgtgtattttggggaaaactttgtgagcaaagagcgagaaaatgagcggagccggtaagaaaatcgcggatgtggctttcaaagcttcaaggactatcgattgggatggtatggctaaggtccttgtcacagatgaggctcgtagagagttctctaaccttcgtcgtgctttcgatgaggttaacacacagctccagaccaaatttagtcaggaacctgaacctatagattgggattactataggaagcttatgacagcattgagattccaaagtacgttgacaaagttactcctgaatacaagccaaagtttgttgctttgttggtggaactgtaagaagcagaacagaaattgctcaaggagtctgaactgttggagaa

SEQ ID NO: 181750 - DNA, 200 bp, Arabidopsis thaliana columbia
tcacccggaaactctactccattttattttcgaggtctccaaatagatcggccagcatttttttgtcctatgaagaggaggtaaatacaccatatactcctagttatgttgtaaagctagagacagacgtggagattaaagctttcgctgagaagattcatcacatgttcgccgttaatccacaccatgtctttaaatca

SEQ ID NO: 181751 - DNA, 449 bp, Arabidopsis thaliana columbia
  unsure (1)..(449): unsure at all n locations
aaaaattcaaagattttgttaccaccaccatagtaatatacgcgccgcccttcttatatgtgatctccatccaacattntatttctttcgttttggttatcttcttcggttccatcgaattccaacaattcccatcgaggaatttggttacgaatcttttgatctgactaaacctagggagcttgatcacaaggagactgaatccaatgctaggaggagtctcttcagtgttgtataatgagttgaaaaagaacggtaaattgcattgttttatgacctgccacttttgatgtggggggggattagttttttttttttcaattctttacattcctattcttctttcccttttatcaatgtttataacttcattttccacttatcatttactacgtgctcttcagtctttgattttttttatataaatctctttttttttatttttttta

SEQ ID NO: 181752 - DNA, 216 bp, Arabidopsis thaliana columbia
  unsure (1)..(216): unsure at all n locations
ananaatatatactatcttaaatacccaattttcttttcacatctattaagcataatttgcgccggctttttcaaccactacacacagcctctaacataatttctcaacctcctacttcaaagccactattcctcaccattctcttattacataccgaacccatactagtttcttacataagaccgcccacactccaaaacaatcatgaacaattt

SEQ ID NO: 181753 - DNA, 293 bp, Arabidopsis thaliana columbia
  unsure (1)..(293): unsure at all n locations
aaaaccgggccgacccacgcgnacgcaaagaactcatttgaatgtatttttttcctggttaagaagagaatgtttctcacacccgctatttatttaaaataatgaggggaaaaaaaaaaaaaaaaaaaataaaaaaaaaactaaaaattatataaaatatcttatttaaaaataaaattatttatattatatacttatattatatttcattttttatatatttatattattctcattatttatttatttattttttatttatattaattttttatttctctttattctctttt

SEQ ID NO: 181754 - DNA, 337 bp, Arabidopsis thaliana columbia
  unsure (1)..(337): unsure at all n locations
nntccgcccatctttcaaccggccctnntaaagcctcaactcatcatatatcatccgccacccgtctagaatccaagcgcgcgtgctgttgctatcactcgaagcgttacacgatgaagtcaatctcttaaagaacccttcggagtcgcggccccgtagcggcnttgcagcttcatnattgctttggcccggaaaccgccatcggctaatagaaagttcttcttgggagcgaggggattgggtccgttagtcttttatttcccaacgactttctctatagtctaaagcgagagaagattgtgtttcaagaacaactgctggatacccacactattgt

SEQ ID NO: 181755 - DNA, 144 bp, Arabidopsis thaliana columbia
  unsure (1)..(144): unsure at all n locations
agcagagaaagaacaaagggaagggganctganagngagaggcaaaacnnncncnggncngnnncaaaaagnaacangnnaaagaaaagangcangnnnncggaacccgacccnnnngaagcggacaaanngangggganggag

SEQ ID NO: 181756 - DNA, 164 bp, Arabidopsis thaliana columbia
  unsure (1)..(164): unsure at all n locations
gaaaanccgggccgacccacgcgtacgatcgttcacctgaaaaaaacaaaattttttgtctccatgttcacctcccttacctccccgccctttatacaaaattcgcggcagcttacaccnaananaaaccaaactgaatatacacattctacctcacaacctta

SEQ ID NO: 181757 - DNA, 237 bp, Arabidopsis thaliana columbia
ctccgggaggggggggtccctcttcaaaaggttcaatttggttgtcattctcagggtattgtgggcggtaccggggggaccaggagacacccaaccgggggcgggccttcacggggaccgacctgggtttttgggcgaacctttaaaataatcttattttcccttaatacaaagccgggggggccgaacctggtccttttcataacctagggctaaccagagattccggcagacttt

SEQ ID NO: 181758 - DNA, 130 bp, Arabidopsis thaliana columbia
agccttccgttttgaggtggtccgttttccaagggaaggagccattttggtggggatgggcctaagtttcaacacagttcctgtggagatgcgtaagaggctggttttacctgaagctgattggccaaaa

SEQ ID NO: 181759 - DNA, 378 bp, Arabidopsis thaliana columbia
cttccgttccggattctccgggttcggcccccgccgtccggggcgttaggggtccattcttaaaccgtgtttttgttcccgttggggtttgggggttcctgggccctgttttttttaactcctttaacattttggccagaaagaaagctatggtggggaatttaggggccttaaaggcattatttcctgcaaaagaagggttgtggtgggttcctttccgtccggaagttcttccattcgtggaacgactaaggcaccagtttcctaaaaggaaggggattgaaaaggcactgcaggcttctgcgaatgtccattctccttttgttccaaaacctgcaaagggtttgcaaagggggcttccttttgggtttaaggtcc

SEQ ID NO: 181760 - DNA, 96 bp, Arabidopsis thaliana columbia
aacgggtcgggaattcggggcggaccaagggtcggaaaaaaaaaggttaaaaataaaatttgttttaaagggaagcccaaataatataagggtata

SEQ ID NO: 181761 - DNA, 453 bp, Arabidopsis thaliana columbia
gggggaggcggggtaatttaaggtggaaaggcttttgagccaggcgaagctaagggggttgggaggaaccaccttttttgcggaggggaaggtggaaccaggagactttttaggcggggtccgtaacccaccagggggggggccaggcttggaactggtttaaaataatctttttgggtaccaccttaacttttttttaaaccgcggtggttcggggggggttcttggggtttcccatccacttaagctaaaagggggattggtttttggcggtttcggggtggttattttaatggagtgggtttttaagccgttggggctttttattgtaagttcgagcttaaactgtggggagatattaagctttactacgggccagaggatgttgcttgtttcaaaagtaattgtttttcttttccggttcttctgaaaccggaaaaccaaacttgtttc

SEQ ID NO: 181762 - DNA, 269 bp, Arabidopsis thaliana columbia
aacctccaaacttttttacccataaaccattcttttaaaccgggttacccaaaaaaccgggccattttttaaaaattttaaggaaccctacttaaatgggttcaacgggcggaacccaatttacttcggggcaaggtaccgaccaccaaacttgcctttttgccttgcaacttggccggggtttcggtctttcgatgggtttaaaatcccccttaaagcttgaccctcttgggattttggcccaaaatggtttttccatttttccttcc

SEQ ID NO: 181763 - DNA, 179 bp, Arabidopsis thaliana columbia
  unsure (1)..(179): unsure at all n locations
ccgnattcccgggtcggccccaccctcccgaaaagggaaaaggaaaatccaaatttttggccctttatgacccctattttggggtgggcccctcttttttttttttttcccttcccaaaattgggttccaaggtccttccttttggcctccctggaccatcacaccttaaggggttttc

SEQ ID NO: 181764 - DNA, 219 bp, Arabidopsis thaliana columbia
tccgaaagggaaaaggaaattccaaatttaggtttttctaggaccccaaatgtggggtgggccgcttggtttttttctctttccttacccaaattgggatccaaggtccttccttttggccttcctggaccatcccagcttcaggggttttctgcttccccggctttattgcttgatttcggggccccagggagttaaaagagcaggccttttgggtgg

SEQ ID NO: 181765 - DNA, 242 bp, Arabidopsis thaliana columbia
  unsure (1)..(242): unsure at all n locations
atnccggggcggaccacacccttccgaaatcccaagtctttaccttactctttgtcctttttggatttcaattccccgaagaagcgtttcttatggatatgcttctggacctctgagaagaaagggattggcaaatttgagattccacatttgggtttaagtaagaaccatttctttctgatgaacctaattggcctgttgctgtgggaccagtcccagataatcatcctccctccccctcc

SEQ ID NO: 181766 - DNA, 236 bp, Arabidopsis thaliana columbia
agccgtttaagagctaataattttggggcttcctgcaaatagcttttggctgtggatctttttcctccataaacaaacatgggtaagacacgtggtttgggagctggccgtaggctgaaaagactccgatttaaccagaggtgggctgccaggcagtccaggaagtttaactggggaaaggaggggaagaagcctttggctggttcttttaacgctaaaggaatggttctggagaa

SEQ ID NO: 181767 - DNA, 161 bp, Arabidopsis thaliana columbia
cgtccgttcctatatctttcaaatcggttttacctccccttttaaagggcttttattaccggtttggccattttcctaactctttttttggccaccgttggtttttccgccgccggttggttggaggagcacccgttggttatgaaatcccacaccggggt

SEQ ID NO: 181768 - DNA, 188 bp, Arabidopsis thaliana columbia
ttccggggcggaccacagccttccgcataaacaagaaaaggaaaaaaggctttggtcctttggatcgcaaaacaccgggggggggggtttattctccatgggagaggtcccggaaaccggaagtaaaagctccacctttgcgctttaattgagctcactatattgaaggcctcacgccattccaagtt

SEQ ID NO: 181769 - DNA, 133 bp, Arabidopsis thaliana columbia
ccttccgccggaaattttaacaacttggtttaaattttgttttatgcccccgggcagtggcctcccaccgtttcctgaatactcaaaatgaacccttgttatccagagaaattttgggggagtggttttttaa

SEQ ID NO: 181770 - DNA, 450 bp, Arabidopsis thaliana columbia
ttcttaagtctaaacttggtccatccatccaggggaatgggggagggggcaccaatggccaaccaccaagggattcttgagggtggaaattaatagccattcaaattttgcgggggaggggggttccgggggcctttttggtaagccaggcttgaccaaaaccaactgcttttgttaacaaacaattaaccttggttttttccggggtaggattaaccgttctttttcgtggcaccgtcccaggagtttcggggctgcttttttatgggattttcaaccaaagccagcggtttcccttagtcccgttccataaattcatgcttgattccatgacattcccaatgttggtggtaactgtgaattggaccattatatgggggagtaggcttttattttccaccattacccttgattttacgcgttaatcattggcattccaatggtcttatg

SEQ ID NO: 181771 - DNA, 331 bp, Arabidopsis thaliana columbia
attaaacttcccggtcttttttctttgccattttaacccttaaatggccgcccaaacaaccaaaccgatgggggggcccaaccaaaggctttttaacttccgccacaaagttcctttggggaccacattttcctcaaggtttactaatctcaaccgttggaccaggtgggccacccgggtggatgctaatgatgaccaaactggttcaatccgtttaattcgggtaatacacccggccaactataaatttgggtttggacccaaccaatttaacttcggttgtttacttcaaggctcaacctttacctgggttttccttgccctggggctc

SEQ ID NO: 181772 - DNA, 348 bp, Arabidopsis thaliana columbia
aaattccgggtcggacccacccttccgggggagggggggggttccaccccccccactttaggtgttggaggggcctcctccgtggttggaaattcctaacccggaaggggattggagaccgcaccccgcggcggcaaaggttccggagggggagattcatctgtttaaggggggaaaaggcccgaccgatgtgttcaagtcaaatctggccggtattgaccaggtccagctgggggttcgacctattcttgggaaatatggctggaaagcattcttggttttcaacgttgagaaaggtcgggctgttccgatcagatttaaccctaggattggtcggcctgggttgcc

SEQ ID NO: 181773 - DNA, 185 bp, Arabidopsis thaliana columbia
cggggcggccccagccgtccgttgggtcaaaaccaggtcattccgcccttttttgttttaccaaaaggggggtccgtccccaaaagtttccagatttggctggttggttggaacctaccactcccgtggggtgggcgaccatctcttccggatgtttttttgcgtgggcctttgcattaaaggag

SEQ ID NO: 181774 - DNA, 252 bp, Arabidopsis thaliana columbia
gggaattccgggccggaccacacgcgtccgtcaaacaggacggtggcagaagccttttgtgttctctgggcgagaaaccaagagtaaaacctctactgttaatgacggtaagccaagtgatagcccttcagatccagtttttggtccaattattatggggtatgttgttggggttccggaacctgcctttgtacctttaaattgggaacatgcttcaggagatttaaggggcaattgttataaaccccaata

SEQ ID NO: 181775 - DNA, 75 bp, Arabidopsis thaliana columbia
ccttccgaaaatgggggtccttaaacccacccttgggttttttttttttagcgtgggccgccgtttattaagccg

SEQ ID NO: 181776 - DNA, 374 bp, Arabidopsis thaliana columbia
tccgggtcggccccagccttccggtttttcctggcccggtcattctttctctttcttttgaaattcaagccaccaaaaatttggtccggaagggcttgcaaaggagtaggcttaaacccgaccccatatgccacagacgacccctttttcccaaaacacgccggtttaagttggtaacttaacagccggggagggggggttctggtcggatttttaagttttgtgttaaggagccggccggccgctaggaatttgtcccaacgtttgggagcaggatccgccaaaccgctgcgttttatttcctccaaaagaaatcctactgttggaagaaaaccgtcttggattttgttgcctttttggtcgtcgtttttttt

SEQ ID NO: 181777 - DNA, 122 bp, Arabidopsis thaliana columbia
cttccgggaccgcggggggcctagtccaagaccggttgcgttcgttttagaggacccaggcttacgtccgcgggcttccaacgtaatagtttttttatagggcaacctaaatccaatcaacg

SEQ ID NO: 181778 - DNA, 288 bp, Arabidopsis thaliana columbia
acggcgggaatccggcggccacacccgccgagacttttaaggtccggagggacttgatgtcgggcccagaccaccatacacacttaatttttaaaaggggcttttctaagtgtggttcaggcctaaaccatcaaccatggcaatggatgtgtgcaccagcttaagcctctttttttctcctaacttttgtgtgcggctaaatggcgctaagttcaatttccaggccatgccagaggtgggtctaatgcaaaagggggtcttaatgtttaatgttggcgaaaagaaaat

SEQ ID NO: 181779 - DNA, 217 bp, Arabidopsis thaliana columbia
cgggtttggatttccgggttggaccacacgcgtccgtttaacagaaggttaggttggttcttaatctttctggaatggggcctgaatttaactctcttcctcttttcctttggtttttcggtaccaataattttttttagaaaccttccaacttaactcggtttagccttcctggcagtttaactggtttttctgatctcctttttgggtggggcct

SEQ ID NO: 181780 - DNA, 195 bp, Arabidopsis thaliana columbia
ggtcggccggatttccggtggccacgcgtccgaaaccaaagagggggggggttttttaaccggggtttttgaaggccccttgggccaacgagtctttcagttaggctttaaactttaacaggttcggttgggacgtgaagcttttcggttttggcagggccggccggaggaggttggaggtttgggggttttgga

SEQ ID NO: 181781 - DNA, 225 bp, Arabidopsis thaliana columbia
gaaaaccggccgaccaacccttccgaataaacaatttgaagttgagctttgtctatcccagggccccaaaaagggagggaggttccttcataaaaagacctctataaagttaaaaccctttattcgatgtggcctaaccatccgtttggtaggtcttcactcttaaaaaggtcctttttcgtccaatatattcccaattccttcgttttaatgcctaattctttc

SEQ ID NO: 181782 - DNA, 272 bp, Arabidopsis thaliana columbia
  unsure (1)..(272): unsure at all n locations
cttccaactggttaaatttcgccgtctttgggggttttattttaaggacccgnaaaggattgtaggggtgggtcctgttcctgggggaagggtttttccacaactttttaaaaaaagctatggaggttccagggttaagttccaaaccaggttttgttaaatacctgttaaacctttttttagaaaacctcctaacctttggtttgaattgttcatttcatggaaagatttcttggggagattgttataccccttacctttttttaattttt

SEQ ID NO: 181783 - DNA, 475 bp, Arabidopsis thaliana columbia
  unsure (1)..(475): unsure at all n locations
ggttgggaatnccggggcggcccacacccttccggaaggacctaactccgtccctggcttaagtgttgctggctttgcggttaaggggatggggttggtgtaaatgggttttggcctaggaaatagtacctggccgccattaacgagggggggggctggggttaccacctggggattttaagctgattggatggctgttaaggctgtttgggccctccagatttctgaaattgctgttgggaccccctttgggtccattgggatgttccggggttgccagaggccacaactggccctaattcggttttaaaataaaccatttgcctcttgcttgcttgggtggaaatgctttgttttttcttttggacgttggaccttatactcggttttggtccgttgtattattaaagacccatttggggtgtgtttaatattccatgttgaagttttttaatacgtgtttgtggcttttctt

SEQ ID NO: 181784 - DNA, 357 bp, Arabidopsis thaliana columbia
  unsure (1)..(357): unsure at all n locations
tggaannccgggccggaccacacccttccgaaaagctttttcggcctgaaatgtttttctgattcggggaatctagggttccgggggagggttattggttggaggaggccatgccgtaggtttaccttacaggggggtaactgtccacactcccaagacttggcccaccgtacccgtaaaaggcttgtcccccgttttggggttctggattctgaccaggccaaaccaggatgtccctgtattaatggaatggaggcccccttggtatggtcatggtaaccacggtcacggatatactaattagtgttaacttaacctttgaggttcatgccgaaaaaaggttctccttttgttttt

SEQ ID NO: 181785 - DNA, 448 bp, Arabidopsis thaliana columbia
gggtcgggatttccggggcggccccaggcgtccggccgtggatggcggcttctcttacctttaattcgtttggcagaaccaaaggccctattcttttttggacccacctttttccttggtggaaaaacctaaactttgggcccagagctatgggaattggccgcattggcagtttggcggggtttttaaaacaaaacggcctgggatggaggaggcttccgcttatgggtgatggtaggtttttggtgtcgttgtcgaagaggagcaaccgtaggagacggtcttggttccggtccttccttaagacaggccaacaaggtttttccaggctgtgggacctttgaacgaagcagtttttcttaaggttccaggggccttacagagtttggatggagtttccatttataaggttcaggttttttgaaggtgttgccgctgttgagctttt

SEQ ID NO: 181786 - DNA, 239 bp, Arabidopsis thaliana columbia
  unsure (1)..(239): unsure at all n locations
ggannnccggggcggaccacaggcgtccgttgagcggccccagaggtagtgttttctttttttttttaataggatttgttttaggggttgtaattgggaatttcattggggtattggcttcgctatgatgctataggagggccttaacaatttccaaccttgggaaactttttgtgctcaatactggcgggggaatttaacgaaatcaggtttggttaatggagatacctccggacctt

SEQ ID NO: 181787 - DNA, 307 bp, Arabidopsis thaliana columbia
ggaggaggggttccttcttaagatgttacatttagaagttcatctccaggtaatgttggcgggaacagtgtgatcaagagacagccaatcaggggcgagccatcacggtgaacgatctgagtcttttgtcgaatctgctagattatcttctttatccttcatacaaagccagtgaggacgaaacttgatcatataatttcctaaagctaaccagagaattccgcagacttttttgtcaaggtttgatttactaaagatcatagtttcttacaaggttttttttttattactttatatttctattttt

SEQ ID NO: 181788 - DNA, 354 bp, Arabidopsis thaliana columbia
tatacacaaaaaaagataaaaaggtctttgcccctattgaacgcataacaacaatggaggcgcggtatccctctttgtagacttggccaaaactaaattcaaagctctacctatcctccttacttcaacttaacaacatcaaaaccttacgacattcccagcttatattctagtattcttcgtctcaaggaattaaaatatacaagttttttcaattaattatactttttttataatccttatttattcacacggctaatcttaaattttctcttatacatcttcttccttatgttcatctcatcttattttatactaatactctcttacatatattatattattctactatcc

SEQ ID NO: 181789 - DNA, 199 bp, Arabidopsis thaliana columbia
tctttttcatcatcaatctatcaaaacattctttaacagcaaaattatcctcctgtaaaacccatctcttatatttgtcggcgggcttcatcacacatttacaatccgcaactcctacttttgtttcttactaactaaccttttcttatggattctgtaatccattcctctcacaagaagggctttaaaaaccaattct

SEQ ID NO: 181790 - DNA, 453 bp, Arabidopsis thaliana columbia
gtttctcctcgccctgactctctctatctcttcaccgaaattgcagacaacaaaaaatatgggacgaatagcatgcaaaagagtaagctttaacccgaacccagaagccacagacgaacccatattcccaaaacacgacggtttaagctcgtcacatcacagccggagaagggtggttctcgtcggaattctcagttttggtctaaggagctcgccggccgcgaggaaattgatccaacgtattggagcaagattcgccaaaacgctgcgttttatttccttcagaagaaatactactgatagaagaaaaacgtcatcgtttttgttgccttcgtcgtcgtcgtcttcttcttcgtcagctatttatatgaagaggtcaaagtctgttaactagacagagtcttatcgagcataagctattgaagattgcattgagttcttgaacccttcttt

SEQ ID NO: 181791 - DNA, 504 bp, Arabidopsis thaliana columbia
  unsure (1)..(504): unsure at all n locations
ccgtttcactagaaaggtnntatgtttggttcctaaatacatttnctcgtatcgtggttnctgaatttcacgtcgtccgtcctctctttctccctctgtgtcttgtcgtacccccaatcatttncttcttagaaacccctccaactttcactttcggtttagcccttctctcgctagtctcactttcgtctctctnngatctcctctttcggtaggtgccctcttcgcacccaatcttcgatcanntgtttcatcgcgccggataacccgcttcatgggtttctctcactgacccgggtcagtttatttggcagttttaatggttgtttagtagaagagaaacccagagtctttctttggctgatatncgactcgaggaccctagagagggcttaaagctttgtgttagaggtagaatgtggtgtttttcgtggcgatgattccgttacagataatggttctagtgctggcttgtttgttacattggtattgggttagagagtt

SEQ ID NO: 181792 - DNA, 231 bp, Arabidopsis thaliana columbia
aaaaaaaaaaaaaaaaaaataaacaaaacaatttatataaaaaaaaaaaaaaaaaaaaaaaaggagggggaaaattacacaaaaacagaggacaaatacaaaaacaaaaaacaaaaaaaaaaagggggggccctttttaagggtcccaggttaccgcccccggcattccccgtaaaaagctttttaatgggtccccaaaaataaattcactggccccccgtttaccaactt

SEQ ID NO: 181793 - DNA, 332 bp, Arabidopsis thaliana columbia
cccacgcgtcgagaattagcgcctgtaaaaaacactatagattggtcgggagagacagaaaggcaatcgaagaaacagaggagctcagttgaaactccggaggttggggatcaagaagatgaaaagctcggtgaactccggggtgtgaggatgagagaaacagagaagtgtgaggcaagaagaggagagtaaagaaagaaacagagagctcagtggtgtggggagagaaaagcagagcagggaggagaaacccgcgggagccttcggcagctcagggagaagctgtgagtaatggaagaaaaaaactgttttgaagacaaagagaagaaatg

SEQ ID NO: 181794 - DNA, 401 bp, Arabidopsis thaliana columbia
gatttccgggttcgccccacccgtccgtccaacgaacccaaagaccttttttaaaagcttccaccaggtttttccgaccactcattctttgtccattcctacttttcctagcgatttaataacaggtttttaaatctttccacttcgaatggcattctggccgaccaaatggtttttgggaggccttaaaaggcattccattgcccgccgggaggtccaccgtcgttaaccctaacgaagctaatccttttcctaattctaacaggacctccatcagagggccttcgggttccgggaccccgtttcttcacccggaggatgtagattcgggccatttcgggttcacggcgggggggtcgggagattccatggctggttccacagctgtggttcttaaacct

SEQ ID NO: 181795 - DNA, 61 bp, Arabidopsis thaliana columbia
tggatttccggggccgaccacacccttccgtaataacctaaaaaacaaggccatttttttt

SEQ ID NO: 181796 - DNA, 227 bp, Arabidopsis thaliana columbia
ttccaaaaaataccaacacctctaaccaaatttttttgttttaacccgaaacatacattggagaaaggatcatttaccttatgcggagttctaaccccaccatcatcctttgtccaaactaaaaccctatactttaacccctttatttttatttatattctctaattcccaatttccactattgaaaataatctcttaatttttacccttcatttcaaattcctaat

SEQ ID NO: 181797 - DNA, 220 bp, Arabidopsis thaliana columbia
  unsure (1)..(220): unsure at all n locations
taattcctttctcaatcttctggctctggttttcttccagaagctttggtggccagcaattcattggtccgtcccgtccatgggcggccttgaagttgaccaggttggccgtggcggccctgttcctggtcgccgtggtgggggcggccntntcnattntttattntcaaattttatttttggttttttttctatatttttattttctttttcacttttt

SEQ ID NO: 181798 - DNA, 331 bp, Arabidopsis thaliana columbia
cgtccggtcagatcaaattcagaatcagaatcaatttttttttttggtcggagtaaataaagccttggtttcgggacccaaatggaaaaaaggggccgttggaagaaaaattgggggaggtcctaagaagaaaccgttttcccgttgggttaaatccggcctccagtttcttgtcggtaggaccggtcggttttttaagaaaggtcgtttttcgaagcgggtcggaaccggggctccggttttttttgccgccgtcctgaagttttttgctgctgaggttttttagctttctgttaaccttgcatgggtttacaaaatgaaccgttttttc

SEQ ID NO: 181799 - DNA, 349 bp, Arabidopsis thaliana columbia
gggcggaccaagccttccgaccaccaaacttaccacctcctcctttgtttatgggattataaattggcctgtgggcagagagtttatatccttgccggctgggtaaccttttcctaggaataaagtccttgttgtttccttctttgtttgcaccaatattcctttccagtaggtttttaaccttcacctttttggtttacctccaaattccataaacttttttcaagctttaccacctgaattgcctttttttttttccaactccacaatttcccagctttatggttttttttaggcaccacctttagaaggtccataattttattcctcctgcttgtgaaaccaaaaa

SEQ ID NO: 181800 - DNA, 456 bp, Arabidopsis thaliana columbia
cccgttccggatttccggggccgccccacccgtccgcggccccggggggaaaaattggtttttggatgcgattcaccaccaccagccgggtccgggaaaaaaaaagattggaccggctaacctgggccgcttccaggtttttcggggagggcctggccatgggcagccgtccctggttccctgccccctggttgggttttggggaggatggcttccttagcattcctggtttctccggggttggggtggcaaatcctggctggggctctgtccattaccggggggccaaggctaagggttttatggtttgggctcctcccaaggcctttgctctttttggggggtccagccagtcctttttttttcaccgggtcagttattagtgggtccattgcacccaagttcttgcctggggcttcaccagttggaagcgtcccgttcccttcgtttctaaac

SEQ ID NO: 181801 - DNA, 298 bp, Arabidopsis thaliana columbia
  unsure (1)..(298): unsure at all n locations
caaccctcccgnttaatcctaatccccttttaagtttttttttttatacaagaccccaaaaaggaaggaagatttttttacattaaaagccgccacctcagtccttccctccaagctatgtaatcaaacctccacccctatcctcattgcttgcctttaacaaaaccctgtaatcaaataatcatgttaagacattttccaaacctaccttgtctatgttatttcgaaaatattcctcaccaattctacaatcttatacattatatattgtctcttaaacaatcccttataaattgat

SEQ ID NO: 181802 - DNA, 419 bp, Arabidopsis thaliana columbia
gcggcccacacccttccgaaaaaaaaatataaaaaaaaaaaaaaaaaattttttttaaaaaaaaaaaaaaaaaaaaaaaaaaaaaagaaataataaaaaaaaaaaaaaaaaaaaaaaaaaaaaaatgggggcgccccttttaaaaaaccaaaattaacttcccctgcattccaacttatttcttttttttttttgcccccaaatttaattcacctgcccccgtttttaaaacccggtaatgggaaaaacctggggttccccaaattaaatgccttgaaaaaaaatcccctttttccaggtgggctaaataccaaaaaggccccacccattggcctttccaaaaattgcccaaccctaatgggaaaatgaacccccccttttatcgccccttaaaacccgtggtttttggtgtttccccc

SEQ ID NO: 181803 - DNA, 249 bp, Arabidopsis thaliana columbia
gggtcggaccaacccttccttttatccattaccttgtgctaccttttttttttttaaaaaaaggaaaaaaccaaagaaagaaggctttttctttaaagcgcgccaaccaatttcaccccctaaaacctttcttatttaaccattattcaattgaatctccatactccaaacaatcataaccttacaattccctttcttcctaaacctaaacctccctcaaaattatgcttaatcttaattagttcttcc

SEQ ID NO: 181804 - DNA, 116 bp, Arabidopsis thaliana columbia
gaattccgggccgaccaacccgtccggtaaaataaaaagagaaccaccaggatttttttttgttttcaattatcctctcactggcgggggggattccttactaggtcaagcccacc

SEQ ID NO: 181805 - DNA, 208 bp, Arabidopsis thaliana columbia
ggaattccagggccgaccaacccttccaataagaaatccaaagcatcgaacctttttttgttaattactaaaacccatccaaggggagagtatcctttttacttaacggaaaagcctccataaaacaacgattggaacacatttattcctttcttattaccctaaaaaatccctaagtaaccattacctaaaattaatcaatagttat

SEQ ID NO: 181806 - DNA, 376 bp, Arabidopsis thaliana columbia
gaataccgggccgaccacacccgtccgggtggattcgggggttccggggaaatccggttatggggtatggccaggaaccggtgggttttttaaggtttggaggctaataacggaaattagttccaaggctgggatggggaccaccaccatttttaaagtagcctctgttccaatgggttaaccgcatttgaagaaaccgacccggcctttgttggaagcaaaattggttctttccaaggccatccaccgggtattgtttcccgtttctcctgttccattggtccttgaatcacagcgcaccaagatttggaactgaacttgcaaaatttaaaaaaccaggttgggtttgatccaaaaaaacaaatttttttttatg

SEQ ID NO: 181807 - DNA, 447 bp, Arabidopsis thaliana columbia
attcccgggcggacccgccgtccgtttattaaaagcccttccctaaaaaccttcttatttccattccttttcctcttcctttgcgggtttcttttttttaaccatttatttttaatatccatccttataaaaggaaattcagattcccgaagcaaactttaaatcttccatcataataatctggtccgttccacttccatccttccatttttttggggggattattcctaataaaagagagatcccctcattaaaaaaaagctccctccttccttttcttttcctcccctcggtcaagggcggtcaaggctaataaccatccttttactctttttttcctaaccaccggccaagaagggattgaccagccgcttaaatctaagtttaattcaataaacgccggggttgttccatgaaagcaagcgagagaagtttctccggggatgg

SEQ ID NO: 181808 - DNA, 425 bp, Arabidopsis thaliana columbia
cgggtccggatttccggggcggccccacccgtccgcatggggatccatggctttggatgattgagttgcttaaagggcttcaaccatgggtaccaccgcgggagtcctgggggctaagattttgccagcaattcgaccttggacctggggcattggtaaaggcctaatttgagttccctaagttattttctaattctcggccttttaaattcccttcgggtggctggacccaagttttgtccatgggctttccaagggttcctgggggggaccatggggattccggggggcaggacccgttccatgggaggtttaaggatttagtccataaaggattagctttgggggctgaacgttggatggctcctctccaaagaaggggggggggattcacgattcttttggaccctgcaccttcttccctt

SEQ ID NO: 181809 - DNA, 459 bp, Arabidopsis thaliana columbia
attcccgggccgccccacccttcctaaaaaaaaaaaaaaaaaaaataataaaaaaattttttttttaaaaaaaaaaaaaaaaaaaaaaggggaggtttttattaaaataaaaaagaaaaaataaaaaaataaaaaattaaaataaatgggccgcccttttttatataccctgccttccttcccctccttttcaacttttaacttttttttaatatccccctaattttatttcccggccctctttttaaaacctttgggccgggaaaaccccttcttttcccaatttttttccctttataaaatttcccctttttccaattggctattaattaaaaaaggccccctccatttcccctttcctaacattttcttacccttttttttaattggccccccccttttttcggtctttttaccccctcttttttttttttatccccccttttttccctttctttt

SEQ ID NO: 181810 - DNA, 407 bp, Arabidopsis thaliana columbia
cggggcggccccagccgtccggtttgggaccacaggatttggggtaatagttttagtggtggcaagggtggtcctttgggggtcccaatggtcaacccctaagtttaccggcaggttccctccgggtccaatgggtttcccgaccttgggagggccattagatttttttaagccttatggtttctacaagacctccccatttttaaggaaaaagatgttaaggtttgggccattttttgggccaacctttttgggggtaaaaaccggggtttcgccggttaaggttgttaccatggggattttaagacaggagaccaggcttttcattttagagtttccggttggtttaatgaagccatggggaaaggatggctggtccttgaagatgggaaccttccccaggccct

SEQ ID NO: 181811 - DNA, 406 bp, Arabidopsis thaliana columbia
gggcggaccaagccgtccggaatggaaataccttagattcaggttttttttttgtgggaaccacaccaggagcgggtggggcatgtttaaaaagcttggggccccaaaaaaagacccatttggcttttgtggattaagtcccaacaactccattttaaaaattcggaacccttcaacctcgtttaaccgttccataatctaggaatatttacctttattagctcttccagtttcaactccttaaacaccatgaatccaggccccggtttttttctccatccctaaaaactttttggtgttaattcctattaacatctcaaaaaactttggtggacctgccttctctagttcctattcaataaacaattccaaaacctgtcctggagctgttaaatttctcgggttt

SEQ ID NO: 181812 - DNA, 441 bp, Arabidopsis thaliana columbia
gggtggacccaggcgtcggattttttttttctaactaaatcctccagggttcctttttttttggcacccaaggttcctaataaggctcctcttcctaagttaaaatttttccctcctttaaccaacaccaaccctttggcttttcaaaacaacccttttttaacgggaccaacggcggtggggcggccaaacaacatcaatttttataaagcagttcttccgaagaagccacaaacatttccggttcctcctattccatttttttccaaccctccttactttgacttgtttggcccggggttggcggggttaaacgaaccagttgggtcaggcaggcaggctttttcggggtccttggggggattttccacggggtttcctacggctaatggggcttggtggccccaccattttaggacttggaggaccagggggattctg

SEQ ID NO: 181813 - DNA, 309 bp, Arabidopsis thaliana columbia
  unsure (1)..(309): unsure at all n locations
ggaanccggggcggaccaacccttccgttctttcccttgtatgttaatgaattttttttgtaagatccaaaccggaggttgcggaggggcatccttgttgatacctaaaaaaggtccaagctaccaaggcccccttccactgcccgtaacttgttgcctctacttgccctcctaatgcaaggctttcctctaacacaaatgcttaaaatcctttgtaaacccctcaaatgcctttaagccaacggtccggcctcttcaaccttcgaacctttgaaccctgtttagggacccatgttggctaaccatttg

SEQ ID NO: 181814 - DNA, 212 bp, Arabidopsis thaliana columbia
gaccaatgaaagagttgatgttgagattatttatagtggccgaagaggttttggtggaagggggaggcctggtcctatcaccagccaaaaaaattaaaggggccgttagaattccctaattttttttaataccaaacctgacctcattttattccgttttttgttttaacctaccgttaatccactaatggttattacctttcctcacctga

SEQ ID NO: 181815 - DNA, 247 bp, Arabidopsis thaliana columbia
gtcagatcaaaatcagaatcagaatcaaatttttcgttttgtcggagtaaatcaagccatggattccggaaccaaagtgaagaaaggagccgctggaagaagaagtggtggaggtcctaagaagaaaccggtttcccgttcggttaaatccggtctacagtttcctgtcggttggatcggtcggtatcttaagaaaggtcgttattcgaagcgtgtcggaaccggagcttcgttctttcttgccgcc

SEQ ID NO: 181816 - DNA, 219 bp, Arabidopsis thaliana columbia
taatttctctcttcatcttctcgctctcgatctcctacttaagctatagtagccagcaaatcaatcaagcaatccgtacaatggcggccaggaagatgaacaagattgccgtggcggcgctgttcctcgtcgccgtggtggtggcggtcggtaccgtgtcttgcgcccactttttggttaggggttggacctggttccaaatttttaaccttcttttcc

SEQ ID NO: 181817 - DNA, 263 bp, Arabidopsis thaliana columbia
  unsure (1)..(263): unsure at all n locations
ggcttccgatcacctttaccaaaaccttttaaatctcattttctttttccacaacaatataccctttccagaaagattttacaatcatttgggcatgggccataaaagnactaaaacaaacttactaatacctttctataaaacccacaatacatccacaacaatctacttaccaaaaacataatttttttaatacttatactacctattaatatgacattccaccctccatcttgtattttaacaaacaacttcctccaaat

SEQ ID NO: 181818 - DNA, 95 bp, Arabidopsis thaliana columbia
aaaaaaaaaaaaaaaaaaaaaaaaaaaaaaaatttaaataaaaaaaaaaaaaaaaaaaaaaaaaggaaaaaaaaaaaaaaaaaaaaaaaaaaaaa

SEQ ID NO: 181819 - DNA, 325 bp, Arabidopsis thaliana columbia
ggccgacccacgcttccgtttacacatatcctttatctatcttctcctttcattcaaaaaagcgaaaaatcaaaaaagaagagctttttcttttaatctctgcaaacatatttaacaaccaatacctcttctttctttccaattattctttaattttcatcatcataatggtcataacttaccatttctttctgtcatacctaaattccaaccaaaatatattttatctttctattttctacaaaaaaaaacttattattttttttaaatcaaattctctttaccattccatactcacaaatgctcccccatcccataagtaatc

SEQ ID NO: 181820 - DNA, 259 bp, Arabidopsis thaliana columbia
tttccccaacccccatacaaccaggcaactcttaaattttaaagctctcctaaaccaccaccccaccttcctaaatccttctctttaaccaaaacctcattcccctcctttaaaacaaattcctcctccaccactgtttcacccccccccacaaaaaaatctccctttttattcaccccaccactttttaacccaaacacacctttcttctatctttcctttattcaccttttttctttttcataaacttcaatcttta

SEQ ID NO: 181821 - DNA, 257 bp, Arabidopsis thaliana columbia
aaaaaaaaaaaaaaaaaaaataaataaaaaatttttttttttaaaaaaaaaaaaaaaaaaaaaagagaaagttaaaaaaataaaagaggggagggaattataaaataaacaaatttttttttgggccggccgttttaaaggttccatctttacttatcccgccttgcgacttttatacttttttttttttggtccccttattttttttaccggcccccttttttaaaacttgggacccgggaaaaccctggttttcc

SEQ ID NO: 181822 - DNA, 225 bp, Arabidopsis thaliana columbia
ggaataccggggccgacccactcgttctaaaaaacatccatcaatataatattttttattttttacaaactaataaacaacctggagcgatgttttcttacattggcggagggaaattatcaccaatccaccaaattctcttcttcatccaaacaagtcctatataatgttcatccctatatacccaaagctaacgtattttttttttcaaatttatactacatc

SEQ ID NO: 181823 - DNA, 211 bp, Arabidopsis thaliana columbia
gaacaatgagagagttgatgatgagaataagatagtggacgaagaggatattgttgaagggagaggtcttgttctatcagcaggcaagaagaataaagtggtcgttagaatttcctgattttttttcataacaaatctgtactcattttattacgtattttgttatgaactaacgttgaatcactaatggtttataacttttctcaactga

SEQ ID NO: 181824 - DNA, 405 bp, Arabidopsis thaliana columbia
cggggcggcccccccttccgggaaaaccattaaaccttggaattcaagtatgggggattttaacctaagccgttaacatcctggaggtggtccaggttagcccgcgcgtttttaactggttcaaactccaactcatttacttggactggggtggggttaaaacttaacccggtggaccggagttttttttacaccgtccccgagctgactgcgttttttttaatttttaaacttaagtcctttttttaagccacgctcttccattatttccaactcgccggccgcttggggggggattcaatcaaaaccaaaccatccatgtgttattttccggacgccaaaaatgccgggtttttaacggtggctgggtttaacggggacctttcccatttttccggggatgaa

SEQ ID NO: 181825 - DNA, 318 bp, Arabidopsis thaliana columbia
  unsure (1)..(318): unsure at all n locations
tttgaacaaatatttttataaccccagattttttttttatatgccttcacttcacaagcgatgccgcnggttatttttaaaaaaccaatatcaaacctaaagacattcaaaaattcttttcttgcccatcatttaatttaggttcagttaaaactttcccaccctgtccccattttttaattaaaacccttccagaaaagcttctaattttattaaaaaataaattgaagccttttttttcagaaacctcctccactattttccaattgccggccgcctttggtgggatttaattaaaacccaacccttcattttttt

SEQ ID NO: 181826 - DNA, 356 bp, Arabidopsis thaliana columbia
ccgtccgttgattgaaggacctgaaacagaggttgttgttttgtgctcccaacggacccaccgtgtacccttccatttatttacagaccgcggttcgttgggaatcaatctggatggccgggaacaattaatttttaaccctagaacttacacccttttcaaccctgaccatttttctcctccactgaaaaagaggggcaacttgggggccttactggtttaactatgcccggtttcttagcccacacggaatttcctttggaggggagaccttggaaccgattgcagaaattgacatgttggtaaaatctatgaatggtattgtagcaatgcctctttttaaaaatgggaaagga

SEQ ID NO: 181827 - DNA, 379 bp, Arabidopsis thaliana columbia
accacacccgtccgcggacccgggggtggatggggtttggggtaatttttaaaattggaaaatcgaatggattaataactactaactaagaagagggggacctaattttttttttttcaaaaaaaaaaaaaaaaaaaaaaaaaaaaaaaaaaaaaaaaaaaaaaaaaaaaaaaaaaaaaaaaaaaaaaaaaaaaaaaaaaaaaaaaaaaaaaaaaaaaaaaaaaaaaaaaaaaaaaaaaaaaaaaaaaaaaaaaaaagggggggggccttttaaagggacaaaattttataaccgggggttgggaaataaaaattttttttaaggggcaccaaaaaaaaaataacggggcggggtttaaaaaaggggggaaggggaaaa

SEQ ID NO: 181828 - DNA, 374 bp, Arabidopsis thaliana columbia
  unsure (1)..(374): unsure at all n locations
aacgggncgggaaaaaggggcggaccaaggcgncggaaaagacaacnggggnaacaaaacaaaagactaaaaagggcaaaggaccncaaaaagagagaggnaaagggcccaaaaaccncaaaccgcccggaagaaaaaaacccggcaggaaaaagggaggggagcaaacccaagccgaagaaagacccaacgggcaaaaaccgaaagggggaccaaaccgaagcgaaggagggggagggaaccgaggaaaaccaaggacaagcaacaacaacaaaaacgcgaaaagagggaacgggccaagcgggacaagaaaaggcaaaaaagcaaaaacaaggagacgnaaagaaaaaagggcaagggggacccaaccaaaa

SEQ ID NO: 181829 - DNA, 338 bp, Arabidopsis thaliana columbia
gaaggggagccaggtttaatcagttggttttttgctttccttccagcctttggaatccgggggagagccttgaggggaaagagaaggttgtttgtattggtttgggactttaaaatgtaaattggcaggacttggtttgattggccattaataaacctcaattttttttcaaaaaaaaaaaaaaaaaaaaaattaaaataataaaataaaaaaaaattaatatataaaataataaaaaaggggccggccgttttaggggtcccaggtttcctaccccggccttccacacgattattttttttttggggcacctaaaataaattcaccggcccggcttt

SEQ ID NO: 181830 - DNA, 419 bp, Arabidopsis thaliana columbia
  unsure (1)..(419): unsure at all n locations
cggggcggaccaaggcgaccgggaggaaaaaaacngggaaggaaaaacaaacgggggggggaaaggagcaagaacaaagcggggggggaaaagaagaaaaccggccggaaaagaagacaaaaaggaacggaaacaggggaaaaacgaaaggcaacaaggggggaacggaaaaggaaaaaaacaaccaagaaggagggaccagaaggagaaaggaaccacgcaagcgagggaacaaagaaggaaaaagcgagaccaggaagccanccaagaggagaaaaggaaaacaaaagaaaaaaggaaggcaggaaaaaaaaaagagaaagaaaagaaggggccaagaaacgagaaaaacgaggaaaaaaagggaaaagaaggggggggggggaaaaaaaaacgaaagaaaaggaaagagggaaggc

SEQ ID NO: 181831 - DNA, 378 bp, Arabidopsis thaliana columbia
tttaaattttggcaccttggccttcgccatggttcctaacacagggaaaatccaatttaacatggattaaaaacctcccattttttttaactgggggtccgaaggatctttttccattatttttaactcgaacccttagcagcttaagtttgtgggggaaggctgggggggaaggctcaaattcatggactgatctcgccgtggttggtccgattcaaaaggttggggttaggtctgaagatgggttaggttttatgggttggggtttggctggtttggaagcttttggggcataatggaatttaataacggcaatcgccaaatggcccgtattttgaggcggattcgaactagtgggattctggttctccacggggt

SEQ ID NO: 181832 - DNA, 300 bp, Arabidopsis thaliana columbia
gtttcttaacaggcttgcaaaaaaacttgtgtttcaaatcccaataaggtccctgttgggaacgggttaaggtggtggggaccaacttttaaaacgtaaaataaggggggaccttgacaaacaaattttgaggttaacaaccaacataggaagttacccaataatttctgtgaattccgctaaccaggggtttttcttaattgatccgtcaatgtttacgtgtgcttgttccccttccaatcaatggtttggggtgggatgggacatttctgttagttttcaatgaccaaccctttttaa

SEQ ID NO: 181833 - DNA, 422 bp, Arabidopsis thaliana columbia
accatttaaaaaacctaagccaatttttttttttttttaccaccaaaattttggaaagggggatttttagggtttccatggtggttttaatgagggggatattttccgccgtggcatgggcccaatttggggcaccagccccaagtcctacttttggatttagggcgacctaagggtctttcgggtaagttggagtggcagaagccccggttttggttttgggttcacttttttggatctaagttacggggagggggatttcgaccagggttggttttgggggtttaggccattaataattattcgcggtttggggtgatttccgaagcagtttatagatctatatttttattgtgcccttttttttttcggtttttatttaactttttatatttggatgaggttttactatttctttttta

SEQ ID NO: 181834 - DNA, 369 bp, Arabidopsis thaliana columbia
gaacacaacaaagggtttttcttggtttagtaatttaactgttacggttccggcctggggggttttttttttttcaacggttccaacgacaccggttttttaattaaaagccaactcctccaagcttttcttttttttccaagattggggttggaggataatcttttgggggaaatttccttttccacctttaattgggggttggttacaaaaaagacaagcttccgttgggggccggcgtaaatttttccgggggccccgttgtaaagggctttttacagaagagatgggggatagggtttggctcctatggaggaaatcaaagcaaagaattctgctatggagactgttgtgaaataaaggatgggg

SEQ ID NO: 181835 - DNA, 337 bp, Arabidopsis thaliana columbia
gatggatatttggtggcaggggaactttggttcaaggggtagggaattttcctttggtggaccggattaatttggggcatgtggattttgaataaggaacgaaaaaggttgggtccggaacaattttgaggtggttaaacaaaagtttttagataaaagagcccttttttccggggaacttaaaggggtaatttgcagtggttttggggggtccatatgtgacgggaccaaggttgacgttggcagcttgaagggtaagcaggcactcttgagaagggtggccggcgttggagtttttcttgcaacagatgagggctttaatgttggagaccaagga

SEQ ID NO: 181836 - DNA, 89 bp, Arabidopsis thaliana columbia
gataaaaacgaggggcaacaccaacctttgtttttgtgtgtccggatgtttccttccgccgcggggattaatttccggcttgaggccac

SEQ ID NO: 181837 - DNA, 423 bp, Arabidopsis thaliana columbia
ccacccgtccgttgaaggacggactagctttggctaaaattttagttccggcgtggaaaaaattaaccatcctgggacagccaacactgatagggcctcattaaggaatcattggattgatggtgggcttctacgctgctatgaaccgggccagttttatagtgacaacgcctaccaaccctggcttgagggggggggcgcctttattatctttaggggcgaagcgggttttacctgttcctcccaaagtaatggttgactctgcgaataaagtgtcttacctctctggaaggcctcatgaaaatttcaggcgtaacaactttgctagtccggaaaacgctcaactttgttggtatccaacggcgcctaatattgggtaaattccactggggaagcttgataaattgttaccggaattaggga

SEQ ID NO: 181838 - DNA, 343 bp, Arabidopsis thaliana columbia
gaagaggaataataaaatggttagaaaagggacgttggtattgagaataactggtacaggcgtgcggttttctaccaaccagggtccacgacttggaaaaagggaggccttcgaatcttttttttttggggggtcttcctttacttatggcctacatgttggtcctttaccaaacctcttttgttcctctccgaaccgaaggtggtggtggggcgccaccacccagggctcccctggccaacgacataccgaaaccggatcggttgatggctattgggccaccaaaaccgaaccgtttcccatggtttaaagggggatcccccttaccttagttgaaagaacg

SEQ ID NO: 181839 - DNA, 159 bp, Arabidopsis thaliana columbia
  unsure (1)..(159): unsure at all n locations
gaaaacggggcggaccaagcgnccgaaaccacaaaaggccggcaaaaaatctggttttaaaagccaggaaaccaaccaacgggggggcggaatatcaaacagggcccaagactgaaaaggagaaggagtaaaaaccatacaaataaatgggcagtaaaa

SEQ ID NO: 181840 - DNA, 389 bp, Arabidopsis thaliana columbia
gggaaaacccgggccgacccacccgtccgttaaagaaaaagggcggaatccaaggttttttttctcggagcctggcttaaagaagtccagggggtatttggattggccttggcccaaaaaagataaacttgttcttgctaaaaaaaaaagtgttgtggcccgcaggctttttttaaaaagagctgtccagtttcccaaaaattcccctgggaaggttaccgggttgtcccgatggaagcgggagcttaatttgaagggaggttttatactttgcccctgaggctaagctgttttttataattcgattccgtggattaaatgccatggacccaaaaaccatgaaaatcctgcagttcttgcttttggagacaaattttaaatggggggtt

SEQ ID NO: 181841 - DNA, 460 bp, Arabidopsis thaliana columbia
cgccggccgacccggcccggaattcccggtccgcccacacccgtccgccgaagccccataaaggaggaggtcgccggtaaagtgaaaggccgttgttggggtttttgaagaagttgaaggattcagcctggttcttggtcgaaggcctctttttttaatcggtttgggcctctaagccgaccgcagggggggtcaaagttcctttgtggcaaagcaatactgggggattagttttcagcaaatccttaaattcgacctatgttcctttaatgtccggcccctggcagttaaacaatggccttgttggaactcaacaaaggggatggattagctggaatttctttgctggcaatatcaatgaaactgttataaaggaacctgttgttgtcttggttttattggccctggctgtttaaggtatcttccatgtaaatattgtgtgtttgcgggtccaattttg

SEQ ID NO: 181842 - DNA, 166 bp, Arabidopsis thaliana columbia
acgggccgaaacccggcggccacccgccgagggttccgtgggacattacatttctttttttaacccctttaccagtgtgggggggtgtccatgcttttaaggggttggccaatggccagtttttaggaccggttatgggaggactggtcaaccaaaaactaacttt

SEQ ID NO: 181843 - DNA, 349 bp, Arabidopsis thaliana columbia
ttctttttatttttatctttttccatggatcttttcttttttttggctggtttaaaagcttttggatctttttttggatcgatctacgggccactgttaataccatcaacgacctaatccggtttaaatttttcctaacgaaatcgaaggaggatgggatcggttaaggcaccagtggttggtccggcaattggaccaaaacaggtgggggcttgtgcttaattggtaaactccactggtttgaaacctagaagccaatttgggggtaatcggccaaaaggggtaaggtttaagggcactaccccaccattaacttttagatggtgcaccaggagtttcaagggggttt

SEQ ID NO: 181844 - DNA, 379 bp, Arabidopsis thaliana columbia
gaggcttcctttttttttttttttttttttttggcgaggaaaaagaggaggagggggatcagggacctcgaagggggggggggggggttggcctcctttggcctttaagtttttttttttttgggctggaatttcgtcggcaaaaagggccataaatcggttttggcggttgttattccgggttcaaaatcaacctccgttgcggatttttacgtggggggctggattagttggccatttaaaagggggatcagttccaaagggatcctttccatttttaatccagatgattccagtttcggccttaaaaacgttcgatcttttggacctgaaggaaggaaaaaggatggtccacaggttcttccaagtgccaaagttt

SEQ ID NO: 181845 - DNA, 111 bp, Arabidopsis thaliana columbia
ccacacgcgtccgttggtttagaccgctggcggtcgttttagaggatccaggcttacgtccgcgtgcttgcaacgtattagtttttttatggggcaacctaaattaaatta

SEQ ID NO: 181846 - DNA, 389 bp, Arabidopsis thaliana columbia
aatttttggttccaggaatgggaggtttggcgacctcacttaatggcttttccacactcaatttggttcttggaactaataaccttaaaaccttaaactttttaaaaccaatcaccaccaaataacaccctggtaaaaccccagaaataccttcaattcccaacgtttttaagttctttaaataatcctttttccttttggaagtaatggaatggctttttttcttggacccacaggttgcagaaccagttgggggagatttcggatttttagaagggggatcattggcgtggatccacccaatggggagggggggttaattggcttccacttttgggacgggttacttaggtgggcaatggagacgtgtccgtccgatccagaggggg

SEQ ID NO: 181847 - DNA, 377 bp, Arabidopsis thaliana columbia
aaaaccgggccgcccacacccttccgatgccggaaaaatgtgaaaccagttaaaatgtatttgctccaattggaggaaaatgtgaccgccgtaataaaaaatttatcctaaaggaaaccagccaaaacctccttggcctttaactggcctcgaatccttgcccaagtttatttttgaaatcgtagaatgaatcgtttccatggtttggttggaacacataatctaatatttactctttaaccttcttttttcccttttttttaacaaggtttccattaaccttaataatgttgggggtctttaaggcactgttgccttggcttccttatggcttaaccttttacttgctttaatcgttgggccaataattctggttt

SEQ ID NO: 181848 - DNA, 188 bp, Arabidopsis thaliana columbia
agtcaaaacaataaaactttgaaattcagtaatggttgaatttcaactcagccgttaacatacttgaggtggtccaagttagcccgccgtcttttaactcgctcacactcccactcacttactttgacttgggttggctcaaacttcaccccgttgaccgagtttttttttaccacgtccccgagctg

SEQ ID NO: 181849 - DNA, 283 bp, Arabidopsis thaliana columbia
  unsure (1)..(283): unsure at all n locations
ggggggnnttaggacgaataaaattaagaactctttttttttttttaatggcgaacgccnaacgaggggngggtaaagctataaggccaatttggaaactaaggaccaccaaagatttcttcttgcccataataaatcaaatacaagccttctttgaaaccatgtttccgatggagaaaccagagccatccaggaaaggctctaaccctaataaaaagtggggtggtgccatggttgccggtgttgttgaagccataaccactaacggcggtttttttttttt

SEQ ID NO: 181850 - DNA, 130 bp, Arabidopsis thaliana columbia
ctgtattgaaggacctgaaactgttttttttttatatagtactcctatcgactcacggggataccctttcttttttatacagaccgtagttttgattaggattctataattgattggcgttgaacaataa

SEQ ID NO: 181851 - DNA, 203 bp, Arabidopsis thaliana columbia
cccacgcgtccgaaaaaaaaaacacaaaaggtctaaagggcctttttccattatggacgaacaacacccctgccggggagggaaaggctgtaaacctgtcccccgcaacatccgaagaccacgaaagcgggcgcgtcgacaatgaggaagaccgagggcacgcaaaagggccaatcaagaaggccaagggacggatccgaccg

SEQ ID NO: 181852 - DNA, 413 bp, Arabidopsis thaliana columbia
  unsure (1)..(413): unsure at all n locations
ccggggacgccgggggtggaatggggctctggggtatattttttaaattggaaaaattcgaattgtataatgtactcacttaacttagtgagtagtgggtacataaaatttttttcttttctcaaaaaaaaaaaannaaaaaaaaaaaaaaaaaaaaaaaaaaaannaaaaaaaaaaaannaaaaaaataaaaaaaaaataaannaaaaaaaaaaaagaaaaaaaaannaaaaaaaaaaacaaaaannaaaaaaaataaaaannaaaaaaaataaaaaaaangggggggggggcgcctttaagaagaaaaaagattttatttccggggggtttgggaaattataaatttttttttttggggacccaaattaaaataaaggggccgggttttaaaaaggggggagggggaaaaa

SEQ ID NO: 181853 - DNA, 294 bp, Arabidopsis thaliana columbia
aaaaaataataaaaaaaaaaaaaaaataaaattataaaaaataataaaaaaaataaaataaaaataaaaattaataaataaaaaaaaaataaaaaaaagaaaaaaaaaaaaaaaaaaaaaaaaaaaaaaaataaaaatataaataaaataaaataaaaaaaaaataaaaaaaaaataaaaaaaaaaaaaaataaaaaaataagttaaaaaaataaaaataaaaaaaaaaaaaaaaaaaaaaaatattaataaaaaaaaaaaataataaaaaaaaaaataaaaaataaaaaaaaa

SEQ ID NO: 181854 - DNA, 443 bp, Arabidopsis thaliana columbia
cgggccggcccacccttccgaatgaatatctggtgccagggaacctctttttccatgtgtaaggaatttcccttccgcgaacctgtttaatctggggcagggcaatcctaaataataaacaaaaaaggctgcgccccacacaacttttttttgttaaaaaaaaattttataaaaataaccccctttttcggggaacccaaaagtgttattcttcacctctttttgggagcacatattttacaaaaccatggtttacttttttaccctccagggtataaagacccctcctaataggttgaaaaggcttaaatttttcctaccacaaagaatagcttctatttataaaacccagaaacttttatccactatgctcaactacttaaaacaaagcttgttatttatgtgcaaggacaaggatcatcagtccctccacctgtcttgac

SEQ ID NO: 181855 - DNA, 409 bp, Arabidopsis thaliana columbia
atggcggaaaaatgtgaaagcagtttttatgttttgcaccaattggaggaagatgggaacgtgttattaatagatgtatccggaaggagagcatgcataaactgcttgggctttaactgggctcggatactgggccaagtttattcttggaatcggaggattgatcgttcccattgctcgggttgaacacataatcatatatttactctttgacccttctttctccccttttgttaacgaggtttcaattaagcttgatgatgtttggggtcttttaggcactgctgcctttgctttcttatagctttaccttctacttgctgttatcgctggggcaatgatgctgagtttgaaggtaggtcttcattaccattcatgcattgaaatggggggcctctctatggaactc

SEQ ID NO: 181856 - DNA, 366 bp, Arabidopsis thaliana columbia
gtccgaacggtcgggaagggaccaccggaacctcaataaagggccccgccggcggtaactgcaaagggagcttggttgggggaacctaaccaaagcggcccaccacctacggttgcaaagcggaagggagggccgtaccgccggttcatggaaggggttgggggcatttcttcttttgttccggcccgcctttacaaattaagccaatagtcgacaagcctgaatgggccgaataaaaagccaccagcctgggggggggacaccaacctcgttgttgggccattttcaagaaccaggctagggggagggggtcccatcgccgagaagctggtgggaggccgacaattccgttgcaacaaatttaag

SEQ ID NO: 181857 - DNA, 194 bp, Arabidopsis thaliana columbia
aaatttctaaaaatcttaaaacctttttttaatttttttttaccgggtccaagaggcagatcttggttaggactctaaccggaaggacattaaccctggaggggtaaggttccgccccaatcgccaccgttaaggccaggatccaggttagggggggcattcttccgaatcatattaggtttattttcgccgtc

SEQ ID NO: 181858 - DNA, 301 bp, Arabidopsis thaliana columbia
ggcggaaaatgggggatggataagcttttttttcctttttttaaactggggggatctgcaatcgagggcctttttgatgctaaacggggccattaccttcccaaaaggttaaggttccccgggttcaaattggattgccaaatcgattcctgggccgaccttactttaagttacccgaacctcaacacctaaactttggggggttactaaatgcagaagcagcagcgggtgtgtttccgggccttgggggcaacctaggttaattaagaccaggaaggaggcttactggttttacaggttc

SEQ ID NO: 181859 - DNA, 343 bp, Arabidopsis thaliana columbia
tgctggttttacctgtaataggatataaatttcatcctgtcccagataaaaaagacccgattttttaggggtccttaaggatttggaccaaataatggggggttggggtttttaactgttttacctttaaggttttatctacctcccactggtggctgctggttttacctgtattaggatttcattttcatcctgttcccctaaaaaaaaaaaaaaaaaaaaaaaaaaaaaaaaaaaaaaaaaaaaaaaaaaaaaaaaaaaaaaaggggggggccgttttaggggtcccaggtttacttccgctggcttgcaaggtattagtttttttttggggccccctaat

SEQ ID NO: 181860 - DNA, 231 bp, Arabidopsis thaliana columbia
ccgcgtccggcccattactttgtggccgacacgaaagaattttccattggtgagaccaagcacgttcctgaattcttggccaattttaacttcttaaggaacctcttcacgggtgggagggccagcaagggaaggccttccccggggcccaattttctggtgaaccttccaagggggccctaagttccttggcttcaaccagggacggggccaccggaggatttggaggcc

SEQ ID NO: 181861 - DNA, 275 bp, Arabidopsis thaliana columbia
cggatttccgggttggaccacacccgtccgttttttttatggataactcaaatttattagaccttattaaagggggtggctaccgcaaggtaggcggggaaattatggtttggccttgattattaccaggcaacctcaaaaccaatggggattaaaccatcggtttaattttttttttaacagaataattttttaattgggggtccctttggccaaccttgccctccttagccttttgggactaaccttaaccggggttttttccgggctgggcc

SEQ ID NO: 181862 - DNA, 394 bp, Arabidopsis thaliana columbia
ggaattccgggtcggccccacccgtccgattaaccaaaaccactagagttaagttccttttagggtagggaagagagggcggttgggggtttagccgggttcctggtggttttaatggggtttaaggcagcaaccgaaccaggaccggttccaaccaaaatggtcggacctggtttggccaaccaaaaaacctttgtagcgtccgttgtggtcgggggacctgttggaattgggggacccgggggggttgaacctgtttttgtgggtgccgccgtgggagttgtgggtgttgccgaagttttgcctgttgccggggtaggcggcggatttggtggcttaggcggtggtgtaggtggccttggcggcctagggggcctaggtgggggttcaggtt

SEQ ID NO: 181863 - DNA, 428 bp, Arabidopsis thaliana columbia
aattccggggcggaccacagccttccgtttccaaccacggggaactgaaacctttccggccttaaatctggggtagtggggttaaatgttggtttaaccgggaaggtttcttaaaaatattatctttggatgatgaaaacaagatttttggatgggttttggaggaccgcgatgggatcggtttttatcggcgggggcatggaatttttaatgaccaaaactggtttttacgccagggttcctgtattaaaaccaaagagccggccgtgggaaaattctcctgaagctaaagccataaaagaagctcttaatccttggaggaccagggccgcagaaccaggcaaaaccccttaattcattcagggagctctttaatcctggtttaagtcaatttaactctaaaaactttcgaaaaggctgcttaagtt

SEQ ID NO: 181864 - DNA, 333 bp, Arabidopsis thaliana columbia
gaaaatggaattcaaaaaggaaaaggcaaatctgttattctctgtggaagcctgatggacctgaccggacctattgcggaggaggggttaactgcatttgcccgggggtaatggctgcggttccgcctgaaaccggcttggccggggttgccaaaggaaagagagggggggtcctttgaaggcagaaaattctaatccatggattaatttcctcggttcctggccaatttttttttttttttcctaatacgtccgttcttggcaacctaattcgcaatctgctcaatcgttctttgggggttcttaccatggaacctttgtttaagccatgtt

SEQ ID NO: 181865 - DNA, 312 bp, Arabidopsis thaliana columbia
agaaaccaggaactttgttttggaagattcccgggggaggggtggatggggccagctgggttttgcccgttaaggttaatattttggaggttccagattttggggaaggaccaaagggggatggccaggaccattttggccttggggaatccgaggggaaaccgggcaaaaccattggcaagggttgcgtggccgttaaaaaaaagagcttagggaggccattggaggggtttttggcttacggggtagctaaccagcccgctgggggtttcgggggggctctttcccgggggaccggggaggggatttgcc

SEQ ID NO: 181866 - DNA, 343 bp, Arabidopsis thaliana columbia
gggaaaggattccaaggattttgatgggaggacgccggaggctgaggcgattaaggaaaaggcccctcaaaattctgttgagaggaaaacagaacctgcggcaattaaggggaccgaaccccaaaagtttgttgtcaaaaaaaccgaacttgcagtgccagaggagaagagtaccgccttgagggcggaggacccaaccggaggctggggggcgattcaggttcaccagcagcagggagctgcagtttccgggagctgttaaaacctttttggttttgtccagagcccaaagcgtgaaaagtttgttgggatttcaggggtagcattaacattatgaggggtt

SEQ ID NO: 181867 - DNA, 398 bp, Arabidopsis thaliana columbia
ggaattccggggcggaccacacccgtccgattgggaagtttcctcggctttttggttttctttggatgaaaggggaccagttttggattggaattttttggctttaactgttatggcaactgggattaaccagttaatattcttggtaataacggtttttttaaaattggaccaagtaactgactttgttggtggaaaaaacttggttttactggctgggttaacacttgttttaaaagcctttgggcattttcaacagatagtttggactttgctagttggggtttggggcctccgctggggaattttccttttaatgaggacctggcattggggggaggaccgcccctttgatgaccagcggggaaatatagggggactaataatttttgggactt

SEQ ID NO: 181868 - DNA, 285 bp, Arabidopsis thaliana columbia
ttacaacaaaggccgggaaaagggccacgagccatttttgaacggccatggatcctaaagaaggcccccaggattccaaccaaatccctcaattctccttggaaaccaaaggtttaaatttgcacccataagggctctcaatgttttggagccaagcccacggacaaaattaaacagggaaggctctttttgggctgttccccaaaagaacattagaataaaggttagggaaaaccaaaaggagctaaggctttggaccaaagcgaaaaaaaatcctgttgtatc

SEQ ID NO: 181869 - DNA, 359 bp, Arabidopsis thaliana columbia
  unsure (1)..(359): unsure at all n locations
cgggncggatttccggggcggaccacacccttccgttggaaggttggcaacctccgttgcctttaatcccatggacaccctgaaaatttcacaacggtatcgattacggaacgacggaaacccttttgttccaggggagggaattggcccggaccattggctctttataaggggcccaattaagaaaggtaaggccgtttattggaccactgttaacgcctgttaagcgggttattaagcctaggctgggcgggcggtcaacataacaagagccgtgacattttaaggatggatttaattccacggatggggagctatttaccgtacttggtacgactttaacagtccggaaaagcaaa

SEQ ID NO: 181870 - DNA, 162 bp, Arabidopsis thaliana columbia
ctggatttccggggtggcccacacccgtccgaagtattttaagccccaacccgttctttttttttctagcgggcctaaacttatggccggcggttcctataaaaaagtaactgggaaaaccttcgtccactttggacctacttcctgggaaatttaatgttg

SEQ ID NO: 181871 - DNA, 255 bp, Arabidopsis thaliana columbia
gaattccgggtccgcccacacccgtccgaaaaagggttttaacagaaggacggttttttcttttcaccgccgcggaacccttcagcggggaattttccccacttccgggtcgtcaataatgatgaaccgtcccaacgcctaaaagggggaccacctacttcttgccattattcatgcccaaaacctggtccttagacttgggactcacttttggacccgccgggggtttatcttaagttcccggggaagtgtaac

SEQ ID NO: 181872 - DNA, 303 bp, Arabidopsis thaliana columbia
tggaattccgggtccgccccgccgtccgctttcttttcccataggtaaaaaattatttttcttattcctcctccccggttaaaccaccaggaggcattttttcttttggcgttctccgtttattcaaaacctttcggggggattctctggggaaggggggaacctattccgtccggtgctaagtttcccctctccctttctactaaaagggcggccttttttcttcctatctgaacatctttggttttcgctttcggttttggcaagaagggtgggtctttcttttgcctgggccttacccat

SEQ ID NO: 181873 - DNA, 301 bp, Arabidopsis thaliana columbia
aaaaaatttttttaaggagcttggaaaacccttggggaggtctaaggtccagcctatgctactcctcctggaataactttttttttaaccggtttgggggggggccttagatttggattccggggccaaaaagggaaacaattccggacccgcaattagcatgggggcctttcaattggtggggcctaacgaaaacccacccataattataaattaatccggttttgcaggcaaaaccatcccggcggaacccttggtgtccgtagccttaaggagagggggaattaccgggccttttaaa

SEQ ID NO: 181874 - DNA, 394 bp, Arabidopsis thaliana columbia
gggttggtcccagccgtccggtattttttgccggcccatcctagggcaagctaatttaaagggggcaaagtggcaaggtgctggcgttttttgatgcaaacctacccggaccggtttatttggaagcgctcctccagggggcaaatttgtcctgggcaaaagtaccaagggggaatctaccgaccgctaccttctatggaccgccggtaccgggaaccccatctttcaggggaccaacctttccaggcccagcctcaactgtggcccttttagaagatgaccagggggtttccctttgcaaagttgcggtgggagttaccgcacttccggggattgcaccccggaacccattgttgggcacctaacctttgaaaggaaaagcttcgacctgggg

SEQ ID NO: 181875 - DNA, 210 bp, Arabidopsis thaliana columbia
gccatccaaattaattatttaaagcgccggttcaataaacctgttaaaaaaaaaaaaaaaaaaaaaaaaaaaaaaaaaaaaaaaaaaaaaaaaaaaaaaaaaaaaaaaaaaaaaaaaaaaaaaaaaaaaaaaaaaaaaaaaaaaaaaaaaaaaaaaataaaaaaaaaaaaggggggggccttcttaaaggatccaatttttcctcccggg

SEQ ID NO: 181876 - DNA, 324 bp, Arabidopsis thaliana columbia
  unsure (1)..(324): unsure at all n locations
agaaattncggggtggaccacacccgtccggccggtaacggtttcctcacaagctcaaccattttttttattactcttaccggttttatctggccgggctactactttttttgccggtatgggccggctaaaatcaacggcaacgttctgttttactgggaaccggaccagtcctttgccattttgggtccggccagaattaaagcgcgcttggggtaagaacaataaagtagctcaagctccggaggtcaaattggggacgcctttgaaaatgagggggtatccgaatcctatattacggtctaaaaacaagaggatggcttt

SEQ ID NO: 181877 - DNA, 405 bp, Arabidopsis thaliana columbia
gtttggccgttaaggtttggggaaaggattttatctggagcatggtttccagttaaggtggtggtaaccaaaaaggccgcccttaaggttaaggcttggaaggctgcaaaggcagggaaatttggccaaatggttaaaaggcctgcgaggaaaatcaggccaaaggttcctttcaacaggccaaagccattgcccgttcttagaaggcctaagtccccaaggatcagggttcctccagggaccaaatgggttctttaccagatcctaaggtcccctttaactactgattctgccttgaaaaagatggaggccaccaccaccttatttttaattgttgccttccgtgctgccaggaaaaagaccaaagatgctgccaggaagatgtttgactttcagaccaagaag

SEQ ID NO: 181878 - DNA, 342 bp, Arabidopsis thaliana columbia
aaaatctttctctatttcaatggcttttttttttttaaatcttcaacttttaaccaaggttatgtccttggtgggggattggaccctaccagctttttcgttggggtctttggggtaattaaatccataatctgtggttttagcggggtttagcagggttttagagttcctgattgggaacctcgattagcagcagctaaggacatttccttagctcaggttaaaggatgatggccctccaattaatggatccccttggggccgatctgggtttatctaactggattcgggttcccaaatctagccttttaaggacagaaatcggtttcctctgtggtggag

SEQ ID NO: 181879 - DNA, 295 bp, Arabidopsis thaliana columbia
gccagggggcaaaggaagctgatccatggtttttttccaattggaccaccttccaaaggactcctggcgggagggcttattcgcagccaaggcgccccccagtttcaaccgaaaaatgggaagccttttggtgggggggctgcttctgaccatttaaccatgacctgtggccaggatggggggtccacttttaatttttcccatttccagattttcctcgttggtcaagaagaaacggttttggtggatgtttccaccacccatggttaccattaaacctcctccatggcagttt

SEQ ID NO: 181880 - DNA, 410 bp, Arabidopsis thaliana columbia
ttcccggggcggccccaggcttcgggaaggattggggcccggcctgggcccgggaccccccttggatttttccttcacccttttggggcggttgttggggaaggaaaaggctgttgaagcttccagtttttggctgtttggtcctacccctgggggggggtttccttttcctgagcttacccaaccaaacgggtctttggaggatccaccacagtttttggtccccttggcaggggagtcaggggaattggaggctttagggctggtggttttcctggggcggccaaaagcaaatgtagggttggctgcagtgggtaccagttgggaggtggagggatctggcaaggttaagctggtagcagaggttttctttgttgaggttgcaaagaagccgttggacctgatggggt

SEQ ID NO: 181881 - DNA, 395 bp, Arabidopsis thaliana columbia
ggatttccggggcggccccacccgtccggagcctggggtggttcctaagagtattaattttttttttaatcctaaggtccagagggttcaaaaattggttaaattaccgcagccggttcttgctattaaaaaaggaacctttttggatgggtggggaatgatggaagaattcctaaatcggggtttaccaaatttggatttttttttctttccggaatttttttatttttctagtccatttaaaaggaacccttgggccttcccaatcaaattcctttttttaaattttatggaaaccttaatggttattaaaaggatcatccgaaggaaaaaaggttttttcccttcaatggaaaaaaattcccttcatttttttatccggattaaagaagaaa

SEQ ID NO: 181882 - DNA, 205 bp, Arabidopsis thaliana columbia
acccgtccggccaaaaacgggggtaacctggttgttttttttgacccccttggtgaacttcacagggccggtgaaccttttattgttccaccaacaattctgttaatcctagcaaaaaaatattctatattgggtggaaattaaggaacttcttggaccgccgtgccttccaatggggtaagaaagagtaccttaggccatggcc

SEQ ID NO: 181883 - DNA, 271 bp, Arabidopsis thaliana columbia
gggatttccgggttggccccaggcgtccgagcacctttggcaccaccatggccggggatgggcctggggggatcatccataaccaccaaaccctgtttttaatcctttttaaaaccaacattaagggccaggaaccctttgggactggccggggcatcggggggaaagagcacttgctttggaaggaactggttggggggggatttgaacggggtaggatttgggctgatcggatggctagctccgccaggcattccagggattaatggga

SEQ ID NO: 181884 - DNA, 186 bp, Arabidopsis thaliana columbia
gtctaattcctaccgggaggcgggcctttgtccccgggaagctcttaaaactgtctgccggttggggccacttacttgttcggattgtactaagccgatttcaaggaaacttaaggctcctcccaaccccctttaattctctgaagttcctctaaagattccggacccaccgtgggagtccctggg

SEQ ID NO: 181885 - DNA, 289 bp, Arabidopsis thaliana columbia
cgacccacccttccgtttggaatatgggcaaaagtttcacttcgcttttttttgtggaatggagtccccttcttgggcttcaaccgttggaaaactagcccgctgtaagccaccatgggctttcaattgcccgggattaaataatcgcccttttttcctcgtaacccgaagggccccctaaatcttttttctggttccaaccaaaggggggggtatccgctgcatcaaggggggtttgcctttcggtttcccacttgaagggcctctgaaggcccgcaccaaccttttc

SEQ ID NO: 181886 - DNA, 421 bp, Arabidopsis thaliana columbia
ggtttggaatcccggggcggccccaggcgtccggaaaaaacaaggcatacccccccgattatgtgtttgggggctcctccgaccaggaccaaggtggggcttttccgggacctccaatgtcccataccgcgaattttaaggccggggattccataattttcttcctttttacccccaaggtgtttttccggacggggtttccctcgggccttggttgttggggggtgtcctcttactgcggggtgggatttcccgagctggaaatgagggattccatgtgcttagccggtagttattaaccccattctgtggagaaggctttcttaccaaaggactttttaggggttggttggaattaaaaggaatgggccggttcgtccaaggttaggtaggtctgttgcccaaaaggcaagatttttta

SEQ ID NO: 181887 - DNA, 326 bp, Arabidopsis thaliana columbia
caccggtcggcatggagcagcggtaactccactaaagggcccggcggcggtgactgcaaagcgagcatggctcgcggcaactcaacaaagcggcccaccagcgacggctgcaaagcggtaaggaggggcgtagcggcggctcaatgaaggggtttggcgcatttcctcctttgttcccgcccgcctttaccaactaagcccatagtcgacgagcctcgagaggccgcatcagaagccaacagccttgggtggtgacgacgacctcgatgatgtgacgatttctaggaacaagctcgtgggaggtggatccatcgccggagagcttg

SEQ ID NO: 181888 - DNA, 259 bp, Arabidopsis thaliana columbia
  unsure (1)..(259): unsure at all n locations
tactaaacaaaaacactatagttaagtttctataatagtaaggaagagatgccatttaagaatgtttccaaaatctctcagactctcaaaaaanctcaagcagtcaccttaccattaccgtttccaaccaaaaatttcgatatctttttttgtcctccataaaattctttttttttgttcgcctctattaaaaaactcttttaatttcctccattaacaaatatatttcttttctttttttctttacacaacaaaataa

SEQ ID NO: 181889 - DNA, 410 bp, Arabidopsis thaliana columbia
attacaaccacggtgaactgaaacccttcctttcataaatcttgggtagttggtttaaatcttttcttaaccgggaaaggatcttaaaaattatatctctggatgatgaagacgagatttctggattggtatttgaagatcgcgattggatcggctattatcgtcttaggcatggaatttttcatgaccaagactggtttctacgacatggttattgtttttgatgcagagagacggccgttggaaaaatctactgaagctcaagcctttatagatagcttttaatctttgaaggaacatggacgcaaaaccaatcaaatccccttaattcatcaaggtgcttgttaatttttgatcaagttcttttacttctataattttcctattgctgcttaaatttcttattgttt

SEQ ID NO: 181890 - DNA, 144 bp, Arabidopsis thaliana columbia
  unsure (1)..(144): unsure at all n locations
ccttttaaaacttttaacgccaacccaannccccatncattccaaaatctattttttattcattaaaaaatcaccatcccttcccacacacccattaatccatcttcccctcctcatcccacaacaaatatattcatcaacttt

SEQ ID NO: 181891 - DNA, 127 bp, Arabidopsis thaliana columbia
gaagattgaattcagaaaggaagaggcagactggttattctctgttgaagtctgattgacgggatcgttgctattgcggaggggggctttactgcattatcacttataattgtttgtcatttccctt

SEQ ID NO: 181892 - DNA, 427 bp, Arabidopsis thaliana columbia
atcgaaagttagcaaactcccttgactttaattccatggataacctgaaacctccaggagggccttcaataaagcacgggggaaccccctatcctccacagtaagtaattgaccctgaccacaagcatcttataaatcttcaaatatcagtaaagctaacccatcaattaacactaaaaacaccggttcagccgattatttagcctaatctaagctgttagtaaacaacaccataaccctgaccatttaacagaataagaaattccaaggaaagagaaccatttacctcacctagtaacaccttaaatgttctgaaaaacaaaacaacccaaatttaaacaaattttgtacagtctaaacaaatttcagtattaacacttaaaaacatcttatgagtcttacttaaggctttacgttctaaactacg

SEQ ID NO: 181893 - DNA, 195 bp, Arabidopsis thaliana columbia
ccgaattcccggggcgggccaaggcttccgaggttgtacgccaattaaaggtacccattttttttttttttgttaccgttgaagcctctacggggggaatttgggcgccgatagggttcgtatactcccattcatgaactacgtctagcatccgaaatcgatttccacgacacgcaatacaaggtcttgcgctaa

SEQ ID NO: 181894 - DNA, 240 bp, Arabidopsis thaliana columbia
  unsure (1)..(240): unsure at all n locations
cccatcaagnaccctctcgcaagcnggttttttaaaatttaccgacttttaacacatnncatnactttttacccttaccaacaacactatcctctaaccacccacacatacacttaccctattacttctttctactaccccaaacaaaaaatctacttcacttatccttccatattaacattttcatttacctaacccaacctatttttttatattaatttatatccaccattttttttt

SEQ ID NO: 181895 - DNA, 297 bp, Arabidopsis thaliana columbia
  unsure (1)..(297): unsure at all n locations
gaaaccactcgagctaagaaacttttcaactgcatataggtttttcaaattcnaacaagcggcaccttctacacaaatcctaacgatcttttaccctaggggttcatggccccactaacatccacgaaaaacgcaatgtgattcgcctccacataccaaaacctaaccccataaagcaatagcaggatttgcgtctcacaaagattacaactccacactaaaaaacttatggttccaaatacctttcacaacatgacctatatactcaaagcaacatcttaactcctccactcttgt

SEQ ID NO: 181896 - DNA, 156 bp, Arabidopsis thaliana columbia
cattcttctcccataagaaaaaaaattgaatcatattcctcctcctctgcttcaccacgaagatgcttattcttttgtcgccttctccatttaatcaaaatctctccgtgtgaatcgtttgtgaatggtggaaactaatcctatcggtgtaaagtt

SEQ ID NO: 181897 - DNA, 60 bp, Arabidopsis thaliana columbia
ccggccgccccacccttccgctatttctaaaccgcaaccttcctcccttttttttttttt

SEQ ID NO: 181898 - DNA, 163 bp, Arabidopsis thaliana columbia
  unsure (1)..(163): unsure at all n locations
cttccttttttactactagtttttagcatttttttttctccacctatnnccccaccacgagttttttaaacaccacgccctcccaaaccatnncttaaataacccccatcctccccctaatcctccctccaccaactctatcttttaaactccaacatttttc

SEQ ID NO: 181899 - DNA, 305 bp, Arabidopsis thaliana columbia
ctttgaatattggaaaaaggttaagagtggcttcttttgtggattgccggaccgctcttggtgttgttcttattgatcagtaggaagctgccctgcacgatttccttccaatcgcgtccgaaccacaacgaggcccagcccctctaaaaccgtaaggtcccatcgcttttgatctcgttaaaccacccaatgtccttttctcagacatcgcatggcgttttttcctcgacccaacaggatgcatcagcagctggaggagaattcggaatattagaagggagatcatctgggttgatacacccaat

SEQ ID NO: 181900 - DNA, 319 bp, Arabidopsis thaliana columbia
  unsure (1)..(319): unsure at all n locations
ccgaccaacgcgtccgttcttcttcntcattacattccattcttaattttcagagagataaggttagagcaaagcactgtttgaaccaaacaacaaaaaaatgcttggctctaatctaacaccattgggggttcaataaaacccatttttttctgtggattcattttcttttcaattccgttcggtcctaaggggtcaatttaacatttcctaacctctttcaggggcttcttttgtttaccactccaaggcgttttttcgtgggctaagagcccgatctgttttatccaaaacaccttaaaaaacacccaatctttta

SEQ ID NO: 181901 - DNA, 200 bp, Arabidopsis thaliana columbia
gaaccaagatgagcacggaatggtttttgttctaatggggaagtctttttagcaatagagtagtgtgggttctaaaacttatggtcattccttatgagtccattgaagattatgtttatgctactctgttcctctatgtgggtcaagtacatccccttactcatgaaggtctcttactttatcctcactgttaattctat

SEQ ID NO: 181902 - DNA, 175 bp, Arabidopsis thaliana columbia
  unsure (1)..(175): unsure at all n locations
cttatttttggataactncaatatagaagatttatttttctgcgaccggataggcttttttgggaaaaggtaatcccatatggagagcattattacccgtaagcaaaaaaatagttgtttgtaaaaggtgtacaaaaccgatggggcccaactctaccaccattagctacgagag

SEQ ID NO: 181903 - DNA, 331 bp, Arabidopsis thaliana columbia
aggtttgaggacatgagaaatgtttttgaagatagggggccttataaaagaccaccagtgaagaaacttagcaacaaagcgtcattggtgtccagagatggtgattttgacttggaaattctggaacgtaaaactggtttgactttgggtcagagttcaaggggagacaggctattgactatgaggccggaagcaaccccattggactttttgatccgttctcaatccaagattgttccatatgagatcatagcccgtgcaaaacaggtttctcaggaccagtgtcggttcaagatgaacaagaaacttctgtagttaaaaggaacaaaga

SEQ ID NO: 181904 - DNA, 229 bp, Arabidopsis thaliana columbia
  unsure (1)..(229): unsure at all n locations
caactaaatttttttttttatttgaaagattacacctacgggggatcttataaataaacttgtaatccaaacaccccgttttttaatcctttgtaatttctaaaggtgcagtattttttacctaaatgttggcatctattnactactttttatttcaatcgnnnctttagatttaatgttaactcttatattgagttcctcttatcctactatttttcatttttttata

SEQ ID NO: 181905 - DNA, 280 bp, Arabidopsis thaliana columbia
  unsure (1)..(280): unsure at all n locations
gactccgtcgtaaattctataacgtaaccattcctgttttaaatgacagtgggggttcaaatctcgtcggataacagctgaatagcgctcgttcctggcnggagcgattagcttattttacgacgaatgacttgccgatctttacgacgggtgtgtgttattctcaaagatgtgccggagcttttnnctactacgacggtcgttttattggatacacaggagacgaagttttgccacattcggggaaagattggatggatctacatgtaaattccgctgg

SEQ ID NO: 181906 - DNA, 152 bp, Arabidopsis thaliana columbia
cgaattcccggccgcccacgcgtccgatcaatatctctattaatccatgttttgtttttgtgactttccaattgatccggggtccatctaacgctaaaggggggcttgtctctaattctttaccagttttttttccaatctttaccgtacag

SEQ ID NO: 181907 - DNA, 91 bp, Arabidopsis thaliana columbia
aaaaaagctttatatagagcttttaaaacaaatggagttgttttatggacagcccatgctaattctagaagcttcacactaattgttaccg

SEQ ID NO: 181908 - DNA, 51 bp, Arabidopsis thaliana columbia
taatatctattaatggccggttccggagattatgatgtttttttaaagcct

SEQ ID NO: 181909 - DNA, 312 bp, Arabidopsis thaliana columbia
cacgcgtccgactatagcagtttgaaactttttttattttaagcgctttggttgcgccggaaaggtttgttcttcctttagcttgagggcagattaagatcgattgtttcatgtcataaaccccatccacgttcaagactgttgtctcttctttaaaaaatcctgctctgctatgtcccaggctgccgtgagactagcgtgagctcgccaaggggttggtcctgaaggctaattttttgccggatggcctttgtattgatcaagatcccagattacttaacggcgatttgctgaacattatggttataccca

SEQ ID NO: 181910 - DNA, 241 bp, Arabidopsis thaliana columbia
cggaaaactccaacgaatgaaagggggggttggtttttaatggttctggccccacgaagagggggcgaaaccatctgggggggtccaacggaaggccctttatttccaccggagacaccgttttgggcggaacaacctgtacccccaaaaacctgcatgctcggggacgaaagaggcgcaaatgggttcacctccaaggcccatgcctctggaaccagccattttgaaaggatctcctgaa

SEQ ID NO: 181911 - DNA, 393 bp, Arabidopsis thaliana columbia
ggggccgaccacacccgtccggggggactgaaggttggcccgtcctaccattcaccgtttgcgtaatcctcaaaggaggcggcgcttttttcctaataatcttctttctatctggaccggaaaattttccgcccagcctccgggggacgggggggtaaatcccgaagacccgacccaattttggctgttgtagagccaagccaggtcccgggccttgtttttttttcagacccagttcaggttttcgtgggaccaccagggtgtgccatattttccactggcccatttgctcagcgggcgtggatggttcgcaactccaagggtttgcaaaccaggatagaactgtgcccgaccgatcttaaaaccaggcctgtttgttttaaggggaaagtt

SEQ ID NO: 181912 - DNA, 344 bp, Arabidopsis thaliana columbia
acccggcggccaaaaacaaacgtaaaacttttagctttttttttacctttttaccccaaatgaccgctggaacaaagtgtgggttttcaacggccttcgccgtaatggccttaaagctttcccctaaggcatttgaagtccttgcaaccaaccttttaccactgagaataactgttcccaaaccaatggacccaccagtcccccctcgaaccgaatcgacccatataaagtccttggttccaccctttaccgaataaccatcctccctaaccgaaaatttccccaaaaactccggtagccaaaccgctaaactctaacttaccccctttccattccctggaacc

SEQ ID NO: 181913 - DNA, 229 bp, Arabidopsis thaliana columbia
cgaccgaaagggttccttccaaatccgtgtcgttagctatgtaggaggaaccagccggttgtgagggggtggtttcatagggtaaggggttggaagtttccccagcacccttccatggttcgatttgttcgtcccccttgtcccaccagggttcgtcttttgggttccagggccaaccagggtttttgttgtttccctcttccaattaaaccttgtggaccccaaaagg

SEQ ID NO: 181914 - DNA, 350 bp, Arabidopsis thaliana columbia
  unsure (1)..(350): unsure at all n locations
ggggagggtagnaaccaaaaaaaaaaaaaaaccctttttggcctctttgcccccccccaaaaaacggggttgttcccctgtctttacggaaaaggctccaacccttccccccgcggaatttaaatcctcttaaaccgcccttttaccaataagaaaaactgttcccaacccaaaggttccatatgcaatcccatgttccgaacccaaccaagcaaatactctgggccaatcctttgtcaagtaaccaaccaccctaaccgaaaatttccccgaaaactacgattggaacaccgttgacttttaacttaatcccaaacaattctcaagaaactcttatcaaaattttttcc

SEQ ID NO: 181915 - DNA, 307 bp, Arabidopsis thaliana columbia
  unsure (1)..(307): unsure at all n locations
accgggccgacccaaccatcctaaaccanntaatcaaactaaatttttcctttataaccaccccaaatttccggggaaatggcgacttttaaaagccccttggaaaaatacaactctttccaaaaaaaattttaagcctttcccccccaacattcccgacataaaacaaaaccttaatgggttgcacccaacaacaaaaatggagtttaaaacccttattaccacggtattcctttatgaaccaattcttataataccattaccatgtaaaccggaatacctattgtaaaccttttctccataagtt

SEQ ID NO: 181916 - DNA, 253 bp, Arabidopsis thaliana columbia
agaaaaaaaaataaccaaataccttctcagtttttacccaaccggccaaaccgcgccatgggagaaattttttgaatccccaaccaactcttctttaatccaggggtgatttaaaaacctggcttatcaacaaagctttaatcgccaaatccattgcaccacccctttacaataccggaaccgctaatacaatcttcctccacaggaaacaaacccgtcctggggacggagcaaaaaaaccttggtttccctt

SEQ ID NO: 181917 - DNA, 397 bp, Arabidopsis thaliana columbia
cggggcggaccacacccgtccgttggaccacaccccgaaggaaaaggggaggatgtgggcctttttttttgggccattcccaggtttcctttgtccttcctctaaccacttttttggggggtttttccttaaaaggaaaccttaattttggtcctaagtaaatcggcttttaaatttattaaaaaggggaacctgtttgtgggggggaaccaccgttgagaaatgggttaaggaggaggaggtattgaggaaggattccaggggaaaggaccgtaaggtaaagatggtttggggaggagatgagttagggaacctcatcttttttcagctaaatgccaagggtaccgctcccggcaggggagaaccacctttggctttttttgtggcctttttaagg

SEQ ID NO: 181918 - DNA, 388 bp, Arabidopsis thaliana columbia
  unsure (1)..(388): unsure at all n locations
ccgaggcgtccaataaactaaaaacccttttacttttccctatctctaaccgcaaggcccnccggggcaagtgctaatttttatacggtttggccccaaaaggccgtaaacctatccccggcgtcctccaaagacatttgaaaccgccctataaaccatccccaaagcctcaaagccaaccattccatccgccagcccagggtacggatccgcccaatttaaggcctggcccccatcctccgaaaagcttcctggctccctaactgaaaagttccccgagaattacggttgggccactgccgttcaatcctccaaccctgtaaccttacttgggaaccttaacctaaaattactccccaccaaaggggccaacctttgaatccctaac

SEQ ID NO: 181919 - DNA, 353 bp, Arabidopsis thaliana columbia
ttaatcccaataatccaaatcccaccatatttacctaattcaaatttaaattaatccttgtccaaaaattaataattaaaaaaattaataaattttattataaactcaaccttttcaatttcttattattaaaacccaaaaattaccaagtcacccctttccttttaataaacaaaccctctcctatacaaaccctattttttttgatcaaatcgctaactctccatttcccttcattatctttccaacctttcttttataccactcctaacacccctttttatttccctacattcaatcttttccttttatttttaataatcctaaatatctttttataatttttttcacct

SEQ ID NO: 181920 - DNA, 374 bp, Arabidopsis thaliana columbia
cggaataccggggcggaccacaggcgtccgatcgttaaggacctccaggaggatttgcattacgtgggggttggaatatggccctttgtggcgtggtaattgcaggggaattcttagggaaaaacgacttttgaccactttggcccgcttgcccccttgggaaatcggttttaaggcagccggggtgggttgtttttggattgttcaaaccgtggttttaccaggattttaattccttatgggtattccaggtgggaccacgggctgttccatgggattggtggcagacttggggtggggcctttatgtttggattaaaccccatcttccaaatggtcctttggccttggggtaaataatgatcgttccaccat

SEQ ID NO: 181921 - DNA, 394 bp, Arabidopsis thaliana columbia
tcaaaaaaccaagggttgcaacggtttttttttttttaaccgcgccgccatcctccgggcgaacgggctaaattccattcttcaaaccctttaaatctccctcttaaatattaaatccctaccaaggttttccggattaggatataaaaaataagaactctccacaagttttttttaagttccaaactttaacctccgtactgaacctgataatctaattcttaccctccttttaaaggttccaattagaaatggaggtggaaccctaacccctgaccagaccaaggaggtgtaacaagtggccggaaagcttaaaaagtactttttcaaggagcctttcaaaaatcccttaatttttggaaattggtaattggtttcctttttaagaccaacc

SEQ ID NO: 181922 - DNA, 442 bp, Arabidopsis thaliana columbia
gccaagccttccaaaaaataatttccaagagtaaattttaaatatgatttccacccccgaccaggtgaggaaccgttaattttaaaaaccaggggggccaacccacaccaggccagtcaaaggacccgaaccagttccaaaaccagttccaaccgccaacttaatggcaggtgccaaggttgtagttaaagctgttaaagccgaacctcgtaacgaataaaacaaactcgccaggggtaaagtccccgaaccctctgttgttatctaaaaccctgccaaaaaatacggtaagttcgttaaaaaaagtacccctggtaaatacctcaccagggttttaaattatttaaacaactacaagtcgtaaaactcaaccggggctggtggtcttcctcctccaacaagtcaggctgagccagcaggtaagcctaagccggcggttaaa

SEQ ID NO: 181923 - DNA, 421 bp, Arabidopsis thaliana columbia
ccgtccgcaattcaaaccaggattaccaaaaccttcttttaataaatcctaattcaaggccttcaagggggaattatggggggcattgaaaatgaaaatgatggggttaattatggtggtggcgggggttttttaagttgccacggttgttcccgttgaagttccagttccaagcccaccttttgttgctgccttgttggacccacccctgttggcatctgtggtggcttggccatctggttccatctttggaccatccttttttcctccataattaaatggcattggttaatgagttggcgggattggattctttattgttagaatgttgcatccttattttttaaggtacccatctgttcctctatgaatcaatgggaataaccaatccatacactgttttgaaaaaaaaaaattacaa

SEQ ID NO: 181924 - DNA, 436 bp, Arabidopsis thaliana columbia
cggggcggccaacgcgtccgaactttttaatttcccacaaaaagggtttttctattttttccagccttaatcttttcccaggcctttcccaaggtggttttggcggcttaaaaggaggaatccaccgccttagtttttttaccaacgccaccatttccatggccatttccggttaccaaaccgcggtggccggttttaaaacggccgacgccgtggtccaagccaccaacgctgccaactactcctattaaaccacccaccacaaaacctccggtcaaacctccaacttttccggttccaccagtaaaacctccggtttaaactcctccgatcaaactaccgccggtccaaccacttacgtccaaacccccaacgccaacagttaaaccacggtcgcgccaaccccttacgtccaaacccccaattccaacggtta

SEQ ID NO: 181925 - DNA, 406 bp, Arabidopsis thaliana columbia
agcagaccatccgggggttaaggtttttccgccgggggtattattaaccggtgggactccgtggtaaccgtcgccgaccgaaaccgtaaaagatggttttggaccagagaatttgcccgtgggtcagggttgcgtaaccggaaccccgtggttgttttaccggttcagatcaatcagttttcaaccgccacccgtcggattttgaacggcttaaccgtaccatttaagttttccttgaagatccaggccgggacctttgttttaaccgttcagatgggggggcttagcaccagactccaatttttaaacgggatcgttgttcttgttcaatccaacggggcaggatttggggttgaccagatcgacggttggggttttgatgatcgtacggttgggatcgccggtt

SEQ ID NO: 181926 - DNA, 444 bp, Arabidopsis thaliana columbia
  unsure (1)..(444): unsure at all n locations
ggaannccggggcggaccaagccgtccgaaaattcctaaaactttaaaacacactttcttttttttccaataaatcaatcggggacgcgtggatcttaattctttccggaacctgataaaaggaccaaaaatggtttttttttttttggaaatggttaaatgggggggctctccggaatggtttccccgccttaaatttcccttaaaatgggatggtaaaaaaggggttttaaaattacccaattttaggagtgggcttcgcttaagggttccttaatttgttttcaaggggggggataataagtccaaaggtgaaaaacctccaaaatttttatttttgaaaaaattgaaaagacgtggtttgactcctacttccttgtttaaagactttaaagtggttcaggatgggatcaaaaccggtaaaaaaaccggaaacagttttaa

SEQ ID NO: 181927 - DNA, 320 bp, Arabidopsis thaliana columbia
ccccaaaggagatgggtgacattcttcgccgctactacggatgcccacccggctaaagcgggtatggtcgctcttttcatcggacttaagtgctccgatgcctttccagctaccaccttggggaacagtatcattcgcttccataacaagcaacggctgaggagcctactgaatgcgcgtgcgcacattaattgcgaagaactcactggccactttctattacgtaaacgccgtcgcccagctcgattaacgaatggagcacgctgccttatccggcaacatggggtatcgctcgctcttacactacctggatcactgac

SEQ ID NO: 181928 - DNA, 167 bp, Arabidopsis thaliana columbia
gaccccgcgtccgcgaacctccaacgaattctttggggattttaccaatggcgttgcctccaccgctcaggccggatctaatggtcgctttcaagggcttgactctttctttgacttcccacccccccaaaggcgtaacaactttttccccaaaaacctcattcacg

SEQ ID NO: 181929 - DNA, 302 bp, Arabidopsis thaliana columbia
cttgccccaccccgaaggaaaaagagaggaagttagactttttttcttgggcattcccaaggggtctttttttttcctcttagcgctttttttgtggccatttccctaaaaagaaaactttatttttgttcttaggaaatctgcttttaaattttataaaaaggggaaactgtttgatgggaggaaacaccctctcgaaaatggtttaagaagaagaggttttggagaaggaattcccgagaaaagatcgttttgttaagattgttttgagaagagatgggtttttagaaactcctttcttt

SEQ ID NO: 181930 - DNA, 234 bp, Arabidopsis thaliana columbia
aatcgttgggttttcctaaacatagccaccttttgttttttaaatcacaggtaattccatgagcaaggcattgacaatattggtgagtcgtcataagtttacccttgacggtgtcaagaagatcaacgggaacgtgctaataaaagagggaatgctgaagccactctatgagttgaacgagactcttgccataagctcagggtggagtgtagggatctcaggtcttagggtttg

SEQ ID NO: 181931 - DNA, 156 bp, Arabidopsis thaliana columbia
tttcgatttcgaattttccaactttcgatttttaagaggttcggctcaaattcaaaaatccaatggagcccgttatggaatccggtttagaatttggttttccggcttccattccgggtaaaacggggtctggtgggcggccatggattggttccc

SEQ ID NO: 181932 - DNA, 138 bp, Arabidopsis thaliana columbia
aaaactataaaacgcggcttcttttttctcctatatatgcatggggaacacgtggaccataattctttctgggggctgataaaattaccaaaaatttctgctggtgctctgccgatcgttaaaccctttttttctcct

SEQ ID NO: 181933 - DNA, 305 bp, Arabidopsis thaliana columbia
cgcccacccgtccaaaattccaaactataaaacacattttcttttttcctaatattcatccgaccccgtgccattataatggtcggggctcaaaaacaacaaaatttctaccttttctctggaaatttttaaattattatctttcctttttatttcttatcaaaatttctcataaaattgaattaaaaaaaggttttaaaataacccatccttggtatcttcttcccttttgattatttcatcttctcccaatgataaaataatcattccaaaggttataaccttcatatctctttttattaaat

SEQ ID NO: 181934 - DNA, 173 bp, Arabidopsis thaliana columbia
  unsure (1)..(173): unsure at all n locations
ggtccgacccangcgaaacganaaacagaaggggcggatggctaagtttggtgtgacgttcaaccgagccttgctgacgggccccatttaactgatgaaggggctaaatatataaccaaggtagtcaaccgccctaactgcctacattaaaattcctgctacggctcaatgca

SEQ ID NO: 181935 - DNA, 333 bp, Arabidopsis thaliana columbia
  unsure (1)..(333): unsure at all n locations
aacggaaacccggggcgccccacacccgtccgnaaaaaaaaaaaaaaaaaaaaaaaaaacaaattattttataaaaaacgggaatccaaaattagggggaacaaacaaaacctacggggggctaggccattaaaagtgggcccctctccttaacaaaaactttgatctgcggcccgttttttttcgggaaaggtttttttaaaaaccttgtaatttccaaatgacttggggtgggatgacacccccttttttccaaaaaccttgattttccccaatttcccacctttctatcttgtcaaattttgcccatcttgtttgaccataaggacgccc

SEQ ID NO: 181936 - DNA, 62 bp, Arabidopsis thaliana columbia
  unsure (1)..(62): unsure at all n locations
gaaaaaaggggcgggggaagngnaagaaaaaaanagggagaaggaaaaaaaaaaggtttttt

SEQ ID NO: 181937 - DNA, 154 bp, Arabidopsis thaliana columbia
aaaaaaaaaaaaaaaaaaaaaaaaaaaaatttttaaaaaaaaaaaaaaaaaaaaaaaaaaaaaaaaagggggggccgttttaggggacccaagcttacgtccccgtgcttgcgacgaaatagcttttttatggggtcacctaaattaaattaat

SEQ ID NO: 181938 - DNA, 62 bp, Arabidopsis thaliana columbia
  unsure (1)..(62): unsure at all n locations
aacccgtccgaccacgcgaccgatcagataaaaaacctttccaaaaactntttaacaaccac

SEQ ID NO: 181939 - DNA, 391 bp, Arabidopsis thaliana columbia
ttacaccattttctgggctttttttttttatttttgggtcttacaacttttttttactcttttttttttttttttttgaaagggggaacaaaaaacaaaaccttaccggcctggaatacaatttttttaaacacaaactttttttttttaacccccccccaattccaaaacaacaaaccccctcttttttcccaaaaaaccccgggaaaaccacccctatagaaagaaagaaatcctaaaaaaaaaaccccccgggtcaatttaatcccccccttcaattggccccccctcactaattatacggtttaaccttttcccacacagaggtttttttgacacaaccacccgctaaaaaaaatctctatcccaaaaccaaaaaatgtttagaaaa

SEQ ID NO: 181940 - DNA, 141 bp, Arabidopsis thaliana columbia
aaagagaaattttttttggaagaggagaaaaaaaaaagggggggggagaaaaaaaaaaaggggtgggggtaaataaaaaaaaaaataaaataggagaataagaaagaaggaagaggggagaaggaaaaagggggggggggg

SEQ ID NO: 181941 - DNA, 315 bp, Arabidopsis thaliana columbia
  unsure (1)..(315): unsure at all n locations
ggaccgacccangcgnccgaaaagaatanaaaaaaatcatacaacattgttatacaggaccgncaaaaaaccaaatggcggagtgtttaataaactcgggggttcaactaaaaaaaccgatgaacgaaaaaacgaataaagaaaattttgtcaaaaaaacggagttactaataacaaaagcgccccaagaacccaacagcacaaaccaagaagacgccccaccccaccaccggcagtaacaagagaacatcatcttctttaactttttttccccaccggaatttttttccaaacttttgggcccccaacagaaac

SEQ ID NO: 181942 - DNA, 85 bp, Arabidopsis thaliana columbia
gaaaaaaataaaaaaaaaaatttaccatggttaaaaaacaaaaaaaacaaaaaaaacccgccaattttacaaaacccgggccccc

SEQ ID NO: 181943 - DNA, 283 bp, Arabidopsis thaliana columbia
  unsure (1)..(283): unsure at all n locations
ggaaaaacgggcggaccnangcgnncnanaaacaaaaggagcgaatgacaangatggtgataaagttcaaccaaaccaagctgagggggcccattttactgatgaagcggctaaatatataaacacggaagtcaaccgtactaatggctacattaaaacccctgctacggtaaaacgcatcccttccataacgaaagacacggcatttggaacccgggccaaccgcacgcccaaanagcaaaaagccccacacgaagcgtcgtcccaaccaaatttttttttt

SEQ ID NO: 181944 - DNA, 259 bp, Arabidopsis thaliana columbia
aataaaaaaaatataaaaaaaaaatataattttaaaaaaaaaacaaaaaacccaagcgagaatttattataaaaaaaaaccgggccatataatttggcccccctttttaaaacttccatttttactcaccccttctttcaataattttcttttcattttctttccctaactttactttttttccccagctttttcaaccgtctttcttgttaaaaatttgctcttacccaacttattcactttccattttttccttttt

SEQ ID NO: 181945 - DNA, 288 bp, Arabidopsis thaliana columbia
aaaagcactttattttaccgcggtttaattttttacccccatggaagaactcccggacacgacttaatctgaaagtggggtgctttaattcctttcttcctgaatttctaactatgggagacagtgacaatcttgacgcaacaaagagatctctatcaaatgaaaaaaatcatattagactccctctaaacgtatccgctacaaggaaagccataactgatattctctagctttgtttccatgtctaggattgaaaattttttaatgatcatattttaaactttttta

SEQ ID NO: 181946 - DNA, 356 bp, Arabidopsis thaliana columbia
  unsure (1)..(356): unsure at all n locations
agtgaaagaaaatctttaaagaaaagccctgtgaataaaattcgactgggtttggggtttgtttttaatattttaaaggaaggatcaaaatctgaattctgactgtnaaaaaaaaaaaaaaaaaaaaaaaaaaaaaaaaaaaaaaaaaaaaaaaaaaaaaaaaaaaaaaaaaaaaaaaaaaaaaaaaaaaaaaaaaaaaaaaaaagaaagttaaataaaagaaaataaaaaataatgggggcgcccttttaaaaaaataaaattttatttccccccccttaattaaaaaagtttttttttgggggccccttaaattaacttaattgcccggggtttaaaaacatttaattggaaaa

SEQ ID NO: 181947 - DNA, 85 bp, Arabidopsis thaliana columbia
tcgatcccgtcgacccacctccgatggaacaaactatgagacagactaatttcaggagattcaaagagttagaaaaatcgtttga

SEQ ID NO: 181948 - DNA, 312 bp, Arabidopsis thaliana columbia
gaaggagaaagcaaaggagagcttttgttcttattatggaaaagcatgttcaagaaaggggggaaactatctaaaaaagcatggcgatgtattttgccagctgccatgtctccttgactcgtgttttttagcagctgatgggttattgttattaggttcattttccattccaggtgcatttctggaggtaatatgcactctaggaggaactgtgtttacgggggtttctgttgttcccttccgttctgtgcggcattttcgtttttccagatttatgggatctcttttggaccaaacccggttaattaaaac

SEQ ID NO: 181949 - DNA, 375 bp, Arabidopsis thaliana columbia
  unsure (1)..(375): unsure at all n locations
tcaaaacggtatttttcgtgggttatagctttcttaagaggttctttcgtctcttaaacggtcttgtnnttttttttacggtgtgtggatactttgtgatatgataaaaaagcggagagtatttttaggttctcgatagtgtatattctcttcggatggggtttgacgtcggagtttctccgccgcttntttggggcgtatttcgggaatattctaagggttacgggttgggatattcgtcttctctctacgcagtcttttgcccactttataaaatctctttcattctttctttggagacgcgaagagaggttttttttattggttttgtcgtcttcctgggaattcgagattcctggaatcttaatcaaatat

SEQ ID NO: 181950 - DNA, 147 bp, Arabidopsis thaliana columbia
  unsure (1)..(147): unsure at all n locations
tatttttttgactttgatctcccatcagtttatctccnncnncnnncnnccaaccgaccatgttttatttttataacgcctccataatttttaccttcctccaagtaatcctctctccctaccaaaatcttctcttcattccctcaa

SEQ ID NO: 181951 - DNA, 281 bp, Arabidopsis thaliana columbia
aaaaaaaaaataaaaaaaaaaaaaagaaaaaaaaaaagagaaaaaaaaagagaagaaaaaaaaaaaaaaaaaaaaaaaaagaaaaaaaaaaaaaaaaaaaaaaaaaaaaaaaaaaaaagaaaaaaaaaaaagaagaaaaaaaaaaaaaaaaaaaaaaaaaaaaaaaaaaaaaaaaaaaaaaaagaaaaaaaaaaaaagaaaaaaaaaaaaaaaaaaaaaaaaaaaaaaaaaaaaagaaaagaaaaatttaattaaaaagaaattgtgtaaaaaaaaaaaaa

SEQ ID NO: 181952 - DNA, 371 bp, Arabidopsis thaliana columbia
  unsure (1)..(371): unsure at all n locations
nggaactgagaagcatccactcgacaatggagactgcgatttgtgggagattagctctcgcaccatcctctctcttcaattctaaatcaggttttcttattctctctctgattccgaatcaaacatctctttgttctgttcggcgcctttgaatcaaaaagttcgaaactggaattagtaatcaaattccggagctttctgtatataatcagctcatgacagttgatttacatacatattttctttgttgatattgatttgcgagatgattaggtgcagaaggaaatgggctttttagctttttaccttgtctgaacctgaaccttttttgtctgaagcaaagtgattggattaaccaaaaccggaccgga

SEQ ID NO: 181953 - DNA, 70 bp, Arabidopsis thaliana columbia
agtaatatcataggtcgcaaaagccggggtagggtttaaattcgccaaaccaagcgaagtaatcattggt

SEQ ID NO: 181954 - DNA, 144 bp, Arabidopsis thaliana columbia
gcgtccggttagagagtccaaaaaatataaggctgccatcattctaattgacagtccaggaggtgatgctctggcttctgatttaatgtggagggagatcaaacttctggcttgaaacaaaatcctttatttacttaatgtcat

SEQ ID NO: 181955 - DNA, 244 bp, Arabidopsis thaliana columbia
caaatttgttggtcccttcttcgctttcgccggggaggcgtttttttttttcccgggaaatcctccgaaagggagagaaagctcccttattttgggtcctctttaacggcttttttgaagccttcggttcaggtcggattttatgcgaattcgaaatttggttttcaggtgaattgcaaatatttttccatcttcgccaacttttattgtcctggtaatttaacattggagtttcttcgataaa

SEQ ID NO: 181956 - DNA, 325 bp, Arabidopsis thaliana columbia
gtttggatgctttccaggttattttacccagcaaaagtttaaaaaggggacctggtttaaggaaggttccatttttatcataactatctcaagggggccaccaacctttccattaatttttttttaaggagggtcttacctttccaattaattaaggatattttttattggggaatccacttggtttctaaattggttttgcccatccaatagtttaaacattaataaaattgtataataactagtaccaaaggattctatgatccagcatggtaattttgggagaataaacatgatacttggtttcttttgtttttttagttgc

SEQ ID NO: 181957 - DNA, 409 bp, Arabidopsis thaliana columbia
ttaagtttttgggtcccataatggacctagcagattttgtttttaagggtggattttgcccggggggaatttccgccggggaaccgccggggccagtttttgggaaaatccaaggtcggaaaatgggggggatgcggggccttcgcaaaggggtcccacggggggggcccagggccgggtaaaagcgttgcgatcaagggggggggcaagcaacggttgcagaagggaggactaaatggcaccattaaaggggggatcgttttaatgcaccgtttgcgccacctttttatggggcgcctgttcggggtcctggccaccaaatccaagatttttttggtaatggaattcgccaggggcggggggtttttcgccaaagtttccaggggcaggttttgcaaggatcttagcc

SEQ ID NO: 181958 - DNA, 382 bp, Arabidopsis thaliana columbia
aatccttggaccgttagggggaggatgaatatgagaaatcgattcggggtttggggaaaatgaaaggggggtttttacggaatggcggttcttatggccatttttcggaattccaggtttttggcttttttttaccagactaaaggtttttttgttgccttaattttttaccaatgggggccttagttcctgcgtccttacgaaaccatccgtttggtttacaagggttttggttgttcccgatcccctagatccaactccagaaattttggatgaacccgcctttggggttccgggcttttaatccataagggtagacccggttaagatggcgccaaagcaaaagattaggatcaagcttagatcatactgggggcctttt

SEQ ID NO: 181959 - DNA, 406 bp, Arabidopsis thaliana columbia
ggggcaagccaagctttaaccttttagggttttaattttactttttttttttcttaaaggcttcttcaaaatgggtttggtttattacagatttaacccaaaaggtcgtttaattataccattcggttttttaataattagaaactttccgaaaaacaatgcacaaaaattccaagccaacctttccatttgtaatctaaatgaaacaaatcctaccctattaataattttaatcattccctcgtttagcttctaaaaaactaaactgataaatacccattttttttcttttgaattatttttctccaattttaatctttccctaaacctttttatataaaccttaatctaaaatttttcaaaacaatttgggctataataataacccaatgttgaaatttccttt

SEQ ID NO: 181960 - DNA, 230 bp, Arabidopsis thaliana columbia
ggaccgggccggaccaacgctttataattaataagcgttttacttttacattttttttaccgaaacggcggcaaaacaatggcgattgttttttctagtttgtaccgtaaaggccataatgctttcccccattgcatcccaaatttttgaaaccgctctaataactttccgcaaaacctccaagccaaccgccccttcctgctgccaatgtaccgtccccaaccaattaa

SEQ ID NO: 181961 - DNA, 264 bp, Arabidopsis thaliana columbia
caacgcgtccataaaccacccttgggggccctcaacactattatttaaggaaggaaaaggaaacccggggggggggatgactacagaatttacggaattggtctaaccggccaatgcaacctgggaggttggtcgcttgttgtcaaggacttccgggttttccttgccagaggtgaaacgccgttttagggttcgagttaggggtatactgatatcccttctaagtcttctctttcttaaaaaaatattctggtagtagctttt

SEQ ID NO: 181962 - DNA, 405 bp, Arabidopsis thaliana columbia
aagcccaaaggtttttagccccgtcctttccatggcaattaatccagcacctgccaatattcagcatttgtgggggaagtgggccttcgcctatttttttttagacggtattagaacctggctcctgaaaaaaggggatgaaaaatcggccttttttgatggcccggttcttttatttttaagggttctgatgggggtttaatttgcaaccgctgcattaatcatctttttggccatggcgactaagggttggctaaaggaagtttccagaagaggagagattttgtgggggattttcatctttggttccttaaggatatttctgttggcgaggtgggtttgggaattcccaaggccagggatttttttggccgatttactttttttaccatcaacctccatggt

SEQ ID NO: 181963 - DNA, 237 bp, Arabidopsis thaliana columbia
gggggatattaaaaaaacggggggggactcagagaaccaaaagggaaggggaaccagggaaggcaccaaaatcaaacgcccaggaaagggagggggccaaaggacctttccaggacaaccaaagaaaaaaggttaattgacattctaattttcaaaggttttggggaaccagaaacctgaatccgttcaagaatttgggaaaagtactttttaaaggcgtaaccaacattaataaat

SEQ ID NO: 181964 - DNA, 214 bp, Arabidopsis thaliana columbia
acccgggccgcccaaggcgtccgaagggtgtttgtggaaatctttggccttttttttagggggttgggggttgttccacgggtggaaccaaatgtctttcttttggctgctccaaaacgtgttgtagccatctaaatgttgggggaaaattttgttgaaaccggggtttgtgttgtaaaagttcttggtgtcttctattggaacttgggggtgg

SEQ ID NO: 181965 - DNA, 155 bp, Arabidopsis thaliana columbia
cttccgaaaaaaccaaaaaggttttttaaagttttatttgagagccggaaggtaattaagagggggtgttattcgattctaccaagttcccctataggaaacctttcgaaacttcggttataattgccaggtcctacaaagggccacaacttgtc

SEQ ID NO: 181966 - DNA, 406 bp, Arabidopsis thaliana columbia
cccacacgcgtccggcccggttacttaaagcgtccaaagggtggtttgttgcggccaggaaactgaaagttttaggcaggaggggccattaagggaactaatggagaaggctttacggaataagaaagatgattttacctttttggataacaataatctggaaggcataattaaaaggctgggatggttataaaaccaagatcttttaagggaaagcattactggggagaaggggaggataagatcccaggccagtaggtcagaagaggatttggaccaaaccgaacagttgttagaacttgttttgggcatccgggaccacatgctaaaaactgagttttttgaagtggttaagggtttttcgatacccccgaatttccgtggtcctttgtaaacagaactaatg

SEQ ID NO: 181967 - DNA, 376 bp, Arabidopsis thaliana columbia
cggggcggccccacccgtccgtttttttttgtttttatcaaaaccttcctttttattttttaaatccctatttttttaaaattcaaaggtattcctttttgaaatttgacctagttatttttttgggacctcagttaaggtttaggtattatttaccatcaaggggttatggggccctcatttaatcaaaattattcacctttaccaattttaaatttattttttttttttttaccttccttttttttttttcccggttttaaattcgggttttaataaaccggggttattggggaaaattcctgggttccatggtccggtaaaattttaagttaaatccatatttttatggtcgattttaaaaaaggatcggttt

SEQ ID NO: 181968 - DNA, 208 bp, Arabidopsis thaliana columbia
ttttcaaaaacaataacaaattggttgggggggtaaattgtatggaaaattcctcgtcaaccctccagatttcaatactccaaagttccaaatatgtaaaagaggaagacttggaatctctttcttttggggcctctttttttacctactggttacatcttggcccctacccttactttcttggtccctcctgaaaccgatgggggtg

SEQ ID NO: 181969 - DNA, 254 bp, Arabidopsis thaliana columbia
ttttgtattctttataggctttccaccacggggggggtatcttccccgattaaggccacctaggccgttcaatcaaccggttggaattaatccgtttaatcccaggtatcctgaataaccaaaaagtacataatttcaatattatgacatgtggaaatagtaatctctttaaaggtttgcccaccaattgaaatgaaaaatttagaacttttttttacttccctgatcttagtaatttcaaattgtttaaggaa

SEQ ID NO: 181970 - DNA, 263 bp, Arabidopsis thaliana columbia
aaaagtaaacctaaataattttccactttgttttcaacgcctccaaacaaacaagggggggggttttaaaacaaggaacctgcccctttttccagactttagttgggttccaggtaaagccaacccgggggatcctaaagcagtcctcttggggggctaaccaaaacccggtttggattttttaccatagccaaccttgcttgttttaatggaaacttcccgggcccattttcgggcggttaacccggtttattattgacaag

SEQ ID NO: 181971 - DNA, 350 bp, Arabidopsis thaliana columbia
gccccacgcgtcttttaataccggtttttttttttccttttttgtttctgcaaaataactctttctcggggggggtttacttgcaaagctctcgatttttccttttgggcataataatttccttgggttcatccaccaaatgttggggttttgaaactccaccaccggattggggtggtcaactttggatttccccttacatgttattttttgtcgccccttattccctggttccagttttcggctcctcccaggtgttggaccattgatgagataaggattggcgtttttgttaagggtgtcgagacatgggccgccttcccttaatcaaaccttttgaggcttagtgt

SEQ ID NO: 181972 - DNA, 309 bp, Arabidopsis thaliana columbia
gaattcgggacggaccacacgcgtccgcccacgcttccgccaacgcttccggaggatgttaaaagggattaagggtaacggttcctaggaggaacttgtggtcccaatcttggggaccacagcttttgaaattgaactaccagattaacttaccaaagttttagaagcctttccaaaagcaacagcagggttgggccgcaataacggggttaccattgggggggattttgggatccatgctaagacacaggctgaaggttaccatattttgttggatgctgccataaagcttaataaactgggtttgga

SEQ ID NO: 181973 - DNA, 75 bp, Arabidopsis thaliana columbia
ttttagaggatccaagtttacttccccgtgcatgcaacttaatagttttcttttggggtcacctaaattaattta

SEQ ID NO: 181974 - DNA, 437 bp, Arabidopsis thaliana columbia
  unsure (1)..(437): unsure at all n locations
ttttgcagcgattgaagccgattttttttttttcgaaacagcggnaaatcttgggacagttttcattttaagaggggtggttgaaaaatcatncctnnttacatttcataccgaatttttcaaaagctattacgcttgctagtttcatgtactgctcaatttcatttttgtttttctaccgtagctactgccattttttttttttacccaacgcctttcttattttcttgaccgttatttttattaactttcctttcttcttttatttcaatctttctttcattttatcttgttctcactgctctttttattaaatacttttatcttttatttctttaactacttttttttttttatactattttcttttttacttctttttttctctctatctatcttttttcatatcttcttattatatttttctttcttctttt

SEQ ID NO: 181975 - DNA, 430 bp, Arabidopsis thaliana columbia
gaattcccgggcgggcccaggcgaccgcagaccaaaggtatatagacacgtcctctattatgcatttaatccagcaactgtcaatatggagcgtctgttgtggaagtgggtctgggcctatcttcttctagactgttatagaagcttgctactgagaaaaagtgatgaagaatcgagcttttctgatagccctgttcttctatctataaaggttctgattggggtcttatctgcaaacgctgcatttatcatctcttttgccattgcgactaagggtttgctaaatgaagtttccagaagaagagagattatgttggggatattcatctctagttacttcaagatatttctgcttgcgatgttggtatgggaattcccaatgtcagtgattttttttgtcgatatactttttcttaacatcaaactccat

SEQ ID NO: 181976 - DNA, 197 bp, Arabidopsis thaliana columbia
  unsure (1)..(197): unsure at all n locations
aaaaaaaattcataatnttttttatttcatcttatcatacttataacatcactccattaatggcttttttctaattttttttttcttacctccacaacaacaacaactactttcctttttcttattcttcttttccgacaacaacaacttttctttctttccaaatcttcttcttttcttctttcctaacttcaatc

SEQ ID NO: 181977 - DNA, 411 bp, Arabidopsis thaliana columbia
  unsure (1)..(411): unsure at all n locations
ccggggcggaccacacacgtccgatcaaaaatccgattgggaggaaaatggtttttccggaattcaaaaaatcnccgggggatgttttaaaatcctgagagtccgggcaaaaatccgnttgcaatgttgtatattaaaaaacacattgttcttgataaatttatccatatctagaaggctaaaattttactttataaggttaaatgaataatacctcttttaatgtttttaccattaccataaattttttcattttgtttactatatttctcatttccactctcctcctttttttgtttcaaaaaacaaccttacttattttttttttaactgtccttaattccatttacttttttaaaaaaactttaattatttttttttttctttaattattctttttttaatattaat

SEQ ID NO: 181978 - DNA, 462 bp, Arabidopsis thaliana columbia
ttcccgggccggcccaggcggccggtccggttacttcaagcgtacaaagtgttgtttgttttttgcaggagactgaaaattttaagcaggagggtacattaagggagctgggggaaaatgctttacggaatcagaaagatgatattacctctttggataacaatcatctggaaagcataattcaaatgcttggattgatatcaaaccaagatctcttaaaggaaagcattactgtggagaaagagaggataagatcccaggccagtaagtcagaagaagatatggaacaaaccgaacagttgatagaactcgtcttgtgcatccgtgaacacatgcttaaaactgagtttcttgaagtggctaaaggtatctcgatacccccgaatttccggggtccttttgcaacagaactcatgctggatcccgtaaatagagcttcaggacagacatttgacagaacat

SEQ ID NO: 181979 - DNA, 327 bp, Arabidopsis thaliana columbia
  unsure (1)..(327): unsure at all n locations
aaagganaactctcttcttcttttttttcttctcctctccncnnaatttactaaggtgggtcactttataacatgggcctcgcctctctatctttctctctctcaatcacaattttcanttacacaccttaacccaaattatctcacattctnatctaatcataacacttttttntctttaaaacataaacaaactatcctttttttatttaaaatttaattaaacattctctattcttctacacttttttattattacaaacattttatattcccaaaatacacaaacccctttcctttattcttctcaccctttctttttttttt

SEQ ID NO: 181980 - DNA, 373 bp, Arabidopsis thaliana columbia
  unsure (1)..(373): unsure at all n locations
aaccggggcggaccgcacgcgtccggtttttcctttaatatttgtcctattacttttttggggaatatctgtttacttgaggctggtaccattaaaggtttgaatggtttccttacttaaatctaanttgctttatgttgcgtttgattaatgggatcgtacttttttaaagttttagccttttatactaaaaagcaacttttcgtgattttcttcaattgaatagctaaaattaggaaattttccttttcagtgttgattttcttttcctattttctttcttttctcttcttcttttttttcaagcgattaaccaaaaaagtcttgattttgttttttgttaaccactaaagtgttactcgatctgtggttt

SEQ ID NO: 181981 - DNA, 257 bp, Arabidopsis thaliana columbia
  unsure (1)..(257): unsure at all n locations
ttccttttttttatctcttcggcctactccaaccagcgcggtttttaatattaacaaaggttcgggcaaaaaaaaaaacttantctaaataaaaaattaacttttccaactttttccattccatattctcctttccccccccccttcatttttccanatttaccatttttattttctttaccccctcctccaaattgtctaaactttaaccttccttttcacttcctatttaatcctcttttccttttattctaccc

SEQ ID NO: 181982 - DNA, 168 bp, Arabidopsis thaliana columbia
  unsure (1)..(168): unsure at all n locations
tttttaaaaaaaagccggggaccaaaacatattcttnactttcttgaaaaatcaaaaaaaaaaactgaggtaaatactattttgaaggagaagccaccaaatatacatttaaagcttcctcaaccaccttttatttttttcaataaaactcctttatcttctctttcc

SEQ ID NO: 181983 - DNA, 323 bp, Arabidopsis thaliana columbia
ggtggtggtattagggttttggaaaacccttattttcacctgagaaaagcttcatccttttgtgacttttaaacttctcttacaagttttctccgtcatcctcctcctgggttcagcaattctcgccaaaattgtaacctctgagctaacagttctgcaactggtggtgtgctattgattcacaccaagatttagggattaagggaaatggtggaaacccaaaagaaatctgataagcttgagaagattaaagtggaaaccgaggagaaaacttgatagcttgagaagattaaagctaagcgtcttcgcctgagttgctaaaa

SEQ ID NO: 181984 - DNA, 57 bp, Arabidopsis thaliana columbia
attacaatcccgtacaaggttttacccagtagtaatttaaacccacccccccccaac

SEQ ID NO: 181985 - DNA, 229 bp, Arabidopsis thaliana columbia
  unsure (1)..(229): unsure at all n locations
gggncgaccaggcgtccgactatattcagtactctaacagaagcgccattttgtatccccaagactaaagctgtcttcaatgggggaagaacccaaggggggtgctttcgatctccaagagattcccgggcccttgaaagacctatgatttttttccccggaactgcagttaagagcctgaatattcggtgttttcctattcctagacactgttggattatgatatcct

SEQ ID NO: 181986 - DNA, 175 bp, Arabidopsis thaliana columbia
gaaagctgaaccaatatcccccaaatttttatatcaaactcataagctcaataagggggaattttaatttggggggcgggcgctgagcttccatggaagctctaaggtgccccaaagggtttaaccaattagctaagtaatacaacaatgaacacccccagaacttatctatccg

SEQ ID NO: 181987 - DNA, 497 bp, Arabidopsis thaliana columbia
ataaaagctaataattaactgattcgaattggttaagatgtaccggaagttggcactctgcggtttttatgtaggacaggaaggttactacaataattataagggtttaagaaaatgtaattttggtcataattacaatctttatattttacttatattaaattactttttatttatattgcttttttttattctttattattattctatatctaatttattttccttaatgtaatatattatataattatttatttatttataataaattaatttatattttcttatattttacatatattattatttatttatatctttaatatatattatattgatttaaatatttaatatatattaatattattttataattattttttatctatatgatatacttatttattttatataattataataattcttttatattaatatatatataattctttatattattatttttaatatttattatttattattatttatat

SEQ ID NO: 181988 - DNA, 52 bp, Arabidopsis thaliana columbia
gaagtaagtttcttcacattttcatcattataatttatgtacaaggcaggga

SEQ ID NO: 181989 - DNA, 214 bp, Arabidopsis thaliana columbia
  unsure (1)..(214): unsure at all n locations
ggcgggnggaagcaaacgcaaagaacccgccttagctccanttttttctttatccccccgaaccaccttcccagcccgggttctaacaaataggtgcctcaacccaaacctaaatcctcctcaagattctttttttccaatcacaaatcctcttccttcacacctcaacctataaaacctttttccttctccttcaccctctttaccatcctcc

SEQ ID NO: 181990 - DNA, 166 bp, Arabidopsis thaliana columbia
  unsure (1)..(166): unsure at all n locations
cttataaataccaatacaaagacgangggaatgctatcatggccaaccaagaaccgtatcgacggggtttttatgtaggcggaggggcacaaaaaanctagattcaaatttgaaaaccgaacacaccaccgcatgattgaaaatttctacccaactgttcaaacaa

SEQ ID NO: 181991 - DNA, 355 bp, Arabidopsis thaliana columbia
cggggcggaccaacgcgtccgctaaaaaaaagaaaaaggaaccacgcaaatatatatttaagctccggctgatctcaagcgcggaggataattttttgctgcagggggtactcaatagtccacaacccacccccaaggatgttacacatgaaacgttaagcaaaaaggctacccatctttttgaaaaaactaaaatgagagttgtttatgtagttccaccattaccactattaccgttttaggaaggatctgcattggaatacttatttagggtttgttgcattatactatggtattgccatccatttttctgtttttttactttttatcgctccaaacttttattctttaattt

SEQ ID NO: 181992 - DNA, 334 bp, Arabidopsis thaliana columbia
tttatttttcaaaccgcaaatctagttcagagcagggtttttttagaggggaggacgtcaaataacctctaatacaatgtcaaagacatttttaatgccaatttcggtcgtctagaactctagcttgccaaatttaatatgcttgtacacaagtcttgtctatacactaaaatggaccttttaagccattcaaaggcgcttaaaacaccggatctatttaacataaccatccaaacctctgtatctaattaaaccttaacttcttctcatactaaagaaatatggtgttcttgtaaaatcttttccatataatactcactcattcaaatccaat

SEQ ID NO: 181993 - DNA, 239 bp, Arabidopsis thaliana columbia
aacctaaaccatctcttcatatgctaatacctgctgtttcttgtgacaataactaaaagaaaaaaaccactgcctgtgatcacccacaccaaccgtatttgagttccgatttatagttctttcaaattccttgaaagcttccatagatcctgaacatacccttcattcccttgtactcatatttttggctcatttactttccttgacttgttgaaataaagtttaatcaagtctttcct

SEQ ID NO: 181994 - DNA, 172 bp, Arabidopsis thaliana columbia
  unsure (1)..(172): unsure at all n locations
ccgacccaggcgnccgaaaagaaacaanaataacttaacctgccatttattttttaccgctcaaccgaagactcaggcagcgtgttattttaaaaggggggggtattaaaaaaaccaaatttcacacaaaacaaaccaccacataaacaccttatttaaagaaaagaaaaca

SEQ ID NO: 181995 - DNA, 429 bp, Arabidopsis thaliana columbia
ggcagaaggtgggggccattgcccatggggttgttgcaccccaaagtttcttaggccttgctggttcttttgccaaaggggtggggctaaatgccttggggtccttccgggcccgtccggaaccaaacaggggggtcctggttccaccaccgggaggactcaccaggggggcccaaatggtccttaaccaaaaccattgggggggaaaccccaaccggttccctattttattaaatattttccagattgctttggtggccgggagggttaaatattagggttttggcgggtttcatttttcatggttaaccattttcatttaaaatcttttttgtttcttccacgtttggttcttttggtggaagccaatacacaaatggttgttggcccttttaattgggattatttaaaatttttttttttaattgg

SEQ ID NO: 181996 - DNA, 287 bp, Arabidopsis thaliana columbia
acccttccgttttttattttttaaacttttatcccccggttttaacctcctaactggcgcctatggctaaggggaggcccgccataaacaaaccggcttccgggaagccgtggtgggggaaaccaaaccccacgtaggctccggcgctataaaaaccaagggccggaaagaagctccttaaggaggcttgtcccgggggccccaggagtaaaacgtggactaccttaggtcccctgcctttcaggtcctactttttgacggtgcttaagcaggttcttcccattttt

SEQ ID NO: 181997 - DNA, 89 bp, Arabidopsis thaliana columbia
ggggcccgccgatcctctcgaggggtggtttaagggttcttaattgaccattttataaccccacctaacttcttgccggggggatgttt

SEQ ID NO: 181998 - DNA, 209 bp, Arabidopsis thaliana columbia
ccagtattggagggagaggggtttgttaatagttgcccaaaaaggacctggcaggccactggcttatttgggccttgtaattaagggtctaagggaaaaaaaccttaaaggccacacaaaatggcctccggggggtcctcgagtaattgttctggtcccacctgaaaagggggctcttaaggttctggctaactgagaaccaatttcaa

SEQ ID NO: 181999 - DNA, 332 bp, Arabidopsis thaliana columbia
ttaatcaatttctccctaattttgattcaaccccattacctttataggggggagggcaattttgggaagctggccctaaccttccatggaagcttttagggcccccaaagggtttaaccttttagcttaaaaatccaccatggttaactccctgaactaatttaaccggccttgattataatgatttcttaaaccgtcccgtttaaagcgtgggggtgtacaccgaaagtaatggaccggcggtggggctcgttccttttcaaacctaccaaggtctaatatcggttcctcctttactatttaggttttggtttttcttttggccattcagg

SEQ ID NO: 182000 - DNA, 262 bp, Arabidopsis thaliana columbia
aagtccagaatctttccccccatttttattccccaaacctaaagctttctgcgagggaggatgaaacccactacggtcctttcgatctccaaaaaatttgcagcccctgaaaaaacttctattcctttccccgaatttgctaataaaagcctgtaaattcgtgtattcccaattccaaaaccttgttggttaaaaatttggtccttaattttgacccaatggtgaaagaatatgttgaataatccgcagttgtggattaatt

SEQ ID NO: 182001 - DNA, 412 bp, Arabidopsis thaliana columbia
gtccggtaaacctaaaaataaagggggttccacttttaaatttttttccactccaaacccggaaggaaggaaaaaaccttcattcttgccaccaccaccaccgaaaaagccgaccgttttggtgttcccgtttcaacattccggtaacttggttcaacatttggacctaacccttaaattttttttccggggggccaccgtaactgtcctggtaaaacccaaaaacttttcctatttggatgctttccgtttttttaactcccgggaccacttaaaaaccctaatccttccttttccttttaaccctggtttaccttccggggtcgattttttccagaaacttcttttggaagctttagttaacatgtttgatgctttttttggtttccacgacctttttgttgacttttta

SEQ ID NO: 182002 - DNA, 276 bp, Arabidopsis thaliana columbia
tccgggtccgcccacacccgtccggtgggactaaaccatggcgtttttggctaaccatttttggggatggagatgttccccactcttttttttttttaggttatcggggagggcttcgaagaactttccccagaacaaatttgcctttgtttttccgacttttgtcgccccggttgcattgtttagcggccaaccaaaggaccgttttgagctgaaaaaaatgttcgaagatgcttttgaacgatgtaaaacttttcctatggaaggggtggcttt

SEQ ID NO: 182003 - DNA, 152 bp, Arabidopsis thaliana columbia
aaaaccgggtccgcccaacccttccgttatgttcgttgggcctaatttttgggaggtttaaacctaaaaagttgtgtgtcctgaagggccggaaaggattcgtgaactgattgcaatggaagcatattttgatcacggcgggtatggaaatt

SEQ ID NO: 182004 - DNA, 357 bp, Arabidopsis thaliana columbia
ccccacgcgtccgtgggggggggacccaggctggccgaatcaaggggttaatgggggctggaccaatgcttgggtttctttggggacccagttttcagaggaggcaggtgccgttgagaaggctcgaaaggggggggagaccagggagaagctcgtggcctgggcctaaaaaactggaagcctgttaaattggatgacacctctgggtcccaaccgaggaaatctagggaattcccgggatttttagaattctgtttttgtggcgaagttttttaatcctaataagggcctgtggggggcaaatggctgggcaggtggcccccattaaggaaataaaatgggcgattctttagcttt

SEQ ID NO: 182005 - DNA, 326 bp, Arabidopsis thaliana columbia
cgaattttctaaggaccccgccaaagcgcctggtgggtaactttccgggcgattttggtcttaaacccgggacctaccaaatctttaactaaatccgtccctaattcctccgaaggattggctggttccgttgccaaatcctcttcctcaacacctaattccatgaaggctttttccgccgccgtggcccttttttcaatcctcctttttgttcctatgccagctgtggctgttttttaaggttggactcctggcagggcctcaaaccagttggttaaaggagggaagcaccagtccaggaggctggattttttttttaggcttta

SEQ ID NO: 182006 - DNA, 200 bp, Arabidopsis thaliana columbia
ccacccgtccgaccgtcgtctgagcccaatgagtcttaagctttttaaaaaacccaatagttcctggctgcgaggccgccgaagagaaattccaggaagcgttgcttctaggaggaggatgaggttatgtgggcaaacaaagccgcattttcaggggaggaagggaggcgaaattgggcgttggaggaggtgaatgtttt

SEQ ID NO: 182007 - DNA, 248 bp, Arabidopsis thaliana columbia
accaacgcttccgttaaccctagggggaaagtttaaaatcttttttttaggaccaaacaggttcctgggaggcgcgtctaatttgaccataagttcaacctcccaaggactccatggaaccaccaccagttccgtttttagacccgggtaagcttctttatatggcttttggaagggcaggataccgtatggtcaatcgtttcttctattattctcaacattactgtctcgactggtatggaatttaa

SEQ ID NO: 182008 - DNA, 101 bp, Arabidopsis thaliana columbia
ttttatttccggtccgcccacacccgtccgttctagtccaccagcttcctcgtggccttgtcattccaaaaccggcaaaatggagggaggagattagtgtg

SEQ ID NO: 182009 - DNA, 268 bp, Arabidopsis thaliana columbia
gccgaccacacccttccgttaaggcaaagacaaaagctttaatgaagctttttatttagaatcgaaggcctttgggctcgggggggtcctattatggtccaaaagggtcttgtggcctcttttgtgggagagacttttaacaggaggggttttgggttcccttttccgtttttaaaccacccatggttccagggtttgtggaaccttccggaggaggagtcgggtttcgcccttcccatggagggtttactctatccttttcccttga

SEQ ID NO: 182010 - DNA, 308 bp, Arabidopsis thaliana columbia
ggtccgacccagcttccttttattttaggcccttatatataaattttttttgggcctaaacaaaaaactgaaccggggggctctattttctttgtgcccaaaaacccgcttaaggactcttgctctgttaaattctttgttatggacctaaccaaaccaataaggcacccctgggcttttttcgtttcaaggaataatttccatgagacctttatgatggaaaccccaatgaccaattttatagttcctgtgtgtaaatcttctgctgccatttgcaagaccttacataactcttaaaaatctcctta

SEQ ID NO: 182011 - DNA, 128 bp, Arabidopsis thaliana columbia
ccggtcggcaccacacccttccgtggttttaaagttcttgttttgagattttttttagcaccatccaaagacttctcctagggtaatgtttaaggttattgcctctccaatttatggtcccccttggg

SEQ ID NO: 182012 - DNA, 373 bp, Arabidopsis thaliana columbia
tccggtccgaccccgcgtccgccttggtttggaaataattagggttccggcgtttttgcactttcctttttggtttttccagctggccattgcctggttttgatgaccgttttggaaccactcgcctttatgtgggcggttaataatttagaactggtcccagagacctggggcgtttttttagcaaatccggagggtttttgggggttggcctaaccgggagatgttggttgaagggggggcctggggggtaatggggggaaattctcgccgggggtttaaggggggcttgggcgatttggttggtggattaatggcatgtttttatgggaaatggcctcaaatctaaaaacctggggttgggaagtccctt

SEQ ID NO: 182013 - DNA, 273 bp, Arabidopsis thaliana columbia
cgtccgaaagggccaagagggaaaagggttcgagattggcggccgcattttctgggagtagttggttgttggccaactcttaacaattttaataatcggattaatatccgggtttttccgtttccgggcaacttttttaatccaattggcaattttttaaattcaaaaggacgtgggttctttcctctttcccccaaatttaacgaccttgtcgttaacccttccttttcttatttatcctccaggctttttccaattggaacccattctttt

SEQ ID NO: 182014 - DNA, 452 bp, Arabidopsis thaliana columbia
cgaccgacccatccgtacaaccacactcaaaaacccaattaatgggttttttttgaccttctggccaatctccacaatttaattcttctaaaacaggaggcgggtctccaaccccttcttctgcttactcaataaacccatctcgctcctataagcccctcctcatccaagcgctactacaccaacatttgtatctactggcctagccccctaatgaacaccacctggccatcctcaattccctttacgattacatgtgcggaaaccaccccccctttgccagcccctatttctaattacccatttaaccatcgcctacacgcataaaaattgttttcactccatcttcaaaatcttaagaagatgtgtcataaacgacttattttattcaaatggggaaaaaagctttttgttcaaagattttacacttagatgataaaccatccattttt

SEQ ID NO: 182015 - DNA, 282 bp, Arabidopsis thaliana columbia
  unsure (1)..(282): unsure at all n locations
catctcatggcccttcctctcatccctatttttttttaaccctgatctattanctataaacgggtttattttcggagaagggagcactatccaaacccgattaacacttcttcatatacggataattgccctactaccccaaccctacctttgaccacccaaacaatatttaagcccttaaggctactaaatttatcctcatgccagctacttaatgctccagaatccccgaaaattacccattgccaaaagcaaagtactagctttaccaaaaagacacat

SEQ ID NO: 182016 - DNA, 273 bp, Arabidopsis thaliana columbia
atctttcatcctgggggggcgccaccacctctcaatccctccaactacctcatccaaacttttccccaatccacctacatccatccaaccatccttcttaccctctaatttactccccaaataatcacctttactccacaccttcccaacaacttctctccattcttatatatcacaccttcttactaatcttaaaaatactccaaatacttcatctttcacacccttttactccttgttaacccccagacattcactaataaccctcacctt

SEQ ID NO: 182017 - DNA, 291 bp, Arabidopsis thaliana columbia
tcttcctttcatttctcgatccccaattcgagttccatggttaaaaaaaccatttttattctcggggggcttcttcaaatggggaggcgaacactattatgatatccaaatgccttttaaaaagttttacattgaaatcagagggaataaggtgacggatcttccatgctatatcaaatcaactttttcaattgatacctttaaaaccttttttaatagagtactttttaactacaactaaaattacattcaaaccatcttccgttatcctatccttaatactttctttta

SEQ ID NO: 182018 - DNA, 189 bp, Arabidopsis thaliana columbia
ccacgcgtccgttaaaaaaaaaaaaaaacacaaaaaaaaaaattactccaaaaaacaaaaaaacaaaacccacaaaagagaatttttttaaagggaggggcgccccccccaaaaaacaaaaaactacacccccaaaacacaatatacttccggtcccccctttaacaaatcccaacctaaacaacccct

SEQ ID NO: 182019 - DNA, 221 bp, Arabidopsis thaliana columbia
tcaaataaaaaaaacccattgttaatttttttcacaagctattctccctggggtccttaaggtgggcggtcccctctatctaaatcctgagcgccttttacaatagaatactttccatccaaggtcatatcatcatgtcgaccaccgataagtcttgttccattcttgcaagtcacctactccttccgagatcccctaactcgatggacaccttgacttta

SEQ ID NO: 182020 - DNA, 306 bp, Arabidopsis thaliana columbia
aaaacccccgccgacccacgcttcctaaaacactttctcctccattaaccaaattctatcctttccccttccctcaaaaatccggggaacttcataaaccagggggggccctcatctctaaataatccttatagtaaagaaaaacccactcctcaaacttctttccatcatctaccaacagtttctctacaaatactacatcaaatttaacatatcaactctctcaatgtacaaacattttcccatataccattaaattatccacaatttcaacgttaattacattctctggagtatctacccata

SEQ ID NO: 182021 - DNA, 405 bp, Arabidopsis thaliana columbia
  unsure (1)..(405): unsure at all n locations
gcgatttggagaaaccctgatccttcaaaactatttttgtgatgcaagaattcttcttattacagtggggagtctaatgaatgcgcgagagggtgacggccattgtgtagcaacgcctttgacccgctgcattagaacgtttacctcgaggaggttttagaagtcgtgttgaagtacatttaagagacaatataccgcaattatccggaatattattgatcagtggaaacacggatantggagaaagaactagnggcgcctcagtattctgtgtgctgtgtggtacccgctgtatcatacacaggaatatattattcttcagaaggcatctttttgagtattgcaagaaagcgtgtttgcattcgacaaaagtgaattgttacaaggatacttttgtatggtcat

SEQ ID NO: 182022 - DNA, 328 bp, Arabidopsis thaliana columbia
atcgtcgtcgtcgtctcaagtcgcattagctttttaaaaaatccgatagtttctggctgcgaggcctcctaagagaaattgcgggaagcctaccttctaggaggaagaagactatattgatgtaaacaaagccgcaatttcagaggaagaagagaagcgaaaattggcgttagaggaggtgaagtttttgcagaagctgcgagagaggaaattaggtatcccagctttatcttttacggcgcaatctagcatgggaaaagtgaaaccagtgctgaaaactgaaactgaaggcgagaaagaggagcttgtgttgcacgatacttttgct

SEQ ID NO: 182023 - DNA, 341 bp, Arabidopsis thaliana columbia
  unsure (1)..(341): unsure at all n locations
gccgacccacccgtccactctagtccaaccagctttctcattaccattttcaatccaaaaccaacctaaatttnaggcataagattacttttggaaaaagaaaccacaaaaanaccccntcaacaacccaaaaaaaaaccccgcccaatcaacaaaaaccaagcccaaccaccgcaaccatccgacctattaagtgcccctttaaacaaaccacccaacaatccacccccccccttttaccaaccatcttaaccgtaaaaccccccccaatcaccaaactcaatcccctcccaacaacaaccccacctgaaaaaaccccttttcccccaaaataaccaccc

SEQ ID NO: 182024 - DNA, 315 bp, Arabidopsis thaliana columbia
aaaaaataaaatataataaaaaaataaaaaatatataaaaaaaaaaaaaaaaaaataaaaaaaaaaaaaaaaaaaaaaataaataaaaaaataaaaataaaaaaaaaaaaaaaaaaaaaaaataaataaaaaaaaaaaaaaattaaataaataaaaaaagaaaaaaagagaaaaaaaaaaataaaattaaaaaataaaaaaaaaaaaaaaaaaataaaaaaaaaattaaaaaaaaaaaaaataaaataaaaaaaatataaaaaaaaaaaaaaaaaaaaaaaaataaaataatataaaaaaaaataaaaaaaaaaa

SEQ ID NO: 182025 - DNA, 332 bp, Arabidopsis thaliana columbia
aaacggggccgaccaaggcttccgtgtactcgtgggcttaaattaaaatccttattttcttgccaaaccattaatccaaaccttgggcgctgggcccacccaaggaagcctaaaccagtaaattgaaatccaacccacaaaataatttgaccgggggtcagaatcattggggaaaaggtcgtattgccataggaatatttcccgaagggattattggggggggtcttaaccttttttcccgtaaattaaatttcctcctaattgcaaataccttttatggtggaatcgaacctataaattccacccttaatcaaaatgcttacattttttta

SEQ ID NO: 182026 - DNA, 403 bp, Arabidopsis thaliana columbia
  unsure (1)..(403): unsure at all n locations
cgggnctggaataccggggccgccccaggcgtccgttttttttgggcaaggtttttttttcttttattttgggggggaggtccaaaaccaatttgaaatttggcattagtttttttttggtcgatccgcccaaagaaggttttttggatctcctttggttttggttttcttccaacctgcccagggcaggattaatggtttttcttccggttccgtttaagggtttccggagaagtttcgggggtcgttggatctttgcgtgggccattttctttaaaaaggttttaatgtttttaagtaaactttttgctttaatgggtaaaaagttaacatatgggttaaaccttttaacggaaaatggaggttttttaaattggttacttaaccttatgtaaggaaagtt

SEQ ID NO: 182027 - DNA, 219 bp, Arabidopsis thaliana columbia
aaaagataaaaaggaaaaaaaaaaagaaaaaaagagaaaaggaaaaaggaaaaaaaaaagaaaaagaaaagaaaagaaaaaaaaaaagaaaaaaaaaaaaggaggaaaaaaaagaaaagaaaaaaaaaaaaaaaaaaagagaaaagaaaaaaaagaagaaaaagaaaaaaaggaagaaataaaaggagaaaagaaaaaaaagaaaaaaaagaagaaaaa

SEQ ID NO: 182028 - DNA, 285 bp, Arabidopsis thaliana columbia
  unsure (1)..(285): unsure at all n locations
gggggnagaaaaaggagggcaaannaanaaaaaaaaaaaataaaagcgaagagaaaaaaagaaaagagaaaaaaaaaaaaaaaaacccccaaagcgagagaggaaaaaaaaaaaaaagaaaaaaaaaaagaggaagaaaaagaaaagaaaaaaaaaaaaaggaaaaaaaaaggaagaaaaaaaaaagaagaaagaggaagaaaagaaaaaaaaaaaagaaaaggaaagaaagaaagaaaaaaaaaaaaagagaaagaaaaaaaaaggaaagaaaggagggacaag

SEQ ID NO: 182029 - DNA, 324 bp, Arabidopsis thaliana columbia
gacccaggcgtccaaaaggaggttggagcaaaggcaaatttttccacctgttttaagaaaggaaaagggaaaacaagggggggtcttaaggaattatttatgcccaatggtttattaccatggagggttattaatgaggttggttttgttattatgtaacttgctaatggcaggattaatatttatttttccggtaactttaaaaggttatcggaaaagtttcttaggtttagtgattcttttgtttggccttttttttttaaaaatattaaatgtttttaagtaaacctttggcattatttgttaaaagactaccatattttt

SEQ ID NO: 182030 - DNA, 201 bp, Arabidopsis thaliana columbia
  unsure (1)..(201): unsure at all n locations
gagaagaagaaggggaaagggaaaaaaaaggaggcaaagaaggaaaaaccggcggagaaagaaaagaaaaagccggaggaaaaggaaaggacacgggaaaagaagaaaaaggacagggaggaaaaaagaaaagaacggaaggaaaacaagggagagagaaagggaagaagaaaaaanaaaagaaaaaggaggaaaagaaaa

SEQ ID NO: 182031 - DNA, 413 bp, Arabidopsis thaliana columbia
aggccaaccaggaccaggatatgggttgcaataaaatggacggggaattactggccgacctattggtggttaacggttaccattgggactaaggtaatcgattgttttggttataaattcgtttaaggtaccattcccgattaactttaaggaatttaaggataccgaaaaaaaaaaaaaaggggcggggttggggatttagcctaacaaggttaattaagttggtgaggggcttaaggaaggatgttgttaaatgctgggttgggtccaagaggggatcacggtcaattaaaaggccattattaattgtaaactcaacgggggtcgggaggtggcaaggaccaccaggagggtttgttggccattgaactttttgaacttttgggttttctttttccaaccaattttttttt

SEQ ID NO: 182032 - DNA, 133 bp, Arabidopsis thaliana columbia
  unsure (1)..(133): unsure at all n locations
ggaanacccgggccgaccacacccgtccgaaatttaacagtttaacgtcttcgcctttatttccccggacctgaacttcctgattgggtgccagaaattgaatccacctttgaactttacccctttttaactt

SEQ ID NO: 182033 - DNA, 194 bp, Arabidopsis thaliana columbia
cacaggcgtccggggtggacaccccgcaccctttcaccttttttaacccatccaagggaaccaacttcaaggggtcattaaataccgttggaaggaaaagagccgggggcggttttattggttccaccatgaaaaatggggaataactctaccacttattcgggggttccaagtcctaaaagacggcctaaaac

SEQ ID NO: 182034 - DNA, 261 bp, Arabidopsis thaliana columbia
acccaggcgtccgacaggaataatgcccaggggtcctttatcaaatggttttgatgcacggggccatctgtcccagagggcttcttttgcctggccattgggcaagcaataataaggcttaatttgacaaacctttttgacctttgggggtggcattgtccgagggggttacaacccggcttggttccttttccgtatagggaatagtcgtccctctaagtggcctagtgtcggaaaaaagatttggtacaccaatattct

SEQ ID NO: 182035 - DNA, 317 bp, Arabidopsis thaliana columbia
ccgaacccaatttagccggagatggctgaaacattttttttttttgaagttgctttttcattcatgggggctgggtggcatccggtattccatcccggtccaggtgggttaacagccttgtctgttttcggaaggaaaaaggaatttccaaaaaggagtgccaaaaagacgttgcttccgtaccggcttttttggtccccaggctcctttatattcttattggttaagttggtactttgtattgtgattactgttttttatccttctggtttaggtaatctggcctattttttttaaaatttttattttgttttaat

SEQ ID NO: 182036 - DNA, 435 bp, Arabidopsis thaliana columbia
  unsure (1)..(435): unsure at all n locations
acgggnttggaatcccggggcggaccacaggcgtccgccgggtgagtttaatggaggttccataaatttctcttttttttggggtttaaggcgccaggaatttggaaaacttaaaataacaaaaccgatggtgatgataaaaaattcgattgccgaagagaaactggaataagagtcgttggtaattggttttaatccggggcaaatggaaccctttgaggcttaagatttctttttttacaatttccattggattccagttctttggtttttggtttaatttactcctgagctggcttaagggggttgttttttagttgcaccagggcgacaaaactcatttttgatggatcttgttcccaatatgagatttttttttggtcggggaacgataaaactttacgattttgtgggcacgccgaacagttttttttc

SEQ ID NO: 182037 - DNA, 203 bp, Arabidopsis thaliana columbia
cgattaaatccaaagaaacagtgatgttttggtttcctttggaggtgagagctaaggcagagaggtggggggtatataaaatttgtttagggaaaccaattggtttcttaaaggaaaaattaattcccaagggttatttcccattgatggatttaaataaggttgggtataacaaatagtaaggtgtttgttggttgaagcat

SEQ ID NO: 182038 - DNA, 171 bp, Arabidopsis thaliana columbia
aaactacaacaattcttacattaacattttttttaccaaccctttgtgttttactttcgagagagatttcatttcctaagtatttttgttctgttttgtaggaccaatgtaaggttcctttggggaaatggggtttagttccggggtgggttttgcttttaggttaagggt

SEQ ID NO: 182039 - DNA, 274 bp, Arabidopsis thaliana columbia
  unsure (1)..(274): unsure at all n locations
ggcgtccgtnaacgaatttccaggggccaaattggcttttttttttgaaaaaaattccttgttccacgggtgggtctgtgtatccgccaccattttcccttgcaaccggaattccggattaagaggaagaaaaaccgtccggaaaatggaaggtagtcctggatcgataaaagaatctttgaccggagccctgccaggctgataaaatcctgtcagccttgtatttactgttaggttctggaaaatctttgtctcaacggcttcccttaattct

SEQ ID NO: 182040 - DNA, 201 bp, Arabidopsis thaliana columbia
gggccgaccacgcgtccgtttattcttttctttaattttttccgttgttttttaagtccttgggatctggcgtggggtgtgtggttggtaagatcaataaatccatttttctaaccgccgccgaaaggtttgggcatttttattctttccttgggggaatctgggatatgggaaaggccatttttcctgccatgtttaata

SEQ ID NO: 182041 - DNA, 211 bp, Arabidopsis thaliana columbia
  unsure (1)..(211): unsure at all n locations
aacggggcggaccaaggcgntcctaaattttaaaggggaaatttatttgttggttttgaaaaccaacgcggccgatcaaggggggggggctttataaaggacttgatgtgtctatttttgccggtgctatgtttttatttaaactttttggtaaatgttaaaaatcaaattctactatagttgttgcttggttgttaatttatgtaataaa

SEQ ID NO: 182042 - DNA, 268 bp, Arabidopsis thaliana columbia
ggttcggaccacaggcgtccgttaaagttccaaccaaggaccggttggttgttttctcctttaacgggatggactttgcctagttagggtagttttggggatcttgaccgttggggattgtgtgtgggtgtgtgttggttttggctctttattgttttttaattttttggtgtttgtttatttttttttttttttttagttattttttcattttattatgttctttttgattttatattttttttatttttttattcttgtttatttt

SEQ ID NO: 182043 - DNA, 330 bp, Arabidopsis thaliana columbia
  unsure (1)..(330): unsure at all n locations
acgggnctggaatcccggggcggaccaaggcgtccgttcttggcttaaaaaggatgtttaacaggatgactaaacaccgccactggtccaacatggtggtaaatttaaaacaattgtcaaaggaataatggaaccagaaggggaaaacgaagccttttttttggaagctttgatggtgaccgacgggttagggaaaccgttgtttaggtttgaggggaggaacaaaccttttgaacggttaacttaacatgaacaagccttgtttccggtggttgaagagcccgatgactttcaaattaatggaagagaagaatctttggttggaaaatt

SEQ ID NO: 182044 - DNA, 145 bp, Arabidopsis thaliana columbia
  unsure (1)..(145): unsure at all n locations
aaacgagtacgagaagcaccaggatgtagttttggctnacccaatgcgctcctccgccggggaggttacatacctggctgaggccaccatttacattccagtcaccgacttgaaaaaatccgcagaattcctggccacccggaag

SEQ ID NO: 182045 - DNA, 353 bp, Arabidopsis thaliana columbia
aaaaaaaaaggggagtaaaaaaaaaaaataataataaaaaaataaaaattttaaaaaaaaaaaaaaattaaaaaaaaaaaaaaaaaaaaaaaataaaaaaaaaaaaaaaaataaaaataaaaaaaaaaaaaaaaaaaaaaaaaaaaacaaaaaaaacaaaaaaaaaaaaaaaaaaaaataaaaaaaaataaaaaaaaaaaaaaaaaaaaaaaaaaaaaaaaaaaaaaaaaaaatcaaaaaataaaaaaataaataaaaaaaaaaaaataaataaaataaaaaaaaaaaaaaaaaaaaaaaaaaaaaaaaaaaataaaaaaaaaataaaaaaaaaaaaataataaaaaaaaaaa

SEQ ID NO: 182046 - DNA, 310 bp, Arabidopsis thaliana columbia
  unsure (1)..(310): unsure at all n locations
caaccacccanagtttttttttttttgcaaaaatttctcatttgaggtaagtttttttcaaattgggagggtgtttctttnccccaaanntttaggaaacaaacaattctgtgtaccataaccaaaataagtattttctaaatggtttattttttcaaagaataaagagttgtcttctaataattaatttccccaaattttaatcttgagcttaggatcattccaccatttcatatccaaagtgaaatttttactttcacttttttcttttttacatttatattccctattaattttttattttaacctt

SEQ ID NO: 182047 - DNA, 210 bp, Arabidopsis thaliana columbia
  unsure (1)..(210): unsure at all n locations
catgtctccaaagcaagtccaggcatcatttatgggatgtgatctgcacgaaggcgacatggggtgttattaaaggggggaggggggaaaaaaaaanttatnntttataanaaaatttataatattttatttattttttattttataattttagatnaaatattttttttaattataattattttattatttaannattttttttttatt

SEQ ID NO: 182048 - DNA, 495 bp, Arabidopsis thaliana columbia
  unsure (1)..(495): unsure at all n locations
caatttacacagcttcacgtcgncgtttttttttcgccggagctgtagctactgatgtggtaccagaaagagagtgcgacgggggacaatnacgctttttcactttttcaactgtgcgattctaacattctgtccttactctgtctactatcttaccactccttttattttattttatacactttgaaccttccggaaattctctgctgattacttttttactgcatttgttttagttttgttatttggttacttttttttcaagttttctattacttatattttttnttctcatttttttatttgttagtatttttttttttttttttaataaattctttttcttttttnatatattattttttatctattttttattttttttatttattttttatattttattttatatattttttttttctataattatctttttttttttctattttacttttcttttttattttatcttttttcctttttttttttttt

SEQ ID NO: 182049 - DNA, 447 bp, Arabidopsis thaliana columbia
aaacccggcggacccacgcgtccgcctgagagttttattgagcgccattatttttttctctctttggggttttaagcgccatgggtttcgaaaacctgaaatcacgaaaccgatggtgatgataaaaaattcgactgccgaagagaaactggaatcagagtcgtttgtcactcgtattaatccgaggcaaatcgaaccccttgaagcataagatttccttctttaccacttccatttgattccagttccttcgctattcgcttcatatactcctgagctagcctcagcgagctgtattttagcttgcaacaaggcgacaaaactccattctgattgatcttgttccccatatgagactctcttttcgttagggcacgataaaactttactatttttggagcacgccgcacagatctttttccaagtgttctttttgatggaagtggt

SEQ ID NO: 182050 - DNA, 279 bp, Arabidopsis thaliana columbia
  unsure (1)..(279): unsure at all n locations
atacccgggccgccccacccgtccggaagaccaccacgcctaaccaaaaaggaaaggttcaggccgggggggccaagggcatgagcttcaacaggctaaagcagtgatttacccccaccaccatccttgggccagacaaaagccttaagctttaaaccctttgtttattgttcttntnnaggatntccaaggtcccctatgggaaaggatcttggnntggccctgtcatggtgatttcttgaggacctttttccgttcaaactccgtttaacctaactg

SEQ ID NO: 182051 - DNA, 134 bp, Arabidopsis thaliana columbia
aaaacccgggccgaccaacccgtccaaaaaaagggcggaaattccaagggtttgggaagggtcaagaacactgaggccaaagggggggactgttaaggcttaaacggtaccctaaaaagaaaaaggaaattaaa

SEQ ID NO: 182052 - DNA, 370 bp, Arabidopsis thaliana columbia
  unsure (1)..(370): unsure at all n locations
cggggccgacccagccgtccgccaaatcggatcaggggggtgtggttgatgttgttgttgaggtggaggaggctttgaggggtggtgactgatcttggggggatggcctggcttatctgggggccttgggagcttcctgttgtggcaaagttaaccccaagggattgttcctnctcgagnnttccggaccgaagagttgctccggtttttgtgccgaacaggccgcccgtttgcggttcctgtaaggcaccaggaaaggaccgaccggtgttggatccccttacatgggcttggtgtggggtggggaaaactctttttgttttatcagaaccattgccccactggggatcaaagctcctgggattttgcc

SEQ ID NO: 182053 - DNA, 442 bp, Arabidopsis thaliana columbia
gccgcccacacccgtccgaaaaaaaaaaaaaaaaaaaaaaaaaaaaaaaaaaaaaaaaaaaaaaaagggggcggccgttttaggggatccaggtttccgtcccctggcttgcaacgtaatagtttttttttggggcaacctaaattaaattaattggccgccgtttaactacgccgggcctggaaaaccccgggcttacccaaattaaatggcttggaagaaattccccttttcgccggttggggtaataccaaaagggcccgaaccgatcgcctttccaaacagttgcccaccctgattggcaatgggacccccccctgtaccggccctttaaccccgccggttttgttgtttccccccagggtgcccgtttaatttgcaagggccttagcccccgttcttttggtttttttcctttcttttttggccacgttcgccggtt

SEQ ID NO: 182054 - DNA, 379 bp, Arabidopsis thaliana columbia
agaaaccccaggagttgccagggaaaaggcattgcaggaggaacctaaaatctttttttttggttcctgaagtctgttaatggcgatgtcggaacctttccattggacttttgcctttgtccctggttccacactttaaaccggccgttgtttttttaactttgttgtttaaagaaaaccacttgccatataacctggtttttcctgtttggatcacaaaattgggcgtttgaaatctgtccccaataaaagttttttggggtgccaggcaggttttggcggttttaggagaaatcctgatttttaaggacttaataggcatggttcccggggaaccaccaggcaaagcggggggggagaagattttgttatcgaaacc

SEQ ID NO: 182055 - DNA, 162 bp, Arabidopsis thaliana columbia
gaaaccggggccgccccagccttccgaggatccaggggacctggaaggaaggtggctttttgcattagagaaggcagttccgcgaggcggggatgtttgggttgaagcctgggaccagtaaaatgatgggaaaatccctaaggaccgtgcaacttttcggtt

SEQ ID NO: 182056 - DNA, 355 bp, Arabidopsis thaliana columbia
cacccttccggtgggaaagggtacccttttcttttaaaccgccgggcaggagccttccaccggcctggtggccaggtccaagctgtttatggcctcggccgcaaaacggggttaaaacgtttcggagatcgggtccacgccgtcaccgatgggttggtccggggggactaaggccgaggcggaccgggtttttaaatggatgccgttttatctggacggccccgttattttgtttcttagacctattgagggattgccgatattcgttaatcttgatgagatgaaggtttcggagtttaaggccaggtcaggggttcctatgcccatagctaacggaccggagtccgcgttttgg

SEQ ID NO: 182057 - DNA, 391 bp, Arabidopsis thaliana columbia
  unsure (1)..(391): unsure at all n locations
aaaaacccgggccgaccaagccgnccggaatttaaaagatcttttttgaaggacttttttcctataaatggncccaatccaattggggcagtttcttttttgtttgtccatgcccaaccagacccaacttatttttttgggaggtcatttctaccaattcattttatccatnattaaacttatttaaatattatattcattacccaattaattccgaccgaataaattttcgaataaaattgtaccatccttaattggttgttataactatttttggtccttcttttttttttttcaaataattttttaaataaaaaaatatccgtgtattattaaattaaaaataaaactgttttaatttaattttcccattctattgaatttatttttt

SEQ ID NO: 182058 - DNA, 134 bp, Arabidopsis thaliana columbia
tcggacttttaagggtcaaattttttttaactttttttggccttttttggccatttattaccaggtttatatataagtcaaatccttaaatctttttttttccagattacctattcacatgaaaaaaaaggatt

SEQ ID NO: 182059 - DNA, 146 bp, Arabidopsis thaliana columbia
tgaaatcccggggccgacccacccttccgggggaggtaggtgagatgaaggaggaggaggtgttcggaaacccagcgaacccaaaagccaggaaggatgttgttcctgggaggttgatggatccctatgctgaacagggcgatacc

SEQ ID NO: 182060 - DNA, 154 bp, Arabidopsis thaliana columbia
gggccgccccagccgtccgctcttttaacctgaaccccttgcattaatcattttttccttaccttccaatggattctccgggaaaggcttttttaaaataatgatgagggttcaagctcctatcaaaaaatcttggtcctcggattctttttct

SEQ ID NO: 182061 - DNA, 204 bp, Arabidopsis thaliana columbia
  unsure (1)..(204): unsure at all n locations
aaaaccgggccgacccacgcgacacgaaaaaacgccggcaataactagggttttgtttggtaccacgacactgacgtcnaaggcgcgttctcttgaaaacgcggcggggtccccaaaacgaaaaggcatatccaaacacacgcctgaagcacaaaccccagctagcttccccggagaaagggaactcactttttttttccgctc

SEQ ID NO: 182062 - DNA, 192 bp, Arabidopsis thaliana columbia
tcccccctcctccccctctcccccccccctctctccccccgccccccccccccttttttttccctccccccccccccccccccttccttcctccctcctcccccccctccccccctcccccctccccccctccccctccccccccccccccccttccctccccccccccccctcccccccccccccccccct

SEQ ID NO: 182063 - DNA, 408 bp, Arabidopsis thaliana columbia
  unsure (1)..(408): unsure at all n locations
aaaaaaaaaaaaaaaaaaatttctcaanaattatatcttttccaaaaaacnngcccncccccccgggcgttttttttcaaacattcgccgccccccaacaaacaaacctcttctatacnaccacccaaattcaatccacttcccctctttttacaacttcgtgactggaaaaccctttttcttccccaacttaatcacctcccaccccttccccttttccccacttatcttaataccaaaaagtcccacacccttctcccttcccaacatttcctcacccttaattcccaatcttcccccccctttacctcctcattaaccccaccacttattctctttacctcacatcgtaacccttacactttccatccccttaaccccccctccttcctttttcatcctctcttt

SEQ ID NO: 182064 - DNA, 158 bp, Arabidopsis thaliana columbia
  unsure (1)..(158): unsure at all n locations
aaaaaaaaaaaactcaagatatactttgtttctttttcagcctcgcnccaatccaccnctacagtccttcttttcaacgaagatcgcccccacacaacctcccnnaanttctcacctcccatctactcaacccttcatcaaatttcttttttctcgaa

SEQ ID NO: 182065 - DNA, 236 bp, Arabidopsis thaliana columbia
  unsure (1)..(236): unsure at all n locations
aaaattnacccaatcctcacaacttttatctattaaccacccaccctccttcatgcccgcttctttttcataattgtctgctccacaaaacattccttaaacttttcttccttcttttcactacttcatctattctttctttcttttatcctccaccctttttttttttttttctatacaaaaccccccttttttcttttctcctccattattatcctttctttaacctcattttt

SEQ ID NO: 182066 - DNA, 421 bp, Arabidopsis thaliana columbia
  unsure (1)..(421): unsure at all n locations
aaaactatgtttacttcctacacaaaaactttacttatccgcgtcctcaaagaantcnatgcagggttttacatttacatcggcctggacaaattctcaactctttttcnctcgtcttcctccgccgcaaaaatccgtgaccctttctatctctacgatcaggacatattcttactgatctccgcctctaaacttaaccagttgcttaaccgtctcggtatgtcttgctctgttgaaaactgtactcctatgatcggacctttggatcctgacggctatggaaatttttaatttcctagagtttcagaaaattttgacttcttctttttttttcaacattaattaatcctccattccttcttagacctaagaaggtttccacattttaaatttttttttttttttaacaaaaacttttcaa

SEQ ID NO: 182067 - DNA, 412 bp, Arabidopsis thaliana columbia
  unsure (1)..(412): unsure at all n locations
cgggcggggccgacgcgaaacaaaatttannannacctttttagaaggtctccttttactatagnanaggcacctatccaatttttgctggttttttaaaatgggtgtcgcatggacaaaactacacctaccttttttttttttgggtcaatatcatcaattcatttcatccatctttgaacctaatccaattatttttttttttcacatttaaataactaactaacaaagtgtttaattaaattgtaccattttttattggtggttattactaatttttttactctcttgttttttttttcaaatttattcctttctatttttaaatatcttctttttttttttatatatttatatattttttaatatttcttaaatttaaaatttattccctattcccttatattttttt

SEQ ID NO: 182068 - DNA, 249 bp, Arabidopsis thaliana columbia
  unsure (1)..(249): unsure at all n locations
cccacgcgaacanacaaacaaacanaaaccattccataaattttttttcccaaccacccaaaccataccccgcggggcatattcttaaagtgaggcggatcaaaaccaacccctcccacatcattacctgactcaaaattatctcctccgatatccattacaattactacaacctcatttttttttttttctaacatccaataaactgttaataatacctaatctcatcttatattcacctccatatat

SEQ ID NO: 182069 - DNA, 229 bp, Arabidopsis thaliana columbia
ccccaccccccacccccccacaaccccccccccccccccccctcacccccaccccccaccaccccatcaacacccaacactcccaaccacccccccccccccccccccccccccccccccaaccccacccccccaccccaccccaaccacccacaccccccccccaccccaccacccacctcccccccacccccaccccacccaaccactcccccccccccccctcccc

SEQ ID NO: 182070 - DNA, 76 bp, Arabidopsis thaliana columbia
  unsure (1)..(76): unsure at all n locations
gaancccgggccgacccacccttccggttnggattcnacgtttgccttattttttcttttcnncttcttcttcttc

SEQ ID NO: 182071 - DNA, 190 bp, Arabidopsis thaliana columbia
  unsure (1)..(190): unsure at all n locations
gctnnncanccaaaggnccaanagagcccngaagcccaaaacacgcncncncngggcgcncgggcncgcnggcgcaaggaacccgccggagaccggcncgannccnccgncaccaccgcaacaaaccggcgaaagncaanccggcngcagnaccgcacaacgcagagcngcaanngcncccncgcagaag

SEQ ID NO: 182072 - DNA, 162 bp, Arabidopsis thaliana columbia
  unsure (1)..(162): unsure at all n locations
cgaccaaaaagaagttagccaaatgttttctgttccatcctgttcatagtgtttggggcatggctcatgttttggttcatcttgtccctcatccacttnctctaccacaaagctaagatggatggctgggtaagcttcgcctgtcttggcagcggtaacggt

SEQ ID NO: 182073 - DNA, 459 bp, Arabidopsis thaliana columbia
tgaagtatgttgacgaggcttaaacttcatttttgagaagattagtatcaaatgtaggtctaggcttttatcaaaatgcagctggtgcatcatcctctgcgcagctgaacatgtctgtgacccgtgataattaccaatttagtgatagaggaaaggaagtgttgtggaggcagccttcaggaagtgaggttggtgatcgtgctgcttcatatgaatcacgagggcctagtactcgtaaacggagcctggatgatggtggaagcactgttgataggccttatctacgaatacaacgtgcagatagtgttgaaggcactgttgtcgaccgtgacggtgacgaggttaatgatgattcagcaaggccttcaaagcgtacccgatgttctgatgcgcatgaagcttatcctttcttgtatgggcgagatttatcagtaggggggccaagtcactcactggatg

SEQ ID NO: 182074 - DNA, 326 bp, Arabidopsis thaliana columbia
aaataaaaaaaaaaaaaaaaaaaaaaaaaaaaaaaaaaaataaaaaaaataaaaaaaaaaaaaaaaaaaaaaaaattataataaaaaaaaaaaaataaaaaaaaaaaaataaaaaaaaaaagataaaaaataaataaaaaaaaaaaaaaaataaaaaaaaataaaataaaaaaaaaaaataaataataaaataaatttaaataaaaaaaaaataaaaaatttaaaaataaaaataaaaaaataaataaaaaaaaaaaaaaataaaaaataataaaattaaataaaaaaaaaaataaaaaaaaaaatataaaaaaaaaaataaaaaa

SEQ ID NO: 182075 - DNA, 376 bp, Arabidopsis thaliana columbia
  unsure (1)..(376): unsure at all n locations
gacagagaagttcaaggagatggacacatcttactcaggctcagctactttcaactacgaaggcttcatgctcaccgtcctccccttcctcatcgcataagttttttttacggtaacccgtttgcacatcttctgtttttttgtatgttctttgttgtgtgaatgctattgtcaatggaagcttttccggtttagttgaactcaagagtttataaaaaaaatgtgaaatgtatagtgagagatcttgtgttataaaataatcaaacaactcattatggttggatnttnaaaaaaaaaaaaaaaaaaataaaaaatatattaaataaaaatttaaaatataaatttaatatatatatttatttttttatatatttta

SEQ ID NO: 182076 - DNA, 160 bp, Arabidopsis thaliana columbia
cagagccagacccagggagagagtttctttaagaagagaaagggcccccacacgacccctgcttgtgatacgagataatggaacctcctttaagatcatacacctatgtgaaaaagatgacccaacttcttttattcaaagagaataattaaccaacact

SEQ ID NO: 182077 - DNA, 353 bp, Arabidopsis thaliana columbia
  unsure (1)..(353): unsure at all n locations
ggccggcccacgcgtccgctcagatctgaccagttagtaagaaacttcttgttaagaagaagaagactgaccnaggggggcctttttcaaaccaccggcggccactaatggacctccaccagttggttccataccacctcctccagctccggcgactgtaaccagcaacggaacaacaaacggaatggctaatcagaaacctcaagtctacattccagctaaccgtccggtttaccgtccacagccttacagtcgccgtcatcaccaccaatctcgaccaagctgccgacgaatttgctgttgttgctgtttctggtcgattctgataattctgatcttaactctcattactg

SEQ ID NO: 182078 - DNA, 274 bp, Arabidopsis thaliana columbia
  unsure (1)..(274): unsure at all n locations
gggaaccatgggttttctcaaaggcacataactctcaccaaagctgggtgtgatgtgactgaattttttcgaactaagaacgaatgccatcccctcgntggattaggagcaaagtacaagtcttctcctgaagaattgactgcaacttgagatctcacatttgcattttttgctgatcctgatagtgcaactcatgttgcttgatgaaattttaatatcctttattttttattattttactttttgatttctctatttctttatttatttatct

SEQ ID NO: 182079 - DNA, 374 bp, Arabidopsis thaliana columbia
ctcaaatccaaaaagaagaaggcttaatttcattcaactcttgccgaaagacaaagttctgtgcttgtttcttaagttgtccctacattgttttggtctttcagaggtttagtccggaaactttaaatgggtgtcgttgaaccgtacgagactatatcttattgactctaaatacatacacatgttaagctcaaataaattctcgagagaatatatactaatgatgatggattttaggctccctgacacagatagaattctatcttacatcttttgattctatttattacaatcaccagtactgggttcggcttgtctttgtcttcttgtgtacatcgcgttctccgtgtttggggtatcttatattggtttgg

SEQ ID NO: 182080 - DNA, 422 bp, Arabidopsis thaliana columbia
  unsure (1)..(422): unsure at all n locations
gaggcgtccgcaactaacaaaaatacttactttcagaaacgattttctacacacgaggaagaagatcgaagaagaagaagcttcgctagagaggaaagaatcnanagaacgatggaagcaaacgcggcgcagagagtgaggaagatgaagaaacaagcacaaaggaccaacgattcattcattgaagaagatgatacagagattgattcctctaaatcgaaaagcttcgaactttactcagattcttgagaaaggtacttctttattacactattctagtatcaccgaagcgaagctttcttataaagagagattaaggaatgggattgttgatattaaggttaatgatgctattgatctcttcgaatccaattttttatattttaaatatttaatttatatttattattttaattttatat

SEQ ID NO: 182081 - DNA, 406 bp, Arabidopsis thaliana columbia
aaaaaaaaaaaaaaaataataaaaaaaatttatataaaaaaaaaaaaaaaaaaaaaaaaaagaggaaaaatttaaaaaaaaaaggaggaaaaaaaaaaaaaaaaaaaaaaaaaaaaaaaaaaaaaaaaaaaaaaaggggcgccccttttaaaggtcccaagcttacttcccctttcttgcaaccttttagcttttttatagggccccctaaattaatttcactgcccgttttttaacaccttgtgacctgaaaaaccccttgctttcccaaatttaatcgctttgcaaaaaatccccttttccccagttggcttattaccaaaaaggccccccccaatcgcccttccaaaaatttgcccacccttaatggcaattggaaccccccctttatcggccctttaatccc

SEQ ID NO: 182082 - DNA, 268 bp, Arabidopsis thaliana columbia
cccctccctctctttttttttttttttctccctttacaacaaaaattttccttttttttttttcttcttttttttcactcttttttcttttttttttcttttttttctttttttttttttttttttttttttttttctttcttttttcttttttttttttttttttttctttttttttttcttcttttcttccttcctctttctctcttttcttttatttcttcttttctttttctcctttttttctttttccctttttttttctttt

SEQ ID NO: 182083 - DNA, 402 bp, Arabidopsis thaliana columbia
  unsure (1)..(402): unsure at all n locations
gttatcatgcccatgatgagtttgttattgatancggnactcggccatccaccggaaaggagagatctttcgacggaacggagacatgtatggaatacccaaaccgggaaactaatatctttgttctccgagtcaccttcggatcaagatcaagcttcatcagatccgtcctcaaagaataattccaatccgtgtaatagacatgcgtcacatggattatcaagtgggatattcgatgagaacttgtatacatgtatgcattatttagaatacatggatcagctcattgttggaaccggatttggtgccctcaggtttatcgatctagcacgaggccagaagcttgaactttgtggaggagaagcttttgaatctggattcacttctttcgtatcttgctct

SEQ ID NO: 182084 - DNA, 390 bp, Arabidopsis thaliana columbia
  unsure (1)..(390): unsure at all n locations
caacgatgatgattttgatgattttgatcctttgggaacttccagtaataagccatccacaggcagtgcctaccaagtggacgtttttggaggagatctgattggtgacttcttggattctgggccaacagaaacatcttccaccaacaacaacgagaactttcaagaggcggacttgtttgctgatgcagcttttgtatcagcctcggctcaaggagctgaatttgggtcacagacacagaaacaagttgatcttttctctgcgtctgaaccttctgtcacagnttcttcagctcctccgacggttgatctctttgcatcttctgaatcagttgtaagcccagaagccaagatatcaatacctgagtctatggctactcccaacattgt

SEQ ID NO: 182085 - DNA, 462 bp, Arabidopsis thaliana columbia
  unsure (1)..(462): unsure at all n locations
ggggcgccccacgcgtccgtttcgtcacatccccactagagaaagaaagagttttttgtctctctctctctctcgtttgcgctggcatattgagttggactctncgccagccaccgcctcctttctatctctctccatcaatggcgacaccatacctctcccttcaacctcttaagtaaaaaaaaaaaaaactttttgctttctctttctcctctcccatacacttcatttctcaaaaccctagattcaccaaaataaacccttctcttcttcttcttgtctttatgttcttgtttctttcatgtccacatggattcttgtaacagtggaagcttacaatcttcgagcgatgatcacgagtcttcatcaactggtgctccacaagatcactcctntttcttcctcccacccttccaaccaccaccgtcttcctccacctactacggtgacccaacaaccctt

SEQ ID NO: 182086 - DNA, 252 bp, Arabidopsis thaliana columbia
agcttagagatctggctgaagctctggtctctactgataaatttagaaaaaaaaggtccatgtgtgataatgataaagctaacgacctccggtgttataacacatttgggtttcaagagacaagtctctgattcatcatccgggggtcggatgtgattctcacgccttaatgggtatttcgatccatcaaaattatgttttgtgtagtattagaagtccgatgacttacactggtttctgttggttatttgt

SEQ ID NO: 182087 - DNA, 123 bp, Arabidopsis thaliana columbia
  unsure (1)..(123): unsure at all n locations
cataaacccnattccaactctaaacataaacccaaacgtcaaatcatcacatataatgaaatattctgactgacagatgcctcatgtaaagattcacctcaaaaagatttagaaccctcttca

SEQ ID NO: 182088 - DNA, 334 bp, Arabidopsis thaliana columbia
  unsure (1)..(334): unsure at all n locations
aaaanngggcgganccacgcgaacgcacaagcaaagaaangaatttcgttttagtttttgnagaacacaaacagaacaaggaaaaagtcaattttaaagtgtgtcagggcgcacctaaancacctagactaatagctttctttactaccttcgcttatactgtctccttcgaattttctgttctccttcttaattttaccttttccacttatactactatttttggttttccttcattcactttattctttcttaccttttgtcatttttgtttttttcattcttatttacattcactctctttaatttttttttttatatcttattttgctaa

SEQ ID NO: 182089 - DNA, 264 bp, Arabidopsis thaliana columbia
agcaaagaagaaaaatggctgcatcttttgctacaccatcgacggagataggccgcggagagtcattctttaccaggagaacggttctcttcatcctttttaaaaccaacattaagcgccaagaaccctttgagactcgccggtgcattgggaggatgagttactttgatttgtttggttacttattttaattaatattttttcactttatttaattctatatttcgtatatcatttttatattccttttcatttttttctttt

SEQ ID NO: 182090 - DNA, 132 bp, Arabidopsis thaliana columbia
  unsure (1)..(132): unsure at all n locations
gactgagatccatggacgtggttttcggtttttaaaacagacgncgnnagaagcgggagttccaattttaacgagtctgggacctcacatcgccttcgtcccctctgtactgtgttctactcgatctgtatt

SEQ ID NO: 182091 - DNA, 449 bp, Arabidopsis thaliana columbia
gacacagcagccaaggtgaaacaagagattctgcatggtttaggtgaattatatgtgcaatcatcgaagatgtttgatgataaaatgtacatgcaattgttgggaattgttgatttggctataaaacaggccatcataaatagcgaaaatttcgaaactgaatatggacatgtaccccctgtactacgtcatgttttggaaatcttgccctctttggggcctcctgaacacctttcgtcaatgtggctaatcttgcttagagagttcttgcattatcttccacgggttgattctgttctgccaaatgacgaaggcagtgaagtattggaacagaaagctgatgcttcgtctgaaacaattccaaccacaagaattacgacttatatgtttgcagaaaagctgatccctgccttgatagagcttcttcttcaggctcctgcagttgaaaa

SEQ ID NO: 182092 - DNA, 314 bp, Arabidopsis thaliana columbia
  unsure (1)..(314): unsure at all n locations
gagattctgatcgacgaaatctaatctctttttttttttttcacancnccntactanagaagcgtggtggcaattattaaggaggaatcactgccccaacggcggccgtaggagtagattccaggcgtcctgagacagctatggaagaaacctgtaacgtgaaaagagtttcttttaaacaaggggaaagacttaagcagtactatctccagcacatccatgagctccagctccaagcttctcagaagactaataacctcaatctcctttaagcttaaagaatataactcaattctcgagtgagaatgctcata

SEQ ID NO: 182093 - DNA, 99 bp, Arabidopsis thaliana columbia
  unsure (1)..(99): unsure at all n locations
ccaccaacaaaaccnncttctgtgatctaatcattaaacaagtatacagcattgattattacactgagctaatcaacttttctttttccaaactgcaaa

SEQ ID NO: 182094 - DNA, 463 bp, Arabidopsis thaliana columbia
cggacgcgtgggctagttcttccccctctctctgtctctctgtccgtcctcaagaaccctaatagtttccaagtttcttcgtattcaacgatctgactttccttaaaaatcttccgatatggtttagaatctctcatcttaatggaagctgacgtgtcaatcgtctgaaaaaaataaatcccttatcgcgttcaaattttccccagcaaaaagattaaatctttttttccaccgtttgtttcaatctgtgaaggaagaaggttagggacgatgaagatgatgatgaatcgtgctcttgtcctcctcctcctgctactcttccatctcctcaccctctcttctttagcctcagccaaagtgattctcatcaggaacaacatcactcgctccttcgacgacatcgaagccaacttcgctccgtctgttaaagctgctggtgaaattggattgctttacgtggctg

SEQ ID NO: 182095 - DNA, 392 bp, Arabidopsis thaliana columbia
cggccggaacccgggtgacccacgctcgccacctcgccacctcggacacacacacaatgcaaggtacagactgttcgggcgcactgtgctttgctctctaccaacgcctcattccgaccgggcgattcgcgaaagacactccgccaagtggcattcgcacccaaaagccaagggtttagcagacacacctaagctgccacaggatccgcgcaactgcgacacttacgaaaccagggggtctagaggggccgcgtaccggcatgtgcacggcttacagagacagggcgttgcctcttgaacagcgcaatcagtgggccaggacgacggccatcagtcaccgattaccaacgtagaactgcaacgtgcacatgacaatgaacagccttatgcat

SEQ ID NO: 182096 - DNA, 464 bp, Arabidopsis thaliana columbia
ctgaaactctttggtgacaatttaaagctgttggaagacaatctcccacttgacagtgtatacaaatcaaaagatgtgtctgctgctcctattcgggtcatccagttaatctacaattccggagatgtgaaaggtcctcagactgttgcttacaacttgccaaacgatgagaaaatcgtcgaagatagaggaacatcaatggttatgctcaaaaacgttcaagaagcaaagtttgaacatattctaaaacctattgctgaagtcatcatcagcaaggaacagcgaggatttgttgattttgattccttctttactcacaccatttgccatgagtgttgccatggcattggtccgcataccataacgcttcctgatggtcaaacctctacagtgagaaaggaactgcaagaacttcattctgcaatggaagaagcaaaggcagatatagtgggtctttgggcatt

SEQ ID NO: 182097 - DNA, 499 bp, Arabidopsis thaliana columbia
ccggccggaagcgggccgacgcagcgttcgtaactcacacaacacagacaatgttttacaaacgaaatggatctcctcgtcgtttcttcttactgactgctgtcgaagagacattttatggaacaggtaatgtgcaagttactcagaaagatgttctatctggcaacaatgaaaaaattacgaagctgtataaaacggtattcttcttagacattactgcactttgctacgaacgaaacaaacccaggttggaagcttttggtcactggatatcactcttcttctctgaagtcagcctcactgatcctgtcatagctgctatagatggagcagaaggtaacgaacgacgcatagaagtggtgccttcatataaagctcataggacatcaccaaatcatgggagatactctgagaggccacatgagtttgctgatgaagttcttaaaaaatgcaatgtgccagttggtcgaatatgaaggcatgaagcacacgatgtact

SEQ ID NO: 182098 - DNA, 85 bp, Arabidopsis thaliana columbia
catatactcatataaattatcaattataattttaatgagatcatatatttacataagaggggtaaaaaaaaaaaggggggggggg

SEQ ID NO: 182099 - DNA, 503 bp, Arabidopsis thaliana columbia
gaatacccgggatgagaaatagttatactgaatttgacggaacatatgtaacacaatttacccacaaatgagtaactagatcaatctaatttttttatacaaagtcaaatattaaataaaaaataataaattttcatttgtagtaatatttttatacatataaactatagatgactcaaaaaattattaaataaatacgaaattctcaaataatattataaatatagtaactaattattacaattaagtatcattgttatgtttatttatggaactttaatcgatcaacactttagtttagtttcactctttgattctcaaaataacatatattgaattatacataatcttattaatatatatatatatatatacaaatctaagacaaaaatcaaactacatgaaaataacaaaagtaatcaaaattttaatatgtaatataaaaatatcttagttgaatcgaaaaaagtaatgttatctaatatattcaaataataatcaaa

SEQ ID NO: 182100 - DNA, 312 bp, Arabidopsis thaliana columbia
gaaaaaccggaggaccgattaccagttttattcttaacaacacataaccggaaacagggtgcggttttaacaacctctggtgggtggaacaacgtctgttaggcaagtatacaaaaatgatccgtgactacaccaaaatgatccactataaaggctacactacaacgtctcagatgcgaatatctgcactgtgaggacccatgattaacactgataacctcaccacagctgaccggtttaagtccaacctgggacgggctgccaacggttatttctacaccttacccatgtcgtagaacatccaactcagaa

SEQ ID NO: 182101 - DNA, 368 bp, Arabidopsis thaliana columbia
agatattattcacagagaggctcatggctgaggtaaacggagatttccccgttcctagtttcgccgacgggaccggatctgtttccgccggacttgacttgctcgttgagagatcgattcacgaagctaggttcacagaggcagatgcttcaactcaacttactattatctttggtgggaggtgtagagtcttcaatggtgtccctgcacaaaagggtcaagaaatgattcgcatcgcttttgctggtaaacagacgcagaatgtgacacgggtcaatccaacacttgacagaggtctttgtttctcaactggagctgatcttccaattgctaggagacggtcgcttcaaagatttctcgagaagaga

SEQ ID NO: 182102 - DNA, 394 bp, Arabidopsis thaliana columbia
  unsure (1)..(394): unsure at all n locations
attaactaaagagctcttttacttggcgccacatctctcatctcgcaatggggccgcctcgacccaatggctctgctgcctcttcctgggctttgacggcggaaagggccnnngttaagctattcctccggccggcccttccgannagtattnntggaacnncgcgccgaatcaaaccatgcgcccaaagctnctccannagccctnaccggtctcattccgnngtcagctcaaatggtaccgcgatcccgnatccgagtcaaagtacccttgggtccccaattctccggtgaagggcctccgaagctactctcaactggagaagttctcccggtggattacccgggtgggacaactgctncggtctatcttcgccgatccccgagaaccttcg

SEQ ID NO: 182103 - DNA, 135 bp, Arabidopsis thaliana columbia
  unsure (1)..(135): unsure at all n locations
gaataaaagaaaatgtttgacggtggagtttctgttcagatccaccgtttcatagcttctgcaccgtcaccgnctgcgcttgcgccgcatcaaccggcggcggaaagatcactaccttttcctgactcaatctct

SEQ ID NO: 182104 - DNA, 130 bp, Arabidopsis thaliana columbia
cttatttctgagcaaagttttttcttcctttcatattgtgaggatgtccaaaaccaatatgaaatttttcaatagttgttggctggtcgatccgaccaaagcaaggtttcttgatcctctttgttttgtt

SEQ ID NO: 182105 - DNA, 118 bp, Arabidopsis thaliana columbia
tgttaattaactccggcgatggttcactccgccttcttggtaacacagccggagaaaaatcgaaagtttcgtttttttcttctccttcgtagctaattcgccgtcgattttataattc

SEQ ID NO: 182106 - DNA, 302 bp, Arabidopsis thaliana columbia
aaataacacaacttaagaaaagagtttaattctcatcgcggcaatcactatcgcgggcggggttaatatatacaggggcttgtaaagacttacttttagatcacttactgaatcttaactcttcatcaaccctattcacctgagctataaacccaaatccatttcctctaatgatgtggtggctaaatattgatacaaaaatctttactttcgtcttaaaacttttgcgtaccacaaccggtttatcggacctatacggctcttaggctccttggtctttacaaactcttcatcacaagttt

SEQ ID NO: 182107 - DNA, 271 bp, Arabidopsis thaliana columbia
ccgaccgaaaccggccgacccacgcgtacgaaaaaaacaaaaacaattacaagcttatatatacgcgaacataacaaacacaggtggggctaattaaagaggcgggggggataccaacgagcagaggatctaaaaaatccgaatattcaaacgggtcaacacacctacatgaaaaagaaaatgacagttgagcttactatggaattcacaacctatgattactggtccaattggagagcttcactatatgctatatggaccatgaaatgaa

SEQ ID NO: 182108 - DNA, 304 bp, Arabidopsis thaliana columbia
  unsure (1)..(304): unsure at all n locations
gggccgacccgacccacgcgtcccgaataacaggcatttaactctcaactttttttttacgggnggacagacgatagcgggccggggacgaataacaagtgcagagaggggcatgaccgatagccactatgttgaccatgattatctgcgacgttctaacgcttaacgtataaagattttaacggcggagctcccaactctgtgggtacaccttttttgaatcaacatgccatgtggtaaatcaattggcgttgagacgaaacaacggaaactgagtcttaccctgaacgaccaggagagcctg

SEQ ID NO: 182109 - DNA, 63 bp, Arabidopsis thaliana columbia
ccacgcgtccgctttcatatacaccatataaaacgtaaccattttaattatgggtttaaattt

SEQ ID NO: 182110 - DNA, 282 bp, Arabidopsis thaliana columbia
cctccacttttttttttaacaaaagcaagcatacacacacgagggggtatcatcaaaacaaggcaggcgcacaacaaaataaatgccaactacaagaaaaccgaaacctccccattttaaataccaactgaaatctaagctataccttcaaatatctcagaccccctcaactcctgtactaatcataaaacacacaaagatactctaaagaaacttttacgatctaccaagaataactacaccgttttcgctaaccataataattttatctattgaaaactt

SEQ ID NO: 182111 - DNA, 381 bp, Arabidopsis thaliana columbia
accctaattgctctctgccttctcacagacctctcgttttccttcctcgtcttccttctcgctccctccgttgccgcgccggcgctgatattccccttggtgacggaatccgattacctcgagaagcggattcaacctctgacacggcgaggtctcgggatgtttccgtcgccgccggtgggaatggtgaaggtgctaagtggaggaagaggaggttgctctggtcgaaaagtggagagagttacttggtagatgatggcgacgcgcttcctcttcctatgacttatcctgatacatcccctgtgtcgccggatgtgattgaccggaggttgcaatgtgatcctgtagtcgaggattgctcggaagtggtttttgaatgga

SEQ ID NO: 182112 - DNA, 330 bp, Arabidopsis thaliana columbia
  unsure (1)..(330): unsure at all n locations
ggccgagccacgcgnccgcggacgcgtgggcggacgcttggtctattgttctatcttagngaggatatctacagaatgagaggtgttctctccgtacaatgcatggactagagattcgtgtttcagggagttcatgaaatatttgaaggatcacctgaccggttatggagaaaagatgaaacaagaaccaacaagattgttttcatcggcaagaatttgaaccgtgaggagttagagatgggtttcagagctttcttgatttgattatatgaccaaatatttaaaattatttccattttgtaattaactgttcattatattttttaacat

SEQ ID NO: 182113 - DNA, 305 bp, Arabidopsis thaliana columbia
  unsure (1)..(305): unsure at all n locations
gttcgattcatatctgcgcttagcttttttttctgtcaatctccgncgtgtttaacaggctggtcttctttgacaaaatggctcgcttcccataataagcagttctctctcgaccattttcctcagatctcacgtccgatcaaagtcatctcgagaagcgccatggagactacggcggatacaattaccggctgtgttcccaacaacactatgatattattgttcgttgagatggttgtttgttactatcagcacttggcatgtattttacatcttcttcgattaattcttgttagaatgcaatt

SEQ ID NO: 182114 - DNA, 444 bp, Arabidopsis thaliana columbia
  unsure (1)..(444): unsure at all n locations
ctccgttgctagaataacctcaaaattctatttccctacagaaaacgcagatatagagagcgttttattaaacagtagagttcgaccaaacaaattcctanatagacaaccaattttaacattatcttaattatacaattacttcatataactattaccatttctttttttttaacctttttatcattacaatattatctttctttataactttcttctctttatttatcttttcttttcattttttctacatctcttttttaacttttattacattctaatattcatctaactatatttcttttgtattatttcctttttattcttttacttatatttttttcaattttttttttttatttttatttttattctctcattattttacttttttatcacaactcatttcattctactttactaatctttctccttctttatttt

SEQ ID NO: 182115 - DNA, 466 bp, Arabidopsis thaliana columbia
cgagtctcgacgaatacgactctcttcctccgatctcatcaaaaactctttcgctaaagctctgtttctgggcgttcaaacaattccggagtttgtcggattctcaacttccgtatacggagaaggtcgagcaacaagtagtcaaatttgtataaattcaatgactgaagaaaacgattatggaggtaatcagaagatacttcatcaaggaagtggaactatacctgctctagcggatgaagaactgatgggagacgatgatgagtatgatgatttgtatagcgatgttaatgttggtgagagtttcttccaagctcataatcagcctcaaccaccagctcaggtcaatacgagtaatgcaagtcttcaagctcagaatagtcatgttgctgctgaaccgaggatgggaattgtatctggaggtacagttgaagggaagtatcgaaatgatggggggcataatgga

SEQ ID NO: 182116 - DNA, 437 bp, Arabidopsis thaliana columbia
gtgaaagtggctcctgggacggtggttagacattctagagaggttgggagtgaggtggagggtgaggaagttctttcaaacgattccctattattacggattctcaacttccgtatactgagaatgtctagcaacatgtattcaaatttgtataaattcaattactgaagaaatcgattattgaggtcatcagaatattcttcatctatgtagtggtactttaccttctctagctgatgaagttacttttctagtcatctatttattttatcatctgtatatccttttttatttttcctttattttcttttatgctcataatcattctaatctcctaattcattttaatttctataattctttttatatttttctttattttatttttttatatttccttttctctatttttttctcttttactttttatttatttt

SEQ ID NO: 182117 - DNA, 386 bp, Arabidopsis thaliana columbia
aaaaaaaaaaaaaaaaaaaaaaaaaaaaaaattttttttaaaaaaaaaaaaataaaaaaaaaggaggtatataaataaaaagaggggtagaaaaaaaaaaaattcaaaaaaattaaatatacaataataaaaaaaaaatatatataaactaaattaggggtttccttttataaacttcaattttttcatccccttgttggctccctattttgtttttttttggtccccttaaatttattaaatttgctcttttttaacaactttgtgttttgaaaatccttgttttacccaaattaaactcttttgatcataattcctttttggcctatttttttatttaaaaaaggtccccccttttttccttttatcaaatttttgcaccttta

SEQ ID NO: 182118 - DNA, 181 bp, Arabidopsis thaliana columbia
  unsure (1)..(181): unsure at all n locations
atctcaaaaagatcaatttatttagaccattatatttaccgaaagagcttctaccgcggcgtttatttaaacacggctgaccaaacccaanccncttcttttcttaaaccattaccccttaaaccatccaatgcttttttttcacactcccaaactcctctaattttctacgtatcataat

SEQ ID NO: 182119 - DNA, 390 bp, Arabidopsis thaliana columbia
  unsure (1)..(390): unsure at all n locations
cacgcgtcagctgnattactacccatctcttctatcaccctttacattccaagacgctgtaaatacctgtggcgcgattctatattaaacaggacggcattacactcctnctgccaacaccaaacatgataaaattttacctatcaataaacttcgacactagacgcttgccactcatttttattaacacagccagtatacaacccgcttatgtaccgactatactcatcttagacattttccatccgcctcatgactttagaaactaacatcctttgatctttataccaccatttactcgcaccttactatggttataggcgatgatatgatcaagatccctgcttcatatcataacttgagggattacattcttatataagtttcttt

SEQ ID NO: 182120 - DNA, 430 bp, Arabidopsis thaliana columbia
gggccggaatccggggcggcccccgcttccgatcactttttaccaaatttaatcgccgccttccttggaactcaaatccgttcaaattttcggccattcagttccaatccagggttaaaattcaacaccctattttccagaccaaacctccaaaccatttggggcaattccctataaccatggggcgtgttttttaaaccccccccttgacccaaaccggaaccacattccggaacccaaaccactggccaaccttaaccttttaaatatttttggtaataatgggccaatccatagcgaaactcctggaaaccttttactacgccaaaaccaaccgaggcgattccaccgaaacccgccaaaccgttggcgttgggactcaatcttttttccaaactgttggtttccctttcctttttttcccgttcct

SEQ ID NO: 182121 - DNA, 468 bp, Arabidopsis thaliana columbia
ccggaggtccgggcccggatttccgggttggcccacacccttccggaggaggacggagaaggggtccctgcctttcttggcggaattaaaccggttggcgccgggggttgtgtttttgaccaccctggccttgccggccgtggggctgcaggtttggttggccggcccggccaaagtgttgtcggaggaagggaaggccaagccagggcaggtttcctttctgtccaggttagatggggtgggaaggaccagcctgttaacagtaactggttcaaggaccaggctttacgcccatttggtaaccgcccttgcgcccggttggaaccgggcccacgttccattaaccaaccttggggactccttaaggactgtttttttttttggaaatttaatggttggcttgccgaatggtttttatttggtggggaccgggattgggttccataaacgggagtttgtttggggacc

SEQ ID NO: 182122 - DNA, 282 bp, Arabidopsis thaliana columbia
  unsure (1)..(282): unsure at all n locations
cgggccgggaatnccgggtcggaccacaggcgtccgttcgggggaccggttttgcttgattgggccgccggttttcctaagaggggcggggggtttttaaaattaatttaaaccattcttttacaaaacctttccaggtacccggggcttagttgggaaattccaacaaggccacccttggccggggggcgaggggcgcactcagccatggcgggctttactttttgggcggccgggggactttaatcctttgcattcagatccagatttggcaaaacttgc

SEQ ID NO: 182123 - DNA, 128 bp, Arabidopsis thaliana columbia
gggtcgggatttccggggcggccccaccgtccggaggctgcaggggggccttttccaggggggtcgtagcagtttaatcccgccgtttattccgcgattcaccaaaccccattgttttatcgccgcct

SEQ ID NO: 182124 - DNA, 80 bp, Arabidopsis thaliana columbia
gatttcgggtccgacaaggcgtccaaaacccaaaccttatttcaaaaaaaggtgtttttgttttaaaaaccttccttttc

SEQ ID NO: 182125 - DNA, 275 bp, Arabidopsis thaliana columbia
tccgccccagccttccttaaaattttaaaaaggaaaaaaaaaaaaagttttctttatggaacccaaaacccctttagggcctgggttttaaaaaaaaaaagccggtttttccattttttcaaaccttcccccttttttaactctttttaatctttaaaatttgcccttctccttggtcctttccaatccctcagtaccaaaactctaatccttttatatttctctgtaccaatgttttgtctttcctaattcttaaaaatttgtattaacctttc

SEQ ID NO: 182126 - DNA, 228 bp, Arabidopsis thaliana columbia
ctaaaaaaaaaaaatgtcttcaaaaacccttttctttctctctaacccaatcaacctccacccgaggcgattcttaatttaataatgcagcccattaccccctttccatctcccaacctattcaaataactcctcaaacaaacctacctataactaatcccaaaccttctctttccttctctatatcaattatcccactcttattcccacctctcactaatatccaat

SEQ ID NO: 182127 - DNA, 340 bp, Arabidopsis thaliana columbia
gtcctaaataaataaaagaggttccttctaataaaatttattttttctaatcctcccttgcaaactgggggacccttattgccatgggggggcctcctcttcaattcatccattcccagggctaagttaaccccaattttttttgccattccatttccaaccttttttaccatcttccggattcccatataaaccaagttaaaatcggaccctcttttcgctgcaggcatcctttgtttcaactcccacacctgttccgctaatggttgtaatccatggaccctgttggccaccacaccatcttttcaaccataaaaagatccgtctccaaccccaacct

SEQ ID NO: 182128 - DNA, 203 bp, Arabidopsis thaliana columbia
  unsure (1)..(203): unsure at all n locations
acggnncggaaattcccggtccgcccacacccttccttcctatttttaaaccaaattaaaccttgattttttgaactaaaaaaatgccttcttgggggggttcgaaaatccttgggccgccccttaacttcaggccatttccaaaatcgtctgttccgttgccttaaaccccatccacttccaaaactgttgttttttttttt

SEQ ID NO: 182129 - DNA, 430 bp, Arabidopsis thaliana columbia
aacgggcccggaattccgggttggaccacacccttccgttgggatgccaccaaacaggagagggggggggtaaagctaattaatttcctttaaaatgcttcggtattgggttcaaaagacaactaaataactaatttttttggaaaaaaaaaaaaaaaaaaaaaaaaaaaaaaaaaaaaaaaaaaaaaaaaaaaaaaaaaaaaaaaaaaaaaaaaaaaaaaaaaaaaaaaaaaaaaaaaaaaaaaaaaaaaaaaaaaaaaaaaggggggggcctttttaaggtaccaaagttaactaccggttctttgcaagttaaaattttttttttggggccacaaaattaaaattaaggggcggggttttaaaaacgtgggactgggaaaaaccttgggttacccaatttaattggcttggaaaaaattcccctttt

SEQ ID NO: 182130 - DNA, 178 bp, Arabidopsis thaliana columbia
tccaataattaaccaaataaaagcttttttcgctttttcaaccgaaccattttaccatctcaaggagtggcgatctaacatcagagggggttaaccaaaaccaattttcctcccgttataagcgccataatattgctcccttaccaaaccaggaaatgcttaaaagacatgaaaagtt

SEQ ID NO: 182131 - DNA, 360 bp, Arabidopsis thaliana columbia
  unsure (1)..(360): unsure at all n locations
aaatncccggtccggccacacccttcctttaaacccccaaattcctacctttttatctctttccggtcccataccttaccttttggcgcggctttttattttccaaggaaggaaaacntttaaatttccttatttgggttttcctttccaaaaaatttaccatttttacctccaaaacccctaaaaaccaatttctaacctttggttccatttttttttccaataaccaaaaatttcaacttctttttaaggtcctttaaaaaaaattttctaaaccccaacctaaacctttccattcctaatttaaacctcccattcatccatttctttttccatccggtttttaaacccctatttatt

SEQ ID NO: 182132 - DNA, 439 bp, Arabidopsis thaliana columbia
aaattcccgtccggccacacccttccaaaattttaaattaaggaaaaaacactttccctttcattctaaaaccaaatcaacccccaaatgtcctttttttttccaaaaagggtccccaaataatcttccccaaattttcaacttttccactttaaaaaaaacaccaaaaatttgcctccttcaaaaaaaataaccccacttaaaaaatggaaaaaaaacctaattcctttaaaccttataaaaaaaaatttaattcctttgttaataaatttccttgtaactaaagaattttttaaacctcctaaaaaattccaaaggaattttgaacccaaaccaaaattaaatcttccaaccattactaatcaaatgccttttaaaaatcctttccaaaacttaatatttaagtatcccattaaaaaagttattaatttaaatccta

SEQ ID NO: 182133 - DNA, 99 bp, Arabidopsis thaliana columbia
  unsure (1)..(99): unsure at all n locations
ccttctttaaaaaaccttcctaacctaancttcccctatctctcttaaccaccaccccccccttaccaccaagaactttttcaaaaaaaaaaagccccc

SEQ ID NO: 182134 - DNA, 267 bp, Arabidopsis thaliana columbia
  unsure (1)..(267): unsure at all n locations
tttttaacccactacctacctcttttcttcttttttaaaaacctccnccctaaacagagatttttttctaaattaaaagaacttttaaatttcatatccaaaattttccctttaaacctcccccttttctacaacccataccccttttttcctttccttttaattttttaccaaatacctaaaaaacctaatcctattttttaaaaacttccattctatcatccaccattacttaactcttattacccttacctcttttaatatacc

SEQ ID NO: 182135 - DNA, 148 bp, Arabidopsis thaliana columbia
  unsure (1)..(148): unsure at all n locations
ggggcgggccaagccgnccaaatcctnttcgaaaaaaaactacctattttctattttatcttaaacaacccctaaaaaaggggtatttttaccaatatacagcccctcctcctttaccatccccaacctacttttctttttcccacca

SEQ ID NO: 182136 - DNA, 310 bp, Arabidopsis thaliana columbia
tcccccccaaaaccaaaatgggccagcgatttttaaaaaaaaaatgtgccccccaccctctccctgttgttcaacccacccaatctcctaaacctttccaccttccacctcctccagttccagttaagcccatctgtgttgttgttgccatttcctaagcctttgttccacccattcctcaggtattgccttttgtacctgaaagtccatttccccccaggccttttaattctttaatggtcccccaacccattcaccataaggctgtggagccttcttcttcatcttcaacccttctttaaacccccat

SEQ ID NO: 182137 - DNA, 363 bp, Arabidopsis thaliana columbia
gcccgcccttttttttttttttttaaaaccaattaaaaaaccatgccaccaaattttaccagcctcaaaaaaaaaactttggggtaaatcctcggaaaaaaaaagccccccaaaccaggttcctgcccaattgacctgcttcaaaccaccaaaaccgggttgccttttaccaaagggtccaattccgttaccatattcttaaccagaaaccttttgcctttggttaaccacttaacccaaaacacaccagggcccaagttaacttccattaagccttatggattcttccaaaccatggtacctatccctttttgctttggttttaggttaccaacccccgtatttttttgattttgaagtacc

SEQ ID NO: 182138 - DNA, 307 bp, Arabidopsis thaliana columbia
gggccggccagccttccaaaaagtctattttccaaaattcaacccgttttcttccaataatctccaacctaaatccgatgcggaattacccagttggggtgctctttcctgaacctccagaccaaatcggttttcctcttgtccctataattgcaagggttttaatccttgttcctacccaaccttttttcctccacattttgatttttcctccacctgctgaacctttaaccgttgttaaaattaatttaaccaatcctgttttccctctctttaaagtgtttgttgctccaactattcccttttt

SEQ ID NO: 182139 - DNA, 311 bp, Arabidopsis thaliana columbia
ccgggcccggatttccgggtccgccccaggcgtccgagtccggtttttttccttttaatccttttaaccagtttggttcctaaaacaccaaatttttccttttttttttggccggaccgaccttaaaggggtaggaaaatggcgggaccaggcgactggctttttagctgcaggctttttaccataaagcaggggggggtcataaggctttgttcaacattgggggaccaaggaaggattggaaggcgttggggagatccggcaggggccggagtttgagggagaagctgccggaaaggaaacttccggtg

SEQ ID NO: 182140 - DNA, 440 bp, Arabidopsis thaliana columbia
tccgcgccacacccgtccgttccccggaaattggggggaggaaaccaaaaggcttattttaatttaaccttggaaaggagggttttggtttttggcctccaggggggcctctaaaaagggagattggcttcgggtggtggaaatggcccgtagatttcgtcgccgccgtggcaaattcaatcgaggtagctttccgccttcgccctccaccggggatccaatattctcaagggttgtttggccgccggggtatttcccccgccgttcccattcctttgggggggttccggtagttaatatatcctcctttgggggtcctttggtttttggtcaatcctggtcctataataattcccttctggccttggccaaaaaggtttatttttattgaaggaccaggtgtggtttggggtttaacccaaaaaaatcacgaaaggttt

SEQ ID NO: 182141 - DNA, 454 bp, Arabidopsis thaliana columbia
ctaatttcccggtccaccccacccttcctaaaaaaaaaaaaaaaaaaaaaaaaaaaattttttaaaaaaaaaaaaaaaaaaaaaaaaaagggagatttttaaaaaaaaaaaagaaggccccaaaaattaaaaaaaaaaaaaattttttattgcccccccttttttaaattcccttttttcttcccttttccttccaaaacttttattctcttttttttcccctaattaaaatttctttccccctttttcccctctttcaactttgaaaaacccttcatttcccccccctttctccctttccaccaattccccttttccctttttttttttttcccatattatcccttcccttttccctttccaactttttttcctccccctatttcttattatccccccttttttccctccttttatcccccttttttttttttttttcccttttttccccttt

SEQ ID NO: 182142 - DNA, 178 bp, Arabidopsis thaliana columbia
  unsure (1)..(178): unsure at all n locations
taaattcccggtccaaccacacccttccaaacaaatttaaaacttttaactttttctttttttactaaacccaaataccctcctaagaaagatttttttcctcccatagctgccccaaaaancccnccaacctttccccccaaaaatataaatcccttaaaaacatcccctttccaat

SEQ ID NO: 182143 - DNA, 309 bp, Arabidopsis thaliana columbia
aaattcccgggccggcccacccttccgaataaatttaaaaagaaaaaagtgttttatttttttattccccacataaccttaaatgtgggggttttttttcctggagtagggaataaaaataaaaggtgtaaccatgaaaaaaattaacccatttttgccattatttccactccaatttggttttccagccttttccataataaccatgttctcgttcaaccatggcatgacccattggttccttgctacataccgtcatttcttacccacggtttccatgcctccctttgctctaatgttcaaaagaaa

SEQ ID NO: 182144 - DNA, 248 bp, Arabidopsis thaliana columbia
  unsure (1)..(248): unsure at all n locations
ccccacccccccccccccnaacgccgctttttaaaattaaagccccccccnccccccccnntnttccccttcctcctcctcctcccctccttccctccccctcccccctctccccccctctttttttttcccctctccttcccccccccccctcttcactcctcccccccccttcccccctctttctcccccccccccctctccctcccccctcctctctccctctcccccctaccccctctcctctc

SEQ ID NO: 182145 - DNA, 410 bp, Arabidopsis thaliana columbia
ttaattcccggggccggccacagccttcctcttaaacctaattccaaataaccattatattttttgtttccaaagaagttaaaacctaagggagagttttccaccgtaattgagatgtttaaaaaaaaaccaaattttttcctaaagaaaatatttatccccaatgtttaattaccattaaaggttttaaaaaaggttttttttaacaaaaattcaattttttattgctttaaccaaaaaaaaaccttcattcacaatttcacaaaaataaataaacttgtttccttttaaaccaaattaacatccattttttaaacccgaaaaataaaaaagctaacttgattcaaacccaagaaactttttattttgtccactttcaattaaatctttacccatgaaccccctaccaa

SEQ ID NO: 182146 - DNA, 174 bp, Arabidopsis thaliana columbia
ttccgtgaatctttttaattcaacatgggttgcaacttttttcctttgtccaaacctcttctttggaaaagccttttttttatcaaaacgctaaaaaccccttttgggaggatcctaaggttgattaataaaaggaaaacctattgtccccctaaaaaaccggttatttctttt

SEQ ID NO: 182147 - DNA, 368 bp, Arabidopsis thaliana columbia
  unsure (1)..(368): unsure at all n locations
aaatncccgggccgaccaacccttcacaaaattttaacctttttactttttcctttattactaaacctaaatgcccccctaaccgagggttttttcttcccttgccgtggccgttaagccctccaacctttcccccccgcattttaaattccttgaaaccgcccttttaccattaagaaaaacttttcccaacccaaaggccccatcagccacccaatgttccgattctacccttttaaagtccttggttccatcctttgccaattaaccaacctaccttaccgaaaatttccccgaaaactactattgtaccacccccgaactttaagttaaccccaaaccattcccaagaacacctaacctaaaat

SEQ ID NO: 182148 - DNA, 411 bp, Arabidopsis thaliana columbia
  unsure (1)..(411): unsure at all n locations
taaanncccgggccggccacacccttccatccatcttttaaatcctccaaatctaaattctttccggtaaccaaaacccctatttgggagcgttttattaattaaaatgggggcctcctcccctctcttttttaactcctcctaattcttctttaaatctcttttttcctaggcctcccttgtcctaattcctttagtttaaccttgattgaaaccaaaaccattcctttaaattccttaaaattttccaaaattcctttgaaaccttaaaaccaccctccccctttaaaatccctgcctaaacctcttcttcttaacccaaatttcccattcaatattctcctttctaaccttaccaccaccaatttatccaacccatatcctccaaaatctccttattctccatcacca

SEQ ID NO: 182149 - DNA, 433 bp, Arabidopsis thaliana columbia
  unsure (1)..(433): unsure at all n locations
ttaaatncccggccggccacccttccacttttgcttaatttccagttattccgtattttttggaaaagaaataatttaaaaaatcggagagcttctttaaaaaaaaggagtgttattccttttcctccgaccttcctggttttattacccaaaaaaaataaaattttaccacttattaattgaccctccttttttccctttttaccacttttttaaggaaccgccttgattcaccttttaaccttttccctgaatttcctcttaaaccttgccaaactttttggttaaccaattaactaataactttcacttccaccttcttttgttttaaatttcaagcttaaccaaaaattcaacccctccaccctttctttttaaaacctaaaaaaagtaaaaacttcctttccctttttaccaaaagaaagtttttttc

SEQ ID NO: 182150 - DNA, 432 bp, Arabidopsis thaliana columbia
aacgggcgggaattccggggcggaccaaggcgtccgaggagggaaggaaggaaggaaggccttgcctttttttttttttaaaaatagaaattggtgtttaaaagccattattgtttgggaggggccaagcttggaccatttccttgggaaccggtggttaattggttcttttggcaaggggattaacaggttggggggggtgggccttagaggacacggcttgaacttgtggcagtcgccggatttaaggttttttgttttaaaggggaactccatcctttctttaaaggccgtttaaaaattccttttcgattttttcgaattcgatgttcaggtaaccagagatggttgcccaatatttttctacgacgactttatttactccggggaacaggggggggggtacgagaagggggtaacgggggtttgttt

SEQ ID NO: 182151 - DNA, 361 bp, Arabidopsis thaliana columbia
  unsure (1)..(361): unsure at all n locations
aaaanngggccgacccaggcttccgagaacccttggccaaaacaccactgtaagtttcttccaccaccacctatcctcaccatccgccagtttcacaagccttggttggacctcaaataaacgntaaattttttttgctttttttttttaaatattgaatgaaaagattcttttttatttccgccgtcgaagaaggaaaaaaaaaacctttttcttcgaaaaaaataacttttgccggaccaccgtctacttcagttgcagttgcagcaccaccattggcaacaagaaggaacacctcttggaaagagagggagaccattcgaaaaaaaaaccgccggaaaaaaccttttccgccaaaaat

SEQ ID NO: 182152 - DNA, 245 bp, Arabidopsis thaliana columbia
ggcgggccaagccttccaaaccaaaaacatgattaatcttccattttgtaactttcgggaaaaaatcacacaattgcgcggatttttttaactgtttggggcaatctaccttcaaaacccaaatataaactacggaaaaatgttattcgttaccaccattttatcatctaaaggttctgttaaaaccaaaaaacaaaatttcgttatgaattctttatatgtcccatcaataatcctttgctctt

SEQ ID NO: 182153 - DNA, 436 bp, Arabidopsis thaliana columbia
gggcggccccacccgtccgaaataattggcgggggcgggggagggtttttttaaaaaaggttagaaaacagttttgtcggattttgcaaaaaatttccaaggatcgatgggaagtgggggcaaatggtaggaagggttaaggccgggacgactccaggaggtgggggaaggctttttgcgtgggtaaggcaaaccaaatggttgagagaaggtttggtaacaagggataccggcctttaagtttccagtcccagttggtccaggggcttccataatttgattggagggccgccattgacggatggatgcttaactccgtagggtcccatgagctgatttcaaccacacgtccgttcatgcggaaggttggggcagaaaatatggaatggggggttcccatcaaaggaaggaccgggaaattaatggtcagaaaatg

SEQ ID NO: 182154 - DNA, 251 bp, Arabidopsis thaliana columbia
  unsure (1)..(251): unsure at all n locations
gaggggaaggggaaggggggggggggggggngngaaggggggggaaaanggggaggagaggggggggaggaagggggggaggaggggggggggggggagaaaagggagaggggggggggcaagaaggggggggaagagggcgaggcgagggncgagaggaggggggggggggggagaggggggggggggggggagagggaggagagggggggaaaaggggggggggggaggggagggaggagggggggggg

SEQ ID NO: 182155 - DNA, 342 bp, Arabidopsis thaliana columbia
ccgggccgaccacacccgtccggaaaaggttaataataccaacaacttccgttgcttagggttccacctaggaaatcctggggagggaggaaaaaaggtttgggttcaaagatccccaaagaaaaggaggccagggttgttttccaagaaaataaggtccaaggaccttaaatggaatccaaaaaaaaggcctcccttgaaaggatggttcgtaacaacacctttatttggtgtggttaattaaaaaccttatttatatttggaaattaaaaaaacctggttttaattatctttttttggggcatttaattttggtagatttgtaactctttcttttttttg

SEQ ID NO: 182156 - DNA, 412 bp, Arabidopsis thaliana columbia
  unsure (1)..(412): unsure at all n locations
ggaaaaaaaaatatntnattacatataattaaaaatcnttttatttttatatcacccanaaatataatgggggggttttttttgtgtggggggaagggatttaaatttggatgaaaagtaaaattaaaatttatggaaaattaaggacggaaaaaaactttaatttgtttggttaatttatatattaattgattaaataatatttatattagaataaaatttaatattttattttttaataccaatgggaacttttacttttactaatcttattaaaggttaaagaaaaataaagtttaaaattttaaaaggtttaatttataaatttttaatttgaagggaaattttaattaaaaatattaattattaatatattttatttatttttttttatttatttaatttttatatt

SEQ ID NO: 182157 - DNA, 463 bp, Arabidopsis thaliana columbia
  unsure (1)..(463): unsure at all n locations
ggaaaancgggcggaccaaccttccgngaccccttggaatcccaattaattttttttaagaaaaaaacctgctttaactttgggggattttttaaaatccagcgtttacccaaattaaatggtccaaaattaataccccccccacctttgttcctaacggtttttttgaaaaggaccaaccttccttgaatttaaccgtcaataaaaaggtcccaataataataaaacctgtccaacccattgccaatcctaacattgtaaaaatgattaccatttttccaagtgaaggaaccactttggtttttcaacgtattctttcctggattaaagcggttgtcaactctgtaaagtccctttacttaaataggtatggaaattgagtttgattctggtaattggtttggtttgatttaaaaaatgctcacttaattatttttaacccaccctttttttatattgtttt

SEQ ID NO: 182158 - DNA, 449 bp, Arabidopsis thaliana columbia
ggggcggaccaacccgtccgcttaaagctttttaatttgttttggttaattttgaaaattttaataccaatattcgggggccctttaccaagatttaggggattttccaagtttttttgttaaaaaaccaaaattaaaaaaaccttcgcccagaaaattaaaaaattggtggaataaactaaaaaattggttggccctttgataactccattgcttaagttaaagggctttcaacccaccaaaatttttgcagttcttgtccaaggcttggcaggtgttcaccctatgaaacccagggaaattggacttttggttgcaaggggggccttaatcgtttaataaacaaatttgttaatggtaacgtcaacaaccttgttgtggttccgggggagattcgaccttcgcccttcagccatttggaaggcaacagctgaccttaggttggaggc

SEQ ID NO: 182159 - DNA, 444 bp, Arabidopsis thaliana columbia
cgggcggacccacccgtccgttacactgataaccaaaatgtctccgtttttttctccaaccacaaacctaaaccgggctggatcctttgggaaaaggcggattgttccatcccttccgggggattcaactcaagacccgccattccgtacttcaagaaccataaaaggccgttccctaaccaaaaggaaccccccaaaaaaaccctttttttccaaaaaatgaaaagggaaaacctggaaaaaaaaaaaaacctcaaccaaaataacctaaatggtaaaaaaggaagtcccaccaaaaaacctgaaccaaacaacccaggagttaataactaacagtttccaaaatccgtccataagccaaccataattaaaaaccaataatcccttgaaccaatgttcttttttggtataaaaaactcttgccttgtccaaaaatcttaaacc

SEQ ID NO: 182160 - DNA, 475 bp, Arabidopsis thaliana columbia
cgggcgggaattccggggcggccccacccgtccgttggtttaggcctttccacttaaggccaggagttggattcgttttgggtcccaagtggggccatcttttctttttttttttttccgccttaccaatccaatatccaggtcgtggtggtggtttggaccttaaaggggggtaataaaaattccctttttaaaaaaaaatataaaaaaaaaaaaaaaaaaaaaaaatagtaaaaaaaaaaaaaaaaaaaaaaaaaaaaaatgggggggccgttttaggggatccaagttaacgtccccggccttgcaaggtattagtttttttttggggcaccttaattcaaattaatgggcgggggttttacaccgtcgggctgggaaaaacccgggggttcccaaattaaatggcttggaggaaaatccccttttgccaggtgggggaaaaaccaaaaaggcccgaccggttcgcctttcc

SEQ ID NO: 182161 - DNA, 180 bp, Arabidopsis thaliana columbia
  unsure (1)..(180): unsure at all n locations
gaaagggggannaagggggnggggggggggggaaaaaagggggggggggganaaaanggnggagggaaggganggnaanaggggggngggaaggaaagngaaaagggggggagggggagggggagagggggaaaagggggggggggagaaaggggggggggagaggaggagggggggggg

SEQ ID NO: 182162 - DNA, 335 bp, Arabidopsis thaliana columbia
gggatttccgggtccgaccacacccgtccggccttcgtggggttaatggaatccggctgcttccaacggcaggattggcgtcccttttgtttggttttttttgcgtccgggtggtgaacggagttcgtcctttttaactttttccgttttttggcaatggcttaattgttcgtttttttgggggcctgtttccctagcgcctccattttttggttggtccattgcgttggatctcagcagccaaactaggggactgattggccaaagccccaaaggccttggggttagagctggaaaagctgctctgggtcaaactaggagaggcagtccaagaa

SEQ ID NO: 182163 - DNA, 227 bp, Arabidopsis thaliana columbia
  unsure (1)..(227): unsure at all n locations
ccctcttcccaacctaattnctcctctaaaaccttccttccttaaaattccggggaaaccttgtttgacgccgggccccactttggggccagcgattccggaccttccaagaccaatcctaattcagccggtaacatccgtaaggggggcaacatcgtcttcaaaaaccgcccctcgagggttgtggaggtttcacacttccaaaatctggaggctcggcctcccca

SEQ ID NO: 182164 - DNA, 129 bp, Arabidopsis thaliana columbia
ggaaaacccgcccgccaaccttcctatctcttctaaatttctaaaccattttttattttcaataaacctactccaattagagggatccttaaaaaaaaacccggccaattccaacttttttatcttatt

SEQ ID NO: 182165 - DNA, 197 bp, Arabidopsis thaliana columbia
cggacccgtgggcaatttttaaaaatctaaaaaactttgtttaaatcttctctaccgggaccaagatgcaattttttgttacgacttttaccggaaggccaatccccctgcgggtggaaggttcgcgccccatctccaacgttaaggccaggttccaggttatggagggctttcctccggtacagcaaaggcttttt

SEQ ID NO: 182166 - DNA, 325 bp, Arabidopsis thaliana columbia
ccttttattaaggaaccaaagaaattgggttttttttgtttccatagagaaggctgggtgcattgaaaaatgcaagcccggtttgggggggggttttttcccttttttttttaattttaccagggggattttttactccttccgactggttccggtttcgggtcccggccaccccattccggtccgttttcaatcgttttcatttgtttgggaaaaatttttcctagagcaatccttttctttatgttggggatccgctcttaattattttaatcgattccaaaaaatttttattgattttaaactaaagggatcttttccattt

SEQ ID NO: 182167 - DNA, 205 bp, Arabidopsis thaliana columbia
gggcggaccaatccttccgatttataatcctttcctttaatggttttttttcatatattccaattatggccacatgggggatccaacaatcgtccttggcgggccaaacggttttaaagccctccagtatcctaatccaaaagggggattttttgggcggtttccgtgtgactatgctttgatccgtatagtctactccccaaag

SEQ ID NO: 182168 - DNA, 278 bp, Arabidopsis thaliana columbia
  unsure (1)..(278): unsure at all n locations
gcggangaggcgacccaaaaggttccaaaggtattcaagtttttatttgaccaagtaaaaacttgttcaagtgtttttaaaccccataggacctaacaattaatttccccgataactacggttggacaaccgttgtttaatccgcctaccaaaaaaccttttccagaaaccttaaactaaaattaatcaaaaaaaaatggacaatgtcctaaacctaagtttgattttttactatctattgattagaaccggtatgtattcttataaaactaatatta

SEQ ID NO: 182169 - DNA, 225 bp, Arabidopsis thaliana columbia
tgaatttccggggcggaccaacccttccgaaaaaaagggtgttgccatcctaggctccttttttttctcttcaaaagaaagcttttgtgccatggttggagaagggggtttattccaaacctgccattgtcgatttcatgaaaggtgaccaaaaccggcctgagttttttgggattcacccttccggtaaaaacccattcctgggctccggtgactccaaaattt

SEQ ID NO: 182170 - DNA, 276 bp, Arabidopsis thaliana columbia
tggaataccggggcggaccacagcgtccgttaggcttttggttcaaggattctttttttttttaaccaaattccccattcttcaaggcggggtttcaaggcccggttgggagggtaaaaaaagcatcttgaattaaattggggaacgcattgggtctttttaaaccaaaaggacttggggccaaaaccctggtttggtcggctaagtccgagttttggaaggtcgttagaactggggggaatattgggaaggatggaaaggaggtgggaaccaaat

SEQ ID NO: 182171 - DNA, 265 bp, Arabidopsis thaliana columbia
ccggaagggggcggctgaccaccttgtggactcggcagagccaagggccttcctctaaacccatattagtcctcgatttacttgggaattccctattggggatggttccaaccgcgatcctagggttaagtcctgatgaaaaccctgtggtccctcttaggtgggggatcatgggttttatggtccagggttggttccaggtgggatgggccattgctgagtttaaacgtcgccgggttgctatttctcctcctcctagggggga

SEQ ID NO: 182172 - DNA, 220 bp, Arabidopsis thaliana columbia
gggcggaccacacccgtccgaaatcctttcctttaatggaggttaaccaatgttttcttttttggccacttaagctttcggggcattcttcctttggcgggccaaccgggtttttaggccctccatcgacctaatccaaaaggggggcgttttggccgggggcctggtgaccatccggcgtcccgccaggtttactccccaaggcttttgtattgtccca

SEQ ID NO: 182173 - DNA, 328 bp, Arabidopsis thaliana columbia
tccgggcggaccccccttccgtaagaaataagagcccctctctaacttttttttttcctttggctaatttccaaaagggacgttttctaatgattcagggaaacccccaacggttgaggaaatgccggaaaaggccacccctccaattgaggaccgtgggattctttcctaaccttccacctagttcccccctttgtcccaggatttggaacccccctccaaaccaccgccggtttttgtggtgggccagcaacaccccggttaaagtccccttgtggaacctcttttggggtttaaatttacccattccgctggcgtacccaaaact

SEQ ID NO: 182174 - DNA, 266 bp, Arabidopsis thaliana columbia
  unsure (1)..(266): unsure at all n locations
ggggcggacccacccttccggaaaaggttaagaaaaaaggggnggttatttgtaaattccccaaaaggttcgaaaccaagaggggttcttatttgtgaaggaacccccccatcccccgaaaaataaatttctttgtccaaaatttttaaactgaacctaaccaaaacttgcagtttccagtttcctttctccaaccaattgctgaacttaataggtcctttaaaggtttctctccaatttggcaaaccttccaatccttcaatttt

SEQ ID NO: 182175 - DNA, 295 bp, Arabidopsis thaliana columbia
ggaattccggggcggaccacacccgtccgttttataaccaagattaagctggagaggggtttttttttttaaaaggaatggagtttttaggaccatgtttgtgagtttctttacctaactcaattctttttactaatggccctcggttaccaatcaacacaaatatttaattagtaataaagctggaattggtataagctgaaaggtgtgttggtagatgccagcggagataagagtcccaaacttgaatggagaaggatgggctcctaagcttaggaagactctactaaagctt

SEQ ID NO: 182176 - DNA, 131 bp, Arabidopsis thaliana columbia
  unsure (1)..(131): unsure at all n locations
ggaccaaggggtcctttttaaaatttttttcatttggtggaaatttttctctttataaaaaaaaacaannncggggagcttttttttaaacattgtcgggcccccctaatcccctcctattttcttttttt

SEQ ID NO: 182177 - DNA, 175 bp, Arabidopsis thaliana columbia
ggaccgacgcgtccgatttaaattatccataattttactcgcatttttttttcaaaacaacttatgaaactagaggagaggtaccttataaaaagggtgatactcaccaacctttttacagattaaatcggacctaaatatcaatatcgtcatatgaaccctttagatcatttta

SEQ ID NO: 182178 - DNA, 340 bp, Arabidopsis thaliana columbia
cttccttcttcaactctatttcacttttctatatatggctacatctcctacttactcagggggtatatttctctggagcgggggcgtcaaaatcactaccttgttattccaactgtaaactccgttacaacggtggttacactctcttcctcgccgttcctctctccttctcatttacctggtagatatacgctctcgatctcattgtcaattttgaattacactataaaaaaaaaacgaaatcggttttgtggaaagagaaatttacgtcacacttgtggtgcttttaatcaaaatttgtctttaatatgttttaaattattcttctgtcttactctga

SEQ ID NO: 182179 - DNA, 229 bp, Arabidopsis thaliana columbia
  unsure (1)..(229): unsure at all n locations
cacgcgtactatcttattaactaaatacctctctattttttttacactcacaccgaaanggccaccgcgggaatttatattacatggggggcgcagaccccaaaggccctcaagctatcccacttgtcctccgacttatatgcaaccccacgaaaaaacatgcccaaagcatacattccaacctttccatcccataacccaagctaactatccaaccgagtcaaaaaca

SEQ ID NO: 182180 - DNA, 384 bp, Arabidopsis thaliana columbia
  unsure (1)..(384): unsure at all n locations
gaaaaggattaggaataatgtgccgtttcatttcatcacaagctgcgagtacctctctggacgtctcagcttcttaagaaacatgagctagagtagaagcttctagtgacccgggaaccctctttggtggtagttctatgaatnatatctatnntctatgtgagagaataagcttacttacacctcggacaaatggaaaagagattggccccaaccatggtgaacaaattgaaagcacgctactttgtccgtaaggctaccagtttgttgatacacaggttacatttttcgtaggggatggctgttgtctttgaaaggactccgaaatgaatacaaattaagtatataggttcagaagactatgcagcttttagaggtgatctg

SEQ ID NO: 182181 - DNA, 209 bp, Arabidopsis thaliana columbia
cgggccgcccacacccgtccgaaccctaattctcctcctcccattttttgtttttaacctaaaaaaccccattttgtgtgtaattctaaaatgcctgagagttccaaccttccttctatcctcttcctcctgaaccaccccacaccaccaaaaaaaatgcctaaaacccttaatatttaattatttttttttccccacaccattaaacc

SEQ ID NO: 182182 - DNA, 448 bp, Arabidopsis thaliana columbia
aacccgggcggaccaagccgtccgttcttcaaaaggagtttcaataatggcttttttaccctaacccttcgccgcattccggcggtccaattcctttaaggcgggacccataaaatcatcttcaactatccgaagcaaaacggtggtgttggattaaccaaagttatcatggacgtaatccataatgaattttggagtggggttcaaatcgtaacgctaatgaaatggtttgggctggaaccgcacatgttataacaggtctttattggagaaggggatggcttaattattttttgtaccaaacgactactttataaatgggggggccaaggaggacttaatggccagtttggggtcccataagaacccaaaatctttttacatcataatcgaacttgcttcgttttggccaatttccagtttgagaaatcaactgtatttcactgaa

SEQ ID NO: 182183 - DNA, 454 bp, Arabidopsis thaliana columbia
cggaaatcccggggcggccccagccgtccggcaaggacctttttttccaccatggcaaccatcgggaggggtcaaggtaaataaggtttaagatttagccccagagggggggattaacgggtttttttccttttaaggcgacataaaccacatggaaatccaaaaggaattgggccggcttcgaatcgaattggttccattaactgaccccaaagccttcgaaatggcctggttataatggggggcaacaatgggggcccagatggttccaataccacgggctgaaacctatgttcaggggcgtgggacacaggtttggggtggtttggaaccaggttttaactaaggtccggccaattggaggcctaagttcctgtcaatgtaggaggtaagaatgttggccaccgcgatgcctttgggttctaaggagagtcctccccagcctaaaccgacc

SEQ ID NO: 182184 - DNA, 300 bp, Arabidopsis thaliana columbia
gccgggcccgaccaacgcttccgtttttttggatcgacgactgtttttttttttaaccggaaccggggtcacggaccgaatttaatccccggaaaaccgtttggtttttttttcgaaaaatcaattggaatttccgccgacctgatcgggaggggtaccatcaacctgatggggaggggtacccgcaacctgatcgggaggagtaccagcgagcttttaaccgtcaggcctttcgaccttaaattccttttggaatggaaaaaccagacctctggcttcttttttttggccgaacaggac

SEQ ID NO: 182185 - DNA, 328 bp, Arabidopsis thaliana columbia
cggggcgcgaccaacccttaatatatttatttaaaaatacatttcccacttttaataaaaaaaaacactaccaccccataaccgaggcctttttcaaaaatttgagcgacccaccatttaaacttttaacaaaaaccttcttaacttttctttaattattaaaaccctttcattcttttatcaaaaacacccaatttctaacctttctatccacaattaattctaaaaaaccacccttacttaaacaacctattattttattcccataaccattaaaaaaagtttattttcttttccttaaaaaaaaaacatttattcttcctgaaaa

SEQ ID NO: 182186 - DNA, 273 bp, Arabidopsis thaliana columbia
gccgggccaagccgtccttaaattaaagaaaccacataaccaatttttttatttccttcctaaaccatgtttttgtccgcccttttttaacccttaaaagttaaaaacccttcccaataaaatacccttttaacctcccctttaaccataagaaaaactgtctccaacccaaaggttccataacccaacccatatttctaatctaaccaattaaatatctttattccattctccgctaacccccctacctacctaaccgtgaatttccccgtt

SEQ ID NO: 182187 - DNA, 152 bp, Arabidopsis thaliana columbia
aaaaacccgggccgaccaacccttccgacctccaattaaacctccacctatctttttttcaccgccaaccttttccctcctcgggccttttaaaaaatattggccgcgccaccaatttccctttttaacaaatccaagaaattttaaaaacc

SEQ ID NO: 182188 - DNA, 323 bp, Arabidopsis thaliana columbia
  unsure (1)..(323): unsure at all n locations
gggngggccaagccgaccaaaaaaaaaaaactttgnccttccatttttctcttatctaccaccactaanncctcggccgcctcctttttaaacaagcggtcgcttattaaaaccaaaaaaccaacttcctccctcccccattctacaaacccttctttaatccccaatcatctttaattttcaccttaaactcttatccccaatcaaccatcctttaaaaaccttcctacctaataatttccctttcctcaaccactacttatttacctcccccatttacttcaatatctcccccttacctccctattaaaccttcaattccc

SEQ ID NO: 182189 - DNA, 445 bp, Arabidopsis thaliana columbia
  unsure (1)..(445): unsure at all n locations
cggggcgggccagccgncnaaaataaacatggttcctggaggccatttttttaaaaaggggataatatccactaggcgcgggaaaaaaagacccaggggggtttttttaactttaaacagttaaaaaggttcctaaggggttggttccacctaatttaattgcaattttaacaggaggaccagaaggattaggattggaaccagcaagagtcctttcaaaaaaaggtcctaatttgttaatcgttccccaaaccattgcacctgaaaaaaaccccaaatcataattttttaaccaaaccccaaccccacttgtaattctttttaaattaaactttctttccttaaaatccataaaagcttttgttcttaaatttaatgccttcaattttcttataaatttcttaataatcaattcaggattatggttttgcccttaccaactctt

SEQ ID NO: 182190 - DNA, 419 bp, Arabidopsis thaliana columbia
  unsure (1)..(419): unsure at all n locations
aaaaccatgccctcccaaaaccccttttatatttccaccngaccccttctttnccgatggattttaacaaaaattgtgcggaccaaaaaaacaaccaccnttcccattttttccaccaccctttaaatattcccaattaaccccaaatcctaacctttttaaccaactaacttttttccctccttattaaacactttccttaacttttcttccttaaattcctattaattaacttacctttaaaccttttttctcctcctacccaaaaccaacttctttccccttcacttccgttattaatttctacatttaaaacaactttttcctatctaaattttaaattcctcataatatatttttatttttcctaatctcatttaacttctcctttttttttcttttctccctttcttcttttt

SEQ ID NO: 182191 - DNA, 409 bp, Arabidopsis thaliana columbia
  unsure (1)..(409): unsure at all n locations
ccggnttggaancccggggcggaccacagccttccggaccgtatttaagggtttaccaactttaatttttcttctggttccctaatttaaagggggaatttttttttttactggtgggtccataatttccaactgggttgttgttcccaatgaattaaaccgcttttaaacccaaaaggaatttttttgtttaaaaaaaaaaaaaaaaaaaaaaaaaaaaaaaaaaaaaaaaaaaaaaaaaaaaaaaaaaaaaaaaaaaaaaaaaaaaaaaaaaaattaaaaataaaaaataaaaaataaaaaaaaaaaatataaaaataaaattatataaagaggggggggggctttttaaaaaacccaatttttcttcccctggttttccacataatttctttttttttgggccccc

SEQ ID NO: 182192 - DNA, 404 bp, Arabidopsis thaliana columbia
ccgggcgggccacacccgtccgttccagaaaaggcattttccaactttttttttaaatctgaactgtaatcgattaagttcgggaaaaagcctaaccaggtcgggataaacttcaaggaacctttgaaggccttttttctttttttccattcaattaaggcaccattaccaaaccgggccactgttttaaaccaccattgtaaatggtcagaaccaccaaatttaaaggaattaaattttgccaaactaatcttaacactttcaaccaaagtaggaaaagttgagttcgattccagagggttaaaaccaaaaggtggggaggccacgggaggattttaaaggttattaaagggattggaagttgagttattagggtttcaagaccaaattacggaaaaaatgga

SEQ ID NO: 182193 - DNA, 389 bp, Arabidopsis thaliana columbia
cggggcggaccacaggcgtccggcttttaaccaatttttctttttaaattaatttttttggaaccctaaaaaaattaagtttcgggggaattccttgccgagccgggggaaaaaatggcaactccaacttcgtcggatcgggaattcagccttgggaaagagttaaaggggcaggaggtttcgttggatgaattgaccagcctttttttttttcgaagtttttaccagaaaaccggtaccttttttttcttaacataagccgggaaggcgaaattttttgcccagaaccacctggattccgctaaatctgaaatcaccaggattcgttcgcagaattaaccattgagaattcttagtggttgaggatccaccagggctgttcctttttt

SEQ ID NO: 182194 - DNA, 459 bp, Arabidopsis thaliana columbia
  unsure (1)..(459): unsure at all n locations
ggaaatnccggggcggcgcccacccgtccggccgaaaaacgccattgtcggccaaatcctttacaggcctgaaaataaaggtaaagagttgggttaacctttaaaattggggaggctaaaatggtttgtgagaaaaactgattcaaaggaaagtcgtcggggacccatggattttgttcatggacctcctactaagtttttaacttccaaacctgtcatgtttgatttgtaaaatcctggatttaatggttttgcacctgactggataggattcgatttaagggccaaaccgaaccctgattccggttttaattccacaaaaaaggagtcccatggggcgtttgataaactgtttgaagtgttaaaggccaaatttcctttttttctggtggttaagggttttttggaaggttcatatggttaaactgggcctttgaaaaatccaaccaggtttgaaaa

SEQ ID NO: 182195 - DNA, 250 bp, Arabidopsis thaliana columbia
cggggcggacccagccgtccgaccaggagggagattttaaaaggaaccttgattttttttaggttggttccatggccttggaggggtcttttaatctaactggctggcgttaagccgccagttaattttgtccccttcccaattaatcaacccgcggttagcctaaccccgggtttgcctgttccaaaaaacccgaggggtaaggttccaccggtttgttggcccaaagttggtcctctaattaaaccca

SEQ ID NO: 182196 - DNA, 394 bp, Arabidopsis thaliana columbia
gggcgggcccagccgaccgaaaccatcctaaaaccgttacctggaccctattttttaacaaaccagtggaagttttttgggggctttaacacagggagggggcgcgaaccttttgaattggtccttaattcttaatcctgccataaccattcaaggtccaataatcctttggaaactcgttcctaaaagggaaaaaccctttgccgcccattacggttacttgtggggcttcaataccctccttgtccggttccccacaaagcttcctaaactttttaccaaatttggcggcctttttcttttccatttcaacaatcttggggtcttgccccttttttgccttcaaaagaccaaaaacttttcccaatttccatttaatctgcccaccattttt

SEQ ID NO: 182197 - DNA, 322 bp, Arabidopsis thaliana columbia
  unsure (1)..(322): unsure at all n locations
cggcccggaaaccccgggccgcccacacccttccgtaaagggggggaggccgttggtaaaatttttttcaccaaatttgaatcgatttttgaagcctccattccaggatttgggggaaatcgnttttaaaagtgacccccctttctttcggaccttggtttcctttcggaacccacttcgttgtgaaagaaccgaattcattttttcattgttgccgtgaccatggagtcatttctttctttaccccttaggttacccctaatgttcccccttggtagtttttggttcatccatttctttacctggtttgtcttcatcccaa

SEQ ID NO: 182198 - DNA, 287 bp, Arabidopsis thaliana columbia
taaacaaacccaattccccaaccctttttttattaaccacttcccgttcccttaacggtggcccttttaataatgccgaaggaatcctaacttaacttatttccaaaaacccctccgccaagtgcaccttttttaccaacctttccacccaccttaatttccaattcataaccaatatccgttaacttaattcctcctataaaattaaaatcctttccgttcaaatgcttttttttttcaaatccccacctttaattttttcttttaccaccaattttttaactctt

SEQ ID NO: 182199 - DNA, 426 bp, Arabidopsis thaliana columbia
  unsure (1)..(426): unsure at all n locations
cggaancccggggccgcccacacccttccaattttaacctaaaaccccataactttttttttattccataggaaatcttccatttgaggtggttcccgaacctgagggggcggtggtccctttaaaatcttaacaatttttgctttaaaacctaactaattttaaactagtaaaaatttttggttccggccatttcccacacaaggagtgtcctccaccacttttttcccttctcgcttccttaatttccaacctgttccctaacctcccaacctcttaaaaccacccaaaaccttttaaaaaaaaattttattggaaccatttgcgagaccatcagaacttttttccacaaaaatccaatttttcgtgtttccatccatcaccgtaaataagccttcattgttttcttaaaggttttaaatctcc

SEQ ID NO: 182200 - DNA, 445 bp, Arabidopsis thaliana columbia
  unsure (1)..(445): unsure at all n locations
aaatnccggggcggcgcccacccttccgcttgaaaaatggaccggggttccttaacaattattggttggaaacggcttctttccccgagcggtcgttttttttttcgggggccccccgaattgggtttccccgtcggcaaccacatcttccccgataggccgttttcgttaaacaacaagttgttttggaccaccggacctgcttttccagagccttgcttaaatcggttggttgttcccgtcggaaggtttaaacctttgccttggttgattgccggtttagggttttttgtgggcctcggcctgttccttgttttaaccaacaaggtttttaaggttccatttacaccaaaggtgtttccatttaacaccctgaaagttgacctggaaggaaagccttaaagccccatttaagtgatctgttaataaaaccaggaagcttttt

SEQ ID NO: 182201 - DNA, 421 bp, Arabidopsis thaliana columbia
  unsure (1)..(421): unsure at all n locations
gggngggccggccgtccaatattatataaaaccttttttaccataattttttttttttattaataagtcgccctaaaagaaggtttgtttttaagaagggtcgagttcctttttttaatataaatcctttttgtttaaacttggtttaaaacctaaaaaatcttaattaatttaatttttccaattttgggtacctaatctaccccataaaatttgggttaaattgttttgttcctgcctttcaacccagtttttccattaattaacttcgaattcaaaaaaggtttattttttaaattattattaaaggattccgggttcttaaaaaaaacccttatttttatttttaacaaaaaaggttgttttccttatcttatatctaaaaccaccctttattttccaaaagttcctactttttttt

SEQ ID NO: 182202 - DNA, 321 bp, Arabidopsis thaliana columbia
  unsure (1)..(321): unsure at all n locations
ggggcggaccacacccgtccgtttaatttaaggaagcttacccgaaaggtacttttaaggacccccgttaaaaaccctttggggggtccatagccacctccgggagggccaacccctacnaaaaccgaggttgcccttaaagttaagcaaaagccgaacccaatggaggacccattttttgaaccaaaaccaaatcctcctgaggttcaaaaacctaaaaaagctaaagatccattaaaggaaaaaaattttcttgatgttaatcataataaagtatctggcctggaaaagcctaaaaagaaaaaaatcctttttgattcg

SEQ ID NO: 182203 - DNA, 382 bp, Arabidopsis thaliana columbia
cggggcggacccaggcgtccggaaggtttgaggccaaatccttccattggaggaggaggagggcttttttttgtttaaatgggggcccttctttttttgttgggggggcttcttcttcctcgcccctttttaaatttccgcttttcgtttttccggtttggggccttaaccccacccttgtcgggtccaagaccagggtttttttaagggcttccggtttgacctttacccatggaggaatgggggtgaaggcggttgtttttgccttggccggggttgttcttgggggcaggggggacccaaaacctgtttttgctgttgttccaggggttaacctcccgttggattcgaaggaagctaaggggaacctgttttgggattt

SEQ ID NO: 182204 - DNA, 443 bp, Arabidopsis thaliana columbia
  unsure (1)..(443): unsure at all n locations
gcccgaaanccccgggccggccacacccttccgtaagtcctccaccactgaatccaccgtttttcttattcaaaaaaaatccaattcccaggagtttaaattggaaagttgggggggtccttaaaaattttccggcctggacctttaccctctcttaatcctatttttcctttttttgcctttgattttaaaatattccaaacctttttttttaaataaaacccaaggttttgttgaccttgtagttcctaaaatttaaccggtttttttaatgttttccaattttttctaatcaccaccattaaccttccaaccttaaaaaaaaaaggggggagaggtagaaaaaataaaaaaaaaaaaaaaaaaaaaaatattttcttatataaatataattaaaaataaaggggccgccccttttaagaattcaaattttcctacccctt

SEQ ID NO: 182205 - DNA, 351 bp, Arabidopsis thaliana columbia
cgggcggaccaagccgccgggaaaaaaagaaggacctttccggttttattttaaggggggccagccaataaaaagggagggttttttcttttaacggcgggacctataccctttaccacccccaaaaactaggtggccatccctgggaaattaaaataaccaaggttttccaaaaccaatattccaactgctaaaagggggaactggtcctttaagcccagaatatcgaacggccctaatggaaggaattgcacccgaaaaaacacccctaatggccgtttggcccgaaagaaaaccagtttaatcctttaaaggtgatttgataatatttacatccccaaaggttcatta

SEQ ID NO: 182206 - DNA, 431 bp, Arabidopsis thaliana columbia
ggtggaaccagggttggttaaaaggaggttcccaaacggttccatttttgtttaaccaggaccggaccaaagggcctggggggttaatccttaaatcgtttaaccctaaaaaaagacctaataatattaaaaagcagggtgggtttagttctttaaacgccaagcaacaccatttttttaataaaaccagacaggagtttcagcaaattcttgagacctcaagaggtcctttaaccattcccaccattaccaccaccaggggcaccttgaccggcattggtgttaatgcttttatccaaagaggaagttccagaaatgcataatttatttacactggattaattttaccaaatttttttttgtgggaccaattcatatatttaaaattagatgcttaaaattaatttgttgtgaaatccagcgaccattaa

SEQ ID NO: 182207 - DNA, 176 bp, Arabidopsis thaliana columbia
ctaaaggttaaagaataattttggttaaaaaaaaaaaaaaaagggggggggtgataaaggaacaaggggggggaccccaaaaatccaacctaaaaatctcactaaaagggcaacttaaatcaaatgaatgggccgcgaataaaaaacgaggggacggggaaaaccttggggtaacc

SEQ ID NO: 182208 - DNA, 416 bp, Arabidopsis thaliana columbia
aaaataaagagaaacctaaggaggttggaaattggaaaaaggtaatgatcataacagggttggccacggcggttccggggggggggccacgaaaaattggaaggagactaccctgggaatccaaactgccaaaccaatgttccggttagttccggggggcctttgggttgcagaactggtggcaatgctaaaggcctttgaaactaaggagtccggtcaaattcttaactcaaatttaacagccttaaggtcctgggggcacgcaaatggaatttgtccaggctatttttttttttaaccagccattgcagcaatccttctttttttttcaacattgcctggggttgggactttttttggtttgaaccagtttttgacctacttggttttggctgttggagcttgttaagttgagg

SEQ ID NO: 182209 - DNA, 446 bp, Arabidopsis thaliana columbia
  unsure (1)..(446): unsure at all n locations
cgggncgggaannccggggcggccccagccgtccgatgccaaccaagaccaggatttgggttgcattcaattcgactgggaattattacccgacctgtgggtagttaactgtttccgctgggcctaatgtaatcccatgtttttgttatcaatccgcttaaggtaccattcccgattaacttaatggatttcaaggttaccaaaaaaaaaaaaaaaggggggggtttgggatttaacctaaccaagctaattaagctggggaagggcttaaagaaagatttttttaaatgctttgatgggtccaaaaagggatcaccgtcaactaaaaagactttcctaattgtcaactccacgggggtcggaaagttgcaaagaaccccaaaatggtttgattgccattgccctttttgcactttttggttttccttttccaaccaatttttttt

SEQ ID NO: 182210 - DNA, 397 bp, Arabidopsis thaliana columbia
atcagtttgggggaaagcaccaaaaaaaaaaattgtcggcaccattggcaccaccatcgccggggatgggcctggggggatcatccataaccaccaaaccttttttttaatcctttttaaacccaactttaaccgccaggacccttttgggactcgccggtccttcggggggaagagtaatttgttttgaagggaactggttggggagggatttgaccgtggtaggatttgggctgatcggttggttagctccgccaggctttccagcgttaattgggaagggcctgccggttttttttttggatggcattggacctgggctggttcactttccgactcttccagttttaatttaaacagtttggttggggttggttcctgggactttaggcttttt

SEQ ID NO: 182211 - DNA, 452 bp, Arabidopsis thaliana columbia
gggaatccccgggccgccccacccttccaaaaccattcaaaaacccctacccaattttttttaatctttaccaccaaaatctttggaggggcaacctttaaggctgggatggtggtcctaataatggggataatctccgccgtgccatcggcccattttgtgcccccacccccaagtccaccttcgggaccaaggccaacctaagcgcctttcggttcacctggagttccaccagccccggctctggttttgggctcacctctccgaatctaagtacctgggagggggattccgaccagagatggtttttgcggattagcccatccataattattcgccgcctcgggtgatttccaaaccacctattaaacctcatttcctattggcccctcttctttttcgtttcttatctaaacctccaatatctgttgaggattttactattcctttta

SEQ ID NO: 182212 - DNA, 112 bp, Arabidopsis thaliana columbia
ctcttcataatagagtttcgattatgggctctgtgacgtcagccatcgctggaatccgatctttcaacggccttaaggcccgaaccatcaaagcatccgtcactgatagaat

SEQ ID NO: 182213 - DNA, 144 bp, Arabidopsis thaliana columbia
  unsure (1)..(144): unsure at all n locations
gtgcagaaacgagctcgactctatacacttctttcatttaaacccgcaggggcacaacaacggggagccacagcgggaagggcgaaaccagccaccatcagnagggaggggcatagccagcctctcttggcagtagctgatccc

SEQ ID NO: 182214 - DNA, 79 bp, Arabidopsis thaliana columbia
  unsure (1)..(79): unsure at all n locations
ggcggaagacggcaatgccggccaaatgctctacaggactgaagatnaaggtaaagagcatggctcaactatcaaatct

SEQ ID NO: 182215 - DNA, 402 bp, Arabidopsis thaliana columbia
  unsure (1)..(402): unsure at all n locations
actttcacctcaaaacgcatcagctcttgtaaaatccatagtagatcttccagttttagttgttgccggagctgaaaanacactggttcctttggaatcttcacaagttctggcttcaaaactcactaattctagactagtggagatttntggttgcggccatctgccacacgaggagggtcctacaacacttgtttccgctctcggctccttcattagcagactgataccnaaactaccaaactcctaaaaccacacaagaccatctcaaagaagagtttgttggaaacatctgcgagaacatctggagcnagtgttagttagaatacgattctttcgtggttccatccatcagcgtaaatcatgcatcattgtattctcaaagggattaaaactcccacc

SEQ ID NO: 182216 - DNA, 64 bp, Arabidopsis thaliana columbia
cttgattctaagcaggctagcctcgatcgacttttcttgcaccccctgggaggagcccctgagg

SEQ ID NO: 182217 - DNA, 304 bp, Arabidopsis thaliana columbia
  unsure (1)..(304): unsure at all n locations
cggaancccggcctacccacgcgtccggtggaaacagggtttgttcagaggaggttctcatacggctccataatgtatcaacatgaacagagcttntggtcttttttttntatcattttatcggtgcttccttgaagaagacctcatcatcatcagaagcaaggttggtatatgtccttcnacgcctagcaacaacactctcttcatcaaaacatacatgagtatctgcaaaatcatgagacctcaagaagtactcttaccactcacaacaataacatcaacaagagcaacatgaacagcacta

SEQ ID NO: 182218 - DNA, 54 bp, Arabidopsis thaliana columbia
ccaaaaaagctcctccattccaacggctactttttcagctcctccacactctct

SEQ ID NO: 182219 - DNA, 286 bp, Arabidopsis thaliana columbia
gctcctttctctctctcagctccgccgatgttttttttcccagacctcggaatcgcctgaggaggtgtcatgttacgctctgtggaccgatctgcccaactccgttttgaaggagtctccagcactgatgagagatgagaatggagatcacactgagagagatcagaggattacaagaatacatgaatcggaaatttcaattgcaagaagaaagctactaaagcttcgagcaaactcaaacattcctagaacaagaaaggttgcagatggagaagaagcagtgatc

SEQ ID NO: 182220 - DNA, 335 bp, Arabidopsis thaliana columbia
ctctccaggagaatatacagaaaaaggtttaaaagaaacactgacagttagggctatggcggcggcgaatatacacgacgccgttgtttccgatgacctgaactatgaaatctgggctccaatcgcgaaaactacactaacggagaaaggactttgggatgttgtcgagaacggagtcccaccggatccatcgaaggttccagagttagcagcgacgattcaagccgaagagttttcgaaatggagagatctcgcggagaaagacatgaaagcgctccaaattttgcaatcttctctcacggattctgctttcaggaagactctctccgtttttt

SEQ ID NO: 182221 - DNA, 264 bp, Arabidopsis thaliana columbia
gcataaacatggtttatgcatcgacacaacgattttctcattgggatggggacacaagaaaaaacgggggatatatatagacattggtaggaagcatattccacattcggggcccccgctctaataaccccaaacctaccttccgcctgactgccaaatcatatttcatttcttagggggcccccaaatttaattacttgggcagacattctcatatccccatttttaggtaaaccttggagataccccatttatagggcttgg

SEQ ID NO: 182222 - DNA, 53 bp, Arabidopsis thaliana columbia
  unsure (1)..(53): unsure at all n locations
aaaaaanaaaaaaagggcgggcaaacaacaaacaaaaaaaaaaaatcaaaaat

SEQ ID NO: 182223 - DNA, 477 bp, Arabidopsis thaliana columbia
  unsure (1)..(477): unsure at all n locations
gcgtccgctctgctccactcattctacctccacacgacgtccttattatctcaccgcctctagnaatcactgcgcgggccgtcttaaaataccgcgtgtgtggtgtcatanaacgctcacgtcggagaatgggaaactagcggtggtagtaaaaactgatcgtgatgatggatcctatcttttaaccgcatttggtgttcgttactagacaacaccgtctatgccggagtgcaattctagttaccagagtctccggcggaagacggcaatgtcggccaaatgctctacgtaaatttcacatatttactcagttcaattttgaactgtgattgaaattgaaaagatgcatggttcatatttgcttctattgatttcaaattccattttttatcatagtgttatatttttgtttgattgttatgttgtggttttagaggactgaaaatataggtatagagtatggcttaactattaaat

SEQ ID NO: 182224 - DNA, 247 bp, Arabidopsis thaliana columbia
  unsure (1)..(247): unsure at all n locations
aaaaaattaaaaatccttcggccccgcaaccacaacaatcnatcctaaatcctcatcactttttcttacctcacaaaacataacataacggggggagttttttccgagggggggggtaaacctaaacaccaaacaaacaacatattccgtctcaactaactactcaatacaatcgattaatccatctcatttcttaaccaattctctcttctcccaacaactattactatactgtcatcaacataca

SEQ ID NO: 182225 - DNA, 80 bp, Arabidopsis thaliana columbia
ccggaccggaaaatccgggtcggcgccacgcgaacaacaaaccatcatcttaatacaactcctctcttttttttttttca

SEQ ID NO: 182226 - DNA, 299 bp, Arabidopsis thaliana columbia
  unsure (1)..(299): unsure at all n locations
ccggancgaaaacccggggcgcgcacgcgtacgctcccatacctactgtaggaactgacacttctgtgatactgaaacgaaactgataccggaacgggcactgaaactggggcgggcgggggnaaccacactcaaacaagaactggaaactagtaccggatgaactagcactgaaactagcaccgatacagatggaactgtcactggaactgaaacagaaagaactgacactggaaccatctctggaactggcactggaacctaaactgctactgcctctggaaccgaatcctcttgaa

SEQ ID NO: 182227 - DNA, 211 bp, Arabidopsis thaliana columbia
  unsure (1)..(211): unsure at all n locations
aaaaaaaaaaaaaaaaaagggggggaaaaagaaaggggggggggggaaaaaaaaaaaaaaaaaanaaaaaagagaaaaagaaaaaagagagaaaagaagaaaaangaaagggagaaaaaaaaaagaagagagaaaaaaaagaaaaaaagaaaaaaaaaaaaagaaaaaagagaaaaaagagaaaaaaaagaaaaagagagaaagaaaaaga

SEQ ID NO: 182228 - DNA, 151 bp, Arabidopsis thaliana columbia
agaatttggtccgccgttcatcgtccttactgtaacaacgaagatgagctctctatctccgcggtattatgtgagtaccgggcttatacaatattcaatcccacaatttattgaaatctctttcacacattactctttatctaacttctat

SEQ ID NO: 182229 - DNA, 179 bp, Arabidopsis thaliana columbia
aaaaaaaaaaaaaaaaaaaaaaaaaaaaaaaaattttataaaaaaaaaaaataataaaacaaaagggggaatttaacaaaaagggaggctggtaaataaaaaacaaaaagaagatgctgataaagaaaattaacagcattgaaatgtaaatatattataaacaacgtgcttcaacgaaa

SEQ ID NO: 182230 - DNA, 199 bp, Arabidopsis thaliana columbia
acccgggggagaggcttattttccttccccccaaaactttctttttttccagcaccatccttttggggccggtttaaagtggatttttcctacacctttttttccgcttaatcccttccattggcggattcctcctaatcctcttccacgccaccccaatggccgccgcagtttaaggctgggctgttgaattttgcgg

SEQ ID NO: 182231 - DNA, 74 bp, Arabidopsis thaliana columbia
ttttagaggatccaagtttacttccgcgggcttgcaacttaaaaatttttttatgggggcacctaaattaaatt

SEQ ID NO: 182232 - DNA, 596 bp, Arabidopsis thaliana columbia
  unsure (1)..(596): unsure at all n locations
tcgtctcgangtaagaagctaaaatggggccaccaagccgccatctagtcttttgtnctctcnnaccaacntcacatntnnctccacgtgcgagannnctcccaccccaaaaaccccgtagacgtgcccatctcaaattcnncatggcgccttccgtcccccctcccccgtctaggggtggctcnnctcctnnccgccctnnnacccaaacntnnatcaacntcaccnngggagggaaaatcccctcctccnnngctgtcgtgacgagccctcgagctaagcnnccttccanntcgtcataaggggtctcagcacccaggtctctcccttcttccctcggcccgtnnttcgtcttcttcaaccttccacgagaggagaaccgtanngcaaaaccagggctttactcggagccagaacccggaaaaaccccaatttcnngaagctggaagatgatcgtgcctaagggagtaccgtcaagtctcttggaaatcgaaccgatcccaattggattcaaccaatggtggatgttctttgcttggggtttctattgggacaccatcgntgctttactacatctntggctacttccagcaatg

SEQ ID NO: 182233 - DNA, 351 bp, Arabidopsis thaliana columbia
acgcgaccgccaacccgtcgccacgcgtcgaattctaaactctaaaatcaatcttaaatcttaaccggatcaagatgcagatcttgtaagactctaccggaaagacttacctcaggggaagcttgcaccatcacacgtaggccaagaccaggataaggaggtttctcgatcacaagctatttgcgaagcgtggggaggcgactggcgtacaatatcaaagatcaccctcactggttagtcgggggatgcaatttgtaaaccctacgggagagatacttgaggggagcttgcaccatgacacgaggcaatcaagatagaggtttctcgaccacgagtgacttgcggagactg

SEQ ID NO: 182234 - DNA, 184 bp, Arabidopsis thaliana columbia
ggaaaaccttttttaagacccaacaatttggcctttttttttgaggggcaataaggaaaattgtgggggtccttttattaaaagggggggcaaaaaaggccccaattgggcccaaggttaccaaggttgaagtcaaaaaggggcccaaggaaactttgaacataaaaactttttccgttgttga

SEQ ID NO: 182235 - DNA, 141 bp, Arabidopsis thaliana columbia
acgcgcgcggattgatgctgatcatggacgcataccttctccatcttacaacgctttgatctacatacgacaggtagaacggcgacgcaaattaaaatgatttcgccataactctcgtcgacacggtgctctgctctcaca

SEQ ID NO: 182236 - DNA, 363 bp, Arabidopsis thaliana columbia
agcaaagaaagctttgttttgattgataatattacacataaccaagagagagcatatagtacaaacgaaaacaagaatagttatccttagaagtaatcttcagtcctgcccttgaatccgatttgtccgaaagtgaggcagaggaagaggcctaagtgccacgtaaccaaccacaaccagaactgtgaagtgagagctggaggagtcgggaagtgagcgagctcagttccgatgctatcgaagaagagacccgtcaggctcttcccatttatcggtggaatgctcgacggagctagccattcatcaacaccaaacccttctcttaatactttttaaaaccaacatttagcgccaagaaccctt

SEQ ID NO: 182237 - DNA, 69 bp, Arabidopsis thaliana columbia
atcttcgtcctattaaatacaaaaattaaaattccttaaaaatatatccttatcttcaaccaagaatgt

SEQ ID NO: 182238 - DNA, 445 bp, Arabidopsis thaliana columbia
ctggcttctttactactgttttcagtcgtaattggtttcgaattttgattccttcatctgtagacagttgtaaggatcgatttttggcttgattttttgactaatgggcttggaggaacttagtaatctggggaaaattagagttttcttgagttgtcgtctacaagtagctgcatctgggtcggaagaccaacatttattctagctgtttcatgggatttgccatcacggtgacattacctaattgtggaagtaagttcttgcctaaaaggagtttcagagacaaaggtgctttgtctcttgccatttgttccctttgtcatttccttcatcctgcacagcctttgttggtcagacatcaaaggaggatgtcatggacaactatcaaaagctcggttggtggtgacagattcgatccagcatctggttcttcagtaataatagc

SEQ ID NO: 182239 - DNA, 279 bp, Arabidopsis thaliana columbia
gcagggtgatcacaaactctttgcagcagatatattgcttcagttaaatgcactggattgtgcacctgagaacaaaaagtacagaaatgaagctaccagagctctacttgatgcagttacatatagtgaaggttcaaatatgcagcttttatcaacgttcattcttgcgaatatcggtggaacttattcatggacaggagaaccttacactgctgcttggctaatgaaaagaggatgtctaacttctatgttttttatgaagtttgttagatttattat

SEQ ID NO: 182240 - DNA, 472 bp, Arabidopsis thaliana columbia
aaatggtagaactataagggcattatcaacactaaattcttgattcattgatttccagctagcttaatcatatcgagggcacacgtgactaatgaattttgttgactaaagtccatcctgtagttgctgttgtaaaggttttaggtctaaatagattgatgtacagtgcacttgaatattaaggcatgctgtcagcctattctcttaccattcaataagttatgtacggacagagatatttataaatgttgaggagaattctcattctccgaaattcccccaaaaaaaaaaaaataaaaataaaatataaatattttatataataatataaaataatttataaatattaattaattattaatttataatatttttttataaaaattattttatatttatttttcttttctttttatcttctttatctataatataataatctttatattatttattgggggccctttttttt

SEQ ID NO: 182241 - DNA, 467 bp, Arabidopsis thaliana columbia
aaaaaaatctagtgttcggttctaacacgcttgatgaccatggcggtctcgtttaatacaacggtgcactatccttctatgagtgcgagctgtatcatcaagctttattctgggataaagcctcaatctgcaagctttttgacacgagcagctcagaatttagtacagggagctctatgagaaagcttatatgcatcgactgatctcgactgtgtttagtacgattcacaatgtttgttataagtctgataataggtctggtcttattggtttgagttttgctgttattgtagttcttattgctttatggagtcttattactgtaatttacaatttgtctcgtatttctagcggttttaatctagtttatatcttgtttctacatgtggatgacatattttatttatttttgttaaacctggacataactgttatttaataaaattgacattgatttttttaatttt

SEQ ID NO: 182242 - DNA, 92 bp, Arabidopsis thaliana columbia
gttttgattttatcttgagacgaataaaaccaacagatgtgagataaagcgaatggtaaactacaactcgagaaggtaatggcatctggcca

SEQ ID NO: 182243 - DNA, 222 bp, Arabidopsis thaliana columbia
gtctctctctctctttctgaaataaacactttttcgacgcccgtgaagaaaagcctcgccattagaccggtggcgttctatagaaacgggctttctcgtcctcgtttcttcgataatcataggttcaactcttaccgtgttgatactcccctttttgtgctagatccacttatcttatgggcacagtttttataaatttagccctgttttttttattgtact

SEQ ID NO: 182244 - DNA, 414 bp, Arabidopsis thaliana columbia
  unsure (1)..(414): unsure at all n locations
gctatggctcatcctgcaaacaaggaattggcgcatagacaacagttttactattggaagaactacagaaacaacagactgaagcacattctacctcggcctcttccagagcctgtacctccacaaccaccagttgcaccttcaacttctttgccacctgcaccatctgcaactgctgctctctctccagccctttctccaatgcagtacaataatatgctttctaagaatgacactaggaatatgggtgctactggaattgatcgtaggaagagaaagaagggtatataagcatttcctgccctgaagcatacaccatggcgtcagtcgtcagatatggtttcctccatgtcctaggagggaagcctactngactcangttacaaaaatgttgaaactcggtattactcattc

SEQ ID NO: 182245 - DNA, 288 bp, Arabidopsis thaliana columbia
atctccctgaagttgattgccttctcataacttaaagccttgatgatcattgtcatttgaatacccttaggccactttccgagaaatctccaggcataaaggttatagcaaccccaaatgctaagcctttgctagatcctctttttagtaacgtcacttatctggaacctggagatagctttgagctaaatgcaagaaacggttctaaggttcgagttaaagccacagctggacctgtccttggtccaccgtggcaacgccctgaaaacgggtatcttcttgtattcc

SEQ ID NO: 182246 - DNA, 448 bp, Arabidopsis thaliana columbia
cgaaagcaaagcctttgggtatcacagagatgtgaaaccaaaaatagctgaagatttgagatccatggggcattcggcgcagacatttgttcaagttaaagaggaagctgaatgctgtagagaagttattgaccttgagtgcggtgtccaacctgatcttggttactgtgaggtatcatcggtgaccaactgtgatgaagctccagaaacatcttttgtccaggaaacatctggtatgatcaatggtatttcagtagccagtccatgttcttgctcgatgaatgaaagctctagtccagcaacagtaggtctgagatctccggggtctcctgatcaattattaaagcagcatatatctactccaaatttcagaaaatctcctcttggaaccgagtcgtctgtagtagcaacttctgagagatattcatttggtggcacccgtagtttg

SEQ ID NO: 182247 - DNA, 222 bp, Arabidopsis thaliana columbia
tttttttattattttatataaaaaaatttggtaaaaaaataaaatttaagggtataataaaataaaaaaaaaataattttttttttttatagcaaaaaaaaaaaaaaaatttaaaattgaaaaaaaaaaaaaaagttatttttaaattaatccaaaaaaaaaataaaaactttaaaaataaaaccccaagggcaaaataaaattcaaaaacccacccaattt

SEQ ID NO: 182248 - DNA, 430 bp, Arabidopsis thaliana columbia
agcccattgagaatagctaccgtcccagcagttttttcatatgtggcggctatatatcttacaccagcaggatcggttccgctcctttcatcagcacgctctgcctaagccatcaatagttggacaggcacgaccggaccaaacactcgctatctggtcgcgacaggacacaacatccgacaagaactaacgagcaagtcactgacttgtaaggctgcgattggtcatgaggtgcctgagctcgctgcgattgctggcgtgaatgcgttgctttacggacctaagaaacttactgagattgcaagagtatgggcaaaaccgacaagagctttcaacaggctgcaaaagagttcgtgtctgaacttaagacagaacccgaagagtcttgtgcagaatcatttcaggtagcaacgagtaacaaagaagtgag

SEQ ID NO: 182249 - DNA, 208 bp, Arabidopsis thaliana columbia
gacttttgttatgccttaaagctgattctagttcttataagaaccttcgtttctcgtgccggaaaaaaaaaaaaaagaggggggataaaaaaaaaaaaaataaaaaaaaaaaaatataatattatatattaaaattttacaaataaaaaaacaagtaatgataaaattatttattgtctttaactaaaaaagctagttgttttttttt

SEQ ID NO: 182250 - DNA, 278 bp, Arabidopsis thaliana columbia
gtcaatctctcactattagtttctcttacgatcgctacagatcatgactcataatgattgaatctctctctctattataaaacacgactcgtcgcactgtttcttaatcttccatgcgcatctacacggctctaattggtaatggatcagtttaacaacataccatggttattcagttcacgcaaggtgcaacgatgtaccattcggcagacactacggctcatcttgaactttaggcctacataaacagttcacgggcggttaccgactcacagctt

SEQ ID NO: 182251 - DNA, 378 bp, Arabidopsis thaliana columbia
  unsure (1)..(378): unsure at all n locations
cacgccgantccgctcgtacccaaagccaaacacgcnntcgtaagtgccactcggagtgtgaaacgactccaagnggaagcaaccttgcgtacgtgaaggcgtgcgtcnngtaaatctgcaaaccacactactgnngtggatgtcgaagaaactcacaaatcgttacccgtcgctgtgaacctgtgtgctttctcctgtgcaatatcccgtaaggtacccangnnaagagtacctggagtgttgcttatttctaggaaacttgcgcatgttcaagaaggctatgtaccgtgaagatttgctcaagaatttcaagaacttgatttgcgtttcacagagccatgcatgtcttaagctctccaggaagactgcagaagcat

SEQ ID NO: 182252 - DNA, 87 bp, Arabidopsis thaliana columbia
aaaaaaaaaaaaaaaaaaaataaaacaaaatttttttaaaaaaaaaggacaccccatttaggagggaaaaacattagctagggggaa

SEQ ID NO: 182253 - DNA, 218 bp, Arabidopsis thaliana columbia
taaaaaaaaaaaaataaaaaaaaaaaaaaaaattttttattaaaaaagaaaacaaaaaaaaaagtgaggtaataaaaaaaaaaggggggggggtttaaatatatcaaagattgcatacttatgtttggggatctagaattgctttctattgtgggtgccggccacagattttttttttatttgcttcattttaataaattgggaattctttttaagtt

SEQ ID NO: 182254 - DNA, 331 bp, Arabidopsis thaliana columbia
cgttagaaacacaaataaaagtgtaattacttttatgtttaacaaaaaagggttatgctaaatcagggatgctgatcttcttactagcattggtcatcacatattgagccacggccatggacatgtccgttgattcctccaacgataaccaccacgtgaccggccgtcccggccgcccgtagggaaatttcgacgctgaaaccaccttgatggacttgtaaggactggtcaacccctgcaaactatacgactacgttgccgagaaggaacggcgtgtaactatttttgaagacaacctccgttttatcactaaccggggcgctgagaattt

SEQ ID NO: 182255 - DNA, 211 bp, Arabidopsis thaliana columbia
caccgtggacggtactaaagtacaaagtggtaaaaacccgttgtaaagaaaaaaacaagagaggtcaaaacaaactacaaaaatgtaagaaaaaaaaaaagcgaatatatggttactgttatatatttttaatttttttaccttgaagaagtaaaataaaaaaaaatatataaaaaaaaggataatttaggataatattttttatttttta

SEQ ID NO: 182256 - DNA, 313 bp, Arabidopsis thaliana columbia
taataacagaacgtagtgtttccttggataggttgcttcgctaaggtatctgctgattcaccgaagatctcagcttcttctgcaataatggcaatgggtttcgatttcaatgagatgaacaaaacaaagaagactttaattggacttggcttgggacagatcctctcacttctatgtacttctaatgccttcacatcctctgagctcgccagaaaaggaataaatgctccaacgtcacaaacgttcctcagttatacattactggcagtcgtctatggaggtatcatgctctatcggagacccaacaattaag

SEQ ID NO: 182257 - DNA, 398 bp, Arabidopsis thaliana columbia
cccacgcgtccgaaactttggagccgtaaaccagacgtcaaaaccgggaaatcagaatttccggttaccagattcctccgtacacaaaatggttaacatcaagacaacaaccgtcggtcccggaatcggcggcggcattggctgcggcgctggaatcggcattggtctctccggcgggctcggaataggtgcctctgaaggacttgaccattctaacgtggttcttggattcggtattggttgtggtatcgggttcgggtttggatacggatttggagttggcggcgggtacagtttcgatgacatcaaagagagatttgtcctatgaaaaaaagctccggttcataatttcgggtcgggtttgggtaaaagattttttaaagcattatgtttaattt

SEQ ID NO: 182258 - DNA, 82 bp, Arabidopsis thaliana columbia
accaccactaagcaaaaaggaaaggctcaggcctggggggccattggcttaaccattaacgggctcaggcagggttttaacc

SEQ ID NO: 182259 - DNA, 90 bp, Arabidopsis thaliana columbia
tataacaaaagaaatatttattttctgtgttggttgaatccattacagagggattttggagtggttttattttaatgagattgaacaaat

SEQ ID NO: 182260 - DNA, 404 bp, Arabidopsis thaliana columbia
ccccccaaacaagtacttcaagaagattggtgaacacactgagaaagttaaaagagaaaagatgaagagtgactcaatcgccgttgatgtccctgcagagtctagctcagtcatcaaaggcaaagctcctctcctcggtttagccagagaccacactggctctggaggttacaagagaggcctttccattttcgatttccttctccgtttagctgccattggtagctgccttagctgctgctgccacattgggaactagtgtcgagtcacttcctttcttcacttaatttttgcagttctattcttagttcattgttctttcaactactcagttctttttcgttgtctttgtttatcttttattttattctttcttctttttataacttttttattatactatt

SEQ ID NO: 182261 - DNA, 233 bp, Arabidopsis thaliana columbia
gcggacgcgtgggcaaaaataaaaaaaacatgacagaaaataaaagatttgagaataactaagaaaaggtgcactatgatgactacattgctcagtaaggtcttggccaccaaaatcttgcagctctgtcaggcctgcagtgtagccatgagacgcaggaaagggcttgggtcaaaggtgcttatcggtataacaaattgtaatgaacgtacgccctgtgtgttcggggagat

SEQ ID NO: 182262 - DNA, 229 bp, Arabidopsis thaliana columbia
  unsure (1)..(229): unsure at all n locations
attgcctgtggataatataaaccgaagaatctgctttttgaataatcaattctatggctacaatttttgcagtaataataaatctttagctctttaacacanaaaaaaaaaaaaaaaaaaaaaaaaaaaaaaaaaaaaaaaaaaaaaaaaaaaaaaaaaaaaaaaaaaaaaaaagggngggaattttaaaggataaaagttataagaattataatttgtaaggggtttt

SEQ ID NO: 182263 - DNA, 73 bp, Arabidopsis thaliana columbia
atctattatctaactaacagcgggatagagcttaagcttaaatggctcgatctttcgctaatgctggggtctg

SEQ ID NO: 182264 - DNA, 360 bp, Arabidopsis thaliana columbia
aaaaaaaaaaaaaacgaactgagaagcgaagaagaaaatggcggcagcggccatggccgttcatctcccgaaacattcttcgtttcttccgaaacccaaacttccattggataaaaaaaccaactttctcggtgggtcatttaatttaggtcgacccatgtccgtaaaccgggaatttaacagtccggtgatggtctccgcttcttcgacgagcaagaccgtccttaccgatgacgtagacggcgatcaaagtaaacgcttttatattaacttcactggctttccttttcctcttggtcctttccttaaccggcgcaccatcagaaccgaggcggttaaaggttgcatatggatgtttga

SEQ ID NO: 182265 - DNA, 156 bp, Arabidopsis thaliana columbia
cgataagccacttggctttcataacacagtctctagctaagattgctattgctggctacggtgaggatgatgtgtatttgcacacgtcttcattagttcatatcggcggtctgtcatcagctatggccatgctaatggttggagcttgccatgatc

SEQ ID NO: 182266 - DNA, 243 bp, Arabidopsis thaliana columbia
  unsure (1)..(243): unsure at all n locations
ggaatcgatccagattccagttacaacgtnttgcttaaaaaaactcctccatttaaacaggggcacgacctattggccataaaagggggtggggcccagaccggatcgcctattggccgccaagttaaacataacaatcgccgatacagatctcccgtcgcagttgcatagagcgaacatagggataagacattgcgacatatactttcaattgggtgggcacatagaaaatggcgggggtca

SEQ ID NO: 182267 - DNA, 330 bp, Arabidopsis thaliana columbia
atgcatcctcaggacaatctgtactggaccatgaataccaatgcatacaagtttgggttttcaggatcagataatgcttctttctatggttcatatgacatgaacgatcatttatcgaggatgtccatagggagaacaaattgggactatcatcccatggtgaacgttgctgatgatcctgaaaacacagatgcacgttccgtacaaaccggagacacagacgagcactctgtagctgaagaaagcattgcaaatgagcatgatcccgacagtccttaggtgttccggcaagatgacattgatcctgatccaatgacctatgacgaatta

SEQ ID NO: 182268 - DNA, 311 bp, Arabidopsis thaliana columbia
ggttggtggttgctgaggcggctcagaaactgttgctacctcttatttcagatggtggtgaaattcatgaggaagagattgaaaagtggagtatactttcaagaagctctcttgatagtgcaagcacgagttttacgattagctccacttctaactccgtgaactatgcgaatagctctgcaaatagtgttgctggtgggattagtcttagtgctgttgatactgacgtagtaggtggtgttccgaatcgatttcttggaataacacctgcttacttatcctatgttcagcttcaaaatactatttccatg

SEQ ID NO: 182269 - DNA, 419 bp, Arabidopsis thaliana columbia
  unsure (1)..(419): unsure at all n locations
cgcaaaactgaagaaatctcgtttcatccttcataacgacctctcaagtgaaattgtgatcatagattcatctctgcgatttattaggctttctatgaacatgagaagagtgtttggaggtgtatctacagatttgtttccgtcgcgaagtatgtaccggccgctgcagtctgggggaaacttggttatgttgctcaaaggatgcatatcgcttttgtttgatcaacctgtagtgacttctttctnttttactctcttttttgtaccactttctatctctcttctttttttcttccgttactttctttattaatatcctcagtttgtttcttcctcttcttttttttctttttactattcttttttccctttattattttactttatttatcttcatttcttttctgcttttccctctc

SEQ ID NO: 182270 - DNA, 63 bp, Arabidopsis thaliana columbia
gttcacatccaacgaattctgatcttttttatctggtcagagaggatgttgcgggggggttta

SEQ ID NO: 182271 - DNA, 114 bp, Arabidopsis thaliana columbia
gacgaagaagaagaggagcagctactaccatggtgctcaagacggagctttgtcgtttgagtggacagaatatttacccaggaagaggaattaagcttatccgatctgattctc

SEQ ID NO: 182272 - DNA, 54 bp, Arabidopsis thaliana columbia
  unsure (1)..(54): unsure at all n locations
cacgtnnngtccgcgccagtcatcgcagaatcctgggcgataagtannatctca

SEQ ID NO: 182273 - DNA, 263 bp, Arabidopsis thaliana columbia
  unsure (1)..(263): unsure at all n locations
tcagtccagattttatagaagagttccctcatagagtttagcctacgtgtaatgtcaanntctcaactnngatcatgttacgcgatggaaaacttgaatgcatctttgacgacaagttnnttgtttctttttctttagtnntttccttttttcatcctcaatanntttgttgnnattcatttnncccatattaggttagctttgattanttttgttttagtaattttctttatannatttggttaccgnnattgattcatatg

SEQ ID NO: 182274 - DNA, 275 bp, Arabidopsis thaliana columbia
gaaaaacaaaaaaacagttacgagacataatctctctttttcctcctttgtctcttcttctcagtcttgtttgttatcgatcaaaacatgcataaatccaaaagaaacccgtcattctcctccactctcctcgatgaaatctacaattccatcaatcctaacacccaaaaaacacaaccttatgtcggctctgttaacactactaccaaaaaacagagcattgtgacaagatcggttcctgaccggaaaatccaccgtgatcgtttcttcggctc

SEQ ID NO: 182275 - DNA, 419 bp, Arabidopsis thaliana columbia
gaagagatatatgttattgattccaagacaaagtctatcaccagagccagagttctggtgacagttccgggaggaagaaaaagggataggaaggatgacttgcttgtgatacgagataatggaacctcctttaagatcatacacgtgggtgaaagagatgacccaacaacggtaatagaaagagaagagtggaccaagactagagaagacatggagaaacatctcaggaagctacgagacttcagtgtctcaaattggttctagaagaactcgagagacaccaaacgtcaagtctgcataactttcttcctgagatggaaaacgagagcatttgatctaaatcgatgatatggtggagggcatttctattttagtttctttattttctgtctttacatttaattttgatttcgttattt

SEQ ID NO: 182276 - DNA, 147 bp, Arabidopsis thaliana columbia
cgcagctgcttcacgctaggcaagctttctattctctttaaaaaaactctttaaaaggacggggttcaccacactatcgtgtgggtccataaagtttctttttttttcttatatcctcattcattcactaacaatgtgttttttctt

SEQ ID NO: 182277 - DNA, 264 bp, Arabidopsis thaliana columbia
ggttcttggactccttggtccattgaaatgtttcaaaaggattgaatctgatctgtgggaaaaaggagagcaaaaaccagattagggttttaggtattcaagatttttttaaagaaaacatagaaccggacaaccatcaacatcatagttaaggcgagtagaacatcataagccttctttgaaggacggtaccagatcatctctggcagaatgttaccgacttggtttgttttgtttctcatttcttcagagcttttacatgaa

SEQ ID NO: 182278 - DNA, 242 bp, Arabidopsis thaliana columbia
  unsure (1)..(242): unsure at all n locations
aatggatcacgacaagccaattcaggatnnttttgntgttcttacttatggtggtgttgacttcaactttgagtgcattgttaatgttttcgttttttctgtttttttcctttttctttcttctttctttttaatttttattctcaattttttttaattagtttattcccttttatttactttatttatacttttactattttataattctatttcttaatattattaattgacttatttac

SEQ ID NO: 182279 - DNA, 60 bp, Arabidopsis thaliana columbia
atagattcgccgtggagactgacgacatttaattcttagacggagcgtgggagagatgcg

SEQ ID NO: 182280 - DNA, 374 bp, Arabidopsis thaliana columbia
aaaaaaaaaaaaaaaaaaaaaaaaaaaaattttttttaaaaaaaaaaaaaaaaaaaaaaaaaggggggaaaaaaaaatggggggggggggtaaaaaaaaacatattaagaaaagaataaaaaaaaataaaatgtaaaaaaattaaaaaaaataaataaaaaataatttggggggttaaataaaaaaaaattaaaacgggtaatgaataaaatttttaaataaaaaaaaaataaaaaaagggaaggtttaaaaaatggaaatataaaaaatgtgaataaaaaaaaaaaaatgagaataaaaaaaaaaattgtaaaaaaataatttggaaaaaataagaaaaaataagctcaataatgatatattaatttttttat

SEQ ID NO: 182281 - DNA, 81 bp, Arabidopsis thaliana columbia
  unsure (1)..(81): unsure at all n locations
ttnnaaaaaaaaaaaaccccaaaaaagtttaattggccgcttaaaaattggttttttcttcccttgttttgcccgaaaagg

SEQ ID NO: 182282 - DNA, 384 bp, Arabidopsis thaliana columbia
gtcagttcatagccgacctatatttcagggtatagattggcaggcactgtctcataatgattcaaagtacaatgagaatacagtctatcaaagactgatggaaaatggaaatggttcagttcaacctcgagcaatgaaaggcaatttaatttcgggtcaagctgatgaagagcatcttagattgcccgatgggagctctaaggcagcaaatatacttgagaaacaattgagtttccagaaaagtgttgatgttagatcagcatgtccaagaacgggctctcttgaaaatggttcaaagtttactgttgagaagaaaacggccaaagacttttacagtggtagtaattcgtggataactgggctggaagccggtgggcatgattt

SEQ ID NO: 182283 - DNA, 322 bp, Arabidopsis thaliana columbia
  unsure (1)..(322): unsure at all n locations
ctctgggaacgtgaattctcaaattccttcgagtcagagtacatatggtttgacagcacctaattcaactgccaaccatataacaaaaccacatataacacctgcagtaacaagctctacaacaaccagaccccaagagtcagcgcctgtgcacaatccccaagaatcatctgctactttcggttctcgtgtatcaaatgttccatccaatcaattggtgcccaaggatcccaaggaactggctgcatcaggaaacgggtttacctctgactcacttttcggagatgtctnttcagttacttncacgcagccaaaaacaaca

SEQ ID NO: 182284 - DNA, 102 bp, Arabidopsis thaliana columbia
attttgaagaatggtgagaatcaatgttttcaatgatcttattacaaagatatacaatgtagggatgattttaaatacgggggcggtataaaaatattcttt

SEQ ID NO: 182285 - DNA, 175 bp, Arabidopsis thaliana columbia
gtaaaggaaaaaaatggcctgtttaatcttcttttttttttttctgaaacaacacacaacttgggccgctccttttgagaagggcggctgggcaccaaaacccatttttcagttcctacaaattcatcactaccttactggtcccaaaggcttattactcactcatcgtatatct

SEQ ID NO: 182286 - DNA, 154 bp, Arabidopsis thaliana columbia
  unsure (1)..(154): unsure at all n locations
gcggtccacaatttctcctaacatcnggattattatgactcgtcgtctgttaagcgtaacgcttttttcttatggccgcgaacaaacataatgcggcgtgagagcgtgtacttcgtgtttggcgacctcactttcgtggacacgtnnggtaata

SEQ ID NO: 182287 - DNA, 82 bp, Arabidopsis thaliana columbia
  unsure (1)..(82): unsure at all n locations
gtactatctctcttttagatatatctctatcnctttgctctccatctttctcgggttaacacagcaggcacagactcacaga

SEQ ID NO: 182288 - DNA, 312 bp, Arabidopsis thaliana columbia
cggacgcgtgggacacaaagcaacaacatacattacaaaagcaaaagaagaaacaaacgcaagagttctcaagcaagctcaaacatggcactaatgaagaagagtctctctgctgctcttctctcatcaccacttctgatcatatgtcttatcgcattgctcgctgatccgttttcagtcggtgctcgccggttattggaggatcctcaactttacgaaccaaatttttcttctttatcctaattcttagattctctattctctcactgttcctttttaccttgtttctctttctctctcccttctttgttc

SEQ ID NO: 182289 - DNA, 126 bp, Arabidopsis thaliana columbia
atcaaacggcttattgcacagatggttgcaatgccctgagacaacgacatttatggcatctgagcctagctcatcacgatgggatgtgtaaaataggttactttgcattgaatacaaactaaaact

SEQ ID NO: 182290 - DNA, 205 bp, Arabidopsis thaliana columbia
caccgaccaaaacgacaccgtctctgtctcttcatccacttcttcctccgaccaaacaggcgttgtcgtcacgggtactttctatggtcaccgacgtggccacgttagcttctgcctccaagacgacactcgtccctcctctccacctcttctcctcctcgagctagccgttcccacggcggctctcgctcgagagatggaagag

SEQ ID NO: 182291 - DNA, 52 bp, Arabidopsis thaliana columbia
aaaaaaaaaaaaaaaaaaaaaaaaaaaaaaaaaaataaattaaaaaaaaaaa

SEQ ID NO: 182292 - DNA, 57 bp, Arabidopsis thaliana columbia
cagatgttggttttgagaattatgccgttagttttccgcaacgcgtacatacgctca

SEQ ID NO: 182293 - DNA, 79 bp, Arabidopsis thaliana columbia
tgtagttgttggcggaggttacattggtcttgatcttattgcagttttaaggatcaacaattgagatggggctatggtt

SEQ ID NO: 182294 - DNA, 192 bp, Arabidopsis thaliana columbia
gcgtccggaagtaatgttaagagttttaaccttgttggaatggggcgtagctctcttatgatgagagggagatgagaaacatcggatgcagggtgcttttaaagaattatgtgacaccgagtgttttatatttctttattattttattatttatttttattttatcaatatgtatattatttttaatttttt

SEQ ID NO: 182295 - DNA, 184 bp, Arabidopsis thaliana columbia
gtggaatgaaggaagaggagcggctatgaagtttaaggaaagtcaccggctttcttatgatgagagggagatgagaaacaacggattcagggtgggttcaaagttgaaagagacaccgaggttgtcgttggatagtagatccaattcctttaggagtccgagagcagattctgcgagatcgtgt

SEQ ID NO: 182296 - DNA, 189 bp, Arabidopsis thaliana columbia
ccggaatcaaccacagctggcttctcatcaacatgaattccctctatgccaagctttacctttggttgtacaagcccagcagggacacagaacaacgacataactgaaatagatggaaaagttcgagactcaagcccaaagaggttactgtctttaccagattctattttacaacttgtgaggcgtgat

SEQ ID NO: 182297 - DNA, 421 bp, Arabidopsis thaliana columbia
gaaaaagatcaaacctttttctttctttctttctcctgctctctgcaatttagaagaagatcgaagaatttgtttgttgtttatcttcttctataaaaacaaaccgtggggtctgttttcatttctggccttgcgattccgataaaactctcagcttcccattcaatccaatccaattccacttctcaaacatatatataattctatatttttgagagacagtttactttttctccttctctctctctctctctttctctttctctgtctctttggcttttctcctcctgttctcatggaagcttcacccaatgatcgacttcattttggcataatgggttttgtgtgtaagcattacaagaggtgaagtcacattcatatctctctgttattctcataattttctatttttctcattgtt

SEQ ID NO: 182298 - DNA, 453 bp, Arabidopsis thaliana columbia
aaaaaaaaaaaaaaaataaaataaaaaaaaaaaatatttttataaaaaaaaaaaaaaaaaaaaaaaaaaagaggaaataaataaaaaaaaaaaaagtaaaaaaaaaaaaataaaaaaaaaaaaaaaattaaaaataaaaataaaaatataaaaaaaaaaaaaaaaaatgtggggtcttttgggttttttttattttttcccctcttttctccccgaatatattctttttttttttttttttataaaaataaaataaatttcctcctttttcccaattttataactgtgtaaacccttttaactctcctttttatttctcttttatccctttttcctttttccccttttttgaatatttataaaatttctatatttctcttttttctatttttttatatttttttttattatttccttctttctcccctctttttttctttatttggtttgttt

SEQ ID NO: 182299 - DNA, 161 bp, Arabidopsis thaliana columbia
aaaaaaaaaaaaaaaaaaaataaaaaaaaaaaatattatttttttaaaaaaaaaaaaaaaaaaaaaaaaaagagggggcgcccgttttaggagggaccaagcttacatacgcgtgcatgcaaaaaaaatagtttttttttaggggggcctaaatttaatga

SEQ ID NO: 182300 - DNA, 245 bp, Arabidopsis thaliana columbia
caaagaaacgctcagattcgacagttctatatattaacaaacatcatctcaagctcttacctggtatctctgttttgatggatcagaagtcgggttttgcggtttataggccaagtggaaacctgtagagttgttcttctcatgggtctgaggtgcgacattcgttctggtcttctttagacaggaggaggtattttcttgaacagtgaagaatatttgttctttttgacatcttttcagttaaa

SEQ ID NO: 182301 - DNA, 263 bp, Arabidopsis thaliana columbia
ataacaatggaggttgagaagacagagaagtctttgcagaggatgatgagtctaagatcaggtacagtggatggaaagtcagggccttcatcattggaaatgagacatttgaaaaattggtgattgttggaatgtgtatattttcttgtcttaatttctaattaacatttatcattcatttcgtttttattttacctttgtccaacattgtgtccatatttttttttccagatttttaaagggaaatttttatcgttataatt

SEQ ID NO: 182302 - DNA, 415 bp, Arabidopsis thaliana columbia
caagaagccaaaataaaaccattgaagctagcatcagccgaagaagcggtcacattttccggcaaaacagacagatcgaccagtgaaagctcctatctcttcctgaggcattgtgatctcttgttaaaatggctagtactctgaggaacattcatgatcaaaatgttattgcttcagaagacactgtataccgctacttgtgtcccgtgaaaaagaccgggagcattatcgggaaaggcggcgagattgctaagcagataaggtctgaaactaattcaaacatgaggataatcgaggcttttcctggttgtgatgagtattttttaaccatgtatttttctttaatgcgtatatattatttttattattattattttattttattttttatttctcctatttttttttaattttt

SEQ ID NO: 182303 - DNA, 158 bp, Arabidopsis thaliana columbia
gcaagctagtttcgactctagtgctgtgttatgtgttatagtcagattgcaagcacttgctcgtgggagagagatcagactttgagacatcgtactaatacatcagagtgtctcacggattcattaatacctaatgattgattgccattattcgacat

SEQ ID NO: 182304 - DNA, 297 bp, Arabidopsis thaliana columbia
  unsure (1)..(297): unsure at all n locations
cggacgcgtgggggaaaaaaaaaacaaaggctttctcgcttaaaaaagttggccaacaaacagagccaatttaatgaaaatgtatggtcatgattgtaatttgagtgatatatatatatataatgtttgngtgcggttntnttattattttatatttttattagattatttttattttttatttatttgtttatttatattatgtttgtttattttttttcaatttaattgttttatttttatttattattatatttattttatttttttttagattcttatataaattatcatata

SEQ ID NO: 182305 - DNA, 129 bp, Arabidopsis thaliana columbia
  unsure (1)..(129): unsure at all n locations
tcgctgtctcgtgggcgaaaaaaaaaacataggcagtgncgctcaaaaaagtcggacaacaaacaagagcctatttaatgaaaacgcagggctcatgactgtcataagagtgctatatatacatataat

SEQ ID NO: 182306 - DNA, 73 bp, Arabidopsis thaliana columbia
cgactcgtgtgaatctctacacagcgcaaccgatttctcagtcgtttcgttactctctcgagagcagatctat

SEQ ID NO: 182307 - DNA, 289 bp, Arabidopsis thaliana columbia
aaagaaatagatccaaaggcctctctcctctctctcgtttttctcatatggttcttgatagtaatttgaaagaaagatgtcggggatgagcagaactcgaagcagcatcgccatgggaacaccatctttccttgagttgaagaaacaagcttcatttttcttcaaagagaagcttataacggcgcttttagctcccaccgatgttactcctttttaactaatgtctgttaatgcttcgattgttttatttattttatttaattaatcaatttaatatcacttcttttct

SEQ ID NO: 182308 - DNA, 226 bp, Arabidopsis thaliana columbia
aaaaaaaaaaaaaaaaaaaaaaaaaaaaaaaaatttttttaaaaaaaaaaaaaaaaaaaaaaaaaaaaggaaaaaaaaaaaaaaaaaaaaagaaaaaaaaaaaaaaaaaaaaaaaaaaaaaagggggggcccgtttaaaagaaccaaagtttacttccgcgggtttgggaggaaaaagtttttttatagggccaccaaaattaaattaattggccggggtttaaaa

SEQ ID NO: 182309 - DNA, 74 bp, Arabidopsis thaliana columbia
  unsure (1)..(74): unsure at all n locations
ctctagctctctaannagaaaattttagctgctctcttattctctcagatttagagttcatatannaccctagc

SEQ ID NO: 182310 - DNA, 290 bp, Arabidopsis thaliana columbia
gtagaaatggtcaggaggcaggtcacttgacattatatagcatggtagtttccttaaagagtcacccgataagcctctagcttccagttcaccataaacatcctcccgctcttcataacttacatcggaaatccttaactgccatgctatataatgtcaagtgaaatggtcaggaggcaggtcactcactgcacaatttgtctgcaggacatcaaaacaggggaaatcacacgaagcttaccgaaatgtgatcatacgtttcatctggtatgtgttgttaattggctcat

SEQ ID NO: 182311 - DNA, 121 bp, Arabidopsis thaliana columbia
atctaatcatgtccgtgggcatagcaggttgtgttttgcgtacacataacacacgctttctgagtaagcactggggacagaaaccatcggatgaaagaggcgttgggtgggatgggagctt

SEQ ID NO: 182312 - DNA, 67 bp, Arabidopsis thaliana columbia
agcttctacatggcgaatcttcccaccgttctcgtcaccggcgctagtggcagaacaggccagattg

SEQ ID NO: 182313 - DNA, 87 bp, Arabidopsis thaliana columbia
cgaaaacttgtcaatgattcaaacatcttggtaacccaaaatacagaactagtagtgcatctggatatctctctctcttgtttgcgc

SEQ ID NO: 182314 - DNA, 418 bp, Arabidopsis thaliana columbia
aaaaacgaagaaagaatgatcaagaacatctttctatagtcggaaactctcaggtctctgcggtgcgtctcaatcttgctcggatgggggacaatcctcctcttgaccaatgataccatcgatctcttcccttacttgtctctcccttatctccctcgatcttctctctccgtcatccctacctccacgccaatctcgagtcccaccaacgactcatcacctcctctggaatcaccggttaatcaaacccgagtcgatgatcatcctgatgatcaaggtttggaattggattgccttaaagatgacaaacaatggaacgtgagtttgaagatagattggaagagatgtgagagtccacattacataccgtgtttggataacacataagctattaagaaacttaactcctagagaaaca

SEQ ID NO: 182315 - DNA, 185 bp, Arabidopsis thaliana columbia
aaatttcgcacaagagtgaaacgcataactgtgggttgtttgctcgaacctcactggccggctcaacaatggttccgtgaaagcgctgcggaagtcagaaaaagcctccggttttagcggctctgtttaacgaggtatttggaagccgccggtgccaattgggaattatgctgactaggcaaaag

SEQ ID NO: 182316 - DNA, 217 bp, Arabidopsis thaliana columbia
  unsure (1)..(217): unsure at all n locations
ccaacattttttttttctcaatacgtgtcaattatcttctacacaacgactatctcctccccggcctttaccaaaaacgcggcgcgccttttcctcncataatattaattcctctcaagcntaccttttacaataatcaaaactattnccaatccaaagggtccatcaatcattcccatcttacggatcccacctaatcaagtactttgcttcattc

SEQ ID NO: 182317 - DNA, 307 bp, Arabidopsis thaliana columbia
tcagattatttccccatctagaagctctctctcgactctctcgtctgtttctatctttcgtgatgcgtcgctcttcatcaaagaagaaatcaggtcaatcaactgaatcagtcaccacggatctctttcgctcagcttcgagcaaggcctcgaataaagagatggatcgaattgatcacttatttaatcagtatgccaataaatcttccagcctgattgatcctgaaggaatagaggaactatgctccaatttggaagtggcacatactggtatcaaaatcttgatgcttgcttggaagaagaaagc

SEQ ID NO: 182318 - DNA, 73 bp, Arabidopsis thaliana columbia
acttgcgctatgggtaaagagaagtacgcactagcaatgggcaaactgagtcacgtctattctgttactcaca

SEQ ID NO: 182319 - DNA, 78 bp, Arabidopsis thaliana columbia
acctattttcctcagccatggccgtcgggaaaaccatgtgaatctctaagggtaggaagggaggaagggatatgctga

SEQ ID NO: 182320 - DNA, 111 bp, Arabidopsis thaliana columbia
atccatcacattctcctctttcatatctcaacgtaaaacacctaactaaagagatcaatatggctcggagtgatgaaggtcggcatgcatcggtccttggcttcgcatgat

SEQ ID NO: 182321 - DNA, 354 bp, Arabidopsis thaliana columbia
tacgagtggtgttgtaacgctgaccagtttgatcaaatgggtgagaggtatagaaaggagacttctttgactcgtaagcggtgctccagtataagataggaaggatgatgtagaagatgatgatttactcgtcatattatttttctatatctaataacggttctattttttttcttcctattaaacccttaaacaattacctttcatttccaattttcctaaacacctattcttttctcctcttatattttccctctctctaaagcgctatgataaaaaacctgaaagtgctagggcacagttgctcgatgaagatggtccagcttatgttcatctctttgttagcatcttacg

SEQ ID NO: 182322 - DNA, 57 bp, Arabidopsis thaliana columbia
aaaaaaaaaaaaaaaaaaaaaaaaaaaaaaaaatttataaaaaaaaaaaaaaaaaaa

SEQ ID NO: 182323 - DNA, 260 bp, Arabidopsis thaliana columbia
ataacaacaaaatacttgcgaacagttattttgttttttcctacaaaacccatctcatgctgagggtcatcacataagcagaggaggtgcatgcaaattttatcttcactatcgactttcccgattttcttaacctgattacctattaatattaatgacactaactctcttgtagatctcaactaagcctttaaacatttcctacatagaccagatcattcttatattctctacttaactacactatttttttatcaatc

SEQ ID NO: 182324 - DNA, 174 bp, Arabidopsis thaliana columbia
gaagaagtgagtgattgcaccaaagcatattcctatggaacatctcaaatgtttgttcaccatggttgctgtcggtgatggattgggagtgtttgctttcatgaattattttcgaaaagatctacaaatacattttatgcaaaactttggtgtaatgaaaaaaggagaaatttt

SEQ ID NO: 182325 - DNA, 116 bp, Arabidopsis thaliana columbia
attgaatgtaggatagaggctctttacatcatttttatatcaacaacacatctttcatagagagagagtgtgattctccttgattgacggattcttcttaatgttataagaagaac

SEQ ID NO: 182326 - DNA, 362 bp, Arabidopsis thaliana columbia
ctaaagccaaaagttctgtcagaaaccggagcttcggctccggaggagctcaaggattcacttgttgaataccataagatggacgcgtggaaatctcttagcaacttgttccttcaagacaaggcagataagataacgaaagaagacgagaagatcacaccggaaaagataccggttactgatgatctgaaaacagctttggaggaggaaaatactccgaccaaagaggcaaaatctccggcaacagagacaaagtattcggtaacagagaaaagagctccggctgacaagaagataacaccggaaatgatgccggttactgaagatctgaaaacagttttggaggaggaggcaaaaccttc

SEQ ID NO: 182327 - DNA, 171 bp, Arabidopsis thaliana columbia
aaaaaaaaaaaaaaaaaaaaaaaaaaaaaaaaaattatttaaaaaaaaaaaaaaaaaaaaaaaaaagaaaaaaaaaaaaaaaaaaggggggggccgttttaaaggacccaagcttacgtacccgtgcatgcaaacggggtggcccttttatagggccccctaatttcaatt

SEQ ID NO: 182328 - DNA, 373 bp, Arabidopsis thaliana columbia
  unsure (1)..(373): unsure at all n locations
ntcggaagatttcttgggagaaaataaggtggattgatggattagtctttaggaatggtggtggaggaggagaatagaagcatggaggaaggacttcttcagcatcaaaacgacagagatgatcgtcgtatcacacattgtctcatcctcagcactcttgtccctgtttgtagtgccttcagctacagatgtgccgatggaaatacttcaggcactgagactgctctcatgaatgatctttgacctttctatggcacaatattcagcttttgccccatttctgaatcttggacctgctaatctatccttcttaggacctcattctccactcattcctattctgttactgataatgatcatacactcctttttc

SEQ ID NO: 182329 - DNA, 275 bp, Arabidopsis thaliana columbia
gtctacgggactgcggttcccatcgcactttacaactccgtcgctttgggagaggagaaagatggaggatttgtagggttgaggatactctccgatgataccgttagggggaaagagcgtgactttgctcaccggagaatataataggagatgacatgagacataccgtcatgactcctggaaacaaaagtgctggcgttattgcctttgttgacgctgatacggatgctgtgtctaagaaatgcagggtgcacgtcgagaatgattgtggcaac

SEQ ID NO: 182330 - DNA, 219 bp, Arabidopsis thaliana columbia
tccggtcaccacgcgtcaaaacttgatctgcaatcacttccttcgaaatgcatcgagacgaaactgggacatgtgtcttactgggtgtagttacattgaatatgggaagatataaaatggtcgtggagataatgtcatcgatcacataagggcatgatacatactaatccgctggattaagtgtctatatatggtcatcaacatgtgaagttcaaccat

SEQ ID NO: 182331 - DNA, 430 bp, Arabidopsis thaliana columbia
aaaaaaaaaataaaaaaaaataaaaaaaatttttttaaaaaaaaaaaaaaaaaaaaaaaaaaaagaaatataaaaaatataagggggggaaaaaaaaaaaaaaaaaaatctttaaaaaattttaaaaaaaaaaaaaaaaaaaatataaaaaaaaaaaaaaaattgtgggggcctgtttgggggttttttttttttcccccttttcctttcccaggtttagttttttttttttttttctcttggaaccctttaattccctttttttttccctcgttttacctggttaaaccctttaaaccccccattttcccccttttttttcttttcccctttttcccttttttttatttgagaattagcccaaaattccctccctttctccctttttccaattttttttgttttttttggccccttttcttcccccttt

SEQ ID NO: 182332 - DNA, 462 bp, Arabidopsis thaliana columbia
aagaaaaacagaagcttgaagctattctgcaacaatgcaaagagcagagtttgaaaatgtccaaagagctagaatcaaggagaggattagtacaacgttgcagctctcagaaaaatattgagatggaagaaaatgatagattaaatagtgaggtgtcagagttggctgacaaaaatacaattgcagtctcttcaggcgactcggtgaacaacgggcaaagggaagttgcttgtattgatcctacagtgcggatcatcagtcccaggtcgataattcagggtactattcaatcgagcagtgtaaatggaaacagagaccaattaccttccggagaagcaatggcgctggacaaacgtgaagaaagcctagctttgatcaatgataaattcagggcagagactttaaagtctagcatggatcaccctaacgatgagctagaacggatgaagaatgagaatctac

SEQ ID NO: 182333 - DNA, 120 bp, Arabidopsis thaliana columbia
  unsure (1)..(120): unsure at all n locations
tccaagacccaaccatcgtatgtagggggctagtcgattgtattgagtcccttcaactttaccgagtttcacatcctcggcctgactctccttatantttttcttcccccactctaaatt

SEQ ID NO: 182334 - DNA, 116 bp, Arabidopsis thaliana columbia
ctttctttgagagtgaaagaggtttttttatttgtttgtgtcttcctgggaatcgagattctggatcttaatcaatatgtgggtgaattgggagatctgggatttgtgagatcttt

SEQ ID NO: 182335 - DNA, 308 bp, Arabidopsis thaliana columbia
gcctcacgcatctctctgtttctgtgattctgtttctgtctttgtggttatggcagagacttggacgcttctcttctctgcggggctcctctcacctcacgatctctccttttcgccaatctcatccctccgccgctcgattctcatctcttctttcccgcgttcggccatcacgattcgcggttaaagcatcacattacggtaacttctccgatgacgatgctttcaacttcttcccttggtccgatgcaaacaacgagattgaatgggttcctgaagaaaggattacacttttcacatctgatggc

SEQ ID NO: 182336 - DNA, 312 bp, Arabidopsis thaliana columbia
cacgaagcaaccacagcaaggcaatagcgccacccaccgctcgcatccacagctgctgattcgtaggaggagcaggccagggagggattcgttgattttatttggcagggaaggagatccgagaggaagaaggggaatatagatcgatggggaagtacgtggagctgctcgacatgggggtgcgcatcgccgcgcggttccactcccactgcccgcagacggcgaggatgtactaccacccgtcgccgtcctcctcctcgtcgccgtcttcctccgccgtcggcggttcggacgacggcggcggtggttttt

SEQ ID NO: 182337 - DNA, 129 bp, Arabidopsis thaliana columbia
tctcgtactcgtggggtatctaggaccgttgttttttaaacttacgtgctttcattttcattgggagattcttacaatgcgtggggagagatctatatttttattatacatttactattaaaatacact

SEQ ID NO: 182338 - DNA, 317 bp, Arabidopsis thaliana columbia
tctatctaaaattccttattcttcgcactctaattttttctcacgaactaacaactaatacgaatcgggattatcttgggggtagaggcggttttgagttccgtaatacctaatacccacgccctaaaatcaatcgtgaactgatgattgcagagccgtctcaggtttctttaacgctaacttcattatctctgccgactggaaaccactagttagcccaccgcaatgcccacgctattcccgggcaactgggtctgcttattgaaaagctaccggtattgataaacggattgtgacctctagaggaaatcaaatcg

SEQ ID NO: 182339 - DNA, 52 bp, Arabidopsis thaliana columbia
ataaattatgaatctcgaaaccctttttcttttttctacacaaaacccatca

SEQ ID NO: 182340 - DNA, 217 bp, Arabidopsis thaliana columbia
  unsure (1)..(217): unsure at all n locations
ntcgagcccagcgnnngtccgcccaagtaaggacccaaaaacaccaagtagaggagaaaggagtagtagaatatggtncgacgaccaaccaaccagtaagtaagcggaagaccattctatcgacccagatgggaggaangtatcaganatgcagtcttttcagaatcttttcgacattcaangnnaagttggtcacccaaggagtcntttcttacag

SEQ ID NO: 182341 - DNA, 163 bp, Arabidopsis thaliana columbia
atataaaaactcggtgggatgggtttggaaacccctacccaagacctgcctccgggatcaatattatagggagtccgggtcaaactacttaacgctcactaaatagcactaggaagtgaactgtcgggagaggatgccaaatatacgttaaagacttacattt

SEQ ID NO: 182342 - DNA, 377 bp, Arabidopsis thaliana columbia
  unsure (1)..(377): unsure at all n locations
acggggcgacccacacanacgaaaagagagaaangnntaacttttacatttcgtttattacaccccgccactccctcacggttggtttattttcaagaaagggcgagacccacacaaaaacactaatattaatcaatcttcaattttcatatccctcaacttctacaaatttttaacgacttctattactttcctcattatcacacaatttaccaaaataccctcaccatctttctttttacaacctcatcaaatatatataatccacttacaatcattcatatcaatctatctttacaacaaacatcaaactccatcctttctaccctttattattcatcacacctctctatctattaaaatatttattcacattc

SEQ ID NO: 182343 - DNA, 321 bp, Arabidopsis thaliana columbia
agcatggatagactcgcggtgctaactttctctgtctataggaactacacctttacgcggtgtcgtactgaattctatatttcagacgcataataatcgactcccggagagggaagcgtgaacaaggagaggatgttgccatgactatagagttcatgttccgggcggaatcataagccgtgcatggcgataacccttatcgagtctttaccgagctaaatacccatggcgacactctttgctttggtggttgacaacaaggaagatggctaaacgtgcagattggtgatcgtaacatcgacgcacgcacaacatgtattg

SEQ ID NO: 182344 - DNA, 477 bp, Arabidopsis thaliana columbia
agctccactacattctatgataaccatttttcgtagtcttagtactttggtcttaggtgcataccgaagacaccatgatgagcaatgatagtcgcgcggatgagagtgataaagatcgcttgataggctgatttattgatagaacgatagacacgagttcatgtcttagtttccttcgtgcgtagagcactctttctactttatctagatttagcgtctctcagatcgagtcgcagggaagagtcaaatgctccacttgttgcaagagcaatacatggtggattagttatacaacaaattcttcaattccatctatgattcttttatgtacggacgcttgcagctcaacattggccttgctcgaactccacatatttgatggaatatctggaatttttttgcttgcaatatcaatgaaactgtcataaacgaaactgctgatgccttggtttcatcatatctgtctgttttatgtta

SEQ ID NO: 182345 - DNA, 441 bp, Arabidopsis thaliana columbia
aattgaagaggaagaaggaggaagctgaaagggatctgttagggtgacgcagccggtgctgttgggtgcgacatcttggatagcggtccgggatcaaaatctgtcgaattggagacgcttgccattgcacacgatgggcgatttcaacctcgctctagtgattgtcgcgatcgttgtttgcgtcatcgtattcatgtctagcatcgatcttctcgtcaactatcagcattcagatgatgcaaaccatgcttatttccccatatgcgtcgttgtttttggcctttctattgctatgatcttgattctcatgtaaccggctgatgtggccaatcggcatgcttgtcgacatgctatatacaatggagcttgcaatctcaccttgcccatgaaggatctttggcttgtttttatttcggggacgctattctcggtgtcttggca

SEQ ID NO: 182346 - DNA, 391 bp, Arabidopsis thaliana columbia
acatttagttgagagagagcgagactcttttccttctaaaaactctctttctttcacacaaataaagcatgagggacctgaaggaatatgattacagtgcacttttgctcaaccttaccacctccagcctcaacaaggcccagaggcgttggcgttttgcctacgctgccatctactctatgagggctatgctctctcttgttaaggagatagttcccgcaaggattgatcccaaaacctcagatgcctctctctctctctcctacacagccctcgagtccggtgagggagcaaagatcaactctatgcctctctcttacgttcctgccattgatcaagaacaacttgtggagatcatgaatggtaaggacttactcggtcattcaaactc

SEQ ID NO: 182347 - DNA, 71 bp, Arabidopsis thaliana columbia
taacaacaaccatacactcatttctccacatctttatatattaaaacacatcaactttattcaagatctca

SEQ ID NO: 182348 - DNA, 401 bp, Arabidopsis thaliana columbia
tatctacttcgcaactaaaactcaaaacaatcaaagaaaaaccctaaaagaaaatctctatatcgaagatgggagttttgaagagaggagtatcgagcagcagaggacttggtggtgttcttagagagcaaagagctaagctttacatcatcaaacgatgtgttgttatgctcctatgttggcaagattgatcttggttgattcaagtgttgatactttgatgcttaaccggatcaaagcgacgattgcaacttgcaagaagatacgaaggacgataccggcttgggtttcgcttgcaagaggatttgattgaggatactggtctgagttttggaagtagattactctacttgcttctctgttgtgttagttcttttcttttattgtggttttttcttttt

SEQ ID NO: 182349 - DNA, 172 bp, Arabidopsis thaliana columbia
tcttcttcttcttcttcctctctgtatttttctcattctcttcgatttgtttgcttgctagtgactactgagtgagagagaaaagagacaattactcctttcattaaatcacacacatcgaccgctgatctacttacttgttcttaatttccactccccttattctccttcc

SEQ ID NO: 182350 - DNA, 316 bp, Arabidopsis thaliana columbia
aaaaaaaaaaataaaaaaaaaaaaaaaaaaaatttttaaattttaaaaaaaaaaataaaataaaaaaaaaaaatcaaaaatactaatggccttccccctttttttcctatcttctccccctctctcttttctttatggctcccaatttttacttccttatcctttttttttctccctctttcctcatattcctctcttttaacccctttttttccttttctttttattcctcctttccccttcccctttatttcctttttgtcccctccattctcccctttcctatttctttcttttcctttattcttttcctttt

SEQ ID NO: 182351 - DNA, 131 bp, Arabidopsis thaliana columbia
  unsure (1)..(131): unsure at all n locations
cggaaaanccaagaaaganngacnancanacnggagncnnngcaagcaaaannaccccggcaagggaggggaaaccagnncngagggagcggaaagangccaaaaccaaggaaccnaaggaaaccanggag

SEQ ID NO: 182352 - DNA, 198 bp, Arabidopsis thaliana columbia
  unsure (1)..(198): unsure at all n locations
aaaacaccnccnncnnnggaacaanncngncaancnccagcggcggcaaaaccaacactggcaaangcaccaactgcggaaccgcganggngnangacncgggnncnaggnngancacanngccagaaggaagccaagcnnaaacccngngagcnagaggaagangggaaaagaagaangggnnnngncagaagcaaa

SEQ ID NO: 182353 - DNA, 280 bp, Arabidopsis thaliana columbia
  unsure (1)..(280): unsure at all n locations
aaaaaaaangggcgncgaggganagagacgaagaagaagaagaaaaggccgngccncaaccncgccaccaacgnnaaccgggacggcgncganacancnnccanncncncggaagcnaccnccaccgncgcgaaaancaacggcaagccngagaaccangagaggangggcnngaaaggcncagngccnangncannnggcgggaccgagganccngcagcnnagggggaaagagaagcaaaacggggccccaaggcggangngaacaagaagcnaagcg

SEQ ID NO: 182354 - DNA, 164 bp, Arabidopsis thaliana columbia
  unsure (1)..(164): unsure at all n locations
ggngaanganccnaanccgnnnagcnnnnaaaaaanaaagaagacanannnancaacnngancaacnggagcaagaagcagcagagaggggccncggccaagaacnagagnnnngagaanggcganggnancaggaagacgancnacncnaaaccccgacgcac

SEQ ID NO: 182355 - DNA, 239 bp, Arabidopsis thaliana columbia
  unsure (1)..(239): unsure at all n locations
gagagagagaagcgcgangaacacaagngnncgagctgnncnnncctccangaaagcnccnncagagcangacactacncagcagcaagaagagaagaagaagaaggagncncaaggcaanggagcngnngcnaanncaggaaaancncnggnnaaacgccgacgagcnaacaaagaaaagaaaagggannngcnacaagangnnganaagcnnaagaggaagcngagacaggaggaga

SEQ ID NO: 182356 - DNA, 207 bp, Arabidopsis thaliana columbia
  unsure (1)..(207): unsure at all n locations
cgncngaaaaaagggggaccagnnnccgncgccgcnnncnncgannnnggacgccgccgcgggcggcgncnnccgcgcagcaggggaaggcacacaggnnaacngaaaganggggcgggggagaaccaagacggggaagaaancnnccgnnnngncancgagaagnaccacncncgcangncgcgggacgnccacacgaacaagaaa

SEQ ID NO: 182357 - DNA, 75 bp, Arabidopsis thaliana columbia
  unsure (1)..(75): unsure at all n locations
gacccacgcgnccggaaaaacagagnaaanaaagnaaggcgccgancgncgacggagaggangagangagaagag

SEQ ID NO: 182358 - DNA, 309 bp, Arabidopsis thaliana columbia
  unsure (1)..(309): unsure at all n locations
cggaaacacacacaaaaaaaaanggcancaaccccacnccncaaggcnncnccggngnnggacagagccgaanggggcaagggacagggcgnncncnnccgncagcncacnnccgcnncgggcgncccccgcaaccgngccaccnnccncaccgnccgagccgcnnccnccnacgccgangagcgngnnaagacagcgaaaacnanggcgnnncccggacgaggaagcnnggcgagggacgagacaaacgcgacnngcgggaaacgnnnnnnnncgagagggcnagagaacacngaggcaaancggcaa

SEQ ID NO: 182359 - DNA, 231 bp, Arabidopsis thaliana columbia
  unsure (1)..(231): unsure at all n locations
gaagagagagnacgaaagcagncaacnnnggaancggaggcaccagcgccaacaacaaggggggcggggcncgncaggagnngnngcncncgggcgncgagagccancaccaccgnccggnnnangagcaacgnaccggaggacacggnnnacngnggaccgaaaccgcagaacncgaancanagagngacnnngacccaagngagacagaagcancggaaaggggagccg

SEQ ID NO: 182360 - DNA, 187 bp, Arabidopsis thaliana columbia
  unsure (1)..(187): unsure at all n locations
ggagaaagcagcaaagaagaaaaanggcagcaacaaaggcaacaccancgacggggagaggccncggaggagcgggcgggaccaccaaacccnncncnncaaccnnagaaaaaccaacannaagcgccaagaacccnnngagacncgccagngcancgggaggaagagacacangcnnngagaggaa

SEQ ID NO: 182361 - DNA, 189 bp, Arabidopsis thaliana columbia
  unsure (1)..(189): unsure at all n locations
cnnccnnnngccgcggcncaaannggncaagccnnnagaaangaganancnccncgacaagggcgncnnagagancgngagaggaggcnggcagaganngagcacnncggngagccagagaanaagncacancccaagnnncncngncnnagcaaaannggaannccnangnncccaagggaagaacaa

SEQ ID NO: 182362 - DNA, 371 bp, Arabidopsis thaliana columbia
  unsure (1)..(371): unsure at all n locations
gaaaaaaccccnatannncctanccaaagaaagactagagagnggnagagaaanggagaanaaaacggaggaagaggnancaancancaaagnnncnncccnnacccgcancgaacncgacaacccngancnncancaancagcngngnnacncaagcaggcanggcncganaggggannnnncaaaggcanaaancanggnanaagngaggaacccaaggangaggcaggcgagcacagcaagaagnacggcgcacnncccccggaagagaagangaaagncnggagaaacgaaaagnancgaggcnaagcaccannccangaancccncnnagacccngaaaaccaagnccgaggggcccacaaagagg

SEQ ID NO: 182363 - DNA, 90 bp, Arabidopsis thaliana columbia
  unsure (1)..(90): unsure at all n locations
gcnggnacngcgggaggaggnaaaggnggcncggaagcngggcagggncagaccaanaggggaggaagaaaagagggggggggaggggcc

SEQ ID NO: 182364 - DNA, 231 bp, Arabidopsis thaliana columbia
  unsure (1)..(231): unsure at all n locations
cgaaaaccgaaaagaagaaaaanggaggagaaancgaagangncnatagcgnnagnggagaaganggaggccaaangnggaagagggcggggaganncngnanngnaagcnacaaaaancagcgagggggaggcannncaancgnngccggaaaaagcaacggaganannaaaanngaancaagccgcgaangggncaaccgancnannaannngaccagagaggaacgag

SEQ ID NO: 182365 - DNA, 132 bp, Arabidopsis thaliana columbia
  unsure (1)..(132): unsure at all n locations
cggnncggaanncccggggcgggccacgcgnccgaaaannnganannngaagcgaancaacaacaacagncgggnncgngaaaaaaaaagangggaggggcnaaacnngcgggcggggggagcgnggaagga

SEQ ID NO: 182366 - DNA, 210 bp, Arabidopsis thaliana columbia
  unsure (1)..(210): unsure at all n locations
ggcttcagngactctaggnncangganngnngttcaccaccacaancancancanccancngcaagccnaaccaaagccagagccagancnngnccnanaacncngactaaacccancnccnnncgancaaaacgcaccgnnncaacagcnncnncaancgnnncnncnnccgnggggacaaaagaagacaancnacgccaancngaacc

SEQ ID NO: 182367 - DNA, 166 bp, Arabidopsis thaliana columbia
  unsure (1)..(166): unsure at all n locations
acagaaccggccagcngagcnnanngccaaggnggnggacgagaaacgccgggcggggaanaagggnaccccngaagaagaangggagagggggcnngaaaaagnnccggnnnngnncaganagaaccaggggaaagangngnncgaagcaaggnacaaaaaggag

SEQ ID NO: 182368 - DNA, 245 bp, Arabidopsis thaliana columbia
  unsure (1)..(245): unsure at all n locations
gccgatccgcgcccagcgtcggcattccagagtgttgcatgcggtgaagaggaggggtatcagagggatgactctgctttgacggagctgaatgattaggaaagtcaatcagacgcaaagagcgaggtgcacggcgtgtgactgaggattgtctataaggtagcnaccaccataattgcagacactgtgaataaggaggtgctgtttctacctaaactcaaggcttaccataggagtgcagtaac

SEQ ID NO: 182369 - DNA, 147 bp, Arabidopsis thaliana columbia
  unsure (1)..(147): unsure at all n locations
acannnagnngagagagagcgagacncnnnnccnncnaaaaacacncnnncnnncacacaaaggaagcangagggaccgcagggaggangannacagngcacnnnngcacaaccggaccaccnccagccncaacaaggcccagnggc

SEQ ID NO: 182370 - DNA, 136 bp, Arabidopsis thaliana columbia
  unsure (1)..(136): unsure at all n locations
cgnaggaccaacaaccggagaggcgagaaggccggagnnnnccggagcgnaaaggacagaggcggaagcnagaggaaggagggggcgccgnagaagaacgnnngagcgcggccggcagcaccgacggaggccaagc

SEQ ID NO: 182371 - DNA, 93 bp, Arabidopsis thaliana columbia
  unsure (1)..(93): unsure at all n locations
aaaaaaaaaaaaaaaaaagagaagaaaaaaaaaaaggagagggggggtaataaataaaaaaaannaaaaaaaaaaaaaaaaaaaaaagggggg

SEQ ID NO: 182372 - DNA, 200 bp, Arabidopsis thaliana columbia
  unsure (1)..(200): unsure at all n locations
aaacaaccaanatnnnnggagnnnaaccctaagacatagacgaaanaagaaagaanccnacagagcgannnnnaaaggaaagagggngagncgaccgggncnacgaancnaggcnaacgcncaacgaannccacgaannnnaggcggnanaggaangggaatccnnncnacnncncaaggganaaggacagaccgagaag

SEQ ID NO: 182373 - DNA, 126 bp, Arabidopsis thaliana columbia
  unsure (1)..(126): unsure at all n locations
aaagccnngagagagagaacacagacganaccaacnnncancaancncgnngccgcagnanaggggggggcannccncggaggaggggggcnncngcggcggcgacanaaagcgacaagaanaaaa

SEQ ID NO: 182374 - DNA, 104 bp, Arabidopsis thaliana columbia
  unsure (1)..(104): unsure at all n locations
gctacccagncaggancnggaaaacncggaaaanggaagaaaaacnncgncnccaccnnaaagggggagaanccgnggaggggagggacnncnacaggngaccc

SEQ ID NO: 182375 - DNA, 127 bp, Arabidopsis thaliana columbia
  unsure (1)..(127): unsure at all n locations
gaagaacagagaaaaagggnnnnnnanngncngacccaaaggacccagnnncaanncagcggggggggggagaaanggagggaaagganncaaaannngnncanaaaaggggcacaganncngaaaa

SEQ ID NO: 182376 - DNA, 138 bp, Arabidopsis thaliana columbia
  unsure (1)..(138): unsure at all n locations
gaggaggagaaagcggcgcagagcgnggcggngaccgnggngactncgggcgnggattcggcggnggacgnggagggggccggggccgngancgnggnccangaggccgnggaagacgnggaggccgngccncggaag

SEQ ID NO: 182377 - DNA, 272 bp, Arabidopsis thaliana columbia
  unsure (1)..(272): unsure at all n locations
gatgcgacccgaaangggagaaaaaccgacaacggnnagccganggcgcgancgggnnnggcaaacacgcaancggnggncgggacggnaaaancnacgnggngacggacncgagggacaaagacgnggnnaacccnaaacccnnaacccaaagacacgcggngnnccangacgagccacnanggancancgacgcgcgngncagggncanaaaacgaaaagaagagcngannacgaacncgaagaagagnanagacggccgnggagcgagc

SEQ ID NO: 182378 - DNA, 192 bp, Arabidopsis thaliana columbia
  unsure (1)..(192): unsure at all n locations
agcagncagggcgcatccgaaggagaaaagggngagaancngccaccaggggncgnangcacagncgaggaaagggnannncagccncngcgnngccagacaagagancgncnccgagccggcncaagaccaccgcncaggagggggnngaancaancngcaaannngccaaaaaggganngaccccnnccc

SEQ ID NO: 182379 - DNA, 72 bp, Arabidopsis thaliana columbia
  unsure (1)..(72): unsure at all n locations
gngaaagaaagaccagagagaanncnccnganccacacaacaacaacaacacagagancccaaggccggaag

SEQ ID NO: 182380 - DNA, 174 bp, Arabidopsis thaliana columbia
  unsure (1)..(174): unsure at all n locations
ctnagncagctccagagcagaggnnncanacgancnngncnnggaagcannagnaanagcgccaaccagganggaacacaggggcnggagncacaacagcgagcggggacggnagaagcagaacnngcanngcnacnnagaannaggcacaagagcggaaaggcnggaggccag

SEQ ID NO: 182381 - DNA, 152 bp, Arabidopsis thaliana columbia
taaaaatcattcgtgttcctgtagtgagattaaggtttggagaagtagcgggagcgagttcgggtgttgttttaccgggggggggggcggaagaacgagaatagaacctacttgaagcaccaatggagtttgaaagtggaggagcctttgtt

SEQ ID NO: 182382 - DNA, 80 bp, Arabidopsis thaliana columbia
  unsure (1)..(80): unsure at all n locations
aaaaaaaanananccnctnccttncnctctnaaaaacaaaagcaccgctncaannccgccggcggggngagccaccacgg

SEQ ID NO: 182383 - DNA, 252 bp, Arabidopsis thaliana columbia
  unsure (1)..(252): unsure at all n locations
cccacgcgnccgnccatgncgnnnnngncgnnnatggnngagactaggacggnatcngancgnctgcgagcccccaactgncgggcgggagnaaggaaaacanccnnggcaaaggctttcgcagnngnnncgcnnncataaanccaaggagagagaggagngngaacccaagaaaanaaaaaaaggganagnnaagggganncggcnnanagaggaacaaaacaagcnccggcgganggggcgcggcggcgc

SEQ ID NO: 182384 - DNA, 247 bp, Arabidopsis thaliana columbia
  unsure (1)..(247): unsure at all n locations
aacactngnncnnnaaggcaaaaaggcncgagccacagagancngagnnncnncnncnncgagagcggancgccgaancgcagaggcgggcaacgaagcagaanggagaccggncgaggcacaacngagncngnaaacgagggacacccaaacaagcagngngaccagancncngangcagnccncgangccagccnngaacannacccngacagcaaaggagcgggggagacangcaccaagacca

SEQ ID NO: 182385 - DNA, 183 bp, Arabidopsis thaliana columbia
  unsure (1)..(183): unsure at all n locations
tttgtatcgcttgtttttgatgaaggggnttttaaagagggggggggggccccccaaaaaaannncggggacttagaaaacaaaaaaaaaaaacaaagagggggccccctttctagaagacccaagctnccggccgcgtgcttgcgacgttatagcttttctanngngccccaaaatacaatt

SEQ ID NO: 182386 - DNA, 319 bp, Arabidopsis thaliana columbia
  unsure (1)..(319): unsure at all n locations
cggacgcgtgggggaaaaaaaaaacaaaggcatattcgcttaaaaaagttggccaacaaacaaagccaatttaatgaaaatgtattctcatgattgtaatttgagtgatatatatatatataatgtttgtgtgtggtttttatattnattttatgaacatttaaatttttttatattatatatattttaaaatattttaattatataatattgggcctttgttttaaaatgtttaattgttcctcacggttcaataaatgtagaatctttttttttgggtaaccttaatttattttacttaattttttttttggagggg

SEQ ID NO: 182387 - DNA, 271 bp, Arabidopsis thaliana columbia
gtggagactgtgaaacgaagaggtagacctccgagtggaagagctgctgggagggagagaaagcctatagtagtctcagctccagcttcagtgttcccgtatgttgctaatggtggtgttagacgccgagggagaccaaagagagttgacgctggtggtgcttcctctgttgctccaccaccaccaccaccaactaacgtagagagtggaggagaggaggttgcacccatgaaacttggaagaggactgcctactaagatcgaatgtgtta

SEQ ID NO: 182388 - DNA, 138 bp, Arabidopsis thaliana columbia
  unsure (1)..(138): unsure at all n locations
nnccgcgtctcctggaanaaccattagggagccctctcaggatccttatagaaaacccctaaatcnataaagtcgagagtcgagtgtgcgtctcttcgctcgcgcgtggccatcgangacttagctcatgatccccat

SEQ ID NO: 182389 - DNA, 181 bp, Arabidopsis thaliana columbia
ccgtccgattcccgtcacccacctccgccgtaccgtgagctagaaggcttgtgtgcttatagaccacgtgtcccatccggagtattttaaactcaccggggggaaatcacctctctccttactattactcaaatcttttctcctttatacctcttatttcctctctcttttcttctcattt

SEQ ID NO: 182390 - DNA, 206 bp, Arabidopsis thaliana columbia
tgcttaccttgagttttcagaaggcaaagagaatgcgttggaactaaatggaagtgatatgggaggaggattctatcttgtagtcgatgagcctagaccgagaggagatagcagtggtggtggtggatttgtaaggcccactggtagtgtcacttagtacgagtggctgatattcctattagtgttaaaaaaacttatttccctaa

SEQ ID NO: 182391 - DNA, 391 bp, Arabidopsis thaliana columbia
agagaatccagcaacgtttctttatttcctttgtgtttttttttcttcataatctctctctttttatttattcataatttttactgtctccatttcttcattactcttctttttattttccggagatttttctctttgcctttgttatttgctgcttttgctgcagctacagtgtaagtttgattttctgggttccttcaaactccaaaatctcgcgtcgctttttgcttcagaatcgatttgttcttgttacttcgatctgttgttctttttaactctgtgcatgattcaatttcgtgttcgtaacctgtgttttgctgcttgtttaattcgctcatatgtataaaaatactatccctataacttatgacctttaatctttgttagttct

SEQ ID NO: 182392 - DNA, 417 bp, Arabidopsis thaliana columbia
tgctgctgtttctgcttctgcttctgcttcctcatcctccactactgactcttctgctcaggcgcagattcctccatcatctacttcttaagttgttttaagagaaacgttgcatagcgaagcgagaaagttgctaggagttgttactatgagcatattgcatcgaagcttttggatcatgtctgtgatatttgatttcctgagatgataatgagttatatgatggtactagattatctggtgaaagtagatgaataacacatgttaagatactctgtcttcttatgttattttggcaaatcatcagtgcattgccttttaagcagaagtgtgagatagtgatgagttgttattacattcgttattttgggtatggaacaatgagtgaaaatgtatctttggctctaaaaacaaaaa

SEQ ID NO: 182393 - DNA, 381 bp, Arabidopsis thaliana columbia
atcatcttcttcacctggagagaatctagggttttagatttactcttccactgcctatcttggctgtattccccactgggatggtggttttcttctccttaattctctacccatacatctacacattcagatacttttagaagccccaatccttatacataccggtaacaaaaaacctagctctttttacattccggacacaccaggtttcgaaaaaccctaacttccatggcgaaaactcgacctggtgtctcctacacaattaaaacgggaaggaaggagctggacccttatacccacaagcgcacccacaaagataggagcacagataatgataaagacaaggaccccatcaaaaactagtaaaccaccatacaccac

SEQ ID NO: 182394 - DNA, 436 bp, Arabidopsis thaliana columbia
accatatttcagaggaggaagaggaggaaggagtgaccaattcatgagtggctattccaagatggattcaacagaccagaaacttgagccggaccacccggtggtcgatcctcagattcagaagcccgatcttgaacctgctgaaatgaaaccgaagctgagcaggaacaggtcagtgtctgcatcagcacaagcggttccttcaccaataaagatgtctatgagaagatcttcgtctgtctctgaacgctactgtagaatctatgaccagagctctgccacgacttggccgcttcctttccatgaaggagatgaagacgaagatgatgatgataaagagaaggtgcacaagaagaagaagagcaacaacttcaagaaaaaagcattcgtaaaggcttgtaagcgtttttttgggatctcgtgaaaccagtttttg

SEQ ID NO: 182395 - DNA, 436 bp, Arabidopsis thaliana columbia
gtttcatcgtacatttcatcatcatcgacatctacagcaacagcgccatcctcggactcgcgacctttaactcctggatcccagctatcatcaactggaacagaggaaacggttcagttcatgatggtaaactcgcttctatcagaatcatatgaatcatggctccaacaccgtagggtctttctccagcgggggatttaccatactttcatgcaacacgctcacggtcgggtagcttctcgcgctgcagaaccaaccagttcaggaggcaaaacccaagacgcagaaaccttaaccggcgatgaacttctctctatcgtcaaaccaatgctggtctacaccggtatgatcgaacagcttcaacagttgttcaaaccccaagaaaccggtccacatcgaaccaatcaagaaagaaggtacatcaagtggagtagag

SEQ ID NO: 182396 - DNA, 177 bp, Arabidopsis thaliana columbia
gagagaaacatttcgagacaaatggccgccgccgttgttggtcctttggtaacaatccaaacttggaatggggccaggtccacgagcaattcttcacacggggactttccgaggtgatgaccgcgccaggtcgaccagacattggtaacttcgttcacgcccaaatattcaacaaca

SEQ ID NO: 182397 - DNA, 459 bp, Arabidopsis thaliana columbia
ggacctaccatgaacctgattctctcttcaatcattttttttctttcttttagattgtttttgatcctgaaatgctcaaaaagtcgtcgtactaatccactatcgtgttggaagatgaaacagagtgaaagagacagaagaaacaagaaccatttgtgaaatcaagaaccatcattattccatcaccagacacagaattgttcaatcatttgacaaaaaccttctaatccatacccttttgtcaaaatcaacacttgggttttcaatagtttatagctttaaacccataagaacgaatctggttctgtttctctggttaatgattgagattcttcaaagttttgattttttttgtagattgcttcatcttcaattttcacttttcatttgtattaaacattttcttgttccgaggggttttcttggttctgacaaataaacaaaaaccttccttttctc

SEQ ID NO: 182398 - DNA, 450 bp, Arabidopsis thaliana columbia
atctcgatggctaataagctcatattgtaacaatgttgttgattttgttgatttgtggtaggcttgcacgctttcatgggagcttagggttttgggtgctgatgtgagctacggagctcagtttgagccaaccaccgaaggaagctatgctgggatcggctataagacacggaagattgcatcaaccgttgaaccgttgataacagatgcttttaaggaggttgaacggcgaaagattgctatgacattctataacaatgctatgtcgaacaagaaggtgctgaacaggacgataactgaatactctgttagatcattgtcatatatatcgatgcatattgcacaatgaatttatttttatatttgtagttaataaatataagtgttattaaaaatattttgatatttatatttctatacttggaatcttttacattaattatttttttt

SEQ ID NO: 182399 - DNA, 458 bp, Arabidopsis thaliana columbia
ttcttcatcttccataggttccttccttcttctcttcttacatctctgtaatttgtctccttctcaacgtgtccatgtggtcttcttacttcatcccttctctctctctctctctgtcctttatataaatgttataacctcatcttcacttctctctcacaaagtccacttgctctatacacgttgctttgtttgtaacttcataactagctccattgttacatagtacgatcatggtatcagcagaaacggcgacaatggctgaggctgaaccgtcgacgacagggcctcgcatttccttctcagcggatttgtcatcatcagatagcgacggagatttcatctgtatcaaccctgtgatgaatctcattgtgggtagagaagaaaaagacaagagctcagtgaaagccggagactttgagtttctgtcggaaaatgcaacgatgcttaacgctgac

SEQ ID NO: 182400 - DNA, 160 bp, Arabidopsis thaliana columbia
cggcggtgaacacgacggggttagctgggagccctccgccacagaccaatgggacaccgcaagggattgatggtgctggtggtggacatggtggtagaggcgcttattgattgaatgacaataaaaaactacctgaaaatgtgttgggaggggatatata

SEQ ID NO: 182401 - DNA, 412 bp, Arabidopsis thaliana columbia
catttgtgcattattaaaccttacagattcctaggaagatttcaaggagccgcagtcctaagaggtaaacactttctgtcttaacactaatcctcgtcttaaactggaaacactttatagtctgtagaatgcattaattgaagaagttccaatgttaagttatgtatagtaaagttaagggttaccccaattcctgataaaagacatagcataaacatctgggacctatactttcttggtgagtttggtgatgaaacagagaaaaatagaattgttgtgtagaaattttttgcgttgaagtctaataaaagaaaatgggttgttgttgggtatgtttaggccactgagaggaaaaagaagcagcagtaacagcagcagcagcagttcaccgccaccaccacctgcacctcgt

SEQ ID NO: 182402 - DNA, 258 bp, Arabidopsis thaliana columbia
ggccggacccacgcgtccgtttcacagaaagttatgtttgttccaaaacattctcgtttcgtgtctgaatttcactctcctcctcctctccctctgttctttcgtaccaatcattcttcttagaaaccctccaacttcactcggtttagccttcctcgcagtctcactcgtctctctgatctcctctttcggtagtgcctcttcgcaccaatctcgatcatgtttcatcgcgcggataacgcttcatgtttcctcact

SEQ ID NO: 182403 - DNA, 424 bp, Arabidopsis thaliana columbia
ctttcataccggaacaaacccgttcgcaaacgcgtttatcttcagacacaaagaagaagaacagaaacaagaaaacgtcccaaccaccgcctcaaacgcaaaagataaagcagaagacggtaccatcaacatcatcatcgtcgtcatggagccagataaagaaccttttgagttgcaaacaaatcgaagggccacgagtgcacgaaccatcaaagattacgtcatcatcttgtggctcctctctttgtaagtttagtgatgttatttacggtaatgcccgtgtgattcaccgctccgatcactcccctgagagtagcaatcttggacaagatacccggttgttgacccgaaaacccattagtacccgtggatcttcttcatcggttagatccaacggttggggcgcttacacgtcatattcaac

SEQ ID NO: 182404 - DNA, 457 bp, Arabidopsis thaliana columbia
cagcaaccatttccaaagtggaaaaatgcaccaacctatcgcaagtccgtgcaaacctcaagaaaatatacaatagagttcgtgttgttgataatgtgtctagtgcaaaggaaaccgtggctctgctcatgaatcaatataggaatcttgtccatgcttgcgatacagaggtatccaggattgatgtgaagactgaaacacctgtagaccatggggagatgatttgtttcagtatctattgtggatcagaagcagattttggagatggtaaatcatgtatctgggtagatgtgcttggcgaaaatggaagggatatcctggctgagtttaagccatttttcgaagactcatccataaaaaaagtatggcataactacagctttgataaccacatcatcagaaattatggaatcaagctttctggttttcatggtgatacaatgcacatggcacgatt

SEQ ID NO: 182405 - DNA, 195 bp, Arabidopsis thaliana columbia
ctcacgcgctttcatcatcttcttcctagattcgctcctccactggcttaaatttcactatcttcttgttcattttccttccttctcacttcaaatccataatcgctctacttctctctctctctgtagatgcgaaaccatggcgaaactggtgatgtccgacggggtctgtatgccaccggcgacagccatggg

SEQ ID NO: 182406 - DNA, 192 bp, Arabidopsis thaliana columbia
cttctttcttttctaaagacaacgacggattcttaccgcaacacacacaaaaaaaaaataactcgagaattcttcatttcttttaaatcttagaatctcgagtttttgtataaatcgattctaatttttcctttgtacattggtttatatatacataaaacacacaaatcgggtatgggggaatttgggttt

SEQ ID NO: 182407 - DNA, 74 bp, Arabidopsis thaliana columbia
gattctgcggaggagcttcttcttcgtttggtgtttacagatattaacgttatcttccttactttagctctatc

SEQ ID NO: 182408 - DNA, 287 bp, Arabidopsis thaliana columbia
tgagaagataagagctctcaaaattccccgaatttcgaatatgattgtaacactaaaccctaagattctccatttctccaaaatccatcctttttctcgaccttcttcgtatctctgtagaactcgaaatgtgtctctgataaccaattgcaagcttcagaagcctcaagatggtaatcagagaagtagtagtaacagaaatctcacgaagaccatttcactttccgattcagcaccgccggttacggaggagaccggcgatggaattgttaagggaggtggtaatg

SEQ ID NO: 182409 - DNA, 67 bp, Arabidopsis thaliana columbia
atagagagagagagagagagtttagttagagagtttattatatggcgagattcacgcgtgctgatta

SEQ ID NO: 182410 - DNA, 85 bp, Arabidopsis thaliana columbia
cttctctattcgtcgtcgacctattttcctcagccatggccgtcgggtaaaaacaagagaatctctaagggtaggaagggaggaa

SEQ ID NO: 182411 - DNA, 234 bp, Arabidopsis thaliana columbia
caattcctgataaaacatacacaaaacaataatcttaatttcaagaaactactactattgctaaaaatcagagactgtcgctaatggctatattcggtaaactgacaaagctcaagtctgccataaagaaatggccttccttgaccaagaaccaccattcaaccatgtgtaccgtctctaccgtcgtatctgaggtctcaaagtgcgaggatctccatgtggtctacgaagtta

SEQ ID NO: 182412 - DNA, 138 bp, Arabidopsis thaliana columbia
tcgctaacacaacaatttttgttggagctgtttacttttgcggatcaggagaatctttggggcctgactcgtttatattctggggaatagcccaccgtaaaccttccatattcttcagttactcaaactactaatctt

SEQ ID NO: 182413 - DNA, 243 bp, Arabidopsis thaliana columbia
aaaaaaagtctaaaaaaagaatttctcaacaaatttataaaaatatctaacttttccagataatatattcaaaattttacagagaggacgaagaagttcccgacacttgcgagagactataaaagcatccaatctcctcctctcgctcttttcagtatccatacttcttcgcttctcacctcctccccactcctctcccccctcttctatcctctcctatttctcatctcttctttctcttct

SEQ ID NO: 182414 - DNA, 434 bp, Arabidopsis thaliana columbia
aagagttctaggtatgtaccagtgagagcttcggcctcacctgtgagacctagacagcctaggagtgaccttggtcaacttcctgtttcatcacaacttaaaaaccgaaaaccagctgctttgatacgtagagcctccatgcctagctcaagaaaacctgcaaaagaaatcaaagactctctgtacatttcgaaaaccagttttctccaccagataaattctcctgatgtgtcaatgaacgcaccaagaattgacaagattgagtttccgttagcgtcatacgaggaagagccttttgtcccggttgtgcgtgggaagaaaaagaaagcatcgtctagaggttcctacagtccaccttcagagccaccactagactgctcaatcacaaaagacaaatttactcttgaaccaagccaaaacagagaaggagcgat

SEQ ID NO: 182415 - DNA, 101 bp, Arabidopsis thaliana columbia
ggaaaggcagttggtgtaaggctagcagatggtagagaatttttcgataagacgatactttgaagtgctacacgatggtatacgttgggtacgcttttaaa

SEQ ID NO: 182416 - DNA, 136 bp, Arabidopsis thaliana columbia
  unsure (1)..(136): unsure at all n locations
tcgctcagncgccgcacgacctcttgtcaccgtacattgtacttgtcggngacaagagcaccgatcagatgtaccaccgttactttacgaggcgctataacttatccagtacgacctgaccttgtcaacttctctc

SEQ ID NO: 182417 - DNA, 55 bp, Arabidopsis thaliana columbia
gaaaaatgggaaccctaggacgagcgattcacactgtgggttaatcggattcgtg

SEQ ID NO: 182418 - DNA, 459 bp, Arabidopsis thaliana columbia
ctcaagaaaatcaaagcagcagttatggccgactttgcttctaagcaccccatggaagatgaggtgaagaatacttttgtggtttgttctttttttttttcctttttcttcttttctctcttctcttcttttctctgttttttttcttttttttttcttttcttttttttttatttttttttttttctttttctttttttcttttttttttttcttttttttttttttctctttttttttttttttttctttttttttctaatatttttttttctttcttcttttcttttttttatttgtcttttcttatttttttctttctttttttttctcttttgttcttttttttttctttctttttttttcttttttctttctgcttttttttttttttttttttttttttttctttcttttctttttttttttttctttctttttttttcacttttgcttttt

SEQ ID NO: 182419 - DNA, 94 bp, Arabidopsis thaliana columbia
accgcccgattccggtcgcccaccgtcggtgcaatggcttcactaactggctatattactgctggttcataggctcgattcaacattttcctta

SEQ ID NO: 182420 - DNA, 54 bp, Arabidopsis thaliana columbia
acaaaaggcttcgagggtggattacacggtgatctcgttggttttgaggagctt

SEQ ID NO: 182421 - DNA, 73 bp, Arabidopsis thaliana columbia
ttctctagctgggaagctcagtacgtgatacttgtttaccaatatttggttaaccatctcttgagtttacttt

SEQ ID NO: 182422 - DNA, 51 bp, Arabidopsis thaliana columbia
cggacgcgtgggggtgattatatacttcttttttatcattacccactctat

SEQ ID NO: 182423 - DNA, 55 bp, Arabidopsis thaliana columbia
tcgaaaactctgaattttgattacaatgttgtcactcgtgctgacacgcgccacc

SEQ ID NO: 182424 - DNA, 76 bp, Arabidopsis thaliana columbia
gcctgcaggtacccggttccgtgaaattcccggggtcgagcccaaacgcgtccgatatcaatttgtatgtcctaca

SEQ ID NO: 182425 - DNA, 56 bp, Arabidopsis thaliana columbia
tcgggtgccttgaatgttgatgttactgtatttcaattttaacttggttccatacc

SEQ ID NO: 182426 - DNA, 66 bp, Arabidopsis thaliana columbia
  unsure (1)..(66): unsure at all n locations
ggcgacaatgggtatttctcgtgactctatccacatgagtgtgngccactggaggcaagcagaagc

SEQ ID NO: 182427 - DNA, 141 bp, Arabidopsis thaliana columbia
cttatctctctcaaatcttctagagagagaagggcttagtttttcttccgccatccggtgaatccggcaaagccatctggttgttaaaccagcttcagtccaacagcctccggctattatagaggaggttgtgcttctctt

SEQ ID NO: 182428 - DNA, 83 bp, Arabidopsis thaliana columbia
agaaaagtcattgaaaaccaaaaaaaaaagaagaagatcaaaaaaaaaaggatgtcagaagaagaagtggtggtgttgaacat

SEQ ID NO: 182429 - DNA, 165 bp, Arabidopsis thaliana columbia
cggacgcgtgggtgttcgtcaaatataatcaattttaaatttcttctcttctcttcaaacgaatcgcctttttcgataatctctttgcatcgatttcatcatggctactcaaacggatctcgctcagcccaagcttgatatgaccaaggaggagaaagagaggtt

SEQ ID NO: 182430 - DNA, 211 bp, Arabidopsis thaliana columbia
gagtgaggtaatcattaccaacaaataatggcggttttatcatcctcctctctgtggttctcttccaagacaacttgtgcgatccgcaatcttctgatcccgccatctcttcaccgcttctctctaccctcttcatcttcctccttttactctctctcttcttcttcttcttcttcttcttctctcttgacatttctcctctgaggacttc

SEQ ID NO: 182431 - DNA, 194 bp, Arabidopsis thaliana columbia
attctagggcaaaccaacgtatatctctatcttagagatcaacactagcgctggagcagatgaaggtgtttcgcattctcagagaagacttttaataacatcctccaactttcatcagataagccacaatggtgaaaggtcctggtctctacaccgaaatcggcaaattggccagagtacttctgtacaaagac

SEQ ID NO: 182432 - DNA, 144 bp, Arabidopsis thaliana columbia
acttaatcagacatcagacgcagcatgatgaagttcacgttccagtacgaggaggaatacatcaaaaactcgagagacgttgcgttgttcgcttgcagatggcttccttcttcttctccccgagctctagccttcctctgccat

SEQ ID NO: 182433 - DNA, 167 bp, Arabidopsis thaliana columbia
aatggctgatagagctactcactaatctataattttagcatacgccgacagatacactggtggcgaggaccttacccgtacttgatatattttctattttgacagatctagaccaaaccactcgaggttaccactttttctatcttgtgggataaagagaccgaaaa

SEQ ID NO: 182434 - DNA, 55 bp, Arabidopsis thaliana columbia
gaacaggatgaactaagctctgaggtattcttgttaagtagggatatggccaaaa

SEQ ID NO: 182435 - DNA, 58 bp, Arabidopsis thaliana columbia
aaaaaaaaaaaaaataataagataaaaaacggtttttttttaaaaaacaaaacaaaat

SEQ ID NO: 182436 - DNA, 172 bp, Arabidopsis thaliana columbia
tctctatctatctctcttcttaaagcggccatttttgctctccaagttccatctcaagcttttcttcttgttttgctgatctcttaactgaaaaacaagatcttgaactaaaatggaaactgaacacgatttgtgcaataccaattggggaagctcttctctctaaccctta

SEQ ID NO: 182437 - DNA, 128 bp, Arabidopsis thaliana columbia
aaagagaggaaagctaatgggcttacatagtttgataacacggactgaagaaagccgcgtgactggtgatccagcacggatgctgaacactggctgtgatgccgggagactttactctactgttgtag

SEQ ID NO: 182438 - DNA, 355 bp, Arabidopsis thaliana columbia
gcgaattatgttggatacatagacaatgtagattgtagagatcgctagatataacaaaggattgtatttggattactatagactagaattaagtcgcttgtttattgatgaggtatatgttgattcttctatcgtcaatagagaaagataggaaggtgagtgtagtttagccatttctctttgcatacatggaaggtaagtactatatatatggcgaaataggaagcgttatcacctcccggatgaggccacacgtacatttatattaatatgaccggaaaacagcctttcaccgtggcagtacatagatcaatccattgtataccggtatagatcacataaaatgataacccac

SEQ ID NO: 182439 - DNA, 371 bp, Arabidopsis thaliana columbia
aaaagaaaaggagaaccagtttttttttttactacattctatttatatttggatgttttttttcatttgtttttgtcattttatttttctattatttctcattttttggtgtttattttttcatattttttttttttattttttttttttttattttttatgcattttatttttttttattttcttttttttttttttttttttttttttttttttttttattaaattttttgtttttttttttttgattattttttttattattttttttttttttttttattttttttttttatttttttattattttttttttttttttttttttatttttttattattatattttaatttctttatttttatttttt

SEQ ID NO: 182440 - DNA, 139 bp, Arabidopsis thaliana columbia
ttccattagagtcgcgagacgatagatgtgacttgttccagaaatttaatcgctgcttctcttcccagctgatctgcgtccaacatcactgtttccaggatcttcagaatcagccgaaggaagaagataagaggacgac

SEQ ID NO: 182441 - DNA, 365 bp, Arabidopsis thaliana columbia
tccggtgaaaatgactacaggagctacaatacacaccacagaaggattgaaattgacagtaacaaagaggacaaaacctctggacataccatccgtaccgatacttccaatggatacttcacgggatgaagtttcatctgctctttcttaagtcttcatctttacaaaactgaaaacaaacaagctcagatgaagaagcaaaaatcttgtgttagaacagcaaatgttgaattgttggaacatgaccaatgctttctgattatttatctgcactgtaaaatgcagacatgtaaaatgagaagatttattattccttggaaaataaaatggttttggtctgacagtgaagataatttaacctttgg

SEQ ID NO: 182442 - DNA, 112 bp, Arabidopsis thaliana columbia
gaactatgcaaaaggttgttggagtatatagcaattagcttgggtctaaaaaaagagagatttgagggaatgttttgggaggcggggcctagcccttagatttattttttcc

SEQ ID NO: 182443 - DNA, 223 bp, Arabidopsis thaliana columbia
aattcttccttaaaaagtaaaaattaatctgattctctctactactactactacgatgggtgagaaaaaggaagaagcggggacgaatcctcacggtgagaccaaacctaccgttggtggaatcaccaccgtatttttgaagcttgatatgcattgtgttggatgcggtttatttttcccacgcatcttctaacatttctttcaattgccttgtttccttatt

SEQ ID NO: 182444 - DNA, 86 bp, Arabidopsis thaliana columbia
attcccgttcgaccacgcgtccagaaaaaaaaacctttcaacttccttccatagcaatatcttctcttctcttaactcttatcatc

SEQ ID NO: 182445 - DNA, 311 bp, Arabidopsis thaliana columbia
aaaaaaaaaaaaaaaaaaaaaaaaaaaaaaaaaaattaattttaaaaaaaaaaaaaaaaaaaaaaaaacaaaaaaaaaaaaaaaaggggggggaacacaaaaaaaaaaaaaaatgggctccccttttataaaaacccaaatttcactccccttgcctgcaattatataacctttgttgtggggcccccaaattatatacccttgccccccgttttacaacaaatttacctttttaaaaccctgccgcaacccaatataagccccccccgatttacccccctttccccggggaaccccctttggttaatgcc

SEQ ID NO: 182446 - DNA, 102 bp, Arabidopsis thaliana columbia
aaacttcgtctctcttctctgcttcgccctctcatttcctgggagataaaagcggaggcgggctccaattattttgcggatccatccattcttttagatcaa

SEQ ID NO: 182447 - DNA, 262 bp, Arabidopsis thaliana columbia
  unsure (1)..(262): unsure at all n locations
tttcatatcatntncgggcccggcacaaacacaacagaggttcatctcctatttactctccatctatccaatctttttctttttattttctccccaatcacaaacataccaataccgacctttaccacattataaaccccgttctaaaactcaattcaataaaattgcaccctccaatggttacaatgctgcttcaccaacttactaatcatcttaaccttagttcactacaaatattcttcaacatcatatacctacagtt

SEQ ID NO: 182448 - DNA, 128 bp, Arabidopsis thaliana columbia
acatcttgagagaaaaaaacaaagccaggatatttaaaatctcatggggatggccggcttcggaggcgtccccaaagggccttggtcttccgtccccacccgagggcaaaaaaggggccccccatttg

SEQ ID NO: 182449 - DNA, 86 bp, Arabidopsis thaliana columbia
tggggggtcaaaaaaccaaaggagggtggcctgccggtcttttttccgaacaaattcctattctttggcaaaaaagccccggaaaa

SEQ ID NO: 182450 - DNA, 432 bp, Arabidopsis thaliana columbia
aaacaaaacacataaactttcaatctctcttgattccaatccattctaaaaaaaagagaaaaatacaaaataaaagaagggaatcattcaacttaataactttttttatataatcacctaaattaaattaatattaccttcatttttcttcatttattacctttttataaccctttctttccccaacttaatctccttccttataatacccctttttactaaattctcataatattcttatataccctctctttatcaatcttcccaactattttcctcactttttttccttttaaaactccccctttttccattcttttattacttctattttttttttctcttcccctctttcctttttttttttcattttttttttattattttcctctcttttttttcttttttttttcaatctttttcttttttctc

SEQ ID NO: 182451 - DNA, 261 bp, Arabidopsis thaliana columbia
  unsure (1)..(261): unsure at all n locations
aaatcaaagcagcagttatggccgacgtagcatcaaagcaccccatggaagatgaggtgaagaagacggaggcgtctagtgttggtgtnaaacttaagacagtcgtggagattatggcttttgggttataattttcaccatatatttgtttgtataactcactatgtttttaatatatagtcatgctttatttaaggttgttttctttataattcgtttttttaatctcttttcttttttttttattttttttaattaatt

SEQ ID NO: 182452 - DNA, 469 bp, Arabidopsis thaliana columbia
ctccaattcagtgaacagtgtgggaagtatgagtgcaactgctttgcaagctgtgggcggtccttacgtgtgggacaatcagtgggctctagctgttcagcgaattgctcaaggcactcctccccttgtcgtcagttctgtaaaatggcttgaagacgaattagaactcaacgcacttcacaatcctggtagccgccgaggaaatggaaatgagaaagtagcttcaacccagagacttgctctttcaactgccttaggtggcagagttgacgttgcagcaatgaacactatctcaggggtgaaggctacctatttgcttgctgtggcttttttggagatcatacgttttattagcaacgggggtatccttaatggtgaatcaagcgtttctgcctctagaagtgccttcagttgtgtgttcgaatatctgaaaactccaaatcttactcctgctgtttcccagtgtttg

SEQ ID NO: 182453 - DNA, 432 bp, Arabidopsis thaliana columbia
caaggtcaagttgtgggaggtggagttgctgtctctgcttattgcctctggacccgttattgtgatagctgctacggtgggggtgccacttatgagaggttaccgattgaggaagaacaacagcaagagcagccgcttcaactagaagatgggaagaagcagaaagaagagaatgatgataacgagagtgggaataacggaaacgaatgatcgatgcagccgccgatgtataatatgcctcctaattttatcccaaatggtcatcaaatggctcaacacgacgtgtattggggtggtactccgcctcgagctcctccttcgtattgattagttagataggcggtggctggtgcgttctttttcacttgtactgattatatttttccattatgctgttataggcatttcttctttaaagcttataaatctgcg

SEQ ID NO: 182454 - DNA, 449 bp, Arabidopsis thaliana columbia
cacatcctttactgagccagtaggtagtgttgggtcttgtaagatcaatgtacgcattgatcagcttggaagaagatccatcgttgctgcgatatggttacctatctcaggataatgttggagatgtgaggagagaagtttcaaagctctgtggagagcttagaccacacgcgcttgcactcgtgacttcattcggcattccagactccttcttgagtccaattgcattcaactgggtcgaagccaatgcttggtcttcagtttagttacctgctagtaacaatctctttcataattcccatatatctcttataaaaggtatgttttcacaatatctacagaaactgttgtaagctcgtcataataaaagggtatatatgatatgtattcagggtttattctttacttaaactggtccaaacaaaaatgtttggttattatttggcatt

SEQ ID NO: 182455 - DNA, 343 bp, Arabidopsis thaliana columbia
cggacgcgtgggcgacgattaccaggatatggaagcagtcgatcgaccgctgcgcattgaagaaaccaccgtatctcatgatgtatctagttgcggttttatatcgaaagaagaatggttaaataaacatccaccatctggatctggatggactgacgaagatgatgataatgacgatgtatttagtagcaggtttatatcgaaagaagaattgtctgacgctgtacataacgatccaccatctggatggactgacgaagatgatgaatgatcaggttgaccccggttttggagaaaagtatttttattggcaaaattttctaattcccaaggaatttttttt

SEQ ID NO: 182456 - DNA, 291 bp, Arabidopsis thaliana columbia
tcggacccaaggcgttgacactttggctcaccagacatcgaccctcgctatattactatgatacgtgtcataagaccgtggagtgtggaacatactacactgtatacattggtataggtgtcactgcagaacagatcaagctgagtacaactaggacggaagctggtttattggctgaaagagctaaccatgacagctccaagccaggagattatgacgtatgttcattaacagtgtgcaacctgagcggacctttcttcatcaaagagatctttgccgtcatcaattcat

SEQ ID NO: 182457 - DNA, 148 bp, Arabidopsis thaliana columbia
cacatttgaccaaaactcctccaatccaggcatcatcgttgactttttcaaactcatttcctctctttttccttcttctcacatcatattagacccaaacataaaaagaacgaagaatcctctgttcttgtctggaatttgtgtggat

SEQ ID NO: 182458 - DNA, 419 bp, Arabidopsis thaliana columbia
gcttcatcactattgaaggcactcgcttcaaccgtcgctcttcttagctcactcagagatgtcgttctcgctgagaaagctactgggtccgattctggttttggtactgcttctggatctgtgcgttgaatccggattctctcaggcaacgccggcgcgtgacgatcacgtgcatcattacgggggggggagtagtgcaacttcatgtggctcaaatccggctcttctatgataccgatggcagagtttaggcaaccggagattatagagaattaccgggtcaaaaccgtcatcagatgttttgatatgctcggcgctggttctaggcaataagaggtgtatgtagtgacccaattatactgttgagatgcaagatataagctcgttgatccttttaaagatcttaaaccctattctat

SEQ ID NO: 182459 - DNA, 316 bp, Arabidopsis thaliana columbia
gggatttgctacacaactcttacgtgaaaggtggtttggccgttggagctttgttgggaccaggaagagaattgctgtgtgatggcataaaagctttatggaaaagatcacctaatatgaactcgatcgttggattgacatccatggctcaattttccataacacagatctcgcttggttgtccagaactgagactggatccattgctttgaagatgaacgccactacctgcaaggcaaaagccacgactgtgagatgatagggacaaaggacaagactgttaagaatcatcatgatgatatggaccatagcagca

SEQ ID NO: 182460 - DNA, 330 bp, Arabidopsis thaliana columbia
aacagagaaaactccgtctcttttgtgtggtactacctatcatttactgcgagataaacgcggggtctctctcccgctgtcttgctcatgcatcgattcttacagttcacactggcaggtcaagttcctcaccgcactcttgcgccaacagctgacgctgaggccatgcctacaagtgtttccaaggacgcatacgacggctaccaccgggcttgtatctgtcaaagacatgctggctactgacactactacattgctgcatagtaatttgctacctcgtgatggatcatcgcgacgactgcatctcacctgtatgcactaccccgacac

SEQ ID NO: 182461 - DNA, 466 bp, Arabidopsis thaliana columbia
  unsure (1)..(466): unsure at all n locations
ggagaatgcggctcanagcgtgtctgtgaccgtttttacttcgtacctacattttgaattcaaggtggaattttaataaaggctgtggcgaccaactaaccctatctctatcacatatactatttattattcttttctaacatatgtttatgacaccagagcttaagtcaattctatctttttgttttatgatgttttcttcactaccctctaattatacttatttttcctttcttgatttttatattaaactttattttttttaatatttattctaatcaatatttatgttatttttttttatttcttttaaattttttatttttttaatactatttatataattttatatctttttttatctatttttaattttttctaatttttttatttaattaatttttttttattaatatcttttatattttttatatttatcttctttaatatttaataaatttttatt

SEQ ID NO: 182462 - DNA, 431 bp, Arabidopsis thaliana columbia
ggagagtttacatggtagatttcaataatctttcatcgcttgaggccttgtcgattcgaggtgtacaatggtgttgggatgcaatatgcatgatactgcagcaagcaagagacgtgaagcatctctttatgaaggttgaattcacaggcaatgaggctcttcaacctttccctgagattgattttgtcgagttcttcaataaccatccaaagcttcaaacattcgacatccatgggacaatgttcgctgcactctgccagaaaaacagccttaagaaggtaaaaataatctcttcttcatcagaaaccttccttaccgatgaagtcaaagcctacttatcaataatgtaacctccattctctttgcagcttgagaccggatttacaataccgtgtttggaggaggttgttatcacagtgtgatttcactta

SEQ ID NO: 182463 - DNA, 221 bp, Arabidopsis thaliana columbia
cgtttatttcggtttaatatattggaatggggatgggccttttagtattgcatggtcgtatcaagcacaagcaccaacaattggaaatttgtactgcatgccgcaaatatttaagtaagggggacatttttttactggtttgaactaagtagaaaatagaaggggtggattacttttgagttgggcctattttgctagtttttcttagacttgggtacgaa

SEQ ID NO: 182464 - DNA, 423 bp, Arabidopsis thaliana columbia
  unsure (1)..(423): unsure at all n locations
aaacgtatgaggggaacgcctcctcccacctctctctccaattcgaaaccctaggccgccgcatcgatccggggtgcgcggcggggtttagtgtgccgttggtggtgggggtggtgtancgctcctntcgccgtgagaggtgctcctagcttcgtggtggtggttgtattcatcgttcctttttatttcaaaccggcgaaaaaagaaacagtctacttttacggcggagctcattacggagatctattagccaatctcattctaggtctaaccatcctttggctcccactaaccttagctgcagtgtctcgagcttttaaccttcgttacaaggtcactaaccttcgcgtgacggttatttttggacttttccgatatgatcattgatgtttttttacaaagtgattaaagacggtcaagttg

SEQ ID NO: 182465 - DNA, 356 bp, Arabidopsis thaliana columbia
atcctatccctaccttggataatcatattcttactccggataacgacagccaccgatttaaccgccttggattcctcctcactaactcggagacaaaccggagcagtcgtgacgtcagcgacgcagcagaggaagcggcggagcgagaaggaaggctccggctaggcaccgtgttggcggcggagagagaggaaatgcagccaccgaggatgtctctaatggagttgttggaggataatgatggacatatgtatgaactcagcgcgcgagacgaggtggaagtggagggaagagatggctgcgacgggggaggagaggcggtggctgtgactgtggcagtggagttgtgttgttgc

SEQ ID NO: 182466 - DNA, 84 bp, Arabidopsis thaliana columbia
gaggtaaggaggcaagtcaagagttattgaatctctcttacaggaaaagaatattgttaagggaaagagagaagaagaatggac

SEQ ID NO: 182467 - DNA, 79 bp, Arabidopsis thaliana columbia
ctacgcaatattggaatcttctgggatgcgcgatcgctttgatttttctgctcttcatacatggagctcactcattcta

SEQ ID NO: 182468 - DNA, 229 bp, Arabidopsis thaliana columbia
  unsure (1)..(229): unsure at all n locations
tttttttttttttttttttgttttttttttttttttgttgttttttttttttttttttttttttttttttttttttttttttttttttttttttttttttaaaaatttttaatatttttttttaaaaaaaaaaaaaaataaaaaaaaaaattaaaaataaaaaaanaaaaaaaaaaaaaaaaaaatttttttttnataattaaaattntaatttttattnaattttttt

SEQ ID NO: 182469 - DNA, 263 bp, Arabidopsis thaliana columbia
acaaggcatgttaaactagattactgttgatctactaagactacaatgtgtaaccaactacaagcgcttcaacagttggttgagggggtgacctcgaatatgatcagagagactactgcatgaacaataacaacacaacagacgcagaggctttctgactgaacgaacacaatatcgatctcatgcatgacgatatggcatatgggcactagcactctaccgaacgaatagaacagggagaacattgtgctgcacatgaagac

SEQ ID NO: 182470 - DNA, 72 bp, Arabidopsis thaliana columbia
gtcgatccgtcaccacctccgttatggactctccgttcacctgattctcgatcaagggctctcatcaccgtg

SEQ ID NO: 182471 - DNA, 455 bp, Arabidopsis thaliana columbia
accgaggtcaagcaaagggaaatcaaacaacatatgtaaaggaggagataagaagaagagagacgataaactgttggctccgagtctggttgaaatcacagtcaccactccgtacgaaactcaagtgatactcaagggagtttctactgacaaaatcattgacgtgagaaggcttttagcatctcacgttgagacttgccatttcaccaactattctctctcccataaggtgaaggggcataaattgaatgacaacatccaagtactttccctcaagccttgttttctccgcatgattccagaggagtatctagaggaaagtcaggcgttgactcaggtacggagagtcatcgacattgtagcatgcaccaccaggttcttctccaaatctcccaacaaatccatccgtgccggcaatgccaatccgacaccggcgccggacggcctcgacatgg

SEQ ID NO: 182472 - DNA, 241 bp, Arabidopsis thaliana columbia
aaaataaaaaaaaaaaaaaaaaaaaaaattaaataatttataaaaacaaaaaaaaaaaaaaagaggcaaaaacgaaaaggggggcgggtctcaagaaaccagcttacgtacacgggcgtgcaccgtcatcgttcttttatagggtcacctagctccgcccactggccgccattttacaccctcgtgactggcaaaaccgtgccgtttcccagctcaatctcttgggagcacatccgccttt

SEQ ID NO: 182473 - DNA, 269 bp, Arabidopsis thaliana columbia
tgaatgtggtaccaaataataacagacgaattcatttgaaacataagcagctatggaagctattaatccagaacagagcaagtgttggaatacgacgatgaatctctctgtgatgggagcaatgagtttgatgcacccagagtaaagatctttgagggtgatactaagtttgtttctttactttttcttttccatttgagtttgatctcaattgttcttttgaattttgaaaacaactttcttacatgaaaaaggaacataagacttgg

SEQ ID NO: 182474 - DNA, 156 bp, Arabidopsis thaliana columbia
taccgtccgattcccggtcacccaccgtccggagacatggaacgtatgtgcacttgaccataataaaccaaacagtatgggaagttctgggtgggtttaaggcattacattaatctccagacctataattcaccaatatactaaatctgcaaagga

SEQ ID NO: 182475 - DNA, 275 bp, Arabidopsis thaliana columbia
  unsure (1)..(275): unsure at all n locations
ccacgcgnntccgcaaaccctctaaannatcaatnnctctcnnaaatctcttctaattctgtgatnncaagatgcangnnatcttcnngttaagaccctctcnaaccggaaaggaaactatcacnnncctcgagngnntggaaagggctctngnnacaccatnnncgacaacngnnttaagggcccaagaaatccagnnngataagggaaggggtattccnnntccggatccagcangnnaggcttaaatcttcnngccggaaaagggcagttgg

SEQ ID NO: 182476 - DNA, 390 bp, Arabidopsis thaliana columbia
tttcatggtatcagagcaccatcgctccttaaccttttctctcatttctctttcttctttccttttttccttctttccttctttcatctcttttttcttcttcaaaagtctccaatggctgctcaacttccagcgatagagcgagcgtttggggttacaaatatcaaagcccacatactcttaattctcgatctcaatgatcacaattatgatgcttggagagagcttttccagacaccctggctgacgttcgaagttctaagacaccttgatggtactatgtttcccagtggagataacgatggttcttggctgaaacgcgacggactcgttaaactctggatctatggaactcttgctccagatctgttccgctcatcattcaagact

SEQ ID NO: 182477 - DNA, 355 bp, Arabidopsis thaliana columbia
cgagaggaaaaaatcggagagtgaagatgtgtagtagctttcatggcgatgctctcacatcttctccatctccaaaactcattagatcctacaagcactctcttctcttccgcatccacatcttcacagtcttcaaccacaccttcctccctcctctccacttcctccgccgcgcctttactcttcttcactctcgcatctctcctctccttcctcgccgtcaacagatcttcaaccgaatcctcatcttcctcagaatcaccttccccttcccctcctccgccttttgccgacggcgattactccgtcgctgccttccgtgccctaaccacagaccacatgtggtcactcgatg

SEQ ID NO: 182478 - DNA, 365 bp, Arabidopsis thaliana columbia
agacacgtcaggatggctaacccgactaggacgacggataaactagataagtaagaaggatacacggactcgcctgcgccaatggagggtggatcataattatcatcatctgatacactaactgacaggagaagacgcacccgaccagtgagtagggaggaactacaagagcatcggtttgaacaagacgtgtgtgcactctacgacatttctgaaatcacatatacctgaatggtctagaaggatggtgcttactcagtccatatatgggcatgagattgtattgtgttagaaaaacagttgttcatctacaaacatgactcaacagaccacatgcgctgtgcgttttattacaccaggaattt

SEQ ID NO: 182479 - DNA, 405 bp, Arabidopsis thaliana columbia
gacaaaacccaatgtgcatatcaagcctcttctttatcttcgcgaattcaacgtgcgctgaccttccgtcgagcttctcagacgcacaacagcacgaggagtgtcgctcacgtaatctgacatgtggatctggacacacggcattcgagagtaccacgtatccgctctggggtggattcaagaaacccaacatctgcggtcattcggcattcaaactctcctgcgagggtgatcaaaacctaaccctagcgagcgggaacatcactattggcgatgatgctgccaatctggaggatcataaaagaaacgttgccgatgatagtctactagacggagagctgctaaacatatggaactctaacgggaagaatcagttcacattagactccaacaccgagacgatcg

SEQ ID NO: 182480 - DNA, 105 bp, Arabidopsis thaliana columbia
aaagaaaaacaaaaaataaaaaaaagaaaaaaatacataattattggatagactctacaaataaagaccagtatggtcgctggcgttcagcggacttaagtcctc

SEQ ID NO: 182481 - DNA, 226 bp, Arabidopsis thaliana columbia
cttcttctggcggttggacctcccaagaatattttttttggttgtgggttttttttttggcacaagtctactacgcatttttccggcaaccctacctgccgtcaactagactattcctggacctcaagcctggtgtcgcagctgaagcattgtccctgatacggttggatagacgcggctgtttacaccttacacagctattctttgcttccaaacgggtgcattt

SEQ ID NO: 182482 - DNA, 101 bp, Arabidopsis thaliana columbia
ccggcaagccttgtaattttgttgtcatgctacttttggtttttgccacttcgtaaggccaggttatttttgaagctgaacgcgggtgcaagccaactcac

SEQ ID NO: 182483 - DNA, 320 bp, Arabidopsis thaliana columbia
  unsure (1)..(320): unsure at all n locations
catctccgaaacgtttctctcnttaaaactttttttgaccgctctttataatttgaattgaaagagaagatgggaagagctgcgagatggttcaagggtatttttggtatgaagaagagcacagagactgagaactgtgtctccggcgacctaggatgacaagccctcttcctaacatccacacagactgttctgcaacttgctccgactccctcaagatctacctttctgctccagccacctctcctctcattctctcgattgccggtgctgatggtgcacctaagagtcttaccgacgacgagatacatttcatgact

SEQ ID NO: 182484 - DNA, 342 bp, Arabidopsis thaliana columbia
cactagtcacagaaaaaaaaaagtgaataaaagatcaaatccaatatctaaaaatctgctctgctgctatagaattgcggattctagtgcaaatagaagggaagttgtcggcgaaaggtcacattttattattgacaagatgattcaaatggacggtggagataggctgagagtgacgttatcagatcgaatgtcaacagtggagaatggccggagctcagtgactttagaagatattctgatggctgaaacgagcagtttccgatctcttactacgccgacaacttcggtgaggaatcactctagtagtagtttacttgacgtgattagaagagagcgtct

SEQ ID NO: 182485 - DNA, 96 bp, Arabidopsis thaliana columbia
aaaaaaaaaaaaaaaaaaaaaaaaaaaaaaaattttttttttttaaaaaaaaaaaaaaaaaaaaaaaaagaaaaaaaaagaacgtgagtttttaat

SEQ ID NO: 182486 - DNA, 261 bp, Arabidopsis thaliana columbia
cggacgcatgggcgaacaaacaaatgaaaaacctattttattttataccgcactaaacaaaaaggcctgaggctttgatacagatgatcgcacccccaaagggacgaatggagaaccgtaccgtgttaacgactcatctagacctaacaaaggccggagcactatactccggtcgaaacaacgagaagtgcgactcaacagtgtggtgaacacagaggcaaaatcttcagaggaggaaaaaaggtgaaactatcactagac

SEQ ID NO: 182487 - DNA, 74 bp, Arabidopsis thaliana columbia
aaaaaaaaaaaaaaaaaaaaaaaaaaaaattttatatttaaaaaaaaaaaaaaaaaaaaaaagggaaacaaaat

SEQ ID NO: 182488 - DNA, 93 bp, Arabidopsis thaliana columbia
aagaaaacaaaagattcgatgaaacaactaaaaatatgtctctcactaggatgactacattgactcacaataatgttcttcgcagcgcacaca

SEQ ID NO: 182489 - DNA, 346 bp, Arabidopsis thaliana columbia
  unsure (1)..(346): unsure at all n locations
gttatgaactatgcacagccgttgaacggctcatacacaaatctttacaggtttgctgatactaaactgttgttaatccgccatttgattggttatctcaaaatctagtgtttgcttactcgtcatttgcactgcaggtatccttctgcaagtaatccctgacagcaagagtagtgtttgagtacttcaatgtctgtaatgaaaagcagattctatagatattagcctttaggagctccctgttctgttccgaacaatggctacttctttcttatataacaaacaagacatctacttttttatatctctgaattatattattatcgaactttgaatgagcttcana

SEQ ID NO: 182490 - DNA, 264 bp, Arabidopsis thaliana columbia
  unsure (1)..(264): unsure at all n locations
cgtgnannaggtcaaccaacccgtcgagaaaataatgggctatctatcttcnntttgtgctntnncttctgcccanntcgctgcccanntttcttnnctccaagnntttcttggggtggggtaaggaaaactgagngnnctgaagaaagaanngttgaccggttccacgcnntgtgtcccccaggccaagtatgccgtnncggtgcngccgcccgtcnnngcagctgtatccccagatagacncatatctngtngttcccggga

SEQ ID NO: 182491 - DNA, 424 bp, Arabidopsis thaliana columbia
ataaaaatcaatcagaaagaagattgaacatagatctcaagagtcaagatcgatgggtttggttgtggtcatatctctgcctctaattttcttctgtctacttctcggatttggctgctacttcctcggaaaatctcgcggccgtcgtgagatccgtacaaatcctcaggtgtatggagctccagctccgcctcccggtgctatcgccgcctcctctccgccgttgtctccacacgccaagcccgacaattctcacaacgtctgattttccttcattttctcttctttgtctgtcttgcttgtctctattggaagatgcttttcgttgacttattgtgaattgttgcaaccttgtatcttttgattgtctttagctttctcgggatgaatatccttctttatttgcggattttcctatctcttt

SEQ ID NO: 182492 - DNA, 456 bp, Arabidopsis thaliana columbia
aaaactttcatatattcctcttctttaaattattacacaaacactctcttctcttcataatcctcatctcatcatcactttgtcactaaatcagaatgaatccatccgagcagaatcacttgtccgtggaaaaaccttcacagacttcttcggggccgtacacaagtccaccaccgattggttatccgaccagagatgcgatggttggtgatcctccagccgccgcagtggagacaaagtccaagggcgatggtttttggaaaggatgttgtgctgccatatgctgctgttgtgtcctggatgcatgcttctgagacttcggaattaacgatttcatgcaaattattgatgtaataaaagagtatttgatgctagttatgttacctactctctgtttggaatatactctgtggatggttgttactatgttttatgtaagtgattatatatatatat

SEQ ID NO: 182493 - DNA, 74 bp, Arabidopsis thaliana columbia
aaaaaaaaaataaaaaaaaaaaaaaaaaaaaatatagtcttttcgcatccaataaaaaaaaaataaagggcgct

SEQ ID NO: 182494 - DNA, 437 bp, Arabidopsis thaliana columbia
  unsure (1)..(437): unsure at all n locations
cttggattgaccacaaagggatggctctggaagctgttttctccatgagtttttgctccttctctgtccctaaagcaatcttctgtgagagagaaacttcatcttttcaacgaatcacctcgagagcaaagggaattgcgggtgagagtcaagttcaaagctctgatggagttgagactcaagtcaaggaaacttctcccaaagtatttgataaactgcctgaaagaaatttagatacttggagcggtggcagagaaacagcaagaggactttcaggttcagtagtaagaaacactgtacgaaaagatactactttacgacatatctcaccttctagtcattcaacanaggttagaggagataagccagagatttcagggggtgagaagaaagctattgtagatagaagcaaggcctacgtaaagctgaaatcttta

SEQ ID NO: 182495 - DNA, 357 bp, Arabidopsis thaliana columbia
gtcgtttccttctttctcgcttcagatcttcgtttattcctaattttttgtataatttcgcttccatggctgcttcagctgcattctccatttcatcaccaccttttgtaccctttaccaccaaaattcgcagaccatttctcttgcttactccaaaatatcccaaacctgtttcggtgcgagcttctgtgtcctcgatctccatcgatgaaaaattgccagtccaaacaaagacaagcaactggcagtggaagttcaagggcaattcgattggtatatactatgaagagcatgagagggagaagtgtgaatcggctaagaatattctaatgataccaacaatttccgatgttagca

SEQ ID NO: 182496 - DNA, 303 bp, Arabidopsis thaliana columbia
aaaaaaaaaaaaaaaaaaaaaaaaaaaaaaaataaataaataaaaaaaaaaaaaaaagaaaaggagaggaaaaaagaaaacaaaaaaaagaacccaaacaaagaaaggaaaaagatatagaatagagagaacctaaagtgaacacactggcacgagggaggacaacggccgggacagggaaacaccctggcgaaacccaacgggaatccgcctgggaaagcaccctggttgtagacacgcctggcgggagagcgaataggccagcagggatggccctgcctaccaggggcgcagacagaaggg

SEQ ID NO: 182497 - DNA, 127 bp, Arabidopsis thaliana columbia
aaaaaaaaaaaaaaaaaaaaaaaaaaaaattaggtgctcccaaaaaaaaaaaaaaaaaaaggggggggaaaaaaaaaaagaaaggggggcccccccaaaaaggagccaaaaaaaagaacgcggacag

SEQ ID NO: 182498 - DNA, 343 bp, Arabidopsis thaliana columbia
  unsure (1)..(343): unsure at all n locations
gggaatgaggtttgtgaatccttttctgtagtacntgtgcgtatacttgctaggattacttttgttttcaacaaagaggctcgggccattaacttttgccgtgagcacgatgttgcgtcactcttccttcatctgctccaatccaacgggcaagataacatacagatggtgtccgccatggctttagagaatctttcactagagtctataaagctgacacggatgcctgatccgcctcctgtgaactactgtggctcgatcttttcgtgtgtgagaaaaccacacgttgtaaaccggctgtgcaagatccaccagcgaatatgttcattaagagaaacatttt

SEQ ID NO: 182499 - DNA, 289 bp, Arabidopsis thaliana columbia
  unsure (1)..(289): unsure at all n locations
ctcttagtttaggttcttagcactgaaatttgactagaagtaagcttgagggttatgatcttattactttgtgggtattagattttgncgatcggattcagagtttttctcttttcgatcgttttacttatccagtacaccaagggtgttgacggtgtatagcttcactaaacataatctctcatttcttctagcttctcgattagctcttaatggtgcatggtgttccgtttgagaccgttttacatgcacctgtgcgtttatccattctttattcattactctcatc

SEQ ID NO: 182500 - DNA, 117 bp, Arabidopsis thaliana columbia
  unsure (1)..(117): unsure at all n locations
cggaatcgttttagcagaaagacnctctcctgtcctcagaaaacctccgagatcggagagcgggcccgctcgagcaatggcgcggcccacgcacacacacgggggaaacaaaggggc

SEQ ID NO: 182501 - DNA, 375 bp, Arabidopsis thaliana columbia
gtttttataggctgctaaaaaacaacgtttctatattataacaaaacagaaaaaaaaaacaaagaaaccatgtacagaaaaaaaacataagccgcacagccatagggaaatccacaaggaagaggagcgcgcagacgaatcacaatcattagttagtatgggccatagaggactactcatgccctgaatgtatcgatcctgatatgagcaactcgaaaatggaaccagctattgtcaaaaaggttaatttaaggccgtcggcggcagggacaacctggatttgcgccccccctatgacccctcccatcagttgccccaccggaaagccgtatggaacccactcgggagccccacattacactgggggggttcgtc

SEQ ID NO: 182502 - DNA, 250 bp, Arabidopsis thaliana columbia
agatttgttagattcgcgtgtgtaggagctaaactccgattgcggagatttacgaggaaggagatgaatcagtggatgtgaataaagaatcagaagtgaaaactgagctgggaaaagggggaggagatgaccttgttctccttttgatctgtttattcctttctttatttatctcttatcactttcgtaatatgctagatgcttttactctttgtttctatcattctctctttattttttctcttttcct

SEQ ID NO: 182503 - DNA, 433 bp, Arabidopsis thaliana columbia
cataacgtgaacgtagtgaaccgaggaatcgtttggatagttaatcaaatgtttactggagaaacgatgtgaacaggcttgagacctgtaaaatcatactgcacggaaatgcagaatttgaagccagcaatgtaactatagagggacaccatgtttgtgcagtgccggccactcactcactgaaagtatcattcctgatttgatcaacttgaaaattcgaaacagctattggcaaaaaatgtaatttaaggtcgtcggcggtagtgacaacctggattttcggttctgctgagaatgcatgggtggctaaattcaaagttaaactttgggaatcccagtttagaagttctttccccaaagggggggataaacgcgccaaatttatcatggaggttagcagacagtttttatttatgtatggaactggtaagtt

SEQ ID NO: 182504 - DNA, 333 bp, Arabidopsis thaliana columbia
ctctctctctttctagttcttagttcccttgcgttccaagtgatcatggctcaagaagagatacagaaacctactgcctctgttccagtggttaaggaggaaactcctgccccggttaaggaggttgaggtgccggttactacggagaaagctgtggctgcgcctgctccggaagctacggaggagaaagttgtgtctgaggtggcggtgcctgtaacagaggagacggcggtgtaagaggaagaggttgtcttgggataggatatctttcaattttatgtctcttaaagtggatggtcttattggtttcttaaatttcattaaactttttaa

SEQ ID NO: 182505 - DNA, 335 bp, Arabidopsis thaliana columbia
ataagatagtatttgcggcacaaaaaaaaaaatttacctctttccaaaaaaaaaaaaaccaaaaaaaggggaaaaataaaaaaaaaaaaacaccccacccaaaaaaaaaaaaaaaaacaaaaccggcaccccccaaaaaagggacccccactcacaaccaccccacaagctcatcaaaaacaactggggtgcccccccctaaggccccaacttccgcccccccgtccaccacatatcaacccgtttatttcgggcccccccccccattttacgccccccagctcacccccccccggcccggggaaacccccgccctgtccccccccttaaccccc

SEQ ID NO: 182506 - DNA, 88 bp, Arabidopsis thaliana columbia
attcagttctcgtactgagagatagttagtatcagtcattatcagggaagagaaaaagaaaatggggaagcatttcagtgaaattgaa

SEQ ID NO: 182507 - DNA, 194 bp, Arabidopsis thaliana columbia
cttagtttaataactattggcacattttatacataaaaaaaaaaaaaaaaaaaaaaaaaaaaaaaaaaaaaaaaaaagaaaaaaaaaaaaaaaaaaaaaaaaaaaaaaaaaaaaaaaaaaaaaaaaaaaaaaaaaaaaaaaaaaaaaaaaaaaaaaaaaaaaaaaaaaaaaaaaaatgggggggggggttgaaa

SEQ ID NO: 182508 - DNA, 106 bp, Arabidopsis thaliana columbia
  unsure (1)..(106): unsure at all n locations
ctcagttccctccgtccaaggcagcaaccttatctcgancgccgancaatcatcaggggggggggttcgggaacaactttgagacgactcaccgggtctgtacccc

SEQ ID NO: 182509 - DNA, 444 bp, Arabidopsis thaliana columbia
agaaattttccgattttggttctcattagttgtctgatctcttatctcactcgaagcttctttttttacgcggtttgatttattaatttcgttacttctctgtaaattctcgatctttagggttcttctcatcccctggtttaataatgggtccaatctcagttcttgttcactctaattttactttcacaatatctccaattacgcagatgctttttgacaaattttctccattaaaagtgtcttcttttttagctgtattaaatttataggtctctctatctgtactggtatagggttcatgattgagtctacaaaaacataatgaatgacctaaaagctattaactttcgtttctagatctgcttgcttctctttaatatcttcacctcattgctctaatagacattaatctccatttgaagttagtattcttttaccagt

SEQ ID NO: 182510 - DNA, 336 bp, Arabidopsis thaliana columbia
ctcggattgaccacacagggatggctctggatgtcgctccctccatgagctttagctccttctatgtgcctaatgcaatcttctgggcgagagaaactgcaccgttccaacgaatcacctctagagcaacgggaattgcgggtgggagccacgttcaaagctctgctggagttgagactcaagtcatggaaacttctcccaaagcattagataaactgcctgaaagtattttacatacttggagcggcagcaaataatcagcatgaggactttatgttcatttgtcagaatcacttgtactcaatcgattctttgtttctacatattctccctttt

SEQ ID NO: 182511 - DNA, 437 bp, Arabidopsis thaliana columbia
cataatgcctcaggagaagctgtaccttcgagtggaacactcttagaaggaacagttgtcaaaatcttaccatatggagctcaagtcaaacttggggatagtagcagaaggttagttcattgcctattgtttccataaatttgtccttctcagtgactactagttttgaattcagtgcgtttgccataataatgtttcgacagtggactgctacacatttcaaacataactcgaagaagaattggatcggtgagcgatgtgcttcaggtggacgaaagtgtaaaggttctggttgtgaaatctctatttccagacaagatctctcttaggtaaaaacaactaatattccaaaatcaactaccacctcagtagtcagtaacaactattttgttttctacagcattgctgatcttgaaagcgaaccaagattgttcatc

SEQ ID NO: 182512 - DNA, 123 bp, Arabidopsis thaliana columbia
aaaaaaaaaaaaaaaaaaaaaaaaaatttttatatgttttggccgctatagaaagaaacagagattaggttcacttgcttgcgactttataactcttattttgtgtcacctaaatttatttct

SEQ ID NO: 182513 - DNA, 198 bp, Arabidopsis thaliana columbia
  unsure (1)..(198): unsure at all n locations
gtaacagcggcagtggcagtagttcgtccgaggtctacatagttccgaagttgaagattgcgtcgctggttgcagacatttttgcgaatacggccgtggcagaaaataaggtggtggaagtttntacagattcatcagcaccatcgcggccagtggacgagcttttcagagtaatcccggaagattgtaggtgtatag

SEQ ID NO: 182514 - DNA, 424 bp, Arabidopsis thaliana columbia
gtagagagagttattatgtttgattctgaagcgtgtacgtcactcagaaaccgtgaatcaaggatctttcttccactcctttctctgattttgactttctctcctctctctatatataagctcaacatcaatatgtctacggcttcttcttggattcaacaacctccttttagatacttaccggatcgtggcggtttctctaagccaagctctcgcagcgcgcggcagttttcctccggcgttgtttcagcttccgcttcttctccttcgccttcatcctcgtgctcctgtggttattcggagattttgaatttcgatttcggggcaaacagaagctggaaccaacagggacgcaaggttcaggcaatgagttccacagcccaacggaaattttcgctatcgaaaggcgactccgatgacaaaa

SEQ ID NO: 182515 - DNA, 304 bp, Arabidopsis thaliana columbia
gcaaaaccaaaagctggacactaagttcttcgttttgcttttgggaatgagcgtgcgagggacacgtgaacgcgtggtaacggctggtctttttaaacttgaacagatcggtaacggtagagttattatcgattcgagtacctctgtgaagaaggcagatccggcacagattatattgatatgagagacccgttgcgggtcggagctaacacattgaaaagagctgcggatatatcactcttatacacgtgatgcgatctatctaatatgaacgaggttaaagtaccgaccgctgttttacatt

SEQ ID NO: 182516 - DNA, 373 bp, Arabidopsis thaliana columbia
aaaaaaataaacaaaaaaaaaaaaaaaaaattaataattatataaatacaaacaaaaaaaaaaaaagaaaaatataaaaaaaaaaaaaaaatacaaaaaaaaaaaaaaaaaaaaaaaaaaaaaggggggggccgttttaggggacccaggtttccggccccgtccttggggggccaagtcttttatttgggggcccccaaattcaattccctggccggggttttacaacccaagtccggggaaaccccgtgcgtcccccaatttaatggccttgcgggccatcccccttttgccggttggggaaaaacccaaggggccccccccggtcgcctttccaaaaaggtgcccaccctgatggcctaatgggcctccc

SEQ ID NO: 182517 - DNA, 68 bp, Arabidopsis thaliana columbia
gtatggaagggatgatggagatgggtgtattggatgatatcatcaggagaccggcgcaaggtaaagga

SEQ ID NO: 182518 - DNA, 347 bp, Arabidopsis thaliana columbia
gactagttcaagaacggcgagcgggccacatatttttatagagagagaatagtgcacacacatattgtgggtatatgacacacactacacatcatacacgtgtgggggacacgacaccgcatagtgcacgaggaaacgcaggggttatatgagtctacacaagagtctagcggtgcacacattaaagtgttgggccctactctatatctatgggggggtacaccacaccacacgcgcggggggcgcgggagtatttatagcgtatctcacgacacgtgtcgcgaacactggatgcgatatatgtggggcacgggggcggggtactctagacacacatcgcgacgcgt

SEQ ID NO: 182519 - DNA, 264 bp, Arabidopsis thaliana columbia
aaaaaaactagtataaattaagggtgtgtgatagaattaactactacagtttttacgagtttgataatggactttgtaggacttggagctgcgtggaaagtggctgacgtagaggaaggttccactgtcgttatctttggccttggtgctgttggactagcggtacatttatttcaaattaatataaactatatatgtgatgattttgcataactgtaacaacaaaatattataaagatcttgtagtataaagtaatttgtaaa

SEQ ID NO: 182520 - DNA, 369 bp, Arabidopsis thaliana columbia
ggtatccatgagatccataatgctgttgttgctgagcttggcgatacccaaattattatcagtctcagaccgaaatgtcactcgagcgccagcagcaaaaccctagggatggtgctgggtctcaggctggtcaaccgtcgaatcaatctcagcagcagctctggcaaaactcttactaaataaagaaagagagtggtttttttcagcttctttctctcgcttatagaggtttgtgtggcgagtctgaagagggaaatatggtgtgttctaaaatgtaacttatcatcatcttttgtctcctctgttaacttaaggaacatgcaactctgatttcatcaatgcaacttcagaaatgaaactttttttttt

SEQ ID NO: 182521 - DNA, 459 bp, Arabidopsis thaliana columbia
cgttcttgtccaaaactcccaagccagaggagaatgctttgggagaataacaattgaagccatggcctttaagcttcctgtacttgggactgcagcaggaggcacaatggagattgtagtgaacagaacaacaggtctattgcacaacactggtaaagatggcgtgttacctctcgccaaaaacattgtgaagctggcgactaacgtgaagatgaggaatacaatggggaagaaagggtatgagagggtaaaagagatgttcttggaacatcatatgtctcatcgaatagcttctgtgctcagagaagtgttgcaacatgcaaaaattcactcacgaacaaccaattcggatcattaaacaaaagtttagcaaggaaatgccaatattacttcattttacagtacactctctatagagttttcgtatttattctggttatagaaacagtgtttttaact

SEQ ID NO: 182522 - DNA, 350 bp, Arabidopsis thaliana columbia
caggcgcatttattttggaaatcaaggatgtgttttggtacatagggctgtataatttgacattgttctgaaaattcgaatcggatcaaccattagtagtgaaaaaaaaaaaaaaaaaaaaaaaaaaaaaaaaaaaaaaaaaaaaaaaaaataaaaaaaaaaaaaaaaaaaaaaaaaaaaaaaaaaaaaaaaaaataaaaaaacaaacggggggggccgttttaaaggatccaagttaacgtacgcgggcatgcgaagttatagtttttttataggggaacctaaattaaattcagtggccgtagattaacaacgttgggactggaaaaaccttggcgtaaccaaattta

SEQ ID NO: 182523 - DNA, 168 bp, Arabidopsis thaliana columbia
atttgttgccattcagtcatgtgcggcgcatttacaatttgtgggatggagcgtccccagtatgctctggatcctcttggtcctcccttggaggcccattgttccaactgcaaggcaatacttactgctgttgaaggctccggtgtactcaaggtacatagagcatat

SEQ ID NO: 182524 - DNA, 215 bp, Arabidopsis thaliana columbia
aaccaacccaacaaaagcccaccaatctctctcatactctctctcgccgctactctctgctctgccgccggcattctctccggtacgtctctcagatccatccgggatttggagcatgtgtacaaaaagactgatgttggaatgtgcagaatgaacacatttccgaacatcttgcccagcaaaagggggaggattcttctcttcaaacagttctg

SEQ ID NO: 182525 - DNA, 241 bp, Arabidopsis thaliana nossen
gcctcactcactattatgacatacattacccacatgacctgatataattctgactcgatctcattgacactgaatggctggctcgaagaacaaaatccgaaccaacgggttgatgggaacaatgagcttgctaggtatgaggtgaacccaaagggaggagagcctgctggacgctcatcacaaccatagagaccatggacacatgacatacatgtttgaactgcagagtgcacgacagtga

SEQ ID NO: 182526 - DNA, 91 bp, Arabidopsis thaliana nossen
  unsure (1)..(91): unsure at all n locations
ttttagctttgtgttgtggcactcgctnnctgcttctacgaaacgtgctgggcggctaatnntggtttcattcatctggcccccgccgttt

SEQ ID NO: 182527 - DNA, 173 bp, Arabidopsis thaliana nossen
  unsure (1)..(173): unsure at all n locations
ntcgatcgccacgcagtccgnttagagaanntttgtgcgcccttgggagnntccctttattattaatataannnaccaaggannttttaccatgntnactgcaatgtttatgaagagaccgnncgagaagcgagaagggcctatgtngggtcgnncttctggtaaccctggat

SEQ ID NO: 182528 - DNA, 443 bp, Arabidopsis thaliana nossen
gtttgtcatgttttttaaagcaatgaagattacttcaaagaagctcattcaagctctgttcagtttgatgcatctaagaataatacgagaccattaacacagtatgattacggagaactatgcaatggagcaactgaagaactaaagattcagaatatgctagtggaagtgtcccttttcacctccatacgccggaagcactattcaaagtgagagaaggtatcacttatggcattcccatattttaatttgctcaaagaaaaattaaatatttcttagaatctcagaccatttccaacgaagagtcttttgaccattttcaacgggagatctaagtctaaatatccgaaaagtaaatcaaagttgccaaaaaccaatagactcagatccaaaattggaaatttagacaatggtttgaatctcataagtgtcacatcataaat

SEQ ID NO: 182529 - DNA, 450 bp, Arabidopsis thaliana nossen
ggcaaatctgttcccgcgctggcgcggcttgacaccgcaagctcgtggtctagctatggactgaaatgatggcgcgcaaaagggagcgcaaaatggccgcagctacggacgaccaactcggctttgcccccgtcgacgatgccccgatcggctacatgaagcggacccgcgattattacgcggcgatcggctacaccacgccctaccgctgggcgcattacacctccgcgccgttccagccgctgaacaagccgctcaaccagtcccgcgttgccatcatcacgacggcggcgccgttcgatgcgaccaagggtgaccaggggcccggcgcgaaatacaatggcggagcaaaattctattcggtctatgacggcgacacttcgcagcaacacgatctgcggatctcgcacatcgcctatgaccgcacccacaccacggcgaccgacagcg

SEQ ID NO: 182530 - DNA, 360 bp, Arabidopsis thaliana nossen
aaataaaatgtgattgtaagttatataactgaaggatagacatttggtgagagtcctctaatttatatgagcaaatttcagctggggactttggagcatgtcaaaccagggaacctctgaagcaactcttcacgggttcgtctctgtgccaatttaccatggggttaacacattagtaagaaggaaggggtggtctctagagtgttccacttacatagaacctggatattgtggaggggacacactctagaattgagttttcgcatatagagaaagggacacctgggccgcggcacacactgacacaaagagaggggagagtgttatagcacgtgtgtgaaaggggctccacacacatgt

SEQ ID NO: 182531 - DNA, 283 bp, Arabidopsis thaliana nossen
ttcatcgtcttcttcgggttgtggtgaagcatttaggtccatcgcagcaaataattcaatggcaaagcaacagtctgtatcaatttgcgaggaaacacaaaacccgtataatagaatgcaggaaattgacaaatcaaagtaaacgagatctatcccaatttcgcttctctatgcagaattcgaagaatcaggaaaatggtccctgatatcgaaattgaaatcgaaacctagcagagagagtctcgctcgtctagacgaaacatattcgaaactgttgctgaat

SEQ ID NO: 182532 - DNA, 203 bp, Arabidopsis thaliana nossen
gggccgttctagctatatacaaaattctggattaattaatctaattattaatcaattttttttttagggaggggctccctgtatttcgatttcaaaaatcggtactactcctgattggtgaaaaggaaaagggggaaaaacctgggatattgtgtggatttgttaggtgggatccaaaacctaaatataaaatttaaagtaaa

SEQ ID NO: 182533 - DNA, 197 bp, Arabidopsis thaliana nossen
  unsure (1)..(197): unsure at all n locations
cacaaacctaattaacccaatttcaatcccaatctaataaaaaaaaaagggcccctggggattattatattcttaaaaaacaaccaanatcacacctcccacaaactacaccatcacaatccttactacaactaactaccaaaaccacaccccttcctaagccaaacaaactaccattacccaccctctcacactaa

SEQ ID NO: 182534 - DNA, 95 bp, Arabidopsis thaliana nossen
  unsure (1)..(95): unsure at all n locations
ataacacctatttttcacctcttcttaaccaccccacacgggaacacaagacatttttaaatttttcaaacctccaaaacacaccncncaaacat

SEQ ID NO: 182535 - DNA, 266 bp, Arabidopsis thaliana nossen
cataactacataaccacattagcataaccaaccaaatcgggaaagaagggcgtcttttcttttttctaaaatcaaaaaaagccaacaatacaaatttctccaagcacgatcctctttcaaataccaaaagcgaagtaataaatacagactaacctctctgataaaaaatggaagcttaagaaagcatacatcacaagcaaaagatcagaacactatagaatgtttcatcgctcatatcccacaaaatcagatggatcctcccaaaa

SEQ ID NO: 182536 - DNA, 360 bp, Arabidopsis thaliana nossen
gaaggatctagatcgtgcagcgacgctttttcatgcaatgtgctgaggggctttttaatgctttcattgcctatattatcattcccaccttctgcagtttcaatcaccggccaagtcaggtaaacaattataacgttttctcaggatttaaccatcagagtcttacctgccatctcaatgcgagattggtcaatatgctcagacaggtgccttaaatcagttgaagaaggcttcgagactaacaggctctgtcaatatccatgttaaaccagtaaatagaaaggtagaaaacttcgtaaatgcaagcaaagatgagaagacgaacatacacattttaacaataaggatgggtaagaaata

SEQ ID NO: 182537 - DNA, 349 bp, Arabidopsis thaliana nossen
  unsure (1)..(349): unsure at all n locations
aaaacaagaattaaattcatatttagccccaactaaaacaaatgaaaaagcganatgggagattttcaatgcttcagcataacccaanaaaacatttgtctataataatgtgatcccccctcttactatgagtaccattttaaacgaatccatttgcacaaacaataaaacaaacaataatgctgtataggattggatcaattcaaaagaacagcctataaagattatcgacaaagactaaaaatatgcaacgcatgcataagatggttcgattcaacacacaatacaaaggaattattctttctataacaaaccacaaagaggaagggtttttcactctattatctat

SEQ ID NO: 182538 - DNA, 367 bp, Arabidopsis thaliana nossen
cttaccaactaaaactttgatttcatccaaaactgaatcttttgccatgggggtttggagatttttcatatcttaaaaaatcccaaataagacatcaaggacaattgcatttctttgacaacaagcaacaagaaagaagcaaaacgcaccgttttgccttccattccaaattgacaaaacttaatgttgttagcctcaaaaaacttgagattctcctctgagtatggttcacgacacatataactgttttgatgaatcaaaaaacgattaattactccaatcataatcaattatcaaacaatgtaattgaataacccagaagattaataaaggatcttacatgatggaacgaaaatttaaggtttta

SEQ ID NO: 182539 - DNA, 192 bp, Arabidopsis thaliana nossen
  unsure (1)..(192): unsure at all n locations
aaaaacccccaannanacannngccacaaccgctgcgcaccgacaacaaccaacaaaaaaaaagcaaaacccaccccttttcctaacataccaaacaaacaaaacttcactataataaactcaaaaaacatcagatcatcctctacataataaacactacacatataacaattctaatcaatcaaaaaacta

SEQ ID NO: 182540 - DNA, 253 bp, Arabidopsis thaliana nossen
  unsure (1)..(253): unsure at all n locations
aaaaaaatttcataaacttaatactcacacacaaaacgnnnatagaaaactttaaaatttttaaaaccccccacaccnncaccaaacacacacaacccaatacccacccaccatttcaatacccaaacaaacctccaaacacacaaaacataaataaaaaaaaaccaaacccccacaactccaccctataaacaccaaccaacctaaacccaaacatcagctccaatacaaacaccacaactaacccaaaacc

SEQ ID NO: 182541 - DNA, 258 bp, Arabidopsis thaliana nossen
  unsure (1)..(258): unsure at all n locations
aacaaaaccaatatcctcaatctcttacccacccaccaagccaacacacgaagcttttaaactcttcgaccctaaaaaannccccncagacaccaccaccacaaaccacaaccaccatatctacaccctctcaaacctccacaaacacacctcaccataacataccaacaaaactctcaaaaaatcacccaacaaaaatcaaaccactcaagaccataacccctacaccttcaataacgcaacaccaacctaaaaacc

SEQ ID NO: 182542 - DNA, 212 bp, Arabidopsis thaliana nossen
catacaaccataaaacaaaatcttttactatttataaactaacaaaaaggccacctgggtctttttaaaatattaaaaaatcaccaatccctcttcactatctcatgacttcttactcttccacactacatatataacataatattactcaacatcattaacactataaaatccaccaatcaacaatcatataactctacaaaaccaaactt

SEQ ID NO: 182543 - DNA, 276 bp, Arabidopsis thaliana nossen
  unsure (1)..(276): unsure at all n locations
ntcactctatttttttttgttcacttacaaacccnaaacgggaaacagcgagatttttaaattcttccaaacccnacannnnacncatgaaaatgtctggacaaacaataaacttaggacccatgctagctacaggaaaaaccatcaaacacatatctatagcaggtcacccaaacttgacaagaccttcagaaattcacacacacaaacaacatatccacaaatcaaacaaatcaaacacataaataattgttctgtacaatctccgatatgaaa

SEQ ID NO: 182544 - DNA, 93 bp, Arabidopsis thaliana nossen
cacacacctaaaaaacccaatttctttcactttccaccctaaaaaaaaggcactctggggattattaaattcatcaaaaacacccaaccaaac

SEQ ID NO: 182545 - DNA, 311 bp, Arabidopsis thaliana nossen
  unsure (1)..(311): unsure at all n locations
cacaaacatactaaacctaatttcttcccctctctcccccaacacacacgcactttcgcaattcttacaatcttcaaacccacacaancnananncnccnccaccaaacacccaccatctcaaccaaatcaacatcctccctcccactcaatcaaccaaacaccaaccacccaacatcaaacactcgtaccacactatcccttaactccaacccacccaatttaccacaacactcaacaccctacaacccaaaaacactaactcacccactttacacaacccaccctccctaacttaccattcccaaacaa

SEQ ID NO: 182546 - DNA, 368 bp, Arabidopsis thaliana nossen
cggacgcgtggttgaatgtggtcgacaatttattgcttgtgcaccaaatggatgcaggggttgttatcatctactacttatttgaggattctcgagctcctgtatctgcgcctcttcctttactgtggaggggttaccaagtctctgagacatcgtctcaagctgttaacaaagaaattgagagctcagaatcatctacaagcaatgaaaacatagtcatgtatgaagatggctggacctttctggttccagaccttattctggatcagacaaacaaggttttatggaagatacatttggatcttgaggcaatttccgctagcagctcagacaggacgtctcttctagaattcctgcagcgaaggaag

SEQ ID NO: 182547 - DNA, 304 bp, Arabidopsis thaliana nossen
  unsure (1)..(304): unsure at all n locations
cacacacctattttttaacactttttccacaacctaaccggcaacataagaaattttatgattattccacctcccaacanaaaacccacccacttcctctcattttcacaaaaacctaaaattaaccaatacaaccaaacacaaatttctctatacatacgctatcacccaaacgaaactcatctctaaccatataacacaatccaacaacaatcaaacacactccaacaaaatcaaaaatataattaataaaaaacactacccaaactgatacaacatccatcttctctaccctaaaaacccc

SEQ ID NO: 182548 - DNA, 322 bp, Arabidopsis thaliana nossen
  unsure (1)..(322): unsure at all n locations
gggggacccacgcgtccgaatacacgctttaactacctttttattaacttttaaacaaaacaacacgggactttagaaattttcacattttttaaacactcacacccancaaccccctacattcgttcttctgatgatgaacgatatctacatttcaaagaacctaatatcccaaaaacactctttatttataacacaaacaccttctcctaaacacctccttctgacataacccaacaatctctctaccaattnttactacctttatctcaacacacacaatatttcaacctctaaaaaattgctaccaatattctatcat

SEQ ID NO: 182549 - DNA, 271 bp, Arabidopsis thaliana nossen
  unsure (1)..(271): unsure at all n locations
aacaaacttaattataataatatttaaaacaccatacccaggcacctacgagatttttaaatttttacaaaaacaaaacanaaaccanaacatccttactacatacaataatatcaaatccactgctagaacaacatactaccaaattaccttccataaaaaaactatacccaatataacacaatcaacattcttaacaatattatataatataatattatataccctcaccgaccagaatataaactacaaaatactgaaaaacacatca

SEQ ID NO: 182550 - DNA, 349 bp, Arabidopsis thaliana nossen
  unsure (1)..(349): unsure at all n locations
gtaaaccgtaatatctctttttttaacattttaaagcccggggagacagggaactttttcatttttcacaaacataaaangaacataataacatttgaagaatcataagtaggtagagttcttataaccaagatcaaggttttatctaatcgccttaaaagagaatcattgccaggtaggatcaaactggttgtttaacattatatatcaacagatgcggtgctacaccaaactgcagtcctctgtgttgaggcccaccaccatatatcatgaaaagaaatactgctgcacatatatccgctgcttcctgattacaaacaaaagcagtacattgtctcatctgttatat

SEQ ID NO: 182551 - DNA, 205 bp, Arabidopsis thaliana nossen
  unsure (1)..(205): unsure at all n locations
cacacacacacaaaacacaatttcttcccctttcacaccaacaaacaccgccctctcgcgcctttcccatttttcaaccccccccacccacccnnnccccacaacaaacccacacaccaaccacccaaccaacataaacaacacacccacccccaaaacacctataactaccctcaaccacccaccccacacaccaccaacacac

SEQ ID NO: 182552 - DNA, 291 bp, Arabidopsis thaliana nossen
  unsure (1)..(291): unsure at all n locations
ctcacacatggttttaattagtattccattatgataacaaggaaattctggaagtttttagatttttgaaagctcaactatngcattttaatatggatatattaaaatttatagaagaataaaataaactaacaagaaagggcgaagtaatgtgaaacatcatgagtgagttccaagttgggtttgatcaataactccaaacagacccatttaaatgcttacatgtgaagttctaaccaacttacctttctcatttcgctttcctcttaaccatcatcatcattaccatat

SEQ ID NO: 182553 - DNA, 292 bp, Arabidopsis thaliana nossen
  unsure (1)..(292): unsure at all n locations
caaaaacatctttttaatcacttctaaanccncaaacccaagcactttggaattttcaaaaactttaacaaaacaacaacnaaaccanaacattgacccactaaaaacaacgacacaatacacacacctaactagacagaaaccaaataccatccccaacaactccaacaaccacaaataaacaacaaaataactacaaacactccccaaaataaccctacatatcaactacaaagatcatcaaaaaacaaaaatcacctacccaagtaccctcacccaaaaaccctcacat

SEQ ID NO: 182554 - DNA, 260 bp, Arabidopsis thaliana nossen
  unsure (1)..(260): unsure at all n locations
aaaaaaacaaataaaccccattctataccccttccactcatcaaaacacgacacatcgaaaattttcaaatctctaaccccccccccncnccaccctctcattaacaccaaacccaccatccaccccaccacaaacaaaaaaccaaaccctccatatttaccacctaaaccccacaaccaacaacacaaatcataccacaccacacaaaccaccaactcaacaacaacacccaccataacaaaacaaacatcccccaaca

SEQ ID NO: 182555 - DNA, 156 bp, Arabidopsis thaliana nossen
  unsure (1)..(156): unsure at all n locations
ctcaaacaaaattttacaatttccataaacatcccacccagggacccaggaaatttttttcattttaaaaacccaacactcnnaacatatacatactactacctctcaaactaaaatagaaacttcaaaaacacatttctatcaccaacttaaaca

SEQ ID NO: 182556 - DNA, 230 bp, Arabidopsis thaliana nossen
aacaaatacataaatcacttttttttaccttttacaccaaacacaaaggggcttttgggcctttttacggtcttcagcacacaccacccgccactctaacacatacaatatccaaaacatcatctctaccaatagatatttaataaaccttttattatcaacatcataattccaccctaaatacacttacctattatccaactatcacacatataaattaaagttcatac

SEQ ID NO: 182557 - DNA, 189 bp, Arabidopsis thaliana nossen
ctaaaacataatttaatcaattttttaaacaaccaaacagaagacctttaaaatttttaagatatataaaaacccaaactcaaaaaatcaaaaccacaacacaccaaatatcaaaataatcaccactacatcaatataatacctcctcactcacatacaaacaaactaattataccctaacacactaac

SEQ ID NO: 182558 - DNA, 213 bp, Arabidopsis thaliana nossen
aaaaaacaaaaaaaacacaatttctaacccaccacacaaaacaaaaacgggcacctcggacatattaagatctttaaacacacacacccacaccccaaacaccaacaacatcaaaaacatcaacactataaaaagagaaacccaacacccctcatactatactcccaaacactaaccctaacccacatgaccaacaataacaaaaaaacacaa

SEQ ID NO: 182559 - DNA, 96 bp, Arabidopsis thaliana nossen
atcaaaaccaatttactcaattttaaaacccttctcacaggggcaacgggggctttctatgattttgagggaatcaaaccggaaaacgcaaaccca

SEQ ID NO: 182560 - DNA, 182 bp, Arabidopsis thaliana nossen
atcaaacatacttttattaatttcaaaaacatcctcacaagacacatcctcaatttctatcaccttaaaaacaacacaccaaaaatcccaaacccacaacccatcatctaccaaaataatcacccaaacaaatatctacctctcccacctcacactaaaacaccctatatttacccaaacac

SEQ ID NO: 182561 - DNA, 362 bp, Arabidopsis thaliana nossen
ataaaaatctattttcttattttcatacccttcccataaaactattaagagctcttgtacattcttatgcttcataaaaacctactcacatgtgctcatatttctctctatccttctacaatccaatatccaaaattatttaccactcctttttacctatacttgtgttactctctaaaaccctatcaatatttctcaataaaagtcacccataataaattttcacacatacatcaattctacctaactccctatatcttacacactaatttacaattacaatacctttcacaacatctttgctctaattcattacctcttctatattcaatacctagctaaagcatccaaggtttcctatg

SEQ ID NO: 182562 - DNA, 257 bp, Arabidopsis thaliana nossen
  unsure (1)..(257): unsure at all n locations
ctcaaacaaactttaactaggtttatcaacaccccacctgggcacacacgcgaactttttaatttttcaccctcaacaccagcangaaggaagcatcaaaatcctttatactcaaagaggcccttcttccactcaagagctagccgtgcttgtctgtgtaccgatagaaagaacgctaatcactataacctgttagacaatatccaaatacgttataggactaatgctagcattcccgatgattatcatctatagtc

SEQ ID NO: 182563 - DNA, 160 bp, Arabidopsis thaliana nossen
  unsure (1)..(160): unsure at all n locations
atcacacaaaatttaacaaatccccaaaccacccaacccaagcgcacacgaaaattctaaaattctccaaacccaaaacannacnaanagaccccccaccaccaccaacacacaaagcatcacctccaccaacatatccactcacattccccccaccaaa

SEQ ID NO: 182564 - DNA, 213 bp, Arabidopsis thaliana nossen
ctaaaaactaattatcactctttccaaaacatccaactactctacaaaagacgcctgggactttttcagatttttacacacacacacacacgcccggcacactacttagatcaagagactcaaccccataaactcttagaatcatgtcacttcatcaagcacttaaaagcctcaccttcaactcctacttgatttactctctctactgcacca

SEQ ID NO: 182565 - DNA, 211 bp, Arabidopsis thaliana nossen
  unsure (1)..(211): unsure at all n locations
aaataaaatatttttaccaatttctatacttttagacaaaattaacaagagcaccttgggcatttttcatttttttactacaaaaacnaccacatctaaccactcaatcaataagaccgtccactctaacaaaagttacatccagacgttccataaagagactcttaaaataaacaagaacaccttcatgtacacatccgtgtagcacaaa

SEQ ID NO: 182566 - DNA, 265 bp, Arabidopsis thaliana nossen
  unsure (1)..(265): unsure at all n locations
aaaaaaataaattatcccaatttcttcaacatcccacccaaccacaaacgccaccttggacactcttaagtctctaaacccccaaacncacacctacaacacaacaaatatcaaaatcgtcccctcaaccaaaaattacctccacaacctcccacacaaacccactaaaactaaccaaacaaacaatccgaccatatcccaagaccccaacccacatcccatacgaacaccaatccgacgaaaactcatgacacttatgaacaac

SEQ ID NO: 182567 - DNA, 218 bp, Arabidopsis thaliana nossen
  unsure (1)..(218): unsure at all n locations
aaacaacataattatataaaatatgataacccccaacctaggcccaaggagagtttttaagtatttaaaaacacaaaacanaacggcacaccacgacatagaaagcaataacaacaaaaacacatggaacaagataccgaatcttaaccgtcaaagcaaacccgcacaaactaacactaaacaattcttaaattccagaacaaataaaaaccacccca

SEQ ID NO: 182568 - DNA, 234 bp, Arabidopsis thaliana nossen
  unsure (1)..(234): unsure at all n locations
aaaaaaaagaaaaaaaataattttataaaattaaaaaccaaaaaaaataaggaaatggggagttttttaatttttaaaataaaacacaaaaatanagaagctctaaattttggtattcaatctgcaactcaattcacacaatagacatagttcaaagaaattttcaacacatttacaaaaataaatgggaaaagaaatgtagaacaaaaaaaaaaacctcactttgtgaccaaa

SEQ ID NO: 182569 - DNA, 205 bp, Arabidopsis thaliana nossen
  unsure (1)..(205): unsure at all n locations
gaaaaacggatttttactgtgtccgtacacacccccacnaggagcgctgggactttttataggattaagagacaaaaacncccaaatccccccgtcaacgacagcatatacgcaacgcttgaacccgaacatgtctggacaggaactactgttgccaatagtctcaatattcaaccgaatccaatgaacattaaaaacacagaaa

SEQ ID NO: 182570 - DNA, 230 bp, Arabidopsis thaliana nossen
gaaacccacaactcaactctttccttcaacatctctcctggaccatcaggacctttctaacttatcaagcaatcgacaaacccaaaagctacccgcatcgaccgacctcaaacccaggtcccctacaaggatccaagtaatgcacattccgctctcaatacactaaacattcactattataccttgcagattaacaccaacctcacatatgatatgtggaattcgaaaac

SEQ ID NO: 182571 - DNA, 256 bp, Arabidopsis thaliana nossen
  unsure (1)..(256): unsure at all n locations
aaaaaacataaacatcacaatttcataaaaattaaactacataaacatagagagtttgggctttttatggtttttaatgaaacacaanaacaccctacagctgataaaaatccaaataagccatgcttatataaaaagcccttctgttctgttactagaattttattaactaaacaaaaatccttatttgatatacatgagataatcgcacataacgacagatcacaaccacattactaaaaacttacaacaaaaa

SEQ ID NO: 182572 - DNA, 236 bp, Arabidopsis thaliana nossen
  unsure (1)..(236): unsure at all n locations
aaaaaaataaaaaaacacaattttacaaatattaaaccccacaaaaacggggaactcagacattttaaactatttaaaccctaacaaaaacnacccccccagaaacaaaactcacataatccatgacaacaacaccaactccctatccctctaactaatatactacaagaacaaaaacaatccccatttctataaatcaaaaaaccgcacaacacaccatatatatacccccttac

SEQ ID NO: 182573 - DNA, 271 bp, Arabidopsis thaliana nossen
ctaaaaacaacatatttttattttatttctgttaggcttcataaagaagggggggttgggattttttgatttactcctctcaaaatttgagaacgttatcatataattttttgagatagatgataattgattggatacattcctaaatatattatatattggtcgagtaatttaattaccttaccatagagcttatatctatagttcggggcacatttaacttatgtttaaacttattatgacatatattttgttctttgaaatacatatt

SEQ ID NO: 182574 - DNA, 235 bp, Arabidopsis thaliana nossen
ctcacatctacttttgaattttacagatccatcattccaaggtactcggggatcttttagagtattccagtacataaaaatccaagctctcaacaagagaatgtctactaacccaagagatctcagcacaatgcactttatgaataaacgtttgcgttcatctaaaaatttgcaacgaacgctttcaacgataatcttactttaccacagagaaacttgttgtatgttggttaca

SEQ ID NO: 182575 - DNA, 362 bp, Arabidopsis thaliana nossen
atcctaaatgaataatatggtttgcaacatctaaacccacataacaaagggaggtccgggcagttctaacttctaggcgtaacacataaacccattcacaacacgcacccggaccaaatgatacgagcattaacaccctaattaaatacactgagaaaaaacaacgcgtgacaccaatcagtgcacctaaattccataaatgattgtatccaatctagggtgaccaacacccatagactaccctctgggtttactaagggggaaaaaaaaattaggcctgtacataactccactattcaaaagtacaaacccaccactaatcttatttttctagagcgatgatcatcaggtctttgaatcac

SEQ ID NO: 182576 - DNA, 135 bp, Arabidopsis thaliana nossen
ataacacataattttaccaatttctttcccatcactctgagagccccagaaaatctttttcatattcaacaatcaacactccaacaccaaaaacgccactccccttaacactctaattttcacttcttgcaattt

SEQ ID NO: 182577 - DNA, 340 bp, Arabidopsis thaliana nossen
  unsure (1)..(340): unsure at all n locations
caaacacanaattttacactttttttacccaacatcatcaaaactccaaagccgctttttcaaattcaagaatctaccaacncaaataaaacactcaactcccactcacacacaaaatgtaaattttaataatatttaatcacacattccattcataatatcatcaaattacaccattaaccactaaccatcaaaacaacacaaaaaatactnatatcaaatcccttcaacattttaccctttttaaaccaaaataaataaaacaaataccatcaatcaaaaaacaatcccaaaaatttatttcaaaaaaaaaactacaccccccgcttaaatcaatatt

SEQ ID NO: 182578 - DNA, 285 bp, Arabidopsis thaliana nossen
ctgacacgtattatgacattgtcctttaaaattagtaacgaaagaccagggactaatgatgaaactaagtaataatcattataaaataataagtgcttctcgtttccctgatcgaagttccgcattgaatagtttaatagcacaaattgctatctctttatattttcttgacaatatcaaccgttagatattaacgctaacttcagagaaatcttgtcttcttattctaacgttaacttttattttaccaaatatctttttacagtattctcaatcaaaatcaac

SEQ ID NO: 182579 - DNA, 360 bp, Arabidopsis thaliana nossen
  unsure (1)..(360): unsure at all n locations
gtcaattttaaaaaactctttctttcacttctctcataaaacttattggggagtcgcaggagaatttactattaccctcaaacnatatnagcatacaatgcttgacgctcatctaagtttggttatgatatcacttggaaagatccgacttcaattatttgtggacctttctgttcactcctagcccgtaggctttatccacgtctgaccaccgatgtcaaacttttgaaacctttaagaaacttgttattggtcatatattccaccacaaacgtaaaaatacgggtttttacatctcatggtatcaataaccatttataataggtcattttctttagatatctctaacttaaacacact

SEQ ID NO: 182580 - DNA, 233 bp, Arabidopsis thaliana nossen
gtataaaagattatattgaatttcgtcatcctgtaatacggggttagtgcgtgattttttattcataagtgaaataacatatcaaatctgtatattcctacagaaaataggtggttactatttactagcattatattggtcattattcatttacacgtggtcattaatatgtcgctaatatataatatgaataaaactgtgacatgcaacatacttgaagtacgatacttctt

SEQ ID NO: 182581 - DNA, 146 bp, Arabidopsis thaliana nossen
gtcaaaaataatttatacaagttccttcccctcacacccggcctactggggaattttctgcctactaatacacataatctccaatatgggaaccctcacatagcctaatcggaacagagtctcttataacaaaatacacttcctag

SEQ ID NO: 182582 - DNA, 191 bp, Arabidopsis thaliana nossen
  unsure (1)..(191): unsure at all n locations
ataaaaagaatttaaccaacaacctaaacatcaaacagagccgccttgaaaattttcaggaccttcaaaaancaaccctccgatactagaaccaccaacactacccaccccaacaacgtcaacaagaacatacccgactccctcctcctcctacacaaagcaacttataccaacctaactcaccaaaccaa

SEQ ID NO: 182583 - DNA, 455 bp, Arabidopsis thaliana nossen
ctgcggtaccggtcccggtccgcggttccggcccacgacgccacgcagacgtttgaacctacgcatctcctcattacaagctaaaaaacatggtttgctctcagaaacatctcaccttctcaatgctcttcttatacttcttttgcttcctctctttcttctctcgtccttctctttcctcaacgtttctcgtcgacggtgtctctgtctggaaaatccccactgttcatatcggcgactctgttattttcagacataagtacggatacgatctctacatcttcagaaacaaagatgcattcaatgtctgcacctttactcaagccactcttcttactaaacctaattccacttccttcacgtggtatccatcaagaacaggctcttactacttttccttcacaaacaacacatctcttcccaaaacatgccaactcaaccagaagctcacagtc

SEQ ID NO: 182584 - DNA, 60 bp, Arabidopsis thaliana nossen
  unsure (1)..(60): unsure at all n locations
atcgcgagccgcccttttttttttttttactttggttattggagccataggaatnncttt

SEQ ID NO: 182585 - DNA, 230 bp, Arabidopsis thaliana nossen
cggaatttagttttgttataacataagtgatgttcttattattctgtgcaagaaatttgtattccacatagtatttcttttgaatatttgtattccacatagtattttattattgattaatatataattttcaaataaaaatgatgagaaaattcaaatattttcataatctatgtaatttttttaacgtgtacatgtgcaaaactcttaactacaaataaattgatttt

SEQ ID NO: 182586 - DNA, 136 bp, Arabidopsis thaliana nossen
attctcgacccaacccacccgtccgatcgctagccgtccttttttttttttttactttgaatatttttttttaaaagagcccccctgaattggcctgatcccaaaacagcggtgcgaccttatatttttccaaaac

SEQ ID NO: 182587 - DNA, 418 bp, Arabidopsis thaliana nossen
gttgtttcccagtctgaggaaattcaatctccaagtattttgcccgacgatgtaccaggacaaccagacgatggcaactgtgagaaaatggataccatgcagaacaatacctctattgatattggcataacttcaggtaagacatgtcagccttcatcttctacccagcctgaggatgagaacagaaatagcttatcacactgtgaaccgtcagaagtagttgaacaaagggattcaagagatcaaagttgcatagggtctgtggaatctcaagtagagatcagctctgctatactggaaaatagatcagctgatatccagcccccgcaatccattttggttgatcaaaaggatattgaagaatccaaagaacctggtatcgagagtgctgatgtgtctttacaccaattagctgata

SEQ ID NO: 182588 - DNA, 156 bp, Arabidopsis thaliana nossen
ataacaccttgcaaaaacttttatatttcttaaatatccattttttctttttaaaacctccataactctcttgaatttcatccaaagcggggtggggctatctatcaaacctaatcactcatttttatccaataccctaaaatacccaaatataaa

SEQ ID NO: 182589 - DNA, 187 bp, Arabidopsis thaliana nossen
ataacaacaacaaatatttattatacctcatacataaccatttttttttctcacaagcttaacatggagagttgatcttcataacaaagaaggtgcatccatcgctgctacatacaaacatcataacaattactttgatattgcaaaatctattcactaattaggaaacttaaacattcgaaataat

SEQ ID NO: 182590 - DNA, 55 bp, Arabidopsis thaliana nossen
atcacacccaccaatatctattatccctcttacctctccattttttcttctcaca

SEQ ID NO: 182591 - DNA, 231 bp, Arabidopsis thaliana nossen
attagatgaattgtgctaacagtataataccgcaatttgaaaatgagagagatatcatacttttttagtggtttgtacgaatatgggggcagctagctagaacttatgacgtcgtatttggcgaaagctcataccagatgcgtcataataaagcgtaactcacactcttgtatagatcgttcaggtggtgcacttgaagaggcttatgaatgctcaacaggcctttctcac

SEQ ID NO: 182592 - DNA, 496 bp, Arabidopsis thaliana nossen
caaaggcatctttctgcgaaattcgttattaagtttattctatgcaacaagacatacataaccgatgggaataatctatacgtgcttacgttgaagcaagatggttccttttgttctgtcgtaggcttatgatgttgatgtattttatcatgtagctagctactccttgtggattaatgattaaatataaaaaagcattggagtattttaattataaactgtataccaatgtttttgcaaagtcaatggctttctttaattcaatacgagaactataatatttgttatagctaatcaggttttcttatccatatatttaactaacaaaaaaattctctttcacccacattatcatcaattattataagatacaaaccgacactaaatacaactagactaagattcaaaatgtttgtagtttatagatgatacgaaataatggtccaaactggtcttccgctcttctttatgtaaccgattcaaatggatacataat

SEQ ID NO: 182593 - DNA, 500 bp, Arabidopsis thaliana nossen
  unsure (1)..(500): unsure at all n locations
gccaaacttaagtagcccacaagaataatgcagaccaaaaaaaaaagcctgactattcgattaacggtcgacaaacattattccataatacactactttgacaaaaaaaaataaaaaataaaaaaattgtgtttatctaatgccaattcaccttcggtaatcactttttattcaacaaatagcattggaatcgtcaaaaatcaatttatccacaagtgttttttttgttcaattatgcgtcaaaatcttatcaaacttgtgcgaaaaaaaaaaaaaaacttatcaaacttgtatttaacattttgccattttttgaatttttgaattttctttaaatacattttttgttaatgaattttctttaaatacttgcgaaaacttttgtaacttgtgtttgtggttactctagtttgaatgtcttaccagtttccgtgtacaaaagtaaattagaaaaatttacagagaaatttcacaactntatcgacttttcaaactaaaaa

SEQ ID NO: 182594 - DNA, 199 bp, Arabidopsis thaliana nossen
gtccgcatacaccaggaggagtccttaactctaaccgcctttctgttttagtttttgcccgccactcataggctgtggcttttttaaaagaacccgggggagccatatataaagccagtcatatacggcaattatcactgcttatatacccgaaccttatctatctatctattaccactatgaagcttgcatgaaacta

SEQ ID NO: 182595 - DNA, 87 bp, Arabidopsis thaliana nossen
ataaaacctggaaatatacataacacaactttaggataagatttttttcctgaagggctccctgagggggggtattaaaaggggggg

SEQ ID NO: 182596 - DNA, 75 bp, Arabidopsis thaliana nossen
atcacactcagaaatatcctttatacaacttacggatttaatttagcaactcaaaaacttccggtggcgatttta

SEQ ID NO: 182597 - DNA, 217 bp, Arabidopsis thaliana nossen
attaaactataaaatatttattatacatcttaagtattttttttttatactgaaaaacttcgggtggagattttatgagggagggggggtgtaaaatatatattatgtttcaagcatcctcccaagtttatgaattatgaatatagctaaatattttggtgaatttatgaatgtataatatcgtaaaagttttgcttatatactttttaatatttta

SEQ ID NO: 182598 - DNA, 212 bp, Arabidopsis thaliana nossen
ataacaccctgtcataactattatccctctttcttatccatctgatcaccccacaaccttaccatggggcttttattaaaaacacgtgggggtccacatattgacaagaacacacccgcatccttatacattatcttgatattgccaaatcgatcctctttttacgaatcctcaacatcgaagtcataaccccaccatactcaacaatactt

SEQ ID NO: 182599 - DNA, 233 bp, Arabidopsis thaliana nossen
cgtccgaatcgtacataaaatttatataccatccttaaccattttttttttctccggccataccctatgaggggttatgtaataaagtggggggtgatctatttttgtgactacacaaaatatgtgatgaatcttataccttatgaaaacatattctctcttttagaaaatgacaaactggacataattatgatgctcaaatcgaataatcgtaacaagaaaatgcatgcttt

SEQ ID NO: 182600 - DNA, 71 bp, Arabidopsis thaliana nossen
ctcacaccttgacaaaaccataacacccctctcctattctatttttctcttcaacgcatccctcaggcgat

SEQ ID NO: 182601 - DNA, 186 bp, Arabidopsis thaliana nossen
atcacacctagacataaacattatacaactttagtatttttattatctcgtgaaagaaaacctgttgcgattataaaaaacccggcgggggggtcatctatatttttaaattctaatacatatatatcaaaagtccaaaaataaacaaatcgtttatttatttagattacacctacatctaatgca

SEQ ID NO: 182602 - DNA, 116 bp, Arabidopsis thaliana nossen
ctcacaccttgacataaacataatacctctcacctatctattttttctccccaaaacattcttgtggcgattataaaaaacgcggggggggcttcatctatttatcttacttctac

SEQ ID NO: 182603 - DNA, 236 bp, Arabidopsis thaliana nossen
atcacaccttgacataaacataatactactctcgtattttttttttctctttaaaacattcctgaggcgattttattaactacgggggggggtccatttacaatttttaagatagaatgttctatatcaattattcaaaaatagccaaatcgtatatctatttcgaatatactacatcgaatgaattaagctcccaagactcaacaaaacaattttgattttgatatttatataaa

SEQ ID NO: 182604 - DNA, 377 bp, Arabidopsis thaliana nossen
ttttaaaatattgactttttgtagtacttttgtcatctttgaatttgtttcattatatggggggttttcaaataagttatctcgaaagtttgtaagatagtatatgttgaatcttaattggatgactgacatatatattagagacacctcacaataaagttttagttttttgtcttttgtttttttgggtgtaatccatatataggaaacaaattcacttggcatgttccatgtttttttgaaaggtttgaccatttagttctggttcttttcatgttataatttgatagcacagttaataataatgaatttattatcttgacaagaatgattgatttaacatgtctggcttttctcactgtattctaaattgactg

SEQ ID NO: 182605 - DNA, 117 bp, Arabidopsis thaliana nossen
cttacacttttacaaatacataactctactctcctatacaattttttttttttaatcatccctcaaactattatattttctaaaactagtcgtggacctataaatctaacttctaca

SEQ ID NO: 182606 - DNA, 54 bp, Arabidopsis thaliana nossen
ctcacaataatcaatttcctttataaaactctccttttctattttttttttcac

SEQ ID NO: 182607 - DNA, 227 bp, Arabidopsis thaliana nossen
atcacactcagaaataaatattatccctcttacgtattcattttatctactgacaaccttcactatgtggcttttacttaacccggagagagggtacacctattgatctgaactatacaagcatccatatcatgaacattgatattgcaaaatcgattcatctttgtacgaatacttcaaaatcgaattaataacctcactcactgtcaacagatactagtactgat

SEQ ID NO: 182608 - DNA, 106 bp, Arabidopsis thaliana nossen
ctcacaccctgacatatacattataccactcacgtatcctttttttctactcaacgccttccggtggcgattttacttaccacggggggggtccatctactgacct

SEQ ID NO: 182609 - DNA, 239 bp, Arabidopsis thaliana nossen
  unsure (1)..(239): unsure at all n locations
ggcggatgaaagactgttggtatttgtgganagtgatgtttcattacacttatatttttttgnnagatgnnngcggattttgtgtgggagaagattccgataggtgaggggggcagtgaatgttctgggatcattgaagaagtatgttgaagtaagtgataacattttatgtggttgtgtgaccagtgtatgctgcttgaactctgagtattatatttgttggagtatgcaattctctg

SEQ ID NO: 182610 - DNA, 210 bp, Arabidopsis thaliana nossen
attagaccttgacatatacataataattgtcatgtattcaattttgagctttaaaacattcatgaagcgattctaaatcacagagcagcggggtcatctataatgctaattctcataacctatatgtgacaagaattatacttacaacatcgtatgtttgttgcgactgaacataaataacattcattaagttggcatagagagattaat

SEQ ID NO: 182611 - DNA, 235 bp, Arabidopsis thaliana nossen
actaccacttttaattgatgtcataagtctttgtgaattaaaaatcaatgctcgagcctcctccattacccaaaatattggcaaatagcaggaggcaataatgtatatcatgtgagatatgcaattttaggcatgcaaatgcgtttagcaatttaatcgttatatcttatgaaaattttgaataaatacaagtttacaaaataatgtaaatactaaagtttagtatccatcataa

SEQ ID NO: 182612 - DNA, 217 bp, Arabidopsis thaliana nossen
ctgacaccaggacaaagacataattttactctactatacgaatttacttttttaagcctacctcatgctgtgccattttccccagcagggggaggttctacctatcttgacatttgaaacttggatgtcatcatgccttactttactagatcttattatttttggtgatttatcctactactactgcataacggtcctaaacttctacaatgctatt

SEQ ID NO: 182613 - DNA, 238 bp, Arabidopsis thaliana nossen
actacatctttacatatacataatatctctttactaaactatttttcactccaaatcatccctgagaggtttataataaaagcggggagggctaaactttatctttttaacttacaaacttataaatcaatagaaccctaattatcaaatcttttattctattctattatacctttctctcctgcaccaagctttcatatctcttatcaacaattttgaacctacaaaaataattaaa

SEQ ID NO: 182614 - DNA, 86 bp, Arabidopsis thaliana nossen
cctacaacccgaaacaatgatcatatccctcagttattttttttttctctttaacgaattactgaggggattttattatatggggg

SEQ ID NO: 182615 - DNA, 504 bp, Arabidopsis thaliana nossen
gggatacgacactatactggtggatctagtaagaaacatcatataaagattagaaatgaataaattttgtgggatatgacaagctgtgggatacggcagagagtaaaagtcggaacgagtcggccgattggaccgcagcactatttgaatgtaccaaatttaccgattatgtaatgttgtcacgcaatatatctcaattgtataagggatccagttttgtttttcccattgtattattggttcttatatatcccctttcacaatatatattacatatttttgtatgatatattacatactttaagaaagctaaaccaaaattaaatgtgagagtatgaaagaagagaagacgaagatggggttgtttgtatttagttttttttttttggtttaagggttgtttgtatttaaatgagcaaaaccgaaatgattgatgaaaaagagaggaaggaggagtaaatagctttctgtagccaaacatactcgtctgaaattgatggcatt

SEQ ID NO: 182616 - DNA, 165 bp, Arabidopsis thaliana nossen
ctcacaagtggacgaatcaatagcatgcctctagtaaacaaattgtccagtttgctcgtacttgtttcgaggctgagtacccgagtttggagatggtttatattatctgtgcatgactctcccagtgtacaagtccttgaattcacgcatcgtgtgtctctttgg

SEQ ID NO: 182617 - DNA, 452 bp, Arabidopsis thaliana nossen
gcttgtaaattaatgacacaacacattaaaaattgtaaaactaggtatccacacattagcttcatattttcaatatggtttgataagaaaacgaacctaagagaacgacattgactcccatagcttttagaaggttctttgtagtccggtatctcacctcaaccatattccttgttaagataaaaccccagcaaggatgaacacgacaaaactagctaacatggctaacatcaggccactcgaatgtccaattttggcgacgcataggagatgcatccgagtacaacgagcacttggggatgaaaaaagcctacgaatctcaattttgacgcttctaagaaaacctataaggaatgtatagagagagaaatataagtgcaatgtagtgagatcgatcacactccctacaagataggaactatacttgacttagttcacaacataaattattg

SEQ ID NO: 182618 - DNA, 192 bp, Arabidopsis thaliana nossen
  unsure (1)..(192): unsure at all n locations
cttacaatttgaaataatttaccantnttaatcctattagatttttaaggcatcatcgaatctattggaccattcgaagcggcggagggactgacagaatttgatccttgatactccgtgtttcttgtacttacaattaccatgtaccttcgttgatgaggtgtgaccaacgtcacagacgtatatggtgca

SEQ ID NO: 182619 - DNA, 216 bp, Arabidopsis thaliana nossen
cttacctctgttcacatatttagctcttcatctctatttttttttcctcgtgtgatcctcccggtgactcttctaaagaatgcgggggggcggaatcttactcccttaaccgtaatcatttggaggaccacaaaatcaaatttaagcatcatatccttattcacgactatgcatactccatatctcaacctatatatcacaaatactacacaggca

SEQ ID NO: 182620 - DNA, 269 bp, Arabidopsis thaliana nossen
aaaatacttgcataaatttttattaccactttcttattcttttttataaccgaagtcacacaggtgtggttcttatagatgagggggggggtataaaatctttaacaaacccatcctatcttatttctaaatattcatactgaattctccatatcttaatttattatatttttaattatcatccatcatcttacacaaaaataaatttctctaaatcccttttatcaaattaattccatctttttcttatttatttttaataattacta

SEQ ID NO: 182621 - DNA, 379 bp, Arabidopsis thaliana nossen
  unsure (1)..(379): unsure at all n locations
gaannccggggtcgttccacgcggccggtgagacacatcgatgccttttcctccggaagaagaaacccaacccaagcggggttcgtatttctttgaaaactccnaacgcgatattaatcaaccaccaccacctccaccacaatctcaaccgcctccaccgcatacgcaacatcaaacgtacccgccgataatgggctatccaagctaccatcaaccacctccaccatacccaaattatccaaacgcaccttaccaacaatacccttacgcacaagccccacccgcttcatattacggttcattttacccggctcaacaaaatccgatttaccaaaaaccatcttcttccgagttcttcagataaattttcaccggttta

SEQ ID NO: 182622 - DNA, 91 bp, Arabidopsis thaliana nossen
gcggaaaaatatatgcggggaatcagaaaaaatggtaaggaacatgtgcgggggacctagtccgttcgtacgttgcaattcctcataagac

SEQ ID NO: 182623 - DNA, 381 bp, Arabidopsis thaliana nossen
aaaagatgtatcacatgatgatattcatgtacaagaaggctggcaacgatgggaaagctcgaaaagtattttcttcaatggttgggaaaggagttccccagtctacagtcacttacaatagccttatgtctttcgaaactagttataaagaagtttctaagatctatgaccaggtgatctgaatgattcctttcttttaagtaattagtatatactagaattaccattagggtatgtattggcctgtaatagtagtgatctaacccttttaactaaaatgtttaacttttcagatgcaaagatctgatattcaacccgacgttgtaagttatgctttacttatcaaagcatatggaagagccagaagagaggaagaagctc

SEQ ID NO: 182624 - DNA, 303 bp, Arabidopsis thaliana nossen
ttttgtggggggagattcataagaattgcataataagaagcttgctaatagaaagaatcaaacagaacaagggagtgaaacatcatcattaacaaatctttatcttttctttctcaaaacatcgtacaccaggctcgtggaggcagcatgtaatacacacagctagttgatcttcatctgcaaacttaaataaaccatgaaggacgttccataatgtacctactgtgattggtttcaaagctatcacaaagtgaattaatttgcaggcgattaatgccacatggtcatcacagatgtttgtga

SEQ ID NO: 182625 - DNA, 272 bp, Arabidopsis thaliana nossen
gcggttctttgtacatagacattttagtaactgtactttcagtatttaagagagggagattataagcttaacgtgttaaaaattgtggtgtaataaaatctgaaaatctgtctacacaccataaactttaggctaagcgtactcaaaaaccaataattcactcttgtttacttgtaaatttttgcagaataaagtttatattattaaatgtgcccatcacatatttactgacaagatttttcttcagtcttatgttacacatgtattgccta

SEQ ID NO: 182626 - DNA, 338 bp, Arabidopsis thaliana nossen
  unsure (1)..(338): unsure at all n locations
gcgaggatttgatgaatcatcagatagcgattaaagctcctcctctgnagggggggtcttcatcgtctgttgcggcgcttgatcagctaccgacaagatattcttgtccagatactgttgatgatactgcccaaagatgccgggaaatagcgccttacctgctacacctaaaatagtgtagctagtagcgaatcaccataattcaacgatttccagttctctcaacacccatgagactacattgattctcactgatacaatttgcgttctgaacatgctctccctattacatatagcccatcacgagaattctccgccatacacatttataatcatag

SEQ ID NO: 182627 - DNA, 202 bp, Arabidopsis thaliana nossen
  unsure (1)..(202): unsure at all n locations
ttcccgggtgcgatcccacagcgtgccgagttatatacaccatctctagtattcatactccatccgaattcatgaagaatggagaggaagatgatgtagagtgaaggcgagcgctgagttatagatccgtcacaatcatctanntcttctcaccaggaaagagtcagtctcttttcaaagttagaattattgccccttcaag

SEQ ID NO: 182628 - DNA, 359 bp, Arabidopsis thaliana nossen
ccaaattttgattcttatttgtccgataaaaataaattaatttcggtggtcatgccccttaaaaatagaggagggcatatgagaagtagtacatggattacgaaacgtaataataagagaagactcaagataaaattacttaattaattagaggttagagcagctaaactacaacaacaaataaaattttcagccattatcaattaatgaccatatataaatatacctgatacattatcatgatgttgaagttttttttttctttttgaatatcttgaagtttaatcccaaaagcccaatatatcccaaaggcggaacccacaccagattaaaatcatctttttttgagaaaagatccc

SEQ ID NO: 182629 - DNA, 255 bp, Arabidopsis thaliana nossen
cgcgacgtcgaattcgggtcgacccacctcgtacaaaccgagctctaaaaaggagtctgcaacgactacggctcaagaagacaaaattggggaaaaaaaagaaaagattttgagatccatagaaaaaggagagcttaggtttggtccttactaatacatgatgttcaacttaatcaagactaatagctgccctaacgtataaatttatcatttttttgccgctttttatgttttccttttacttaactttttact

SEQ ID NO: 182630 - DNA, 297 bp, Arabidopsis thaliana nossen
atcaaaataaagaaaagttataattaatttggaatacaacaaaaaaaaattacaattatttaagcaaatttttatatttaaaagtatttaaaattgactagattttttgttgagtaaccttatattttcatttgatcaaatcaatttaacatcaaatatcatccatataacttctcacttactttataccatacgtataattgaatttacttttcatatttgtttttgtctagcttcatgtatgcatctcaatattaacaacagtggttatcatattattatttcttttgtctaaaa

SEQ ID NO: 182631 - DNA, 219 bp, Arabidopsis thaliana nossen
  unsure (1)..(219): unsure at all n locations
accaccttcttcctaaggcagatttcttagcattttgaaggctcacanactctnncctcacaacaaacatacctactcttcctctgatatacacattctcttcacaacaattctcatcatcatcttcatcaccataattaaccaaagtcccctaacctaaccatgacatcacttgtgaaaaaacaataacaaatacttacaaaataccacgaacttatt

SEQ ID NO: 182632 - DNA, 379 bp, Arabidopsis thaliana nossen
gataaacaaaaatcaaagacactgtaagatgactcccagtttcaagcttgcctaaaaggcaatgataaatataaaatataaaaattgggattatttcatagcaaggcgatccttttaagacaataacgtttataagtatagtcatccctaacctagcaatatgaagaatcaaagaccaaaaaagaaaaaatgctttgtttaaggtccaggctcttgacaccaaaagcaaatattgaagtacgtcaaatatagagaagtagacttgtaccttaacctcaaccgaaagtgttgggactttcttaaaaacatctcttaagctgcgccggacaaaaatgtccaatccctgtccttcacgtatcattggtttaccaattgaacc

SEQ ID NO: 182633 - DNA, 226 bp, Arabidopsis thaliana nossen
gcgatttcacctccattttcttcgatcaatgctagaaccagaacctacgctagctcgcaccttaaggaggtgatttaattttcacacgcaatagggaaaattttctccacttgagatctatatttgttggtgcaccaaccatggctgtcattgctctaaagtgaccatctgaagaagcagctgttgataatatctctgcgccaaggatcaatgcctgcaacagtga

SEQ ID NO: 182634 - DNA, 386 bp, Arabidopsis thaliana nossen
attttgcattttaaattattcacaactgcatttttttttgtcttaaccgggtcaagaaaatcgttgatgctttacctagaaagctaattgtctttgttacacatcaccatcgtgatcacattgatggtctttctgctatacaagagagcaatcctgatgctattctagtggcacatgctaaaactaggcatcgcattggtatcattcttctatattgttttccattcataaaatccaacttctaatgttcggatactctctgagtccaggtggttggtctggtaactataccccagtttctggaggagaaaacatctatgtcaacggtcaaaaactgaccgtcatttttgctccggtaccatccagctctttaaatccttgatagc

SEQ ID NO: 182635 - DNA, 376 bp, Arabidopsis thaliana nossen
gttgcgttttactgtttgtgtgtttattctgtatccccaaatcaggtgggtttctcatgtttcataaccataggagctgaacaaagagttatccagaaaacttgaagcgcagacgcaaaggttagagcttgtaacagcgcagaagatggccatagacaatgtttcaccagaaaagcagcagccggacactcatgttgttcaagagagaacaccgattgcagatgaaggcgatgaggtactctctcatgttctctgtgttcagagtttataaagttcaatctgagaaagaccacagtttaatgatatctctctctctctttaggtggtagaaagggttctaggatggatcatgaagatgttcccaggaggaccgtcg

SEQ ID NO: 182636 - DNA, 389 bp, Arabidopsis thaliana nossen
gcaatagacaaatgtatcatttaacttttcaatacagaaacacatgggagaagaccaagatgtgcgttgggacattaaacgaggactcgataggataaaaaacctcaccttcaggtgcaagataaatccttccgagttctccatattgagcgagaatatggcgaagtctaacgtgatccatgtgtggtgggatacgacttaagtagcaaacacctctattgtcagctttagaagcttccttaagcaatttatctttcaacttctttttccttctatcagccttttgactcttcattggttccttggactccttctcctcggatattccattcgtaagctcgtgagattcctcactctgcatcttcttcagcagctgctgaatccatcac

SEQ ID NO: 182637 - DNA, 219 bp, Arabidopsis thaliana nossen
  unsure (1)..(219): unsure at all n locations
gncgcgatatgaagagtttgtgaggataatgagagattcctaaagaggaataggtgtagtggtactttggagtagatgaggaaggttcttgtagttaggtagcttaggaatagatgagtatatatttatagagagaagtttcttttaataggtagttagaagatagaatagattttagattagtgagggatatagagaaagagattcttctagttagat

SEQ ID NO: 182638 - DNA, 319 bp, Arabidopsis thaliana nossen
  unsure (1)..(319): unsure at all n locations
gcggccttgntgaccatcggcattatagtggtcggagtcttagatccggcgggaaccgagaattacggcgttgtggccgcctccaaggaacgcgaaccgtaaacggagggttccggtttccgtccatagacgctcttcgacgacgcaccaaaccaactacaactctaccggaaaactagccactccgacacaccggatcgacggtgtcggttccataccaagcatcccaacacactggggcttaacccctttcttctatgaccggatcttcgccgatttccttaagccgttactctccaaaccgggcggatggatgcca

SEQ ID NO: 182639 - DNA, 384 bp, Arabidopsis thaliana nossen
  unsure (1)..(384): unsure at all n locations
cgaaatnccgggtccgaccaacccttccgccctatttgccattcgacattttagattcaagagtcttaaatccggcgggaccggtcaataatgggtgtgtgggcaccataaaggaacccgaaccgtaaacatagaatgcccattgccctccatatacgctgtggcgacacgcaccataccaactacaactgtaacggaaaactattcactcatacacatctgatcgacggagatgagtccatacaaagcattccaacatactgcagcttaaccgatttattatatgaccggagctaaggcgattgaattactccgttactcttcaaaccggacggatggataacaactgcgacagatccaaagatcagagctcaaacaaaccga

SEQ ID NO: 182640 - DNA, 378 bp, Arabidopsis thaliana nossen
tattgatacaaatatgtgaattttaatcatttagaaagtggggcaaaggttaaatcaataataaccgatgctaattacagatttagcatcagttgcactaactgatataattgtttattcaatttgtttacataccacatatctcccacagaagaaaaaaaaacctccataattttttatatatatagtgattctggttttagatggtgtccaaaaagtgtaaagttactatcccaactaaatttaagtgttcgcttaatattaattaataaagatatttgtttcataaaaactaatttagtattattttataagttattataattaatataaacacttacaattatttattataaatgttgcaaatattaacgttat

SEQ ID NO: 182641 - DNA, 367 bp, Arabidopsis thaliana nossen
ataatcttctcggttcagggaaacctattacattggtcacaggatttatgtctagtctatgaaacaatatgctctaaataaataaaaagtagttgtttttctggaactttcctatgtcgacatttcactttatattttccatctattcagttcttgagttattttttcatagttggaaaccctgattgagcaattttcaagcaaagtcgtcaagagcccttgtcgtattttctttagtacttactaaaaattaaaaacataaggtggtaatgaacaagaacaatgaaatcaggaacatatatagagagattaagaaacatcaagaagacaagaacgtaggaacatatagaaaataagaaaaagcaag

SEQ ID NO: 182642 - DNA, 363 bp, Arabidopsis thaliana nossen
gtagattggcacaggatgcccacaatcaagctggtattgcccatagtggtggtttaggacctttattgaagcttctcgattcaagaaatggatcattgcaacacaatgctgcatttgctctttatggccttgccgataatgaggataatgtgtcagattttatcagggtgggaggtatccaaaagctacaggatggagagtttattgttcaagcaactaaagattgtgtttccaaaacactaaagagattggaggagaagattcatggaagagttctgagacatctgttgtacctaatgcgcatttcagagaagtctatccaaagacgagttgctcttgcccttgctcatctctgttcacccg

SEQ ID NO: 182643 - DNA, 307 bp, Arabidopsis thaliana nossen
  unsure (1)..(307): unsure at all n locations
gaaaatgaatacttcggtgctttcaattcttacacattgtatcaccagggccaggggccgatgaaatagctccggagattgngatcgctattagtagacctccgtcaacggttctttccaagattttctgcagacctacttgaacaacatcttgagctcactacatctcctttagagaccctccttctagtaaataccctggggaaaactcaaacctaagatcggtgggacctgctataactctctttgcatctgatgccatcacacctacacctatgcggatagtcacaaaggtcttactgagaat

SEQ ID NO: 182644 - DNA, 375 bp, Arabidopsis thaliana nossen
cgagattccggaagcaaaacattcctaaatttcgccaagtgagccgccgtgggagaagagaagtctctgcttcagttccgtagttttccttcactcaagacctctgatttcgctctcaccgaagaaccttcatggaggctggagaacaacgtgtcgtcgaatcgccggagaggaaacaagagaagcggtggcgtttttaccaattttgcgtccctttccgtagcgattaggagagatcggagagaatctacatttaacggtcgtaatggcggcggaggcggagcgttcgcatcggtttccgtggtgattccgaaggaagaggatgaattcgcgcctacctcggcccagctgttgaaaaaccccattgctttactg

SEQ ID NO: 182645 - DNA, 372 bp, Arabidopsis thaliana nossen
tctaaaacaaaggcaacgctcgggaactcagcttgtccaaggggtaagaaagcaggctgatgatgccaggtcttctactctgtctatgccatatcgagtgcagcgaatagaagagtttgtgaaagaactcgattcaggcgatctgaaactccgtgttcgggttcttgagtcggaaagagcagcccggaaagcgacaatactgcagatggcgacgatgtatacagttcttggaggaactctacttaatattggggttacatttagcaaccaaggaagtcagcttgttgccaatggatccttcattggagcagggatattcatgttattggtactgaggtctatgcaaagggtaaataagcttgataaatttga

SEQ ID NO: 182646 - DNA, 317 bp, Arabidopsis thaliana nossen
gacgatccatggacgtgagtttgctttctatggctatcgaccgaaaggggagataaaatctggtgaggcattcatctttcatttaagcgtttttagcatgtattgaattctgcaacatggtgaacaggatatatattcaaaacaagacgtcaaaaacttgaagtccagtaagagtctctaaagttcaattaagaatcaaaacatatgtaataaaaagggatctaaaatgttaccgatatctagctctattctaatttgtctattatttgtacgtgcatgcatctgcattatatacttgatgggacatcggacataac

SEQ ID NO: 182647 - DNA, 378 bp, Arabidopsis thaliana nossen
gagattagagagatgccattttttttttttaatgggcaaactaaggtgggggggataccataagaatataattgggcattttagtataatggtgatgaagtcgaaagattgtgcagtaaaatgatagagaaattaagcaaattaattgatctcaaccaaaaaaatttaacattcaaaattggggaaattctctaaataccacatttttgagttgttcttccaaaactctacttaaatggaggaaatacaaactttaaattgaaaataggaaacttaatataatattttaattttatttgtaatttcttttgattgaataaaaaatattttacataaaaatgtgtggtattattagaaaaataaactaattatcgtatt

SEQ ID NO: 182648 - DNA, 81 bp, Arabidopsis thaliana nossen
  unsure (1)..(81): unsure at all n locations
ggcggggaaancccaanncannaggccnnncganacaancaaananaaagcccggagggcgcgagagncnaggagcccaaa

SEQ ID NO: 182649 - DNA, 373 bp, Arabidopsis thaliana nossen
actgagtcgaacaccaccgagaaacccaacattataaacaacataagaagatgatgcaatccaatgatatgtgctcttaggatttccacaagtgtcccgggaaggctctcgtttagtgcaagtaagaaccattggcctgtatcaggaagtggaggtgtttccctatcaaagataaaaccatttatcactgaattgcataaccattccaaaaacagattagtgtaatttagttcaaagattctcaatgaatgttaagtacatgctaactcaaatcaacttaaaacaattttcaagattccaaatcaaaaccatgtactattcaaattgaagataccaagtaaagactatgagtctcactatcagatcaagtagc

SEQ ID NO: 182650 - DNA, 352 bp, Arabidopsis thaliana nossen
gcgaagttgcagaagcggtttgggatagcgaaaatggaagggaaagcatatggagggaactctgtggtatgtgaaggaaagttcttgatggctatgggaaaagaagagtgatcacgcctttgtttctttcttcttcatacgggccttgtggctgctaattagttgtcacatcctaagttgagtctcatttctatcttcaatttatgatgtttgtttgcacattatgattatattaaaaaagcaacttcagttttaataactagatgacccaaatatatattatagtttgaaatgagatgaaagacaattccaattcagcgcgagataccattacatatttggctggggaaag

SEQ ID NO: 182651 - DNA, 182 bp, Arabidopsis thaliana nossen
  unsure (1)..(182): unsure at all n locations
cacacacngaattccancgacatcaacccagcgaaaagaggggaanagcggaaaataaaggataagcaaaagaacanagcaacgcacaagcacaaccgaggacacgncaacccaancaganaccccaaccgcggcaaaagcgacccaaaggacaagaaacacaagaggcacaacgaaggaac

SEQ ID NO: 182652 - DNA, 185 bp, Arabidopsis thaliana nossen
gcgcgagctcctttctgcattgactttaatgaactatgggctgaataccgaggtcactccgtggcttggatgggccaacatgttctcggtatcgcaatgatcataactagaactacagaaatgaccatgtcccaaatcttaagggcgaaacagaccttatcagctgcgccttattgtacgatatc

SEQ ID NO: 182653 - DNA, 382 bp, Arabidopsis thaliana nossen
atttcaaatttaggatatatacagtatgttctattgtatatgtattggactaatgcggtaaagctgttatagtgtgagaaggacgtaacgagaggtcttcgtggacctaataataataacgttttacggttttatccaaagaccaaaaagctactagatctacgattcaaaccaacacgcataaagatgaaaattaaattttaaaaacagatctataatcaacatgtcatgtttggttggtctatttttttcaagtttttgaacactcccaactttccctccactcctttagtttaccacaatacccaatctatctaaacatgtaaccaccaaactccaaataatttgcatggcatgtttgagtaatgtgatccatgaattt

SEQ ID NO: 182654 - DNA, 373 bp, Arabidopsis thaliana nossen
agaaaacaaacaacattagactacctcttccaaaccaccacacatttgagtaacaaacataaagaaaactcgtaccttaaggatatcttcaacctcgtcccaaagggaaccccaaatacaactccttacaagcgaaagataagtaaacgtgtttggcttacaatccctttgagccatgtgctcatatactagcaatgcaactttcgattttcttgatttttcgcaagcgcttatcactagattatatgatgaagttgaaactgttaaacccgaaccttccatttcatacaaaagcttcacagctttctcccaataaccaagcttttggcatgacaccatagctgtgttgtacaaatattcatttagacaacac

SEQ ID NO: 182655 - DNA, 118 bp, Arabidopsis thaliana nossen
  unsure (1)..(118): unsure at all n locations
ggaacgggtatcaacggaagagttgtccctgttngnccgggccctacgggggtttgccgggttttccgggtcccccctcccaacacacaccatgccaaacaagtcacatcataggccg

SEQ ID NO: 182656 - DNA, 379 bp, Arabidopsis thaliana nossen
gtactataataccaccgagtaaagactcctaagatcgtttccattgggaaataaaatcagcaggtattttatgggtgcaaatggtttaatacgttgttgttggcttatttgaaagaatataagcgttgcatacttgcatgctaattacaagtcccccttaagaaatttctgtttcatttatttcggtacacatattcgatgagtttaagatatatttttcttaaaatataatatacctaatcaaaacctaacactaaactctacaaaagcattcactagaagtagtttcagtttgaaaccaaaaaaaaaaaaagtagtttgaaagatcaaacttgccctcgaaaatccaatacttttttcattgtaattaatgtgaaca

SEQ ID NO: 182657 - DNA, 383 bp, Arabidopsis thaliana nossen
tggaattgtagagttgacatttacctaaagatgcattttggaatatctgaggatgagttgtagttaatcttcgaagggaggaattatagacggttcagaagacccaaaaatggctaaagtaaacttgtggattgtttcttgttaaataagcaagcttagaggctcctctacggcgggttttgctttttcccgaacctatcagtactgtacgtaatatatctgaaacaaacgtaaaacaaagtttttgatggttgagcaaagtttgctttatgtggtacttgtttttcgaaacctcaaaggctcaaaccattttatccgaaatatgtgaaatagcagatcatttaatttaaaacatttttttttggctaaccatgcttaatatc

SEQ ID NO: 182658 - DNA, 193 bp, Arabidopsis thaliana nossen
atcttgcctcttcacaacctcacattcactgcacaccgatcacaccgagtttactttgtcccggaagaaagaaaaataatcataccattgaaaaaacgcttaagcattcactcttaagataaacacataaatttggctaactagtttataaacattgaccatatacatcaaacaactctttggagaattgccc

SEQ ID NO: 182659 - DNA, 370 bp, Arabidopsis thaliana nossen
cagaaactgaattagatcagctcatctgagaagaaaaaaacaaaaggagagaattaaacaaaccctagatcgtttgttgagaggaccatgctcttcttctaaatcatcttcagcaatctccaatttcaccggtagctcatctcggcacctggccgccgattcagactccggtcttaaacctccagatttcctcatttccaccatcccccgaaaaaacaaacctttccttctcaaaaactcaaattcagacaaaattcggataacccacaaacgaaatcacgaaattattccacaaaaggatttatttatctggaacgcgaaagagaatcaaaagcaaaccctagaaatcagagtataaaacatttacggg

SEQ ID NO: 182660 - DNA, 362 bp, Arabidopsis thaliana nossen
aaactatcacaccgtttcgattcttccgctaaactctcgccgtcggatgaatttttggccggcgacccattttagtggaagaccttatcctacactcgatttctttcgtttgagtgtcttagttaaaaagttacttcctttctgggaattatctggtttcggttcttgcaattttctcggtggttgtttggtagctgtggaaatttttgtgtctgggtttgtttgtttctgtttgtgttgctaactaggtttctgggttcggtttgattaattgaaagttgggaagggtgagataataaaagagacgaataaaaaaaagaggaaagtgtttgatgttttgcatctgattctgaatcgattta

SEQ ID NO: 182661 - DNA, 369 bp, Arabidopsis thaliana nossen
acataatgctcagagagattgaagtgtcaatgatgacacgttgttgggtgggaagctctagtcaatttcatccttcacatttaaacacctctgaaacagtaactggctaactgctcctacccattatagagatgcagcttccttgacgtgcttgatttgggagtatgttgtaccacctccgcaaacgtatgcatttcacacagaccacaggtccacaacagctgactgctttatcttcaaaacacgcctctttgtttcaaagtcaagagtcgaactatcaacattggcagaaattgctcaccagacttctaaaccaaactcaactttaaacattctccaaataccgctataaggtctccctaaaactct

SEQ ID NO: 182662 - DNA, 368 bp, Arabidopsis thaliana nossen
  unsure (1)..(368): unsure at all n locations
gactttctctagttttcgtctctgttttgcattgaagtttttttctgttgacaaaaaaagaaagtatcttccaagaaagaaagaaaaaacttacaaaaggatatattgtgaatggagtccatgaaaaaaagtctgttggcaaaactataaattatcctttctaaatagctgtttagaggaaacaccaggaaaagaagaaagaaacaaaacaatgtaatcttagaggcaagcaagccaagcaacctggcctagaaatgcatcaaccatcttgtttgatattcgaagagcatcttcagttttcccggcttttagatatgcatcaatcattgttgtgtatgtaaaaacatcangaggcaccaatctgtctg

SEQ ID NO: 182663 - DNA, 368 bp, Arabidopsis thaliana nossen
  unsure (1)..(368): unsure at all n locations
gaattcgggtcgtccacgcgtccggtcaggtgatgtgagcctcataatgggtcatcaagttggcaaactggagaatagtttttctacaatttattnatttattnctgacattataaatagttttattaactagactaccccaaatgtttacagtttataaggttaataagaaaatttactgggacattttaaagtctagtttattctactacatgtttttcaaaacaaatactcattttgttttaatttaattatcattttagcacttaaatttaatctcataataattatcgtttttagatttttaatgcaaatgtttaataaaaattgtgagtattaatgtcttgacaaataattttttttgaaac

SEQ ID NO: 182664 - DNA, 363 bp, Arabidopsis thaliana nossen
taacaaacaaacccatccctaattgttttttccatttgctatttaactaattaatcgcctctttgaccattttttagagacatctcatctctccaggtgacagaaatgcatattagtgtgtttaccaccactccccaaaaataaaccaaaaaattttgtttacaaaatatcaaatgcctaaatcagtgacagtattgcctaactcaaatctctctctctctactacaacaaatggcttttcacgactgtttctttagccttctccacgacgtttttggtcatatgtacacacaccaactgtgccttttttcttttgtatattaacatctctctcaagtggcccaggtctttccaacctacact

SEQ ID NO: 182665 - DNA, 233 bp, Arabidopsis thaliana nossen
gggaaatatctgtcaaactgcaagctcaattaaaagacacacagtaccttaagttcccctcgagaaaggtaaggcctcttttcaccatcttgtgaaaaacgaacctttcccctttcttctttagattttgtccactctttacatatttcagactgattccacatatcttccatatcttcgggggaagctcgagagtcccagtatgtgaaatccgtgtctgtgtcaacccgagg

SEQ ID NO: 182666 - DNA, 459 bp, Arabidopsis thaliana nossen
  unsure (1)..(459): unsure at all n locations
agccgtccgcatactaaagatgatagtcgtcaatcctttgagccatacgaagagtcagagacctcggtagattcataatcagttcgacgagaaggtagatatngcggcgacgtgagagaaaccttcatcggctttacagatgtcnttcgattccangnntcgcagcagagtttagacctctttnnccttctctttaattttngnnactcccannaccggagataaagatgtcatgatcttatccatggnncggcgatttcaattcttcctcngtnacccgataaccttcatatctnnccgccgnntcgataaanntagtttcgatggatacccaaacggtnntcgatcttttgccgccaccattcgnngccattggagaaagaaggaaagggtttcgctttcttagagaagttggcgaaggggctataatagctctgagnnattggaagaagaaagaaa

SEQ ID NO: 182667 - DNA, 219 bp, Arabidopsis thaliana nossen
cggacgcgtgggtttccaccaagcaatagttgcatgctattacccattttcaaagagtacaacaaataatcaaatggttggcgacaattaacaagttatccaatttgcaggaagatagccaggaaaggacttttattctagaagaataattgcatgaactactttgcatataactcggagaagaatttatatgatgaacgagtaagttacaggaagtcg

SEQ ID NO: 182668 - DNA, 366 bp, Arabidopsis thaliana nossen
gcggcgagagcgtttgatcgaatgaatggtaaagagattggtgggaagcaagttgtgatcgaatttagtcgacctggtggaattaagaacaggttcaggtcatctaggcaaccgcagctaccatttcaaccgcttcgagagccaccaatcctaattcctcctttgaggcgggcagtatctttcatcaaagataaaaacaagaatgtgagccctaaaaatggagttattgctgttgatgcttctatgcgttccttatgtatcatcgatgctgacgataataagactcgaggaacccgaggaacggaatccgaatgcgcggagacaaaaagcaagaatgtggcttagggggggaagaaagacagatga

SEQ ID NO: 182669 - DNA, 346 bp, Arabidopsis thaliana nossen
caaacacaacaatggggttttgagaaattccggaagactcaaagggcgtggttttatatttatttgtaaaaggatttatttgtcccatttcaatttccatttttgtaatttgtcataatgggaaaaggcgcaatcaaagaagaagagagcgaaaagaagagaaaaacatggcgatggcctttagcgactttggttgtcgtgtttttggcagttgctgtgagctctaggacgaattccaatgtcggtttcttcttcagcgatcgaaattcttgtagctgttcacttcagaaaacaggtaaatacaaaggtatgattgaggactgttgctgtgattatgaaacagttg

SEQ ID NO: 182670 - DNA, 337 bp, Arabidopsis thaliana nossen
cagaaatattgtgactggtttcataggtagcttgacgaaaaagaaaggggttattctgaggtggccgtgtgggaaaggtaatgtcaatggggaagagagaaatgaggagaaaggtaatgtcatacatatgccaaagctttcagagttttgagcgagtctttggtgacaaaagctacgtgttatcttcctggccaattaatttgctctaatctaattctacattctagtctcactgtgatcgatcttctaattatgataaaaaaaaattgtggctatataatcaaattatgaaatttcttaaaaatcaaatatggaaaagatacacaacaaagatgat

SEQ ID NO: 182671 - DNA, 343 bp, Arabidopsis thaliana nossen
ggtttgttgactgtaaattacatcggagaattgtagtgatcggggaaagggagtggcgttgttgggttggttggtcttgattctttcagcttcgaattagcttcttcgcttcttcgttctgggtttaaggttcaagcattcgagataagtacagaattagtggagaagttcattgaattgggaggacacaaatgtgacagccctgcagatgttgggaaagctgcagcagccgttgtggttgtactatcccaccctgaccaaattcaagatgtcatttttggtgatgagggtgttatgaaaggtctacagaaggacgctgtattgcttttgtcttcgacaatat

SEQ ID NO: 182672 - DNA, 139 bp, Arabidopsis thaliana nossen
  unsure (1)..(139): unsure at all n locations
aaaattcccggggctttccacgcatgcgataataaaacactttttttctctctttaaaaatcaaaaccanncgaaaaagagatttctaatttttctcgcaccaaaaaacacaacatatctcctactttatttccatttc

SEQ ID NO: 182673 - DNA, 336 bp, Arabidopsis thaliana nossen
gaagaagaagaagaaacaagaacacaaacttatctctttttgttatcttttgtctgaattaaaaaaaaaatggattctacttcgaatgatcatcaagagttggaacaattcgaagccattgatgatctcctcgaagatttctggttctttgataacttacttgacagaagatcaaggatcttgaggtactgtcattcagatccttacccttttacttcttcttcttcttcaacttgtcccaaacccgaattaccgaaaattggagattcggattcggagattaagcttctagaagcttctactgggggagactttgttccgccgccgtgtatagag

SEQ ID NO: 182674 - DNA, 320 bp, Arabidopsis thaliana nossen
cacatatcaaagtttttaatatttgcgtaattgaactactcaaaggagggtaattcgattttttttactaacctaaacaactctagaccactgatcataaacattaatcaactgccaactcaacatttacttatttatataaactatatttggtaacgtacacccaaaaaataaacatatgctaactatcgactcaagactataaactttgtattaaaagaatatgattataattcacaacaacccatctacttatttataattgactcactataaccaatatttaatatctcatacttgctattctacacgtacacgag

SEQ ID NO: 182675 - DNA, 204 bp, Arabidopsis thaliana nossen
acatacgcgacaacggagatatttcacgtatttttccattcaccctacaaaccataggtggaccttcgactttggagtcgacagatcttaatacagcactctcctttcaaactgcatcaacactcacccctataacaatctattcttaagattaacaatatattgtgccgatcaccacctatcaataaaaaaagcaactatttc

SEQ ID NO: 182676 - DNA, 338 bp, Arabidopsis thaliana nossen
gtacggattcgtggaagatcggcggcgattgggcgcctgttccctcggttcgtttccgggccagcgcccagcgtgcggttcgtgcgcctaacgtcatcgaactgttcaccgcacagggcttcaacctgttcgacatggacgatgatccctgcgacttcaccgatccgaacgaagacggcaccgcctcgcaggcagcttgcgtcggcaccaatccttggcaggtgtcgcaaggtcaggctgacggcggtaacctgagcagccctgctggccagtacaatgtgctgcaaggcggggagacgaccctgacgccggaaagctcggacactctgactttcggt

SEQ ID NO: 182677 - DNA, 240 bp, Arabidopsis thaliana nossen
ccggggcgggcgcacaccttccggagactctctctcttttcgcttaatatcatcggggaaaagaaacccaggcccggaaccaataaaacccttccgcgattcccggggaaaaaaacagtgccaaacattttcgcctctctattgcccctatgtatattatatacgtctcaagcaccgacagatttccttaaagatttccaccaggtttaagcgaggctttctcctttttattacactcct

SEQ ID NO: 182678 - DNA, 342 bp, Arabidopsis thaliana nossen
ctagaaacgtccaattccgaccgaatacaacttttgttattgaaatgagaacaaaacaatggtattcaattgaataacgtaggacccacgttgcttttggaataacgtaggacccacgtcgcaactcaaaaatcacaaaatcttcatctatcctttttggcggcaaaatttcttaacgaggataatcaaagaaaacaaaaggcaaatcggtcggttggtccaacaaatggtcccagagaaaaagatattgcctatgaaaaatggctaccaccttcaacgagattggtctcatgtattgtggtctgtggatattataatataccacacagtctacacacaatg

SEQ ID NO: 182679 - DNA, 343 bp, Arabidopsis thaliana nossen
gtttgaaggaaaggctcgggaattagctgtcgttatcaaaaaaggaggaggtggaggaggtggaggacgcggaggcggtggagcacgaagcggcggtaggagcaggggaggaggaggtggcagcagtagtagccgcagccgtgactggaaacgcggcggaggggtggttccgattcatacgggtggtggtaatggcagtctgggtggtggatcggcaggatcacatagatcaagcggcagcatgaatcttcgaggaacaatgtgtgcggtctgttggttggctttgtcggttttagccggtttagtcttggttcagtagggttcagagtaattattggccatt

SEQ ID NO: 182680 - DNA, 339 bp, Arabidopsis thaliana nossen
ctcctttacctctacttcttttttgctcagaccgaagaaaggcaggtggggccgcccaaatgcacggtccttgcgaaattggaaacggtagttcttcttcttccaagagaaatcgcaatggtgaaggcgggaccttcctgccccgaagtgccttcttcgggacacgagccgggcctttctacacacacacttctgcttttgtcagaatggtcaccaaatatggcggccgcgctcctagatactcggatagcccgagtagtgtaggctacgagagggttagagcaatgcgatttgtgtaccactaactccgcaatagctgctatggaaggaggtaagcct

SEQ ID NO: 182681 - DNA, 339 bp, Arabidopsis thaliana nossen
actatttacttctataaataaatataactattaagtatgaatgactctgttatgtaacttgatgtggataaaaatatgaaatcggactatctaataacatacatattattttgataactcatgaatagggatatatcactaatgaaattatgattgaagtatgagtccttctaaataaatcataatatgtattcacattggtgtcagatcatataataagcatcatataacctgactgatggatatgtacaacggtgagatatcgaatagatggatcatatgaacgtgtggttatctccaatgttctgaccgacacctttagcattatggtgttatcag

SEQ ID NO: 182682 - DNA, 346 bp, Arabidopsis thaliana nossen
ggagcgttggaccaggaacaagaaacattgagatcattgacctagagagtgacgtgattcacataagtggctcatcaaaagctgttgaagtgactcaggaatcaggcgatacaagtaaagagcctctgaaagctcaggaagaacctgataacgactggagaagttcggtcttctttccagacagagaagccccttcacattctgtacttgtctttgaaagttctaatgctagaccatctgtagaagatcttagcaacaccattgagcttggtttaaccccgcaagagaagaacatcagtagctctaaaaagcggaagaagaatacggaaagatgtgcatctaagaa

SEQ ID NO: 182683 - DNA, 270 bp, Arabidopsis thaliana nossen
cttcttccttatttttttttttttcttccagcactccacaatgcgaagcgtattactttagttgctcactttctactcagatttgatgacagcacatcaggccatggcaccagccatgtcagcttatctgtttaataatgcttcttcttcttaatacaaaacttgctgtataccacattgtatactccattcagttctacccttctgcttcccatattttcacaattctcttaaaaagctctatctattatgtatcttattcctctttct

SEQ ID NO: 182684 - DNA, 270 bp, Arabidopsis thaliana nossen
gtcccacgcgtcccgattcgtttgattcgaccttctgattttttttaaaacctatcctaaaatgtgggacccaatttattagcaccgggtcccatcatcacttacaaatgagagcacacattttactaattataactactattgataaacggacgcccctttagaggatccaatattacaaacccatgcttgctatagaatcccttttatatatttccatataaattcaattcactgtccagtgatactcatctttcttacttgtataac

SEQ ID NO: 182685 - DNA, 345 bp, Arabidopsis thaliana nossen
gtcaaaaacggctaattttctcagcctgagatccaatcctctacctccgatttgtctcctccaccggaaactctcctttcctccgagcttcctcggctctgaatcttccgacaactgcttcgaaacctttccacagttggattcgtgcttcttcacgtcgccggttggttctcggtggttttggcggcgcttctttgtggatgaacaacaatatgtccggtaaatttggcggtaaatctttcattgcttccgctaggcagaccaatccttctcccgtcgaacaggcgttgaataaggtggattggccagagactttccctttcaaagaagaagatttccagagat

SEQ ID NO: 182686 - DNA, 340 bp, Arabidopsis thaliana nossen
ccgggtttcaaaatcgggtctttcccctaatcgaaaagcacgaattttcaaccctagccgctttcgaaaattcccccaattttatttttttcccctaccaaattttcttcgaatttcagctcagatcccttccttcttccagatcgatcttcagatctattgttttttaagaatgggtttcaagcgaacgtttgacgctgaagatgttcaagagctcaacgttaagaatggaagacagattagttactgtaataagctggccaaactagatgaaggagttccatatcgtctttcactggagaagccaggtgtcgtagcaggatatgatataagtgatctc

SEQ ID NO: 182687 - DNA, 302 bp, Arabidopsis thaliana nossen
aacaactcttttatatctattataaaaagatgataaaacgatagggtgggtgagttttccagatcagtgttttcaattctagaaaacatctcatactagggtgcttattaatctgggttcaacaacagcgagatccccaatctcttactagaaaatatctccctgcgagactgattcgaccatcgcacttacatcgctctcttatgttaccagcttgacatcaccgaaatatactaatccgttaattcttttttacaagaaatgaaactcacatgctatgtatctattgagttctataaaac

SEQ ID NO: 182688 - DNA, 370 bp, Arabidopsis thaliana nossen
gcgctgagaccagtgaaacaacttctgtcgaagctaaggagacatctccgggcgagccgaccaaggaaacaactcctgctgctgaaccagaggttgcagccgtcgaagagtcttcttctgctgctgctggtgaggctgcagcagttgcacctgagaaagtggagaaggctgcaacagaaaacgctgaagcaaaggtggaggcggttgccgtagctgcacccgaaaaggttgaggttgcagtggaagcggagaaaaaggctgaagctgaaccagtaaaggttgaggctgaaccagtaaaggctgaggctgaaccagtaaaagctgaggctgaaccagtaaaagctgaggctgaaccagtaaaggaggagag

SEQ ID NO: 182689 - DNA, 199 bp, Arabidopsis thaliana nossen
  unsure (1)..(199): unsure at all n locations
aaaaacgggggggttcaccccgccgcccttaaacattcttacggattttctcaaaaacacaacacangagggaggggggtttacaaaattttgcggtggcaccacaaacagaaaacacgatgcaactgcaataataagtcattcaatttactattcgtcctagatagccacattcgagacacgttggtgaacacataaa

SEQ ID NO: 182690 - DNA, 393 bp, Arabidopsis thaliana nossen
  unsure (1)..(393): unsure at all n locations
aatcccgcggcgtcccacgcgtccgcacctgaagaagcaaagtggtcnttagctacacgaacttgaccctccttgcgtcgttcaaaaatttttttaacccatcanaataacatacaactttaaacctcacaaaactcaatctcaacccctaacattatttatttacgcactttctttttattaccactcaacacaactgaaacaattgcttaattccctttacaccaccgttttatcttataccacatctatcatctctactacaacacatattttcttaatacaaccttaaaacatctacgatatccaaaaaaatcctacataaccattttaaacctaaaaagaataattttacctttatctactaatctattctaactctcaacgaattcc

SEQ ID NO: 182691 - DNA, 358 bp, Arabidopsis thaliana nossen
cgaagaacgaaagagagagagagagtgagagagagagatatgatggacggcgttgaaggcggcacggcgatgtacggtggtctcgaaaccgtgccatacctaccggcgccttattaacatttgggcagaaaaaaacaatggcccttctgtttttgtaaaaaacttaaaagttctttttattttggttgggcaatttgtccggaatttgatcaagccgaaaaattccaaccggttgtgaacaaatgtacaagaattggtgattcttaaattggcagtcttaaaaaaatcaatggtaaatctggtctttctggaacaacatttactgagagattagaacttcttgatgatgaagaacaca

SEQ ID NO: 182692 - DNA, 368 bp, Arabidopsis thaliana nossen
gaaggtttgtgttgcttatggaaaagtgtatttggtgcagcaattcctgaaagacttgttgaaagatctatgcatatacaacaacaaagggagcaaccaaggaacttatgagctgaagcctgaatacaagaaagccactcaggaataggtttggtcaaaaggttttttcagggtttgttttggatactatcttttgattatctatagtgaggttaagcttgatcagttacttaaattgtaactgatcttcatggctataataagaaaggaaggttcgttcaattgtatgccttaagtattcacaatattaacgtaactaatcctttttagtgatgctttagaaagtaatcagttgttttaacttttgg

SEQ ID NO: 182693 - DNA, 364 bp, Arabidopsis thaliana nossen
aaaagttactgtcacttatgtttaattgtattaagtacaaaaaagggggaaagacttgttgatgggggtatacatatacaacaacaaagggagcaaccaaggaacttatgagctgaagccttaatacaagaaagccactcaagaataggtttggtcaaaaggttttttcagggtttgttttggatactatcttttgattatctataatgaggttaaacttgatcagttacttaaatcgtaactgatcttcatagctataataaaaaaggaaggttcattaaattatatgccttaagtattcacaatactaacgtaactaatacttttgagtgatgcttcagaaagtaattgactgtattaacta

SEQ ID NO: 182694 - DNA, 374 bp, Arabidopsis thaliana nossen
ggtctgatatttcagaagatctttttttaatatatgggaaacaacaaggggggggatactcgtttttttggtgtgttcatatacaacaacaaagggagcatccaacgaacttatgagctgaagcctgaatacaagaaagccactcaggaataggtttaggtgaccaggacctgtatgaacagcgttagatactatcgtttgattatctatagagaggttaagcttgatcagttacttcaacttcgaatgaaacttaatgggtatcataaaaacggaaggttcgttcaattgtatgccttaagtattcatcaaaatcaaggtcgaatctttttgatctactcattttaaaatattgtccactgttttaacttttg

SEQ ID NO: 182695 - DNA, 368 bp, Arabidopsis thaliana nossen
aattaatctacgtcacatactcgattttagttgtgagctgcaaaagtctcagtgattgctagtaagaaaaagtttgttcatctgcttttggtttggtccattatattgaatcattaagcgaattttgatgatacattgtgactactttgggttacatcatcatttatcttttacaaagggtttttgagtgtgactttatgatgtgtcaccaaacctcttatgacccattcttacggtgtagcaacatttcatttgttgagtatgtctaaagttagagcagaagaggaacaagtccttatctccaaatatgaaaaaaagttttgaaaacttaaatgatgagagagctttagttggagggtaagtggacc

SEQ ID NO: 182696 - DNA, 368 bp, Arabidopsis thaliana nossen
  unsure (1)..(368): unsure at all n locations
cgtatatatacattcatagcatggtgctcaatctaaaaaccttgatgcgactgattgagacatccatcgtcactgaaaagagaatctatcagaacggtagatctgttttcaaaactcgatccaggattttagtggctgagaaatgcctctgaacaggtaaccatgtgctgaacgaggggtatggcgacacctctgatacatctnatcaacaagatcaggggggcctgagaagagtgcttccaatgaaccatccctacaggtcctgacccatcccttatatatccgagctgctgagcgttctcaacaatacaatttctgtagcgaacggagcacattgtgaatctatatccaggttatgtgacttatgt

SEQ ID NO: 182697 - DNA, 334 bp, Arabidopsis thaliana nossen
gcgtcggtttttccatttactatttatctctcaaagtctggtaagtgtaaaaacatattatatattggtcaacacataaaaatcaatggagggagacaaactttgatggacttgatttggtacattataaatccaagcgctctatatatggccattgctcctttaagatatttacaacatctacaatattctctctagatcgatcaaaattactagccaatattgaatattgattacaaaaataccatacatattgcaaaatatatggaatggagaaacaactacatatagatgacctgtgattgtaatcgagtggtaataaatttttaatact

SEQ ID NO: 182698 - DNA, 296 bp, Arabidopsis thaliana nossen
aaaaacccccccccaaaaatctaccaaaacctcttaaacaaaaaaaaaaacaaaaaccgccctttaaaaattattgtccgctccacaccaaacaacaaaacccttatattctaaaacaaatcccacactactaacaaaattattttccatatcacatttaacattgcgcccaatcttcccaaaatatataatcaccaacacaacaatctctcttactaccacactacgaatacaccaccaacaaacaaaactcacaataatacatattacagtataaacaagtctcctcaaacacc

SEQ ID NO: 182699 - DNA, 366 bp, Arabidopsis thaliana nossen
gctgaaacatccaaattgacaaaaactttcctatgatcacaacaatcctgctgcaattaaaagagtttatggatctttctctgtttagatcattccaataaacatttaaaaaaaaacacttttggtcaatcaagcttcttattatcatgtttacttagtattactacctaattcagaattagttccctcgaatgtattattgcactatatgtttgattttattttatattttaagttgtctgattcgacatttattgtaaacttgcaaatttcttgaaaattacttcatgaaaacaatttttgtgaaatctcatgttatgcaaatatatatagttgttaatttattaagttttaacatgtaaaaga

SEQ ID NO: 182700 - DNA, 268 bp, Arabidopsis thaliana nossen
ttcatcaatctcccgccgcgcttcagacaagaaacaatgtctgggctgctggatggaatccccgaagcagtggctctgagatgcctggctcatgtgcctttacaccttcatcccaatttagaactcgtctctcgctcctggcgagctgctatccgcagtcatgagctcttcagagtccgtaaagagctccgatcttctgagcatctcctctgcgtctgtgctttcgatcctgagaacatctggcaagtctacagtcccaactgtgatc

SEQ ID NO: 182701 - DNA, 390 bp, Arabidopsis thaliana nossen
  unsure (1)..(390): unsure at all n locations
ccggaaaaaaaaagggggtggttccacgcgnccganacacactattctaattttttttttaaacaacnantaatcacaagccccttccttcgtgntttttgcgccccttcacaccccacacacaacacataaatccaactagaaacataactcactcgccacaacccgatggattcaaaaactaaataacctttaatctctctcaaaaaatcagtaaatactttacgctcctctgtgacgatactccagcgaaatatctttacattgtgctcaacaccggcagcaacatcgtctggctacaatgcgctccttgtccgaaatcttactctcaatccgacccgatattccacccgagaaaattcaagacctatgccacaatcccctgttctt

SEQ ID NO: 182702 - DNA, 399 bp, Arabidopsis thaliana nossen
  unsure (1)..(399): unsure at all n locations
ccacgcgtcgcgctctggtatcatctgtcttctttcttcttcacagcctactataantcttctgggtgactcaaaaagttgtctgtgtgtgtctaaatacctaaattaccctccaacgccctactgcatctctcctatcatacgcgccatctgtgacgctcatcaagcaagtatcactttaccacaagactctacatcatcagctcttcaacctacggacccagatctgtttctcaaatttggttgccgtaacgatttcactctctcttctccagattccatccaagaatgcttcaccaatcactacgtaacccttgcgaatctgtgccaacaccatcacctccgatcacttcaccttccgctattaaaactttggattctctccttacagtgacctct

SEQ ID NO: 182703 - DNA, 336 bp, Arabidopsis thaliana nossen
aaaaaaaaaaaaaaacgggggctaacaaatatctttggtcgctctttaataattatttattccctctgcaaagaaaagtgctcaaagacagaacaacagaacattttctaggtggtgaattcatacactcaagaagaaagggtgggttattcataaccaccttcaagaatagagctatacctatccccaaccacccggacgaactgtctaaattctaaacaagatttttactagaaaccaactagatttcttgatatatataaatcatcatagccctataagtccttattgtatggataagaccacaatttaaaaaatcaccactttcttacaact

SEQ ID NO: 182704 - DNA, 123 bp, Arabidopsis thaliana nossen
aataaaaatactttcaaacactgtcattatatataaagacacaacggacgagtggtctccccatactcagtggactcacaaccaccacgatcccaaatacaagaactcaacacattcctaaac

SEQ ID NO: 182705 - DNA, 293 bp, Arabidopsis thaliana nossen
  unsure (1)..(293): unsure at all n locations
nacttatatactaaatcattttcttgcccagatccaaacaaatcaccgggggcttttgcaattccggggggtctccaaaaccacaaatacagctttcttgctccctcccttcaatcaatcacgatcatcatcgctgtatttctactcctcgtactcaaacacacaatacattcatctataatcatatacaacaaagtctctatttccctcaagaatacaattcattattcatcataacatccatcaaatctgaaactaatactattcgagaaatccaaagaaacgtaacaaac

SEQ ID NO: 182706 - DNA, 374 bp, Arabidopsis thaliana nossen
tccggtttcattcatatctctctctctctctgggccttactcaatcaccaccaaataacagacaaaaaaacgccttcatcgccggcgaaagtgagtcggagaatggcgtatatgtgcaccgacagcggaaacttaatggctatagcacaacaactcatcaaacagaagcagcaacaacaatcacaacatcaacaacaagaagaacaagaacaagaacccaacccctggcccaatccatccttcgggtttactcttcccggttcgggtttctccgacccgtttcaagtaaccaacgacccgggttttcactttccacacctggagcatcatcaaaacgcagccgtcgcttccgaggagtttgactccgacgagtg

SEQ ID NO: 182707 - DNA, 220 bp, Arabidopsis thaliana nossen
cccacacgcccgcatgatttgtacattcttcaaccggtacttaccttgtcacagattttccgctgtagtctctcgattttattaggagatcgagcaccgcacttcgagcttcacatctctttgttcaatctcaaaggtagaaattcacgttaaattacatgtgatttcacttgtttttttgatactgtttccatatagatcgatctaattctgggttctt

SEQ ID NO: 182708 - DNA, 368 bp, Arabidopsis thaliana nossen
agcgtttcgacaccatgtcctactcttccttcaccgtctcctgaaaaagagaggaaaccatcccacaggaatctgagtaccaaagacatcatcctcattgcgtctggagcactcctcatagttatgcttatccttgtttgtgttctatgttgcttgctgaggaagaaagccaatgaaaccaaagccaagggcggagaggctggacctggagctgtagccgcaaagactgagaaaggaggggaagctgaagctggaggtgaaactggagggaagctggttcattttgatggaccaatggcgtttactgcagatgatcttttgtgtgcaacagcagagataatggggaaaagcacttatgggactgtgta

SEQ ID NO: 182709 - DNA, 272 bp, Arabidopsis thaliana nossen
caaaacacacctaactaaactttataatcacaccacactcctatccgaagtagcatttctaattttttctgatccttacaaaacacccaagcacacaatctagaaactccctatccaaaccccttacatttcaaacaaattaacaacacttctccagcaaaaactactaacatctaaccctaccaaaccaaaattttgaacaacattatccctgaccacctataccccttatttacattgtctctcatcaccctaaatcccaaaaccatttt

SEQ ID NO: 182710 - DNA, 374 bp, Arabidopsis thaliana nossen
ggtaatttaaaactggtattcatgtactgaacaagtctgctacataaaaagagtctagtttaaacaaaccgactctggttagctctacatcccaaaactctaaagtctgctgcagaagattctaattatactaggagttaagaaacttcaaacacactaaaacccgtagagctctaagtaaagatgttgatgcaagcttgagctaaatgtaaccttctaagatagattctgatacctctcccttggtaaattcccaaacatgataataaaagcatccaggagacattcatctcgataataacgccatcttcactcttcaacccgctttcagtcaatgagagttcatcttcttcaaaatcgtccaccatttcagc

SEQ ID NO: 182711 - DNA, 173 bp, Arabidopsis thaliana nossen
gtatattagtagatttagtctttcgtttgtgcgataagattaaccacctcatagatagtaatatcattgtcaaattcctctcggtttagtcgctaaattgtatcttttttaagcctaaaagtagtgtattcgcatatgacttctcgtcctaactttttttttaattaacaaaa

SEQ ID NO: 182712 - DNA, 350 bp, Arabidopsis thaliana nossen
agaaaacctagaaggccaaaactagaggagaaacccatataacacacaccgacatattcatatagatggtgggctcggaacatcatcaccatcatcaacaacatcatcatcaaaaccatcagcagcagcaacaaaggagcaaagaagctttagggatggtggctctccacgacgccctgagaactgtttgtctcaacaccgactggacttactctgtcttctggtccatccgtccccgtccgagagttcgaggcggtggcaacggctgcaaagttggcgacgacaatggaagcttgatgttgatgtgggaagatggatactgcagaggaagaggaggaacagaaggttgc

SEQ ID NO: 182713 - DNA, 430 bp, Arabidopsis thaliana nossen
  unsure (1)..(430): unsure at all n locations
cacgcccgtccccgctctctcannacaatcctacattatatgtagggnnttgctgcnnttctgagtggcgtagcaggtaaccatgttttatgcgccctccacttttcttnnaatgccanntcttttnntcctcttccctttctccttctctatantanntattttctgacctcnntgcaaaaccttnnaattcatcccatctnnctcaaacccaccatttntgtggaaacccaccatttcacagttncgcttaaacttnnttccatttgntagtatcaatttcatttattcattganntatggatgtctccaacccacgatgctcctnnngtagctgttgtttgcagcttacctggcttcttnggttccagcggatcttcaagtgtggcttaaagggtcccacgtgtttggcccagttttgggcagtctt

SEQ ID NO: 182714 - DNA, 188 bp, Arabidopsis thaliana nossen
taaaacttctatataattctcatttttatcacttaactcacacgggatatgtcgctatttttaattttatgtaacttaccatacatatcttctatactcattaaaatacactcacacaaatctattcaatgagccacttccactataaaaaatataaccactcaaagaccgaatcactatcacttaaa

SEQ ID NO: 182715 - DNA, 53 bp, Arabidopsis thaliana nossen
taaaaaaaaaaaaaaaaaaaagggaaaaggtaaaaattaaaaaaagtttaggg

SEQ ID NO: 182716 - DNA, 222 bp, Arabidopsis thaliana nossen
gaaccctccataataggtctaggaaaaggtatatattcagtttacatttctaataagtatcatttctttatgtcgacagtaagattatttctacatgtaatagtactatagtaaaaaacgaaattttaaatagtgatatgaaatttgttcccgtatataaggtgatcacttttgagtaaataatatgcgaaatctagtgcaatattcctaaacaaccatacc

SEQ ID NO: 182717 - DNA, 351 bp, Arabidopsis thaliana nossen
cttcaagcctcttatgcatgttgggtttaatggaagatagttagagatttatagtactgatcaaatcctgatacaggttgttgaagatggaggaagtgaagaggtttggcacaggaggaagacttgatccctttatttacaaggtatgaaacttaaacctgcacatccttcattgtgatatatattctagcaataagtacatataaattgatctttttgcctccttatttttctgtagattgcatgaaagattaagacattaatgctggaggcaggtaacacttatatcccctttcccactatctagttatatacagtttggtttgatcctgatatgggctaggaaaacgt

SEQ ID NO: 182718 - DNA, 197 bp, Arabidopsis thaliana nossen
ggggctcgaggtaaagcctcaacatcttatataatcctttattatttaaatcacaaatactcaaggggacagggacaatttattcgactttggacaaaaccctcaccaaaaaaaacacccccctacaccttccaatactcatgctctaaccccaaatactatagataccattccatatatccctacaaaaacaatct

SEQ ID NO: 182719 - DNA, 305 bp, Arabidopsis thaliana nossen
cacaaacaaagatatatatattactcaatactaagacaagaggctcataaggggcctctatgacatgattcacggaagttaacatctctctaatctcctttcatagctctgtatctcaacatacaatcatactgactgatgtaaccatagccaacttcctaatatgccatacaacagctgaacaagaatcccttaaagcattcacagctgtgagaacgagactggcattggcaacatcacttgtgcacacctatataatagcacattcatgaatcataatcattagccgagagactaaatatata

SEQ ID NO: 182720 - DNA, 358 bp, Arabidopsis thaliana nossen
ggagattgaggaaatgaaaaggtcaacagcttgacttggtcgcattggggcagacatgctgatttgaatgttcgagctaagagttgtttaatcggagtagtagccattactttggatcctcttcttcttcccaagaacctaaaaggttgacgaaggcagagtctcttatccggagggagttgacttctgacattagccgttattaataagtctgttagtcaactcttttcttttttcggaaaaacccctttattcttcgtatatttcacttaactccctgtattctcttctgttcaacgaacaatttctttacttttctatttcgtgaaataatttcctatttaagtgagataacttc

SEQ ID NO: 182721 - DNA, 347 bp, Arabidopsis thaliana nossen
ataaattaaggaaataaaaatttcaacaccctgacccaggggcactaaggcaaactatcggttttttacacacaaactaacaaccgcataatcaaacaactaaccattacttccaatcctctaattcttcccacaaacctaaaatttttaccaactcaaactctcccatccaaaataaaaccactatctaacattatcccttactaacaaatatcatactcaacacctttcttttttaacaaaaacccctttattctcaacatatctaacctaaccccctaaaacaaaatccttttaaacaaacaacatactttactatcctattacctgaaacaatttcccattta

SEQ ID NO: 182722 - DNA, 205 bp, Arabidopsis thaliana nossen
actaccacaactatcaattaccattccaccaaccaaaactcccaccaccaccaactacccccaaaccaactataaaaaactcaacgctaccacaacaaaaaactcaaaaacacaaaaaccttatcatccacccacaacatctaatacccaaccacaccctaaaaccaaccaaaactcaaccccacaacaagcccaaacaccaaaa

SEQ ID NO: 182723 - DNA, 207 bp, Arabidopsis thaliana nossen
acgtgcttttatgattccaaccgaacacaactgacaagcgcttaataattaaccgccgattcctatctctatcattcgacaacagatgaagataaagctaaacatcaaatccgctactacatcaaaacataacactctcccactgcaaaaatcattctactaaacactatgatcgcaccatatcctacttcaaccatagtctccggt

SEQ ID NO: 182724 - DNA, 411 bp, Arabidopsis thaliana nossen
ccgtccgacgagggtactagatgtagctatgccagatggctgtttcaattgaaagagacacagcatggggacatgtacaaggacacacctccaatggctacttctcatcatgcgaacatacacatctttatggatgaacaagatcgtctcaatagaaacgagttccttcaatatcactagatgacttgattgcttaatttccgagattttacgcaagagtgcaacatcatatcccacccttatatgttcatacagcaactactcgtacctatagagcaccgaactagaatcatgcactaattcacccacactcagatgtctctcaaatgaatcaatcaatcacaggattggtgttactgaacaaaacacatggatctatatagatgcttacagattcctaaccaatgccta

SEQ ID NO: 182725 - DNA, 285 bp, Arabidopsis thaliana nossen
caacacctggatatggacagggagagggctattgtggtacatactgagactgcttgtgtacattagtagttgttctttatacaaaagagaatgaatcatacatgtttatcttgatcaacatgaagaatagtttactctatgctatatgatgtgaccccatatgcaggggccatttatgttcagagtgatcggcacatgctacacttgtatattatacacgggaacggatatgtataaaggttctgtgaaagcttaatagagataaagtctattattgcaaaataa

SEQ ID NO: 182726 - DNA, 363 bp, Arabidopsis thaliana nossen
acccacgcgtcctaaaacattaactaaaaacaccttcaaaacttatttacccccaccacaaacgacaccaagaaaatattaagatttttaccaacacaaccacaaaacaacacaaaccacaacaaagccccaataaaaaaccggacaaaccaaataaaccaacacatacaagtctcacaaaagccaaaacaaacctactcaaacgacccaacacaccccaacaacagaccccttacacaccccacacatcttaaaataaggacaacacaaactacccaaaacagtcaccccacaaaaagccattaaaccaaaccacacaccaaaaataaaatacaaaaaaaaaaaaaacaaaaacccaccacc

SEQ ID NO: 182727 - DNA, 347 bp, Arabidopsis thaliana nossen
gttttatcatgatagacctaccgttagccctacgtcaggggagaaagaggggatgttcgctatttataaataatcaattacaacagataaatattgcgtgagagaccttgaatgtcctgacgttgctacgcccaaagatcaagaacacatttactctcaaagcaggaaaaaaataattctggcttcttcgttctagctttatcttcattagcttgcacttgctatccattcagatacctggcaatacatcacattatgttatctaatataagatgcaataaatttgctatcgcgtatggcatgcaatacagctgaccaaacataagaatctgttgtgtgacaaacac

SEQ ID NO: 182728 - DNA, 310 bp, Arabidopsis thaliana nossen
cctaaaacatgttatctccttatatcaagaaaaacctccggctcatatagagatctctaaactgtttagatctaaaactatacatacataacaacacctgcctcaaaacttaaactctttgccacaacattacttctaacaaaactatttatccacgtaaatgcatccagaaccaatacaacactaaatgaacattcatccttgaacccaaataaactaactgccctaatggacatgagaattttaaacacccctacacatagaacagtaggaaacttattcttctccaccagccacccaatcaacgatt

SEQ ID NO: 182729 - DNA, 371 bp, Arabidopsis thaliana nossen
atctcttcacacaaaagcttcaacccttaaactgaagctgttatattgcattgtaattggtgaatatatagatgtgatcatttccttttttcaccgttgatccaataattttactctcttagcgacctttttattttatgtgttgttggttgaattatttgtttgttctagtcattgcactactctcttaattttttgtcatcatcaaacaaatataataaaatctagaagatttgaatttaatttccacggttagttaaaatatcaccaagaaagcacaaaacacgtataattctacaattaatgaattaattacatcataaattagccgttaatctatataatgaaactacaattgacaagttcgaatg

SEQ ID NO: 182730 - DNA, 342 bp, Arabidopsis thaliana nossen
  unsure (1)..(342): unsure at all n locations
cacacaaaaacttcttcccttaaacttaaacatacatataccaganaaacgggggaatttatagattttagcaccccccttaaccacccataatccaataattttactctcttaacgacctttttattataagtgatcctgcctgaataatttattcaatctaaccatctcactactctcttaattatttgtcgtcttcaaacaaatataataaaatctagaacatttgaatttaacttccacccctagataaaatattaccaacaaagcacaaaacacctataattctacaaccaatgaactaattacattataaattaacccctcatctatataatcaaa

SEQ ID NO: 182731 - DNA, 266 bp, Arabidopsis thaliana nossen
  unsure (1)..(266): unsure at all n locations
caagaacagcnaacagaacaggaaggcgaaagngccggcaacnacaagaggagaaagnacaaggcgggaagggcaaacaacncaaaancagagggagcaccaaaaagcggaacccagaagaaaacaaaccgcagaaagggccgccaacancgaggngggncgcaaaaacacaaggaccggccagganggcncccacagaaaccnaaaccaaggggggaccaacacacgggcagaccaaacnggacccggcgccccaccgacaaaac

SEQ ID NO: 182732 - DNA, 223 bp, Arabidopsis thaliana nossen
aaaaaaaaaaaaacagccaaaaaaaaaacaaaggaggagacaaagaaaaacggggggaaaaagaaaaggggggggggacaaaaaaaccaaaaaaccagagagaccagaagcaagggcaaagagaagaaaggacaagcggagagaaacaaaaagggacaaggcgaaagaaaaacgggacaagacaaaaaaaacaggccaaacagaccaaaaaaaggccaaaaag

SEQ ID NO: 182733 - DNA, 105 bp, Arabidopsis thaliana nossen
aaaaacaaaacctttgtctttaacactctccttcaaaacccacgggtgtctttaaaaatttgtggtggataaacccatagaattatcaccttcacttttatacct

SEQ ID NO: 182734 - DNA, 364 bp, Arabidopsis thaliana nossen
gtaggttttaaacccaaaagcttgtatctttagtggaaaaatatcaagtgggctgcttacctgtcatgaggtgcatagcacgcaagaccttggtctccggtgtcacagtgataagcttattctgcaattgccagttcacagatccagtcagtttcaatccacaaaagcaaaaaaaaaatcgtacaatcgtgcatttacatacctcttcagtcataatgtctccaacttttgtcgatttggatgatctcccttgcacaatgatcttccgtagataatctagagaaatcacaatgccgaaaagtgaatcacacataccacaagacacaacaaaaaaattattaatgattagatctaattttacctc

SEQ ID NO: 182735 - DNA, 349 bp, Arabidopsis thaliana nossen
  unsure (1)..(349): unsure at all n locations
ggggggcccagcgnccgaaaaaancaagaancccacagccaaaagaaacaacagganccaggggggannaaagggagggaggggcaagcccaacaaaaacaccacagggcanggaccaaanagaaaaaaaaccggggaaggcaggaagagcggggggcgcgggcgggagaaaccgaaaaagaaaagagacacccaaacggaacaaaanaaaaagggcggaggcaaaaaaccaccgcgccggaagaaggcaccacagcggccccaacggcgaggaaaaaaaaaaaacaggnagaaaacgaacacgcaaaagaaacccacagaacccaaagaaaagcaaaagcaacgggca

SEQ ID NO: 182736 - DNA, 353 bp, Arabidopsis thaliana nossen
ggctcaaatacgcttaaacaacttaccacattataacacccatccgtggggttgttacttgtgttggttggtttctcacagaaataaatccactcctcttatcttatattaaaccaaaataaaatcaactcgagatgtttaaacaagctatatttataagatgattatacttcaaattatcaccacaaactttaaacatgataaataactaaacacatagccatagattacggttctcatattcaagtttaaagaatgcaaaggagccaaatcttatccttaaggaattaaaagaaaatgtgtagaatataaagaccaatgacttttttatttcagatcttactcgactgaat

SEQ ID NO: 182737 - DNA, 337 bp, Arabidopsis thaliana nossen
  unsure (1)..(337): unsure at all n locations
aaacacaaacgagananggagangagccaaaacaagacaaaagggcgggggccacaaaaaaaaaaggggcaacagagcagacacacgccgaaaagcgagagacacacagacacacccaaaaagcgcaaaagaagaagaaaacggagcaaaaaaggcagcaagcaacaaggagccaaacagggggcggacaccaagcgcacaagaaaccccgagcgcacaacaaacacgggagcaccagacaggaacaacaacacaacggggacaggaggaacacgaggaccaacccgaaaggaggacaaacaacggcaggagaaacacggcaacaacgacagggagc

SEQ ID NO: 182738 - DNA, 116 bp, Arabidopsis thaliana nossen
  unsure (1)..(116): unsure at all n locations
gcggnaccggnccggaaggcggggggcgacccacgcgaccgcgggaccaacggcacccagtttccctgcaaaaccctaaanccaagggggatcaaacactaagacgggggggcgaa

SEQ ID NO: 182739 - DNA, 365 bp, Arabidopsis thaliana nossen
  unsure (1)..(365): unsure at all n locations
cacgcgaacggggagaaagccagagaacggaaaacccccgagcgacgaaaggggcaggaagggggcaacaccaagggggggggggaacgagacccacaaacaaagaaaaaacaacaaannngcagannaanggagggaaagggacacgagaacnccaacganggacaagnagaaccggacggcaagaaacaacggaaagaggagcaacgaanaaggcaaacaaaagcaaggagaagaagaaggagacaccaccncccggagaacaaaaaagaggcgaaaaaaccgaccggggaagaacaggaaaagaaacaaggccacaaaaagggcagcaaagaaaaaaagaagacgacaaaaaaaaccaagaa

SEQ ID NO: 182740 - DNA, 385 bp, Arabidopsis thaliana nossen
  unsure (1)..(385): unsure at all n locations
cggnccggagggcggggggcgacccacgcgnccgaacaaaaggccaagaccaagganacganccagacaaacaaancgggaggggcncacaggagggggggggggaaaaaagacnnaaagacgccgaacggaaaccaccagagagacagagacgacacagaggcgggcaccaaggcagaggacancgccagcaacaacaagagccaagcaaaccaaccggccgaccaccacggagcaaagaacaaagcccgggggagaccgaaaaaccgcacgaagcggaggacccaacagagaaccggcgggacagaagaaacgcgggggacgaaaaacggagcaagaggcgccgaagggacaagcggcagaggaaccgagaaagcacaaggag

SEQ ID NO: 182741 - DNA, 265 bp, Arabidopsis thaliana nossen
  unsure (1)..(265): unsure at all n locations
cggaaggcggggggcgacccacgcgnccggacaagacaagcaacaaaagcccacgcagagacagaaacacaagggagggaaanaaggggggggggggggccaaaacacaaaacaaacccagcacgcaagagggaacaggaagggccgacgaaaaaggggggaccaaaaacaagaggggcgacaccgaaacaaacgacaaacgagaaaaaagcaggaccggagcaggggccagcaccgaagaagaaggagccaaggggcgccaaag

SEQ ID NO: 182742 - DNA, 365 bp, Arabidopsis thaliana nossen
ggggcgacccacgcgaccggaacacagaacaaagaagccacagaaaaagcacaagcaaaaacgggggggggaggagacgaggggggggaaaagacaaaccacacaacacaggaagcccaaaagcacagccgaagacaccacacaaagagggaggacaaagaaggacaaagcaagagagcaagagaagcaacgaaacagaagaaaaagcaaagagagcggcggcagcaagagggagaaacaagggggaagaacaagaaaggaggaacaaaaacagacaaccgaaaaaacagacgagaaggagcagcaacccggacaaacagggaaaagacagacagaaaaggggaaacggcaaagaagcaagaaag

SEQ ID NO: 182743 - DNA, 270 bp, Arabidopsis thaliana nossen
  unsure (1)..(270): unsure at all n locations
gggggggggggggggggggggggggggggggggngngggggggggggggggggggggggggggggggggggggggggggggggggggggggggggggggggggnggggggggggggggngggggggggggggggggggggggggggggggggggggggggggggggggggggggggggngggggggnggggggggggggggggggggggggggggggggggggggggggggggggggggggggggggggggggggggggggggggggggg

SEQ ID NO: 182744 - DNA, 380 bp, Arabidopsis thaliana nossen
  unsure (1)..(380): unsure at all n locations
ggggcggcccacgcgnccgngcaaanacancaccaggagggcttgccaancacgagaaannaccgggggagggancaacggaaacggggggcgcccgaccacccccaaccccaacagccacannnccaggnggnanngacagngaagaggaggaaagggagagcgacaaaccaagaacccgagacagccaagagaaacacnnnnccaggagnggggggacccgaangganacannncagcaaccagaagaagagcggacccaacacaannccaaagaaggccgagcgnngaggaaaaagncgcaacaaaacagagagacangaagcaaaacaagcgagaggacaaccnccagaggggcagcaaagagcaaaacgccaaaa

SEQ ID NO: 182745 - DNA, 159 bp, Arabidopsis thaliana nossen
  unsure (1)..(159): unsure at all n locations
ganacaaaaaaccaaccnagaacaaancgacaaaagccccncaaaaccggggggcnacgcccaacagagggggcgcagacccaacngacaacacgaacgaagcaaaacacagccccaagcaccggagaaaccaccggagacagaacaaaaaacccggga

SEQ ID NO: 182746 - DNA, 349 bp, Arabidopsis thaliana nossen
aaaaggtagagatccaactattttttccgttttccgtcataggaacattgcccttttgagggaatattgggtcttggtaactgcccactccatatctatcacaaaaatgactataaggactttatattctctcaatccagccacaccaaacctttaataatataaatttccaagaccaaacgtttagctctggtctaatccccaataaaaacaaatgatccctcacaaatcgaaccatttcatgttactttaactcaataagacatcccatcatgcggatgttcactcctagatccacatgatttaatatgacttcttaatatctcaatatcgctgtggtatacccatt

SEQ ID NO: 182747 - DNA, 379 bp, Arabidopsis thaliana nossen
  unsure (1)..(379): unsure at all n locations
aaaatattattatattttttttttgagaaacttttaaagtatctgaccaatggagatgacctaatgtcttaataattgttctagccatctattaaattacgaaactatatatttttgaaggtgtgatcagtgaaaataagagttaagtggctatatacacatcacataagaaatatttagcaaccattttcggttatttttatattgatttcagaaaagttaacattattggagctaagtgtttatagacactgtagaatgccatgataatttaaatttatccaaaagtgaaacgttttcaatttaatagatggttatttttatattttacttaatagactattaatgattntaacataattatgatgattatcagtat

SEQ ID NO: 182748 - DNA, 87 bp, Arabidopsis thaliana nossen
cattctatatgaacacaaaacacagctttttttgcttttttagaattttgccaagagggtactttggttaatctacggggataaggg

SEQ ID NO: 182749 - DNA, 205 bp, Arabidopsis thaliana nossen
cttgattcatctttccctgattaattgccaaaccatctgactcttcacacattctaatggggagggggggtcaatcaaataatatataggtaatgcgcctctttttaaaataaatgatattgctttgttcgtgttaataattacttctctactagtacattaatatatactcttaacttttaatgttataaatatatataaattt

SEQ ID NO: 182750 - DNA, 92 bp, Arabidopsis thaliana nossen
aaatataacaatacaacatatattaatcactaactacacatacggaacagtcaaaaatcatccgcttctatcatcactcacttaccatgcct

SEQ ID NO: 182751 - DNA, 90 bp, Arabidopsis thaliana nossen
ggccggggatcctatagatttttcctacttgaactcaattttttttattctatatagacacctacgggtctggtcatatttttggggttc

SEQ ID NO: 182752 - DNA, 404 bp, Arabidopsis thaliana nossen
cgggggcgacccacgcgttcgaaaattttcggtaaattttggtttcacttaatatatttggggctgttagaaatttgggaaattgttgggccaaaaataagaaaagagacacattctattgggcttataagatgaagtattttttatcatgtcaattgtctattttgcccttgattttctctgcaatgtttcttcttcttcttcatctctgcatttctttctcttcttaaaatttccagaaattttcaatttctttctttcttgacaaatttgtttttgattacaaacactaaaccctaagtgtaatagtataaagggaatcccaaccaaataatcaaacgaatgttcccaaattttagatctataaacccatcaacgaattttgaaataaatattaccattta

SEQ ID NO: 182753 - DNA, 298 bp, Arabidopsis thaliana nossen
  unsure (1)..(298): unsure at all n locations
cattcattctattttattttattactttnatttttttttttttctattcccaaacccggccctgttaaaatttaatttttggcaaaaaacaaaactatttaaaattttactttttcttctttcctctactcattttcttccctcatctcttcacatcttttttttcttctcatcatatacaaaatactttctacttctttccatatattttcttccctctttctttattatttctttattcaaccatattttttttttttttttctattctccttttttttctattctttcattcttt

SEQ ID NO: 182754 - DNA, 307 bp, Arabidopsis thaliana nossen
  unsure (1)..(307): unsure at all n locations
cccgcagnaccagnccaaaattcccgcttcaacccacacattctacaaaaaccattatcctttttcttttaaacctcccctatcacacccgtacgggtaataaaaaaatctgtgcggccaaaaaaaaaatcctaaactcattacctcacctccccaagactttatatttctcaccctccctgacctttaactttttttttccactaccttctcttccacccctttatttccttctaccaataattaaaattcattattatcctacactaatctaatcaaaacacaaatacattattctattacataa

SEQ ID NO: 182755 - DNA, 366 bp, Arabidopsis thaliana nossen
gttctttccattacacttgcttatgttcttagattccttattacaggggacttacctcatcaagagcgcgtgtacatcacctcaagaagggaaccatcctcattcctctcagtccattcctatagagtaattaggagaatacatatattctacataagcttatgtgcatcacaatccattacattatcgtcctttaaagaaacttgatggaacatcgaatcggattgttgaagaagggtgaaagtgattctcccttgcaaaaacaagctttttctagtttccatccaaacagaaaataattaacacttaagagtaccttagaagcttcaaacatatagttgttaaaaatctgcttaaaggtgttcc

SEQ ID NO: 182756 - DNA, 232 bp, Arabidopsis thaliana nossen
gttaagtgcataatgaaatcttttgttgtagtggacccaactcaaagagggtgaagatatgtattctggtaatcttatcggagaaaacaaaacaaaaaaacaacaacttgcttttctattttatttaaaggtcgtacaaatatttaatgtatgtatatgcaaattgtgtctaaatctcatctgtactaattagatgaatacaattcgtttttaattaacagcgatattcgtg

SEQ ID NO: 182757 - DNA, 283 bp, Arabidopsis thaliana nossen
caattttatgcttttagcttttttttttcatctctttattctctctctctgtctcttctgctcaagagggctaaaaaacatcaaaaaaaagatcccaaatttcgtatttcaacgtactgaatctctctctctttcgggtttattttggctcccgatatggtttaaaatttgggatttaaatggaagctgacgtgtcaattttctaaaaaaacctttatcgctaatatttccagattacctaaatataaaaaagattgaaactattttcctattcttttgaata

SEQ ID NO: 182758 - DNA, 355 bp, Arabidopsis thaliana nossen
tgcgtacttactttctctaactatttatgctacacatgtggatcacatcctgcattatctaattagaagtgggtccatgaacctaccaaccaagttaatattcatgggcgtatatttatctaaaaatgtgttgcgcatctatttttacgcatctaaataactaataacagctcgaaatatacatatataggattctagttacacacatatatatgtgtgcatgcatgtatttgtgtgtaatgtgtatagtattgtgaatgctttactcggatattgcctcccaagtgtcaataggatcaaatattcaaatttatttagacccacaccaacccactgtatttcacgttaaaatagt

SEQ ID NO: 182759 - DNA, 256 bp, Arabidopsis thaliana nossen
aaagaaatgtattctctctgcttcattcctacagctccattgattcgtgcgcctccataactcgatcgggctccaacaagcttaaatcgaattacccttaaaatgccagcttctctctatgtatctcatccaacaagatgcagcatttcaaacccgtcgtgctctgaggaattgttgcattctattggtggaatgtttagggcatagattattgttttcggaggtactttctttaacaatatcaagatgcatagtg

SEQ ID NO: 182760 - DNA, 365 bp, Arabidopsis thaliana nossen
agatgagttttgggtcagggtttatttaaaggaacatgcaaatagtccgggctcttgggcaactccaaggcatatacctcggattcattcagtcgacgccagtaatccctcgccgcatggggactttcatctctagaccccgaaatcatggtccaatccatattctgcggatgctctttttaatcgattttaggttatatttatattcttctttttcaccccctaaattcatttatgggcttctgttgggccttctaaactataaatcctaatcttatattataaacacctgagattcacaaaattctctaaagattgtttggttgtttggtttaattattgggattttttttttacataaaggt

SEQ ID NO: 182761 - DNA, 86 bp, Arabidopsis thaliana nossen
  unsure (1)..(86): unsure at all n locations
aaaacnggggacaacccacgcgggccgggaaaaaacatctaaacactttttcaaaaaattttttctttatatacccctcaatatac

SEQ ID NO: 182762 - DNA, 109 bp, Arabidopsis thaliana nossen
ctctaatttttgttcacccttttttctacaactaataaaaacgcagcgggtacttcgtccatttttcctgtctctaacatccccatctccttcttcttcatccaaaacc

SEQ ID NO: 182763 - DNA, 386 bp, Arabidopsis thaliana nossen
ccgggccgaaacacgcgggtcgaccacataccttgaaaaaagttttttctgattatttcaccacaccaacagtactaaagcgcgtgttttggtgcattcagggtctcaaactttaaaattttctggaagacattgatgcatccatcttgaaggattaacctttccccagcgcgcttaatgttttcaagattcaagcctttgagtacaccagactcaatcactctattatttgcctctttctcaaaatccgaaagctgctctagagctttacataaacctttatattcaaacttgtcctctgcaaaatattggaagaacaaatttaccacattgagagaaaaacatacttaaagacccatccactctataaaaagccaagtgcatta

SEQ ID NO: 182764 - DNA, 335 bp, Arabidopsis thaliana nossen
  unsure (1)..(335): unsure at all n locations
aaacaaaaaangggaggaaaaaacgcgggtcgacctacacattcagaaagatttttattgaatatttttgacccaaaacctggcccgttttaatggtctggggaccgtgtccgtgctcaaaaaccaactacaattaaaacgccggcgaggtggcggatcttgatccggttcttttagtttcttgaattggatgctttattctacattttaagaaaaagaattttaagtctgaaatttcggtttgggtcccaatatttttagctaaccttgcctttaatcataacctctggtctatctataatcccaaaactgggtatacagacgcttaggatgat

SEQ ID NO: 182765 - DNA, 348 bp, Arabidopsis thaliana nossen
  unsure (1)..(348): unsure at all n locations
cgggggcaaaaaaccgggggcgacccacgcgttcgctctgtattttagtagatattttaaagtatgagttgggatttgctagggtgctggtggctcacatgggtcaacagacgctatanaagctgcaaagtcattagcgatgtcaagtggtgctgttgttgcagtgtcaggagctgttgatattgttactgatgggaaacaggttattggtgttcacaacgggacgaagatgatgcaacagattactgcaactggttgttctctagctggtttgattgtagcgtttcttgctattgattcatcacgggtactggaagctacggtttccgctatggctgtctttggcat

SEQ ID NO: 182766 - DNA, 170 bp, Arabidopsis thaliana nossen
attcgatcaaagttttatatcacaattttatgagttactacggcgtaacttaacgcgagatgttggcttaatacaggaacaacaatccatcttaccataacctttcattacgtcatgccattgactagttctgaaaccctatccatttgtatttttacgagtacagaaat

SEQ ID NO: 182767 - DNA, 331 bp, Arabidopsis thaliana nossen
aaccggggcgacccacgcgggcggaagaccaccagacactttttgtaactttttcatactccaggacgttaatgcgggaatggggactggagagcttcacaaaactgaatctctgttctgcttatggaatgcattctaggtgtggattcggcaatgtgcaattacttttgaccggaaagcactctattaatggacacagaccaatcctttcttggctccaacattaccctcaagccttcttatatgctgaagatgtatcacaaggcaaagaggagcatcgatgtgatgacaatatgtgtctggaatcttcaaaaccttcttccttaaaata

SEQ ID NO: 182768 - DNA, 195 bp, Arabidopsis thaliana nossen
aaaaaccggggcgacccacgcgtgcgggtttttcgcctttttctaatttttttctcgtttactaaccaaccggtgttttttcagggttccatgggaaagtttaaatcccccaccaaagttgttgcaaaaattaaggcccctaacctttttataaaaggcaaaagaaaccttgaaattattattgcccccaaaggg

SEQ ID NO: 182769 - DNA, 375 bp, Arabidopsis thaliana nossen
gcgagaaaacgcctatctctgcttattggcttctccatctccgatcaaatccgcggtcgtaggcagagagagagacaaatgggtatgcctagggcaacctctggtcccgcttacccggagaggttctacgctgctgcatattatgtctgtctcacacagatctgatttgtaggcgaaaaacgtacatgtcaaattacacgacgatactgcactacttctctatacgctatacccaacaagctactgtggtgaccatgcattaataactaacctagactctggaatccatcgagccgtaggatactgatatgcatgcaaaggagctactgcggctttcacttacgtgaagggtcaagaatgaaaaagatgcacaag

SEQ ID NO: 182770 - DNA, 202 bp, Arabidopsis thaliana nossen
  unsure (1)..(202): unsure at all n locations
ggggcgacccacgcgnccgccgaaagaaaccagaacaaggacnncaagagagggaaagnaggagagggcccaaaagggggggggaggggcgaggaangggaggaccaanaanccgcgaacaaagacggcgcaaggcgcncagaggagagagcaaggaaagagggcaagccacgggaacaggagaagaagagncaaaagaagc

SEQ ID NO: 182771 - DNA, 204 bp, Arabidopsis thaliana nossen
  unsure (1)..(204): unsure at all n locations
ggaagaacaccnacnctaacataacgcccaaagaaaaaaagaggggcaaccaancagggacgggaaggggccncaaccaccaacaagaaccagccgaaacaaaaaagcgccaacaagacccgacgggaggggccgggaaacaagaccccacgcaaaaccaggagagccaacaaagggccccaaaagcacgccggcaaagaaaaa

SEQ ID NO: 182772 - DNA, 208 bp, Arabidopsis thaliana nossen
ttcgtatagcaacaaaattttttctttcctcatctaccccctcttggtctgggtcacttttgatcgggttgagtgtctacactgcccaacaccggctcaactacgtaccttctccatcaacttatcgcgctcgatccatcccaaatttttaaaagcgctgttaataacatatatatctatttccaccatgcacctcaactcctctaca

SEQ ID NO: 182773 - DNA, 350 bp, Arabidopsis thaliana nossen
  unsure (1)..(350): unsure at all n locations
ccccgcaagggatctttcactatcctttttattgatattgtcaggncaggagaggtagcttatacttgttatgtgatgtgcaacgattcttattatcaaaaaactgctattttactcactggcgcaacgattttggatcagcgtgcctgtctatcctcgtagagacaacatcacaaaaacatcgatttctgtaatgctacttcccaaggttttaaaaatgaatcctactcacaacattatgctcaactgaaacgagttctacacttcgataatcattgacataagctcaagaattggcgaaaataattcttgccacaagattcgcgctatgcaaatgacgctttaaacat

SEQ ID NO: 182774 - DNA, 335 bp, Arabidopsis thaliana nossen
aaacagtagagtaccatatttggatacctaactcccggttggggaacgacccctttaaaggatgaggcaatggctctatctgcggtattactatctatcacaaaggagataaattatactactgagctactgaatggaatctcaccgaacctgactgatgagaatctggaagacctagcttttatctcgatacaaaaaagtaaagaatgcaagtctaacatttttagcctattctcctcaggtagcacgaccgcaaaatacatctctgcattgaatatttcccgaatatgagtatgtgacttattagaactgaccctactgattagccagagaat

SEQ ID NO: 182775 - DNA, 413 bp, Arabidopsis thaliana nossen
gttacctgagaatttagtagttatattggtgaaagagctcctctcgctactgtctgttaagggtgatggtgactttaagggttaatcggcttctccgtagaaccttactccgattttcaccttgcataagctctaatggcgaagctgatgatgcatctttctcgacatcttcgtcgaaaaatcatggtccagagatagaaggagtttcttctagtcaagaaaatgaccactttggagagtttaggcaattgggtttcggaaagtcatcagctttgaatgctacgagcgttggtgatgctgaattcggagaaattcgaaaccctaggttcaatgagattgatgaattaagagaagatgacgatgatgatgaaggaaatgtaacaagtggagacgaacttgatgatgataatgat

SEQ ID NO: 182776 - DNA, 300 bp, Arabidopsis thaliana nossen
  unsure (1)..(300): unsure at all n locations
tccggtaatcgttctcgtccttttttttttccttctntcccattaacacaagagcaaagtcctactcgttaaaggttggagtattcatatcnctcttcttcagttttctctgtccccatttttcttctaagagttaaaacggtaacctcaaaatctgtgattaagtcaataaaagaacccctatttatgattctcatttactctttataatcaaaagcttcgatttttaacaaaacccataatctgagttcttgttttattattttttcgagtgatagttatattttttttttttaaaat

SEQ ID NO: 182777 - DNA, 394 bp, Arabidopsis thaliana nossen
gccttgttcttcctaacatcttttaacctgagtgagtttttgtgggcctatagatagatgctgagatggagcttttagtttcctcagctaacttgttgctgatgaccaccgtacattggatagtaaggtgcagcgggatacattctcgggtcaggttgaggtaccatgtatccatacccattgtaaaacttgtctccatagtacggatcaacccattgatttccatacttatctctaggctgcaacacatcataaaacttgtaagaatcagagatgtgtcaagcagagccattcaaagctaatcacataagtgaagttctttatggggtggacggttaaaaccacaccacaccaaactttttttcaagcgaaaccattatagtagccttatacc

SEQ ID NO: 182778 - DNA, 133 bp, Arabidopsis thaliana nossen
  unsure (1)..(133): unsure at all n locations
ctaatctgtacggttcttatttctaaagggtgaaaaccaaaagcgacgcatagggcaaatttggaaagggtgttttatntatggccgccgtttgtagttcgtcggagaccggtaactgcggcgtttcgggaaa

SEQ ID NO: 182779 - DNA, 320 bp, Arabidopsis thaliana nossen
aatttaaaaaaaaataaatgtaaaagaaaaaatattaaaaaaattatattaaaaaataaaaaaaaaaaaaaatataaaaaaaattatagaaaaaaaaatataaaaaaatgtataaaaaaaaatatagaattattggaaaaaaaatatattaaaagtataaaaaaaaaaaattttaaaaaatttaaaaataaaaaattaaaaaaaaatatttaaaaaaaaattataaaaaaattttaaaaaataatatataaaaaaatttaaaaaatataaaattaaaaaatttttaaaaaaaatttataaaatataaaattaaaaaaata

SEQ ID NO: 182780 - DNA, 389 bp, Arabidopsis thaliana nossen
  unsure (1)..(389): unsure at all n locations
cgcaatttgcagagaagcaacttcatctacaagaagaattagagattacggtgtttcgatttagctatgcgagaaactctngccgtttgaaggttttaattgttaaagatgtcgagttctatggaatgttctgagttcgtcggtagccggagatttacagggaagaagcctagcttctcacagacgtgtagtcgattgagtcagtatctaaaagagaacggtagctttggagatctgagcttaagaatggcatgcaagcctgatgtcaatggaactttatgcaactcacgtcagccgacaacaacgatgagtttattcccttgtgaagcttcaaacatggattccatggttcaagatgttaaaccgacgaatctgttttctaggcaacc

SEQ ID NO: 182781 - DNA, 269 bp, Arabidopsis thaliana nossen
aatagatcatccgtaaaagtgcacactgattctgacaggcaacgctatgggtcccatttattgtctggcgagggcgggttactctaggggtgctctcttgagtcacatctccagacttgcttaactgctaatgcgatgtatatactctactgggatctgaatgaagcatcatatcttatgtgacgagaatcattagattgatcaaacatatgctgtgcctactcctatgatgagataccaatttaagacttgacagatgaaacttatct

SEQ ID NO: 182782 - DNA, 53 bp, Arabidopsis thaliana nossen
tctttctaaaacactcaaaaaatatcctttttatttaccacacaattcccccc

SEQ ID NO: 182783 - DNA, 335 bp, Arabidopsis thaliana nossen
ggcccaagcgtcccaatgacgacatttctttgtttgtagttcgctgaacagtaatagttaaaagtaggttatttagtgttcgtggggaatgaaaattatgatatgagcaactaagaaattgtttggaattaaattcgatgtcagttttcaaacgtcaaaacgatggacaaaagagtataaaggttggtaatggaatctgctttttcgagtcgtgtggatgagcttgtaagtcacacacacttatgagttatgaatttcttctaaacatagacgtgaggtttgaattaataaaaatgcaaatgttatatattgtctctggactaaacataagtttc

SEQ ID NO: 182784 - DNA, 377 bp, Arabidopsis thaliana nossen
cacgcgtccgatggttgcgtttagtcaagctttcttgtcggcattaattgcattacttgctggccaattgccttcactgatggctgcagattgtccattagatttcagtggatcaaatttcactctagtagctactgtgtgctccaacataaccaacagaggcaaatgttgccgctacatgaacgcttttgttgcggtgtccgtggctcgttacgcgaacttgtcaactaatcttggagtcacatcagatttatctgaaacctgcattgcttccatctctagagccatggaaggctacggagtctcgagaaacgccactagtttctgcggtttgggaaccaagatccttgttaagtatgactgtgacggtcgaacca

SEQ ID NO: 182785 - DNA, 390 bp, Arabidopsis thaliana nossen
  unsure (1)..(390): unsure at all n locations
atttatttactctaaactgattctattatcttttatcaaaaccaacagggtaataaataaaaggttgttgtatacaaatgtttanagtcattgtaactatatctaagtcaaggcgtcgtcttctatttcacggcgataaaaacagagaaccttccatttgtttttttgagcgcgtggcgacttagttagcgccggcgtcggtcctccagtctggttttctttagggtttcattctctacttagtctggttcgtttttagatcatgatttgatgttggcaaggtgaagaatttttggatcttggatctgtaagagccatcgttgtgggctctgattcgtcaaaggttttgtgcgattggaactcccttttctctgttttgagaaaattatg

SEQ ID NO: 182786 - DNA, 269 bp, Arabidopsis thaliana nossen
  unsure (1)..(269): unsure at all n locations
ggccggggtcaacccactcgtaccaccaattttgttccgttttttatacatcaaattcatatccgatctggagagcaatggcgtcacggggagccacctcancaagagttgaattcgtatacatggcttatactcgccaaacaagcaaagcgtcacaaacaaatggatattttcatataataagaatcaaaatctcttaacaaacacgatactactcctcaaacaacgatagatgaattaattcattgacaacatcgttaacgaagctt

SEQ ID NO: 182787 - DNA, 354 bp, Arabidopsis thaliana nossen
  unsure (1)..(354): unsure at all n locations
gggggagggacgtcgtncgcacacacctctttatcctaaactgttattatatggcgactctcatctctccgnttggtgagagtcatgatcctaacttgcgccagcgcggttatctccnnncgcttaaacccactacctttcaccccacacgtatcgcttcatccgcgcacgctcttcgttcacacagctctctcgctccctaatctgctctctcaaattgccgcaagccgccgcaccatattccgcctttcggcaccacccagatccgttcgatacgacaccgcgccaccagccttcattttccgtcaggagacaaagctcccgagactccaactctctccttacctcgatcca

SEQ ID NO: 182788 - DNA, 292 bp, Arabidopsis thaliana nossen
taaatataatcatactttattataaaaaataaaacctacctatcaaatctaacaattttttttcttctttttcttccttctttttataaacaaaccacacaatttttttctttcttttttttccttaattcttattcttaaaaaaaaataatcactcctctcttttatatccaatctttcctactctttcattctacattcatatcttttttatattttcacctaaatttaattcacttatccgctcttttactacttctttacttttaaaacactctctttttccaacttt

SEQ ID NO: 182789 - DNA, 387 bp, Arabidopsis thaliana nossen
aacacatcattttctttccttttgtttccacccagaatatagaaccgggggggtatggtataacacatgatgagcatcaaccattctacgtcttcaacgacccacccgaccattccatataagactcctctctaccaaaccaaaccagatccttctagttagacccaaaaaacatatttttctcattcgaccgactcgaaagatctagctatacttgaagagaaaccgaagcagagtcaaaaagaagatatagtggacactggtagacagaagatcaagatgcatcggatacacatctctgctagggtttgtataccgcagatatggatacatgaagagcttcttaacgaataaatcagattgttcaacgattgacacctgtctaca

SEQ ID NO: 182790 - DNA, 248 bp, Arabidopsis thaliana nossen
gccccaccctctctctcacatctaccactctgctacctatccctcaaaggaagcatcgctgtgtcctgagaacagttccttctcccaaaacgctcaaaacttttctttcacatttctaggactctttagccattgaaaacaccttattcgatacccgtgcttgatctttcatcagctttttgtcaacactttttatacaaacgatcgatatgcctttgatttccacacattccaccacctttattttt

SEQ ID NO: 182791 - DNA, 273 bp, Arabidopsis thaliana nossen
cgaacacgaactgtgtaccgtttattctatgtttaattcataattaatgacctgacgcatttcatggatcttatccattaattcaactcttagatttggactatgaatttaaaactctggaatccaaaagcccaaaacctactagaaatttttctatgatttaaatgatggtgtaggagtagccgagtaggactacgaagctccgatggatgaattaattgatagagtccatcgataacgaagctttgagcagcacaaacgatccgcactaca

SEQ ID NO: 182792 - DNA, 362 bp, Arabidopsis thaliana nossen
aacatactttcctctgcttgtatttccagcacaccgaaccaaattggtcgtttaaaaattaatttgatgggccacaacacactttcaacgttatataagttctactgtctcttactcactatatacgacactcagtatcctccttatcttcttaatcacaagaaaaaatcggaacaacatcacagattacattaccgaaaaacaatataaaccgaaggacaaaaaagcaccaaatcacttatcatttatacgataactataaaacaaccctgtcttttcttactactatcacaaattaataacaccacatccaataccaacaattaatacaccatcttttacccaataacttcttaaaaccc

SEQ ID NO: 182793 - DNA, 84 bp, Arabidopsis thaliana nossen
gccgaatcagctgatgtgctctcgaagcaaagaggcaagaaatggaatggagcaattaagcatagtgagcctaatcaaacacag

SEQ ID NO: 182794 - DNA, 390 bp, Arabidopsis thaliana nossen
cgaatcaattaataaacatgcactatttttataggaggaacagaactgaagagcgggtcattgatattctgtcagccgatgcatcttcttacgagtacaataggaatctatgacgccttcataaaatctgcacagtgtaagaccatcaacggaaaaacaaggattacagtacacttggaaataagaaccttcaagtttccaatacacttacgtcttgtcgagcggccaccagatattgactctcttaccgaccaaatcctcgccaaagccatcagactccttaaaagatggaaatccatatgtcacatggtaacagataggtgacaatcaatggctaaaaatggggagagaaggtaacaaagcttattataccacttcttttctcactgt

SEQ ID NO: 182795 - DNA, 264 bp, Arabidopsis thaliana nossen
ccatgtgttgccattattcatatgctgatttcaaatcccctagccttgtaaaggaccatatgaatcttttgagagaaagtatatccaggttatagtggttgacataatgtttccagatatcattgacagttgatagattgcgctgaaaaactgcaagctgaaaataatattaatcagataacaaataaaaagaagataattatgcagatcaatgaaaatgaaacctccatgtcaaggaacaaaacgaaaagtccttaatgggac

SEQ ID NO: 182796 - DNA, 389 bp, Arabidopsis thaliana nossen
gatacttgtattctttactattttcttgctccactaaccactattactgccaatttttacaactatatattgccagtcctaatcataatagttatgattatgctaataattttacgaattctcaaataacccacttatcattgcctaactgtgttttcctttgtttattttagttctttttagtttttaaaaagaattagtgtgcttatgttttgtatatatcaaagccagattttacaatttgagtaggaaaacgaactataagataacaaattttacccatgcaaatttaatcacacaacacaatcacaagtttaccccatgaaattattagtctaaaatatgatttacgttgaatttttaacttgataatcttgtctagttattat

SEQ ID NO: 182797 - DNA, 315 bp, Arabidopsis thaliana nossen
  unsure (1)..(315): unsure at all n locations
gcgaccggngaggaatcattattctatatttattttaaatccacatcnncnaccacgagaggttccattaataagtgtgtggcactctaataaacatctatgccnaananngccgaacagaggcaacattcgccatcgtgtctgcttgaaacatatatctcggcgagggaccattcgtttccaaccaattccatccaatcagaagcgtagccgcactaaaccaattacacctatttcaatcctcactacctaaagccaactccatatatcaatccccgagtctacaacagctaacaagtttttttcaatctcatc

SEQ ID NO: 182798 - DNA, 338 bp, Arabidopsis thaliana nossen
  unsure (1)..(338): unsure at all n locations
gcgacccgnacgtaaagattgttccatcttaattaaaaagacccaagcgcancaagacatgtggcattaaacagtggtggaccctctccatactcagcatttctctcatttcaacaaccaagaaagatttgtccatacaactgctcgacacacatttctacttgaaacaaatactaaaaccaatcaacactacccaattatcacttaaacttacatgttttcaaaaactccatcacctttactcatgagctacagcttacttatcaaatctacacgaaaaagttacctgattgtacatctaatgtgcattattactccaccaaactaattttcaacac

SEQ ID NO: 182799 - DNA, 368 bp, Arabidopsis thaliana nossen
  unsure (1)..(368): unsure at all n locations
atccattttcttcaacattattatatcacacataaatccttaaagggtgtgtctttacaactttgtgggggccncacaaacataccacatctctttacactggtccaaccaaacaaatcatatcccattcttctttctatgattcacacaacaatgcttcactaactatggcagacactgcacgcctgaaatacaatctacatcttcttataacagactaaccataaaccactatcactcaaataaccctaccacttataatcctatcaccagtctatacacaccataccatgcatcttcataaattcaatgccgcatacccaacttatcttataatttcctccatgcaaatggtacatacacaacca

SEQ ID NO: 182800 - DNA, 236 bp, Arabidopsis thaliana nossen
gcggcgggagcccgggcacgagaaggacggcgccgcaaggcaagggcacggggagaaccgcggggaggatggacacccacgggaacgcgaacaagcgccgggcgaggtggcccaaggacagggagacgagcgaacaggaacacgaacaggaacggaagggagacaaccaacaccccgcgggaacgggagcgagagccgaacggggaaagaaagggagcggaagagcaaggctcggc

SEQ ID NO: 182801 - DNA, 247 bp, Arabidopsis thaliana nossen
gcgtccgcggaaagaagcgcacttgaatttgtttacaaacaagcatcaacacgcctggcggggattctgcgacggggtgggaaacaaaataccttcagaatagtaagagctttcgataacctaagcttcttcactggggactgtccattagaaggagcttgagattgacgtagaggaggaggggaattgggtggtgagggtggcccattaacacttccattctttgattgcactggtttcttagaag

SEQ ID NO: 182802 - DNA, 200 bp, Arabidopsis thaliana nossen
ccagcggcggcagaccaacacgggctcagacggaaagcgccggcgggaaaggcacggggggggaaaccaaccgtgccggaggacagcagcggccacaaagggcagcggcgggggaaccaggccacaggggagcacaaaagccggaaaaccacacacgaccgaaaccaaaggggccactggagcgaacagaccgggggcgg

SEQ ID NO: 182803 - DNA, 232 bp, Arabidopsis thaliana nossen
  unsure (1)..(232): unsure at all n locations
acagggggaacaaaagaagcggnnggaaaacgggggcggaaaaacgacagggggggggganaaaaaagaaaaancanaaagcaaaaagaaacnaaacaacnncaacaaaccagggggaagaccagagggggaagagggggaaaacgagcaaacagaggaaggaagagcaggagcaggaggggacacgagggcaacgggaccaaaaagcgcgaccagccaaacaaaacgcaaa

SEQ ID NO: 182804 - DNA, 330 bp, Arabidopsis thaliana nossen
  unsure (1)..(330): unsure at all n locations
acgcgtccgaaacaagaaatgctctatcctttacgtattcagctccccaaaggtcccgggggggtgcaactcttggggggggggatccctctgcaaagcgtgataaagcatggaacattgtgcttcctagagatgatgtcatgaaattaatggatcgtctcatgaaccaagaaagagttgctggatcaatcttttacaaaatgcaatgcacgaaaggattccgtcatgaaccacctacacatgtatattattgaagagacatgtgtgcccatgcaagagttntaggacttgaatagacaattgatacaaaatgggcgtatatgtgggaca

SEQ ID NO: 182805 - DNA, 242 bp, Arabidopsis thaliana nossen
  unsure (1)..(242): unsure at all n locations
cggaaagcaaaacaaaacaaaacaaaaacagagcacacaaaaanacacaccaagggggcacagaaagggggcggggaaccacaccccctccacctccacacgagaagctcagaacataaccagggcaaggccacgggaatccaccaccgcctccagggcagcccccaacgacaaaggggaagcgcagaaccggcggcaccaccgaaacacggggcaaaaagaggcgaacccccaacaaaaac

SEQ ID NO: 182806 - DNA, 220 bp, Arabidopsis thaliana nossen
tatccctttccacgtttttttacttcttttcgccatccggttgtgtataatattgggtgggaaaggattactggctttcaattctctttccgacatacactttctacttggtctgcatcttcttcttttttctgatatcacgttctcttttttattttgcggttacacactttcccggaattcttgtattcatacaactaatgcttctcttaactgttct

SEQ ID NO: 182807 - DNA, 234 bp, Arabidopsis thaliana nossen
acgcaacatctcgtggcgcaaacggggggggagagggaaacgagggaagggaatctcaaaagctcgagttcacagaaatgacccgaggacacaaaccaatcagcgggggcgtgaaccacaggcaaactcgactcttgaataacaaaacagaaggccttgcgaaggcagcaaccgctgctgcgtcagagggccggaacgcacctgaggagcatactcttcccaagcccatgaaag

SEQ ID NO: 182808 - DNA, 359 bp, Arabidopsis thaliana nossen
  unsure (1)..(359): unsure at all n locations
cccacgcgggcgagccngaaaannaanaggtctttatcacattagattattcatatgggtgaggaaaatgtatgaggggagcataaacaaagtttgcaaggaaaaagttttataagaaaggcaaagcattggaatgatgataatggagatgaaactatgaaagcatgatgttgttagtgaaaagagaaagagggactagaaataggttgatattccccaaaatccaaaactactaaaggacacacttacaagtgacaacaccaccaagcgtggatgtgttgtgtacagcaccaccggngnattttacttcaccaatcaattgatgtaaaaaagactcatatataaatgttcacatcatc

SEQ ID NO: 182809 - DNA, 279 bp, Arabidopsis thaliana nossen
cacgcgtgcgaaaaagcttcatattgtcaccacattaattccaagaaaattcgcattaagggtctgcaaaaggtaatggggggaaaattaacatttggtcctttattcaagaaaaattcgcattaatttatttatttaagagaggattacctaaaatggggtgtataaattgcaaaattagctctggtggtctgctaggagagtgaatggagaaagagggtgttaccattaccagtacaactatagttgcagagttcagggggtccttggagtagcatt

SEQ ID NO: 182810 - DNA, 374 bp, Arabidopsis thaliana nossen
  unsure (1)..(374): unsure at all n locations
gacccacgcggccggaanaaacnggagcgatgtggaaacagatgagaaccaanacnngggggggcctaaggggagggggagggaaaacaacaaacatcatttataaggaagacaacggccccacaacatgcacaagcacaaagaaagagcaatgacatctacctctccccagaaaccaggaggcataaacgcccaacttgaagaaccacggcaaggggaagcccactgtcaggggaaggacagggccacaagactaagccataggaagaaggaaaacgggggccaggaggcagaancaaaaagaacacccacgcagcaagggacccaaaacgactcaggagacgtntncacagaagaaggatcaaacacaaaag

SEQ ID NO: 182811 - DNA, 260 bp, Arabidopsis thaliana nossen
  unsure (1)..(260): unsure at all n locations
cacgcgaccggcgaaactacaacaagttcagtaagaggcatctncancgnctcaggcggaacaaggagaggacgggggggcacacaaaaccananccaaaaaagagcgagaacaccacggaggcacacaaccagcagcgtgcacatgcttagcctcaccaaaaagccccacagacacaagggcagccgcagccacagccacaacaacaagagtaaaacaggcgcacacctcctacacagcgacaaaacacaccggcacca

SEQ ID NO: 182812 - DNA, 275 bp, Arabidopsis thaliana nossen
  unsure (1)..(275): unsure at all n locations
cacgcggcgaagagaccaaaaaggaggagccaaaagccacgcgancaangaaaggggggggaccaggaagggggggggcggaaaaaagncccnnacaaaaccaanaaancnaaaacngaaaagaaaggcgaagaagaaaacggggagcaaancgacgcagagcncgggcncacaaaagagaagccgcacgagaggcaagacgaccccgagaagaaaaacgaaaaggccagcgaccagggccnggaaggagagcagaaaaanaacgggagacggaa

SEQ ID NO: 182813 - DNA, 291 bp, Arabidopsis thaliana nossen
  unsure (1)..(291): unsure at all n locations
cagaaccgggccggaagncccgnnggcccacgcgtgcggcggagccacccgggggacgtctatctagcccgaagccgtccgctcgggggggcgcaatggccggcagggggggacttcactcgcgggatccaaccagcagaccgactgcggcataggggctgcagcacccgcgcgaccagagtggcggataagtcccaccaacgactgcgggccgagcctactggagcaagaactcctccgccggacgggccgaggggagcattcaggcaccaaacaggcaaacggcaccca

SEQ ID NO: 182814 - DNA, 261 bp, Arabidopsis thaliana nossen
ggccgacacgtggacggccgcgtgggcacaacgtacaccaagcgaggcatggaagcgaggcggagacatataacaaccacggaaggaacaaccccgagaaccaagcgcagccgcaaaggcaaacggcgaagaccgaggcggaaccggtggggagacagaacccaagggagaacacacacgggaaccaagacacatgggacgcgggaagagggatcgggggcagaacaaagacgagaccgttgcgcacgcgagcacgggcgg

SEQ ID NO: 182815 - DNA, 267 bp, Arabidopsis thaliana nossen
  unsure (1)..(267): unsure at all n locations
aaaaaccggggnnccgcacgcgggcgagcaaccgcagcagcancgaagaacaacgaacggggacncncaggcacgggagcagaacaaaggggggggggaccagaaaaaacggaggccgnaacncacgaggaaacangggcgaggagaaaggaggccggggaggccgcaaacncgagagcagggcgggacacgcaacaaacccgaggcggcgcgaaccaggcgaaacagcgcaagaggacaaccaagggggggaacgaagggacaagg

SEQ ID NO: 182816 - DNA, 257 bp, Arabidopsis thaliana nossen
  unsure (1)..(257): unsure at all n locations
ggaaggggaagggaaaananagaaaaaaggagggaggaaaaaaggggggggcccnaaaaacaaaaaaggaaacccagangaacgagaacacganaaggaaggaaccgcaaaggcaaagggacgggggagaacgaaggacagcacggaggaaaaaaaaaaaggaaagacaaaaacagaaaaacaaagaaggggggggacgaccaaaaagaggaaaaagagaaaagggagggacgagaaagggaaagaagaagggaaga

SEQ ID NO: 182817 - DNA, 290 bp, Arabidopsis thaliana nossen
  unsure (1)..(290): unsure at all n locations
ccggggcgtccnanncgttcgcgcctatccactgaccacaatttttctcatcccggaacccaacaactggggacattcaaaggttttggtctctgccaaaaacaccgaaacaactcgctttgtgaacagatgcaggctagggcgcccgccatcccccacttaaaaatattataaaaatcaaaacaacacaaacattgatacacataaacctattttcggctacattcaacacaacctaatgaacaattcaccatgaaaaacacatactaacttacaatcttgaacagaca

SEQ ID NO: 182818 - DNA, 163 bp, Arabidopsis thaliana nossen
  unsure (1)..(163): unsure at all n locations
ggaaacaaaaaccagaaggacgggggagaccaanaaccaaangcggggggcaaaagaagggaaggggggggaaaaggagganagcaacncccacccgcaaaaacaaacagcaaaaagaaaaagcggggacgggcaaaagaagcaacggacggagaacgaaaca

SEQ ID NO: 182819 - DNA, 174 bp, Arabidopsis thaliana nossen
  unsure (1)..(174): unsure at all n locations
gaaacgcagcancacgcgngaaaaaccccggacgacaacaaccggggcgggacagaaaaaggcgggggggccgacacaagaacaagagcagaagcgagcgacggaacccgaaggacgagacaagacaaggcggcgcgaggaggagaaacggaacacgagaccagaagcggggaa

SEQ ID NO: 182820 - DNA, 366 bp, Arabidopsis thaliana nossen
cgtcaccaaagttctaactattttttttgacaaatacataacgtacgtgggggataccaatgtttttggggggtgaacaacagaccataagatccgaaaggttaatgaatcatctctatgcattgcttataacggtaattgatatattctaaatcatcaataattgacaaccaaacgcttcaaaacccaatactcatctcttaatccatacttgattgttctgatgatactaagaaaaataacaaacgcgactcaaagtatcattacaaattcatacacgcatactatgtaacacactacactaactccaagttgcctattataaactattacagtgaaaacaatgttctcacaagcataaaatac

SEQ ID NO: 182821 - DNA, 236 bp, Arabidopsis thaliana nossen
  unsure (1)..(236): unsure at all n locations
gcgggaaccggancaaaanagacaacagagcgaaaaggagccaaacgcgaaaaaaaacggggggaaggccgaggaccaaaaaaaanccgaggggcgggaaacggaggggagccacacaaaagcaccacagccacagcgacagggaaaaagaagaagacgngcgaggagagaacggaaaaagaagacgaagccaacgaaaaacgcaacgaaagaagggggagaacacanggacaaaa

SEQ ID NO: 182822 - DNA, 316 bp, Arabidopsis thaliana nossen
  unsure (1)..(316): unsure at all n locations
aaaacagcaacgacacaccaccggcggggaacaaggacgggggggggggcaaaacaanagaccncnccaaaacagaacgcnccgaagcacccgggcacggcggggggacgaccccncgggcggaacaacgccaggggcacccaaacaaacgcagcggaggggcggggcaaagaggggaacgagcaagggcggcagaagggaagagacgacgcgcggggaaaaggagcggacgggacgcaganccagcccaccggagcaggggaccaaccgaacaccgggaaaaaccacggggacgggggcgggaacagagacgacc

SEQ ID NO: 182823 - DNA, 200 bp, Arabidopsis thaliana nossen
caccacgcgagggagatacggtttttgacacagatgctagaacgacacggaaggtgtaacgtgtcttgctatgcgccgaacacttaccaacagcgcgcgcaacgagccatgtatgaatgacttcctaaacaacgtttaccaagaacatcgatacgaccatatatagaacaccaacgcggtactaccagtcataagaacta

SEQ ID NO: 182824 - DNA, 331 bp, Arabidopsis thaliana nossen
  unsure (1)..(331): unsure at all n locations
aaaaccggggggcccaacgtgcgcacccccatattttcaacgagtgtttaaccgtgtncagacaagaaacggtggctttaacagttttttggggttcaaacccacactccggcgatggttgcagctatccaccaacaaaccaaaatgaacggaaatgccgcaaacccccaccgaataacaacaaccaagctcatatccgattgcacaaccaccgtctatgaaaaaagatgaaacggcggcaattcctaagcactggaatcataatacaacttttttatcaacgagaaaccacgatggagcattatctataacacggcaaccgacaaagaaa

SEQ ID NO: 182825 - DNA, 257 bp, Arabidopsis thaliana nossen
atggttgcggcggtccaccaacaatcaaaaatgaacggaactgccgcaaacgcctaccgaatgcagcaaccaggctcatatccgcttgcacaaccacagtctatgaaaaaagaggaaacggcggcagtttctgagtactggaatcaggatacaacttggtgagcaacgagaacgagtcatggaacatgtatctataactgggaacctgtcaaagataccttgcagcgtgatcgaaaggacagttgtcttaaaaattg

SEQ ID NO: 182826 - DNA, 242 bp, Arabidopsis thaliana nossen
  unsure (1)..(242): unsure at all n locations
aggcacacagagagaaaagaagaggaaagggggagaaagaacaaacggggggggggaaacaaaaaccaagaaagggaaccccacnccgaaggaaccaaacaaacaaggaaggggaagcaacngggaagacacggaaaagaaccggcaaaacacaaagcaacaaagagccacaaggcgcccccgaggagcacccagaacaccncacagaggcaccgcggaacccgaaagccaacagggagaag

SEQ ID NO: 182827 - DNA, 249 bp, Arabidopsis thaliana nossen
aggaggaatcaaagatagagtgttagcgtgctactgccacatgttatgaaagtttctagactgcaaaattaattgcccataacacttttgaaatcgagaaagatatcgcatctaatatggactactcatctgaccgtacattggacgaagctaactataccaaatctctcaaatcaaaaaacgctaaagactactctatcttctattatccttacctttaaaaatttgggagaaaaatattgaattttt

SEQ ID NO: 182828 - DNA, 321 bp, Arabidopsis thaliana nossen
  unsure (1)..(321): unsure at all n locations
cggaaggcggggggggnncggggnggcgggcacaagcgngacgggaggcgagcaggcctaagcaaccgacaagggggggcaagagaccggggggggggacacaaaagacggaggaaggccgacactgagagggaagaagcagaggagagcaacaggagggaacgagggccaaggccgaaggggggacgaagcaacaaacccgaacaacgacgcggccaagagagcgggcaccgacggggagggagaccggctcaagaaggggcgaccagacaaacagggccgcaaggacgcgaggcaaccggaagcgagcaccaccccaag

SEQ ID NO: 182829 - DNA, 261 bp, Arabidopsis thaliana nossen
ctcccctcccctcctcccccccccccttcccccccccctctcccacccctcccccccccccccccccccccccacaccctcttccccctccactcccctccccttttccccccccccccccccccctcttcccccctccccaccccccacctccccccctaccccccctcctccccctcctcccccctcccccccctccccccccccttcctccccccctcctccccccccctcccctcctcctaccctcctccccttccc

SEQ ID NO: 182830 - DNA, 136 bp, Arabidopsis thaliana nossen
  unsure (1)..(136): unsure at all n locations
aagaaaagaagagcgggggcgnctgcgcgtgcggcggtatcatctcttttttcttttgatcaagtcaataaatgcggggcgggtaataattatacgggtggcgatccaaaacattggtgcaactttcattgataaa

SEQ ID NO: 182831 - DNA, 212 bp, Arabidopsis thaliana nossen
gttcgctttgaaggattaaaattttttttgttacattatataagaaaaggggggtcttcataatagttggttgtgaaaagtactcaaaagaaaagagtctctactgttgttgaggctttaactttgatggaagaaaacagtttttgtttcattttatagtttcccataatgtactgcttgagatttgatattttttttcttctcaaataaaa

SEQ ID NO: 182832 - DNA, 230 bp, Arabidopsis thaliana nossen
taccaactttttcaccaccaccccaaaggaaacacgcgtggctttcaaaattttttgcccgcacaaaacaactacgcttccctctaaaatcactaaatcctcacatctaccccattttacttcaacttcgcttctttttgcttctataaaacacaatctatctctctcaaccaacttcacactacatcaattatcacaagacttagaccatcattgaaacaacatctcaa

SEQ ID NO: 182833 - DNA, 203 bp, Arabidopsis thaliana nossen
aaaacccggggcgttccttctgtccgctgttgatcttattacaaagatttatatgacttccgctaccacaagaggcggcgtttaactttttaggtgcgccaacacaaaagctacctccctcgaaactcgagcacgtgcctaccttatgacaattgcttctaccgttgctttcgcgcgtactataagctcttacgacactctaa

SEQ ID NO: 182834 - DNA, 214 bp, Arabidopsis thaliana nossen
  unsure (1)..(214): unsure at all n locations
agaaacgaagggggggnnncgcacgcgggcgcgaacaaaaaaannaacnccgcgaaacggacaaagcacaagaaagggggggggggaaaaagagggggggggggagacaaaaaaaagagaagggagaagcgaaaaaaacaagggcagcggaaagaacaggacggggggagggcaacgaacaagggacacagcgagaaaaaaccaaaaaaagcca

SEQ ID NO: 182835 - DNA, 310 bp, Arabidopsis thaliana nossen
tccggggcgcccacgcgtccgcccaacactatatatgactattttcttttggccccaccagattctgcaccaggcactttgaaccatggtggcacacacgatcccgctaatagcacgaaaaccctaacaccctatgtatacattgatcggcctcgatgcaagatacacaactgatttattttttattgccatcataatcttctcaaattcatactgcttttaatccaaatacgaatctttatcaccataacatatctttttaattttcatattatttatccaatatttcgttcactcttactattttcat

SEQ ID NO: 182836 - DNA, 372 bp, Arabidopsis thaliana nossen
caaaaaagagaaccctgtaagatttcttttccgcaaggtatcgaaattatgcatatttatttaaaggactgagagagggaacatataatcccaacataaatttctcttttcacaaccgaaagaatccatcttgcggaatttagtcaaaaggagcctgacatggtggagataaaggttcgatttttctctttttctttttgttctgtaatttcattggggttttggaggagattaatatgtaacaattttagggtttcgtattgatttagggcttacgtggggtttggttattgatcttgtttctttgtttgctcacgttactatatatgcttctgctgttttcgctttgccctttgattgatgaatcatatt

SEQ ID NO: 182837 - DNA, 249 bp, Arabidopsis thaliana nossen
aaaaaagggcacttttatatatttggaaaaaagggtctatttgggcgctgaattggatttttgcggtcttcacagcgaaatgaaaaaaaatggcaaaacctatattaagaattggttccgcgtaaaaatacacgtagtggttcacgtaaaaatgtacgtataataccaaaaggtgttattcatgatcaaaccatgtttcaacaactcccatatgttactcgtttacaaaatttaaccccggctcccata

SEQ ID NO: 182838 - DNA, 304 bp, Arabidopsis thaliana nossen
ccacaacaagcgcgcaaaagaaaccggggggggcagccagacaaactactagtatttcatcacgagatgattctgatgacgatgatcttgaaggagacgcagataaaggagatcctactgatgagaaacgtgctaggaggaagctctcaaaccgagaatccgctaggcgctctaggagaagaaagcatgaacaaatgaatgaatttgatacacagggaggccaattaagagccgagcaatcaactttaattaatcgccttagggacatgaatcaaaaatatgatgcaactgctgttgacaacag

SEQ ID NO: 182839 - DNA, 367 bp, Arabidopsis thaliana nossen
gatcagtcatcttttttactttaccggagttgccttacctgcaaaacgtataaccaatccaagcgtggttagacgagaaaattccataaaatgatcattgtgggaaagattgttttgcttaggagactaaccgtttccttctcgggacgaaagaagagttttctctgtcttgttcccgcttttgccactcgagtttgagactcttgttttaggagaatgagaagtgatttttgcactattacctgaagatggtagagagtaacgtctactggctttctcagttgtccctaattgcctaggtgaagaagagccttgtagcctcagctttgctatagcggatttagtcgcctgcatatagctcggtatt

SEQ ID NO: 182840 - DNA, 121 bp, Arabidopsis thaliana nossen
  unsure (1)..(121): unsure at all n locations
cccaaancccncggccaagacaaaaccccaagacccccaaacggggggggncagacaaaggggggggggggaaacaaaacgaacaccaaaaaaagaacaagagaaggagccgagagaaaga

SEQ ID NO: 182841 - DNA, 97 bp, Arabidopsis thaliana nossen
  unsure (1)..(97): unsure at all n locations
ggacaaaaaaaaaaaaaaaaaaaaaaaaaaaaagaagggggaaaaaaaaaggggggggggggaaaaaaganccaagcnaacgaacgcgagcaagcag

SEQ ID NO: 182842 - DNA, 385 bp, Arabidopsis thaliana nossen
  unsure (1)..(385): unsure at all n locations
gggcgacccacgcgnncgaagacaangaccaccacagagggagccgcccaagcnaggaagggacaggaaagcnnacaaacaacgagggagacaaagcanncncaagaaaagangagnaanggaaaganaaaaggaagcagcgngaagaagaaccnccnagaaagaaacgaagcaacgcgaggcaaccaaccaaggaggcggagaaggagaaaccgacngacnncaaagcagaaacagcagcacagaaaacccnggagaacccgagcgagacgaaaccgacgacaaacagaaacgaaaaacgcaaggcagaaaacggggagaacnnccaaagaaccgcgcgcaacaaagagaagggccaagaaaaagaccacgaggcacgagagaa

SEQ ID NO: 182843 - DNA, 353 bp, Arabidopsis thaliana nossen
  unsure (1)..(353): unsure at all n locations
gccaaagacaccanccacnccngcggcnggaggagcaaagacacacggggcggccaaacacgcggggggagggaaagagcacacgcngagaacancccaaagaagccggcgaagacgaagaagccagagccgcgaccaacagagacgaaaggacacacaggggaaaaggccaagaagagcacgcaaccgcagaagaagcacagaaggcgccngaaaaccaagggaggccaaagcacgggcgggagacgcggacagaaacagcccaggagagaggggagagaggcgagagacccacaaacacaccacaaagcagcaacaacagaagaggaggagaagggggcgaagaaaagaag

SEQ ID NO: 182844 - DNA, 243 bp, Arabidopsis thaliana nossen
cttcttttaatccttcatttttttatcacacacaccaacgtgcggacaggcattaacacggttgttgggctaaaaacaactcaattattccacaacacatacattgtttataaagctatcttctttttctgatcataacccaataattatctcactctcaagatctattctacttattactttccacacaattgcacttatacttatctttttttactcttaattaatctcatcaaattgttt

SEQ ID NO: 182845 - DNA, 291 bp, Arabidopsis thaliana nossen
  unsure (1)..(291): unsure at all n locations
ccccgaaccaaacaaaanncccncaaaaggaaaaacgaagaagccgaacgaggcgggggggggacagagagcaacncgaaaccaggaagcanacaanggggaggcggaaccaaacgcagcggggaaagacannggcnancgaagcaacacaacggaaggaanncagcanccaaaaccncgcacngncgaagagggnnnaagcgacanncggggacgnagagcggggcncaacaaggcgcacncaacagaaggacagaagggnnaccancagggggacccngagaaggaaaa

SEQ ID NO: 182846 - DNA, 298 bp, Arabidopsis thaliana nossen
atcacgtgacatatgcatgttttaatccaaaaacaaagcgtgtgttgggttaaactcacaatttctgtgttacctccaagagcttatcaagtcttttatatttaaaatgatggctacttcattagcaaaatgcacttatatctgatagcgataacagtcgtcaaacacttatttataaatattccacctctattaacaaaatactaaaagaaaacaaaagtcttcaagctcatcaactaaaataatccgacaatggatcatccctctgccaaaaaacaacacaacaattaatttcaca

SEQ ID NO: 182847 - DNA, 370 bp, Arabidopsis thaliana nossen
  unsure (1)..(370): unsure at all n locations
ccggaacagaagaggcggggcgacccacagccgccgggcggagaggcaaggagcggagaaacgcacacaccagcaaacaaaccggcgggcgcnagaaagcagacgggggggggggaagaccggacagcacaagagaaccccagggggaaggacgggaccggggaagagcaccgacccggcggggaaaggccgcggggggccaaaggaaggaacgccaggaaggaacncgaagaaaggaggaaaggggagaaacgcgagggaaggccacaagacaaagaaaagggccaaaggagacaagacacccagaaaaaaaaaacgcggaaaaagaaaggaaaaaggggaacccaaagaaaaaaaaaaccagggggag

SEQ ID NO: 182848 - DNA, 359 bp, Arabidopsis thaliana nossen
gtaaaagcatgtttaaactctttctcgacctcagcttggatattgcaggggattcttattctggtggggccggaaccagaagttgctccgggaatatatcactgagcgatctccatcgagctcatttcgtgatgaacttgaaattcaccaaagcggatttcttcttgaaaggggctacccataaaggacttgatgcctataacccgacacttgctaaaagcataccaccgtctgttggtgcctataaagccaacacttgatccttttactaaccaattttattatgggtttagttaataatatatcactcatcttatagctattaatgatattattggaggaattccactttctcttaa

SEQ ID NO: 182849 - DNA, 209 bp, Arabidopsis thaliana nossen
tcgcgtacacgtatgccgcggggctacttcctctcgcggttccttgagctaggccgaatacatttgtgtttgggacaaaaaaactcacggctgtcgatgcacagtgggtttcgtgttcaatttttgttagaggggacataaccttacctttttcttccttgttaaatcatctgattttcttatcatatagactattcgacttatttaaa

SEQ ID NO: 182850 - DNA, 347 bp, Arabidopsis thaliana nossen
gagccaaagtcggtaaaccttattaatttctgattgattgtcccttcaacagagaagcataattaggtggattcaaaagggtatattgatgtggaaaaagccaaactaatgttatgttacatagtgtatgcatggatcgaaaaggatatgggatggatcagtatatatttaattaaggaaaaagataacttaagcttatatatatgataattgtaaaaaagatatttcaccacttgtatttcatgattaccctgcagcgttgaaaatgtataatacactgtcaagtgtcaatgtcgcttgctattttaaacttttaacgttttctttttggtttttattttattctt

SEQ ID NO: 182851 - DNA, 256 bp, Arabidopsis thaliana nossen
aaccaccaccaaacgatcacacggcaacccctgaacaaaggcataaagaagatgcccacacacacaccatacatccaacacaaactttatcaaaaccactcaccctatataaaacagcaggtccacaaaatctcactctaaacaaaacaaactaaaggaaaacccaccaacccatcaccatgatcatcgaacccgacgggttttacctcactgaacacacccctcccacccagcagcatctcgagagtcaaaacac

SEQ ID NO: 182852 - DNA, 257 bp, Arabidopsis thaliana nossen
gctttttcattctatttgccttttagggatatagaaaaataagaaggggcaatgattgaccagtcaaggacccatcacaagatgatttgcccataccgtaccccaaactcccacataaaggccacgcatatcgtatatgctgttatccttctcacagtctgcttataactccttgtcatttccaacttaactcatgctgaaacagagattatactcacgtgggctacttatactttccacatcaaacaatccttttt

SEQ ID NO: 182853 - DNA, 352 bp, Arabidopsis thaliana nossen
atctcaagccaccattttttcttcatcttcataaagagaaagagagagatcctcttgtttggcaagaacccaatttgagttctaagtcctgatttgcttagctcttttctttccttgatttcattctatataaagtcaacggaaagatatacatatatagttttcttccgattctagggttttcatatttcctctaaattttcatggtcaaagaagaaaatctaagaaacaatcgaaccagcaagagaaagaagacttcaatatcaacatctctctctccctctctctctctcttatattataaggtgagaccacaagaacttttgattttctttttccttcttcccttctt

SEQ ID NO: 182854 - DNA, 356 bp, Arabidopsis thaliana nossen
gctgaataagctgttttgctttcgaagaaaagatgaaattgtgagtatgaagtaattaataataaagattctgatataatccattcttaaattaaataaattgcataaagatgcatttagatttgagaatttactcagtttgcagctttttcagtcaaaattcatttataccattaatgctaggacatgtgaggcacaataatttttccattaaattgtgaaagaaaaacaatggtctaatttgtcagattcctcaaaaggcatgttcttaatttcattgctcctttgaatatataagattcttgtaccattctctattttcttatattctactgccatttttgcaaaatgttagt

SEQ ID NO: 182855 - DNA, 310 bp, Arabidopsis thaliana nossen
attgacgagctttcaaatatgttcatttacagaagcgaggcaaacagagacactttgtacagaatggtgtacccgcgagaacataaggagttcagtgtgtctgaaagcacaagaaaacgcacgggagctgatgtaatcaccagatatctaatactgagtgatgtcatagcattactataccatgcatagttattgtgggctgcatatgaccctataccgggtgacctgacgatgttttagaaagccagcgctcaaacgagtttttgaccgagagacgacgcggccacccattaataccaggccgtgttga

SEQ ID NO: 182856 - DNA, 74 bp, Arabidopsis thaliana nossen
aacttctcttttattctcagttttttcacacacaaagacaacgcaggtgtgcatttccaatttttctgtccaaa

SEQ ID NO: 182857 - DNA, 297 bp, Arabidopsis thaliana nossen
ccggggagaccacgcgtacgggtactgttcttatttcgaatgtataaaaaccaaaagcgacgcacagggcaacataggaaactgtggttgatttatcgacgtcgatcgttgctacttgaataccggaaacagagaagttccgtgtaagagagaaacgatcatgtagaatggattgagagatggggttcaagatcacaaaaagtgggtgaagggatactacgtataatattttcaaacgaaatcatggaactgggtgagccgttacatcgtcttcaaacaaactcaaagtcgtgaaag

SEQ ID NO: 182858 - DNA, 354 bp, Arabidopsis thaliana nossen
aatttatctatgtgttgatggcagatgagcaacaatccctcacaggccgggggttgtgcactgatggtgttattttgcaactcttcaaggagatatggcgatttcagcaaaaactctcaaccaggttcgtattataaaatctctgacatcgaatctctctatctttcaaatcatcatgatcataacaagtctctttcttttctcaggaaaaactgagaagccagagctggtaggttcatcattacatgtccttgtatatgattagcgtgtcaatatttcattttctttcttttatgatcgactaataggatctgtgtactgatttaaacattacagactaggactcccagcaag

SEQ ID NO: 182859 - DNA, 326 bp, Arabidopsis thaliana nossen
ccaggcgaacgacatcacaggttcatctaagtctgcttccatccaaaaggaaggcccgttggaaaataccggggttacgcacgaaacaacgtaaaccgccttctaataaactctcttatgatctatttttttcaactttgttagcctcttaactcaccaccacaagaacaagaaagattaagagaggatacggacaaacatgtgatccctcaccaaaaccactaccagattgtcgttccggagaaggcccttcaatggctgataaaaagaagggtgttgatgacaacaacaacagcaacatggatgatgagctttttgctgttctt

SEQ ID NO: 182860 - DNA, 316 bp, Arabidopsis thaliana nossen
agaaagaataaacgactaaatgttgcctatctgggcttgggtcatgcaataaaccttggaacaagagccggtgactactcctccgtttaccgcatcaaaacaagacctaattcatgcaacaaaacacgaccaatggaagggtcacatgaatatgaaaaaactgaaactcgtccactctccacagctcttatgattcatgataactcgaaaactcgaattgcctcttttcttgttacacaagattcaaaattctgccctataaaattacaaaagccggattgtggcctaccatagtcagcacagacgaccaacaatt

SEQ ID NO: 182861 - DNA, 229 bp, Arabidopsis thaliana nossen
  unsure (1)..(229): unsure at all n locations
aacaaaaacatttccgttaatctcaccacacaccccnacgcaaggcncggggaaaagctaagtgttacaggcaacacagcgagacaggcaatattgattcctccaaaactaccacaccagtgcaacctatccaacacatatttggttctagaccaccgccaccatcaataggtacgccaaccaggccgctgacaggaacaacaaccaccccaagttctcattttttttt

SEQ ID NO: 182862 - DNA, 386 bp, Arabidopsis thaliana nossen
gggtccgcacggcacgcgtccaggcggtcgatccggtcactttttaacgattacatgaggcatagctccttatttattgtaaagttaagcccttgtggaaccctagttaacattacacatgtcatcatctagttaccataaatctattctttgttcattgtacctcttttgcttgtgacaaccttcctcttttgcttgtgtaataggctaagggtattaaatttaatgtttatttttgtataacagaataattaaagcgttttttaatcaaaaaaattaaacacctaaagccgcatcaccagcgttgaccaacgttccggtcaatcgaattcggtattagggtttaaacccaaccgtgccccatttcttcaccgcgcttagcttat

SEQ ID NO: 182863 - DNA, 360 bp, Arabidopsis thaliana nossen
aataagctcatataaaaaccatatggtcacttcaagaaggaatattagactaaatgttacctctttggtcttaagtcttgccttaaacctggaaacaagatcctgtgtagtgacttgcttcttttccatcagaacagcgcggatttcatcttcagtcacaggcccagtcgcagctgaggatgatgatgcaggagctgaagctggttcagctttcacagcttttgttggtgtgttggatttggaaactgtgtttgctctctcttctttcaaagaagatttcggatcctgcttacaaagattacagaaacctgtttgttagaaatcaaatccagcacaaacgatcaactctttttcaaacat

SEQ ID NO: 182864 - DNA, 327 bp, Arabidopsis thaliana nossen
  unsure (1)..(327): unsure at all n locations
accagaagaattatcatgtcattcgggtctctggcggncggnccaacagccgacgtggacattttgtgggtgttccagccaaaaaggaccgngacctccaatgacggcacataggaggtggcactgcaaggctgatggggtcgttaacggttatagagccacagctagtcgcgttcatactagtcatctcagcaagcggtctcggaccaatacctgacatgctttttccagcgtatgcgtctatctatataatcgccctctcacgactagcctgacgccaacactgcgttgacaccgcttccccccaaggctaccgagacagcaaac

SEQ ID NO: 182865 - DNA, 226 bp, Arabidopsis thaliana nossen
  unsure (1)..(226): unsure at all n locations
aacaagcctttctncttcaangtagtaaaatctttctnnctctcttctaatctatgctcacctctactcagtcgtgttctcttccatnaaggtttcaatcttacccaaccccgtttcgtttttttnttgctcttccggttgttgaattttgaaagatatcctaagaaccccggctgtgcggaggtaaaccacgctagaggtttgcttttaagccttctaccttgcg

SEQ ID NO: 182866 - DNA, 348 bp, Arabidopsis thaliana nossen
  unsure (1)..(348): unsure at all n locations
ccggggcgtgccacgcgtgcgaaaacagatgtgtcactggagattaaacaccaacacggattcacanactgtggctgggggaaacttttttgtggcggggaacannancacaatcagcaataacataagaccggaaagcacttgtaattaaagaccatagacgaatccaaaaatattgcacacatcattaacgctcaaccacaaaatgatatgaacaaacattacaaacacaaaccccaaaaaaaaaagcatccatcgaatataaacatatgagtcaagctcacctttatcagccctctccatcaaaacactatcacccaaaaaaaaaccaatgtgtaaaaattgcta

SEQ ID NO: 182867 - DNA, 346 bp, Arabidopsis thaliana nossen
  unsure (1)..(346): unsure at all n locations
gcggggggctttaaacccaagcacaaaaaaagattaccttacattaccccaccaacanccctcacgcccagggacaaccataacgtatacgtacaccaaaacacaaccatcctcttctccaattactccaccctcatctcacaactaacactaacancacacttccttcattacaatacatactttaaaccaacacattcaaaaccataccccatccatactctcactcaaacatctcctctacaaccaactaccttaaaactctcattcaacaacacaaaaaaaattataacaattcatacaaaaacatacaaaaacacatactacttcaacctaaccccaaaaa

SEQ ID NO: 182868 - DNA, 380 bp, Arabidopsis thaliana nossen
  unsure (1)..(380): unsure at all n locations
attcccgggtccgccgcacgcgctcacgccataacttttattttgtcattttctcttaaaccttcttcttctccttcgtttgagcagtaatttttgtggttggcttcttctnctctttcctctttcccctaattgatcaatcatgcttcttcatttctagttctctcttcctgactcatttccctcattagatcttcttctccactaaacccataattgaaagaagctctttttttgcttacattgaagttaaaaaatcatcacttgttttgtttttgaagaaacacacataaagtttgtctttttacttctcaaatttggttgttttcactcaatttcaatcttgctttctgattcagattctgggttttcttcagaat

SEQ ID NO: 182869 - DNA, 329 bp, Arabidopsis thaliana nossen
  unsure (1)..(329): unsure at all n locations
aatacaatttcccaatttttaaacttccaacaccccaaanncacgaggcacggtcaattaaaacgttttcgcaccccacacncccnncccatncaaacctacaacacaaccancatcttcacaatcacccagcaaacgcaaacaaaatatttccgcctcgaaaaccaaaaccaaaccttgcaaaatcctgcaattgctcaaacaaaaaaaaacaaaaaaaaaaaaacaaaaaacaaaaaaaccaccaaaacaaaaaacccccccccccccagaggatccaagcttccacacacaatcaaaccaccataaaaacacccacaaaaaccccc

SEQ ID NO: 182870 - DNA, 360 bp, Arabidopsis thaliana nossen
  unsure (1)..(360): unsure at all n locations
ccgacgcgtgtgtccaaatgataagaattagataattcataaatcatagtgatgtggaaatgtttatggttctggtctttngnnaacaacaatatggctttgaatttgattgattgtctctaattttgcagatattggaaagacgaaatggttcgatattttgaagtataggtttattcacatgaacaccctcggtgatgaaatcgagacttaccaaccaaaagcccttgtttattgattttcgcggtttggcccgcaagtattttttttcttttctggttagccgaataatattcagaaaacgaggaaaagcattgagatttttttgttttaactaactaaaatttggatgagaaagtg

SEQ ID NO: 182871 - DNA, 427 bp, Arabidopsis thaliana nossen
  unsure (1)..(427): unsure at all n locations
ccgtccgcgcataacgccggtacttctacgtgtatcaaacggaaaggnctcatatgggcaaatggtggaactgtctttcgtggtattggtagtgtnncnnaccannagagatcnntccagcggaccagttaccctagtcgtgcccacaaagnggcttttcggtgcatgaaacaatgccatagtgcgaaccagttcganngtggatcgaattcaagaaacaaacgaannnaacgcacagtgtcaacaacaatctcgcgggcccgtaccctcaagtcatgagaaggtgttnngccgcttgagggttatanaaccaatgggtcccccagatctcnntcccgaagaagcnnntaaacgagtaaaagtnnttagcacgattgagaaccacannctgacccataagcagttccaaatgagtctatcggaaggg

SEQ ID NO: 182872 - DNA, 115 bp, Arabidopsis thaliana nossen
cgaccgaacaacattgttgtttgaataccaaaacagcctccggctgtcagtagttgccggcttcttcggctttggaatgtcaaaaaaataaactatttttttggtatttctgttg

SEQ ID NO: 182873 - DNA, 297 bp, Arabidopsis thaliana nossen
  unsure (1)..(297): unsure at all n locations
gcacagctcgatgccgaacgaaggcgccccttcccccgccaccacgacgccgagcggttccagtgccttcaggaaaaacgccttgctggccgcgtagtcgctgacgccgaatttgacgtggtcaaacatgaattcccccgggatggttggacccgcccgcgccccgacgcgatgcanggatcaccgcgatgttgccacacgccgccgccgacggcaggcccccagccaaccggcaaaaaaaagcccgacacgcagtcgggccgccaagctgagaacacaagaagaatcccgaccaca

SEQ ID NO: 182874 - DNA, 381 bp, Arabidopsis thaliana nossen
  unsure (1)..(381): unsure at all n locations
tcggtggaatctccagtacatcaccttaaccccaaatattagataggaactggggtcaagggacagttgcacagtttacgacaacncgtattcaatgcccttacttgcgtgaaaagcagccgatgtcattctttttttgtcaacaacttatattattagaaaggctcatagagccaatggggaggactttgtttacataagcacccgatgtgatgtctaccattaacatttcgtgaaaatatttggaaaattaatttttaggcatggaatgtttgacgattgatgatctacagtaaaaatctaaatacaaaactttgataatttaataatcatttataaattaattaaatttcttcactcttgaatcatatcactgtaata

SEQ ID NO: 182875 - DNA, 201 bp, Arabidopsis thaliana nossen
  unsure (1)..(201): unsure at all n locations
ggggggacccacgcgggcgaaaaaaaaaattcttccaaccttaacggcccatcacactccataagccgctaaattcggaatttttgggcttttacagacaaagcccncagcaaacatctttgacctcaatgtttgtctacataaaaaactcacaaaccaatctaagttctactcccctaacatcaccacaatctgacccat

SEQ ID NO: 182876 - DNA, 219 bp, Arabidopsis thaliana nossen
  unsure (1)..(219): unsure at all n locations
accaacacacccaaaaccacacacaannaacaacaccaacaccaacccntaacctaaaacccaacacaccaaccaaaaacaaaccaaacccctcaacaacacccacaaaaacaccccccacaccacacaacaaaacaccaaccaaaacaaccccaacaacaaatacaattcaacacaccaacgcgaaccgacacaaacaaaaccaccacacaaacaaca

SEQ ID NO: 182877 - DNA, 269 bp, Arabidopsis thaliana nossen
  unsure (1)..(269): unsure at all n locations
aaaaaaaggaggtccaaaattctagaaagccaccnaccggcncaaccgcagatttttgcgttttttcgacacacaaacccnncanaananangaaaaaaggctnccataatcctngntcaaaaagaaaccggaccatacaagggtaggcagtaaagaacaatacacaagcatgaaatattcaaccaaagttagcaattgacccaacataggaagagaataaccaaattatgaatcccagaaacaccacanttagccaaaccaaatgaaa

SEQ ID NO: 182878 - DNA, 374 bp, Arabidopsis thaliana nossen
  unsure (1)..(374): unsure at all n locations
gtaaggaaagagaaattcacctttctcttgtttcaagaacggaaaatgtgagtaatcttacttttttaggtattctncacattaatgagtctccagagagaacccgtcatggctttaaaagagctggtaatttggctaaacgactaagagggttgacatgggatgtgcgatgctgccgaacatagagtttggaagaagatttaaagtgttactacttttgtagctactcattgagacaagtttttgcgaaaatgcaaaggccaatgccagtaaccaaaaacaatatatacaactttgttgtgatatgaatatgggcgattttccagagccataaaatcagttgggggtatgaatatgggcgatttttttgttgt

SEQ ID NO: 182879 - DNA, 268 bp, Arabidopsis thaliana nossen
  unsure (1)..(268): unsure at all n locations
aagggaaaaccnnnnatggcactnnccnnnatggagaaccggatatatcaaaaatgaaacttatctggagccagctcattgatctgggaaaaactnctgtggaaccaaagtttataacaagagattttaatgatatcattgaatcttcataaaaacaaggatgactagaaagaccgggggggggcggagtngatctcataatctttatgtcataatgcgattttttttatctacgccactctggaaatttctatcaaggagaggaaaa

SEQ ID NO: 182880 - DNA, 375 bp, Arabidopsis thaliana nossen
caaacatataaccattttaattttgttttccgcatgtaagtggatagggcaggaatggtttgtcttggagcatgcctatatttctgttttattatttgattgtctatgaaaatctttgtagaacgtgaactccatagaagagaagaaaacggtttaattaaactaaaccaagtttccatttggaagagtctcataaggcctattgcaaccagctattggaaagaattaaaatccatcttgtaatataataccatagtagtcattttttgtgttcttaaaattaaattagttatcaacccaatgaagcaatcgaagatgcaaccgactaggtctggacgtttggtagtttcttatgaaaagaaaggtaacaatgtc

SEQ ID NO: 182881 - DNA, 376 bp, Arabidopsis thaliana nossen
cacgaatgttctctcttgcttttgtgatttgtaaaattctagaaacgtggaaatgctgaaagttttttgtttctttctttcttttctctttgcgtattatttatatatctttgctattcactgattttataaattggaacttattgagtaagattccaaaactattaatcatagagattattgacacttcattatgtttttaatcatagacgtgtgggcaaaatgacagcaccttaaattatttattttgttacaaaatccataattaatcaactcatcttggttatttaattaagagcacattcattataatttttcttttgccagcactataaattttctttgggccaaaaacatttattaaattttgtaagat

SEQ ID NO: 182882 - DNA, 397 bp, Arabidopsis thaliana nossen
  unsure (1)..(397): unsure at all n locations
cccgggcgcccacgcgttcgcttcactgttgttgattncttttgaatcttctgagctcgcttcacctacgggaagacggcaaggatcatgttttctagattccagatcctgaagaaggtgaaatcttatctgtgatccagtggaagattgaatcaagtaacagattcacttagttcacttgcgtattgcatgcccctgaagataacattttgaataatgttgatattgaattatcacctataagctctggttcttgttgcttgtattggttctgggtatctactagtgaagaaaccatggcttttggttctcctaggaataattctatattagctgcggctggatttcctcggaaagtgtctacagttgcaattgctattggtggtttggcatcatt

SEQ ID NO: 182883 - DNA, 390 bp, Arabidopsis thaliana nossen
  unsure (1)..(390): unsure at all n locations
gacccgcgcggcctaaaaaagcacacaaaaaaaaagctaaaaaaaaacccattcacaaaancacgagcccaacgaaaaaaaccaaatttttggcgcacaaaaacnccancanccccaaananaacaccaacggcaggaagcacgaaagccggaaagcaaaccaccacacgtgtcaacgagaaaaacccaacacacaagaaaactccaaagaccgcaaaaccaagaggcaaccgcatcacaacaaccacaccagcaacctgaacaccacaaaccaagacgcaaaaactacagatcaatccaagaccaccgataaaaagcaaacaccgacgaaccagaaccacccacacaaaacccctgccactgtcctcaaaacccaaccaacaaaaacac

SEQ ID NO: 182884 - DNA, 372 bp, Arabidopsis thaliana nossen
cggaaatcatcaaagagaaggagattgatcaagaaagatcaacagtatagcaagttttcaggtgtttttgcttctgggatctctccattggaacctctgtgtgcgatgttataaggacgtgaagtctgaagttgaagcttgacagttttgggtcctttaacagggagagggtgcaatgtcctcccagcagcacacacagtaagtagagatagccatatcaagggtaagcatcctgtaagatcaccaataaccactttgtattgacgttaacagaaacagagccaaaaacagaaccaagactcaaactttttttagcttaacaggaaacaaatccagatagaatgagaaataagctttggtctctcaagaccc

SEQ ID NO: 182885 - DNA, 383 bp, Arabidopsis thaliana nossen
  unsure (1)..(383): unsure at all n locations
tcgcaatttatggcaagacaacaaaaacctacatgtgattgaataatcaattgggtaaaacggagtgtttcaggtttatctcaacaacagnccggatgtaaacacatgaaactatgaaagcaagcaacgtggttatagagcaataacatttaagtgaacaaaagtaaaatatggaagcaacgaggattttgacctgtcctttttttcgtcgctttggttgaggtgcatactctgtcctgttcctttcaaagtcagagacacacaggctgttgatattctgaccactttctgaagatattccatcgtttcgtcgaggaggataattttcgagtattccgcgttgcagcttctttttctgcttggcttttcgtcgtttctcttcc

SEQ ID NO: 182886 - DNA, 415 bp, Arabidopsis thaliana nossen
  unsure (1)..(415): unsure at all n locations
aaaannccggggggggccacgcgaccgngaancctaacaaaggctctactttttcttcagataactaccaaaaccccgttgcggtgaaacattttttgtgttcggggtatnnctccggnaagaaacgaaacgatcgcgatgacgacgacggtgacgccttggttgcaaagaaatcagcactggcggtgtgtgatgccgaccctgcaacggccatagcgaatatccgacatgagtttggggagcacgggggagtaaacatgtccatcgaagcctccgccaccttcaccgtcatggaaccggataccatgaggcggatgttcaccggagaactgggaccggacaacgacttctacgtatacagccgacacttcaaccccaccgtgctcaacctcagccgacagatggctgctctcga

SEQ ID NO: 182887 - DNA, 380 bp, Arabidopsis thaliana nossen
  unsure (1)..(380): unsure at all n locations
ggctangcacattttgtctaattaagcaggattttcacctgccacaacgggtcgaagtattttagatggttctacgtctnctgcagcatggaaacttcattactatgagtgggctatgcaaatttttgaacggtacaatataagtgaaggagcttgtcagtttgcctatgcagcccttgagcaagtagatgatgcctataatttcatagagatgactgaggaattcgatccaactaaagcagccacctacactagaggacgactgtgggcaaatgttttcaagttcaccttagatctcaatctcttgaatgatgcctactgtgctataatttcaaaccctgatgaggagattaagcgcatctgtttgaggcgcttcatat

SEQ ID NO: 182888 - DNA, 385 bp, Arabidopsis thaliana nossen
  unsure (1)..(385): unsure at all n locations
cgcgaccgtctatatccagactttgtttccgtttccataacgctcnaaaggncgccgggtggatcaccaaaggttttgggtttatactattcccggctcaacacatggcggaggaagatgttatcgctatccccgtgcagccatctgaccacaagcgcaagcttgagaatctcgaatcgcagatcctggagcagtaacacgcctgctcgattgataatgacggttctgtagatgatgacaaaaacacatcagattattgtgagccaaaacgaccgaagcttgacgatgaagctgctgatggtttagggattgggggaacggtagaaaacagtggtgatgttgaatccaaggaggagggaactgagaaacccattgctcagagaga

SEQ ID NO: 182889 - DNA, 251 bp, Arabidopsis thaliana nossen
aacacatttccccccgaagacgacacccctaaccccaaccacccatcaaaccacaagcgcacgctaaaaaatctcaaaacacacatcctcgagcaccaacacgcctcctcgatacataaacacacctctgtacataacgacaaaaacacacacaattattctcagccaaaccgacccaaacttgacgatgaccctccaaaccctaaacccataaccccaacaccccaaaacacagccccacccccaatcca

SEQ ID NO: 182890 - DNA, 397 bp, Arabidopsis thaliana nossen
  unsure (1)..(397): unsure at all n locations
gntccagaatacacagaacctgtggagccggaagttccagaagagccggagctgccctcaccttttgagcctgagattccagaagagcctgagattccagaagagcctgaggttcctggagaacccgaagttcctgaagagcccgaagaaccagaagagccagaagggtcaacatttgaatttccatcatggtttccgagctttcctattcccggtgttaatggcggtttgccaaagactgaaaagacaaaacctacatcaacagttgaagaggttaacgtttctaacaagaagccatagatcaatgggtaaagaacgtcaaatgattatataaactatatatgcaattatagttttggtttgtgtttggttaaagatgagagattacatatgtatt

SEQ ID NO: 182891 - DNA, 231 bp, Arabidopsis thaliana nossen
  unsure (1)..(231): unsure at all n locations
ccaccacaacaaaaccaaccnccccaatacaaccaaaacccaacaccataccaccaaccccgcgcaaaacccgaaattttggggataccaaaaccaacctccaaacatactaccaaaataccacaccaccaaccaacactactccaaaactaaacaaaattcaaaaacaactaccccaaacaccaccaaacaaaccctactaaaccaaaccaaacccacccacaacccaac

SEQ ID NO: 182892 - DNA, 393 bp, Arabidopsis thaliana nossen
cttattcttcatcatcgaccatacgattacagtcgtcttagtttaagatcttcgtaaagtgaataactgttcatccctcgattattctctatgataaactgcgtttaattctttcaaaaaaaaaatcatttcttgcccaagtttggatctttttggcatcgttaatctcaattctcaagacagttagattgctaggtgctttagcggcagtgaacgatgatcggtcataggatctcaagattggggtctactattgttaaacagctcgcaagagagggatatttagcaacatacgggacaaagaatctacaccggtcttatggccactacttgcagtctttgccagtggtaccaaggcaagctaggacttctcaggaagcctggtttttgaag

SEQ ID NO: 182893 - DNA, 124 bp, Arabidopsis thaliana nossen
  unsure (1)..(124): unsure at all n locations
gcaaatagactattttcgaattgccatagaatcatattgtttttatcgggctaatattggttttttagaggtnancaacttatgcgatcacatatcatgtagcattagcattatttagtcaggt

SEQ ID NO: 182894 - DNA, 375 bp, Arabidopsis thaliana nossen
  unsure (1)..(375): unsure at all n locations
ggggcgacccacacctccnnaaaaatatatagatacaaacaacaatcacnaactaacgcccccaccgggtctaattgaaattattaagggtaaaaacccannnncaaaaaaatcacaaaaaccagggaacatgacccaaacaaatcacgaatagaaccaaaaaaattgtcgctagggaaccaaacaaaaacttaaaaaaactactgtacaaagactaaaaacatagattccacaaaatcataaatcaatagattacatatcttttttatttaattactaataaaaaaaatacgcattctaacgaaaaattacataaatcctttcaaataacaactactatatataaggtactcaaaccatctagatcctaaaatt

SEQ ID NO: 182895 - DNA, 412 bp, Arabidopsis thaliana nossen
  unsure (1)..(412): unsure at all n locations
ggcggccaagnaaacatacagcagntgtngnagaaaagagnaaggcaggcccagcccatanaagagatctatagtacgcataagttaaggattttcaatagtcaatgagcatgcatctaaaaagtgttagcatataatgcacatgattgaaagggaagaaagatagtttaatcaggatattgatggtaagcctctatcatatttcgttgaactgcttgccaatacatcaaaatccgcagacaccatcagcaccctttgggttgttaatatccctgcgacatatccccggggtgtttcttgccattgaacctgtacattttgagacaacaattagttctttatacaattgatggaaaaaactactttagaaatctaaaacatattctaagaatctctacgtaatacaaaagtt

SEQ ID NO: 182896 - DNA, 105 bp, Arabidopsis thaliana nossen
  unsure (1)..(105): unsure at all n locations
agcagccagagagagagagacaagtgagagggatctacgaaaccaancaggcaattttaagttcttgaagcataacaaggcccnnatccttcttcaaggacctta

SEQ ID NO: 182897 - DNA, 367 bp, Arabidopsis thaliana nossen
  unsure (1)..(367): unsure at all n locations
tcttaatcggatttcaatcctgtctacataccaattttagcccccnnagagtttatgggacattttgggactncncaaaaactttcccatttatatcaaaactctcacatatnattctcaaacttaattttattatctaatcattttttcatctaaacttccataataaataccttcttaatccccatttttcctaattaaatcatattttntcttattcatcttccttctccacataatataacttttatccctatctcaaccaacaaatctcctttaattctccatctactcaacccctctcttcaacctcaantaatttcttcatccatatacttcttattaactacacctttttaattctcaa

SEQ ID NO: 182898 - DNA, 396 bp, Arabidopsis thaliana nossen
atcggtgaattctcttcttcggcgttataaacgctgtcatcgcctgagcggacttcacgtgttttattgttcttcttctgcttcgttgtaaccatcgacgcttcgcttgatcgagatttagttcgccggaaaacttcaccgaacaacaaatctgattaactaccagctcaatctctggtaagccaaactttagtttctcacatcgtttgctttttccgagtttttctcttgctcgatggtttgttcttcttaatgttgtgattcgtgaagttgtgaagatcgatgataaatcttcttcgtgtttgtttgcgccaaatgattaggatattattgaaatacgaaatctaggttttctatgtgttcatttctccttactgtttccgttttctgtgctca

SEQ ID NO: 182899 - DNA, 365 bp, Arabidopsis thaliana nossen
gttgaattcagtttttaaaggtgatggctagtaatgtatttgatcatccacttcaagaattagagggtgaagataatggtgtaaagagcgagaaagcgagtttattggaaacatctggttctgtagatactactcctgaggattctggtcatcgttcttctgatgggcataggggactagaccactgtgaaactgcacctgttggtctctatggagatatgcttatcaatgacagtgagattcagtactctcggtccttgacagagaaagggtctcctgcgattcataatcttaaattagatagattatcggagcaagaaaagcaaaaactcattgttgagctagtcagaatacaaaatgaccgg

SEQ ID NO: 182900 - DNA, 375 bp, Arabidopsis thaliana nossen
  unsure (1)..(375): unsure at all n locations
ccggccggaatccggggcgacccacctccgatcacctgctgtgaattataagaaagagacgttgacgnnngggtattgtggatgataggcgaaggcaggtccacgtatatattatttgcttgggaaggcataattctgcttaagttgtctccatggaaagaaaaaaaaatattcacttgaaaaacaaaagaaaaagaagattggcagaagtgaagacatattttgattggttcaattatcgctctctagtctcattgttctattcaactacacatataatactattgttcatttctgcctctaaaaagaagaaggacgaatcatgccgatgatagtactgatcaagatatgagtatcaccgttaagtagactaaa

SEQ ID NO: 182901 - DNA, 392 bp, Arabidopsis thaliana nossen
atgaaattcaataattgaaaagaggttcatgtaatgagccgagagaagaatataaaagcagtcaaataattttttcaaaaaactatttgtatattaaaaaggtacaaagtaaaaaataaatttaagaaggtgccatcattggctcctaaagaacaaactacaaagaatcaattcctcatgatttgatctctcacaatccgtctcctttatgtggatgcggaaaaacactctccacacgtttcatgtaaattttttaattaaatttctaaaaacaatagagatactattcgatttgttcttgaattattcatgaatacatatagtggcaaccttagacactagccacgtcaaccgtacatgttatatcatatatttttatattggtctatcta

SEQ ID NO: 182902 - DNA, 390 bp, Arabidopsis thaliana nossen
atcgagagacatttggagagcgaaagcgttcgctctatggttgcttagatgaaaaactgcgacccgtgtgacttctcctaacaagaaacgatttctcgatacgctaatagataactgggagtctacgtgcaagcaccattccctggatactatctaaatgatgttaggatacgggatacacttcgtcgattttactactcctgcgccaactttttatagtctctccttgtgagattcgtcggttagtggagagtctcttccgtgccgaccgtcaacctttacctgcatgctgtctctgtactacgcattgctctataatgacggtactatcctggtttccatcatctatattgactgcattagggagactctttaccttggcttttgctt

SEQ ID NO: 182903 - DNA, 239 bp, Arabidopsis thaliana nossen
ataaatctgtaatatagggcatttatagccacaacttttattttctcatttctattttttttaaaacaaaacttatcttttcccattattagtagacttagacatcaatcgagaatgatatacagtatattagtaagaaaaatgatcatatcatcatattttcgttttagaatctgagtaatttcacaatatctacctagctatccaagtaccttaagttttgcatattatctaaaatc

SEQ ID NO: 182904 - DNA, 117 bp, Arabidopsis thaliana nossen
gttgaatacattacatgtttatagaatacaattgattttttacaaatataagttttcaatatctgacttttattaatacattaagtgactccatgcatgaatcttaattagctagaa

SEQ ID NO: 182905 - DNA, 117 bp, Arabidopsis thaliana nossen
gtataatacactacatattcataacacacaattgatagtttacaaggatatcttctcaatatgggagttctattaatacattaagtgactccatgcatgaatcttaattagctagaa

SEQ ID NO: 182906 - DNA, 360 bp, Arabidopsis thaliana nossen
gtgaaattgatttggtgaaattaggtcagaggcgtttctcatggctcctcttactctctccgttgatgtgaagagctcttcagcgacctctcatggtaaattctctctgtctgtcttcattattgactctgaatttttttcgcgtattggttatgaaaagagatgtatttgataaatgctattgttttcgcagatgtttcgaagagggtaatgcagagtccacagctcaaaataaacaaaggcttttttgcatctgttaatacacaagaagataaaccctttgatttcttccgcactctctttggtttggggatattttggcttttgggtcatttgcaattattattttatgaatcccat

SEQ ID NO: 182907 - DNA, 222 bp, Arabidopsis thaliana nossen
  unsure (1)..(222): unsure at all n locations
ccacccactcgttctttcattcaatacaatccatttttttaaaaaacaatagattccccacagatacaaaccaaaattataaaacctcnaaaaacacaccaacattctccattcaaaaatctcaactacctaaaaaaaaaaaaaaaaaaccacccctcctatattatccaaacttacacacacaaacatacaacaccatacctcttttatattcttacctaa

SEQ ID NO: 182908 - DNA, 289 bp, Arabidopsis thaliana nossen
aatttaaacctccaaaaaactacaaaaaactaaataaccccacacaatcccaacatatttaaacccttaaaaaacaaaaaaatctttttctctccccaactcccaaaaatttccaaaaacatcacaaacactttaaaacccccaaaaaactacaaaaaactataaaaataacaaaaagactctaaaacccatacctaaatcatatatacaatacccaaaataaaagtatatcaactctcccaaacctaactctttccttccctcaaacaaaacaaaaaaaaccaacccc

SEQ ID NO: 182909 - DNA, 319 bp, Arabidopsis thaliana nossen
agcagactggttttattatatgtactctttagatcaaatatttccttcagatcattagtgatataaactagggaataattcaatagtttaatctttaagggacgttatacaaggagacaagtcaagtaccacatgatataaacatatctaatactaaataaaacatcccacgctatgcatgggcttgaaaactcatatttaaatatgtagcaattctcatatatttgatattgaacttccagtaatctgttattatcacatgatataaaaatatctaacatataacatgtgaaaataggtttaagggtttcttgagcta

SEQ ID NO: 182910 - DNA, 347 bp, Arabidopsis thaliana nossen
gggttggtactcttcaaaggcgaggaggttatctccatggcgggggaaggaccttctactgccttagaggcacgtgccaaggatagctctgcacaggctcttgctgggcctgtaatgagccgcgctgctgcacgtggagtgcctactgaaccgttcgccacagcacatcctgtgcatagcgggcctgttcgtagagcatgacagggccatctacagagatgatgcagcctcatatctctaaccctgctgttatgcggcctcctggacacatgctccagtcgtctccgacttccggtggaggtcctactacgacggggagaggcgaccctactccgagtgacagtatg

SEQ ID NO: 182911 - DNA, 364 bp, Arabidopsis thaliana nossen
cctctctctaaaatcctctgccttctctctagaagtttctgctcttgagctcaccggttgggccggctccggtagtttcaacagagccggagccggtctttatttttatttctatcttagtttctcgggttagatcttctagtcttgttctcgttactctcgacggatagtttccagatcttcaatctgatcttttccggaagggatgagcggttcggttgatctatctaattgatctatctagtcgaagtgggttggatattagtatcctacagatctggttttgtcttataaccttatgtgtaggttaattgatttgcatgttgattttaagctgtctttggctcattctgggtctcgatct

SEQ ID NO: 182912 - DNA, 355 bp, Arabidopsis thaliana nossen
ttctgcttcggtgacagggttaccacaatattttaattgtgcaactatcctcaagatagtggaattgtaatctctaaccctttggaaatcttgaaacctcagggttttccactcttcaagagcgtgagggagattgatttccttttgattatcgaacctatctttcaaggcttgccatagtgcggctgggtcctcaacgtctccatagtcgtgagttagattctcatctaaatgcttcttcaggaagataatcgcttcggctatatgctcgggtggcgatttgttaccgacttctatcgtttcagttatcttttttattacaagataaggtttcacatttgtgacccatctgaca

SEQ ID NO: 182913 - DNA, 300 bp, Arabidopsis thaliana nossen
ttgtcatatcatttttagattttaacagggttgtaaaattttatagttatacatatatatatatagttacttaatttaaaatcaaattaaaatctaaaatctggttgaataggtgggaccggtcctgatctaatctggacataggctggttttcaaaaaattggtttttttttcttgaataaatttaatgttcatccaaaagaaagttataccgttaaaacttagcaagaaagtatagatagaaacacattgatttattgtggatcctttatcattaactttttcgtatctttaagacct

SEQ ID NO: 182914 - DNA, 386 bp, Arabidopsis thaliana nossen
aattagagtaactctttgtttacgtcttaaagaaaaaagtctaccccaagaatgttctaaaattataatcgttggattcaatttgaactagctagagtacgaatgtttataaacttcattttctttagccttgaagtaatagaagtttctacaaacggacacgtagttattaatatgtgcaacaacttccatataagccaagagccatgatctcatgaattggattaaaagcaaagaaatgtctctctagctagctagataatgcaagcaacaaaactaatgtaactttaaaatatatttgtatactttttttgatgctacataattacaaaattacgaagtatgattctttcaacgtgtgggacgtatctatattacataccagt

SEQ ID NO: 182915 - DNA, 374 bp, Arabidopsis thaliana nossen
  unsure (1)..(374): unsure at all n locations
gggataattttggaaaaataaactcatcaatctactatataatttattatgtttaaatgtacttttattctaaattttagtataaataaatttcaattaatttcgttaatttggtttaattacacaaaattgtgatccacttctatccataaaacttctctattgaattataacaacaataggttctgcatttgaattgatgaatttgggttatattcgacttctatggcctacattttgttctttatgttctacatttttcaaaaccttgaatggatatggaacaaagttgtcatagctatactaacacactaggatttaacctgtggtacaccacggngcaaatattttatttatatatataataatataaa

SEQ ID NO: 182916 - DNA, 225 bp, Arabidopsis thaliana nossen
  unsure (1)..(225): unsure at all n locations
cgacccacgcctccnatacatttaaaacccctacattctcttccaaaaaatcctaaggcaaaagtgcntttcctatgtatgaggcacaatatcancnacatcccctccaatgtacttactccacaaccataacatatgaaaacaaaaactataacctaaatacatactcatgcagacaaaaatctaacactccgaccaggtcccacctcaaataccataacacac

SEQ ID NO: 182917 - DNA, 341 bp, Arabidopsis thaliana nossen
  unsure (1)..(341): unsure at all n locations
ggaagttaaatagtaccaagtaataataataatgcactaacttgtcacagtatcttacacaagatgagggtacccnncccaaccaactncatcaaaccaattctcaatcacaaaaaacaactccccaaacaaagacctcaatacccacattaacaccactagacataacattaagagccacctatcccctttagctacataaacacgacacttctggaaatacaaaacccgatcaactccataaatactccgacttaaacggcaaagaagatttcatattcatacctcctctagttagagcacccaccgtccgtcgaactaccaactaaaaatgaccaacc

SEQ ID NO: 182918 - DNA, 365 bp, Arabidopsis thaliana nossen
caccgtttcatacgaaactctttacgaggagtctctctttacttttctctctctctcaaagaaagaaagaaaagcctcttttaattttctccggccagagtgtgtgggatgcacaaggaaagagggaaaatgccggtttctagcaacagaaatagagtatcgccatacccgcttcgctcttgcaggaacaagaaacaaaaagaagtcgagacgtcttcgtcacctgttgagttagagagtgttagtgaatgggaggatgtgaggtgtgtgatttgtatggagcctcctcacaatgctgtcctcttgcaatgctcttctttctccaaaggatgtcgtgcttacatgtgtgatacaagcgctcgtca

SEQ ID NO: 182919 - DNA, 297 bp, Arabidopsis thaliana nossen
aatttaacccactattggccttcttttgtgcctaaacggcgaaccatttacaaataacggtcaccaaaaaaaccaaactgttgcaaatagaagaagcaaaaacagggacggattccacattaatttttcaattaaaaagcaacactctccggaattataaaaaaaccctttcccaatccataaagaagagaaaaaaagggtctttaccctaaaagtgaatcaaaaaaaaaaacaagatcccaaaggttacaaaaaacaaactgtggggagatttgaaaaaattttaaaaaaacaaag

SEQ ID NO: 182920 - DNA, 150 bp, Arabidopsis thaliana nossen
aaggttcgtgccatttccacgtcttcccacatatcgattccatctgaaagtttggatttttgagttggaaaagaagtgaaatctgaagcgaatatatcgacaattttctctctctctctctctctctctctatctctctctctctgtctc

SEQ ID NO: 182921 - DNA, 274 bp, Arabidopsis thaliana nossen
ctctaatctaccgccaaatcaaatgcgcaaacggggacctaccgtgctttgaggatacaccccaacggctctaatcgcttgaaactcttcctttgcagagcctaggaagaaacgcgaggattttaacgcaaagcgaggtggagtcaagtttccgaggtttcagatgccgggaaaaaaaaaggaatttgtaatcactactcatgcaagtaccatggataaattctcacattctatacctttaacaaaaacctcttgcgggatagtgcgaagactt

SEQ ID NO: 182922 - DNA, 158 bp, Arabidopsis thaliana nossen
  unsure (1)..(158): unsure at all n locations
cgtcgaattaggaattttctaggtgtttcccgatattcttgcaggagatcgagggtgttaccacacagcctgcatctnctactctagggtgtatgagagcgaggnngattaatataatccccaaccattganntgggaatnnatggttnnncacctgg

SEQ ID NO: 182923 - DNA, 266 bp, Arabidopsis thaliana nossen
  unsure (1)..(266): unsure at all n locations
acaaaaccaaataccacaacaaacatccaccatccaancnaggaatcatgcggctaataccgttttttctatttacccaaannacncctccacatacattaaggaatatcctaaccaataaaaccatctccgaaaagactacaaacacaactacaaatactatccatagaatcaattataacaacacacacacacatattccccaaatatacaacgcacacaaaaaatcacgttccaactaccacatgatacaatgctaaaactgg

SEQ ID NO: 182924 - DNA, 247 bp, Arabidopsis thaliana nossen
  unsure (1)..(247): unsure at all n locations
tttggnngggatgaatganntgacgagngnncggtcannagcagannaaatgaagggagatnngaatgatnngagcttgagggaattaagaagtctnngagttagaagggagctagagcnnagatgaactctagcactgatgacannaaagaacgtcaaagcanatgatgagatacaagcaagcacggaaaaaactatattgcgggtttgacaggattgttgggtgccgaaactgatatcggggtca

SEQ ID NO: 182925 - DNA, 366 bp, Arabidopsis thaliana nossen
ggaagccctaagaacagagaaaacagccgccagcctttcgttgctttctgcggtggtgggcgctcctcgccgctaccggagtgactcgtcctcctgtatttcgttttctcttcacctctctcatcatctcctctttgtctgttaacagatctagaaattttggggtttgaatctgttagatctacagatcttgagttgtttcccttttagatttctggtgcagatggtcatgttttgtggcagccttgttcgtttgcttcgtcttggcttgtgcttcatcttttatcccatctgtcgtatgttccttgtcagagaggttgaaaatctaaggcgttcttgttgggttttagtgtttgtcctcttggt

SEQ ID NO: 182926 - DNA, 355 bp, Arabidopsis thaliana nossen
atcgaaaacaacatctgcttctctctaaaatattatctctctaaatattctctctatctcgagcttcctgtttgatctccggtgatcgactccggtggcttctctaacaccggagtcggtcgatcctttcgcttcttcttgtttttcttcggtggtgtgatcgaagattcaaggatgcatgatgtttgctctggtcgggatttagtccttttgcagcaagagttactggatctttccgatcatccgtgtggtttacccactttatctcttgtctgcgattggctctaaatctttttgtcttgtccatcagatgatgttgaatcggctcacttcctgcttgcatgtctctggttcc

SEQ ID NO: 182927 - DNA, 380 bp, Arabidopsis thaliana nossen
gaaccggcccggaatcccaggcgcgcgccgacccgtggggaaacgtcaatgaacctggacacacaacaacatagtgtgaatgtgatgctcagacaactatttttgatcatatcctctcttatccctttctcttcttattccccacgaacctccccgataccacccacctcgatccgctctcaaaccagagctacaatgtccacaactccgatccagaacgagtcgactcagcagactcagagacccgtccaggtggcgcaacgcttagagaagttcaagactacaatcttcactcaaatgagcatattgggcaacaaaccacggagctatcaacctaggtcaaggcttccccaacttcgacggcccttgtttcatcaaag

SEQ ID NO: 182928 - DNA, 207 bp, Arabidopsis thaliana nossen
aacgaaaacctttttttttttttctcacaaaatctacacggtactatatgggcaaacctgggggtattggcatcttacaaacacacttacatggataacagtggtctcgctctggaacttatacgtgcatcatatgaggatgtaaacatcgagaagatcctagattcatatataagaaaacttaaccactcatttaatgtactttgg

SEQ ID NO: 182929 - DNA, 259 bp, Arabidopsis thaliana nossen
cccacgcgtccgcgccttcgaaatcgcccttggagagaaacggcgctaaggtttcgtaaagttgtgaaaaagtgaaaaaatattttttatatgtccggtaaatggtccggaaaggttaaaacgtacattggtaaaatcaaaggttcggtacgatgtggatgactgaaatataagtcgtctggataaaattattcaccaaacgactgaaatataaatcgtccacaccctaaatataacccctaaacttaattatctaatt

SEQ ID NO: 182930 - DNA, 307 bp, Arabidopsis thaliana nossen
  unsure (1)..(307): unsure at all n locations
gggaagacccgggcggtcccacgaatgcgaccaaacatacaagcctaaaatacaaaggccacacctcagggncactgggagattctaggtttttttggtgccaaaaaaacctactaaacggccgcccaaaggacccaaaagctaaacacatacatcggtaaaatcaaacgtccggagcgaagcaggcacactaagggctgttcaactggctcaaccaacagaaccttataactacaggcataaggctgacatatgcacacgcgcctcagatactccgcaaaggcggttcaaaagagcgaaacacata

SEQ ID NO: 182931 - DNA, 125 bp, Arabidopsis thaliana nossen
  unsure (1)..(125): unsure at all n locations
ccgtccggcatcacctatgacacatcaacccatgtaacatacgcattctgttgtgatgcttttagtgcagtctaaaccacatgtcataagctccaccatctcttcatggattcactangccacag

SEQ ID NO: 182932 - DNA, 357 bp, Arabidopsis thaliana nossen
caacactaacggaatcgttatcgttaccgaaatcgccaccgctacttccgccgttgacgccgtcagacgatgaataacggagaatcgagcataatcgagtactgagtccatcggatagaagagttctgtgattgtaaataacagaagtaggagccgacagtaacgggatactgcgacggaggagaagagggaagcgggcgtgaaagagagcggcaacggccatgatcgccatggcagaagaaccaccgcgacgggattggtttcgaggtgatgacgtatcgttggcccagcccagcccagcccattagaaactatccatacactgggcttggcccatttaagtgacttcattttttc

SEQ ID NO: 182933 - DNA, 365 bp, Arabidopsis thaliana nossen
tttcaaaaaaacttaaactatctttttcatctaagaaaaaccgatacctctggtaattaaagttttttggtcactattcaattttccttctcaaacaaatttattagacattaatcaaaaatatataatggctgaatctaattcaaattataaaaactttttttctttacttagaattcctcactctcaaaaattgattccaaatgctctttctacaaatgattccgctacttctgcaatcactttacataaactattgcttttaaaatctattcactaacgtttactacaacatatacacaataccccacattattattggaaatgtcaagcttttgcgtacccttattcacacagacattaca

SEQ ID NO: 182934 - DNA, 361 bp, Arabidopsis thaliana nossen
ggttaatttgggaatttagggtttttttttcttgaagatgacgactgcggctagaccaacgtgggctccggcgaagggaggcaacgagcagggcggtgcccggatcttcggcgcttctcagaagtattcgtctcgcgatgtcgccgctcacacgactctaaagccaaggagagaagggcaacacacgcaagaggaagtggagaagaagaatcttcgtgatgagcttgaagagcgtgagaggaggcacttctcttccaaagacaaatcctacagtgatgatagagaccgcaggagagggaatcagctgttactcgaaggctcgaagagggaccctgaagatcggattgttcctcgcagtgtc

SEQ ID NO: 182935 - DNA, 345 bp, Arabidopsis thaliana nossen
gccaccacaatcacaaaactctgagtcaacaagttcgattgtgcagcttatttcacctgcctcctcaacagtacaatcatttgattcactggtgaaagacactcatcttgggtcaagatgctacaacattttcgatctgagtattgatcactgtctggattgaatgaggaaacacagcagagactgagtgaagttaggggaagaagaataccctagattactcaacaaaaaagtaaataaaaggccctgaatgatggacactcgtaatggagctggaagccacaactttcagactctgattttgatcactgtctggatagggcagggttgatgtcaactctgatt

SEQ ID NO: 182936 - DNA, 235 bp, Arabidopsis thaliana nossen
aaccacaaatacaaaaattttactacccaattccacaactgcctcttgctcacctggctatatacactattattgttatctccacctctgaaaaacacacaaattgcgtcaaacacctacaacaatttccatctcgggcatcacaactatcttaacttaacgaggaaacacaccatacactacgcctacacacggtaataacaattccccaccttactaccctacttactggacc

SEQ ID NO: 182937 - DNA, 299 bp, Arabidopsis thaliana nossen
ttccgggggggcccacgcctccgattaaaccgtactttctcggtttcttaaaattccaaccatggccaaaaaccctttctttgggaggggagaatattcgcccctggggtccctaaaaccgagggcgtttggaaaccaaaaccaccttgcccacccggccaaaaaccttgtatgggattcaacccaccatttttttagcttaaattaccacccttccaccaggcttcggggtaagggggcgttgttacctgggggggactttgggattggtcaagtcggggaatcctgttttgcttccg

SEQ ID NO: 182938 - DNA, 361 bp, Arabidopsis thaliana nossen
ccggaaccgccgcggcgacccaggcgtgcggataaaatggagcatagtaccatgctgctcatagacaccatagtaccatattccaacacggaaggagtaatagctgtggaagtcaaaaatatgagtcgtaatggaagagacccaaaggtggaagaacatgaagatagtatactgcttgagctacattatgcaaatgaagaatttcaagagtgaaatcaaggactacaaagacttatgggagttgtatcaattgtagccacaatagaagaagttgatgtcaaaaggaagttgtttagtactaccacaatacaagagaagacgttgacgtcaagaagaagaagtctagtactaccagagtaaa

SEQ ID NO: 182939 - DNA, 362 bp, Arabidopsis thaliana nossen
caattgattcaaaaatagaactactatgatatatggaaacagtgtaatcaaaataaatagtggtactactaagaataggaatagcatgttatatggaattaacattaaatagagtcatcatttgattgtcttttttactaagtcataatttgactgtttctttgcatttaacatgttaaagtagtgtattacattcagaagaaatatgtacatgtgttttgttttaattccttgaatatgatttgcaaaagtgtgaaacaaaaacaatagttatcacttgcaaatgatatatatttgattaacatacatgtaaatgctaaggtggacgcagggtgagggagtgttaaaccgtttgaaattat

SEQ ID NO: 182940 - DNA, 364 bp, Arabidopsis thaliana nossen
cccacgcgtccggaaggagcttctgcgtttaaagcataaccctttcgagacatggcggaagagcaacagaagacgtcttcttcttcttcttccttacagcaaccttctcctgacaagaaacccgaagatgctgagatcaagcctcaggatccaaatcatggcgattctccaaagtatccgtttatttatccgggtcttgttccccggtcgaaccctggacagtgcgatgaacaaatgaaccgtggagctggcatttatgcggctcctgttcatcagtttggaggatatgtcgctggtcttccctcgaactatctcatccctctcacttacaatgttcccacgactagaccaagcaatgagactg

SEQ ID NO: 182941 - DNA, 210 bp, Arabidopsis thaliana nossen
aaatgctcgtgtgaagatttggattatggatggacatagttggatatattttacgtttaaaatgtgaagtattacattattttttctatggtatgaggtttacttgtattatattataattgtatgtacaggagataacatatatattatatagtatgtatccaaagaatacaagtttcctgaactgatctgaaacgacccagttttcag

SEQ ID NO: 182942 - DNA, 255 bp, Arabidopsis thaliana nossen
atcagaaaaatgcatcgagtcttatctatattttaatattataggacactctccatccatcactatgggtgacatggcgcccaacctaccaacgggtaccacacatgaccagctcaaagctcatgaacccttccacaatattaggagcgaggctttcgtaatgcgggctattacaaacatgcatgcaacatgcagcgttgcgctattgcctaaatacgctcatgaattcaacctgagaggcttgaatctcctact

SEQ ID NO: 182943 - DNA, 173 bp, Arabidopsis thaliana nossen
gacttagagcttccaggcccggtcaccttaatttcgaaattccccaggaatcacaaaaagtgggactcacagtcattgggcatggaaaaaattgtacctagtcaacaatgaagcaactcttacatatggaccagggttgttggagaacataaccaagagtggatttatgtttt

SEQ ID NO: 182944 - DNA, 375 bp, Arabidopsis thaliana nossen
atcagaaaaatgccgattgaagaatcaaagcaaaaaaaaaaaaaaaaatgttttaaagagatcgtggggaaaaacaaatgagtacaatgatttggaagtcgtagatttggctttcaaccaaccaaaatacttgtatgtatttttaataggttgttatttagatagtgagtagactacgcggtttgaaaaaaacctactttgaacttacgacttgtaaaaaaaagtgtagttcatcattatgtaatagttcaacttatgacttttccaatttatcaaagaagtttatcataaacgttttctcttttagatgttaacacattgtctccttaaatactttgcttttgacattagatacgcaataaatagcaacacttt

SEQ ID NO: 182945 - DNA, 360 bp, Arabidopsis thaliana nossen
cccacgcgtccgctacttctccggccgaaactatgtctcagtctatccaattctcaactccttcacgcactcctcaccttctccacctccctaactcacgcttccaccgtcctctcacttccttatccttccgccaattccctctcaagtacacctcaatcagagcctcctcctctccagatctcggctcctcctcatcctcccaggtccttcactctcctaacggcactggcgctgccaaaccggaagagcgatccgtcgtagccaccgcggtttccacggatacggcagcgatagacgtcgataccgtgacggaagcggagctgaaggagaatggattcaagagcacgaggaggacga

SEQ ID NO: 182946 - DNA, 362 bp, Arabidopsis thaliana nossen
gggagatagatggagagaggagagagagcacgcctgtaatagggcgcccaaaaaggattacagtcccatttactgtatcttaaagcccaaaggcctttttccatctcgatgcttattattatcttgttttcgtgaaacgctgcgtttaacaaaagggtatgaaacgctgcgtttcatttatgtgaaagtgaattcttagtagtatgtgtcttgttgtgcgaatttgataatctggtttggtttggttcagtaatatggagagaagtgttcatatcatctagaaatttccaaacaccagtcagtttacctttagactttagtgattctgtttaaatcatgaacctaccttaaaactacaaact

SEQ ID NO: 182947 - DNA, 196 bp, Arabidopsis thaliana nossen
ctaaaaggaggagactttgaagaagaaagaaaacattcaaagcttttaaaacgcagcgttttaagaaaaaagaggtagaaagtgattctggctttcccaacaatggaagctttcagtctccttaactacctgaaaaacagtggtggtgctgttactttccttcctcattcctccgaatcttcttcttcttctcttt

SEQ ID NO: 182948 - DNA, 368 bp, Arabidopsis thaliana nossen
  unsure (1)..(368): unsure at all n locations
ggnngagaggaanncactacacacacacacaaaaaaaaannngagggcctcccccaaaaacaaaagggggaganaacgagcaanngnnnnnnnncagaaaagagccngaatnnnaacattttttttttgcaatctccccctaatctgttgtcccttgcttcnttttcttctgttaatcatctgtctttcaaaaagaaagaaaaaagaaaaattcgatttctgggtttgtttttgtcatacagaaaaaaatcaagcttatgaatttgtgtttaatttttttgttttaatttgaaaggcaggtattttcagaacgagatcggtttttcaaatttcttctgattttacctctttttttcttcttaaatttt

SEQ ID NO: 182949 - DNA, 389 bp, Arabidopsis thaliana nossen
tacacgaagagtttacaccgttgatctttgaaggcatttcgtacagttaatatcggacggttgataattgggatgctgtctgtcacatcgtaaggcgtgtcatacacaccaatttcattttatttttaattaatacatcctaaattactgaattcttatcaagaaaattgattcgatttgttcaaaatatatatgataatgagatatagcaaatgagatcacgagtaaatttatgtagattgaattagttgatattttatggaatcatccgatgataaaattgagtatctccgtatatttagcttacgaaaatataccattcaattctccctctctcatatttattttgttcctttttcgattaaacatgagctaaaaatggtgacaca

SEQ ID NO: 182950 - DNA, 389 bp, Arabidopsis thaliana nossen
  unsure (1)..(389): unsure at all n locations
gtgattttaagagtgtggtgcataaaagatgttgagagtttgattacccagataatttaggtgaaccgaacaagagaccttctttgctcaaagaggaagcttttattgcttcatcaaaccggtccccaacaaattgtttcttctggttggaaatgtttggcactgagctttgataactaggctatgtcacagaacaatataatttgaatttgactgtaaactgaggagaaggagattacccaaatcacaagaaaggaaaagaataaaacctcatcatcgcttgatgatccactatccataggtccaggaagttcatcatcagtatcactatcttggaagttagatgaatttcccttatgagtaaatntccgactttttgcttcatgtct

SEQ ID NO: 182951 - DNA, 263 bp, Arabidopsis thaliana nossen
cttatacaaaaaacgagccctttcttcaataaaaaacgctaagaacctgagcgagaacacaaatgacgaggggccatagattaccacccaacccacaacatatcaaactgacctacaccaaccactaataaatgcatagatcaacaataaaacataactcatcaaaccattgaacatatgcttgatttaaaatcaatgcagaagttcaaaacactctgaactaacaacccattgctatactcgaagaccattaaataacttaa

SEQ ID NO: 182952 - DNA, 347 bp, Arabidopsis thaliana nossen
  unsure (1)..(347): unsure at all n locations
ggccctgnagatctaatggatgctttatactggactattcgcagagctttttttttttttttatgtgcaaattcggagatcttctatgtcacctaaatgtttctatgagttaattagccataaaacaataactctctataaacaatcccaaacaattttaggattttttctttcatatgtaacatgctaatattttttaatgtggacgtgctaaaaattcatttaattgtgaagatcctgaaattttactgaacgaattatctctcatactaaccggaaaaattctattgcggagctcaattgtttgtgaaagtttagctgtcattctgctttaaagtcaaaagtaa

SEQ ID NO: 182953 - DNA, 388 bp, Arabidopsis thaliana nossen
aaaacaacaacagaaacaacatcaggcagagaccaacaacaacaacatcgatataaatcagtatattaagagccatgaaaaccaaaccacaaagcgaaaccttccgaaagaaaacctactagcaagttgcagcagctaatccacacttctccgggagtttctcagcgaggtcaaagctcgatatcacggacattgatactgtctttatgcttacagaggcactggaaatcggccttggacagggcattgcagcaagggcccaagggatcaattccggtggtcattgggttcctagcctacacatagggcttgcaagagttcagacaagtagaagtcataccgcagaagatctgtccggttgctgccgtgagtgtaaaggcaagaacca

SEQ ID NO: 182954 - DNA, 368 bp, Arabidopsis thaliana nossen
aattaaaagtgtttgactacattttaattaaagactgagaaacaaattaacaaaaaaagaaaacttatggtacgattaagaacctgaaaaacttttagaatctcatacatattgtttatgattaacatacatctatatttatgatatgaatatgcattatacaaaaacatattaaatttataaactacttttaatcttgttgttctcctttttcaccattattcatacatctttattcatctcttcgttaatccaatccatgcattcacgataatcatcaaagttatcgtctatcttcatatcatcactttgattcacagattctatattatgatattcgcatgactccatcatattattttcctcag

SEQ ID NO: 182955 - DNA, 388 bp, Arabidopsis thaliana nossen
  unsure (1)..(388): unsure at all n locations
ccggggcgttccacgcgggcgctaaaccactatctttctcacactataacccagctaaaggcaagggcttggcgtttttaaagtttgcgggaccccaacaacnnccgagaaagacgaaaactttcctcctatctagacaagcgatccaccgcatttcactattatcttcaaaaaccccaactttctgcagaaactacaccgccattacatccaccatatctcactctgatcgtcatctaagaaactactacaaacaaaccccattccaaaacgtctaaatccctaaacccattccatgattcaaacaatatttccactttactcgcgacacccgactcagtgaatccactgccgccattgacgactcaaatgaccaacaggaagatga

SEQ ID NO: 182956 - DNA, 376 bp, Arabidopsis thaliana nossen
ctagatgccatcacaagtcgtagtcaaaactccaaaacactgaatacagacacgaaaaaacaacaatcaataaatagtgataaacctcaagcataaagcatttcccatttctaaacatctgaagaaatgactaactgaaaaatgaaggaaatgaccaaaatttactaatcaaaccaattatagaaacctttgttacgtcagctctaacaacaacactaaaaaccatgaaaagtaagcagtttatattaaggttgtttctagctttccatgaaattaaaattgccaaaaaagtgaatttgaccaataaacactaagctaaaagcctaaacttacgcagtaggaccctcgctttcctcacagttcatgccgaagccgc

SEQ ID NO: 182957 - DNA, 373 bp, Arabidopsis thaliana nossen
tgcttcttcgctagcttatctgaaatcaggaagaatctgctgtttttcacttcaagttcaaatcaagtgttaaattctacgaatttttgactttttcatcagtgtttgtcaattgttcgatctatgttgtgcttcttgcctcttgatgtgtcaaaattgaagtcaaaatcgttctacaaagttgtgaggagctacttagcttctcttccttgtgatgttaacaatgttagagatgatgataatattatccaatttctgtgttaagttgtgatctttgttttagaaaatgtgtttttgaagagatgtgcatcttctcagtgttttgttatgtgtattgatatgataacaggcaaacgcggcatcgggaatggct

SEQ ID NO: 182958 - DNA, 369 bp, Arabidopsis thaliana nossen
gcagcgttaaaagtctttttgttcaaacactcttcagaccacttgaggtttgcttattgttttgtgaaatgaacgaagcaattatgtaaactccctcattactcttttgaataataataataataataataataaaaagatattgattcctcggttatctacctcttaaaagacctaaacagcaaaatacgataggttgggtgtgtgaccaaaaaaggaaaagacgaacgaagaagtaagaaaggaatattaaaaaaagaaggaaaaattaaagaaatggcctttgagagaattgaagtggcccaatgagggatggagcagtcaagtgtggggtctctctcacctctccacgtttttcgtctcttcgct

SEQ ID NO: 182959 - DNA, 351 bp, Arabidopsis thaliana nossen
gagtatgataagcatttttttcaaaatggtgagcttaacccccctgtttcatcttcaatttcgtgtgcacgcaacaaaaaggaccatagaattcctatgaaattgtgtaattcttatgcttttgggtaggtgaacactttgataggaggtcaattcaagagtaagtaaaccatgttgttaaattagataaagtgaaagctctgcatttctttataaaatcattttatacagatggaaatttcggtcatgagtaatatcagcttaacatgttgaatactactctctgcaatctgattgaataaagctgtaccattttgtgttatatgggaaacataataaataatatgtaca

SEQ ID NO: 182960 - DNA, 376 bp, Arabidopsis thaliana nossen
ggaattttcgttcacatgaatattttcacattttttagctgatacattaatatatatcagacagaaaataattggacatactagtttaatgcaatataaatagtaattaatgttatccacacggacatgtataaagttcgaggatatttttgtttaaaataaaaacggaattcttatgaaaggtattgtggatagttgttacattctatataaatcaaatatctacttgtataatttatgtaaataataagtattttgtaaattgtgagtagttgatgaacctctgtcatggttttagctggtaaaggagaattaatttgtattttattgtagttggtaacagacagttaagagcattaggtcagtatctacgttt

SEQ ID NO: 182961 - DNA, 377 bp, Arabidopsis thaliana nossen
gcaggtgagagagagaaacaatggctaagctacttcttcttcacgcgcctcatgtaatacctaggtttagcagcagtagtagtagatcactggtctccgcagcggctttatacagaagacctctcctcgtgaatccccaattttcccatatcggacctcgtcttcattctccgtacaatcggagattctcggctcgagccttcgacgattcacctgcttcctcggcggagatggagaaagagaaacaggaacagctgctggatggagtttctgggaaaaaagatgaggactatccgaccggagaaatggagtatgagaataggaacgcgtggcagatttttgttgtgaagtttcggatgttatttgcttatccatgg

SEQ ID NO: 182962 - DNA, 188 bp, Arabidopsis thaliana nossen
atcatcatgtgaaagaaggcctaatcaagtgtttaatacaaaaatatgacaagttctttctcaaggtaactcaatggtcaaggggattcaaaccataatcaatcaaaaaatgatttaataaaccctaacggacctaatcacacccaattaacacctgcagattttggactcaaaaaacttcaattaaa

SEQ ID NO: 182963 - DNA, 376 bp, Arabidopsis thaliana nossen
gtgtgactcgggactcgcgactcaaccgaaccttacccaatactcaaccacacaacaatgggcgcaagctccgtcgtctccggcagaaccaaacgtacgcgatacttctttatgtctatggtcaccggaatttctcgattgcgaatcgattggtttcgaagacggagattacgatttcacagcaaatctaccagacgattgcctcgctcatatctttcaatttctcagcgccggagatcggaaacgatgctctctcgtatccaaacggtggttattagtcgacggtcaaaatcgtcaccggatatcacttgacgctaaatctgagattctccctttcttaccatgtatcttcaatcgattcgattccgtaacaaag

SEQ ID NO: 182964 - DNA, 522 bp, Arabidopsis thaliana nossen
  unsure (1)..(522): unsure at all n locations
gcgacgccaccgcgcatccgagaaaaatgtganngaaatagtgactggtgtatgagagnanngagagatacccggtaaaccgaagcgaaagctaaagtagaggtcagcgagtannaatctggnngaattgtcnnnttcaagcccttccannaatttnncagttaaaggggtgctcaancctttgcnnagaattttctcttctttaaaggtgtcagacctcttgggnngtaaaggggtgtnncaactttngnngcgatggngnntcttgacccggaaacccaatggnntggagnngggtttgnnngttaaacgnnngtggtggagggggagaaagggatagtagaaccgtaggannaggttcattgtngggaagganatcnnaagaagaaatggttctttcccaaagtttannagccttatgcntnntgaaaggtgattngnngtttagtangtaaacccaaccccacatcnnncacaaagatcnnttcagaaatgttacaagannatcagcccccagatttc

SEQ ID NO: 182965 - DNA, 109 bp, Arabidopsis thaliana nossen
gcccaaattattacataccccataaaagccccgaggtaaaaaaggatattccgttgttccaacttaccattacggcttcccccgtacaacacctcctcctccttagttt

SEQ ID NO: 182966 - DNA, 380 bp, Arabidopsis thaliana nossen
gttcccgtgggtttacagggagccaggcataatgctcatcagtgctacgggttatcatcttcgggtcgtcaccattactacttgaatagaccacctcctcctcctccatcctctctccaactttctccttctctcggtctccgaaacatcgataccaaaaacgaaaaaggattttgctttttgacaatgggaacaacaccatgcaatgataccaaatctaaaaagtcccatattgtattgttcggcaagcttatactacccgaggaacagctatcagaaaaaggctcaacggataccgcaaacatagagaaaacgcagatttcatcaggcgggtcgaaccaaaacggcgttgcgggaagggagttatcttcgtcagatga

SEQ ID NO: 182967 - DNA, 166 bp, Arabidopsis thaliana nossen
cggacgcgtgggggattatgcgtcatcatcagtgtttagtatacatcggcctgcgaatttaattaactaatgcagctttgttgactatctaagtgtattataaattctaaaacaatcgaatcaaagagtttgaggataactacgaggacaacatattttttacttt

SEQ ID NO: 182968 - DNA, 382 bp, Arabidopsis thaliana nossen
cggacgcgtgggcggacgcgtgggcggacgcgtgggcggacgcgtgggcggacgcgtgggtaaattttgaatttctcttctttgaaatccaaatgatctggggagaaaattatgggtaacttaaatgaaaattgtcatatcattagcataaaatgtagttgtatacttaataattttcatattgactagtttttttcccccaataaaatcttagtattacatttatttcctagtatggaaagtaactttaaatgaaaatttgaaagacaaaaaaaaaaaaagaaacgaagaaaaaaaggaaacagaaacttactgatgaaatgcaaaagcgtttctgtaaacggctcctcgaggaacaaaggtttcttctttgtccgataca

SEQ ID NO: 182969 - DNA, 276 bp, Arabidopsis thaliana nossen
ctcaaatattaacaaattttttttttctatcaactcaaaaatacgggcggtaaaaaactcagccgggcgctaacccataactactacaccaatacactcccaaacaaaacaacctccattctcgtcaaaccaacagcctcaaaccctcttaaccaactaatatcaaaacacctacgaaccgatctattgtaccacataatttactaaatatcacccatcctaaaataaagatcttcttataaactacattcaccaatatctttttttattacacac

SEQ ID NO: 182970 - DNA, 64 bp, Arabidopsis thaliana nossen
  unsure (1)..(64): unsure at all n locations
cgtcncnngcaaagagtctcanntctttcgtgcgaggtgtgtgtcataacccaannnaatcaaa

SEQ ID NO: 182971 - DNA, 52 bp, Arabidopsis thaliana nossen
  unsure (1)..(52): unsure at all n locations
cacgcccgtccgcgttcggcaaccgtaagcaataaaggggtatanntttttg

SEQ ID NO: 182972 - DNA, 132 bp, Arabidopsis thaliana nossen
cacagaacttacctgcgggagatccaaagaacattgatatcagtggtgcacgttaccgagcagtggttactcaacccgagtaacaaaccgaacccattacacggccgtcgtggttttgcatttgagatggta

SEQ ID NO: 182973 - DNA, 293 bp, Arabidopsis thaliana nossen
aatctataaccaaaaacttttttttaaacaacaaacaaaaacacgcgttgggctaaaagatttctggtgaacgaaaaaacccacacaaaatatcaaaaaccaaaccaactaacaaaaaaaaataacaaacgcacacatcccccaacatcttaaaaagacaagaaaaaaatacaccacccataacaaccccacacacgaattatatattctacccccaacaatcccgaacacaagaaaaaaatccaaactcctaaaaccaccacaaccaccacaaatcccacttcctttactaa

SEQ ID NO: 182974 - DNA, 526 bp, Arabidopsis thaliana nossen
  unsure (1)..(526): unsure at all n locations
cacgccgtcnncgggccannttcttctatcanncggggcattgtggtngncctcgagcccctgatganntaattcgtcgatggatggtgagagtgggtgtgtctgcgcagtaggannagttttcttgaacccaaaannntattggcngnnctccacncnncagttatngnnaagaagcnntgtcagnntgattcaacgccagnnccctgtattatttagtgaaangnnggatggtngnngggagaacccncnnacaagtnntaccgctttccagngnnagctgctnnntctcctccnnntcccccacaangnnttgctgcttccangnnaggctgnncttctccnnntccaacnntggaacncananncacagcncaannntacaacnntgctanncttttgtnntaatgannatcacctntnnctcagaaaaggtttgagaccttntnncgatganattnntgatcccacgcccagtgcgtnntttcaagctggcccttccagcatttatgcatctacaagatgg

SEQ ID NO: 182975 - DNA, 336 bp, Arabidopsis thaliana nossen
  unsure (1)..(336): unsure at all n locations
gggcgtcccacacgtccgnaaaaaaacattaaccctcttttttcccgacacagcacccaaaaggcgtggctcacaaaagtttttttgtaaccaacacaaccaacacaatacctcccactacccacgctagcactccaagtactcaccctcaaccaacgctacctaaacctccacaacacaatcaatgtaacatgtaatacatctactcatcaaccctcataaatcacataaaaactccctctctcacagacctaaatcttaaaaaacaacacaacctatatacacacaagaaccacgataactacaaaccataacccaaccatgatctaccactaa

SEQ ID NO: 182976 - DNA, 236 bp, Arabidopsis thaliana nossen
  unsure (1)..(236): unsure at all n locations
aaataacacacaacccttttttatctatattcaacaccacncacggccggaaaacaaatattttggcatgcaaaccaacaaacaacaatcatctaccataacccaacacaccataaacaaacatcacaaaaaacatacactctatccaccccaaccttataaataaaacaccaaaaataaccgtactcttataagccacacttatcccactctctacaaactaaacatagcaccaa

SEQ ID NO: 182977 - DNA, 287 bp, Arabidopsis thaliana nossen
  unsure (1)..(287): unsure at all n locations
catccataaaatataatttacttatatcagaaacaaacacaaacggggagtttctttttactaagtgtttgccccacancnncaaaanaaagaaacctacctatcctacagacgacaaccaacacaccaagaatgcaatcaaaacaaaactatcacacaagcttcacgcacacgcaagcttcataaccaaacctacccactaaatgatgtgactactttggatcacacaaaaacatcgaaccctactccaaatgctacataaacataatctctcaagaaactcaaac

SEQ ID NO: 182978 - DNA, 381 bp, Arabidopsis thaliana nossen
ggctagcttccttaaacaaatgtgaatggatgtgataaataatgaaatgttatatttttccttttgcactggatacgattttcttctcactgccttttatttcatatacacttcactccaaaatacaaatgatattcattgtctgaaaccagattgaatattaagcagatttgatcgaaataagccaatcaaacaaaccaacattaggctctcttcttttcttgatttttaacctttggttcgaatccttgaccagcttcttccatagatctcccacagtccatcctttggatacaactagttccgttacctgtcccaaagaaccatattaatcagaacagagcatttgctcttgtttgtaatttgatgtagtgataagag

SEQ ID NO: 182979 - DNA, 377 bp, Arabidopsis thaliana nossen
  unsure (1)..(377): unsure at all n locations
tccgtccgataataacacaaaaatcaataagatattgaatgcnnncacaaagtttgcgtggtgccttgctcgtagattatgcgtgtgttgtgtgccccattagtcaccgcaaggggcatgnntcgaagtaagtgtctataaagagaccaaattatggcaccctcttcttccaataaactactatccaatagagcattggtagctttcagctttctgctgtctggtatttatcattccacgcagtagatgaatgtctatangctctcgctttactggtttcaaccacatcccaaaaggtccagtacgcctaattggataccgaaatgtgtgctacacatagtatccatctggacaaagtcaattgcaaaagaggtcgc

SEQ ID NO: 182980 - DNA, 150 bp, Arabidopsis thaliana nossen
tgcacatatatataaatatagaaattggggaaaaagtgaaatgcagtttgcctaaattgaggttaagagtaagcacatggggttagtcattgcttgtattaagcagcttgccaaattcaggggataattaccatccaacctctctatctg

SEQ ID NO: 182981 - DNA, 179 bp, Arabidopsis thaliana nossen
  unsure (1)..(179): unsure at all n locations
ttcttttacattcaaacaaccnatgggacagttcaaaatctattgcgtcagataatcaaacatcaacatattattcattattcacgacctatctgaatattacaacaccactttacacttgatctacaactatatttctataaactctcactctacatacattctctacaacttatact

SEQ ID NO: 182982 - DNA, 118 bp, Arabidopsis thaliana nossen
gtcttgaaaccgtgaaggaatctgtatcttttgtatgttacccattttagtgtcggtaaaaatcaatttggaggcaaaacgcccagagattttcccgggagagtgttttacatccatc

SEQ ID NO: 182983 - DNA, 216 bp, Arabidopsis thaliana nossen
gactcttactattcctcctttttcccctctttttcttcttcttacactctctcaacaacaacaagttattattaaaaatttttgacaacaacaacaacatctaaataatctttcaaatattcactcccaaattatacacacttaatcctactaacaatcattaatccatcccaaattcaataacactcacttatccattcaaatatttaacaaaaa

SEQ ID NO: 182984 - DNA, 346 bp, Arabidopsis thaliana nossen
  unsure (1)..(346): unsure at all n locations
cggactcatacgcggttctcgttttcgcaccccnaancanacgcgtgggcgtacaaattttttagttcccacaaccaccncttanaaacccaaatgatcaggcgagaaaataatgaggcacttaaacgaaaaaagtcacatcattagcataaaaggcagatgcatactgaacaatagacataatgactaggtattatcccccaataaaaacttagaactacattaattccctaggatggaaagcaactttaaatgaaaatgtgaaagacagagaagaaacaccaaacgaccaaaaaaaggaaacataaacctactggtgaaaagcaaaaacctctctataaacaac

SEQ ID NO: 182985 - DNA, 386 bp, Arabidopsis thaliana nossen
aaaccttataataattgaattctccagcccacaccttcactttatcttcgctttttctattttttaattccctaattattaaccatagtttaactttctatatcatagtttaatctcttgctgcataattaaacgtcaatattgtttatctccactatgtaactagtcatttttttacacataagagccatacaagagagctcgtaattagtttttactaactataccacccattatcaccacatgtgttatactctttccatttcataatgaaaaactattttggacttttaggcatatatattggtattaaaatctatgtttgacgacaagaaaatagtatcagttttttaagtaattcactagtagtatatcttacatataaa

SEQ ID NO: 182986 - DNA, 102 bp, Arabidopsis thaliana nossen
gctcaagcaatgtctgcccgttaatatccctttccttaacggtcttcggtggatccgagaaatcggaaacaacacaacacaagctgagttttctcacaaaca

SEQ ID NO: 182987 - DNA, 383 bp, Arabidopsis thaliana nossen
ggtccggctccatatatgaataatgatgtgatggcggaggaggtgggggatgagaagatggatatgggctatgctggaagttagaaccctccccacgtggcatgctttttgacaaagatactcgggaactataagatggttcaggacttccgtaatgcattgggggattcatccttggaggaccggcatgatagtcgccctggaatattaaccacaaattaagttattaactatgtctgaatcctcactttgttaactgcaaaagattctaaaagaagaaaaaggacgcacctgcatgctgggatttctgcggtagtcaaagccatttgagtaggaattagacattgccaactgagcattctgcgaagggcgagctggtggag

SEQ ID NO: 182988 - DNA, 288 bp, Arabidopsis thaliana nossen
  unsure (1)..(288): unsure at all n locations
ccgggcatttccaatcttgcttctccacatacactattttacctatctatctcccctttcaacaggaggggcatnatagcatatggttcgggcccnancacaccatcaccttcaatttctgtatcatctaattatccattgaatccactgctttacaatgaatcatctttaactttctctccatacaccttttcaaactctcttccaaacttttataaagtctacaaaaccaaccactctttgttcatgtcatataatatcatttatttttcattttaattttactac

SEQ ID NO: 182989 - DNA, 383 bp, Arabidopsis thaliana nossen
tgtttcttcttccattttctgtttctattggaaacttctctctccaattgggtggtcttcacttctgtgatcggttagctttgacaaaaccgtagtaaaggatcaaaagttatcatctttggtccatgttgtgaatcgtgctctgcttgggtcgtgactcccaaatccggatttgaaaccagcatatctgagcttaattcgagcatagatagcttagcaatggagcagtcagaagagggtcaacagcaacagcaacagggagtgatggattatgtacctcctcatgcttatcagagtgggccagtaaatgcagcttcccatatggcattccaacaagctcaccacttccaccaccaccatcagcagcaacaacagcagcagct

SEQ ID NO: 182990 - DNA, 364 bp, Arabidopsis thaliana nossen
ggttaggccaagggaagaatgcagttcttttgggttatttcaaattctatttctgttactttggttcttttgtaataaaaaagcttttaggtaaatatgtcacggaggtctttaaacttatagtaggacacttactagtgttggaaaagcatcgattgcctggataaccgttcgcatgaagagtaaaggcagaggagttcgatcaacctgaaaccaaaaagtatcacagatctcaatatctaactaaataggaagttcttttccatgatatttgacataccatctgaccgagggcctttgctaagacttgctgcgtgaaaacagtgcgttgttcaaagcaagctgagcatgcatctgttatctg

SEQ ID NO: 182991 - DNA, 289 bp, Arabidopsis thaliana nossen
cgaggctaaatttaccttttttttacactcaaatctaacaaacatgacagttttatataactttgctggacaaccaaccacattcataactgatttctgtaaaaaactccttcatcaaatggagcttgaatacattctcctaacaccatcctaaaattttaaagcaactaataagaaattaaacaatactctatatcacactgatcttactcaaagcaaactacacattataccaaaattactacttcctattaatattgaacaataaattgttaatgcaagttaatag

SEQ ID NO: 182992 - DNA, 345 bp, Arabidopsis thaliana nossen
cgaggctagatttaccttttggtgacattctctttgagcttgttgatgactctgtcgtactttatctcttttagactgttgaatttcacaaaaacttgacttagaatcactcatccaactgttgaagatctaggaattatacttgttctatcttacctctaagtccttgagcgctgataacatttcgtgcttattattctcgttgatatcctcaaacctgattgatagaattggttacgatataaacaagttgggtgtaaaatggctttaacaattaagaattctactctatgcaacacagcttcttcgggccaggacctaatttaaagaacactcactttagag

SEQ ID NO: 182993 - DNA, 119 bp, Arabidopsis thaliana nossen
cttcactctacagagattgcttttttggtgtagacaccaacatagactggcaggtctcaagagtggtggtgaaactgaaactcgtccctggaaactacttctaaaccatcactgtctac

SEQ ID NO: 182994 - DNA, 277 bp, Arabidopsis thaliana nossen
  unsure (1)..(277): unsure at all n locations
cccggtcgacccatcgtacgtttaatatcccattgcctatttaatttctaaaaccaacatcaanctggggcgggtgaattctattcggtttgggtacccaaancctctcgnacattccaacccacgaaactctaatcataattaaccatgttaacatctaatcacatcttttcaaaagcaataatacacccatagatgttcttgttacaaaatttcctcacatcttaagagataaatgctcattacaataactcttcactaaacttatacaattcaa

SEQ ID NO: 182995 - DNA, 382 bp, Arabidopsis thaliana nossen
aatcaatcggaattaaaacttgaaatcaaaccagcaaatacatttattaacctttccagtttccagagaagtagtagtaaaattctgaaattgatgcggtggggcatccattaaggcgtgttaaagttggttcaccagctttgtaacatacataacacatccatcgctatcaaaggaagatttgatcggacgaggaagctgagaaaaaaacaaaaacgacaagagattcattcaaacttgcacgccaacgccggattattcccggtgtatacgtattttatacggttctatttaggaagaagaagaagaagaagaagaagaagaggaaattttaaggaaagagtttttgtttgaattggaatggagggtgttttcttaaaaa

SEQ ID NO: 182996 - DNA, 384 bp, Arabidopsis thaliana nossen
  unsure (1)..(384): unsure at all n locations
gtcagcggggccgtgcagcgttatgctgtcggagacgctctcnaccgccttggtgcatgacgtcgcgcacgcgggtcagcgcgaacggatcgacccggtactcacggaccagatgatggccgcggcgtgcgaccttctcggtcaggatcgagcgccgcatcagcagcactgtaacgccatgcgcgctgcagcaggctgcgatcagcggcagcagcacatgggtgttgccggtgagctcgacggctaagaaggtcgcggtcaatggcgagcgcatcgtgccgcccatcgtcgccggcatcgccagcagtgcccagaagcccgggctcgcggccggcaggtagccgctcagcgcggtgcccatcgcaccgcccatgatcaggagcg

SEQ ID NO: 182997 - DNA, 277 bp, Arabidopsis thaliana nossen
tgatatctgtgataccaaatgcttgtcagaaagtgcaccaatgagaaccacattactttttttccgagggcggcgttaagcgaaatgcagtgagagtcatgccccttctaatttatcattttacaagttacatcaaatgctcttgccttttcttgtgtcggtggcttttaggatttcccatattacttgatatactttcgttgatatataaaaataaatggattatctcattatactgtgaaagctctaagtctacctttttctctttttctaattt

SEQ ID NO: 182998 - DNA, 376 bp, Arabidopsis thaliana nossen
gtcaatatacattgaagaaaagttaacaactaacatgacgccaatgtagtgagttatacatacaagtcttttaactctacgagagaagcaatggcaatgggaattggtccaactaaaccacttgcttgaataaacctgaggtaaccataacattataattacttaaatcaagaatgtttaaaggaagtaacaatctcaaaccgtaaacaaagatcttacagtcgctcaagcttagtccatttttggatgaaatctggaattgttcctgacaactggttgtcacttacacgactatgtacaaaattatatgcattagcaaaaaatatcagaattgcatatatatagtagcaaataaaaaaaaaattctctatgaatc

SEQ ID NO: 182999 - DNA, 377 bp, Arabidopsis thaliana nossen
gccggtctcgctagaattcgaacgtatttatagttggaaattattcttggtatttaccatttattttcttagtacctactaataaaagaagaagaggtcaacttgacattattaagccgagagaagaagacgaagtcaagggaattatcacgtaacaaacataattagtcaatcggaaagaaacaatacacaacaaaatagtcaacgataagtatttaatgacagaaacaaatttaatggtatagttggatattttcttgtatttcagctagaaattccgttctagctaataatatctaatataaaaaaattgtgaacgaacattcacagccatatgttttcttataaaataaaataattattaacaaccataaatt

SEQ ID NO: 183000 - DNA, 363 bp, Arabidopsis thaliana nossen
actacttaaaatttatatttatgtacctttaactaagaaattatggggaaaaaacaagtgcacaaattatgaatcttggttgacattccatcaaaatctaggatcgaaccttgtattctcccagtggcgagagctatataggcagtgagccactttctttcatatcgaatgttggactactcggtcagcttgtagtgtccaaaactaaagtaacaattaaaagaaatgactttttcttaaaatatgtttcttctattttaaaattaatattttaatttttttgggttttgtttgtttgagggtaatcttctagggtaactaagccaaaccgaaaaaagttgatgtgtgtttttggctagtttg

SEQ ID NO: 183001 - DNA, 381 bp, Arabidopsis thaliana nossen
gactgtaatcatctcttctgtcaacagtggaacagttgaacgaatcattgaaacaactagagaaagaaaaagcagtcatgtttgatgattggacgaaacagttgaatgaattaaaagtggaggttgaatccagaagacgtgaacttgaaaccaggcaaacgaatgttgaatcagtagtagctatggtattgcttcctttctttcgaacatctaacaacgtgaatctgttgtgcacgatgctttatcatctccgtaagttttatttgtttatatatcaacaggttgatgacaatactgcgaagactaaccaggtgagacagtcaggagaagctaaagttaaaaaactagccgctaaatatgaagagatcgtgaagcaggttt

SEQ ID NO: 183002 - DNA, 339 bp, Arabidopsis thaliana nossen
gaataaaatctttctttccgttcttttttttttggtgtgggccggaaaaaaagattttattgcgaaagggggggcggatccaaatgacccacgcttacatccgacgtcatacgacttttttagtgctctataaggtcacctaaagtccagtgagtgaccacggttttactacgaaaacactgggaaaacccatctttttcccctctaaagacattcgcctttcatcacctttcgtacaagcggagagacccgaaaaagacccgctccgaaacagcttcccaacatgtttgcatactgaaacgcgaattggacccgcccattaaccgcgcattaagcgcg

SEQ ID NO: 183003 - DNA, 387 bp, Arabidopsis thaliana nossen
gttactggagaatagtgaatgagggaaatctttgtaagtcacaaggcggtgagtcatctgaaggtgagatgtttgatgaagagtccaattatgtttaccctggtcatgacatggatgatacttttacatgggatacacaaggttgtggtggaagagatgcaacttactctccccattctggaaagtattttgagctagatatacctccaagagtatttgctcctgttgagactttctattatttactcttggatcaacgtgccaaaaagcaagtgcccattggaccacgtcatcaagccgagattcctgaatgggaaggcagtcagactgggaacatataaacctcaggcatgtcagttcaaaatcacattagtggatgtgctgatg

SEQ ID NO: 183004 - DNA, 144 bp, Arabidopsis thaliana nossen
  unsure (1)..(144): unsure at all n locations
cggggcgacccacgcgttctaaaacaacaaaacctttttaaaaccgaagctatcgctaaacaaagagcacaattcatttctttcccccagcaaacccccctanccaacgcatccatctaccatacaacctatgcaattcaaaaa

SEQ ID NO: 183005 - DNA, 104 bp, Arabidopsis thaliana nossen
cccgtgaagatcttagtctaagctaccttttagcttctcgcagtagttaagtatacatcaaggatagcgagtttttagtttcgttgtgttggcgctgcctctag

SEQ ID NO: 183006 - DNA, 360 bp, Arabidopsis thaliana nossen
aattaaatggtggtcaaattcgatgaccgagagcagtaagcttaaggtagtgaggccagaggctgctggcttcaagctaaggcatggtcaagaagaggaggcttcacggctatacgaggaaattgtgaaaaaccacaatagcacagatgctctggttggtcttgtgactacacttgctcgtgtcaatgtcgagaaagcagaaagttatgagaaacagcttaagcccctaccaggtttgaaggctgttgatgtggataacctagaaaagacctctggtgcaaaacccattggaggcgctgctggttcatcgagtcatgaagaagtgaagaaagaaaaggcgaagaggaagaggaagagaaa

SEQ ID NO: 183007 - DNA, 377 bp, Arabidopsis thaliana nossen
  unsure (1)..(377): unsure at all n locations
gaaaaagaagaagagtacaacaagtactaagaagacgaagaaggtttcaacaatagcttattcgcagcttttccgattctggtgagtgtttcgcactacattgctcttgctctactggagattgcggttgtgtgttacgagagctagagttgaattggctttggtcaacacaatggggacttgtggttgctgacttttgtgattttcagttttctacttggatttagatggatgtttcttccattgtgcgaaatacaaccctaactgatcaagatcctttgttaatggaccacggtaaccgcgagcacatcgttgacattacaagcaatgacgaggaggactcttcatcaagatcttctctcgatgagnctactcct

SEQ ID NO: 183008 - DNA, 351 bp, Arabidopsis thaliana nossen
ctgacattacatccctccagcttctctattctgcgactcccaagacggggagctttatttctttgtgtgtcatacctcatagcacattcctagaccagcaccagcaggttctagatcatgtccattcactctcaaaaagtttcgaatctggagacgacacataatgaggaagacccgctgagcggtaaactgtgtccactctgcatgataccatataaatgtacagcggctaatagatactggaacaatctcccgtggtaaatatactccggcatataaaagagagcctaacactcagaccgtgaagaccttgcactacatgtacatgcatcactgtataccagatgaatt

SEQ ID NO: 183009 - DNA, 60 bp, Arabidopsis thaliana nossen
cgactagatacttgatagatattatgcgatcgtctcttccttgtgtattctctttgtgaa

SEQ ID NO: 183010 - DNA, 508 bp, Arabidopsis thaliana nossen
  unsure (1)..(508): unsure at all n locations
gcgatcccatcgcagtccgaaacctcaatagagtgtagcagaatgaaatagtagtttcctttcatgagaatttccattaatgtgatgtcatgaatccaatagtgaagttagcatagtagtcttcccatagccatctnnnttgaaaggcgctagaaatatagaantnntaataatnnttctatataatacctnnttgaattatttcaatnnacatagtgaactatagagatatatatacncnnaaaatgataatacaatatccctttgatatcagtgcatgaaatattccaatctccatattagctttccatatattatagaaacatnntgaaaatagttgtgtatcaattattatgagaagaaaaatgatgaaactgaactgatctgaataagtnngtggaagacaagttataagataagaagaataatttatagaaccattatcgaaatttgccannttttcttctacttcaatagaacaaagttgcacacctgatacctatttaaa

SEQ ID NO: 183011 - DNA, 393 bp, Arabidopsis thaliana nossen
  unsure (1)..(393): unsure at all n locations
gtccgaaaaggttatacaactgatgcaacgtcttatcattcgatattncatcatggccagaaagtagttattttttgtggtttcaatgccccactaagtacttcattattccactattttttcatgtataacaaagaaaaataataaagcctaaagcaaagaattacaaaacatgtttcacagttgaaaactaaaagtctacatgttcatctgttaacttttataaagaaaactgtagagcactgctcttctctctttgctttttgtaaattggttgataagatccgaaaaatggaccctatattgtaatgtaaccatcaagaactgaaagcgaaagtgaaagcaacagtttacccacaccaaagacatatgttctatcatttcatagtctac

SEQ ID NO: 183012 - DNA, 344 bp, Arabidopsis thaliana nossen
gcccgcaggtacccgagtccgagatattcccgggtgcgatcccatcgccgtccgtatagaaccgagtagaaaacatgtatttctatgctattctgctagatttagtttgtgcggagtgttatatatgagtgttgtgtccatttgggaccttaatagtttatatccagagagttagattaggtattggggaggtaataatcctttctagtagcccggagaggtgtccctatcaggatagctcatgtagtctattttgagcattataccaaaacatcaatacataggatcgaataccgatcccttcaacagagatgtgttgagaatggtgtgaaccaagctttggc

SEQ ID NO: 183013 - DNA, 371 bp, Arabidopsis thaliana nossen
aacagttcaaaccttctgtttttatcttgtcagctaagcaagaggatcagaggagccttatctgaatgatagagagagaagcttttacaccctactaaagcatatactgcaaacatcgagatccttcacctatagagtgaggtctaggattcaataataatccatgtattattgatatcttcaataccctttattgctctatccacttaattacaaatccaatttgtctgataccttccaggcgcgtcaaagcatatgttcttaatcaatatcaaacaaaagattgcaaccgctcaataaaatgtgggtgaaagttttatttgcgaacatcatattgctcacgctctgaatttcataatccataatgctaa

SEQ ID NO: 183014 - DNA, 275 bp, Arabidopsis thaliana nossen
cccctacaacatactaaaacaaaatcccaaaccccggcacacaccatactagccgaccactccacaagcacaaaacaaccaatgaccccctctacccatataaccacacactcaaatatgaacacctccacacctccaacaatccaaactcaacataacttccccaaaaacacatcccaaatcattacagaccatacaaaagaatcacctactcactaaaccctaaaaccaacaattaaaaccacaaaaaccttcataaaaatcactgccaccac

SEQ ID NO: 183015 - DNA, 387 bp, Arabidopsis thaliana nossen
caaagatatcacattttatgaaaatgcttaaaactccagaagtatcactagttatgttactaaagatataggaatgagtcctaactgatcttaagaacttaataaagcttgttttaattttgaggtgctttttagggtattttctaataaatttatttgtttgtgtcaaaaatgaattaaagctttgagaggaactggttgaggagagatttgaacgtggtaagatttgggctgatcggatggctagctccgtcgagcattccagcgataaatgggaagagcctgacgggtctcttcttcgatagcatcggaactgagctcgctcacttcccgactcctccagctctcacttcacagttctggttgtggttggttacgtggcactta

SEQ ID NO: 183016 - DNA, 224 bp, Arabidopsis thaliana nossen
tatctactctcatttaactaccacctttccttcaaacctagagtgatgtctttaatttttgtgggctactataacaaactagactgccattcttcttacaatcaaaattctttcacttatcaacccactatcccctatcgccttttaaaattttaaatactcctgtcaaatcaaccaattctttgctctctcccaaaaattcacctaattttaatactgacaac

SEQ ID NO: 183017 - DNA, 250 bp, Arabidopsis thaliana nossen
attacactcaaacatttttcttaatgcccgtcactacacccggctacattcatatttttttggatcacgacattaaacaaccagacgttcacccattcaacaagatactataaactctaacgagatatataatatatgctaatcttctcattcacgactagagctccaaacctaacgcgtattatatcaaccaagatcataataattcccacagaaacctaggactctagattaataaaaacaaacaatc

SEQ ID NO: 183018 - DNA, 210 bp, Arabidopsis thaliana nossen
aaccggttggttcaaaatggaggttcttaagccaacccaaaggaccttatttccgcaccctttgggttaattttttaaggaccacaaccaggacctccaacactcgacccttcaacataaggtagaggttttgttcatttaacccaccaaaaaccttatttggattaccatttcctattttttaggatggggttggggaatttaaaggag

SEQ ID NO: 183019 - DNA, 382 bp, Arabidopsis thaliana nossen
gagacaactgaatctctcacccttttcctctgtttctctttatttacaggcttacattgtgtacatgggagaggccactgagaattctcttgttgaagctgcagaaaaccatcataatcttctaatgacagtgatcggagagtaagaatcagttcttgctcaaattatcgtcatcggatttttattcgaaattatttacttttgcagcgagagcaaagcaagagaactgaaaatctatagctatgggaagaatatcaatggatttgtggcaagactgtttcctcatgaagcagagaagctatcacgtaagtaacaaaactgtcagaactgttttggcttttatcttgatgtgattgattattgaatggtttttctttgggga

SEQ ID NO: 183020 - DNA, 263 bp, Arabidopsis thaliana nossen
aaaatttttctgggaggaaccaaaaacacatggccgctttacaacatatgggtgaagcgacctccaaaaagagctggtcctggggctcaaccctcacatgccatgaccttcgatgacaacagacacaactgtatctgcggcgagctgaacccaactctccacctagctagcgatctttaccgggccaatattgcaactcaagaatgatcctacgcatctagcgcccgataagcaactaaaccatgcattggcgcctacaccgg

SEQ ID NO: 183021 - DNA, 367 bp, Arabidopsis thaliana nossen
gagaaatagaaaaaacctacaataaacatgacagtaagcacagaatgcgcgtaactctaaatctattgcggctaatagtgcaggacaaaaggtccaaacaattccccccctgatgccatcatgttcttcctccacctaagagctttaatttagaactgctcatcaatgtttggattctaacctcacagagagaaaaatacttcaaaaacgaccataaaacctagaaaaagcttactatactgtaaatttagtagaatcgaattggtataacgatggctcactcttgagcataagtttaagttatgacctagcccactagcttatgaccccaatttcactaagtgacatccccaattcccaatcgaaa

SEQ ID NO: 183022 - DNA, 256 bp, Arabidopsis thaliana nossen
actcaaactcatccaccaaccttttctctcacaaagactcaaacataaaggggtgccccacaatgttatgtgttataggccaacaaaaaagagctgttcctaactctaccaacccacaaaccatctctgacattccgaccatagccaacacggttgcaatggctaacgacccaacactccatcttcataaccaactgaacatcccctaccttgctactcaacaatggataactctctcctatgaacggagaggctc

SEQ ID NO: 183023 - DNA, 220 bp, Arabidopsis thaliana nossen
ttttctcacacacaaaaagctctccttctctctctctctctctctctcggtctctgtctcactctctgtctttgtgctctctctccctctctcccacatctctctccttcatctttcgattcactaccatagataacaatattcttatgcatcatcacggatatataataagaaacccatccttatatacctctgctacacacatcataaattatcacac

SEQ ID NO: 183024 - DNA, 393 bp, Arabidopsis thaliana nossen
gtttggagatcggcctctattagagataccagcattcaaactggtcttgacgtttgtgctccgtacttttttagctgttgagggtgctgctcctctagccatcttcttagaaacaataggtttctcatctttatcagagggtctcccttcctcctcttctgaaacttgcttctcatcaactgttggaactactctagtctttttcttcaaagtttcagtgactgacgctggagatctaacagccaaggaactacgtttccgacaagctataataggcactgaaagtgttggtttaagagaagagactttgacttcctccttagacgtcaccaaggcatcctcttttggtggtggtaaggtttgtttaggaatcttgaaactcatctgtttctt

SEQ ID NO: 183025 - DNA, 304 bp, Arabidopsis thaliana nossen
attttatctgtggaagatatactccctattttggatcgttgggtcaaactgatgataaagtctgctctatatatatagacgaaataaatttctaattgaagacaaaattaaagtctgtatatagacaaaatctaatatgaaatatagaaaaaatctaatatgaaatataaacaaaatccaatatgaaatatagacaaaatctgaaatttcatgataataaatgtcataataatgaaaatatagacacaatctgagacttaaagtacattccaaataaagtggaaaagctgttgtttcatccgat

SEQ ID NO: 183026 - DNA, 379 bp, Arabidopsis thaliana nossen
gaggaacgtcagcggcttctgcaggaagtcccagaagttcatacagatccaagcatggatccaagtcatgcattatcagaagatgcagggttgggtacaaggaaacaagataatcacgtaaaggcacaaagtaaaggtccacagaataaaggggttaacttgatcaacgtgggaaataatgtgcagaaaaaatatgatgcaccaattttgcgaagcagaaataacgtacatgctgataaagatgattgttctaaggtccacaataactcatcaaatatccaggaaactggtaaagatgacgaggagagtgaaatatggcattatcgagatccaacaggaaagacccagggaccgttttctatggtgcagcttcgtagat

SEQ ID NO: 183027 - DNA, 394 bp, Arabidopsis thaliana nossen
  unsure (1)..(394): unsure at all n locations
naaaaaaaattccaatggctttttctactctaaccttccccaccactattggttgctaaatatgttgctgggctttcaaaaacctttatataaaaaaatanaataactacaaaacttattaaatataattggataaataatgggttccatcttttctatggttacttctaaaacctttaggttctctttatacaccttaacttcttcttttaattaatcaatactattggtaacttgtacaatttacattcttttgctctaccccataaattttcctaaaataagtttttcacaattatatctcctttatacaataacagtatttttatttttaaaatttattatgtcatttacccttttatacccttctttttttttcaaaaatgtatttttt

SEQ ID NO: 183028 - DNA, 389 bp, Arabidopsis thaliana nossen
cacttttccttcagcttggaaagcctgagcagtagctttcaagtctcttttaaccagataatgatggatatagacatccaacctgttacattcaaaaatttgtctttaaaaccccaacaaagggcactcgccaaacaggggcttaacttcctacttaacaatgtcccataaacaaaccatccagttatgagcaaaaacaccaaaatcaggaaactttcttgaaggagcttaaagtcagatacttgcatacaaaaaggaagagagaaattgggacagtaacaaaagaaacatgatgccacaagagtcaaccagaattcgataaaccaaatatccaaaaaaataattacaagctccttgacagtgactgacaacacaaagaactaaacttt

SEQ ID NO: 183029 - DNA, 225 bp, Arabidopsis thaliana nossen
  unsure (1)..(225): unsure at all n locations
acgacccacgcgtacgcacttttccncnatttttattttacccaacaacagccacaaacgatgggtaaaaaatttttgggcttggacaaaaaaaccatanaccacatcaattccaaaaagtcaaccaccactacacacttgatctacaaaacatgtaaaacttcacaagacctccaaaaacaaaaaaacagaatgacccacctatgaataacaagacctacctca

SEQ ID NO: 183030 - DNA, 365 bp, Arabidopsis thaliana nossen
acggttttcggatatgaaactacaaacctgaggaaactagctgacaaggttgcaaaacctggattctacgccgtgaaacctgattaatgtcatgcaaaaactgataatttcctcaaccactagcgcatgttatctacactgcataaacatcattgaagaaaaagacttttttattgtgttgatctcttataattaagatccttttgcgtttaatttattaatctccaagcaaaaaaatggatatgagaagccatgaaatgattgagagtagaagagaagacaatggcaacaacaacggtggtgttgctattatgaacattattagtactaatattgatgataattgcaatggtcataacaacaac

SEQ ID NO: 183031 - DNA, 306 bp, Arabidopsis thaliana nossen
gtttcccctctttcatcttttttgctatgccctttaaattctactacaaaccgggccaacattaggttgttggatgatagacataatacaaggataagaaatcaagctcttttttgataaaccaatgcatgccatgatcattttaaatggtacgtagatgtactcggctttagcaccaagagggaatctagtctatccatgcattagcggggtgaactagaatgcaagcaagatgagcatatttacattctaatgtcaaatgtagtatatattcaagtagcgacagattaccttctaccataacgt

SEQ ID NO: 183032 - DNA, 217 bp, Arabidopsis thaliana nossen
tgaccattgacttttactatgcttcttgacccaattgtatccttgtatgtccaacatattttcggacatttttctctaataattaaacaagtaactgtttctttccatttttcaaaatttgccaaaccgcctttaaagatataattaataccatttttctttagtattttttttgtccacctactttttactagttactaggcaaaaattggtcttt

SEQ ID NO: 183033 - DNA, 380 bp, Arabidopsis thaliana nossen
gacaaaaagagattgctttggcatcatactataaacctgccacattataggaaggtactaagatgaggcggggaggaggaaacacagccttaaatgtcaatgaggagccaaactaagccaaacaaaaaccatgatcatgattcatgaatcaaagcgtgatgaaaccgagagagcgcaggacacaaaccttagcaggccaagcagggaatcctttaactttagcaagaacgagatcacccaatctcatctctcctatcgccatagctttgttcgctcctcttttacgcccaggagccattggcgaaactgactacaaaccctaatcacagctcagatagaatcacaaatcccaagcaaaacccgagaatcaataagaaagt

SEQ ID NO: 183034 - DNA, 382 bp, Arabidopsis thaliana nossen
ggacgaaagagaagaaagctgagacagggtagctgagaaagccattggagaggcgcccaagaattttttttttctgtgttcttggagtttcgggataagaccgcaatggtctccaagtctcaacggtctaaaacagacatcactgaacgaatcataaaatgccacgtaagtgcaaacaagtttcctctgctatacaactaggattatagtaatagataatgtatttcaagtttcaacaaagattatattcgtttttttttttgttttctgatgcttgaaagtttatgaattatacacacatacaagtgaaatcgtgtatgtcacatggaagatcatatacaaaatctttttacgtgtacttttaaattatatgttacattat

SEQ ID NO: 183035 - DNA, 384 bp, Arabidopsis thaliana nossen
cccgaatgatactttattataaagtctaaaattatagcccgagtaatgtacggtgggggtctatttgttgtaggctcgctaataaacaaaagaccactattctagctaggaaactgtaagacatcatttccttgattgtgtatagaagttaaggctcgtccatgagaggaccccctattttatttatcctttctcggaagtcctcaaatagaactctagtatgaaaacagttactaactactagctacatttgatgccttataatgtaaactgacatgttttggcctttgtatgacaattacattgagtgatttgcgaagtaatagagtttgatcctcccatagagagatatgatttcgtcaatcttgagatatgatttattga

SEQ ID NO: 183036 - DNA, 367 bp, Arabidopsis thaliana nossen
cttttatacgacatattactcttattattactattattacatggggcgggggcacaccatcagtgaggcgccttttacaaacacctgacatttcagccaaatcaacatcctagatcccactcaaacaaccaatgtcgaagcctcataaatcgaattatagaaccacattagcacctgagctaccatgcacccgtttaactggatgctctaattatcctttatcccaattgcattatcttgtctcttttctttaacccacctgccctctcttacttctaacaaggagaatgatatatagtgacaatctcttctgaatgatctgaaacttttacagaatttaaaagatcatatacaataggaggaacta

SEQ ID NO: 183037 - DNA, 279 bp, Arabidopsis thaliana nossen
  unsure (1)..(279): unsure at all n locations
cacatnaccaaaccccaggcgcgttcaacccacgcgtccgaccactaaaacaacgtattatgacctccccccaaaaaaacgtgtgggcaacaggtttttgggaactaacacaacnacnacaacaatcaaccaaataaatcacaagaaacctacaacaaaataccgatcaaaccgctcacattactaccagaaacacaaacaaatacccaaagacgcatactgccaaatttacatgccctaataaaccaaaactccacaaataaacgctctcaaaaacat

SEQ ID NO: 183038 - DNA, 380 bp, Arabidopsis thaliana nossen
cttgtaatcagagaataaatgaatcggcatgcaaaacagcaataaacaggggattctgaaaagagatacacatgtaaaagatagatagattgcatataaatgttaaaagatgagagaaattaaagaagaagaaaagagatctaaacatgaatgcacaattaaacaggggaatatccaaaaaaaggaggaaactttaaaacgaggaatctccagccagatttgaaaggaagccggaaaaagaaaagccctaattaggtctctctctcgcaggtgtaatcaaaatcttacttggtgactgatctgagccgatgaatcaagaacacgcatcagacagagaggagagagaagaaatacaagaagaagagatctcgtgagtgttc

SEQ ID NO: 183039 - DNA, 331 bp, Arabidopsis thaliana nossen
gttctaaagacaacgaaaccatttccgctagctttaatcaattcggttgtatataagtaggatgactgcgtcatttatatcttaaccttcatcgatgacacaaaacatgttatagatacctacattgaggagccacagtcatcatgcacgtctgctcatcctacacattttatacagactcatcttgcacaaacacatgaacttttttatggcctataatattaataatcttcaactactcaatgtacaactgaaagaggccactttctacacatactcgaactactacgttttctttatcgctaacgccacagaagaggtggatgtgact

SEQ ID NO: 183040 - DNA, 380 bp, Arabidopsis thaliana nossen
gagagatccttctatatctctctctaatcgattaacaaaatcggggcgaggaaaaaaattttgtgtctgttctcttccgtcaatcttaatcatttccgttgtgatttctcgccacaaagaacaagttgcattaggctccaatatcaaacctatgttcgattcagatctagccgaattactctcacgcttcttgatccgacggctattccatcatccaaataaataaagataataacaaaaaccgatccctcgatttttaacatcctcaccaactgtgtatacgacaaactgaacacacggtcaaaacttagacggatagactactatcagaaaaccaatacatgattcttaacttctacactgaaaacagatcactacaa

SEQ ID NO: 183041 - DNA, 280 bp, Arabidopsis thaliana nossen
  unsure (1)..(280): unsure at all n locations
aaagctctactttttttttattaactactatgactcattcgctcgaggcacaataactcgtggttttctcccnnaagaaactaaactatcgcgatgacgacaaccgtgaccccttggttttaaagaaattagcactgactgtgtatgatgcctacccttcatctgccatagcgaatatcctacattactttgtccaacacggattagtaaacatatccatcgaagcctactccaccttcaccgtcatcgaaccttttaccatgaggcggatgttcaccgg

SEQ ID NO: 183042 - DNA, 349 bp, Arabidopsis thaliana nossen
  unsure (1)..(349): unsure at all n locations
gaatgcgttaatgcatccacagggtcaacaccctctaacgcanactcatggaatgagtgcctctagagtttctgcggccatatatgatacgccctttcataatttatcctccccacatcaactcatatactatcagacataaacctcagatcattgcgccgatctcaaacttcaacctatatgcttttaatcttattgtttgcatggatagcactcagaagagagggaattgggtgatctcactatcgttatcattaatataagtgtaaatccaaaaaatgccattggtataaacaaccttacataatcagataagcgaattacattcaataaaacggatttggatatc

SEQ ID NO: 183043 - DNA, 425 bp, Arabidopsis thaliana nossen
  unsure (1)..(425): unsure at all n locations
aaaaccggggggcgttccacgcgtggcggagatgatgacttcttaacacgtctaactctgataccgaaattanncnnnctttgtttggtttaacattttttttgtttacgagcgaccgacccatnngatactcaaacacaaaactcttacctttggtcacatgtgatttttcgattccatttattcttctttttgaagcgaatctgagttttgttttcatgtccgcgaggatttcatttctgaaaaatcccgatccgtgcaatcacttatctgattataagcttagatatggtactgatggttacaaatctttcaataacttgttcagatgcttcaacgatgcaaggattaaaatcaaacttcaaggaatcgacatacccaaatgcaattattgttctgtttatcaaaagaaactctacatctgt

SEQ ID NO: 183044 - DNA, 462 bp, Arabidopsis thaliana nossen
  unsure (1)..(462): unsure at all n locations
attaggcgtttggcttcagacggcgccgttctacgtgtnntcgaccaatcgctcgaaaggcggtttagacgtttgggatcattcgcacgtnnctggtcgcaccagctttgatccacgagatctcatgctgcggtaacgatgggagcgcgatctcagctattctattctcgagagacctcttgaagggtattggattgattgtgtgcaaaccctttaaaacggcgggcgggaatgaaaaatcgtagaccgnnntactccccgnnaccgagttnntagaagagcannaccgctttgtgaccgcgcgaaatcttccaacgcgctcnnactgcgcnnacaagcnntagagagtactttcccgtttggtcaacccnngtcagaacctcattgtccaacgagaanatcgaaaaaactccaccgcttctcncgccgtcgctttgattcacgtgaggctgtgctggttta

SEQ ID NO: 183045 - DNA, 382 bp, Arabidopsis thaliana nossen
ttccctaacgtatccacctctgttacttcaatctcctggcctggtcctggaggatcattccttattgttgtctctgcctctcgagtttcctcttacaccaattctttcatattttcttctttgctgtatcccttttgttccttagaatgttgctcttccttctcttgaagctttattaagtttctgtcttcactatgtcttctcaccttagtatttcccccttcatttatcttgtcaacctcatctgcttctagtttatcagattcaaactcttcatcatttttctcagtttctgcaatttcatcatcaccaactacttgtgttctatcaatgtttggtctgaatccttctcccattgccccatcaacctcttctttgacat

SEQ ID NO: 183046 - DNA, 384 bp, Arabidopsis thaliana nossen
gctcatttatagttatagccacttagcatcttctaaactgtcattaggggatgtaattgcatgtgtacggatatcttttcagttttaatttctattagcctggtatcaaaagaagaagaagaagaagaaatcactgtcaactaaaaaagaagaaagaagaagaagaaatcagccctgatctttaagctcccacgtcacgactgatgggttcgattaaggagaaaaatatataatttgattatattatccactagcattcacaaaacgagaaaaatatatattctaaataccattatttactttctaaatagagttgaaaatatcattttaatcgcattcatgttacctttgcttataatcgttggaaaatataataaactttat

SEQ ID NO: 183047 - DNA, 389 bp, Arabidopsis thaliana nossen
  unsure (1)..(389): unsure at all n locations
aagcccggggcgtcccacgcgtgcgattacacacattgaaaaaattttgaaacctagaaagaaaacaggggtgggggctaaaaaatgtgtttttggctacacaaaancaaacgggcttcataaccctaaaaaacaaaaattctcttctcaacccagcgtcactactcgatcatccaacctcaatacaatacctcgaaaacctaacattctaatgaaaactataactccttcaacttcctcccgctacctatcactataataaacctatcccgtgctggtgtcatccaagtatctaaacgcatgaccccgactacaaagaaacatctaacgtcgttgcgaaaccaaatactaacacacactaactgccatacaaaccagaaggattcaaa

SEQ ID NO: 183048 - DNA, 351 bp, Arabidopsis thaliana nossen
ctgtactctgtgtacatctttggaaccaagacatctttgatgcgcaccatacaacttcctattcaagcatacagaatgttactttagggaatcccttatagaagatttaaccattagatgagctaataatgttgtagacaaaaatatcatgttttccagtaccaagcttacgcaaatcaattatttataatgaaactacaatgttagtcaaaaccataacaaatataggatatcaaacaagggtggaaaagactcaaaccttagcaggatttacctaaattttattccgttttgagcttcattcaagtaatccatctcctgcattcaatttgatttacctgtattcaatat

SEQ ID NO: 183049 - DNA, 240 bp, Arabidopsis thaliana nossen
gatccaaaaacaccgaatattttttccttagcttcaatagaatggggtgtataaaaatactgttgtttgcgccaacaaaagatgaaccttcatctgattacacaaaacaacatgatgaaaaccaactacgaggaatcaaaactctacatacaagtatacaaattctccccaatatctacataataattttgctcaaacatatcaacttctttatgctgcataacaataataatcctaaaa

SEQ ID NO: 183050 - DNA, 111 bp, Arabidopsis thaliana nossen
  unsure (1)..(111): unsure at all n locations
ccgtccgcaccaaacacacagtgttgaatcctaaaaaaagggatcgaaaagaatggatgccccacaaagtgtgttatgtgccgttctcgtggatattggcgtnntttgtgt

SEQ ID NO: 183051 - DNA, 388 bp, Arabidopsis thaliana nossen
  unsure (1)..(388): unsure at all n locations
attgaattttgtagtgatctctctcctatataaacttcctcactcttcttccatttcaaatctctctctctggagtcaaaattagggtttatttattcataaggaagagcatttcgaattctgtagttcaaaattgaagatcatgtcggcgtcaacggtgtcaatcaccgctagtcctaggacaataaggcggacgccggttctctccggtgagaagaaatctaattttgatttcccgccgagcgaatctcatgccaatgcggcaattggagagtcgtctgctggtacgaacaaggatctgattcgcgccgaggctgccggtgagagatccaacacctacgacgtangtccggtgacaaggaaatcangatccaccgcgacggggact

SEQ ID NO: 183052 - DNA, 382 bp, Arabidopsis thaliana nossen
tcttatggttcagaaacccaaaattgattcttttgagctaataaaatgtcgtgacaggatctgaaatctgacgaagcagacgaagaggcatgtttatttgctcacttttgtagaaaaaagtgtagagaggagagatctatgagatgaagaatagaacagaacaaattattaaaatattattattattcgtttcttttattgcgataattgaaaaaagcggataagtggagtctgattatcgttgtacgaaagaaccaacttgcccgctaaggatgatgggtacttgcgacttttgtcttaaatctagcttttggataatgtgcaaacgtcgaatataatacagtgtggatatttttgtataaactattttaatatatgctct

SEQ ID NO: 183053 - DNA, 386 bp, Arabidopsis thaliana nossen
acgcggtcgtgctacttttcctatgtgacttggttcgtcgagggcaggttggtcagaggcgctgctcgagtttgggtgggggttaggggaaaagatgaaagttgtgtcgaagaaacgctggaaatctcttggtcctcttcatttgaaaagcaaatcagttgcacggttttgtttcttttcgaagttgaagtcaaacaaccatggtccaggccgtgcacctgtgtatctcaatgcttatgactcgactcctattaacggatatatctattgtgcatgccttggtatatttcactctggtgtagaaggtaagctctagtcgcgcgcttgtgtattcttgttgatatcgtctaagtattcggaagatttgcgtctgttgccgtatagct

SEQ ID NO: 183054 - DNA, 378 bp, Arabidopsis thaliana nossen
ggaactcaaaccaatggagaagcggaggcgggaagagattccggtggccggagaaaggcgactgatgagaggtacgtggcaagggcaaaagcataggaacatgagagaaacaactcgagaaacggttcagggtaatggcggagaatgtggatattttgagatggtgttttggaagtttgcaggaatttggtggacctcgtggattcgtcctcttcttcattgccgaagaggttgaattaaaacttgtgcttcttccatttgattgtgactggattgacacttgagctgcgcgtgcactccacgcgcctttcactttccatctcttcttcttatgaccataaaaagataaggaaaatgattttttttctttctttcaat

SEQ ID NO: 183055 - DNA, 386 bp, Arabidopsis thaliana nossen
gtttttcctcacacattctcaagcttttaaacacctaaatcaagatctttgggaatgaaaaacatatgggttataatctacgtatgtagatatacataatatttcttttaacgaaaagaaatcaaagacaccagcgctcgcatagatgatttgttttttagaggattaataatcttgtttttgtttgtttggtatataaaaatatacacttatctctggtcccttacaccaatacataccatatataaaaagtaaagtacatacaacaataaataaatataaacatacaatacgaataattgtaatagcttatgaaactcgaagtttatattctgcattccaaataaccgattgatgcactatataaattatgtcgtaatgtaacc

SEQ ID NO: 183056 - DNA, 378 bp, Arabidopsis thaliana nossen
atcgatctctcaaagtctcaacacttttaatttttttgatgactggttggaatatataatacatgtatgtatgttttttatgtgtctgtctgagtttactaattaaccatgtttttttttcgttgttattgttttatttttgggagttcttttttacgaatgatttgattaccttccaatatttatttgttacttttcgattgaacagatacatgcatgatgtagtgaaaaaccctactctaaaataaatttaaatcatttacatgcatagtgaaatttatgacagtttgagaaagctacatatgtaacatataatgtgaattatagtttgaggtaaatgactcaaactgaaataagcaaaagacaacaaataaaatc

SEQ ID NO: 183057 - DNA, 156 bp, Arabidopsis thaliana nossen
tccgttaatcctttcgcttctagttatatccaacaggttttaattctatcactatgtagatccaaacatttattgcgtctgcataacaataaatctctaaaatacagcaaaaaaaataaatactattaatgtaaatccaatcaagtttcttgtttg

SEQ ID NO: 183058 - DNA, 385 bp, Arabidopsis thaliana nossen
caagcctttcctcggatctataagaaaaaaaaacatgataatagaacagattaggctacaaagatgaggataaaatgatcaagacaagactctaacaatatagttcaatataccgtatgctgcatacaactcttcagcgcaagaaactctttcaaacatatatctctttcaacctcatgaactttagatgcaacacagctcccgtagtctttggcctgtaacaagtttactttctagtcaataacaaggactggatcttcaagacacaatgcacacgtaaaagaattatcgcttcacaattgacataatataatttcacacattctttaaaattgatgtcgtaatataacaactagcaaaactatcacaaattcattacgaaacc

SEQ ID NO: 183059 - DNA, 333 bp, Arabidopsis thaliana nossen
aaccaacatcaccagtttttaacttttccaccgcaacaagaccatgatcggcgttcattgcgatgggtgggtaatccatgaacttggcttcactgatttgttcaatcaacttctccccaccatgccttggaacacactcatggaccgtatgatgaaggagcttcatgatcaaggcaaaaccattgaggagatcaaacaagtcttgagaacaatcccaattcatccacgtgtcgtccctgccatcaaatctgcacatgattgaaggtgtgagcttatcacaattctcactccactcctgcatctaagtctgatcctcccactcagaccgtgaag

SEQ ID NO: 183060 - DNA, 385 bp, Arabidopsis thaliana nossen
ccaagtcctcgcatattttaaaaacacccatcagattccggaagaaatcatgctgcagcaagggaaaaggtagagtaaggaggtttccagaatataattctaaagacatgataaactataataataacagtatataaagtaacgagcttacactgaaatcacaaacccttaagtaccttaaaggaccttaaagataaaaatacaaagaaaatagggctcaatttttcaataataatggttttgctagaacttgtttgtaaacatgaaaaacctaactctactgacagcatcaaagaagaccctgagaatggtataagattttccagcgagcgcaaagatagagttatttttacattaaactgaacaggaaaggacaagaacagtc

SEQ ID NO: 183061 - DNA, 377 bp, Arabidopsis thaliana nossen
  unsure (1)..(377): unsure at all n locations
aacaacaacaacattgtcgttgttttcgacttcgacaagaccatcatcgacgttgatagcgataattgggtaatcgatgaacttggcttcactgatttgttcaatcaacttctccccaccatgccttggaacacactcatggaccgtatgatgaaggagcttcatgatcaaggcaaaaccattgaggagatcaaacaagtcttgagaacaatcccaattcatccacgtgtcgtccctgccatcaaatctgcacatgatttanggtgtgagcttaggatagtgagcgatgcaaacatgtttttcatcgagaccatcgttgaacatctcggaattagcgaactcttctctgagatcaactcgaacccaggatatgtcga

SEQ ID NO: 183062 - DNA, 58 bp, Arabidopsis thaliana nossen
taaaacttaaacatatttataatcttagactgtaaaacattccggtggccgtacaaat

SEQ ID NO: 183063 - DNA, 390 bp, Arabidopsis thaliana nossen
gttcccttttcatcggcgaaatggacttcgtatgttggaagaacattggaggtttctcaagttctttagggttcacttatgcctcttttttccatgtcaaggccatgagtgtgtctcggctgcctcttaagtttgtaatagtatctgaggctttatgttttatatttatgcttgtgttggttagctcaacaatgttaacgtaacgtttagtattttcagttcttctgtttctgtataagctttgatttgtctttttggtttcctacgacgaaaaagagaagcttcaatcggaatacatcttttggtatcaagcttgttcattaataatgtttttggattcttaacatatcaaaaaaagctttccatttataatgatgtcagtcacatcta

SEQ ID NO: 183064 - DNA, 109 bp, Arabidopsis thaliana nossen
attaaattcaaccaaaattcaatctatctaatactaagtaagatgagtggggtaaagtcttactgtattttttgatacgtcatcattttaaaaacgaagagatttttcg

SEQ ID NO: 183065 - DNA, 287 bp, Arabidopsis thaliana nossen
  unsure (1)..(287): unsure at all n locations
acccacgcgtccnaaaaatcaccactaacaccaactcctaaacaaaacacccaacatgtggggtaaaaaaatttttgcgtccacaaanaccnnnccancnnaacacactcaacactcacatctccccccacataccacgaccacacaaccctccacctcttccaaacacccacaaacaacacacacccactacacactccaaataccaatctcaacacacctaccacaacagcaacaccaacacacaaaccaaacaccccacaacacaacccacaaacccacacacc

SEQ ID NO: 183066 - DNA, 63 bp, Arabidopsis thaliana nossen
gtttcccgcgaagtgttcgccatcattatgaaaatgaaaactgagagacgacctccgattgag

SEQ ID NO: 183067 - DNA, 399 bp, Arabidopsis thaliana nossen
gctttctcgaggccaaaaaaatattttggcagtccaagatctttaaagcgaagggaagtagtaaattattattctttaaatatgactctgcgttgtaggtaacacaagtcttcgacccaaataataatgtaaacttctcggccacctcaaataataaatggaagattggttcggcgcaataaatataaattcattttcttaacaaagaaaagacgaattaagtttaagataaataaaagtgagtgacaaacagaagagcttcatgcaaataaagaagcctacaagtagctaggcaacattaatacattctaaccacttaaatatgctgcttttatgttatttggtaatggtatacatcatcaggtctctgctcttctctaaaaatcttctgtcactatt

SEQ ID NO: 183068 - DNA, 370 bp, Arabidopsis thaliana nossen
actttctaaaataaatttatattaaaaaatgcaaaatatacccgggttatacaatattgtggtgtgcctatatacacttttctttaaataacgtccttgcaaacccaatccttcaaacccaaccaagtgaaaaaaaccttttttccctgcatataaaaatttattatcataataaatattctactttttaacattagagtctatgtctaataaacaactttttataaaaaataactctctaaatctttttcaatttttacatatatttaccttaactcatctttaacacattcccttactttcgtttccataattataatgaacccttacaatctttttatttcaaaaagaatcttctgcttatattctc

SEQ ID NO: 183069 - DNA, 363 bp, Arabidopsis thaliana nossen
  unsure (1)..(363): unsure at all n locations
gaccaaagcatcttgcacggtaaaagttttttttttttgatgttctgtangaaaatccaataatgtaataatgtttcttctgtcaaagagagaaaaaaaaaacaatgtttcatttcacttcttttatacttgttgatagacagaaaattcctttggaaaataaagtttcttttaagcgtctcctaaattttttctaattggaataaaaacatttactaatgatttatcaattatcatgaattctatatcactatcgcagctctaggcattaacagcccaaaaaaaaaaaaaccatagcccaaaaaatcatagctgaattctcttgttttctggtttaactntgaatttgcgttgtaaagtttg

SEQ ID NO: 183070 - DNA, 395 bp, Arabidopsis thaliana nossen
caatattctacctactcgtaataagaattgggttattgatcaaatttttggcgggcgaattgattaaaaataaagatatatatatatatatatatatatatatatatataaaccggagatcaaattaatagttcggatatacttccatggatgcaaaaataaagtatcaaacttcatttatcatgtagaatatatattaaaggatatgtaagatacaatcatttataatttgtttcggtttcacacttaatacagttgagccgcgttaatcattgttctcacttctcactgtttttttgtttcccccaaagaaaacttctcactgatttacacgtacgctatgtataaatccacgaatttgtttttttttatttaactataccaattattgacag

SEQ ID NO: 183071 - DNA, 387 bp, Arabidopsis thaliana nossen
ggctgctacatccagatttcctcatcctctattagggaagaagaaccaaaaccctaatcctatcttctcctcttataaatcgcttcaacaacagtttctttctcttctgatttgatccatgatttctcatctggaaccctagtttatacatccatcgggtgttactgttctttatctgggcaatcagtggttagtcaaaagtataggattttcatttaaagatttgattttgcgttgaaatcgaacgaacccagatttcatattttgtctctgttttggcttttttatctttttaggtgtttttgttccttttgtatatctgtcgagacttctaggtgtgaaatcaaagcttgtttggtttatatcgatcttggttttagctgaatc

SEQ ID NO: 183072 - DNA, 219 bp, Arabidopsis thaliana nossen
cggggggacccaacccttccgagcttacttggtttacttcattggacccaaaaattttaagggctaaggtatttaacggaggcgccagaaccttaaaacctcttttttaaatggtaataaccggaccttcttttaatccggggaaggtttttgttaacaaaacctggaatattaaaaattaaaaatgctgccttaagtaacattaaatccttggaaaaa

SEQ ID NO: 183073 - DNA, 399 bp, Arabidopsis thaliana nossen
cggacacgtgggttttttttggttttcaaaataagaaaattatttcgttggtcgcgttaaaaccattctaggattgtgcaaaattacgtgatgattagtttgatgttagacatcttaaaatactaaatttattgtttcagaaatatgttaaggaagattgatgtcatctatctcattttacacaatcacgatatacataatttgattttgtagtattgtcaatattttcattttcttggaccatttttactgaacgtgacatgaacagtgatgcttgatcaaaataaacgtcacctttgtgcatagtttatgtggatatctcttaaaaaatctaaatctttgtttgttggtggaatataccctagaaatggcatcaatgcatataattggatatttttt

SEQ ID NO: 183074 - DNA, 399 bp, Arabidopsis thaliana nossen
cggacgcgtgggcgccaaagcataaacatcgtgactgattttgatactattgtttgttcttttcatgaattcaatgtttgatactaaaggtgttttcagtgtaagacatattagcataccttcctggaaattgtattttatggcttccactgataaacctaaaagaatgagaaaaacatattgagacaagaccttggatttatatatccaaacacatgcataaatcgacagttttgttttgaaaatttacctttacaaatcgaggatacagaggatcctaagtatgcgactcttctttttagatcccatatcagttctgttgggacgtcgatagggtttatgctagagccatggtcagcaaaaacctgcacaagtatagtccaaatcgagctttgacga

SEQ ID NO: 183075 - DNA, 368 bp, Arabidopsis thaliana nossen
ctcactcttatcccattttcttcctcctcgtgcaactaaatactgagaggattaatataaaggtgttctcgaatcacaatcattatgatctcaaaaattaacactaaccccacaaaaataaggctaactatgcttaaaaaactcacctttaccgtaacacagcataaataaagacccaactctccccaatgacttgcctttcaacgaacaagaacttaatgcccttcaagttctacgtgcccctactctctacgatatttaacagaataaataagcccgcaaataaagggccaaaaaaacgaaacttggtttggtttatgattaggataccaagacataatgagagaccatataagacttacctaaaa

SEQ ID NO: 183076 - DNA, 271 bp, Arabidopsis thaliana nossen
atacaacattcacccaacgctcctcctctcgccggcgcgacccattttttcttatctctcgaaacaaacaacacagctaccacaatagtgtattccattgcccctacttcctctaaaccggacactacctgagccacggaataagctttcccaccaatacctacataaacacacaccaccccttccccttcaccatacacacctctatcccaccctactgcacccttacccgaccccctcccaccaataaccaactctccctcgccccccc

SEQ ID NO: 183077 - DNA, 383 bp, Arabidopsis thaliana nossen
ggttgtgtttttatgtatgtcggcatacgtgtattttagagagaaggttgtgattgtaattgattgatgacagtaaaaaataaaaataataataagaaaactattagaaacataaaaagatatctatatcagaataaaatactacgatgacaattaatttgcttcatttacaagcttgtattaggaattctctatgccaaccactccactacgtttgtgagtagagcttgcttgatcaatacaaacaacaaaaagatgaatttataattatatattatactatataataaaatacaagtcacaaaagcatatgtttggaataaattattgttatgaacttggatagtttcattctttttgacggcaaatagttatcattcatt

SEQ ID NO: 183078 - DNA, 306 bp, Arabidopsis thaliana nossen
  unsure (1)..(306): unsure at all n locations
aaaaaaanaaaaanaanaataaaaaaactattanaaacataaaaacatatctatatcccaataaaatacttttttttcaattaatttcctaaaaaaacaaccttctattaccaattctctatcccaaccactccactacctctgtcagtacaccttccttcatcaatacaaacaacaaaaacatcaatttataattatatattatactatataataaaatacaattcacaaaatcatatcttctgaataaaacattcttatcaacttacatattctcattctttctcacctcaaatacttatcatt

SEQ ID NO: 183079 - DNA, 184 bp, Arabidopsis thaliana nossen
  unsure (1)..(184): unsure at all n locations
ctcttttttaaaactactaccaaaaaaacacnaactcatctcccttcaacccccacaacttacatcaccaccactcaccccacccatactacaccaaccaacaatctccaaacctccaaaacccaatccaccctaacagtaccaacacatctaccaccacacaaattactcccaacccacccaa

SEQ ID NO: 183080 - DNA, 413 bp, Arabidopsis thaliana nossen
tgggaaaaccggcggggaccaacgcatccgcagtgatcaagctcgaatcgctgttgatcgaactgctctagctgagtgggttgggaaggaatactttagtgtgcctgtgctactttccgaaaaagaatttcccaagacaagtggggaagtacgttacatcgtgtttaaagattttaagaatcctctaatctacgaagagaaggatcttgatattgcttctgtagttaaagctcttgacagcctcctcactcaagatactgagaaatccaagtctgtcagacttttcacgaacacttggtcaaaacaagcagaggctatcaaggaatcacattttccttctttctttcaggatttgttactttactttccaggttgtatctctgcagacgaagttggagaccgtctgtttcttt

SEQ ID NO: 183081 - DNA, 215 bp, Arabidopsis thaliana nossen
  unsure (1)..(215): unsure at all n locations
ccccaaaaancaanncnntccttcttcaaccctacctctcaaaacattnatttcatcaacgcccatttctcttttttcactatancacacaacaaaaaaccactactcanaanccttaactaatccatatacaacaaatctttcctttcaactaaacaatcaacaaatctattactcccaaaaatctttatctcntaccccaccaagccaaatac

SEQ ID NO: 183082 - DNA, 201 bp, Arabidopsis thaliana nossen
accacctcacttttccgccaggtccaaatttttttctcctcttctaataaaaaaaaaacaattcaaaccaatcttccaaaccaacattgtacatattacaacccatcaaatccccaatttattcttttcaataataccttacaatatacattccataacgttccgagccaaacacaactatcctccctctacttctacaac

SEQ ID NO: 183083 - DNA, 263 bp, Arabidopsis thaliana nossen
  unsure (1)..(263): unsure at all n locations
ccccccccccccccncccnccccccccccccccccnttttttttccccgccccccaaaacccccccccgccccccccccccctccccccccccccccccttccccctcccccccctccccccccccctcccctccccccccccccccccttccccccccccccccccccctcctcccccccctccccccccccttcccccctccccccctcccccccccccccccccccccctcccccccccccccccccccccccccccccc

SEQ ID NO: 183084 - DNA, 396 bp, Arabidopsis thaliana nossen
  unsure (1)..(396): unsure at all n locations
ggaaanccgggggcgacccacgcatgcgagccactctcgttgcaatctccttcttgtgcaactctctctgcttccaccggggggggactattgagtgaggctgctccacnaattctccattactcctcttcccgccgttaacttcactctccgacgatcgattcctcagattcttgctttcgctaattcctcctactatccatcatcttcctctctcgaagctggtgagaacaatgagctaaatgctgtttcagcttttagtgagattgttcctgatactgtcgttctccatgactttgagaggtttccgccgactgcatctactgttagctctgctcttcttctgagtatctgtggtctacctgataccattttccgcaatgctgtggacatgac

SEQ ID NO: 183085 - DNA, 382 bp, Arabidopsis thaliana nossen
tccgaatttttcgactttggttttcatttttgaacatatcggaatgaccagcggcgggctttaaacgacttatggcgttatcacaccaatcccttcgtctcttcacacttatctctgcaattttgtgttgtctaagacgtttgtggtatacgttgagttcgaacttggtggttaacaattgtaattttttgtttggcataagcattactgtgcatttaaaagaattgccactctgattaacagcaaatcatttcatttctatgaaactcattctttctcattaccttaaaaaatagtcgtttcctcgagaaaaaagatagaactaaaaaaacatatctcaaatgcaattatccgactgaacagttttcacatttgatgtaca

SEQ ID NO: 183086 - DNA, 373 bp, Arabidopsis thaliana nossen
  unsure (1)..(373): unsure at all n locations
aaagatcgatgtctgatttattttgagagcggattgagaaaccgcggacggttcatgagaatgtagcgggtaacgataaanatgaanagttaaggaaagtgattagagagagttttcttaggcagaatcttggttcacaaacaactactatagagactaagaaacgagttgttagaagtgattttgcttcctcttctggagctgtgtcgtcgtcaactagctcgagccaatcttcaatggtttctggctctactaagtcctctgcttcgtctgatgttccacagagagctccaagtttgattgctaggcttatgggtttggatgtatcaactcaagaaccgaggaaaagctcggtgaatcatatcgataagcc

SEQ ID NO: 183087 - DNA, 357 bp, Arabidopsis thaliana nossen
  unsure (1)..(357): unsure at all n locations
aaatanatctttatctattttgaaaccaccatcaacccaccccgcggcnncttaaaaagttgggggccccaaaaaccnnnctnaatcatttctaaaaactctcaaacgaaccaactttatcaacacgcgctgcaactgtttttttatcttctccctcaacaaaaaaccaccccaaacaacaccaacagaaccacagctaacaaactacatcgccatgtacctatccaacaacttctgtcttactaactttcttccttactcactaaccgccgagtcagttctagattgaacaccaatgcatctaccaccgctaatactcccactctccatcacgttactaccactcaaacctcctcc

SEQ ID NO: 183088 - DNA, 376 bp, Arabidopsis thaliana nossen
ataaaaacgaacgtcgcatagactacatattttttatttatgccaatctcgtcccaaagagaatataaccgtggttagtttctttcttgaggttttttttttttttttttaggaatttcttaaacttcttaataacttcagttcatatatttcattgcttagtaagtcaaaaccaaaaattcaatttatggttaacatatatatgtatattcttttttataattactcgtatttcttctctctatctaataaaataatatagttcactttgtaatgcagggtctagaagtgttaagataaaattaatagatacattcaagcttttacttgtgagaaaacgactctatgttggacctatatatagatgagacttttt

SEQ ID NO: 183089 - DNA, 369 bp, Arabidopsis thaliana nossen
  unsure (1)..(369): unsure at all n locations
gatcccatcaataaaaagatctgcttgctcgaagccattgtanacaaggccgggncttgttgacgtgtaggcaaancananaagcgcaagagaagatcaaagccaaatatagtctacaagccattgctaaggaaggagagagactgaattctaagaaaataatttttcattctggtaacaagcaatctctagagctaataaaacaaagtctagtagtaacttagaggccaagaagtcaaactcaattttcaacgttccatatcctccacttttcctagcatttgctaaagaatgttgtcagccaatgcaattatattcccaaattggcatcaccaagttgacttcatgattatataacaaatatgacct

SEQ ID NO: 183090 - DNA, 107 bp, Arabidopsis thaliana nossen
tttatctaatctttagctaaaaaaggcccgaccttctaaaagatgcaagggtacccactcttgtagtcgacgtcatacctcttctatagcgtcacctaaattcaact

SEQ ID NO: 183091 - DNA, 341 bp, Arabidopsis thaliana nossen
cggacgcgtgggttgcgacggcccctcaagattggtagttacaaacgtacgaatcatagagattaggtgtgatgtctaacaaaaaacaaaagtaattcttgaaaaaataaaaataaattgtaagtagcatataataccaagaatgttatgagtgatagtatgagaaccagcctgtgactgttgtcattgattcaagcgatcggaaatttcactttatttatcaataatatatataacattcatatttttcaaaataactatatcttaatagaagtctcacgattcgatacttcgatcgaccacaaccagacgtagtctcgtgtgattgtgtgactaacttt

SEQ ID NO: 183092 - DNA, 386 bp, Arabidopsis thaliana nossen
  unsure (1)..(386): unsure at all n locations
ccacgcgtccgnttatctaatctttaccttaaaatttcccgaccctctaaaacaacgtagtgtttcctacattttttgttcgggccaaaacacnncnatannntcacctaaatacaactcactatcacctcatcttacaactataatgactacgaaaatcttttttctttacccaactaaaaaacctttcactacatccacctttctccaccttacttaataccaaataatccctcaccaatctcccttaccaacattttcacaaccataactccaaattaaacgcaccctatcgcttcgcatcaaacaccacccacatccatactactcacatcgtaacccctacactatccatcaccctaacaccctctcctttccctaacttc

SEQ ID NO: 183093 - DNA, 370 bp, Arabidopsis thaliana nossen
  unsure (1)..(370): unsure at all n locations
gattgtcacgagtgtttacacgacaaccttgacaaactggcttccaaatcgtgaaaagttgatggtgttggtcatcanatacatcattancctcntnaattttcctncaaaaagaacacattttttaaacaaaaagatgctagctttgttaaaagctaatattcaagaaggtgggtttttgtttatcgtaccggagaatctgagaagaagaatcaacagcgtctggtctttgtctcttgtttttgtttcgggtgttaggtctactcattgtgtcaccaccaccagaaatttccccagtaacaatcgaaaaccctagaaataacgaaaacacagcaacattgttaacacaattttgattccgattaacgaa

SEQ ID NO: 183094 - DNA, 393 bp, Arabidopsis thaliana nossen
  unsure (1)..(393): unsure at all n locations
ccggggcggccgactcgtccgatgacttcttagatctctagtctctactacttaattaggttcgcatctccaaatggtcagtaataagttcttcgagaattaggaaaaaaccatcaaacaagattccatatatctatttgatgtcgtcgcgtaaaatcaactgaataaaaagtccgttttgttgtaaaattgagtaaactctcacaacggtggcggtgaacgtatataagtcatgtgacacggcacctgagaagatggaacggcgaataaacggccgtagaaaaaggaggagacagccactttgaaaggcgagagagagcttcatcaagagtgacgtanggttcggtgacctcatcttaccttgatggcgtgacgtcatggatagttgaatta

SEQ ID NO: 183095 - DNA, 318 bp, Arabidopsis thaliana nossen
cccccaccccccccccccccccccagccccgccacccccccccccccccccccccccccaccccccccccccccccccccccactcccacccccccaccccccccccccccccccccccccccatccccccccccaccaaccccccccccccaccccccccacccccccccccccgcacccccccccccccccccccccccccccaccaccccccccccccccccccccccccacccccccccccaaccccccccccccccccccccccccccccccccacccacccccccccccaaaccaccccacccccacccccc

SEQ ID NO: 183096 - DNA, 376 bp, Arabidopsis thaliana nossen
  unsure (1)..(376): unsure at all n locations
gtcctaccacccctgttcaaaaatgctttggatggcatactncaaaccatgtgtgtgtaaaaattagttggttcgggccaccnancccaatcactccccaacggcatggctcaatctcgttcaaatactaaagatgatgtttcgttcattcttcttaaaggatacgacataactttgcataggtatacctataagacaaaaagctaaaattttaactaagttctcaactataagttaataacgagacagccatcatctagactccataataagtattcaaatgaataacttttttttcaatttcaaccattcctttcacgaagatacaattcaagattcaaaaatatcaataaacctctctttcttccaccaataa

SEQ ID NO: 183097 - DNA, 221 bp, Arabidopsis thaliana nossen
  unsure (1)..(221): unsure at all n locations
cccaaacccacccaaaaaacgtttttttcaaaagcaagttggccgcccccaaaaancaccnaaacccccatcaaaaccttcataacccaaaccacaaaaaacatgcactcaataatatactattacccccaaaaacccaaacaccacttcacataaattagccaaagccctaccaccccctcaaaaaacaacactaccaaaacactcccccaaccaaacta

SEQ ID NO: 183098 - DNA, 367 bp, Arabidopsis thaliana nossen
  unsure (1)..(367): unsure at all n locations
atcttttacagaaacacgatcaagtncagaatcnnncngtgtctgtggaccttaagggtgagggtcacccaacntntncaaatctacatttctttnccattgttggaatctccccctcgatcgttgcttatcaaatgatcttttattcgatttttactaacaatcgtttcaaagcatggtctaatgatgatcctgatctccgactgatccaataacggttaagcaacgctgtttttgatcccccattgttgtttgccatcgatcaacactcataaataacttgcagttttgttcataaagaatggcgttcaatacagctatggcgtctacatctccaacggcggcaaatgacgttttaagagaacat

SEQ ID NO: 183099 - DNA, 378 bp, Arabidopsis thaliana nossen
ccagactatatattcaaagttgaggtatttatttaaatatatagggaactggtgacttaacttatttcaagtactaaaagaaaaaatattcaaatatacttacatgttagattctagattagctaaataaccttgaaattttattatttagataaataacaacgcggaaatattctaattgaagagtatttatatgtttcaacgctttgactaaagtagtttttataatcatgatattttattagttacgacattgagagataaatgatagaacttacgtgcgtgccatttcattcgatgaataaactagtagtatgctcaaatgtttgaaactaataacgtgttattttcaaaaaaatcccatgcgtaatttattgg

SEQ ID NO: 183100 - DNA, 381 bp, Arabidopsis thaliana nossen
  unsure (1)..(381): unsure at all n locations
tccgccanactatatatccaaattctttataaaaatttaaataaaacgttaacatgtgacttaaaatagtgcgagttctaaaaaaaaaaatcttcaaatatacttacatntaaaatactatatcaactaaataacctttaaattttattatttatataaataacaacacaaaaatattctaattcaanaatatctatatattacaactctttcactaaactaatttttataatcattatattttattacttactacattnatacataaatnatataacttaccttcctaccattacattctataaataaactaacattatcctcaaatcttacaaactaataacttcttattttcaaaaaaatcccatccttaatttattt

SEQ ID NO: 183101 - DNA, 240 bp, Arabidopsis thaliana nossen
  unsure (1)..(240): unsure at all n locations
ccactnccaaaanncnaacatcaaacancccccacacaccagccacaacctantctctcacacnaccaanacaaaacaaccactaatnaatcatccacattcaaacaaaanccaaaaaccttaccatcacacccactatacacttcaaaaccaccccaaccccaacacaacaacncaacaaatcaaactctttacccaccactcctaccaactcacaaccaaccacaacaaatcccactt

SEQ ID NO: 183102 - DNA, 354 bp, Arabidopsis thaliana nossen
  unsure (1)..(354): unsure at all n locations
taattacggggccggcgcactcgaaggaactaacngaattttntttttttattcatgaatatcggcngcaaangggggcaggttgaacttaagttggtaaggccgacacnnnaancnacnaatcatatcataacaacaatacataaaccaaatttcggagacgaacctacaaatcttttcaccgcccggattaacaaacccttactccaacagcctaaacccattcgcgaacaatcctatatctcaaaccttctaacttcctaaccctatcacaccaaaccaagactacatatctacgatcgaaagtaaaaacaaaaccccttataaaaaatgaaactcaaaaccccaaaatca

SEQ ID NO: 183103 - DNA, 316 bp, Arabidopsis thaliana nossen
  unsure (1)..(316): unsure at all n locations
agggaattaaattaatacagcttttattttcgaatcttcaggnnccccattaatggtancaggtatttagtctgtccaaaaactcaatnaattaacctcccatacancttcttcttcttcatcatcatcttcaacatctccccactttttcttctccttcntnncctcaaacttctctnctctaataaatacttcaacttaaaattattaatataactcaacaactnttttaactctctctaccttatcctccataactatatccaacaaataaacaatcaaattataaacccaaattcatcttaacttctccatt

SEQ ID NO: 183104 - DNA, 231 bp, Arabidopsis thaliana nossen
aaaaaaaaaaaaaaaaaataataaaaataaaaaaaaaaaaaaataaaataaaaaaaaaaaaaaaaaaaaaaataataaataaaaaaaaaaaaaaaaaaaaaaaaaaaaaaaaaaaaaaaaaaaaaaataaaaaaaaaaaaaaaaaaaataaaaaaaaaaaaaaaaaaaaaaaaaataaaaaataaaaaaaaaaaaaaaaaaaaaaaaataaaaaaaaaaaaaaaaaaaaaa

SEQ ID NO: 183105 - DNA, 278 bp, Arabidopsis thaliana nossen
atcaccaaacaacacatacaccaaaaactaaaacacgattatcaaatatccattcaccaaacactaaaaaaaaaaccatatcacaatctcaaaacatacctaacatacacccaaaaacactcacaacaccataatcaatatacaaaccaaaactctccaaacctataacaatacatacccactccacaaaccataccataacatcacaacaccccaacacacaaccaaaaaaaacaacaaatccatcacatcctaccacaaaccccacaccacaaaaa

SEQ ID NO: 183106 - DNA, 272 bp, Arabidopsis thaliana nossen
cctcaaaaattttccacaacttctcaaatcaaaataagattatgcaatcctaactcttttttactactctatagactaatcatactatttttaatcatcttcaattaaaatccttcatctcctccattcactccttcccttacctcttcttttctcacattataattttcctcttctatacataacttactttatatttacacattattaccactcttttattatacattattcctttttatccctcataactaataatcttcctattctaa

SEQ ID NO: 183107 - DNA, 217 bp, Arabidopsis thaliana nossen
aacctcaaaccctcctccttcatctctcattctccacctctcttctctccctttccatcaccatctccaccttttttctctcctctccaccaataactctcttctaaaccataattcccaattatttctcaaaaaatcatccctaactatgtctcttctttaccttttctctccgtctttaattttctccaatgctttcatgaattcacactatttc

SEQ ID NO: 183108 - DNA, 178 bp, Arabidopsis thaliana nossen
aataaattctcttcttttctttcgtattctcacttttttttctttccccaaagcaacaaactcattatttatattgtccctttttactaaataattcacttctcatctagagacaattctccttcttacccataaattccattattcacatttctaatctccttttatttcaccatca

SEQ ID NO: 183109 - DNA, 320 bp, Arabidopsis thaliana nossen
  unsure (1)..(320): unsure at all n locations
aaaggangagactnngtttatttaagaaaacattcaaancnnnccgtgtctcttcnaaatattttcgttggtccaaaaannnnnnnctnnctttcccaacaataccaacctttcaatctccttaactactggaaaaacaacaatatttcttttactttccttcctaaaaccaccaaatcttcttcttcttctctttcccaatactcctccttttaatccatcataaccaccaccattatcacctcttttacctaaacttatcactaacaacctcatgacaactactactaaagaccattcttcaacctttactttcctct

SEQ ID NO: 183110 - DNA, 371 bp, Arabidopsis thaliana nossen
  unsure (1)..(371): unsure at all n locations
ttcgagtttgcgtttagaaattgaagttgactcttctgttcttgagtctggctccgatcggtgtggtaggtcgcantaccaggagattgatcactccttcgacattgctctttgaattcgtcctcaagggaattaatgagctcgtagaagctaccagaaatggcgtccatgagctctggtgatgaaagccttcgactttgcatgtttgatttgaggagaggtcaaactgaaggacaagagttagagaaaattttgttcttttatcctgccgatttagacttctcgacgcagttatcagtgatcgggctcagtgaagggcttattacttttactagacttttctctccggaagcggcttgtgaagtgatcga

SEQ ID NO: 183111 - DNA, 91 bp, Arabidopsis thaliana nossen
  unsure (1)..(91): unsure at all n locations
tcgttttagaggatccaancnnacacacgcggtcttncaacagaaggttggtgggccanaaaancacctaaatncaattcactanccccct

SEQ ID NO: 183112 - DNA, 375 bp, Arabidopsis thaliana nossen
  unsure (1)..(375): unsure at all n locations
gtttttattcgtgattttttcatagacaaaaaatttanagngaatgtttgtgatagaaactattggatggctcaaaaaacanccaacccatgcgaataaagattgaagttttgactacggacaatatcagaataatttgtcatgtatgtcataatattttgttaaaaatacatcaattttgttttaaataatcacaagtcttaatgatatattatacatgcacttatttattttaaaaataaatcacagtttcgtgttgtatcaaagacttgttgttacgtaaaacaatttaataatcactacaaaatggatcaccaatacgattatacttgactgtattcattcattttagaaattaaaaacaactttcaattg

SEQ ID NO: 183113 - DNA, 377 bp, Arabidopsis thaliana nossen
aacaaagtttcacttcacgctcacgatatctctggttttttttaacagagtgtgggacttggctactttgtttgtgcctccagcaagaacgcggctacccgcaagcgctccagaaacaattggagcgggtgttttgtgggatgaagagttcgtacaatgattaaagaatcgtacatagtataaacagaatttatttgagatgccatgtaatagtagagaagcagatttctgtttatgtccttacctttacttgttaaattcataggtagaaagaaagaacctctaaccaaagcttccatgtcataagcaaagtttttgtgattttcgattttgttctttatcagtatttaaacaatcggtcaattggtgatttcaca

SEQ ID NO: 183114 - DNA, 381 bp, Arabidopsis thaliana nossen
gctaaaccaagacaaaactaaacaagtggaatcaacaaagacaaaactaagcacggtcatcattagaaacgaaggtcattgcatcaaaatcaaagctttagggatacaaaaaacagagaccgttaaagagtcaagctagaaaaaatgcaatatgaaaacagaggatagctaaaccaagacaaaatagttaaacaccatcctaaccaccatgaatgagttaaatttcgttttcttacaattcaactttcgttattgggctcttaatcttttgtctaaggcctgttaacttttttctttccttatgcaatttaaataaatgaatgttaaccaaaacataaaaataaaaacaattcctgaatgcttttttcctttcactaattg

SEQ ID NO: 183115 - DNA, 196 bp, Arabidopsis thaliana nossen
acatggtgatgatattatgtttatctcagaaacaacgacaaattttgagtgatgtggatgccaggatgcggaaccaatttcatagatattttttcttggagataactggacctttcaaaatcttatttcacagtcaaacaaaacaaaaatgaaaatcaagtaaattctcacttttgttttgtttgactgtgaaata

SEQ ID NO: 183116 - DNA, 400 bp, Arabidopsis thaliana nossen
  unsure (1)..(400): unsure at all n locations
aaaggccgggggcgttccacacntccnacaaaactaatttaccattgatttttttcttcttccttcnnncacagccgtttttctactatgtttttggtccaaaaaacnncaatcatanntcttccatttaagattcgtttacatcgccgtttttgagctcggttggtgaatacatattcttgaaaacagaaaacttgtactgaagcatggctcttcggctaccagcttctaaagcagctgaagttgcgattggatctattggctgtggttatgatctagctattgatttaccgttgaagtattgcaaaggaagttccaaagattctagattacttgacattaaagaaggtgatgataattgtgagattgttttacctggtggaatctccattcctaatgt

SEQ ID NO: 183117 - DNA, 390 bp, Arabidopsis thaliana nossen
  unsure (1)..(390): unsure at all n locations
gggcgactccacgcgtccggtgaacaaaaaaaagaagaatattaataaaagaaaacgnncgacggtgggggtctcaaggtggtgcggccggncataactnctccaccgccaccgcctccgcttccgccgcatcaaccggcggcggaaagatcactaccttttcctgtctcattctcttcctttaacaccaatcatcaacctcagcatatgttgagcttggatagccgtaagatcattcaccatcatcatcatcatcatcaccatgacatcaaagatggtggtgctactactggtgagtggataggtcagacggatcatgatgatagcgataatcatcatcaacatcatcatcatcatccatggtgtagtgatgaagttcttgctcttctt

SEQ ID NO: 183118 - DNA, 253 bp, Arabidopsis thaliana nossen
  unsure (1)..(253): unsure at all n locations
aaccnnnccccacaaaaaaaaaaacaaccacaaacacacccaaccacccaaaaatataactcaccgcaaaacaaaaaaacacccaacacacaccttcgatcactataaaacccacaaccccaggaactccaaaaaaaaccacacccacacaaaacaaaccaaaaaaaccttaaccaagacacaaacacaccaccacgaacaaccccacccaacacaccacaaacaaccccccccccacaaaaaaaaccaccca

SEQ ID NO: 183119 - DNA, 94 bp, Arabidopsis thaliana nossen
acaaaaaaaacccctcaaacccatttttcactctacaatactcaaataaacctaatctctacacctctccacatctttccactttctaactact

SEQ ID NO: 183120 - DNA, 376 bp, Arabidopsis thaliana nossen
tacacttgtcttaaaaaaaaaaagccaacgcttagcgtaccacacagattatagacttctgaattttttgttggcatgaagttgctctgccaaaaaagggtcatcacccttctagcaaacaatataatctcaatctctttactgaccaagcctcccatttgtgatgatggggtcatccaggatgacaaaaagtgtttggctgagatcttatcaatcaattgaccaataagcatagtttctatttcacattttttcaatctggttattcccatatccgcctgctttttgtaacttatgaataaaagtattaaaccaaaaaaattctgatttctaaacctacatttgattttatctaatctcctttccacatcacaaa

SEQ ID NO: 183121 - DNA, 66 bp, Arabidopsis thaliana nossen
  unsure (1)..(66): unsure at all n locations
ccgtccgggtatgcaccggcgcattttgagaaggtaagtgaccgccctttcagagnngcgaaaggc

SEQ ID NO: 183122 - DNA, 380 bp, Arabidopsis thaliana nossen
gtgtcataaaaaaaaatcgaaaggctttggatcatagaacagttaccatttcaactggggattgacagagtgtgtcaggaagtttatgagatggaaagataaatatagaagctaaataccttagcaagaatataacgaggtctggtcgatatctggctcactacttcaaccagagcggagctcactttgctgttaatatcaagactttccgaagatgctgtcaaaatgaatatagacccgttaatgatgatattcctcagtcatgattttataccaacgacacaaatatataaagatttgagatagagaacaactttttcccgtgatgagttcacgactgctcataattagagtctccctgccagcccgaaggaaagcat

SEQ ID NO: 183123 - DNA, 83 bp, Arabidopsis thaliana nossen
aaaatacttacgagtggttattatattaaatacgagatttttcagtcagaaatttaaaaacgcatggacccatctgaacatct

SEQ ID NO: 183124 - DNA, 99 bp, Arabidopsis thaliana nossen
aacaattgaatccgtatggcgaagaatgggtagatccccatccggggcacctttctcaatagaggaggcaactcattaacattgaatatatcataaact

SEQ ID NO: 183125 - DNA, 297 bp, Arabidopsis thaliana nossen
  unsure (1)..(297): unsure at all n locations
acccacgcatgcgntgacacatgganttttctctggtttttttangccccacaaaccaacggcggtaacgtcggatatgtggggtccctgaactatccaaccttcgatacttcggttgatctcatgagtattatcgagattgggtcaaagcaaacgtttgatgtataatggattcgacgtaacttggtctggatgaaaaactataaacactaatacttcaaagctgtaagatacagaagtagactgataaacacgacgaaacaaataacacaaaaaataggagggatacatggataa

SEQ ID NO: 183126 - DNA, 374 bp, Arabidopsis thaliana nossen
gaaactgatacgggcttttaataggctagtgtgtcggtataggcccattagtgaacagaagaagctgttgatcaatcctcttgcggagaaactttgggaagagccgaagagaagtcgaggtctctctatctctctctttcgtacacttcgcgcttctcttcctgtaatctctaattccacactcactacatttatgtacttttttctgtatctatacgctttgtgtatgatgttttgtatattgttgcttctcttgctttacttgcttggttggggatttcttctctgttttttcttggtgaattttgcgtatcgcttaaaaatgagtgaaattgatttggtgaaattaggtcagaggcgtatctcatggctcc

SEQ ID NO: 183127 - DNA, 380 bp, Arabidopsis thaliana nossen
gagaagaatcggctcgttggatctgatcgaagctgcaggaactttgtgtgtgtgtttgaagatagatggattttggagtcgcaaccgcaggttgttggagtttggtgaatttttacagaaatcattaccgctcggagtatgcaatgcaacttgcatttacctttacacagattatatttgttttcacaagaattaataattattatttttaatggattttgatttttaaaaaccaatctgactatgcaatgtcaataaacaataatattatttacatgggctgacggtcttaaggttcaaaattaacgtatgacatccttcaacggattaggtgtcatatagtgttacctaaatccaattcacttcgctgcgttttataa

SEQ ID NO: 183128 - DNA, 378 bp, Arabidopsis thaliana nossen
gttaaacaatttattcaacacccccattactcatagtaaggtaaaatattttttttttccttaaaactttagtcaaggtcataagatcgaatgtaattaaatcacatctcagcaacctcttaattttgtagatcaaacaacaacacattttactaaacgaaatattaatagactaccattttattatcttggttttaaacaaaatctgtcttattgaaaataagtctctaatttatttaaagttttttgatattggtcgaatcccatttatacattaacctaaaggttccagcagcattatttcgtacataaattccatcttcttgcgcttgccagaaacatatgttaggttttctccctccacatatatcatgtata

SEQ ID NO: 183129 - DNA, 320 bp, Arabidopsis thaliana nossen
ttacatttaagattcacattctggtgaaagatctcggagagataaagataaggaaatggtttatgttaccaaaagaacttattggatctttagatatattatcttggattctcttaatttacattagggtctatacatctttactaaataattttggcgtgtaaatttacttttcatctaatctaaacaaatttacacaagagcgcgcacaaatatataaaagtcacgcacacaagcaatcccaatcacaaaacacctccattgctttgataagacaggactgttaatgttcatcaatgcaggttcacttcatagaaata

SEQ ID NO: 183130 - DNA, 200 bp, Arabidopsis thaliana nossen
gttgctacttagattccacacaaaccggcaccatgtctggaacaattacaagggttttacatatatcatgactacttggtagcagaattgtgtttttgtcaacttattattcaattaacaatgcagagtgagcattattaaagaaactaaaatatgataatagttttcacaaaataatatttttctgtgtgaaaacaagg

SEQ ID NO: 183131 - DNA, 297 bp, Arabidopsis thaliana nossen
  unsure (1)..(297): unsure at all n locations
tccaaaactaaaaattttaacaaggttggtatatataactagaaataaaacgcgccaggtaaaaaattttggtgttttatcaaacaatancccggangagaccaataaccacacacaaccccattgacaaataacaactcaagcactattggacagacatgatcaacaaagacctccattcacgccaagagagcttatccgacaccaaataacactccaacggataggtctttggctatacacaaacccggttaatgaaaaaacaccacaccagcgacaattcactgaaaccaaaaa

SEQ ID NO: 183132 - DNA, 316 bp, Arabidopsis thaliana nossen
  unsure (1)..(316): unsure at all n locations
aaaacgcctagattctattattacaacacgcaatacgcacccccgctgcgcaaaaaaaactcttggcgttccnacaacattaaaaaaccatctcaaaaatcttaatgcgcctaaacattacatgcttgacaaacttacacctccatttgacccaaacaccaattaactaccacaaaatttaagccattgccttcccctaatacttatcataaccaacaacttaacaatattctcttacctaccactaaatcaactcaatcttcatgctaaatcatattcaactttattgaaaaattaaaacctacaagacctaccc

SEQ ID NO: 183133 - DNA, 287 bp, Arabidopsis thaliana nossen
accagaactcacttctactatctagtttgatcagaaggataaggaataacaagttctccatgagggtttgtggaagccaaacaactactacccatgtagctaatcatctatatacaacaagggtttgctcaaaaaaccacatatgctaccaaattgacgagattctcagagattactaaactcatatatggatagagactcacgttcacctctctacatatacaaaagcctacattagtagctctaacaattacgggtgttatacaaacacaagtgtttcacctgtt

SEQ ID NO: 183134 - DNA, 349 bp, Arabidopsis thaliana nossen
  unsure (1)..(349): unsure at all n locations
gtgagtctttaattgttggaagagaaactgaatcttatctaggctgcatgagtgtattaatattgcgcatatctttgntaactttggtcatatggaacagatttaacttcactagattgcctgagatcattctgctgcagactcttgtgcacgtttttgaacttctcttaatctctgagttagattgtgtttcactagttaggttagaacatggcatagaacatttttgacacaatccaaccgcaaaattttaaagctatgtttggttattatgacattgaagatttgcatgtgtacctaaaaacatttttttaactctttttcttttgagtaattgtttgagctagat

SEQ ID NO: 183135 - DNA, 261 bp, Arabidopsis thaliana nossen
ggggccacacacactctcttaatgcccgtacattgagatttatattaccctatcacagaccaaaggccgtggctataaacatgtgtgtgtccatcaaaccccaaacccaaaaccctatccaatctccatgactagtctcccctcttcggactgtcaaaacttatcttactaaaacatccaagtaccaaaaacaactaacaacaacctataccccacataaccacaccaaaccaaaacctacatttccatcttaagcaaaaa

SEQ ID NO: 183136 - DNA, 358 bp, Arabidopsis thaliana nossen
ggccggtgtatgaaatcttgggaagatgagccgccgtagttaaggtcgaggttctggagctgctccatgagctgcgaacgtctttccttgaagaaatcaagacgtgttgttaactctaccagagctgctgatgcagcagctgacggatgattaagccttgggtactctgttatctgcaaaacctcaagcatgttagtgtgcaatgtcattgcttaagatgtttccttagaatttttaagagcagtcagctttaatttgctaggcagaaagcgatcgtgcatgtctctgtagttactattgaaaccaggtaaggccaatcacagaattgcacacaatactacgcaacccaaaagtgaag

SEQ ID NO: 183137 - DNA, 257 bp, Arabidopsis thaliana nossen
aggacaccatgacaccctctattcctaaaaattactcaatcaccagtggggccctaatacagtttttgagaaggttaaacaaaccctatgactccaatgcaatagacaacctctaatcctataccaaccattcatgctaaggaatactcaaatcccacccacttttacccccgtacctcttacattatgcgtcacccaaggaaatcccaaaaacccgcttaaaccattcggtgtgggcactctccaaaagtggaacc

SEQ ID NO: 183138 - DNA, 361 bp, Arabidopsis thaliana nossen
aggaaatcatgatgacctctagtcgattaaaatacaataacgctaggggggccataattcaatttgttggaaaagtaacaggtgaaaggattccaaagggagagcctagtgctacaagtgtatcacccttgctacttgatgaagcaaaattcatgcttggttgaccctgatttacaaaatatttgcgtcacaaagatgaaccataaatcagaaagaaggaaacggggaggaaaatcagggaaatatttaccagtaaacttaaggggactcctagaatagccattcgagtggcagacttggccatgaagttagcgttgtgtggctcatcaagttgcatcaagggcttgctgtaatgttcaat

SEQ ID NO: 183139 - DNA, 360 bp, Arabidopsis thaliana nossen
accaggggttttcacttctgtttgttacttgtttgagaagtacaacatggaggttttgtttgctaatgtctcctctaatgttttctggagcacctacgtgatccaagcacaggtatcttatacatataaccatttttatcatatgatatgtggtgacatctattatttaccatggttctttttttttatgtgatgaaacaggtaaatccgagttgtgagaatcagttactgggaaatggtcttggagttgtagacgttttcaagcaagtttctcaagaactggtgttatatttttcatctctataaatcataactggctgcttcggtttgagttttaagtattttcagggtttgttttct

SEQ ID NO: 183140 - DNA, 374 bp, Arabidopsis thaliana nossen
aggacagtggtttgttgctctcgaccaaccgacagaagtcaacttcttacacaaagacagtcctaattgatcctcaacagtgccagacctgagctatggaacagataaatgggtcggaagaacttcatcacacttagtatataagtaaccaagcagggcccttttcaacatgtggttggcctaagtctactgtcattgcttgatatatatctagcatgccataatgttctttcaacataaatactttcaagtacagagcctgatagtaagaattaatgacttacagaatctcatcgccgacagcaattactgaggccaaaagcacctcgtgtttctgtgattcggtatctacgtcttttttcagtgaagcaatt

SEQ ID NO: 183141 - DNA, 362 bp, Arabidopsis thaliana nossen
caccagcctgctcctcatctacactcttcccaacagcttgctcctgggcaatactcttcctaacaggcggctcctcatcaagactcttctctccaccagcctgctcctcatcaacactcttcccaacagcttgctcctcatcaatactcttcccaacagccggctccttatcaatactcttcccaacagccggctcctcatcaaccctattcccaaaacctgactcagtctcaccaacaacatctccaacattctcacaaccatctatcgtctctacagccgctgctagcttcatcatcccatcaccagtccttaactcctcaccaccactctcaccaacagctttctcaccaccaccaata

SEQ ID NO: 183142 - DNA, 373 bp, Arabidopsis thaliana nossen
agccttccgtttttatatatttctgaatttcatattaatcttgctccatactttattggttggatttaaaaattgttgtgtcttccttcgatggaaacccattttccgggaaaagggcttattgcaagggttacctaatttccttattttttaatctaacccttggacatttctcttaaaaaagactcaccagggctatggtcagacctcatttatgtatgtcttgagtccttactaataatttaagcttcggatataatatgttgatggttcagaaccttcatgtcaaggaatattggtgtgtctggagggtttttataaggtcttaggaacctaagacatctttgtatttggacgaacgttgatgaaaaca

SEQ ID NO: 183143 - DNA, 303 bp, Arabidopsis thaliana nossen
aataaattttataacggcctaggtcaaaattatcaagacactgtataaacattgaaattcttgccaaatccctataaactatgacgacgtaatacccaattagagatagccacgtggatgtatgaccaatttaggagcattcagttttcgtgttttgcagtgataaatatctctgagagctaaccccggagagcttacagaattcaagctaaacattgttagagagaaagagagagcgataatggcgatgaggggcttcacgttgttttcgatccttgtgttgtcttttgtgcgctccgtcta

SEQ ID NO: 183144 - DNA, 365 bp, Arabidopsis thaliana nossen
aattaacaatttttaaaaaatctagaaattcacactagttaaattaaatatcgtcgatgagaattaatcagtcaacaaaaaactaatcattttatttggataactaaatcgtatcaaatgggaacatatgtttacaaccttttagaaagaaaaatgaagatatgttgatacaaaagatgtttctcttttccaaataatctaacaaacgaatcagaagaaaaaaaaacaatattgtgacaacaatcatcaaacctctgcaactgcattcttcacacaatcaacattacacaaccgaactgatctcaccatttcacccaacctagaaccaaagatttagatagtaagatcccatgtacaacatatgt

SEQ ID NO: 183145 - DNA, 220 bp, Arabidopsis thaliana nossen
gcataacaattttgagacaagagactctctctctctctcttctctctttctctccccctctctccggcgatggttgttgctatggaccaaccacaagggaacgaaaaccgcccgaacgagaaaaaaagcgacagcaaacacgcaaccaaatagacgaccgacacaccatacaaaacaaccacagaaagtccaagaaaaacgcagtgagcaaaccaaaagc

SEQ ID NO: 183146 - DNA, 369 bp, Arabidopsis thaliana nossen
cttagaaaaatcaaaatctccatgttgaggttattaatattgaaagcacgtgttgttgtattcgactcaattactaaactcgcatgttaacgcatgacacatgataatatcggcatattcagtgaaccaggttggttcatgatcccttccaaagcggactcacaccttagactcggagctcacacgccaaatcgctcggctaggttttgatagccaactccggccaaaaaaccaatcgcgagaatgtggtttttgattgacccaactcacattttgacctagcacgaaaaccaaacaccaacatgaaataagataaactattcaaaatatctagttttatataaaaatcttaatttaatgtcacgagaa

SEQ ID NO: 183147 - DNA, 375 bp, Arabidopsis thaliana nossen
  unsure (1)..(375): unsure at all n locations
gggcgttcaacgcgtgcgnttcttatcatattattctttttatgcacccgntatgtnatgngaatgtgtttattaaaattttgtagttctacaaccatcattgnttaatattcatgaaactttttttttttttcatgaaacttatatatctattaaaagtttaaaaccttattatacaaaatgtttgataatctattatctgtcaccacccgtttgtgaccagatagtagatttctaaagngtttagaataagtntagtgttttagagtattaaaaaatttttaagcacttttcattagactntatatatgacatatgtaaaataagattcctgaatttgaatttagctattacttatataccataactcattaa

SEQ ID NO: 183148 - DNA, 157 bp, Arabidopsis thaliana nossen
acccacccaacccataaaaaaaaacacttaaattttttttttcaaacacacacaaaaaaaaaacagtggcctttaaaaataagaaagaaaaattactttcctcctaaatctctctctctatatcaaaatatccacaccacaactaatttatatctat

SEQ ID NO: 183149 - DNA, 168 bp, Arabidopsis thaliana nossen
  unsure (1)..(168): unsure at all n locations
cccnttcaccatatcattaacctaactctaaatccttatcatctatacacactcactacttttacctttagtcctgctaataaacagaaacaaatgctactcaataacaaggaaatatcactttctgcaaataaataccaaaataactttatggaaatacaaatacct

SEQ ID NO: 183150 - DNA, 328 bp, Arabidopsis thaliana nossen
  unsure (1)..(328): unsure at all n locations
gaaaaaggttattctcatcaattttcacaccgcaacctccncngggccagtcgacctaaaaagttgtagtgctaaacaaacccttnacnttcctcctcagccacataacgacagtaacccctacaaccaagacgtcctccaaaccacccaaactaccaacaataaaaccggcaacatcgaaaactgcaaccacaaccacacccaactccaaagaaatgaagctcacgtcacccactacataatataacaaccagaactgaacatccacacctgcttaactaacacaaaacaactcaacctctaacaagtaacaaacatcaacaaaaga

SEQ ID NO: 183151 - DNA, 115 bp, Arabidopsis thaliana nossen
ccgtttgatacgaaactctctacgaggagtctctctttactttgtctctctctcgcaaagaacgaaagaagtgcctcttttaattttctccgtccagagtgtgcggcgctgcaca

SEQ ID NO: 183152 - DNA, 245 bp, Arabidopsis thaliana nossen
catgccccaaaacccataactttaatctacatatcaaataaccacttcctatttatatacaaaatatctggatgcattgactgcacattacttcaaaatatttatatatatattattaaaacacatatacaacaaaactctgacaaaactacattctaaataattgcattttttgacccataacctataccgagtttttgttagtcctccctatctatataatccacactcacttactcattcat

SEQ ID NO: 183153 - DNA, 309 bp, Arabidopsis thaliana nossen
gggtctcagagggtttttgattgccattgggagaagaaactgatgtataccctccaaaatatccatacgaaaagtctttggtctcgattctgtctttgatggcttattaattgttcaagcaagttttgagacttgcttcgagatgttctggtattggtcctgaaaaatgctgggatttttgacggacgtatgtgacgacgctcatagccctgatcagagatcgaatggaaagagggtttgtaaatgggccttatattagagcctatctacataaaaccctaatccaagatctgattcagattcctattc

SEQ ID NO: 183154 - DNA, 217 bp, Arabidopsis thaliana nossen
attcccacccccacccacgcgtacgactagttctacatctctagcttatcgccctctctccttttttctgtcacgctttcattccaatggttgtggaaatagaaaattctctttcttaacttgcatttcccacaaacactgactttctctaataccgcagccctttatttaaacctttccttttaaaaccctcaaatttctccaaaaaacccctaaa

SEQ ID NO: 183155 - DNA, 258 bp, Arabidopsis thaliana nossen
  unsure (1)..(258): unsure at all n locations
gttcctcaaacaacnccacaacccatagatcttcttcttcttcgacttactcatcttacaaacttctccacatatcttaataccagatccagccaaattcccgttacccaaacattttctactcaagctcacttacacacccacctaacataacttaacatatccaaaccaccaccataatcatattcaaaagcttatcacaatcatcattaacactttactaactacctacaatacaaccattgactctttcaacta

SEQ ID NO: 183156 - DNA, 367 bp, Arabidopsis thaliana nossen
atcaaatatttggccagtctaaatagaattagaggagaataaagtaaaataaaacaacaggtttgaccaattaattaaaaaaggggcgagccaacttgtcgtatatcattcgtacagtggccatttactaagtgtgtgaccctatatatataaatcatatccttcatgcaaagtcacctgaacatttcatatataagaagatatacaagcctaccaaacataacaaaacatatttaaaacaccagcaagtttatattgcaaagcgtttcatcatgatcatgaagatatctatggctatgtgcaaacaaccattgcctccttcgccgactttagacttccctccagcgagatttggtcccaatatgct

SEQ ID NO: 183157 - DNA, 314 bp, Arabidopsis thaliana nossen
cgtcgttttttttttctttttttttttttaaagacattcacttggtctgttcagataggtgttttttaatttaccaaccatctcgagattttactttcattacatcaaaatattcgaatttggtttcaaacccgctttttcccgtcacaagaaaaccctaacattaccggtgaaactgagtctatagtgaggtttcagcacttttaaatttaattacgaaaatccctcttctgtttcaggatcaatttgctccatttaatcgctatctgtcgtagctcttgatgttaagtcggagagggaagatttctccacat

SEQ ID NO: 183158 - DNA, 366 bp, Arabidopsis thaliana nossen
caaaatcagtgttagtttctacaacccctgatcaaatcacatggttacccgcattttaagcggaaatagaaatgagaacaattttgtcaccttgttctgatttttcaatgggagtggtttagagaaagacacgatgaactaaacaaaaattaaaatgcttaggaagtacgtataaatttggttttaattaaatatctcagtggacaattttgtattgatgtccttgtatgcaaagttgcaaacaagcacaagtcaacaacaatcttagtctctttgtgtttgtagttttgtaggattatatatatatacataggagcttcgtctattttcatatatgattgcattaggaagttaatgccttacccg

SEQ ID NO: 183159 - DNA, 395 bp, Arabidopsis thaliana nossen
gaatttgttataacaaaattatttagtgtcaaagttagattaattaaaagattgtttttcacattcttatttggtgtcttataaacacaatcagtattatctcttatttatatattaatagattaataaaacaattataataggttatgtattttaataggttaagtattttaatttataataggttatgtatataataatttataatagattatgtattttaataatttataaatagataaatataatcattatctacagaaattttgtaataaaaatatattctaatgatagtttattcaaaatcttaatgttaattattttcatgagtttaatttaatattatttacaaaacatttattagtttattcataaaaattttattctaatagata

SEQ ID NO: 183160 - DNA, 369 bp, Arabidopsis thaliana nossen
  unsure (1)..(369): unsure at all n locations
aaaaacccggccccacccactcaaccgaaaacatatataaacatataaaaaattaaaaccccatagaccaacaacacaccgcaaaaaaacaaaatggcgcattcnacacacaaaacacaaacaactacanccaacaaccaccacacaacctcaacacacaaccagcaactccaaaatcattcacacaccatcataccacgcactctgcaaaacacccataacaccaccccataaattaacccccaccaccctaccaaatccccaaaaccgtaaacaacaatcaacaaaaatcacaactcctcaaaaccacgccaataacgccaccaacacccaccacccacaaactaccctaaaacccccaatcacaaa

SEQ ID NO: 183161 - DNA, 72 bp, Arabidopsis thaliana nossen
gtagagaatccaagtttacgtgcccttccatccaacgtcatacttcttctatagggccacttaaattaaatt

SEQ ID NO: 183162 - DNA, 266 bp, Arabidopsis thaliana nossen
  unsure (1)..(266): unsure at all n locations
agctgacgctcaagatcatcattaaagcacagaacataagaaacacagcgagatatcaaactgatgggcgactancaccagaaaatcaacactctcctctctccacaaacccatcaacaatctgcaaagagaaagcaaaaggtttttgtagaaaacccacttaaaaaacatctaaatcacaagtcaagaacatcattataagcccatcccattcaacactacatattccgatctgtgcattaaacctaacattatccatcatcatc

SEQ ID NO: 183163 - DNA, 393 bp, Arabidopsis thaliana nossen
caaaagttaattagtttaatggttaaatcatgaaatgtcaccaccgaccacttgatctcccatgctgtagttgaagaagtttgcctcagaccactttagtagcatacaaaaaagaaaataaataagagggtgttattcagttatggatttttctagaattgaaatgcaacactaaaataaacttttaactcaaccgatccatatatgtagatgagttcaaaaccaacaaaaactaaaaaaaaaaactatagataaattggtcgcatattaaaagattaaaaaaacatggtgaattaagtatttatctacaaattatactaaatacaacattttttatgttcaaaaaaaattggactgtcattttatctgttatactaaattatatatatatat

SEQ ID NO: 183164 - DNA, 396 bp, Arabidopsis thaliana nossen
  unsure (1)..(396): unsure at all n locations
gaataatactaacagcatataaaggttaaagctttatcctgtgagagaaacagatagaattttcggaaaaagagcacaaggtaggtgaaagatttcttctttctttttttctcatcacaaactctctgcatttctccacgaaatcattacttgaatagtaacccgtctctcttatatttgcttactgtgagcctgcgactgtaatttatgttcttctctttctaaagatttgcgttttgtttgaatcggagtttaattcaagaacccttttttacacttctttcttctaagggttttaggttgtagctgtgtgtgtgtgtctcacttatctcttgtgggtttttatctcttttgaagaacangaacagttaaaagtcgggatttttgggtatttga

SEQ ID NO: 183165 - DNA, 395 bp, Arabidopsis thaliana nossen
gtcaggtacgtaattctcttgaactgtcaccagcatatacttgcattaacgagctcgtattgatatctgtatgctctttggtaggctgcatttgttggttcaattaatgggcattgccggctttacagtgcagagggtatatatgctaaaggctcattctatttgtaaaccatgtctataaccttaattcttcataaagttaacagactcattttatttgtttttctgtaataattgatcagattgcaagttggaacaaacaaaccagatagatctgcagaacaaaaagaaggctcaagctaaaaagatcacagcttttcaggtgtcactctttctttttgaaaacgtttacattgctgatgttttttatgcctctacttaccatagagttagct

SEQ ID NO: 183166 - DNA, 74 bp, Arabidopsis thaliana nossen
tcccgaggaccagacccaatcccttcacccacctccaacaaaaactaaccatctctcaccaaacaaaaacacaa

SEQ ID NO: 183167 - DNA, 381 bp, Arabidopsis thaliana nossen
gtttactgagagcaaatcaatctcttaatttgtttttgttttttgtttggcatttcctttggagggcgacaaataatattcgccgaaagacaagaaaaaaaagtgtttactttttgggttcctcttcggtgggttcactacactagtaacatctctgaacctgttctctgtctctcaacagcaaaacctcgaggcttctttatctttcattctctcaatttcttctctctgatctgaattctcgccgagtgaatctagaaccaggtttaagggtttcaagcactctgtttacaatgctgcttccgagatggtttgcaaaagcgtcgctgctcctactttcaattgttgcctgtacaaacgctgcatttatcggagtaaaca

SEQ ID NO: 183168 - DNA, 390 bp, Arabidopsis thaliana nossen
tttattttttttccctcttcttttctcttctctctctctcgttcattcgaccttcctccatgttgtctgcatctttcctctctaatctttttatcttctttttcttcttccctccttttaacgattccgtggagtctggaatatgatcttgtggaaatctctcagttgtttctcgttcgtcttcaggttgttgttgtacactgctagtttcgtttgtgctggagacatagttcaccacgacgattcgcttccgcagagacctggttgcaacaacaatttcgttctggtgaaagtcccaactcgagtcaatgggtcggagtacaccgagtatgttggtgttggtgctaggtctggcccaaccttctaatctaaggacaaacatgctaccct

SEQ ID NO: 183169 - DNA, 281 bp, Arabidopsis thaliana nossen
ttgagaaatttttgcaaactctcctagaccatgtgtggtataccaaatttttttgagtcatacaacaatcaatcccacaaacctaaattgaaaacaaatatatttccacctgaaacaacataaacagaatggaacctttaaaacaagaagttccaaatcttatggatacacctcctaacatattaaacaattcatcaacaacctagaaaagagattcaacaaagtatcatctacttctcaaacaaaatattcgcacccatattaatcaaagttttccaaca

SEQ ID NO: 183170 - DNA, 375 bp, Arabidopsis thaliana nossen
  unsure (1)..(375): unsure at all n locations
ataacatgcacgaaactaagtagaaaaagaaacatcgatggaaaacaaacagaagctgaagaaggtattaatttcattgaattgatttctgaagaaacctataagaaaaaaaacgaggttaatatgtaacgaagtaagattagaagaaattatacccgatttcgtgccattgaggagttgtgctggaagaagaaggtgaagaagaagaagaagaagaagaagaagaagaagaatgatgagaaaaagagagatggtgaaacgaagaagacgaagaatttttattttattttttttaaaataggctgactgactctaacgtggccttaaaatgagataggcccattgngctaaactatctaagaaaaagtccatatg

SEQ ID NO: 183171 - DNA, 356 bp, Arabidopsis thaliana nossen
tataacatgctttaaactaagttgaaaaagaatcatcgggggaaatcaaacagtttctgaggaaagaattaatcccattgaattgatttctgaagaaacctattagaaaaaaaactaggttaatatgttacgaagtaagattagaagaaattatacccgatttcgtgccatttaggagttgtgctggaagaagaaggtgaatatgaagaagaagttgaagaagaataagaagaatgatgagaaaaagatagatggtgaatcgaagaagacgaagaatttttattctattttttttaaaataggctgactgactcttacgtgggctttaaatgagatatgcccatagggcttaacta

SEQ ID NO: 183172 - DNA, 231 bp, Arabidopsis thaliana nossen
  unsure (1)..(231): unsure at all n locations
agacacattcaaggacgcaagttaacgaaactttttacaaccccacnggctacccacaggtgctttatggcaatttttggatctcacaaaaaccacacattagatatggagattgaagagagggaaacaacaacgccgatcatctgcagaacgggtgcgccgaccacatgaccgactcctggaaacagatggcggctgctgggaggaagtatatcccaagcaacacccttt

SEQ ID NO: 183173 - DNA, 364 bp, Arabidopsis thaliana nossen
gacgattttgatgtttttttttgttgtaaaaactcttttaaatattgatttcattattatatgaatttagtagaatttttaacatagcaaaagtattaaattttgaaaaataatgataactgaaatatgaaatagatttgttttaattaactcttaaataatctaagtaaacaatagaattataaagattttgtcataagatataattattagtttattactatcaaactttaatattactaaacgttttgtccattattgcgttatgtgaagattgtgggtccgagttactaattttttcggttagatataatccaacacatccaaaaaagtatataaaagaagaaagtgcatagaacaattg

SEQ ID NO: 183174 - DNA, 146 bp, Arabidopsis thaliana nossen
tctataagaaacaaagccgggcaacttggcctttttctaagcaacataaccaccatttttgggtcacctaatggtgagggggtttcaaaagacctctccacagcaactccttcaacattgatatccatcatctgagcctctcatcc

SEQ ID NO: 183175 - DNA, 144 bp, Arabidopsis thaliana nossen
gaaacggacacgctttagcttatttttgatgaaaaattgcctatagaatagaccatcaacgcgttttgatgacaacaactctgcccaactttcaatgtctgacactgcaaaatttttctcactttgttaagcaattaatctatc

SEQ ID NO: 183176 - DNA, 250 bp, Arabidopsis thaliana nossen
ccgacagcgagggcgtgtaagctcacgtgcgtggaccgaggagtgcacctgctgtgtcaacgacggtggcggctgcgctgcgagtcgtccgtaataaacatcaccaattagaccaaaaacattcaattcaacagaacacaatctcaatgtgacgtttataagattatgtaattgatcaacatggcttgcttaaattgcctgaaccatttctttattgacttttaataatgtaagacaaacaccaaaatat

SEQ ID NO: 183177 - DNA, 374 bp, Arabidopsis thaliana nossen
ccacgcgtccgcctacagcgattcaattaatctcacgtgcttggaccgaagagtgcacctgctgtgtgaacgtctgtgggggttgcgctgctagtcttacgaaatatacatcaccaattagaccaaaatcattcaattcaacagaacacattctcaatgttacttttatatgattatgtaattgatcaacatgtcttgcttaaattgcctgatccatttctttattgactttcattaatgtaagacaaactccttattataaaaaaaaaaagtctgccgctcttgatgatccaatcttacttacgctttcatgcgacttcatatctcttttatagtgtctcctaaataaaatttattgaccgttgttttacaac

SEQ ID NO: 183178 - DNA, 163 bp, Arabidopsis thaliana nossen
ggaatccggcgacccactcgttttctgatcgttctgcgtctgtttattcgggtgattgtcaaaggttaatcaaatgggggaggtatcaaattagaggacttctcccaatcacttgcctcgttgtttgttttgaaaaagctaagatgctgtctttgtgaacact

SEQ ID NO: 183179 - DNA, 286 bp, Arabidopsis thaliana nossen
  unsure (1)..(286): unsure at all n locations
agagnnattatcataattctgcatataatacaagtactaatcataaaaatattatatattaattatcaatcgggctttagctaaacggagcctgcatcctccactttattagtccgatcacgcaaaccataaaaaaattgtgcaaatctaatatcaatctaaatactccctgcattaaattccactttactaatatgcgctacccgttacaaatctttgataaaacaatcaatccttccgagcgaaacagatgatatctcgatcgacggagaaaatggggaaatcc

SEQ ID NO: 183180 - DNA, 225 bp, Arabidopsis thaliana nossen
gaaacaatcactaaaacgaaacctaaatgtctcattcctaccacaacatatccccaaaggccctttaacaatatatcgagattgcactacccaacactattcattcacgggtagggaaactccatccacaaaactgtgtaccacgaaagcaacttttaaccgactatagctaccttcctagaccaaacttcattcgtcacaaatcttacactacattatattaac

SEQ ID NO: 183181 - DNA, 298 bp, Arabidopsis thaliana nossen
  unsure (1)..(298): unsure at all n locations
cggacgcgtggtcggacgcgtgggattttattgatttgagaattaatagttaatgtgttatttaggtaacgtatatgagagggttttgaggtttcatacgttaaattttntgcaaaaaatcagagaaacaattctaatcaaaatttcaaaacttgaaagaccgtagattctctctcaaggatcggnttgattctatttttgaaatgcaagaatctctntgaagtaatttggaatctttctccccaaattttattctgggatagcttcatatttctggctgattcatcctacttatata

SEQ ID NO: 183182 - DNA, 390 bp, Arabidopsis thaliana nossen
gaggtttgttttatcaccggttccatcttgccagaagaatattagttttgattttacctcgtataaggctgtcacagatgcatgagtcaaaattatgattgtagctgtagactttctcattatatagttgttggaaatacacttgaaatgtattgagattccttaaccgataattgtgtgaatgatgatgtgactatttacagtggctatggaattgctgcacaggccttaacggcggtgattagagctcatgatggccggggccacatacgatgcttacaagttccatcttaaaagcacttggactctcctcttcaaacgaactcatcgggtaccttctttttcaaactaatgactggtctcaaaacatatgcctttttttatttcctt

SEQ ID NO: 183183 - DNA, 163 bp, Arabidopsis thaliana nossen
agagacgcgtagctataaatcctctaaaacttaacgaaacttttcttaaaaagtatttggagaaaactaaaatattaagggaaaccacaaatacatatcacataaagttaaaaaggtctctcatattatctttatcctctctcaacacaaacagtctcataat

SEQ ID NO: 183184 - DNA, 381 bp, Arabidopsis thaliana nossen
gcagatgataacgtggacactcaaaaaaccattgaatggtttgcaataattgttagtgaagtaattaatatattaaatgtggtcaggattaggtctgacattttggtaaatggggtcccttatttgcatgtccattttgatcttcatgcacctacagaatcatagatttgtatgtgatcagtgatgacgaattagtgatatggttttatgatcattaacattgttttaatatgataaattaaagatctattttgttagtgtccattgtccatattgatcttcatgcaactacagaatcacagatttgtaggtgatgacgaattcatgaatgataataatatgcgatcattaagatggttttaatttgataaattcaattct

SEQ ID NO: 183185 - DNA, 136 bp, Arabidopsis thaliana nossen
  unsure (1)..(136): unsure at all n locations
accgacgcgtncgagcnattctnactataaccttttttcacatttccttcatctaattccctagatctactggctatggctaagtgttaccgtattcaaagctagacagatcttttacagtcgagaatatcccacc

SEQ ID NO: 183186 - DNA, 238 bp, Arabidopsis thaliana nossen
  unsure (1)..(238): unsure at all n locations
taaacccactccgacanccacaggtgcttacaaaattattgtggcttcacaacaacaacaccacaacaacatccaagaaactcatcaccacataaataaatagacacattcatacaccatattccacacaacacatgcaaaattttcaaaaaaaccaacccaaaccactacccaaacaaataaacaccccacttctgaccaaacaaaataaaccactctcataacacaacaaacaact

SEQ ID NO: 183187 - DNA, 137 bp, Arabidopsis thaliana nossen
catcacattcctcccacgaccaagctacactccttgaacaaatctatgctacggttcctaaacctacacaacacagaacaccggaatggtgatagcaagcctccccacataacggcgaaaacgtgggaaaacccccc

SEQ ID NO: 183188 - DNA, 107 bp, Arabidopsis thaliana nossen
caagaaaatcctttgaatatagataaaagagatttgatgtcttatttcaatgaacagggatatatactcattctcgaataacatcttataatatttcttagcaaaaa

SEQ ID NO: 183189 - DNA, 313 bp, Arabidopsis thaliana nossen
  unsure (1)..(313): unsure at all n locations
aaaaagattttgagaaatggatgtgtatattatataatataattatgttggntaatttattatatggatatattaggataaccaatatatcaaagaaatgatttgatatgattntatcttncttataatttaagatacaacaagttgtggttttgttcttggtatttgattctctggaaactggtaagaaacttggtgttttatgtcagtgacagtgctttgtgatcttgtacgatgataacgaaaatccaaatattaatttttaattttccatttgtttggcttttctaatcgtgcgtataatgaagatgca

SEQ ID NO: 183190 - DNA, 368 bp, Arabidopsis thaliana nossen
cgtttctagtattcaacttgcgggttagatcttactttacattaataatatatcatatagtatttgtaattatttctttttaataaaaagataaaattaataatagaggcgatggagatggataatatagttgactgattgtttaatgttaactagcgttggggacagatggatccacacaactcgactcaaaaaattaatgcctggtttacgaacgtgtctttcttgacggaccccatgctttcattgtttggacatagatacttacttttgattccatattccaattttctaatctattagtaaatgattacgtttgtagaggtggtagctgatagatggcttcaaatgtttggggcaaacttaag

SEQ ID NO: 183191 - DNA, 132 bp, Arabidopsis thaliana nossen
  unsure (1)..(132): unsure at all n locations
gaaacttggggaagaacccacgcgtccggnaaaaattgtgagaggattcagaatgcgacgcgaatcgagttccggtggaagaagagagccgggaaagaggagaggagggaagaggagagagggaagagagag

SEQ ID NO: 183192 - DNA, 217 bp, Arabidopsis thaliana nossen
  unsure (1)..(217): unsure at all n locations
ggggggcgtnccacacgtccgaaaaaacacttaaccaccctttaaatacccaaacaaaaaacaaactgaatcgcaaaaattttatggcttggcaaaaacaaacacacaacatcccatcatatcatcatatcatacaacccaaactatacaaaatcacagacaaacttgtacataacctcaacatgacccacaataacacactacacaaacaacacac

SEQ ID NO: 183193 - DNA, 489 bp, Arabidopsis thaliana nossen
  unsure (1)..(489): unsure at all n locations
cacgcccgtccnngtctaaacccaagcttnnactccgnngatatagtacccgagccttnncttaaaggggtcaattggatgtggacgctngnngcatcactttgccgcganngatatcncnntaaagggannagtgataccccagctaannntttttggagaaaatgccctatacntnngcagcnnccacnannttctngcnnngagatgnnntatgcctnncttcnntgtgtnntttgaaatattananncggacangcntacnncttcngnntttcccttcnntgaggaacccccggtgnnnggaaagnannaataacncnntttnnnaaagaagnntgctttnnntgaataannnttgccannagaaggcanntttgaaaggggtgctggcannnaattgaagggggaagagatnncagacaganntgactaatcnncagaccaagannaatggaaaagannatggataaagggagannaaatggc

SEQ ID NO: 183194 - DNA, 240 bp, Arabidopsis thaliana nossen
ctcaaactaaatcttacctcatcgactgacgaccgagccagggggaagcgagatcataagttatttgtgatcccatactcaacactcgaagaagcgtatatcgcataacgttataacctctcattgccagagactttcaggtacatttacgcagccagcaaaacgcattactactacttacttgccagaaatcttaaaccgtctctacaaaccgtgttccgagccagatacctctctttc

SEQ ID NO: 183195 - DNA, 270 bp, Arabidopsis thaliana nossen
ccacctccaaactttccttcccttatttcaaacatctgatcccacggggggcataaatttttgtgaattaaacaaacaacaccttctaagggtattcactaggaaggaatggaaccagatccatagagtgggattcgacactaagataaaaaccggaaagagagaaataacaggattgctacaaccaccttaatccatcatcactggagactacgccggataagaacgcacgaagaactccgcccaaaacgcgtgagattggaagaaaaa

SEQ ID NO: 183196 - DNA, 210 bp, Arabidopsis thaliana nossen
  unsure (1)..(210): unsure at all n locations
ctcaaactaaataccacctcatcaaccaaaaccancaccagaaagaagcgcagatcataaactgacatcgttcatcccaaacacaacactacgacaaacgcatatcaacataacctcaaaaccccaaaagcccatacaccctcagaaacaattacaccaccataaaaacccattactaccacttactgccaacaaatccaacacccacac

SEQ ID NO: 183197 - DNA, 165 bp, Arabidopsis thaliana nossen
ccagcgtcggagagtggtaaacattgtaaaacagagctacggagggttctggtcgtcttagtgatggaaatatacagatcaaatgggttgaagaagaagggggagggcagggggagaggggggacaaagggagggctgggggagagggagagagactgggggaaa

SEQ ID NO: 183198 - DNA, 350 bp, Arabidopsis thaliana nossen
  unsure (1)..(350): unsure at all n locations
cacgccacgcgaaacgaaaagctttctctacattttttaaaaacacgcacactaacacatttggccttctcaatttttttgttatctaancaagcttacctgactaaatctctttggactccttcttgcgttttctatttactacacagaccaaacaatagagagagactttaagctatataaaaaaagagagagatactctcaaatatgggttagtccacaattttcactaaacctcttcttcttaggattgtttttaggattagggttttgaggtgaggagagcaagtattcaccagtttcatcctttttgagttactctggattcctcaccctctaacgaccaccac

SEQ ID NO: 183199 - DNA, 369 bp, Arabidopsis thaliana nossen
gacccacacgacccaaaaagaaaatcttaagcttttcattacaccccaatacaacctgcagggtgcgtcacaacattatagggggcacaaaaacacacccacaaggggaccctacacagcaacagaacaaacgtaaccactacaacctcaatgctcacacacgccaccgaaactaacaacagtgaagccacaccagatctacacacagggaccacaaccacaccaacaaacacactcatgaattcaacaagacacgctataaactccaacaacgctctcagttactacccacactcacacacataccgaaacatatacaacgaaacctaaaaaaacggaatcagcgcaaagaacccccctgtatctgcc

SEQ ID NO: 183200 - DNA, 330 bp, Arabidopsis thaliana nossen
cacaaagaaattggtaaagcttatcatacttctagatgcaacctgcggggtgctactggtcattatcggctgcacggcgaggcacctactagtggttactactcatctacagaacaagcgtaaccactaacaacctaaatgttctgcacgccatctaaactaataagagtgaatccacacccatctgacatcagggaccacaaccacactgcaatatacactgatgagttctacaagactcgctatataattcaacaactctgtcgttactatctacacttacacacttactgaatcatagattacgaagcctatagtaccggtatcaac

SEQ ID NO: 183201 - DNA, 368 bp, Arabidopsis thaliana nossen
gcgaacaaagaaattcgtaaagctttttatacacctcgatgcaaccggcggggtgcttctcatcattatcggctgcatagcgacgcacccacaaggggatactacacatctacagaacaagcgtaaccactacaacctaaatgctcgtaccgccaccgaaactaatacgagtgaagccacacacatctacaccagggaccacaaccacactgacatacacactgatgagttctacaagacaggcgataaacttcaacaacgctgtcgtgactatccacagtcacacacatacgacataaatagcactcaatccattatttcagaaatcagtgacactaaaacaagttttattgacaataacaatacca

SEQ ID NO: 183202 - DNA, 357 bp, Arabidopsis thaliana nossen
gaccgaaaggcttaataatatttcagacatacgaatgtcaagaagtcttgggctactacatacatacatggcttcctttattaatctctttattaaaacattctttatgattattaaggatgtggaagttgtgaagaacaatcttattagcgcacgagacccaagttcaagataccccaagaaacatcaggccaagattgatcctgtgacttcatgagaagaaccctaacccaagcaatccagccttcccatgacattctcttgtcccaaggacttccccattgcaagagcagaagaagccctttctctgcctctctctctgcttctttgaatctcttctttcccaagtacacttga

SEQ ID NO: 183203 - DNA, 400 bp, Arabidopsis thaliana nossen
  unsure (1)..(400): unsure at all n locations
gaccggnacggaacgggcgggtcgacccatgcgctttattataatatagatattggacgttataaattactatagtagtacggagtggttttgaagtttatacaaaaggaagcgtcaagaagtggagcagaagcagtttgaaactatattggggaatggggattattgatattttaatcatgtttgattccatggaatgttgtgaatagcatatgcgtgttgcgaggttcttggcttgaatcgattaaccggaaagtaaaagctttacagatttggttttgcaatttctatattgtcggacgctgagattcgatagatatttcagttcaaatgtactgaaaacaaactaacacttgtgtgtgaaccaaatcgaaatttattttcataattttaaaacctg

SEQ ID NO: 183204 - DNA, 228 bp, Arabidopsis thaliana nossen
  unsure (1)..(228): unsure at all n locations
accacanaaaaanctaccaaaacacaaccccaaaccaaaaaaccaaacccacacaccaaccacactcacacctatacccancaccaacaccaaccccaatcaaaatctaaacacacaccttaaaacccatcacaaccaactaccaccaaccaaaccacacacatcaaaataaaccaaacacaacccctacaaaaaaccaaaacccaacacaaccacccaacaccccac

SEQ ID NO: 183205 - DNA, 345 bp, Arabidopsis thaliana nossen
ctactctctattatcctggctgagagggtaaaagtcatgaataaactggagagagaattatattcttgcgttgtcataaaaaagctcttatcttcatctaatgaaacactttccttaatgggtaggtttaaacgacctcaacgagatggatacagatgaagactaaacgcaaactcagacaccgcatttaacttcatgagctggctctactactacgaataatacaacttgtatgtctggggtctctactaattatggtcgtagacgtgattgatatggagcgtggttagtgcacacactagacccattatgtttcataccacaagaggaggccatatacacgta

SEQ ID NO: 183206 - DNA, 108 bp, Arabidopsis thaliana nossen
gataaggcaaacattccaatcattgatctatgggacacaaccactggaggagaactggagacattggtatccagacacaacagggaaagcacatgtacgtgcctctat

SEQ ID NO: 183207 - DNA, 392 bp, Arabidopsis thaliana nossen
  unsure (1)..(392): unsure at all n locations
gggggagctatgcgtccgggtttgctttgcagtttggtttaatgtttgggatctctctngnnnggggtgtggcacatggattttggttggtcttaatctaantttcctcattggtttttgtaatctttcttttgagctgaattaggaatctgctactgataggtttggtttgttaaagcgtttctgtttattactgatcatagcaggcttgcttagcctatctgtataagttttatcacatagatttgttgccttaaggcttgcttagcctggcgatttattctgttgacactcttaaactacaggctattgagagaagaagaggagctgggactggaggagacgatggccgagttattgagatcccaactcatcgacaagttggtgttctt

SEQ ID NO: 183208 - DNA, 235 bp, Arabidopsis thaliana nossen
  unsure (1)..(235): unsure at all n locations
caaccaacaaaccaacanncaaacaaatttaacaaaccaacaaataaccaacccaaccattacacacccccaaaataaaaaaaaaaaacaanctcaactacacaaaaacaaccactacaaaaaaccactctctcaacaaccacaacannanacccancaacaacaacaacaacaacaaaccacccctttactaaacacaacccaccaaaaactacaanaacaaaaaaacacccca

SEQ ID NO: 183209 - DNA, 271 bp, Arabidopsis thaliana nossen
atacttgctaaacctaataatgtgcgcgacacacattacgagcgaggtgcgcatcatacatttgcttgttgatcaaaatctgtaccagaagaagctggatagcaagatcctgcactatcaactccaaagacaatagctcatgaccttgacagaactcgacgaaagaaacgagagactgcatcacatgaacccgattgataatgctgaagagcttccttctattgtatacacttcatcaagtggaccatcttaccacacatggcgaagcttt

SEQ ID NO: 183210 - DNA, 240 bp, Arabidopsis thaliana nossen
gtcgtttgggttgtgcgtgctatcttctccagcatggctaggccccgtggcccctccgacgaataagagagagtccgaagagcggataggagaacacgagagaagagccctgctcacagaagatctaggactgagacagatgatcctgctcgtcgcgtaaggctttgtgatcaagctgaccgcaagagctcaccacgagatcttaagattgcacgttctgaccataatcgtgaggcacgc

SEQ ID NO: 183211 - DNA, 375 bp, Arabidopsis thaliana nossen
atgcgcgcgagaaaataacaccagcttataaattacgcttgtcaaaaagacatcagggcaggactcggtatctgtttctggtgcatataacggggaagctttgggaggagaggaatctacagttttcgatcgattatggcttgttgcgtgagacattatcatggatctagctgttagcaaaaatgtgtgcatataacaagttatgttgatagctgcttgtttctcatatgaggaccacttaaattatcccaaaaagcattacactaaacttgatgactctcccatgttccgcatacagttacaaatcatgtatgagagcgcagaaatattgcgggaaagaagtctcaagttttacaaatgatgccagaaatacac

SEQ ID NO: 183212 - DNA, 373 bp, Arabidopsis thaliana nossen
  unsure (1)..(373): unsure at all n locations
aattgttaggatttaaatttaaatccggttttcaaaaatgatcaaaggaggcagttaaaatgatcatgaagcacatgatttatagtgatgattttatcttgaatataaaagttacaactattttctcttgttgcggatttcactatcatcgaaaaagaagtttgcaaaaatattcacatataacaatnnnngttgttaggtacctaattttcatgtatttaccactagaggtgtgctgagaaggaaaaagtggaaaagtaaaaaagcagatgagagggcttcagccttcaacttcacatatattcgtcaaagcagaaaataaaggggacaacttcagagaatataatttgcagattttgaagccttattatgt

SEQ ID NO: 183213 - DNA, 376 bp, Arabidopsis thaliana nossen
  unsure (1)..(376): unsure at all n locations
aaaaaaaactcacctttaaactcatccataagtatagcttcaagagctgcaatctccatttcctgctcctgcttatactctacaagagacacatcataacacccaataattctcaaatcaatctgtcagaaatcaagatcaatcggaatctaattactctcccatctaatgataagcttaaggaatcaaagattcgatgttaaacgaagaaattaagaaacttttgaagtaaattgatcgaactcacccgtcatgatgaccaaatttgacacctttgtcgtggaagcttntgagattgcctgaatatcgaactccacagtgagagtcgcctcgtgaccaagagcgacgtttacgagagattaacctaaaggagaga

SEQ ID NO: 183214 - DNA, 88 bp, Arabidopsis thaliana nossen
  unsure (1)..(88): unsure at all n locations
ggccggggnagacgaaccaagccnacnctcaccttcactttttgtttctatccctccatcacncncgggtagggtcaaanttttggtg

SEQ ID NO: 183215 - DNA, 139 bp, Arabidopsis thaliana nossen
ccctaccctacatactacaacctcactctacttctaacaatactctaaatcacctaaacgctctaatacacctacaaaaaatccaaaaagaacacaatgacactaatccaataaataacctaatataacataataacaa

SEQ ID NO: 183216 - DNA, 279 bp, Arabidopsis thaliana nossen
  unsure (1)..(279): unsure at all n locations
cactcgtccgctctnaacctttccccccacctctactaactaaaattttcccaaaaagcgtagggtncaaccttcttatattcagattaatcccccnccnnnnnccactnatcaaaaaacctacctaaaccccccccactaacctcactaccacttttccccttcaccaatcccattctaaaaaaaaatccctcccaatccaaataactactccctcttctcaacaccaaaccaaccctaccctcccccattccatactcaatcactccaaaaccaccc

SEQ ID NO: 183217 - DNA, 332 bp, Arabidopsis thaliana nossen
  unsure (1)..(332): unsure at all n locations
tccgtccaggtttccatagagtgaatctcacttcaaggggatcganntgatgggacccgcnnactggaatcgcgatgggcccttgcgagtatttcagagttgtgttgaaagagagcagagaataggttagaggtaccttagagtgcttcgatattcattcaaancctcatcatnnccgacttgtaagaaccgtgagggtttaaaagtagaaggaagggagatannttttcgcagttccacgagttaccatccaatatggctcaaatatgtctttcaacaatagactcgcttagtannttcgttggagtttaccttatcttcagctatagaat

SEQ ID NO: 183218 - DNA, 241 bp, Arabidopsis thaliana nossen
  unsure (1)..(241): unsure at all n locations
ccacctggctgngctactcatatctccgatatcatcaaactccatcacacgactttaacaccgctaggcttactaaacaagaacgacatttttccacacttccaccttctcatccaatgactcaaacttctctcaacaataactccctagaatactttagatttaccacttctgccactaacaacaaacctcacttcttagccgatcaagactctactcattccatgcataaccagccacc

SEQ ID NO: 183219 - DNA, 464 bp, Arabidopsis thaliana nossen
  unsure (1)..(464): unsure at all n locations
gcgatcccactgcgnntccgctccnnatttctctnnatctttctctttctcagctgcnnttctcgannnatcttctagtatcgatctgtcttnnncttcttcaaagtagataaagatggggcccganntggtgagagaatatntcaagcccacccttgtnnctgtgacccaatggaacctnnggaataggtgaagagccctggttttgctaggtgaatgaatagccccgatgagccagtangttcccaaagtatttggttggtcagtccctagagcaccacntaggtgtcatagagttggtatagggtcaagaaaagatgcccttacgttggtgaatgaaagctcaaagtccaagagaagagtatcctcactttctgaagtattcccaatcgaacatggtatntgtaaagtaaccctgggatgacantggaaaaagatcttggcatcacanctttctacaatga

SEQ ID NO: 183220 - DNA, 382 bp, Arabidopsis thaliana nossen
  unsure (1)..(382): unsure at all n locations
aggttccataaaaaacttggtgttgccgacgtgttgccgagtaaggacacgggttttgtctacatattggtgtaacggtccntacaataatgcgttttcaataattaactaaaggttttttggacatatttagtggtgggttatcatcacttagcatgtattttaacaaacaattaacttttcaatgaataaaccccttaatggccaccttaaactcaaagcccagatcagaaccaaccagattttgccacgtggctctggaatataacaatcaatttctaaatgtcttcttttgaacccaaagaaaggctttcacactcagtcagtactcacacaccacacactagttcattttattttccatatacatgctctatagaca

SEQ ID NO: 183221 - DNA, 353 bp, Arabidopsis thaliana nossen
agcagtaaaaactcagatagtctcctttgacctcattaagaaaagcttttaataaacgtatccaagaaaaaacaacactcgatctctcttttgttttcttaacttcactttagttactttttttcaaatatagttcatccgtatctggataaaattaggattgtaaaattacgattaacaagaaagaggtatatttttagattaaacttggatagtatgagtatttaccagccaaaaaccattaaagaaaaagatgacaaattgattatccaaacaaaagcagactctataattagccaaattaattaactaaagtttccacggtcacaacaaaatccactttttcaataatt

SEQ ID NO: 183222 - DNA, 274 bp, Arabidopsis thaliana nossen
  unsure (1)..(274): unsure at all n locations
catcccacttttacccaaaattttccttccacacaaacaacnncncaaaaacagtaanatacatatttgttaagtttcccacctcccccacaaaactccaacaaccaacgaaaactaacacccaaacaccctaacacactcacacactataccacacactaaatcacaacacaacacaaccaccacaaagaaaacaaaacaaaacaccccccataccaaactactctctaaccaccccacaacaaacaacaaaaaacccacacaccaaacaaac

SEQ ID NO: 183223 - DNA, 326 bp, Arabidopsis thaliana nossen
cggacgcgtgggcttttttgggtgaagaaagcaaacaagaccttgtaaagattgtaagaatcatctgcaatggacccattactaccatccattatcttttctgaaaatgaaaatgacaaaaatatttatctttaaatttaataccaagaaaaagaaagaagtttcaagaagggtcatcatcatcaaaccatttttggtattaacaacagaccaaacccgattcacctattttaacccaacctccaccatttgaaggctaaattcttattaaaaacctaaagctttgggggttcttatttagaaaaaaaccctggaatttttcaaaa

SEQ ID NO: 183224 - DNA, 374 bp, Arabidopsis thaliana nossen
  unsure (1)..(374): unsure at all n locations
cggacgcgtgggcacgaatattatgatattttccatgtttcacagttccaatatgaggctcttttctatttttccaatttgtgatatttagacaacaaaatagaaatattaatttctagttatagagctactatcaagaaatccatcgctcttataatccaataattctataatcacttttcaaattttaatcattaatactttattccaacaactattgagctcacatgatcactacgctggtttttcaattntctcattgaattattttttgtatcaatgttaattatttatatcatttttaattttgcgactacataacaaagaaaacttaagatcccacactttcttgttacctacatggttgatcatga

SEQ ID NO: 183225 - DNA, 161 bp, Arabidopsis thaliana nossen
  unsure (1)..(161): unsure at all n locations
aatcaatcccccacacncacacaacaaaacacaaacatcaaccaccacttatacaactactatcaacaaatccaacactcttataacccaataacccaatanttnccctctcaaatctctaaccactaaaaccacatccccaacaactatatnaacacaca

SEQ ID NO: 183226 - DNA, 291 bp, Arabidopsis thaliana nossen
  unsure (1)..(291): unsure at all n locations
gatttttgacgactacaaaaccctatcgagctcaactggcattgccgcgctcttctgctattcttaagactnatatttctgcataccactagggtagctttcgttggcgaagaaatggatatggatatggacacttcccctagctactttcacccctatgccctcattgttagggaatcaattccgtcgcttatcaaagaaacactctacattcccacatgaagaaatggtgaattcaaatgtcaacgaaaacatattactgtatgacgggcataacattcatagtccaac

SEQ ID NO: 183227 - DNA, 375 bp, Arabidopsis thaliana nossen
cgcctacataattcgagccggatgcttctccagtcaattggacgactaaaatgttgttcctgacacgattctggcattccctgtgaaagtcatcagttatatggagttgattcttcaacgtagctaacacaccatcgcggtcttttgccaaggaatgactgaatgtggcggcaagcagagttgcttcgtacgctatcttcctcttttcctctgcagactcctgttcgatgttcaataggttcttcacatcatcactgatcatctataagcattttaagaaaacaaattttcagagaaagaacaattaattagctacgaatcgaatgtaaaatttaaattctcaataccataattcgaatgtaccttcttttcacc

SEQ ID NO: 183228 - DNA, 284 bp, Arabidopsis thaliana nossen
cgagaccggccggtcgggcacctcgtcttataaactactttttttttaatccaaacatgcagggaccctcttttttggggatatcccctgttcctaaacgatgcttgaaaacaaaaacaacatccacctgcaaaaacatgtatgaataaccccaattttactcaaaccaacctcaacaacttctggaagcggcttataactgtgtaacttggattgtcacccgggatactgtttcatccgaagactactgggcttcattactgaaggtcaagagaaaaagatca

SEQ ID NO: 183229 - DNA, 220 bp, Arabidopsis thaliana nossen
  unsure (1)..(220): unsure at all n locations
accttaccatcaaacaaaccttttttatttttcacaaaagccaaacaataccaagtggccaatacaaattattggaataacaaacccaaaacnacaaccaaaaaacaaaagccccagaaaaccacaaacaacgaacgaagtcaaaacctcagactccaaagaacctaaccccacaccaaccgatctaagattacacaaaaaccaacaaacggtccgttaa

SEQ ID NO: 183230 - DNA, 209 bp, Arabidopsis thaliana nossen
  unsure (1)..(209): unsure at all n locations
aattatanaaatttgttccaactcttttcataaacaaagacaaanaaaggctcgcgtaaaaaacttttgtttcgtaaaaaacacttccaaagaaccggaaaaaagggtccaattggaccaaaaaaagagcccctccaaacagttcttcctcaaccaaaaaaaaaggccaaacctatatccaaaaaagggacacaaaaaaatactcttag

SEQ ID NO: 183231 - DNA, 376 bp, Arabidopsis thaliana nossen
cccgaagtacgtaccatttacgccggttaaatatttcagtattatgaatctatgatttataatccattgggcctctatagatttagcccaaataaattgtaaacagtttgggtttagacacgagagccgtgtaatttttgttgagttgtgtataattaattatttggtcattgtcttattatatagttttaaggaaatcaaaatgaaaaattaaaaacaaaaatgggaccagaaaccattcaatcatgtgattgagaaaagccagctgttttctagtacgaaaaaaaacaagcttcatcttttccatgtatttttctttctttcttttctcaagaacggtgaatccataacttataattgcaaggattaagagatt

SEQ ID NO: 183232 - DNA, 198 bp, Arabidopsis thaliana nossen
agaaaaaggaccgttccaagttggtgatggggaagcttcttcacatctggaacttattatgaaaacatataattaattatgaacgattagctgtttaagggctataaaatcagatgatcgtttaagttttatactagcaaaaaatttcatcgatacaatatcaataaattacacaatttggaggtcgataccacaaaa

SEQ ID NO: 183233 - DNA, 100 bp, Arabidopsis thaliana nossen
ccccaataatcaaatccaacaaccccacaacaactggtagtgtaacaataaaaatgtttctgcaaaaccaacaacacaaacaaacaaaacaacctaacac

SEQ ID NO: 183234 - DNA, 347 bp, Arabidopsis thaliana nossen
cagagatttacagagatttgctccaatattttctataaatatcataattgatctttagttccattcacaacatccaaccattccaaaattttctatacatttttttctttttcttaactataatgcctcgttctactggatattctaacgaagaagataagtttttatgtcaagtttatatggatatttctcaagatccaatcatcggtgtttaccaatcctctgaccatttttgggatcgcgtggcagaatctttcgaaaatagaaaaaatccaacttggagtaaacgttcaaaaaaatctctccagtgtcgattacaaactattgagaaagctagcaaaaaatta

SEQ ID NO: 183235 - DNA, 317 bp, Arabidopsis thaliana nossen
ctggtctttgttcacaggaaaaacgtaatggaaaacaatgagtccaagcaagaaccagactccgcagatgatcaaaagaccgctccgttgatcgaagatgagatctgtaggagcataagtctgtatcatgagagctctctgtgacctgcaagatcctgaaactaaggaggtgtgatgatctgatgatgaggaggtttactggagctcgtgacctgacattgaaaaagctttaacgatgtttctaaattatctgactgtgaagagaagcattctgatccatgggcacataccacaagcccagattgataatgatctat

SEQ ID NO: 183236 - DNA, 377 bp, Arabidopsis thaliana nossen
atcgagtttttaattcatgaccagaatttcttgtataaactaactactcgtcttgtctcccacgtaatagaccagcagggtgctatgattataccattccaaagaaacccataatgcactttggtgggttgtgtagatttatatatggtattaagttaatgatatgttttatgaaaaaaaagagagttaatgatatgttaattaagtgggttttgtttatatagttgttgtgtacatttatctcaaatattcaaacatacatatatgatgttttgtacaaaccttttttaaacgcatttatttaaagagcactaaaacatttgttaatacaacatttggcaaaccctgtagaatctcttaaacaaaattacaacttt

SEQ ID NO: 183237 - DNA, 349 bp, Arabidopsis thaliana nossen
cgagcacagttacgagcgaccaatattttgtttttttttgttaaagaactagcgaccaagagtgcaagatcatgaaactatacagaactaaaatgatatagaattctttttatggctggtttacgctaaagatgtgcccatgaatgaaatctataatttatcaacaatccataatgcgttgtgttaaaaaaaaaatatatgtgattcaggcttctccaatgtgtattatgctatgcatgttcacgacaccgcaaaaacactctacttgagtgatatggaaataagtatttatctatattatatatgatatttcttaaagagtacttaattatataatggttttggatat

SEQ ID NO: 183238 - DNA, 124 bp, Arabidopsis thaliana nossen
  unsure (1)..(124): unsure at all n locations
gcgggatccaaaatccttttatatttcacaacgtnatattaatggagggtttattaattttttggtttgaatactaaatnaatattactttatagaaatctaaccggattttttatcccgccga

SEQ ID NO: 183239 - DNA, 362 bp, Arabidopsis thaliana nossen
cttttgcacccatattttcactttgaaacccatgcacactgggcacgtgcgacctacttagttttttgggaccaacaacccaagacaattggattgtcttctcccgccacgagaagctacctctcatgtcattgccgtactatactttcagccaaaaaataactgacacacgctgaaatggatagatccaaaactgatgatacaaagctgaaataccctatggccaatcacaacatcacaccatgaataacaactctcctatacgcgatctgaatgccaacaacacctgataaacagacaaacacacctaaaccaaagacactactttaatatctcaccatcacttgacctgtacacaactc

SEQ ID NO: 183240 - DNA, 378 bp, Arabidopsis thaliana nossen
gtaatgaatgctacaaagaagatttaaagttaaacaaatttaaatcatgaaatcgaataattaaataaaatacaaagaaaaaggaaaaaaaaataaaaaaaaagggagggagacaagatgctgcgatggttcacgtgccaatgtgccttttacttttcatcaactagttttctttttaattattaataaatcaactcaatttcgcaattttatagttagtgacgtcacttctctctcctcacagagtcgagtttctctcctacgctcttcatttcatttcatttgatagagagagagagagagagagaaagagcttcgtcttcttcatctccatcattatctccattgacattgttctcaattgcgaataataatcat

SEQ ID NO: 183241 - DNA, 373 bp, Arabidopsis thaliana nossen
cttttaaattgttagttcacttacattaaatttacctaattttgattggtcagtattgaaatttgatgtctttgttcttcaggtttcctttgtgttatgcacagtacttggattagtccaattagttgcgtatgccgtgtattacagatcgactcagatgtttgatgagctcggaatacaattatggttgtgtgtttgcttttggttttgagttatgtgcgtgatttgttatagatatttgtatttttgtgtcgatcaataatgaatgagtcacatttacagacataaatatcagaaaaatagaacaaatacacacaaatgcaagaaaaaaaactcccaacgattgaaaactaacgatttaataaatatagtt

SEQ ID NO: 183242 - DNA, 201 bp, Arabidopsis thaliana nossen
  unsure (1)..(201): unsure at all n locations
caacnananaaaattaacaacttaaaaaccgacaaaacccggggccctgaaaaattttaagatcttcggaacacccaaccnaaaacccacaccaaacaccaagcacaccccgcacaaaacagacaacacacacataaacaactgaaaccaccccatcccaaaaacccagaaacggcaccaacaccccacaaatagcaacaa

SEQ ID NO: 183243 - DNA, 361 bp, Arabidopsis thaliana nossen
  unsure (1)..(361): unsure at all n locations
cctaaaataacttttacttctttactataactacacagggacaggggattctctgttctttgtgatttncactcttaacacgtatctgctatcaacaactccctattctaagaaaaatgacgcatcataccaagttgtcctatcaaatcctaagagcccacctaccaacccactcgaatcacgctttgaatcccaccaagaaaaaaccatatgaacttctttgactcactacaacaacaatctatcaagaaattctcgacataccaacctctttctcatccaataactacttgcatcctcaatgactaaacacagatacctatttgtactccaccacaaaacataactggcatatccgata

SEQ ID NO: 183244 - DNA, 368 bp, Arabidopsis thaliana nossen
gttgttctttaacaggatcgatcctttgatgacgaggcgaccaattgtgttgaattgattctagccttgggttcgaaccgacgtggtgttatttgattattatatttggtttcagtgtcatacactctacacgagcctccacttcaaatttaaaataacaaatctttgttaggtcataattgtctagctaatataacaatgctactagcagaatgtatgtactacataatcagattttatatattcttgatattctcttacagatttttgataacaactgattatatgtaatatatgaagtttagtgtcaacgaaaattatgataattttgttagaatcttgaaaaattaatacaagttatttacata

SEQ ID NO: 183245 - DNA, 209 bp, Arabidopsis thaliana nossen
tctcggcccgaattcccggggccgcccaacccttccgggtggccccgttaatttttttttggcaaccccacggatctctcttcgaatctgctagatctggtccttttcttacatctgtattgggaaacctctgatcggaagggttcgtttacagatctaccgatacgagtttcgcagtatttcccagttccgacgtatgctttggtttc

SEQ ID NO: 183246 - DNA, 383 bp, Arabidopsis thaliana nossen
caaatcttagtggagagagagagtgacatcttgtttatattaccaaggcattgaactcagtttatcgaaatgctccaggatgaacatgatacaagcttgcctcagcgacatcgcatggaatgcttctgatagctcgtacatgtctcctatactttccaacgtaatatcctttcatattcaaagtaaccgtgtcagatttcgttaagtactacgcaaaccacatcatcactttacattgtgatataattctggctcacctgagcaattgtgtattcacagagtcgtttcaggccctccaagagatactgatccgctgctcttagaagatcttttgatatctcatttgttatgtcgacagatccagtgtatataaacctgaaaat

SEQ ID NO: 183247 - DNA, 361 bp, Arabidopsis thaliana nossen
ctcaaacaaagtgaaacattcagtgaggcaaagtaagatcgatataaaagagtcgaattgttcataatggtcttataaatgaaacatccaatgatacaaagtagaaaaattatagagtacaattttaatcatcttatattattggttgaaacttaaaagataaagaaaatgataaaactaatgacgcaatggaggaaacttgccaatacaaatgcttttgaagattctaataaggtaagctctgccaggataaataagcaagaggcacgtatcattaagtgttctcactgccctgcaacaatctctatttagccatcggaaatctgcgtcgcctgccgctaatctcaatgcatcgaaacat

SEQ ID NO: 183248 - DNA, 339 bp, Arabidopsis thaliana nossen
gacaaggactacatgcttagtcatagaacagggtcaacagaaccgtctatctgtgacaggttcagcttttagatatactctgctcgttaaatcctagtatagcatctgcttacaatctgagctcgttcaacacttagttcccgtgtttccagttttagacaatggtggaaaatggttcatccaggtttcagaaaaaatatggatagaaatgcaagctagatgtcagaaagtatatcgcacatgcttatttaagtaacaccaactctcactgtacaaaactaggtagggagatatgcaaagtagaatttggaagtctgaccttcctgctgcttgatccac

SEQ ID NO: 183249 - DNA, 305 bp, Arabidopsis thaliana nossen
accgtccggattgtggtccacgcgtcgacggactatctctagtttttaacagccaacagaaccgcggtgtggacagtagttgtggatatacttctcgtaaatcctatatagcatctgctacatcgactcgtaacactattccggtttcagtttagacaatgtggaaaggtcatcagtttaagatatactgtgaaagcagctaatgcagaaagttaccgacatgcttttaagtacaccaacttactgacaaactagtagggatagcaagtcaatttgaagttgacctctgtgttgaccattcttat

SEQ ID NO: 183250 - DNA, 354 bp, Arabidopsis thaliana nossen
gacgagtacacacccatcgacctttttggttcaccggatccagccgcaatccgagcaaagaactagagttgaaaagcaacgaggaggtgggtaaatcggggcacaacaagattgaggatggacagatggagcaatttgggttggcgaccgactgtcaccagagatgaaaatagagaagcggcgccaagagaaaaagggtttggggtggagaggggcttgagagtgttttctctcacctctctctgactttacgtctcgttttgggtctgaaagctattcataagctgttgagggtaattgtttttatagtgactaatcccaccccgaaaagccccgcatccagaaaaatcccat

SEQ ID NO: 183251 - DNA, 268 bp, Arabidopsis thaliana nossen
cccgtaccggtcgaattccgggtggccaacctccctgatcatcaaacatgattactgtacctccagctgatggctgtcttatcattgactcacactgagtttgagctggtatctctaagaggcagacccgtgagcacgctttttgctttacccttggtgtaagcaagattgctgtgacaagatggagcaccaccccaaatactcaggctggacgatgaaatatcaggagggtctcatactgaaaagggggatcaaccctacaaatcca

SEQ ID NO: 183252 - DNA, 186 bp, Arabidopsis thaliana nossen
atgcgggagaaacggcaccctttctttaaacagaaagaaattaagagtttaatatcccactttgtgaagatactgattaatacctttattctcgcgccacatgtaacttctatttaccaagaggacctgagttgccaatttttatgcgattgccttaataaaaccaacaggtgttcctcacccatt

SEQ ID NO: 183253 - DNA, 359 bp, Arabidopsis thaliana nossen
aaatttttaattataatattttgtaatattatgatataaactaaaccataaattaaagttaaaatcttaaatgaaagttaaaatctgaaattaaattaatgcgattaaaccctaaattaaagttaaaatcttaaattaaatctcttaccctaaaccctaaaccctaaactcctaaaccctaaaccctaaattaaagttaaaatcttaaattaaatctttaaactctaaattaaagttaaaatcttaaattaaatctttaaactctaaattaaagttaaaatcttaaattaaatttctaaccctaaaccctaaaccctaaaccctaaaccctaaaccctaaaccctaaaccataaactct

SEQ ID NO: 183254 - DNA, 358 bp, Arabidopsis thaliana nossen
ctgtaagcgtttaaagatcttatatgcaggaaagtatcccatctgcagcgtcatcgaccgatcattcgcgacgtcattggccttgaattctggaccgcgattgtcaatgaaagacacgtcatatgttgaagaacgtgtgggatcatctccaaagatgatgctttctcacttatcagctgccgtggtgtcttatgattccggaactggttagtgatttatgtgcgagtacatacctaaaacagtattttaatggggtcactgagaatagcaccaaatcatgttgcctctcattccctttgtgacagctggcgtcgtaccaaagatgcccacaccgctggcctcaaataccaataaataa

SEQ ID NO: 183255 - DNA, 352 bp, Arabidopsis thaliana nossen
gataggtttgcaggtgagagggaaacgggaaatggtgggagcgacctttggaccactttactattgttggagatgattggctctcttgacaatggaggttctagcgctagtgggagtggtggtggatcaagatcccacaggtcaagggcatggaggaatcatcggcgttcatcttcagataggccgtacctttggggggagaatctattgggtctacaagatgagcgcaataacaacgatgatgaagagtttcgtttgcagaatgatgcaagcggtgcttctactcctgttccaagaagaagaaggagatttggacgtcctagatcaagcggaaatcatccgcgataagctg

SEQ ID NO: 183256 - DNA, 81 bp, Arabidopsis thaliana nossen
tgcgatcgcacacgttcaagcaagcgaatacgcggcacaaaatattactgaaacacaaaccataccgtctttctctatgac

SEQ ID NO: 183257 - DNA, 356 bp, Arabidopsis thaliana nossen
gtgaaccaagacactgcatagaaatgagtagcaaaatgttcaagcaagccaataaggcagcacaaaatattactgaaacataattcatcttgtctttcactatcacaaaaggaaatgaactgtccatctgcttaggaaaacttaagctactgcaaccagattcctgagaagaggaacctatcaaaaaacttgatatttaggaaacatccgaccatatctgtatagccctgtctgaatctactgtatatgaaattacacaagcagagatacaataaataaataaaaacctgtggagggtgtatagattgcggacactcttgtctgcatcaggggataaatatcttccatcttctctg

SEQ ID NO: 183258 - DNA, 95 bp, Arabidopsis thaliana nossen
tcgcccacctcgtaacagtctggtttttcgacgccctgagcaagataggtgacataggcggcgacgacaacctctttgagtgaaaacgccttctg

SEQ ID NO: 183259 - DNA, 158 bp, Arabidopsis thaliana nossen
gcgtaaacatagaggtcgtcttagtgcgatcgctagagactcgccatattcgttcatttaaagactgaatgctcatctattttggttgacggcgccaagggaggcatcgccccttacggtagatttcatcaatgaattgtcagtgtagctagacaagc

SEQ ID NO: 183260 - DNA, 371 bp, Arabidopsis thaliana nossen
gaaaaatgctagagatcctctgtgtgtgttttttttgttctcttcataattttcccatacacatactaataagttctttgatgtttggttgaaaacttgaattggatacatttcatttcttcttgtgaaactctatcaattcacttgtgatttgatccagttgacaaatttattaagattctcacaagatattccatcttttgcaacacttttcatcacaatctctttaaccttcatagctcgttcttcatactctccaccgtctctcatgatctcatcgatcttcttcttaacctctaacctcggaaccactcctcgtgcgtctctttcaagtcctaatccaatcttccacacatcgcatatatatgctt

SEQ ID NO: 183261 - DNA, 376 bp, Arabidopsis thaliana nossen
tcggaaaaaatgccgggacccacccacgcgtgcgctctatcctattgtcttatcttcgaagcccaatctaaaaccccccggggttcccttaccgtttggtggacccaaccccgcccacccggcaaatctgtcgcggttctcttcacgcgatcccttgcttcatgtgctcctctcgccaaatctccggagtcttctgagatcaaccggtaccgtactctggtcgccgctttttcctacattttccgtgacggcctcaagtctgtcaaaggtctctagactcaggctacatcggcttctctgaacgacccgaatcccatctggtcgaacaggccacctaaggagacgatcctgctcgatggttgccatttcgagcact

SEQ ID NO: 183262 - DNA, 376 bp, Arabidopsis thaliana nossen
acccttccgaaaataacagtacagtatattgcaatttaaacaattaatacaaaattaattgacatcaagtcaaaccaacagaattagtaaatgtatacatttcaagtataatatatttactcttactaggaaatgattaattactttaatgattaaattggtatagaatctttcagtcttcaatttacattgtttccaatcttagagagattgcaattaattaaaagaaaagttacaaaatcaattatatacaagtcaattcaacaaaacttaaatctatatattactccctttgtcctaatatattatatgatttagtccttttttaagtttcattttctttttttttttctcaaatattatgcataatttatgt

SEQ ID NO: 183263 - DNA, 366 bp, Arabidopsis thaliana nossen
tttgcacttggcaatgttacagcgtttatgtttacatctaggattgtcttgtttgcttaccttatatgaaaagtcatctcgttcatatggattttttgcattctacattttagaaaagcaccgtttgccacttcaggtatgtaacaatgtgcacagctacaaatctttgcactgaacagatttggaataaagtttgagttaaagtgaatacatgacttggttaatcctggcttgggccatcttgtggcctcttgctcatatcaagtaaaatgccatgacaacaacgttaatggctaagttagcattgcagcatctcctctgacttctgcagataccaggagattttttgtctcatcattccaaaat

SEQ ID NO: 183264 - DNA, 366 bp, Arabidopsis thaliana nossen
cctccatctcccctcccaaccttcttcgctttaccagcagctgtagcaaatgttctttggcacacaaatcgcattacatctttggatctagaaatggaatccccaaacattcgaataaggttcatatcaacaaccttatacctgcaaattcacaaaataaaactaaataaatctacacaatcctataatgttcgttctcggatttagatcaagattcgagttttgtcgaagatttttgggtgagggtttaactcgcaagatagagataggtagcgagtgcatcgcgggaactggtaaaacttattaaaaagtaacggaccggaaaattaaaagacccgtctaaaagcccaccaatagtaatgcata

SEQ ID NO: 183265 - DNA, 302 bp, Arabidopsis thaliana nossen
gcaaacgctcgacaataactactttcatagtaatacaacagttcattgtgtaaagagacgagcatatctttgtaaaactagtggatacagggaagctgcatacgaatatgaatcatgtttataaagagttgtttatattgaagaatgttttggctggtcctcgatcgattagaatatttcttactgatatagaaagatggccatcaatgtatatctatggttttcctatcatcatggactaacaatttaagtgtgaaataattaaacccattgttatattgttctgaaaactattgaactta

SEQ ID NO: 183266 - DNA, 240 bp, Arabidopsis thaliana nossen
gcatcgtttaagttagcagctgatatgtcaacgcatggtgagcgaggacggtaagacgaggtgaacgatctggatgattagaccgccgataataacaatgacccatgaaattgcacagctaaatgctgctgaccatgtcaatgcgtttgactgtcttgagggtggtgggaaccgtatgccacggctgttatgaccgaatggtattcgagcttttcttaatggaaccggctttggtatttg

SEQ ID NO: 183267 - DNA, 358 bp, Arabidopsis thaliana nossen
atcttctccccctcactgtctgctctaggtcgagattttttagggtttatctccggatttgggttagcgaaatcgagctcacggggttgtctcgattattcctttttaggttgcttgaatctgaagctaatcttgggttaattggattgttagaatcgagacctaaatccttcgattggatcagagaaaatatgtcgcgcgttctcacttgcccaccgcttgtgtttgcaagaaaccacgttggcgttcaaaacttggtcgaatcgactaagcttaaaagaatcacacttgattcaaaaaaggcgcaccggatagagaagaaggaaaagaaggagaagagaaaagaaaagaaagaaac

SEQ ID NO: 183268 - DNA, 365 bp, Arabidopsis thaliana nossen
aacaaaacaagagaggtcagagactcactctaacgaaagcatgggaaaattcagaaaattagggtagacaatgaagagctagagagagcattgaacttagaattactagtaagaaacatcacaagcatcaagattcagaaatgaagtactcatgataaatattccatggattgtcacctcttcactgagataatggagattctcgcgttgatattgcagtagagccatttgttgatcagaaaggcgaccggcttcatggtatctgtgtttcaagcaaaaaaaacgaagtaagacttgagaattgtaaaaacatttgccatttgcaatataaggttgcgaggtaaagcaaagttttcatgaagact

SEQ ID NO: 183269 - DNA, 308 bp, Arabidopsis thaliana nossen
  unsure (1)..(308): unsure at all n locations
caaaaaaacataaacattctttttataaacaaanaaaaaaacaggctggctcacaaaaatttctgtttgcgttgcaacaacacanacacaaaagtccatcataataaacatacgataacaaccctacctatactaaatcaccaacaacattgtacctaaccccaaaatgacccaccctaaaacacccaagaaataacacacccacacctataaaagagtccataacaacaaacacccgaccacattttataaaatcaataaaacaatctccctaccatctacaaaacactcactcccaaaaccaatat

SEQ ID NO: 183270 - DNA, 236 bp, Arabidopsis thaliana nossen
atttgagcaaaattgaaaatcgctctgaaaccaaatatggagaatccgggatcatacggtaacttgcgggatttcctaggtcagtcatcctaatgacggtgtatgtcccgatgccggatattggacgccatgattacggctgagcttccgaatattttgaccattctggagcttgacgaatgacatatatgtgttgagaacaatttacaggcggattacaagctgtactatgtact

SEQ ID NO: 183271 - DNA, 352 bp, Arabidopsis thaliana nossen
cactttgtgaatcctctttgttccttcttcttctttctaggccatggcagggatacttgagtttgggcggtccctgttcaagcaatcaaacccttctactctaacagttgctggtttcaccccaaacttcattctaccacaaccacttttaacacgagatgcagatgggagaagaggggagagtgagggtgagacagtgttgagtttctcatctccaaagcgtgcatcttgagctaacgggtttgctgctcggctagggggagacccaaagaaaaatgggggtgatctagatgatactgattcctagagaaagaagaagacaagaaatagatctcaatacacaaaatgtgga

SEQ ID NO: 183272 - DNA, 156 bp, Arabidopsis thaliana nossen
gttcaaatccgagaattttgatatcggtggacattttaaccggtctgggccgggcgggtcactttccaaaacgcctgttgtgtgtgaaccatctgaatctgctatctagaaagctcttgtaatagcccatattgattcttaccgaacgctgttttt

SEQ ID NO: 183273 - DNA, 130 bp, Arabidopsis thaliana nossen
tttttaattcgggggaaagccgaatccgtttaaagcggattgaccggtttgaagggaaacttttattttttttcgaaatccaccctccattttggggtcaaaaggccaaaataaaaaatttggccccttt

SEQ ID NO: 183274 - DNA, 330 bp, Arabidopsis thaliana nossen
tttacaagttttgattcgaaaaacttaatctcccttttattggtttgaaatttttacaccaacccctaaattaattttggggaaatccgattttgggaaaaattaatttgtttttggaatcgttaacaccgttggaagaagacaagcaattgcccggggggaaatcttttttggttaaaaaaaaaccggttcgtggaaaaaagcccgaaattgaaaaattgacagtggcaaatgtggacgcgccaccgaaaagtaccggtggttggggttggggtttctctggcttctctgtgctttccgatctccaaaaagctgcggaagatatttctc

SEQ ID NO: 183275 - DNA, 332 bp, Arabidopsis thaliana nossen
aaagttttgaaattttgagtcttgatcattggactaattaagctaatgagtagtatctttttttttttgtttcttagttgtcgtctatgattgagctaaaacgataaaagattagtaaacattttgagattaatttgcttgatctattctatgctaattttgttgaattttggtactttctagtaatattctcaaatatgggaagaatatgaaatacttccaattcattaggtgtttgagtggaaaaaaataccatactttgattgattcgaacctaaacaaaagtgtcatttttcttcttctttctaattgcatgatttgatcaagaagag

SEQ ID NO: 183276 - DNA, 324 bp, Arabidopsis thaliana nossen
aataaaggtattcaacaaactcgagagtaaatgtactacacaacatataagctttcagaatattaaaaaatcactcacaccatcagaaaaaaacatgatgattcaaaaactgcatatgacagacaaataaaggaaaactattaactggaccatcctcttcactcattttctaggttccttttaagatataggtacagcttctgtaatctgttagaatcatagatcaaaacaaaacaaaatgcttttctatttccataaaaaaaaagtttcacactttagaagtgagtctttctatttgatcctatagatagcctactctcaaaa

SEQ ID NO: 183277 - DNA, 188 bp, Arabidopsis thaliana nossen
  unsure (1)..(188): unsure at all n locations
acctccnntctatactatatccaacaatttatcaaaaataataaataaataacattgtcttctacaaaattggtggccttacaacacaaacccacccacacaactaaaccctccacctaacaaaccaccacaaattcatttccttcatacatttcctcacacaaacacacctcaccatctaaatcaac

SEQ ID NO: 183278 - DNA, 288 bp, Arabidopsis thaliana nossen
cattaatgccacacgaaaattcggaacacacgacatcgtttcaaaatctgaaaaagggtacttagcgggtgctatattacaataactgtacaacaatactaaccaatattctacattacttttaacatattctaaatcataatacatgcaataatgaacagtaactcatagtaatcctagactaatatgggattaggagaccttctatagatctgaacataagctagctgacatccataactactgctatggcatgttcgactgtctaagtgaatctatattgatcaa

SEQ ID NO: 183279 - DNA, 125 bp, Arabidopsis thaliana nossen
gttaggaaatctctgaaattagggctatccgtctgccaacacaatcgtccaattacaattttttgttttacaaaacaacacaaccaacacacccaaactcttctaatacctaccatccaacaaaa

SEQ ID NO: 183280 - DNA, 259 bp, Arabidopsis thaliana nossen
tctctctatagatttcaccgtctctctgccgtttcctttctccagattctttttctcagagttatgaatcaaatatcacagctaccaaaacagattcctcttacttcttcttcttcttgttctgtgttcgtcttctcagattcagcttcgacttttttttttgtttctcacttttatacaaaaggaaccttgttttgtcttaaatcagaggaaatggtgatgtgatttgtggttgcatttttgtattttttttatattg

SEQ ID NO: 183281 - DNA, 376 bp, Arabidopsis thaliana nossen
cggacgcgtggggaaaattagtgcaaaaacgtatgacgtaaatgatcggtatcacgaaatgtggcacactctgagttgtcaatattcaattatattatacatcaatccattatccatattgacccaccaaacaaaaatctcactgcctttcattattaatctcactttctttccaaatcctcttttctatttagtttaatcccaattttttaatctattctcgtgactgcattcgtgtcccttttatttgattcttcatccctcgatctttgtttaatcggcgcatcaaacgagacgaatattttaatttttccttaaacaactattaatatgagactgagagcatgtaaaatgtaaattagtgactagttgaaat

SEQ ID NO: 183282 - DNA, 368 bp, Arabidopsis thaliana nossen
ggcacacaaatatatatcgtattcgctgaagagaactcactagtggctgtagctttaacactatcgagggtcctgcaactctaaccatttaaaccaaggaatctcttctatcatgtctctaacatatctcatgttatgtctaaacggctatgttccctttgtgcgcgctcaaaatacactgtaatacacacataggtgatcaactacattcgagttatatgttttggtcattcacactcataacaatgctgtcttgttcctcatgataatgttacccttactcttactcttttcaaactacaattgctcatattctttcactttcaactatgtatgatgactattgctactcaactgctctcactgaa

SEQ ID NO: 183283 - DNA, 362 bp, Arabidopsis thaliana nossen
tttctttcttctaccttgttatttacaacaaaagcttcctggtcaaaagggagccaaaccttatgtggggctatctctacatcaattgaatcatttcagtcacataagaaccaaatttcgaatcagattgttatatctcaatatctcataccggaagcaatatagcaacattgcctaataattttcatgccctattttggatgatacaagacacgcaacagatacctttggagctaaaggagctttacaatcatctttgggagctgcttttgattttgcggacccatcaaatatccaaggaagttcaccggtaagaagattataacctcaaaacccttttttcgcttatatcctaatcatag

SEQ ID NO: 183284 - DNA, 380 bp, Arabidopsis thaliana nossen
caaattctttgctgaacaatgctgggctcactgaagtaattgttgcatgatcaaatcagctcaggttgaacttaacagaatctctttttgagtgcattttcaggataattgagatgttgaacattttggaattgatggaaacagatgccattcctgataataagggattgtcagtttactgcaccaacagtaccaggacagaacgatattccccatatgtacttcaaaatttaacttctcttccgttggggtaccaagttttccaaggacatgattcagatgtgctaaatatatcagctccagtggctcagaactttgtgcaacccggttgctctgttcccatttatatcgataatagtgacacactacttattcctgat

SEQ ID NO: 183285 - DNA, 362 bp, Arabidopsis thaliana nossen
aagatatttcatttgagatattttgttcgatcacattcccatgcatgtgtgaaaagtttaaacaccaacttggttcttctacgtacagtataaaactaaactctatacacactctccaactaacttttgttttctttaaatatttatccaataataaccaccaatccaagcaaaaaaatatgtagaagaagttgaaactatacatagaaaaaggctagtatatattgtaagttgttcatttgtttgaagtaacatcgatcgggggttttggaaaccgacaaccctaaggtttaggtattgcgagtttacgacgatagacaagaaaaaagttgggccatgtgaagtcacgttactcttggaat

SEQ ID NO: 183286 - DNA, 376 bp, Arabidopsis thaliana nossen
atatttttgtaccttcatttgtttttatgtcttccttgaagaattttgtaaccaatgttatatttactgtatttatctatatatgtttgaccaccttttttccttcgtatgaatcgatcatattgtatataatatattaaaaaaaaaatcaaatttatttagtatactagacttctaggttttttggagcacatggaaaaagcaagcacagattcacaacagagtaggtatgacgaaactggagaatcttttcgtcaaatgtgaaaacctatttctgttaatgtaaataaatatactatttgttattagtaaatgtggaggacggattagtgcttgagaatgaggtaatactattaccgtatttgcgagaaggtgt

SEQ ID NO: 183287 - DNA, 256 bp, Arabidopsis thaliana nossen
cccccttccttgaagaatttttgtaccaataaaattttttcgttcttcaaaaatatatcatcaaccaccccccccccttcctattaatctatcaaatagaatctaatctattaaaatataaatcacaatctatttagtatactagacttctacgttttttcgaacacatgcaaaaagcaatcacatattcacaacaaaatatctatttcttaactccaaacccattacatcaaaacacaaaacccatctctgttaa

SEQ ID NO: 183288 - DNA, 379 bp, Arabidopsis thaliana nossen
ctcacattgcgaggaaaaaagattatttgactcaaggaaacaaaagataattcggaaatttcttttgttttcctctcagtgatgaaattacaaaacccagataagaaaaccctaagagaaggctttagtcaggaatctagtgtagtggctttagattctggagttttagctatgagtggtttgaaatgcgatgggaaattcccggtcaaggatgtattaatggaagaaggtggtgataaagtgaggaagattcaagtttctgggggaaatatatcacttgttgttgattttagtggagctaggactagttctaacaatttctttgagtctaatgctagttgtgtcaatgagaatctggttaaaggaaatgggtacagag

SEQ ID NO: 183289 - DNA, 345 bp, Arabidopsis thaliana nossen
atcataaccaaaaaaccaactttatagcttctatcacaactcataccagttctctatccattttttgggtaccgacaaaaactatttcgattctgttcacgcgatcctttgcttaatctgctacactcgccaaatctaccacgtcttctatgctcagccagtcccatccattgatcttcatttatatctacaagcttcaatgcgaccatgagtctgtcaaaagtctctcgacacaagctacatcgtcttctctgaacgacccgaataccaactggtcgaacaggccacctaaagagacgatcctgctcgatggttgcgatttccagcactggcttgtcgtcgtgg

SEQ ID NO: 183290 - DNA, 379 bp, Arabidopsis thaliana nossen
tggaaacctgaaaaggcggataaatcaagaggaacacaccaggcataatcaaccctatcctcaacaggccacgaacatatgggcttgaatgtctccttggagaaatcggaactttggagcagtgaataacagaaacggtagtatgcaaaataccaaaaccaaactcttgggaaactggtagacataagagatctaaggtcaccggattcatgatttcaaccttatcatgataaattcgtatggatcgtttctataagagatccaagtgattgtcgatgaatctcttgtcgttgaagagagcgtaccattgtatgcatgtcgctttgaatcgtatcagagagtcgatcggggtcctgtaaagtatgtcttctactataca

SEQ ID NO: 183291 - DNA, 322 bp, Arabidopsis thaliana nossen
caatatttgaatcggtcgataaggcccataagataatatagatgggcccaagtttctttcgaggtgacacttgtgacttgtgatccgatgaatagcttgttttttttctttctaagataacctaatttgcattttgtttgttgatatctaatcgaaagctgctggataatcagctcccattttccctagtgaggaagtatgtgccatagctaccaagggcactgatccaggttagatcaacctttgaacttggactacttaattatctctaggtctatgcataagtttgattggcacagtgattggttaatttgatgtcaat

SEQ ID NO: 183292 - DNA, 379 bp, Arabidopsis thaliana nossen
gatttatgagacaagtcaaaagcccatgatcatgggaaacgttcttctttggacgtgagagtccgagacaaccaaaaagttatgacagcccactttctttcagaacacacattttaacctttttcattccaatagtactttccaattttcatatcataggtatataccaaagatagagtgttttgagagacggtcattatgtttggtttagaagttcttttatgattattgtttaattctcaagtctctataacgtgtcatgttaattattttaaacatcctagtaatagaaatatgtctaattagagaccacaaaaagattcaaaaaaagtgccaattaaaagagtgaagagatttaaggattatccgggaagattcg

SEQ ID NO: 183293 - DNA, 375 bp, Arabidopsis thaliana nossen
gtttatcaatcgtggttaagctcacagttgttgtgtatttggttctggtaggtttttgaaagtattaagcagcaagaagagacaaagcaaactgagtttgcaacgaaggcgcaagagtttaaagctatgcaagcccaagctgaaactgtgagatcatctaactttaagtttcttaaccaatatttggatgtctgtttatatattcttgaacaattgtgttaacaactaatggctacctaatagaaatgagttagcaactgtggcataacgattatgctgttatcttagtaaagttgaaaatagtgtcttgtgacaaaatctgcttccaatggtcactatgatacatattgattaataatattactcggtttagct

SEQ ID NO: 183294 - DNA, 250 bp, Arabidopsis thaliana nossen
  unsure (1)..(250): unsure at all n locations
atcaaaanncgtccaaacaacatcatanaatgacagaaatgcgtactttattttttcttattactgtaaccaaattcatcacaacatcatcatcccccactttcaccattacagaccttcaatccttcaaaaccctatctacatattcacacactttttttcctcttctttcatcctacttttttttctcttaaatatcccctttctctaatctacttcgatcaccacttcttctttctcaccttcttct

SEQ ID NO: 183295 - DNA, 278 bp, Arabidopsis thaliana nossen
atcgacgacctacagaatcattaccagccatgatacgaaaagtccacgatgactactgacagaaggtgggaccaccaaaacaacataaaccacagaggctggagtctaatataactgatcttactttcacctgatcaaaacgggaaatgttaataatactggactgctagttcaaaccaatggacttcttaaaacaagctatctactgggaaaaaattatggttaccggactgaagatgcatgcataacattcacaatgtggcagatggcataatagc

SEQ ID NO: 183296 - DNA, 307 bp, Arabidopsis thaliana nossen
aaaatatacactaaacagtaaacacaaatttgaaaatatctaaaaccaaaactcaaagtaagaatatgaaacaaattaacatgaaaaataattggagtttcccaaattcgtttgtttctctcgatccgaaatatgttaagtttagttataagaggaaattacattacaaacatatacaaatttttagattaagacagatggagaagaaaccagacttgttacatccaaaaggatttgatttttcttctctttaagcaaacaccgacatcaaaatctatcaaccaacacatcaatactatttaaccat

SEQ ID NO: 183297 - DNA, 374 bp, Arabidopsis thaliana nossen
gtcctgaatgtgtgaagagaatgattgaaacagcagatatagaaggtgatactgtaagtattctcaatcttcaattgcctcattccctctagctcttgctctctataatgtaattcatcccaaagtttttcttgttcacagcctctgcatcacgcagcaagaggtgaacatgttgacgtggttaggtttttgctgggttccggggcttcaccaacgacacaaaactcctatgggaaggtgaaaaaaaacatttgaaagcaatttctatctttggcttttgaagtatggttagcgataataacaaggttgtgataatgcagacaccaggtgaattagctgatttaaacactgatgctaagaggatactcgaagaa

SEQ ID NO: 183298 - DNA, 330 bp, Arabidopsis thaliana nossen
gaagaaaagtgtggacaaaatggcctgaagacaacagcttttatgaagcagtagttacacaatacaatgcaaatgagggtcgacatgcgttggtatatgatataaacacagtgaatgagacatgggaatgggttgatcttaatgagattccaacgaaagatataagatgggatggagaggaagatggggtaactttgaatgtaggacatggcggtggaacaactcgtgggaatcgaaggaccttaagccatggtggtagagggagaggtccaagaactcagccaagaagagaacatttagcaacggaaaacggtggtgggaggaagtttt

SEQ ID NO: 183299 - DNA, 373 bp, Arabidopsis thaliana nossen
  unsure (1)..(373): unsure at all n locations
ctttgccggagaaaatattccggtagccatgctccggtcattaacttgttcctcgaccattacttcgacctctctcttcttccgctctttccgccagctccctcgctcttacttgtctccctcatcgtcaacgaccgtcgtcggtgcctccggccgcaacattcgccggctttctactctagaagctgctgggagacggctatttctacgacgaggcttgaaactactctccgccgcgagtcgtggtctcaatggacagttctctcgcttatctattcgcgccgtcgctacacaatccgcaccttcttcttatcccggtcaagatgaggctgagaagctnggatttgagaaagtctctgaagagtttatctca

SEQ ID NO: 183300 - DNA, 378 bp, Arabidopsis thaliana nossen
gaagcttcaatgtctgtagtagcaattaacatgaacacgatcaatcacttgtccaaaacctgtaaaaccccaaatatccaatcaccgatttgcttcgatcgcaaacccttttcatattctctcattcctctgtttccaaaaaccctaaatggcttctcctcttactcttcttccgttagtcgcagatcgagattcatcattcccaagagacgacgattctctgtttccatggagtggcaagactgctcagtaaagatggaggtcgatgttccagtatcagtagcgtataatttctacttggatcgtgaatcttttcctaaatggatgccttttatttcatctgtcgaggtgttaaaggacaagcctgatctatcacgt

SEQ ID NO: 183301 - DNA, 373 bp, Arabidopsis thaliana nossen
atttgttctattatagatcacaaatcgacgactctttcacagattgtggattctgttgctgcgttgagttgtgaggttacaaaggctgatatagcttcgtttagcttgttggattcaggagatgggaatggtgataaagatgtgattggtgttgctggtgatctcaaggttttgcttaacgggtataaaggtacagggaaattagaaatagaagagatttcgaaaatcccttggattcatgggaaattcaggtatgtggtgaaaagcgtgcacgcggatgctaggagagaattgaattccggtgttaaaggaggcaaaactgggtctggaaacactgggattggtgaggctttaggaacaacattgttacctt

SEQ ID NO: 183302 - DNA, 466 bp, Arabidopsis thaliana nossen
  unsure (1)..(466): unsure at all n locations
ccgtccgcannaccttnnngccggaaataatggggctttnctccgcganntttctttcttcttcctcgccccgtcggtcaccttctctcgtcgttgttccggtcaccacncnnactganntgcttcncnntctcgctnnnctctatcgcnnactccaccnnntaaaaccganacccgtaccctcgacngnntcgtttcaaatctcttccccagcaaaccacccaaactnnatcctnnctcactcngnnacccgacnntcgtntcnnctcactttcacncacnncaccaannnacccgagatcccccctatcccgnnacccnnngttttctnnntcaattcaagtcttcacccaccctatcnntctagagctnnntcactctcgagaacactnnnttcgtcgcgtcaccagcaccaaagactacccaaaagcttaaccactcnnagtcgactcgagccggcgactca

SEQ ID NO: 183303 - DNA, 59 bp, Arabidopsis thaliana nossen
atcaatttaaacattattttaatttatcattggtacctacttagatcggtccccaaggg

SEQ ID NO: 183304 - DNA, 303 bp, Arabidopsis thaliana nossen
aaaaaatgaaaaatacgcattcaatttgaaataaatttgtttgatttgatttcggttatggtcttaaaaattttatggaataaatttgagtcagtttttctaataaaaaaatatttttggatcgttttctattacatatttgagtcggttatgattttaaaatatcttttagttgtttttccaatgctctttaactttttagtttttttcaatcataaataatgtgagaaatattttttaaaaaagatttttaattttaatttggatcattttaaccagattagaaattgttatgtacaaaac

SEQ ID NO: 183305 - DNA, 416 bp, Arabidopsis thaliana nossen
  unsure (1)..(416): unsure at all n locations
ccgtccgnngattttttctggtnnattcgannnaaaattctgtaacaannnaatttaanncatatttgtggtttagttanntgagaactatttggcgtagctannnttcaaanntccagagggttntnncgataccgnntgaaannaaaaaaacncnntgggacngnntatcgcnnccaaatnnncattggnntccggtacctgggnnatgtagcncnnttcccnncccgggcccaaaatgcncnntaatatttacccaatgggctctggtgnnggttaagggggtcgagganntactcttnnggtcaagannaattaatgggtgacttgggtgaagtnnacagcaatnntattaggannaataatcnngagttagaaagctgtagnnntatgagtgggcgacagagnnggtttaa

SEQ ID NO: 183306 - DNA, 374 bp, Arabidopsis thaliana nossen
ggagatgatgaagtacctgatgccccagtacgtttgaaatagaccagggtggcaatcaccattccagtcgtcgtgcgtccacgtcccatttgacaattgaaaatgatctccgtattaatgtcagcctgagatatcttcctaatctgaaatcatagtgtattgaatttttttattgacaggaacatattaatcacaatataatgttatgctcccagcaaataccaaatggcaagagataagatcattcaaggttgtcgactacgaggaatggcataggacttaccaacagatcaaaatctgtttcttttggtgacttttcatccgttataggaacacgttcataatcgacaaggtagccttcagcttgcagttct

SEQ ID NO: 183307 - DNA, 174 bp, Arabidopsis thaliana nossen
caaaaactacacttcattgttcgtttttaaagatcttaattactactctctaacttttttaatctattttctagaaaatacattttgttacaatagataaaaatatgttttatatgaaatatttattaattattattattaatgtattggaaaattcaaaaaaaaaacaatttt

SEQ ID NO: 183308 - DNA, 243 bp, Arabidopsis thaliana nossen
  unsure (1)..(243): unsure at all n locations
agaatctaacctactcgggccaaacgcacctgatgactgggggggccaacacaggttgtggtgcangaattgcggcgagcaccgatgcacccagagatcaaaccgatgatcggactctcactgagaccgaagctgcacattcaaaggagaatctaccccaagtcataaactctatagagacaactataggagtccttcatcagatacaccttaccgacacttatagcacacccgtgtctgaac

SEQ ID NO: 183309 - DNA, 372 bp, Arabidopsis thaliana nossen
  unsure (1)..(372): unsure at all n locations
gtcgtaccggccgccgtatcctcctcttcctcagccaccatctcaaaagtgcgggggcccctgcgttgtgtgggccgacaaaaccccctactgctcctaccccaccaccgtcgcatcaaccgtacttatatcctacgccgccgccttctcctacgcatgcttactatcagcaggggccccactatcctcaattcaaccagctccaagctgctnctactacgacacctacctcagctnctcctgcgatcgctcccgatcctcctcgacaccagggtcccaatgaccacgagaaaggggcctccaaacaggttggaaggcgggagcgtgctaaaccggatccatcgaagcaccaccacaggtctcatcttcctc

SEQ ID NO: 183310 - DNA, 376 bp, Arabidopsis thaliana nossen
aaaatttcaaaagagttgtggcttgtgggaggctatagcatcgcttggtttgatcgtacacatcatggatggtgaatagacagggtccaagtgttaacgttgcgcaatcccataacgtgacaagaatgtcggtgaaaatattggtgttcttttctctccaaattaataaactacaactaagagtactatttaaaaaagagttaaaatgacacaaaataactcaattttttatatcattaacgcattatacgtatagaatttaaataataacatatacatttccatataggataaataacctcatcaaaaaaaaagaagaattttattattagtttagacttttttgtcaatattaatttattagcttcttaagttt

SEQ ID NO: 183311 - DNA, 377 bp, Arabidopsis thaliana nossen
  unsure (1)..(377): unsure at all n locations
gataggcatacctaataattgtctcatgtcatatacgaaaaataatagcccatcgtttgtgatgatatgatgtatatatatatattnnntttttcagcaagtgtaaagcttcacatatacgagaagagaataggacatccaataatgattatttttattttgttggtgtttatatatcgttttcatatatatgtcttcatataacataaagttaagattaaaatcgtaaagacacaacaccaacctttttatatataataagattcaaaaagataaaggataaacataaaccatattcactcacaataatacaagtgtaccgtaaatatggaaatgtttgaagtcacggattaaattcgtgttggaaaaagtttgct

SEQ ID NO: 183312 - DNA, 373 bp, Arabidopsis thaliana nossen
  unsure (1)..(373): unsure at all n locations
gaagaatatgaggttgggattaatctcaattcatcaccgaatctcattgcgcgactttgttcttgtctgtggcttctcctccatgccttctctttcgatattcatatctgcttgattatttctttagtagttgcagaagcttcataagcagcaaaactaaaaggttctaaagcttttgtcctaatttaatccattcgattcatacatgttatttcggtaaattttgctgtcttaattcgtaccatttctgtctttttttttcttggtcctactgaatcaaagtcatcatcagactggtccaattttagctttaagaaactcaactaatttactttcatctctntatcagatatgaagcaactctggactttct

SEQ ID NO: 183313 - DNA, 191 bp, Arabidopsis thaliana nossen
ttaaactgcaagaaacaaatgtcccagtagcatgaccacttcagcactggtcaaacatattatagtggggtaacatggataaagctatttcagatactaatccagtcgaaatagagtagttttgtcttagcaaaatcaccaaactttatctcttgataccaatacagagtgactgcacaagtctgagaaca

SEQ ID NO: 183314 - DNA, 368 bp, Arabidopsis thaliana nossen
cggacgcgtgggtgaaggttcatccataaatccattgttggagctcttctagaaagcgtctcaagttcgttggctcgttttttggtctgcaaatttctcctcattccttcaaaacttatggaccctttttgtccaaatactgatatttcttccaaatctagttgcctcaaagaagatgcatcttctaagtgggtattccaagttgtctttgattgttgagcctgaatttcaaagatagaacggttaaaattaccgataaaactgctggatctgttggctaatgtgtcctcattataagctttgtttgcttccttgtgagcttgttgttgggaaacacagaagatgtttgctaatgtgtcctgatccac

SEQ ID NO: 183315 - DNA, 248 bp, Arabidopsis thaliana nossen
ctatttttgaaatattaaagcattaatatatatatatatatatatattacatatgaaaataaatttaggaaaagatagtctaatataaagaaaacaatctaaataataaattttatgattacaaatttagaaatatttattatgaaagaaaaaatggaagatttaagaatttctttagtagttttaagaagttagataggataagcatctatatatggtttatatgcaatattatagaatgctcttag

SEQ ID NO: 183316 - DNA, 163 bp, Arabidopsis thaliana nossen
ataaattatataaatcctctattatatatataatatatatataatatatattatataatatatatattactattatataactgtttttatagaactttctcagcaattctagttacattaaaaatttagctaaagattagataaaaaaggcgcgaactcaaaa

SEQ ID NO: 183317 - DNA, 312 bp, Arabidopsis thaliana nossen
ataccacataatacacactccatttttctcacctgtacctacactcatattgcgtgtttcaactattttcgtttttatcctaatccataaatcaatgatatgtcccacacttccaaatcttccaccaaaattatacccaaaacacccagaaacccaactaaaaccagaacacactatgaagcctcatcaacttacaatcttcaaaccactcatccgtttaaccaaataacaactaataattcttcacaaaattactattcatataacataactcgacatgcttcttcaaaccaattctctcaacacatccac

SEQ ID NO: 183318 - DNA, 365 bp, Arabidopsis thaliana nossen
  unsure (1)..(365): unsure at all n locations
gtcgtaccggccgccgtatcctcctcttcctcagccaccatctcaaaatggtttggcccctccgccttcggcgccgtcnttaccccctcctgttcctcccccaccaccgtcgcatcaaccgtacttatatcctccgccgccgcctcctcctccgcatgcttactatcagcaggggccccactatcctcaattcaaccagctccaagctcctcctcctccgccacctccctcagctcctcctccgctcgttcccgatcctcctcgacaccagggtcccaatgaccacgagaaaggggcctccaagcaggttggaaggcgggagcgtgctaaaccggatccatcgaagcaccaccacaggtctcatc

SEQ ID NO: 183319 - DNA, 353 bp, Arabidopsis thaliana nossen
  unsure (1)..(353): unsure at all n locations
catttctcaataacaaacttatttaacccaaatcctgaccttccaaccgctggagcaatcactttttagggcgaaatacacnccncacccaccaaacctacaatatgctcctatattcttttaaataaaaaaacccttaaacaccaccaaaccgtcccctccattaacagactacagtccacaactatactttacccttctcacaatcactacaacccaaactggcaaccaaccacaacttacccaaaaaacgatataaaagattacattacctaacatacaaacctacacagaaagaaacaattagataccaaagacgcttcaaaaaacaaaaacaaaacttctctaatcac

SEQ ID NO: 183320 - DNA, 363 bp, Arabidopsis thaliana nossen
  unsure (1)..(363): unsure at all n locations
ctaatttaatgtcctccattattctcacttcctcctcatttacaccggcagcttatctccacgtggttgttcttcatccaaaaacaaancttacttattttgtcaatctctctcaataaaaaacctctatgctataacttactaatctccaacaaaaaaaatctatataataagccatcaaaacatctatataagaagataaaacaatgaccacaacaattaacaacttattattaccaacatcactacccctaacaccgatgataataccaatgctacataacaacaacactcatctctctatcatctctcaaaccctaaatcaccaccaatccaaatcttcctactcgtttaccatcacca

SEQ ID NO: 183321 - DNA, 340 bp, Arabidopsis thaliana nossen
  unsure (1)..(340): unsure at all n locations
ccggggcgacccacacatccgcaaaaaaaaactttccatcaacttttaattcatcccgaaacactaagaaggagggccctcaaaaatgagggtctaccaccaacaaaacacnacttcaactaaaaaccaacctcatctataaacataccgcacacataccgattcctcccaacaaactcacacaggcacaaccttacctaccattaaaccataaacaccaccttcacatgaatcataaattcaacccccaccaagacatcgaaacacagctcacgataaaacataacctccaagaagaagcattaccaacacaacacaaactacaataaacctctaccaa

SEQ ID NO: 183322 - DNA, 369 bp, Arabidopsis thaliana nossen
cggggggacccacgcgtccgaagactgatatcctcaagacacattaacccctcatattctcccacaagaggggaaaccaacacttttatgttttcaaagacaccttcattacaaacaaatcaacactcacggtgtaagacaccgaccctgcagagtccataacgaatatacaacattagtttgctaaacacgagccagtaaacatgtccatcgaagcctaccccaccttcaccgacatcgaacctgataccataaagcaaatcttcaccagaaaacttgaaccggacaacgacttctacgtatacacccgacactacaaccccaccaagctcaacctaatccatacaatcgcacctgtcgaaggcaccc

SEQ ID NO: 183323 - DNA, 352 bp, Arabidopsis thaliana nossen
aacagcttcacctttctgggttttctcagattgtgtctaatcttgaaaaaccttttattcgtagaagcaggagtgaagcaaagaagaagaagaaatggatgtagtagtagcaacactatctctctactcttattcttcttcttagtcttcttttcaagaacaagcacaagtacaagttgtcgtagaagaactgttaaacacttatccacaacttcaacatcatctacaccacttgaatcaagaatcacttccaaggttattgcgattagtatcgtctcagggattttaacagggttggtttcagctttggtgttagctttcttggttcgtagcattgtcaaattcatgaaac

SEQ ID NO: 183324 - DNA, 234 bp, Arabidopsis thaliana nossen
ctttcctctagatattacagcatttcatctataaccacctccaacaacagtgggcaccaacaaaatggtggtgtactcacaaacaacacaacaataccacactgcaataacgaatttgataagcaaagctcaacatccgcaagacatatatcaaaactactgacataaacaaactgtatgtaaacatcaccataaccgtcctcatggaaaccaaaacactaatcaacattccca

SEQ ID NO: 183325 - DNA, 200 bp, Arabidopsis thaliana nossen
  unsure (1)..(200): unsure at all n locations
ggaccgcatacggcaaaatttcttcaaggaccgttaaccaaccatccgcggagatcccacgagtggtggggttcgaaaaacacngccgaccctacaccgaacaaggctaaccgtacacaaaccacctatgtacccaacgacgacaactactccaacaaagagcacacaccaccttatcaacacatatcctcctccatacc

SEQ ID NO: 183326 - DNA, 378 bp, Arabidopsis thaliana nossen
gcgatgaacacatatgcgacaagaacaaacgcaaccgctgacactacaccgagtataattggcagtggactgctctttccattggttgatccacctgacccgataacaaatgtaattttttttacttgcataatatgcataactaaatgtttttttttttcttttcttcataatattcatgttatgatgattactgagagctttttctaattaacaaacccataagataacaagataaaatgaatagaaagatccaaatacaaacctggactcacttcattgctccctccagttcctcctttgctagtcccaccggagcctagcacaaataaaattcaatgtgactctcttttttttcactcaaacttcaaaggtgat

SEQ ID NO: 183327 - DNA, 367 bp, Arabidopsis thaliana nossen
gggagagggaataataaaaaagaggttttaactaaaatctgtgcttcctgcacgctaacagatggggccctattatcgtattcagtactggatgttgacacgtgtttatctctttacttattttgccgtccgatgaatctatcatattcttcacggcatcttcatttttttgagaaaaataaaaaatcgaacatagtatcttgaagtgaaattttttactattgctttgataaaacaaattactcgatatcattttcttcatataaaagtaacaaagttgattttcgtttgtggtttaatccttggcctctccacccgactgtggataaattcaatatcattttcatcactaaattggaatatatat

SEQ ID NO: 183328 - DNA, 295 bp, Arabidopsis thaliana nossen
ccacgcgtcgagaagctgcatgatacgataatcggaaaacacgacggtggatgaaggtgttggtcatcaacaccaaggatcgcctaagaccccaaagctgcgccaggtacacaaggcaagtgttgatcaaccagctttctggacaatgatgatcgccagcacgtaccctttcctactctctttctaataacctgagcataaagctttgactcgcgcccgcgcctacgctctgccttaaagcgaagctcgctagtgcgacctataggcctagcttagataagagagccagaacaac

SEQ ID NO: 183329 - DNA, 301 bp, Arabidopsis thaliana nossen
  unsure (1)..(301): unsure at all n locations
tccagaattcaggaagcgacccacacatcccaatcccacgtacgttcccattttactaatgaacaaggacccaaccncaagagacaatcaatattatatagcacattnaaccaccaacgcaactacacagacaccaatcacccccaaacatataatctctcaccttcaatcaactctctacagaaagagaatacccaacctccactgctacctatcacactaacactaatcaaaacaatcatgcacacatacactctcaaactagcaatactatcatctcttacactgctactcctacaca

SEQ ID NO: 183330 - DNA, 418 bp, Arabidopsis thaliana nossen
  unsure (1)..(418): unsure at all n locations
acccactcgtccgtaaaaactatacaaaaacattaacaataaaacacccccccaccaaatagaccttacaaatcatataagaaccaaacccannaccaacactcatacaaaaaaccctaaccatctccaacaaccacattcctattactacctaatcaccctctatactctctcttaaccttattcttctaattcccaacaaaactccctaactcacatcaaacacatacaccactaagctaaacacacacatcttaaaaatcattctcactaaaacacttcacctcccaccacacccacctcatccactccaatcattatccacacataccacaccacactccatatctaatacactctactaacttcacaatacactacacaactcataaaccatactcacaccatatcaattatc

SEQ ID NO: 183331 - DNA, 153 bp, Arabidopsis thaliana nossen
  unsure (1)..(153): unsure at all n locations
gcgatcccatcgcagtccgcagcctaccatagagctaatgtcttagcttatttcatgaccctagctcnnttcttcttgctagttanngttcttttaggttggatagcgcgatgtcacagccgagtcgagttcagaagccataatgtattctta

SEQ ID NO: 183332 - DNA, 278 bp, Arabidopsis thaliana nossen
  unsure (1)..(278): unsure at all n locations
gaacacatcttctccaattgttaaaacccactacaacaaacccgggaagtatacacagatggtaggggagtctcccannccnccaagcccttctgttgatccaccaaaaggtccacggtcacactcaatgggccgctgacaacgtatccaccagcaagatcgaacaacaagccatcatgcaagcctatctagcacctgtaacaactaacaaccactatattaaaccactctctatctaatgcattcgcaacctctgcaggctccaagtgcacagtcct

SEQ ID NO: 183333 - DNA, 405 bp, Arabidopsis thaliana nossen
  unsure (1)..(405): unsure at all n locations
attaaattgaaacattaaatttttttcataccatattcctgccttacgaaaggccncnataaattggttgaatctnncnacnactatatatcacatacgaaatctatcgcgttcctgcctagacaaagagagcctttttacaatataataactcacagggcgtatcaatacccttctcgattcaacaacataacacgatcctacattctcttcgcattaagaaccaatttgtatcaaaaataaacaaaaatcgactcatactcataacttcagatatcaattaactatttccatattgatgcatccgagatgacaatgtaatgcgatcgaatgtccatgcgagaaataaactctcattcacactttcctataatttcattcaaatattgaatcaaatataaataa

SEQ ID NO: 183334 - DNA, 401 bp, Arabidopsis thaliana nossen
gatgaatgtgagactccggtgaaaatgtcacaaggtctagatttgaaggcacatttcagcattggtgatgctgatgaaaatcgtaaaagcgattcacatgaggaagggccatttggtaaagctgcgcggtttgcggaactgagacgaagagcatcaattgaatctgatagtacaatgtcaagctctggaagtgtcattgagccaaatacacctgaagaagttgccaagcctttgagacatcccactaagcatcttcattcagctaaaagtttgtttgaagagccttctcgtatatcggagtccgagtggtccggaagttctgatcatggtatcagcagcactgatgactcgaccaatagttcgaatgatatagtcgcgagggacaccgcgattaactcctc

SEQ ID NO: 183335 - DNA, 404 bp, Arabidopsis thaliana nossen
  unsure (1)..(404): unsure at all n locations
ttcagccatatcggaaaaaactatatccgacgagccattcnnngtcagggcggcgaagctccgtatggagcggtgctancncttatcttttcccgccttatgaatctctctatcgcggcttcattacattcagtctaactcgagtgatgaaaccactctccgtgctagagctctttgatcccgcggctggtaggatattaccgcgttagcagctctgccgtcgtggatagagttagaacgacaaaatcagccttggtttcctaactcgtatttactctttagcctatgttttcaatttttctcttccgatcttaggtgtatctgaatttttgcaacaatgtctgagctaaaagagcgcctgctctcctccaagacctgcttcagctatgaacctcatagatgct

SEQ ID NO: 183336 - DNA, 406 bp, Arabidopsis thaliana nossen
  unsure (1)..(406): unsure at all n locations
tgagttttgatatcacatacatacgataacggggagaagaagaccagagcgagcttccattggtaggagttttgcagaaagnggagcataatttggaagattccctccttgaggattattgtggacacatcgaagttgcctcccatccttcatcttcaccatgaaaccatctggtccactttttacctcaacttatatacaaaaccaacaagagaacatcgatgattagaatcaaaacacaagaagaatagagagaactaatggtataaatacagatttaaccaggattaccagcttccaatacactagacttgacataatcctcatcgttctcgttgaaattctctgctgtgcttccggtaccatcagagtgcgagctgaaaagacatttgatactcttatacct

SEQ ID NO: 183337 - DNA, 407 bp, Arabidopsis thaliana nossen
gggaataagaataaaatgaaaacaatattggagatcttaacaacagaaatactctgatctaagtaatgaatttaacgagaatgtttctgaactacagtcagatttgatttgtgaagatttacagaaggagataaacctagggaacaatttacgcaccattccgtacaaggagagcgccaagcccagtaggataaccaaataacttcatgacatcagccgaaaacaagaaagtcaaaatctgataacaaaagaacttcatttattttggaaaatccaggagataccttgtagaatgacacaacaacaaaatctgcaggatactccgataaatcaggtggtagtgtagcacaaccctttgcagcatcaatcaagaccatccaccgcttgctccttatataaagtatata

SEQ ID NO: 183338 - DNA, 386 bp, Arabidopsis thaliana nossen
  unsure (1)..(386): unsure at all n locations
tcggattcggaggcgacccacctccgtaaatcataaacacaaacctttcaagccatgaaacactaggagtcccaaaaacacttttggatgccctcacatcactagagacacctctctaaccaaccaaccaacatctctatcaaaaacaaaaacaaccttcattcaacaaatctacaaatcctcattccactacatatacaaaccagcaangacatcaagaactgccaaaaatgtaaaatccttacagccatgtggcctactgctatctctatatttcacgctcgatatagtgctaacactccaacactccattactcactcctctattgtagcgtatataccactgctagctcctcatacaagagataccatgacaagattctctc

SEQ ID NO: 183339 - DNA, 301 bp, Arabidopsis thaliana nossen
ccggccgaagccgggtcgacccacctcgattttaccttgctccaatttttgaaacagaaaacctgaggacaaattgtgggggtatcaagggatcaagcctggttatccgttcgtactgcgcccttggatcggcggctttgttactctgaagaaaggagtttgaacagcgtgttttcggggagaaggcagaactacttctgtcagaagcaagccagttatcagctaagcttctttgtatcttggaaaggagtgactataagagatctctgtgtttcatagattacccattggacactgcatt

SEQ ID NO: 183340 - DNA, 75 bp, Arabidopsis thaliana nossen
tccaagctttcatacacatgcattctacgtcctaactcttctatcatctcaggtaaattcaattcattgggggtg

SEQ ID NO: 183341 - DNA, 367 bp, Arabidopsis thaliana nossen
  unsure (1)..(367): unsure at all n locations
cccacccgtgcgcgctgtctctttctctattttttgtgtgaaaacctacccaacgggtctttctcaattctgtatggtagagcctacatcccccaccaaatttatatcatatatttaggacacttatccttcgaagacagtcaagagaaagcctctacatgatattgacaccaaaatgagctttaacatgcagaagaaagacttgattccctgtatccagaagacaaaatctgtatatatggcccccacaaacgctgagagctctaataatccanattctgaatctgaggacaaacgctaaagctaataaagtcccaggcaaataggactgcttcaacagttatgaatcatctgatgactcttcttc

SEQ ID NO: 183342 - DNA, 386 bp, Arabidopsis thaliana nossen
  unsure (1)..(386): unsure at all n locations
gaattcaagaatcaacccacccctcccacccataccactctctttatttttaccaacataaaaacacacccancaggacacatccccatttgttagtctacttacactcacataccaacacctatccatcattttcagatctattcacactacaacccacttaaactcacgatttttttaccaccaactcaattaacacattacaaacccataaaatagatcacactctatgtttacctacaaaacaactccaaaaaccactttgacttatccatccacaacaactaccactaatacttcaaaaaacaaaaacccctaactactaacataataactatcttaaaactatctcataaacactactttaaacaacatactaaacccta

SEQ ID NO: 183343 - DNA, 302 bp, Arabidopsis thaliana nossen
  unsure (1)..(302): unsure at all n locations
tgaanaccaggcgcgacccatctcaacccgttccgccaaatcacttgccctttacttcacaccaaccancccaagaccagcctctcctacatatatatagacactccccctaaccacaccaaagcttaaatccacaatgagaaaaattcacatacccacatgaccacactccctcttcatatcacacaaatcgaacaagtcacacgattcgaagatataagcaaccaacacacaaatcaaatccccaaaagaaaccaaatcaaaacccccctccaaccatataccacaaacttcacacatct

SEQ ID NO: 183344 - DNA, 379 bp, Arabidopsis thaliana nossen
tgctttttaagaggtgtcatcctcgagattgttctctcttcaatctcaggtttgcctcagagtttggaattgcttggatgttaatcaatcattaatgtttatgtatccttacattaagatctggagacagaaccgactgcaacaagagtttcaatattcacagcagcatgaagtagacgtagatgtcaagatctatggtctcggtccaaagagtgattcgagattcacaacagtggagacacctctagcatcaatagtttgctccctagagatacctttcagtgatgaaggtggatcaagaaaacagtgcttcttaaaccagagcaatgcaacaatggaagaatgcgaatccacaagtatcaaatccaggatctgatga

SEQ ID NO: 183345 - DNA, 360 bp, Arabidopsis thaliana nossen
  unsure (1)..(360): unsure at all n locations
cccgacccaacccacctcccaaatttacaaccttacatccagcacagacccacccaagggagtccaaacttttaagacctccacacccncgccccaccacaccaaacacccaccccaaactctccaccaatcaacccaacccaacccacaaccacaaacctaaaacctcacaccctccacacactccatcccaccacaacaacaaaacaaactccaaaaaacccccaaaaaacctctcacaccaccaacctaacacccaaaaactacacacacagaccctcaacggcaaaacacctcaaataaaaaaaccaaacccaaaataccccaaacccaatcaaataaaccaaccactacttcccc

SEQ ID NO: 183346 - DNA, 192 bp, Arabidopsis thaliana nossen
  unsure (1)..(192): unsure at all n locations
caaccgcacctcttcccaaatttatttacccccaaaaagacagcccaaagagaagtttcaaacttatttaagtcagaccancncnccctcctcaacacactaaacacatcacaacccaaaacatacaccacaagatacatctaccataaatctataaaacacaagaacacaaaatctcctacaatcccaaaa

SEQ ID NO: 183347 - DNA, 266 bp, Arabidopsis thaliana nossen
atttacaaaccgacccaaacccagccaacaattttctcaccatcccaaacaaagaaagccccaatcccactaaaataaccaaataacttcatcacatcaccctaaaacaacaaagtcacaacctgattacaaaagaacttcatttattccggaaaaggcaggagataccttgaagaatgacacaacaacaaaatctgccggataccccgaaaaatcaggtggcagcggagcacaaccctctgcagcatcaatcaagaccacccacc

SEQ ID NO: 183348 - DNA, 90 bp, Arabidopsis thaliana nossen
  unsure (1)..(90): unsure at all n locations
tcccatcgcagtccagcagccagtgcagtnnttatatcagatgtttaaactaggcccnnaccagtnntattacatgagagtatgtcctag

SEQ ID NO: 183349 - DNA, 376 bp, Arabidopsis thaliana nossen
  unsure (1)..(376): unsure at all n locations
gctctgggaacttatttcacttttatatcccgacgggggaccccngcaggcagtganccaaattattcagctgatccaacnncnncanccngcgctaataaactaaaagcaaaaagtcccaacgtgagaaatccacgacacgatcctcctcatgaacccacgaggaaaaaatataatcgtcaagctcattccagtgtcacatacatcaagcttgtctacgacaaagactctaaagacatccccgcaaatgatcctccgaaaagaacacaactcgcacctgaagagctccttcttgaatatcctaacaaatatacaacatggcctgaacttcactacgacaaaatatcttaaactgacaagcaaatcataacaatgc

SEQ ID NO: 183350 - DNA, 347 bp, Arabidopsis thaliana nossen
  unsure (1)..(347): unsure at all n locations
cataaactgacttattagacttttgtttcgaaaactgacaccaancaagggagtgctcaaagatattggtatggataccatacctccaggaacatcaacagacgacacctgcatcgtcaatgcaacgacatcaaaacaaggagaccatctcaacaagatctaccaccaacatctcaatgagctccaactactgcaacaccgaaaagacgtataaccctaatcaactaagaatactcaaaagaatgaactcaagatcctaatactaatactcagagaagaacaacagctcctacaagaacctaattcctatgtgggtcaaatgaccaaaatgatatgaacaaacaaag

SEQ ID NO: 183351 - DNA, 480 bp, Arabidopsis thaliana nossen
  unsure (1)..(480): unsure at all n locations
gaccggaattgcccgggtgcgacgccatcgcagtccgcgtgacagcgtaggtgcggtacgccgtgtggctgtgacgcgtaggagcgagcctagaatctggttcgtgtctctacacagtcgatgtgtctcgtgctcgtaagaatagtaaaacaactaacccgcgaagagcggtgatgataccaactataattgagtgggattttgaagaaaaaggtctgtacaataaaatctcaaagatgtggaataagctcgatggtgaaaagtcttcatacccggacctttcctagtagtccttattaggtcccgataataaagaagaagagttggtttagtatagttgacanttcttcagcatgncttctggagttggtaatagccaatccaagaaaagaagtttgactgagaaggctagtcaccgtgctcttgccaaataccttattaaagatcttgctcattacgctacttctactatatctaagc

SEQ ID NO: 183352 - DNA, 376 bp, Arabidopsis thaliana nossen
  unsure (1)..(376): unsure at all n locations
tcgcaagaaccacttcagactcattttaggaccccacatcaacccgaggcagtcctcctatacattcgatgggtctgcngagacatgtaaaccaataacaccaagaacgcactgtacaacaaattgaagaatctctgaaaaagccctgacaaaactctcacaaagacaacactcgccgtaaaacactcatcccagacttgactgattgctaattgtccccatcataacaaaacagctggactggataatgacactattgaccatgcttatgaagtagctaataacctactcaagaaaacatgcataactgaaaacgatagtcacaccgctcttgtcacataacagattaatgatcctgctgattacgcaccaccac

SEQ ID NO: 183353 - DNA, 437 bp, Arabidopsis thaliana nossen
  unsure (1)..(437): unsure at all n locations
aattcccggagtcgatcccacagccgtcccgagaaatagtaccgatataagagaagtagtaagtaggaaccgaccaccatananntaaaacccaagaggaatagggagaatatagtgttgactgcgatattaggccccctctctctccaggnnatctctaccttcttccaaatctcctcctcacgccagccagtaacctccatccgtccccttccagttaccctcctagatccctaatcttcttatcctttcctcaggaacccctccatgtggcttccgggaagagcttatagtggccctcagatatcctatcgtccagctctgtcccatccaccagtctatggccccatctgtcatccctccagctatcatcttcccgtccccgcccatatttcgttagccagatccagttccctatactcatcgagagctctcgt

SEQ ID NO: 183354 - DNA, 230 bp, Arabidopsis thaliana nossen
  unsure (1)..(230): unsure at all n locations
caaccaacacttcctaccccttcacctacccacgctaacccccnagagtcgaaaaacaattttgtcgctttctaaacaacccatncncctcaccttcacaatatccctcctatccaaattctcatgctgagccacccaacacttttatattttcaacccttaaaaacaataaccaaactgcttcataactatatccatctacccaaacttcccacccattcaaattttaa

SEQ ID NO: 183355 - DNA, 89 bp, Arabidopsis thaliana nossen
  unsure (1)..(89): unsure at all n locations
ccggggcgacccacaccacctccaaagacagtttcaccactccttcaaacccaacaaaacacaaacccgngggggcctcaacaaaattt

SEQ ID NO: 183356 - DNA, 344 bp, Arabidopsis thaliana nossen
  unsure (1)..(344): unsure at all n locations
gccgaagtttttatcggtctttcagctcacccattcactatactctcgcaagatcaaaacaatagctctttaacaaacnnnannnanactaccaacatcaaacaaaccttttttttaatataaaaagaagattcattctaacttttattttcataatataaaaaacaattctacccaaaaatgaatataaaagaaactatgctccacatacaattttattcttttgagaccaaaactcccaatttctttattatactccaaggttaatattatagtaactaacttttcccactacatatttaaaaaaaatatacacatttctatgtaagattgcctcattcact

SEQ ID NO: 183357 - DNA, 381 bp, Arabidopsis thaliana nossen
agccttccgaagacatatttgtgtatctgtttggatgctcacacatggatttctgttttgttttatttaataaagatctaatgattcatttttttttttaatttttttttttgtgaaactttttttttaatctaaaaggaaaattcattttaactcctagtttcataatattagaaacaattctaccaaaaaatgaatataaaagaaattatgctcgatgttttattttattttttggtgggcaatgctcgatgtttgtttatatactccatagtttaatattatagtaacgaactgagcacaatacattcaagaaagaaatatacatttctatgtaagattgcgtcatttactataaaaatatacaatgtaatattattt

SEQ ID NO: 183358 - DNA, 370 bp, Arabidopsis thaliana nossen
ccatggttaataagagaataagaatatgatgatattgctaaaactttgacccgtatgatgggtgtgggattatgaaatcatactatatttgagtgactgactcttcacagaatttcacaacgtctacagaggataccaactttactgatcattaaccttagtatacggtggcgaacaccggtcactcgatgattatccgggcggcttccaccgcttatgacattgcccatgatccaactttccgaaattgaaattgcaaatcgattacaaaaagatgaaagacagtgggaggaagcgtatcacaaaaggaggtcaactaactttgtcggctaagatacagggccacacgtatcggcccatataaaatacc

SEQ ID NO: 183359 - DNA, 370 bp, Arabidopsis thaliana nossen
ttatcataagatatgaataagaaaatagatcgtcttggagattgtttcgaagggaactaagaagcctatggcctctttggagagatcggttattgggtgtacattgagctatttgtacggcttagttaatggacgctgcacgattattatatgtctttttataatagaatgtacaatcacattaagtaaaatattcatatcaataagtactaaaccatgagttatctatattgcaacattttctattcacattacattcgcgagaggacgatgaatatctggccagagtcgttaagaatcagaacttgtagataacgaatcatagatagtaataattatataatatatagtatgaaaatggtatgtaagg

SEQ ID NO: 183360 - DNA, 182 bp, Arabidopsis thaliana nossen
ccccatctaaaaacaccatacaaaatctataacctaccaacccacacaaagagagactcccaacacttttacaactcccaccacaaaccaaccttctctacaacccaacaacataacatcaacctacaaactcaccaattaataaccaatttcacttaacacataaaccaacaacgaatcat

SEQ ID NO: 183361 - DNA, 342 bp, Arabidopsis thaliana nossen
taagtacagaaatttcatacacattatcctactgacaacacgaccagcgggggccctcaacaatattgcggtttcaacaacaacaccataatcatgaacatgccccacttcaagacatagcccacacatccaagctaccccccccactacatctgcaccatcaaaccaactatccccatgcaaaccccaacccacacactactactaccagaccacatctactactgtattcaaaccattacaccaatacacacatctctttactcaccacgccacaagccatctatcacaacccaccaacacaatacttcccataacccacattaatctcactgaaatatt

SEQ ID NO: 183362 - DNA, 252 bp, Arabidopsis thaliana nossen
gacacaccaacaatctccatttttacactcctatctgctaaacacatgaggatttctacattttttgagtttttaaaccaattcaccactcctttttacatcccatatcaagcacacctcacacttatattgatctcctttatatattctcttatgacaacaacaaaacgctaaatctaactacaaatactatcatgtgccataattttagttactacaataatcaaacatatgcttctttacacgaatatt

SEQ ID NO: 183363 - DNA, 326 bp, Arabidopsis thaliana nossen
atctagactatgcaagaacaggagccaatcaagatcatgaaccagggaaaggaagaccataaaagttaacttaaaccaattcaaaaaataatccataaacgtatatatactatttttaccaatatgctttttgtacgtggaaaaaatcatgcatacatatatgatgtaatggaccaagcttttgggaaatattaaagttttttttttttgtgcaaaaaggaaatattaaagttataaaagaaaaaaatatgtatgcatgcatataaattaaggttttatcatgtgagatattgattttaagtcattgacatttaagtgtcataaaa

SEQ ID NO: 183364 - DNA, 291 bp, Arabidopsis thaliana nossen
ataacagagaggatgacatcttttataatgagctataaaaaaaggccctcaggagacccaaaagtgttgagggtcccaaccaactacaacaccgaacgaaaagtgcttccagaacagctaataatcgcacacgacgaatagaggaaaattattaatgccataaatataagagagagctcgttcactctaccttcgccacaactccacacctttaccattgaatttattcaaaccctttttgctaaaatgcaccttactttttcctcatctacctcattttatcccccccac

SEQ ID NO: 183365 - DNA, 325 bp, Arabidopsis thaliana nossen
cagacacacattctacactatctataaccccacatatacatcccacgaggcccaaaaacaaaatgtggggttatacacaccccacatcccaaaagacaaaacaagagtccggatcaaaccacacatcaaacagatgattcgcgttatccccaacaacctaccaaaacacaaacacaaaacggagacatataaacgaaaattgaacctatcatccaaatcctcaaattgcatagataaataaacttaaaacatcactaccaatgaaacccctcagggactgaactgtgatatgaacacacctttatcaaaccaaaacttctttcat

SEQ ID NO: 183366 - DNA, 310 bp, Arabidopsis thaliana nossen
  unsure (1)..(310): unsure at all n locations
ccggggctaccacacacgtccgaccaacaccatttcacatattttatccaccaccataacccacccancctgtcacattaaaatatgtctgtctacaaaaacncacaaaaaaaaacctaatactcattttcagcactcttcacactacaaacctgcaaatctgcttattttcatatatccaaaaaaaacacccctatttcttcttctgattctcattctcacacactgtcaaccaataattctactccatcaaatacctttcttacatactcactaacaatgttacaattctgtaaaaagacaaaaccac

SEQ ID NO: 183367 - DNA, 381 bp, Arabidopsis thaliana nossen
gagagagacagggatcactatagagagcgagatagggacagggaaagaggcagagatagagaacgagacagaagagacagggcaaggcgcagaagtagaagcaggagtagggatcgtaagagacatgaaactgatgatgtgcgggatcgggaagaacctaagaaaaagaaagaaaagaaggagaagatgaaggaagatggaaccgatcatccaaatcctgaaattgcagagatgaatagactgagagcatcactgggaatgaaacccctcagggactgaactgtgaaatgaggacatctttatcaaaccgaaacttggttcatttgcccagctaaaccggttactatactgtgatcctactcactatagttttggtttttt

SEQ ID NO: 183368 - DNA, 378 bp, Arabidopsis thaliana nossen
  unsure (1)..(378): unsure at all n locations
cggacgcgtggggttggagcatacaaagatagttcttaaaaatgctgagttgcanagaatgaaccttggtgctgtgtcgtctactagtgatagggtgggttttagcactggtcaaaagatatcatctcgagtcagcaattcgaagaaaccatctgattttgctgtgggttcggggaagaaagttcggcatcagaatgggacttctcgtggatggaatcgtggtacctcagggaagtttgagtcttcgaaagagactatgactagcactcctaacattacactgatgaagcaatgtgacacgctactgagaaaactgtggtctcatccgcattcttgggtgtttcaggcgccagttgatgtagtgaaactgaacatacc

SEQ ID NO: 183369 - DNA, 381 bp, Arabidopsis thaliana nossen
gttgaaaaaccactattttttcaaatagttaaatttgcttttcatctgagggtcccatttaaccgagtgaccagttagttcaacaaatttttcttcgattctccgtttaccagcagctaatggtttcctaatcgtatagtcttccgcttctaattcagcgattacaagctctagaaaaatttaagttgttccaggcgtccatttatgctaaccacattttcaaattttaaacaatcacaattatattttaaaaataatatgtaggtaaaactataaaatagtatacacaaaactttaataaacatacattgcatcttgtattgcttgcacctctactcgatgttccttcaccagcattttcagaatctaaaagtcatcact

SEQ ID NO: 183370 - DNA, 242 bp, Arabidopsis thaliana nossen
atttcatctaattatatatatttgctaatttatcatgtttctgtgtttctatattatatatttattaaggaaaattgctaaaatttaaaatattgaaaagctagatcctgagatggaactagaagtctaaaacagcttaacgaggaaaactctacaaacaagagaacagaggccataatttgttgaacatggttgcatatcatacaaaaaatggccaaacccatagaaaattgaactttaat

SEQ ID NO: 183371 - DNA, 393 bp, Arabidopsis thaliana nossen
ccgcaatatccggggcgagccacacgtgcgcgaaaactcacacgcagactttatagtcacataatgtggctcacttgttggcaggaggatagtggagagcagaaaatgttttttatgaggctaccttctgttcctttggcatcaacaccaacagaaaaccttgaaacaaggccaaatatcaaaggccccgttgagaagaagactgttgatttaaaagccttgccagaaggttacatgggcaaactgttagtctacaaaagtggtgctgtcaagatgaaacttggggaagtgctttatgatgtgagtgattctttttccgtttactaagtattctatgaccatagatcctgcaatatggtttttaccgggcataatactagctaatatctagta

SEQ ID NO: 183372 - DNA, 379 bp, Arabidopsis thaliana nossen
ggaatgcattgtctgagaatcgatgacatcgagttttcgcattttaaccgcgtagttcttgtaaaccctgtgaatttcagcaattctgtctttgtgttgatctggttttggttcaatcttgagtggtttcagctcttgtaatggagtctctgattcctcaagaatagtgcacaatcctcctgttcttgcagtccttagttctgttttcaacttctcaatcacatcactatgctcaaactcatcatcatctgaatctgaaccatcatcaaactcatcatatacctcttcttgttcatcaaagcccattttcatctcttcttctctctgcataaactcttcttcttctccataaggaaagtttgaaatctgtaaacttggg

SEQ ID NO: 183373 - DNA, 334 bp, Arabidopsis thaliana nossen
ccgcaatatccggggcgagccacacgcgtgcgagaacttacacgacgaccttataaactcattatgcgactcacatggagctctgtcgatctcggtggagatacaaagatcttcctggggctacctgttggtgctttgggatcaacacccacagataaccttgtgactaggccaaatatctaatttccaccgatcgtagaaaggtgcttaacattgacacgaatgactactattgtggagaaacatcttgtcttaatatgaatcagctttaaaagaaaaccaggggaaacgatatatcatctgagcatttatgtgctcgcctacataacaatgt

SEQ ID NO: 183374 - DNA, 378 bp, Arabidopsis thaliana nossen
cttttggggtcacatgttttgtgaatgcaaacagacaaaaaaaaacagggaactttgtttgcctagggtgttaaattaatggggaaaaaccttattcagattactctatttgacagagtttatgtaaaacctctgaaaccgggaaaataaatcaagggaatatcattgcactgcagattctggtctttgatataagtgaatatgtgtttgcttccttcttgtgaatgtgtttgtgtcactgttccttagagcgattgttgtgtggatatgagaaagacagaggaacatatggaggaaaacacgtgtgttatctatgaagcttatctatcaatattacatggaatttgtgaatgtgtggttaggttgcatatattaagc

SEQ ID NO: 183375 - DNA, 295 bp, Arabidopsis thaliana nossen
  unsure (1)..(295): unsure at all n locations
gccaanaaacatatcaccaaatttttattccacatcctccaanngcaccggggccttaaataatttttgggtatgaaaaccagatcatgaaccatttagacattatcatatgcacctatacttttcacaagcacagtaaatctttattaatatactaaacacatcaaataatagattatccatcaaactctacaccaacaaaaaaaaataaatctctcccgacctagattatacaaccttacctactccttcatcctacaccatattattcacatattaacacctaaattcaatt

SEQ ID NO: 183376 - DNA, 334 bp, Arabidopsis thaliana nossen
aaaaaagttaagccctcattgttgtcctctagcctctcactctgcgggggctgcataaaacattttgtgttggggtacaacttgggctcatagttcgtaatcctgacacagcatttttgagaataaaaacacaatgcacaattgtccagagaggctattcccaccaagagaagtcgcccacgtactagactcggcagcggcaagtttacagcctagctgctcgcagaactttccgatctatacagagattcagaagtgcatgtgaatcataagaaaccagattctaaccctcgtaccatactaaagttagaatcctaaaaccataacttaacct

SEQ ID NO: 183377 - DNA, 58 bp, Arabidopsis thaliana nossen
ctcattaccatttttttcaattttttccctatatattcaacgataccgtgttggttga

SEQ ID NO: 183378 - DNA, 307 bp, Arabidopsis thaliana nossen
  unsure (1)..(307): unsure at all n locations
gggtcgtctccacgcgnccgnctctcttcttcccttctctttatctttcacagagagaaaccattgtgagcaccaaaattttatttgaccccaacccacccaccacccctaacttttttatatcatatatttcacantgtaacttcccttttacaaaaccattttttttcatactctaacaaactctacttattcttattttactataacattaatttccccctctacaaactcatattaaatccatcacctaccataattattcacaaataatccatttaataatttatatattttctttatccaa

SEQ ID NO: 183379 - DNA, 421 bp, Arabidopsis thaliana nossen
  unsure (1)..(421): unsure at all n locations
cggggcgtctcctcgcgtccgaagaaaaatgatttttgagagtttacttgacaattacaagagannnnnatgtatgataataagattatggttgtggaaaanagaattacggattttttgtttggtcatcgaacttcctatttttaggatgggaatatgtctaatattctttaccgtattatttcttaagatttgagttaatctttccttatcttcatggaggtcgatgccgagctcatcgacttttagttcttgaactgatttcacaattcagtcatatcattttggtgtatttttggtttgaaccgaattaatcggtggatactaaaccactctcttacattaaatataagaagtgaagactcataattatatacaatttattaatatttttataaaaatttgcacattgaatatttga

SEQ ID NO: 183380 - DNA, 152 bp, Arabidopsis thaliana nossen
accaaatcataaatcacaaaatttcatcggagtataaaacaaaatcgtagcttgcaaaaagactctgatgaatcgaggaaacataatccaaaacacagaacacaaatcactcacaaacagcaacccaaaaaggcgagaataaaggaaaaatt

SEQ ID NO: 183381 - DNA, 428 bp, Arabidopsis thaliana nossen
  unsure (1)..(428): unsure at all n locations
cggaatnccagaggcgtctcctcgcatccggagagttattcacttacaaaaataattaaaacttgagtgtaaccaaaaaagatgtttgntatactttctagtggtctccntaacttttattctttacaaatccatcccccttagatctatttatttcccactactttgattcatttctgttaataatctgtctttcatataaaaaaaaactgatttcttggtttgtattttcttaaaaaaatcaatctttttttatttttgatcttcttgtgtttttttttctttgtagaattaatcgtttgtgaaggtatttttttaattcccttctctcataaatctacacaaaagttgtttattttataaacctctttttcaattttcttgaaaacaaataattcctttctttactttttttacaataaccaagg

SEQ ID NO: 183382 - DNA, 400 bp, Arabidopsis thaliana nossen
  unsure (1)..(400): unsure at all n locations
gtttgttcgatggaatgaagaagcaataaccagatgcacattgttggcagttcanccagccagactggcggccaatgtcaaagctatatttacttgcctgctagaccaggtgagcgtatacataactgagggacttgaacgggcaagggatagcctgtctgaagctgcagcattgagggagagatttgttttgggaacaagcgttagcagaagagtggctgctgcagctgcttctgctgcagaagctgctgctgctgctggtgaaagtagctttaaatccttcatggttgctgtgcaacgttgcggtagcagtgttgctatagttcagcagtattttgcaaattctatatctcgtcttcttctaccagtggatggtgcacatgctgcctcatgtgaagaa

SEQ ID NO: 183383 - DNA, 403 bp, Arabidopsis thaliana nossen
  unsure (1)..(403): unsure at all n locations
tccgataatacttaaatctttctttctactatgtttatattntagagttcnaatgtagtatgtaaactcgtattgataaacnaatgnnncccaatatntctaaaattcctgatttatagtatagcatataaaaaagactatactagaattattcttatctgtcgttngataaaatatctaatcatatgacgaacatatgatggttatttcaaaatacaatattagttacattgaatgtttgaatcaataataaactgcattattagcttttattttattcgtaatatttttctaaaatattacaaaattgctgtcttttttatcctatataatcttaaattcccattttttttttaatctatatacatctactatttttcttttttattctattcaatttatc

SEQ ID NO: 183384 - DNA, 406 bp, Arabidopsis thaliana nossen
tgcgtatcaaagtcggagatacatccttcaccatagtctctgatagcctgtgtcgttagcttcactggctgctagcatctgaagcaatagcctcaccacgataaactctccatggtcctcgatagaatactggcttcatcagaggcactgttttccctgggtgctcttcccaaaacttctcctgtttacagagagtggagtaacataaagttcacactcaaacaagaaacataactgatactaacacaaaacagtgtaagaaacacattgacaaagaatacaatatactacagaacaatgaattagattagatactaatcaagacgtaaaagcttcattgaaagacctaatgaaccattcccatgaaaagcaattcaagtatagttcttttcatgatcacacaaac

SEQ ID NO: 183385 - DNA, 415 bp, Arabidopsis thaliana nossen
gcgtccgaaatcattaaatcaaaactcattatctaagcacaaaattctactcacatttttgtatgaagcaatttcgtatgggggaaaacaaaaaaaaaaaaatttattggaaaacgtacaagaaacaaagaccgttgtccttgtcttttaacagcagacaccgtcacttcctgctgagctgaatgatattctctccagcttttctgacccaaatgtagtatttgatacctaacctagcatcatcatcctcattgaccacctcttcgcttacagagggaaacgaaaacaccaaaggcgacttatctcctcttctgttgctgccgtcgaaactaaattgaggaatctcggcatcttttctcgcttcgtgatgattcgtaatggcaacaccaccaccacttgctactggtgggcttgt

SEQ ID NO: 183386 - DNA, 398 bp, Arabidopsis thaliana nossen
ggatatgtatgattctaaggtcttttatagatgtgtgcaatcagagtagggataatcacttagagtctagagttagagataattggaagcgattgaaacttatgttatgtggtttgacacatgactaaatatagcttatctccgattgttgtgctgaagaaaatgattagtctgtagcatagaaagttattctaccactaaattctagttgggtcttgattcttgactaatatgttagatgaataattgaataatggaattttgaaatagtcaaatgatcgaataaaggatgtctgagttttgtaaaatagacataaaacgttcaagaactggttgtagttagtttataatgcttcgttttatctagttataatattagttcattcattgcggtaatc

SEQ ID NO: 183387 - DNA, 247 bp, Arabidopsis thaliana nossen
accccccaaccccaccaaacccacgtcacgaggtccgacacacaaccaaagagagcttacctcccttttctatactgaacaaaaagaccaccccgcaccatacaaagtaatcctaccaccaaaacccacccacatctccatcctagaccaaaatctcacaccaacaaccccacaacccaaccccaacacacccaaacgatcacataaaccatcccccaccccctctaaaacatcacacaaaaccccc

SEQ ID NO: 183388 - DNA, 373 bp, Arabidopsis thaliana nossen
atcagtattcatttatagatgttgtattttcagatcgaatgaagttaaaaataacagatcaaatataacagatattttatttaattctttataaaatattagaatataataaatgagctgcaaatatgtaagagatacagaaaaaaagagagtaaaagaatcaacctgaaattgccgtatagaaaccaagcaaaagcaatattagcagaaattcacacacacgtggcttctaagtattatcctatttggtttcccaaggaacctttaacatcatcatctctcaagacttaactcttgcagcaatgcaaactaatttaaccaatcaccgcctacattgaaccgggttttcctaaatacgtcactacaatcttgt

SEQ ID NO: 183389 - DNA, 406 bp, Arabidopsis thaliana nossen
aaaaaaaactattaagtgagtgagagatattttgagatttgcatcatgactagacaaaaacctagatgtgagaaaaaaaaaaaaaaaagatgaattgtttgttcaatcactaagaggctctttagataattttgtgacaagagcaaatcaataaattttcatttggacttgctcttgtcacaaatttatctaaaaactccgagtgattgaataaaccattcatcttttttttttttttttcatttggacttcctcttgtcacaaatttatcgaaaaactccgagtgattgaacaaactattcatcttgttttctttttcttctttttcttttctaacatccatgtttttgtccagtcatgatgctaatctagatgcaaagtaaaaaagaagaatagcaccttgatt

SEQ ID NO: 183390 - DNA, 123 bp, Arabidopsis thaliana nossen
  unsure (1)..(123): unsure at all n locations
acattttcccttaactttttttctcccatggacctannnncattttttttataaaattattctagataaaccaaccnnnccnnccctcccatttctatttcttcattctatttactccaacct

SEQ ID NO: 183391 - DNA, 402 bp, Arabidopsis thaliana nossen
  unsure (1)..(402): unsure at all n locations
ccgattttagtgttataattattattattttagccaaatgaaaagncnacatgtttatcaaaacatatatagctgtgattaggttncaatttactataaaccgataacattgaaaacagcaacactgagccgatatctaaccacaaaaaccatctccatcgatctctgtctatatttaagaacacagtctcaatttcaagactacaaaaaacaacagaagaaaacacccaaacaaaagacagtgacaacaaaagagctctcttcttcttagcaaagccatagatcgagagagacaactaaagaactattcttctattaaacgatcaaaacaataattcaaatcctcatttaagcaaaacatcaacacatttccttcgtgaagggttacatcatctaaaactc

SEQ ID NO: 183392 - DNA, 200 bp, Arabidopsis thaliana nossen
ggttcataggacaaaggggtgtgaagaagtgtcgggggtatgattggctatgttgcacatggtggtcactcacgcaaaacggtagtaatagctgagcaagaaagacgtctaaccaaaccataacatacacaccaccgtaaaacctgaagcagtaaagcagccaagagcgtaccaacagaagcgtgagccaagaaaacgtt

SEQ ID NO: 183393 - DNA, 407 bp, Arabidopsis thaliana nossen
gcacgccctcgagaagaaaaatagcttcatttatctccaacataaggaatgaaataaagggtagaagctgaaaaaccttagcttgtatatacttctccttgatagatatcatatcagcatagctgggttttccagtgaccatcaccctggatttatcagacctgcacatatttggcagagtaattttaacattatgatttctaggtgatcaaagttatcatcactttcaaacataaatggagtttttacactgttaagccggggtcaaaatggatggcgctccttgaatgaagcaattcctcccaaactgtgtttgcgaaagtatttccaagagcttggaacaaacttataacagatggctcccatactttcacgtcgagagtgagtgacctaacctgtagcaacag

SEQ ID NO: 183394 - DNA, 373 bp, Arabidopsis thaliana nossen
cggacgcgtggggaataaaccctgcaatttgtgcgacatgcttaaatgagctcatgctacggatcaaacaaaaatatgtaatctgcacactactgagagaagaataagtaaaagaggaaacgaacttacggatggggttagttttgtgctctgtgctgcagcgtcgtatatcaaacatctaaggctttcttcagcttttccatcaactattctgttgctcttaggtcgtgtttcacctgcgatgtttgccagtgcatgcagtgcagcctgcacatgccatttacgaaacaatcatataatttcatgaatgtctctactaatgaagcaaaatttcaaccctcaatagttagaattagaaatcctaaaactggaa

SEQ ID NO: 183395 - DNA, 369 bp, Arabidopsis thaliana nossen
  unsure (1)..(369): unsure at all n locations
cttctctgtctcttaagggttctttgttttagctgtttgggttttaggggggttcgtttctcacttgtgggtttgactatnccaagaacaagaacagtgaaaggttcggttttttgggtttcgatctgataatcaacaagaaaaaagggtttgatttatgtcggctgggtttgaatcgactgtgattttgtctttgattcatatctcttctccgatttcatcatcatcttccccatcatcgtcgtctttgaaatcttgtcttctcaacgctcttcacttctgctgtaataagcagaggcttgttctggagactccttctctttccatgcgcttaagacccaaaaggacttgttctagtgttgaagtctt

SEQ ID NO: 183396 - DNA, 285 bp, Arabidopsis thaliana nossen
  unsure (1)..(285): unsure at all n locations
aaacatcaaaaagaaaactatcacagcaaaaacaatccattcggagaaatataactctaattactattatctataatacataaaacaatcaacctactgccttctctaacaatgccaacaaccacactgctcacaaatatcgagcaataactaaataaaacatcccctcaaaaccaagaaacacttacatgaccccacaaaaaacacaattataataacctaaccaccttttcctataaaaacacacaaanacaaccccccacaaccaataataccacacaaaac

SEQ ID NO: 183397 - DNA, 372 bp, Arabidopsis thaliana nossen
attttctcaaaccaaccaaaaagcttcttctccttttctaaaatttcatcaaaccctatagggttttctcaatacaattgattttttttttcttcttcttctctatggatacgaccctttctcccgccgtggaggcggaacaaatcgccgactcaacgatcgacactgtttctcgtttgatcgccggcgttttctccggcgcacttactggaatcttcgctatggctggagcttttactggagctgtaactggtgcggtggcaggaagagctgcacagtatggagttctccgtggggctgcacttggcgctgttgctggagctatcctctctgttgaagtgttggaggcttctcgtgcgtattggtatttag

SEQ ID NO: 183398 - DNA, 314 bp, Arabidopsis thaliana nossen
acatcaagttatttttgtagtctatattttggtatattcttggtggctaagaaatatatacatatgctttaattatattccaattcataagatttagtctatctcaacttgttttaatggtttttcttttcccatgcacgttgatattatcgtgtaaagtgtaaacttttgctaggaaaccactttctctagtaccaaactagtagaaagcatttttctcctccaataaatcacttttaattaacacttcaaacaccgtctttacattgtttattttatagaattccacctcgctaagcaagtgctgctttata

SEQ ID NO: 183399 - DNA, 229 bp, Arabidopsis thaliana nossen
  unsure (1)..(229): unsure at all n locations
ttttcacaaatctttgggcaccaaccaaactcaaaantctcttattttgggagagaacttcgttaaactcaacgcgaattggaatttccctttttccccgattttcgattacaaagcgaaataatttgacagcttaagatttaagcatttatgtgctgaaactactacaaacttgtcatccaccacccgatgcatattttttattaatggagatctaactcgtctatat

SEQ ID NO: 183400 - DNA, 368 bp, Arabidopsis thaliana nossen
  unsure (1)..(368): unsure at all n locations
ccaaantccggggcgaccacgcgnccgancaaacnccaaccaagacctgttgagaaaacccacacaacangaaggaggcccacaacgaaatatgggggctcaatccaacaccaccataagcccatccatggaaaggccagaccccgatgtccaaccagaccacacatccctctcatttatcgaaccacaaaccatccaacccgatggaacattatgcgaatgccacaaacaaggaagcgaaacacaaaaagctctgtcagagaactaacatcgatggccatcttaaccaccagattacgcactaccagcgctcccatccgctacataacatcttgaaagagccaaattcctggcaagaaccacacaaa

SEQ ID NO: 183401 - DNA, 388 bp, Arabidopsis thaliana nossen
acccacgcgtccggataagtgtgcctcctaatatgttgctacatcccatttccagttccacctgagggatacaaaagtatctgaggagaaagaaagaaagaattcttttggccgcattgtcgtgtacatgtagcaaatttgttccatttcatgtaaacattacaaaatggacttaagggagagcaactgttttgacctgaaaggaggtactcttctgtgaactaactccatgatcgacttagcctgatcaagctgcccctttttcacaagccctttgagcaacatctcaactgtgtccaagtttgggtaccacttctttctcatacaatccttgcacattgtataagccaaatcaaaatttcctgccttgcacaaatagtgaatcatc

SEQ ID NO: 183402 - DNA, 293 bp, Arabidopsis thaliana nossen
  unsure (1)..(293): unsure at all n locations
aaaaccggccggacccacgccgaacgnnaaaatnttcttatacagnnnctaagattttgctaatcataannccccttggggggctncaaaaatattggttggctcaacccaaccncaaccaanaattacaagggaccacatcaattgttttaaccagaataggttccccaccaaaatttaccaataacccacctgcaaaacacaccctcccctttcttggttcctgtgaaacctgaacctgaaaaaccaaacctaaaacctcttaatttttcaaacaaattaaagccttcgtt

SEQ ID NO: 183403 - DNA, 338 bp, Arabidopsis thaliana nossen
ccccccccccccccccccaacccccccctccccccccccccccgaccccccccccccccattttatcccccacccccccccccccccaccacccccccaacccccccccccccacaactccaccccctaccaccaccccccccccccccccccccaatccccccacccaaccacccccccccacatatcccccccacccacccacccccccaaataccccccaccaccccccccccccctccccccacacaccccccccccccaacccacccctccaccccccccccccaacccccaccctcacaacacccaccccccccccccacccttcccccccc

SEQ ID NO: 183404 - DNA, 289 bp, Arabidopsis thaliana nossen
  unsure (1)..(289): unsure at all n locations
cttcccgccgtcaccttcattctcaccctcattnncancccagagacagtgaactttaatatgtttcagatgccccccaaaaccnncangaacggtaataacggttgaaagatcaatgatcatgactttgtacaaagatccatccatttatattgtaaacaccacacataatactttccacagtagttctagcagcacacccaccgtccaacattgagtccataaaaccatatccattatagacatcatctctacataaactactttctttcatttcatcatcatacac

SEQ ID NO: 183405 - DNA, 151 bp, Arabidopsis thaliana nossen
  unsure (1)..(151): unsure at all n locations
caaccaccangcgacctagcaaccacccatcccaagaacaaaacaaaatatctcactattctaacaccataacaccaaaaacacaccacatctcaacaaaatcacccaaactactataccaaaaaagctaccacttcaacagacaataacc

SEQ ID NO: 183406 - DNA, 401 bp, Arabidopsis thaliana nossen
atgaaatgccgtgcatttatattagtactgtattaatcctttatgataggtgtatcgtttcaagaattatgataacgagaccggatcttaaaatccattgaatgcttatgtttttatgtattttatgaatctgattaatgtgaaactgacattggaaactgttatatgggtccataattaaatgattacatagacaattcacattaaacattcatatacataggtatcgtgtatatatcatatctacgtatcaacaaaatatatatatatatgctgtaaaaaattagaattaagataagctgagacaaaccagttaaattaattaacgttttcaatgctagtaaaattaattaatcagtttgattattaagttagtagtcgtattagtcaaccgcgtaaga

SEQ ID NO: 183407 - DNA, 53 bp, Arabidopsis thaliana nossen
ccaaggcgacccacgcgtccgatgacacgccatccttcaatattacaacaaaa

SEQ ID NO: 183408 - DNA, 266 bp, Arabidopsis thaliana nossen
  unsure (1)..(266): unsure at all n locations
tattcaatatacctcttatcctatcaataaaattatacatccatttaaaaataaaatcattattctttatacctatcactacaaacacaaacatcacatcaaatctactatacctactcctnctctanaacctatcaaanctcaaactataaaatttctcaatcaaaacaaaatctattacacacaaccttacatcctctataatcacacttttaacctttatcaattttcattttcttcttaaacccttaaaaattctcaacaaa

SEQ ID NO: 183409 - DNA, 271 bp, Arabidopsis thaliana nossen
  unsure (1)..(271): unsure at all n locations
aatatcaccaattttcaacatttaatcgattccacncactttgttctagtgacatttacaagatttaaggccactaatananacccagaaagccaaaaaaagacactaacagaataacaaattaccctagcaaatacttctcaaacaatcctaacactaacaccaaaatagactaatagacatctataaatacacaaccaaacatcaaaaaaatcacaaaaaaaatcacaacatctaccttatactacacaacatatttaaacaacaaaaa

SEQ ID NO: 183410 - DNA, 353 bp, Arabidopsis thaliana nossen
  unsure (1)..(353): unsure at all n locations
gggggagcaacgcttccgnncttggnatacaanctttcaatgcttgttcatatacagcaaggncnttggaggtgctgcatttaaacgttttgggttaatcacacacccaaaaaacttagtggtaacgataaaagaattttaaatacaagttaccataatcttgcaacgccagtggaacatccatcctttgctggtttaacacatagtgtgagacactgaaacttcttgattaattcatcccaaacatttgggaaagtctcatgcattatatcctctgttctcttcacatctttgcttatggtatgaattccaaactctgaaagctattgattacaagaaacacacaacaacaa

SEQ ID NO: 183411 - DNA, 158 bp, Arabidopsis thaliana nossen
  unsure (1)..(158): unsure at all n locations
atacaaaccanatatcctcttcaatctacaaatgtcccaacgaccacatcgaaaaccctaatattataccgttcaataaaccacactcaggagccaagngggangtcacaggagaaacccaaaaactactactacatctaaagaatgatcacaatctt

SEQ ID NO: 183412 - DNA, 380 bp, Arabidopsis thaliana nossen
  unsure (1)..(380): unsure at all n locations
agttattaaagttttggtttttctggattcactaatctacntagctnttttgaaattgcttgtttataggaatananacgnncnaagtaggcatgaagttttttgtttgcttaaaatttttaatttgagtgagataaaaccgttaaaagtttatcctaaaattagatagctacgctaattttccatatgcaaattctattttgtcgttatacataactctttacttgcaatatacaacagcttccgaaaacaaaaaacaaaatcaatgaatggccaaatcccaaacgattactgaaagagagggataaaaagatagttaatgcgcaaaggaatatgcctgacttgcctaattggtcgtattatttactctttnttttttc

SEQ ID NO: 183413 - DNA, 344 bp, Arabidopsis thaliana nossen
  unsure (1)..(344): unsure at all n locations
gcgacccacccccccgacaaaaactcatctctcaccactcttctcaaaacanncncgagctanatggcaatttcttaaggttctcggccnncccacccncncnnaancactctancatcccntccctactccctctctgacggatgatctccatgttcacctattcaaacgcagcaaataagacatcgcaaagaggggaacgagcaagtgcttcaaaaggcaatacactacacttgtgaaaaccgagctcactgtactcagatccatcccaccggagcttgctaccaacctaacaccttcaaaaaccactgtgacgtcaccgacaacagctactaccagaaaaa

SEQ ID NO: 183414 - DNA, 422 bp, Arabidopsis thaliana nossen
  unsure (1)..(422): unsure at all n locations
cccccccccccccnncccccccccncnnnctccccccccaccaccccccacaccaancccccccacccccccccccccccaccccctcctccccccccccaacccccccctacacccccacaaccacccctcccaacccccccccaccccctccccccacccctaccccccccccctcttccccacccccccccctcccccccccccccctccccccccccaccaacacccccccccccccccccaccccccccatcccccccccccaccctccccccccccccctccccccccccctcccccccacccacaccccccccccccccctccccccccccacatcccccctaccccccacccacccaccccacccccccccccaccctccccaccccccccactcccccccccccactcccccc

SEQ ID NO: 183415 - DNA, 398 bp, Arabidopsis thaliana nossen
  unsure (1)..(398): unsure at all n locations
cgacccacgcccccgggacgagaacctttttaggcttttgtggcaacncnnncattgtcnnttgttnacttttcatgttattcggcacncaaanngctcatacctcttgtacgtgtcgttatgttatatcactctgcgcaggaatctttgacaagaattgatgtgccataaatatctttggttgctaatttactagatacttcttttacaggccaatcctgcagaagctctgaatgttccagttgttcctctgggtgctttgttggctgccgcttttcctctttcgacacgttctccaaatgtattatttttgccttaatgaattgatatcatcaacaaatatgatgcacccttaaatgttagaaaaacttgtcttgaataacttctgtaagtaaaaa

SEQ ID NO: 183416 - DNA, 271 bp, Arabidopsis thaliana
gactataaaaaaaaaaaaaaaaaaaaaaaaaaaaaagcggccgctctaaacgatccaaccatacgatccacgtccatgctacctcatatctcatctacaatgtcacctaaattcacatcacaggccatctcattacaactcctttactaggaacatcctggcgaaaaccaagttattcgccatgcaacacatcttccattagatagctcgttcaacagctaacatgccagcaacgatggccctacccatcacttgtccaaccagtatcgca

SEQ ID NO: 183417 - DNA, 197 bp, Arabidopsis thaliana
aattcgagcggccttctcaaaaaaaaataaaagaaacaaaaaaaaaaaaaaaaaaacagagacaaaagaaaaaaaatctaaaaaaaaaaaataagcctgaaaaaattgacacaagaggccactcaaaacgttcgaaacacaatttaatcgtggaggccccataggatcccttcttatgttgccgtgaatcgaacgtc

SEQ ID NO: 183418 - DNA, 369 bp, Arabidopsis thaliana
gaaagagaagaagacgaagacgaagatgatgggtgtgttgaagtcggcgattggggatatgttgatgaccttctcttgggttgtagaaagattcacaaagctgttccattctaaaataacgagaccaacaccagctgaatgtcaaaagtctccttgtcattgtttagatccacacgcttattttagatatttgtgcggcgtaccatatcgcttttatgttcataaatcacatcagactctcttccggtttagaaacatttatgatgacatggctggtttagtacggtttcatgagcttggaactggtttattgaagtaaaatcggtcgctctagaggatgtatccttacgtacgcatgcatgcgacatc

SEQ ID NO: 183419 - DNA, 295 bp, Arabidopsis thaliana
gccacgagtacataacgcagcgaaaggacagatatcggtgttgatcgtgagtaggtgaaatcacgggcaatccaaagagctagcttaccggagagttcaacggcgaccactcaagaggatccaaccgaagttcagcttgcaaccaaagtctcagctcgaccagtgagccacaaaatatcaacacaatgtcggtcatgctcggacctctaggctgggacaaccctgagcttatggctataaatcgccttacattagaacacgcagtcgatatcagggttagtacacagatggtcag

SEQ ID NO: 183420 - DNA, 255 bp, Arabidopsis thaliana
ttccgctgacacatcacgacagaaggcgaaaatcgggtacagatgcgattgctcaacatagtggaaagctgctacagcatcacataatgctatcgtcgctaacattcaacccaactggattcacagttccatatagacacgcagataaacgatttgagtctctcattcacactcgttccacgcttcacactctccatcttcgtgatcagatcatcaaccacgattccactctacgaactaatccgagtagtcaac

SEQ ID NO: 183421 - DNA, 86 bp, Arabidopsis thaliana
aattcccggagtcgacccaagcggtccgaaaattcgagcggaccgacatttatttattttatttattttttatatttttaattgat

SEQ ID NO: 183422 - DNA, 228 bp, Arabidopsis thaliana
cccacgcgtccggaagggggccattggattgtgtgtggctgcgtcagtaaaacgtattcttaaaagcaaccattggtgtgattgactccataagaaaattcgtcaccgtgaagcaatctcaaacctaaccggaccaaacctccccgaatcccaatccgccccggcaattaaacctcccggtaggcaaaaatgccaacttctccaagaattggttccgaagaagaaatt

SEQ ID NO: 183423 - DNA, 173 bp, Arabidopsis thaliana
gaaaaaaaatcgaaagaaaaataaatttgataatcatgtgaaaaaaaaaaagagatgcttcaatgaagcaaacatacagtgaaaatgagccgatctggaggatccagtgctaaattacggttgcaagaaaattaacatctctcataagatgtcatccaacttcaattcatggc

SEQ ID NO: 183424 - DNA, 294 bp, Arabidopsis thaliana
aggtccaggtcgactacgtatcggtgcggcagccaaaagacgaggaatcggtaccgcagcaagtcgacgatcaaacggtacggctacaagatgaccacagaaggatacgttagcgcttgcaagaccgttgggtattgctgcggaaaactacagaccgcggctgatttcagaactttgaatctaacaaacttcactactccatggtgcctaacttaccatgtcattacatccgtctgtgctaacttatccaaaaatcacctcgacgtagtcctcatcagagtctatgtttactaa

SEQ ID NO: 183425 - DNA, 144 bp, Arabidopsis thaliana
tagcgggaatgatactaccttcggtgccaatcataccagcaggcttcaaggatctggatcatggcagctgtaggctcaccctcgctctgcactagcacctcccaccgtcctgacagacacaagtagcgtatcatccgtcaacgt

SEQ ID NO: 183426 - DNA, 393 bp, Arabidopsis thaliana
gtcgacgcatgcatccacacatccgtccgtacggcagcgaaacaacagaagggtacggctgcaaaaaaacaacagaggggcgcggccgagaaatacagtaagtgctatggcaacaataacactggtcagtacctcgacaacgctgagaagtatctcagcgactactagtcgtcacactccaccggtgctggtggtcctcctcctccgacgagtcaggctgagccagcaagtcagcctgagccggcggctaagaaagacgatgaagagtctggtggtaggcttggaggttatgccaagatggctcaaggtttcttgaagtgatttgatcgttaattgttgttcatcattttcgtaataatagattaaataactagtatcgtttgtgactaattt

SEQ ID NO: 183427 - DNA, 194 bp, Arabidopsis thaliana
cccacgcgtccgaaaaaaaaaaaaaaaaaaaaaaaaaagaaataaataaaaaaaaaaaaaaaaagaaaaaaaaaaaataaaaaaaaaaaaaaaagaaggatgctcaaaaagataagaaaattaaataggcttgaatgttgacgtggtgttctcttctgtgttgttgcttttttttggtttagtggggttttttt

SEQ ID NO: 183428 - DNA, 355 bp, Arabidopsis thaliana
cgcctgcctgtagcggtcttagaatcgcgggtcgacgcatacgtccgggggtcgacaacacgacagaaaggggacagtgaggataccaaacaaacactcatttcgcaatatcctggtagaagtaaacatcaaaattcattgacctcatcgcatcagggatagtggtcaccggaatcttcatcaactgggcatggatcgtctggccacacaggtacgcagatcatgtagaatttacaatcttacccagcctaagtaatgctgctcacatagttggcaggctaaagcacactgacttaggagtcaatgcatagggaaaacaatcatggatcgcttacattgattgagttggggtgtt

SEQ ID NO: 183429 - DNA, 224 bp, Arabidopsis thaliana
gctgcaaacgacagacaggtagggcatcgagaagacaacagattgggaaacatgacatcggttaaaagtctgcttcactaattcgacctgctatgccactaaaactagcaggtatcacaggcgtcattttcaacgtcacaggcttcacgtccggcaaaattacgcatcgatcaatcacggttgacaccacagctctctcacacatgcgtctaaacatgagcttt

SEQ ID NO: 183430 - DNA, 418 bp, Arabidopsis thaliana
ggtagtagagagagagagagaggtagacaatgggagttatgaagaagtgggcgtcgctgaagaagaagaagctgcaacaagaggaggaacaagtgacggctaaagaaacacagacatggcagcgattaaggaatctgttttcaacgtcgtcttcgtcttcgtcttcgtcggcgaagtggaagcgagttgagataataatgctgacagagatagtagacggagtagtttacaaggtcatgtatgtagttgaagctttcgttctcgtttccacgctctgcttcttctacctctgttgtggatgccacatttgatccaatttttgtttctctcattatattattctttccaattcatacttcctctcttatgggggttagtgttagtctcagttttatacaaataagcttatatgtaaccg

SEQ ID NO: 183431 - DNA, 333 bp, Arabidopsis thaliana
aaacgtaagtacagctgagagagggagacagaaaggggagtgttcgtcactcgcttctcaagtgagatatagatatatgaatcacatcatctcttctccttttgacaatcttcatagagaggtgtttattgatgtttgcctgatggaatatatttcagttgaatatccatcacgagtggttcagagttctagacggtagctttcagctttgctagtggatatagccggtttacgtctggcagtgtgacgttctataaatggttttgctcggggtgatatctgttcacaccgtcgatccgtatagactgaatggcttacacttttactccatca

SEQ ID NO: 183432 - DNA, 385 bp, Arabidopsis thaliana
  unsure (1)..(385): unsure at all n locations
ggagatcaacagattcgagagatgaggagaggaggcaaggaagaagacgaagttgaacagttgcttcaagcagctcaagatgagatgatactaaagctctctgttgattctcacacttctcgatcttcttccgattatttagatccagatcttcactctagatttctcgctctcaaatctcaaaagaagaaggatcagcagcaacaacagaaacaacggccgagaatgcagccgaaatcaaaggatgtggttgaggaaacaccagaagatctcatgcttagattcgcggctctgaaaacttctctcncctccgcgtcttcttcgtcctctgttcttcttcaggatgaaatcggagaagatggtgatgaaatcggagaagatgctg

SEQ ID NO: 183433 - DNA, 144 bp, Arabidopsis thaliana
  unsure (1)..(144): unsure at all n locations
tcacgctgcatatatacgacagaaaggtatggcttcaattgacgacacctaggtacggctcctctaagactatctagaggtacagcagctaaaatacgacagaacagttactcacntgcgagtaattacgatcagatcaggtac

SEQ ID NO: 183434 - DNA, 203 bp, Arabidopsis thaliana
ggtgctgctgctacaagacgacaacagggtactgctgctacaagacgacaacagggtactgctgctacaagacgacaacagggtcatcaaaaaaaaaaaaaaaaaaaaaaaaaaagcggccgctccacaagatgctagcttacttactcgtccatgatacgtcataacacttctacaatgtcatcaactttcatctcatcagt

SEQ ID NO: 183435 - DNA, 347 bp, Arabidopsis thaliana
tgtcaccaaaaaacaacaacacgaagaagactgcaacaaaacaactaaataatgcaagctgctctcttacaacaacaaatttcccatcaggtacaagcagacagttctttaaacctgccgccccacgtagttcatctcttctattctcgttcctgcttctatcgtactccttcgactttaatactcccggcccccctaggttttcgtcttttcattcccctctttcctgcttatatccccctcttgcgggtccccttcgtcctctctcagggccccctttttctcatcttgtgtcgtgacaaccccggttttctccacaattatcccccattgatacaatccccctt

SEQ ID NO: 183436 - DNA, 226 bp, Arabidopsis thaliana
  unsure (1)..(226): unsure at all n locations
acgtctgcgcaaacgtccgtacaggcgaaaaaacgaaaaaaagggtacggttgcaaaaaaacaacagaagggtacggctgcaaaaagacaacagaaggggagctttagcaaatgtattgaagatcactaccactgtacgtgtaacatanacgttgggtaatattatgatcagaatcgctggattgacgaatccgaaacatcgagatagtgctcgagatgttcttgt

SEQ ID NO: 183437 - DNA, 292 bp, Arabidopsis thaliana
tgcaactttcaagttaacaaaaaaaacaaaaaaaaaaaaaaaaaaaaaaaaaaaaaaaaaaaaaaaaatgaaattacaaagggatccaaacaacagcatcaaaagcataaaacaaaaaaagtaaaaacaggtagaaaataatgaaacaaagggggcccccccaatgaataaccgctacgtttgcgatcatggaaccttaaccccctcttaaagggttacccaaattgcaacccagggccttcagtttaaaaatttattgtgggaaaaactctggcatttcccaacgataccc

SEQ ID NO: 183438 - DNA, 282 bp, Arabidopsis thaliana
ggttgcttcaatggcgaaagacggacctaactgggacggtctgcttaagtggagtctctctcactccgatggtactcgacctacttgccaattaagtgaggaggatcgaaaatggtttgcagaagctatgcaatcacaaacggtagatgtagtcaagcggttgaaggagattacacaggtattgcagacacctcaacaagttttggaggctcatgaagtgacccttcaagatattgaaagtttgttggatgagtttcacgaacatgttgaatcgattgatat

SEQ ID NO: 183439 - DNA, 385 bp, Arabidopsis thaliana
ggtttcagaggggctctcttgatgaattctcatttgaaggaccgaaactcggcaaaatcagagctttttggattggtcttgagtctggtcaatggagagttggaagagtgagcttgtgggtggttaatcctcgtggtaaagaaaccgaggcaaaaaccttttgttaccgatatgattttgaagttgatgaactcttgcttggagagagcagtgacctatcaatggtggaacttagacctagccgtatcactgaactcgctgactccgatcaaatctcttcgtcttcagctctgaatcttgaccgtactatggtttccaatgaggaaagcatggaagaatacgcaaacttgaaactctctctgctactctataatgcggttctcat

SEQ ID NO: 183440 - DNA, 239 bp, Arabidopsis thaliana
aaggaaaaaaaaaaagataaaactaaacaaaaacaacagattgaaaaagagagtcaaataaaatactaaacgggaatacgaaatagatttctgcctaatgcttacacttatgctcgtttactcttcatcatggactcagtagcctcagcctccgcttcattcgtatctttcaccggtcttaacaggtcagccatcaaatcatcctctaatgtcatagtcttgactgctgctgttgcatc

SEQ ID NO: 183441 - DNA, 185 bp, Arabidopsis thaliana
gatattggttaaaactgagaatcatgatgcagactaaatccataagttacttttggtccgtcgtctaaacaacacatcaattaaatattctcaaaaagcagccgtgctacaagattcaagcttacattagcatgcatgcgaagtcaaaactcctccaaaatggcaacttaattcaattcaaagga

SEQ ID NO: 183442 - DNA, 246 bp, Arabidopsis thaliana
ggagatcaaatcaagagaagtttgatcagcttgtcataagaataatggctgcgtcacttcagcgatcttcgctgcggttgcattcagctggtttcactgcacagaagacagcagcgagacgataagagtcgcgcagaacagctcagctctcctttccatctgtcgcgactggagtcgcgacgatcagatcagagacgcccttcggttctgacggcagcatagcattgacgtacggcatcgagtcca

SEQ ID NO: 183443 - DNA, 111 bp, Arabidopsis thaliana
taccgctgctatattaccacatacgcgtactgctgctataacatcacagaaaggtacggctgcgataacactacagacgggtacagctgccataagatcacacaatgatat

SEQ ID NO: 183444 - DNA, 141 bp, Arabidopsis thaliana
aggtactgctgccataatacgacagaacggtacggctgctataagacgacacactggtacggctgccacaatactacatcatggtacagctgcgacaagaccacacaacggtacggctgccacaagacgacagacgggtac

SEQ ID NO: 183445 - DNA, 347 bp, Arabidopsis thaliana
  unsure (1)..(347): unsure at all n locations
gggtcagatcacgagagacgattgtgcctactatctctacgcgtgaaacgcacgctccgccaagcagagagaaagagttggattctgtaggtgactgtgtcaggcgttggatgtcacgcgccacgagttttgcgtgtgtgctttggagggatcgatccatggctgggactggagagaagacaaaagatgaacattagcataacaatgaatattagggcaggaaatcgaagtactagaaagctatattgcgggcaagcgatattagggaattgctgatttttttctaatanaaaatcggatgatgaaaatatattctataactttattgtaaagcatacgtactcaga

SEQ ID NO: 183446 - DNA, 318 bp, Arabidopsis thaliana
agttttcaaaaaaaaaaaaaaaaaaaaaaaaaaaaaagcgggcggcccaaaaggttcaagcctaagttacccttaatgccaattcaaaactcctccaaaatggtaactaaattcaattcaacgggcggccttttataacgttctgaacgggaaaacccttgcgttaaccaacctaaaccccctggaacaaaaccccctttccgcaactggggttacaaccaacaaggccgtaacgattgcccttcccaaaaatttgacaaccttgaagggtaatgggaacccccctggtaccggacaattaaccccggcggttttggg

SEQ ID NO: 183447 - DNA, 242 bp, Arabidopsis thaliana
ttcttgcacagaaacatcatcgtcatcatgatatcattctagattgtgggattccatcacttgtaatggcgaacctggataggtcgttaagttgcaattcatttgcaattctgtgacagtaacagcattggtataaaaatgatctcactcctttgttgtcagctgcgcagcgtcatattctctgacgagtcgtccttccgcacatctgttcgattactattacattcatgctgatagcaaaa

SEQ ID NO: 183448 - DNA, 366 bp, Arabidopsis thaliana
gagaccaacaaaaaaaaagagggaaaatctccttgttcaatagtcaataagttagccgctatcgatctagtcatgttgagcatggtaccgacatgtttcaggcttaaccatatggagaagggatgataacgagatctctctagacgtggatgggattttcggttcaaagatggaatattcatataaattcacatgcggattatagttaaatcggaataaagttttgataagtggactctccttacctaagtggggatggtagtccagtcttgtatcaatatatatatttgggctaacttagcatgcatatagaatcattatcaatgtgttaaatattccccacctaggtttcgttcatccaattcc

SEQ ID NO: 183449 - DNA, 168 bp, Arabidopsis thaliana
tgctgttacaagaatcgacagaagggtacggctgcgacagcagcactaaaggatacagccgcacgtacacgtcaatgcgatatcgcagctcttataacgtgtcaccggtattgatgtcacaggacgacatattggaacggctgcgactatgacaaccctgggatttta

SEQ ID NO: 183450 - DNA, 226 bp, Arabidopsis thaliana
  unsure (1)..(226): unsure at all n locations
tggaactaanaaaaaaaatgagtaatcaaaaaaaaaagcggccgctctacaagatgatcgaagcttaagtagtcgtgcatacgacataatacctctacaatgtcgtcaacaatcatcacatcagtggtcgtcgtataacatcgtcacgactaggacaatgctgtcattaaccatcataaccgtgctgcacaacatcctttcttcaccaggtggcgtaacaacgaag

SEQ ID NO: 183451 - DNA, 383 bp, Arabidopsis thaliana
  unsure (1)..(383): unsure at all n locations
cgagagaagctctatcttcttgctgttgggtattacagaagtgggaattactcaaggagcaggcagctcgtggaccgctgtatcgagatgcaagctgattggagacaagctttggtcctaaagaagaccatcgaagacaaaatcacaaaggatggtgttatanggatanggatcacggctacagcctttggagctgtgggtcncatagccggtggtatcgcagcagcgatgtctcgcaagaaatgaaaaccacaaccatgacttcttctctgtgtatacaatggcagtttactttttttcacatttntttcttcctctttgagtgtgttctccactgcttacgtcacaatctatgatatagaaaaatcgaagctatttgcctc

SEQ ID NO: 183452 - DNA, 365 bp, Arabidopsis thaliana
ggagagaatctttccggtgaatgggaaatggcaagaagaaggatacgagtacgatgaagttgagttagagcgggagagagagacataccgttgaccactaaagacgagagctttagagagagacgcaacaatggagctgagtatttccgagagtcgaagcagatcaattcgttgcattgtgaaacttggaggtgcggcaattacttgcaaaaacgagctggagaagattcacgatgaaaatctggaggtcgtggcgtgtcagttacgtcaagctatgttggagggttcagctccaagcaaggttattggcatggattggagcaagagacctggaagctctgagaattcctgtgatgtggatgaca

SEQ ID NO: 183453 - DNA, 407 bp, Arabidopsis thaliana
gaaagccttaaaggagactcagcattccaatctcgttcgaaaattcaattccgagtaacccatttaggagttcacttacttgaaaaagtgaagcaaaatgcagaggagaaaactgtcgtgtcttattctccgatcctggtggcgagacttgagaatgttggtcttcattccatgttcactgaccagcaaaaatttaaccaattatgtatagaggctctaaatgtggatcacaaatgggcaggggcaccctttgcagccatgcttcgtcagcatcaatcaagttcaagtgacgcaaatggttgtctattcaaatgtgtattcattctagtatcaagtggttccagcgtcacacaagtcaagcactcctcgatagttttgcagccagtcaatttgaacctagacgaaga

SEQ ID NO: 183454 - DNA, 138 bp, Arabidopsis thaliana
taaggctgcgaaatcactattgtttggtatagctgcgataatattacagacaggtaaggcgcaatacaatcagccttcggtacggctatgtacaagactacagatcggtattgctgcgagacgaccacacaacggtat

SEQ ID NO: 183455 - DNA, 265 bp, Arabidopsis thaliana
caaaaaaaaaaattaaactcaaaaaaaaaaagaaacaaatgaatttaaactccaatcaagtaaaaacaactctcaaaactcaataccagacgaaccaaatcaccgtaagccattctactgcaccgcttcatttacaacaccagctaccatcgacgatctcatcgcaagtgccaacgttgtatctgaagctgctcaatccccaactcgttacgaatcatatccactcgacaacggttatgtctcccgagcccctgctcatactctt

SEQ ID NO: 183456 - DNA, 430 bp, Arabidopsis thaliana
cacgcgtcagtacgaagacgacagaaggggagagaaacaaagagagcgataaagagatgggtggagaagagagatcaggagatggagaaaaaagaggggaagaagtagttgatgctggttctctcttcgtccttaaatccaaagggacatggtggcactgcggattccacttgacgacgtctatagtggcgcctgcgctactgagtctaccgtacgccttcaagttcttaggatgggctgccgggatatcttgtctggtcggaggagcagccgttactttctactcgtacactcttctttctcttactctcgaacaccacgcttctctcggcaaccgttacctccgcttccgtgacatggctcatcacatcctcagtaattctttttctttttacatttgctctttcctataatcaaagctgggacaaat

SEQ ID NO: 183457 - DNA, 141 bp, Arabidopsis thaliana
aggtacggctgcgagcggccgctcaaaaggatccagccgtaagtacacgataatgcgatatcgcagctcttcgacgatgtcacggatattgatgtcactggacgtcattttggatactgctgcaagggaaaaccctggggt

SEQ ID NO: 183458 - DNA, 195 bp, Arabidopsis thaliana
cggtactgctgctacaagacgacacaatggtacggctgccataaaacgacataatggtactgctgcgataagactacatacgggtaccgctgccacaagaccacacacaggtaccgctgctacaataccacagaatggtacggcgcaagatgacaacataatgctacagctgctataagacgacataatggtaca

SEQ ID NO: 183459 - DNA, 278 bp, Arabidopsis thaliana
aagacgacagtagggatttcatgagcgaaaataaagagccaaacctccaaataagcggccgatctagaggatggacgctcaagtggatctaaatgtaacttcacatctctgcgacatcgtcacccatcttcaattcaatggacgtcgatttaaatggtcgtcactgtaaaacaccttgagtgagaaaactttgtcgtcatgcaacataatcgccttgcaccagatggcgttttcaccaacaggcgtacaaccatagacgttcgcaacaattgcgcatc

SEQ ID NO: 183460 - DNA, 72 bp, Arabidopsis thaliana
  unsure (1)..(72): unsure at all n locations
acgctgcagaatacacaangtacggctgccaaacacacaaaggtacgctcagaagacacaaaggtacgctgc

SEQ ID NO: 183461 - DNA, 326 bp, Arabidopsis thaliana
cggctcgaccagcgtcacccagctcgtacgtgcataaacacaaaggtgcgtgcgaaaacaagaagggaaaagatgaaaaaatatttgatatctgtgaaaaataatggtgctcatgagcacttcggtgcattgaaccactggtttcacgtggaaaacgggctaagattacgtcgccaaaagccgtcctccttcaaattgtccagtgggtcaaaaataagacgaaagcccttcggattaacggcagcatggacttgagggacgcgtcaccctccggcaaaaggcaaggataggtgttaaaagtactcgacaagtatgagcaacgtcat

SEQ ID NO: 183462 - DNA, 104 bp, Arabidopsis thaliana
cgatacggctgcgacaatacgacacatggataccgctgccattacaccacatgacgatacggctgcgagaacaccacagatcgatactgctgcgagttgaccac

SEQ ID NO: 183463 - DNA, 207 bp, Arabidopsis thaliana
ggaactttaccaaaccgaaccattggaacaattaggagaattcataaatggaacctcccttgaaaaaagtcaggttcagaacctaaacatgtgaagaaacaagacagaagagtgaaactcaacaggtcacaaatgtgaggagtgacatatagcacactctcaagagagagattgcgcatgagatactccacaaccccatagaaagtg

SEQ ID NO: 183464 - DNA, 341 bp, Arabidopsis thaliana
ggggcccaaccgcgcatacgatcgtccacatcatggcggcaagatcccactagccactccccccgatccattgcgcctgggaccaatagtccgccatatgattcacatttcccgagagaacctcattgtggttccgattccgacaatcgtctctcgtttccgggtgtctggacactcggaatgccgtttccatgctttgtgatccgtacatgccgactctgcgcgatttgaggatttccggattgctttttcaaccgggtcgacagtctctccccaagatgtctgagcgtcgtactcaatgtgcattctgtacttcagcgatcaatggcatcggtatcccg

SEQ ID NO: 183465 - DNA, 187 bp, Arabidopsis thaliana
gcctccgaacagtcggacgtataggtgcgagagaactacataaggcgacatcgcatatcggtagagtagtgacatttgttactgtgcagtcatgttccgtttacacagtttttgcggtgagtgctgttgactgctcttccagacgatctaaccatgtccattgcagaacatgggtcatgacccacga

SEQ ID NO: 183466 - DNA, 290 bp, Arabidopsis thaliana
aacaaaaaaataattaatccaaaaaaaaattacatcaagaaaaccaaaaaaactattaaaagaaggattcaacatatttgaaacacgcaaagatccataacaagatacatcgcacatcaaaaaaaaaatcggcccccctaaaggttccaaccttacgtaaccgtgcatccaacgtcaaaccccttcaaaagtgtccccaaatttcatttcacgggccttctttttaaaatttcttaacgggaaaacccctggctttaccaaacttaacccccttgcagcaaatccccctt

SEQ ID NO: 183467 - DNA, 432 bp, Arabidopsis thaliana
  unsure (1)..(432): unsure at all n locations
gtagaaggaaaaggaaacgtgggagaaacggtacaagacttaatggcggaggacaaattaagagatcaggatcagggtcaagtagaagaagcatcaatggagaatcaaagaaactctattgaggttggaaaagttggaaacgtagaagatgatgccaagtcatcatcatcatcaagcttgatgatgatcatgaaggagaagaagaggaagaagaggaagaaagagaaagagaggtttggtgtgttaaaagggttttgtgagggtctagtgaggaacatgatagctcaacaagaggagatgcataagaaactcctggaagatatggtgaagaaggaagaagagaagatagcgagagaggaagcttggaagaagcaagagattgagagagttaacaaagaggtanagattagagcacaagaacaagccatggct

SEQ ID NO: 183468 - DNA, 280 bp, Arabidopsis thaliana
tgctaaaaaaaaaaaaaaaaaaaaaaaaaaaaaaaaaaaaaaaaaaaaaaaaaaaaaaaaaaaaaaaaaaaaaaaaaaaaaaaaaaaaaaaaaaaaaaaaaaaaaaaaaaaaaaaaaaaaaaaaaaaaaaaacgccctcccaaaagaatccaacctaacttacccttgaatgcaaattaaaaccccttcaaaattgtcaccaaaatcaaattacaaggccgtcttttaaaaaattactcacgggaaaaacccgggttttacccaactaaaaccccttaaa

SEQ ID NO: 183469 - DNA, 131 bp, Arabidopsis thaliana
attcaaagtacatttttatttatatcagtgacaccattttctcgcagatgcaccgattttaagagagaagaaactggagtcgctcgataagctagggcctcatgtactcgtgcatgagatgtgatagctct

SEQ ID NO: 183470 - DNA, 158 bp, Arabidopsis thaliana
ggagaagagatcgaaagaagaataatttggttaacctggtagaaaaattatgggcggcttcattatgccaacctccgtgaaaattaaaccaactgggttcaacggtgaaaaaaacggcggcaaaagaattaccttcccccaaaaaacctcttcctccc

SEQ ID NO: 183471 - DNA, 158 bp, Arabidopsis thaliana
tgggactcgtggttcgtcgcaactctctatactgagtcgtattaacgacagaagggggaaaaagacaataattcgaatcttacacttgcttcattatctcttatccgtactttatcgacgtcaccaccctcagtcacggactcacctgcagctcagat

SEQ ID NO: 183472 - DNA, 53 bp, Arabidopsis thaliana
tcgtgctcgtcccaagtctctatagtgagtcgtattacgctgcgttattccca

SEQ ID NO: 183473 - DNA, 124 bp, Arabidopsis thaliana
gtagttcgtcgcaactccctatagtgagtcgtattaatacagagctggaatctacagaaggttctatcaagatttcacattcactgcatccttcaatctaacttcaaatcacatggattctctt

SEQ ID NO: 183474 - DNA, 282 bp, Arabidopsis thaliana
ggccacacaacggagactacagatatgatattgtggagtttgatccaatagagtatcatgactgtcactgtccctgagtaaatgaaaacgttgctgctgccggatctatcaccaatatctcgggtacgtcaagttatgccgatgcagtttgtgagtcggaagaagctcttgatgcccatgactcgatccagtcgcttgaaaaccctcagaatcagacaatggaatcagaatcagctgcatctctgtgcagggatgatcaccggactccttcccagaagctca

SEQ ID NO: 183475 - DNA, 90 bp, Arabidopsis thaliana
gggactcgtaacacgtcgcaacaccctatagtgagtcgtattaaggagcgaaaggaggtaacgctgctacagcagcacgcacaggaccat

SEQ ID NO: 183476 - DNA, 106 bp, Arabidopsis thaliana
gcgtaatacgacgcaacaccctatagagagtcgtattaacgacagaaaggggagctcaaactcaaagtccaccaattgccgttctcggtcacacgggatgattcag

SEQ ID NO: 183477 - DNA, 343 bp, Arabidopsis thaliana
  unsure (1)..(343): unsure at all n locations
ggtgacgttttaaattaaagccccaatagcaaagatagaaaaaagaaactttatttctcttagtaatacaataatccttatagaatgggtcaagcaagatatcttttttgtttgtttcccttgttaatcgttataaacttgtttctcaaaattatgtttctggttagtttaagagctatgaaggatacgactaagaagaagaagaagaaaaaggatgaggcttgtaaggtttcaccgagaccttcgatctctgangagactgtgaaagtanaggataaagaatggtggaatagaatgtctgaatcgagcacaaagaggagtggtagtagcagtagcaacaaca

SEQ ID NO: 183478 - DNA, 190 bp, Arabidopsis thaliana
catcggtatagctcctataataccacagaccggtaccgctgctaaaaaactacataatcgctaccgctgcgacaacacgacacaccggtacggctgccatacgaccatagaatgctactgctgccagaagactacataatgctacggcttcgacaatactacagacaggtacggctgcaacaacaccaca

SEQ ID NO: 183479 - DNA, 234 bp, Arabidopsis thaliana
tcgcaaaaaaaaaaaaaaaaaaaaaaaaaaaaacgggggcgctctaggagatacacgcatatatacgcgtacacgagatctcatatctcctctagagtgacaccaattcacatcacaggggctctcgttacacaatctcgacagtgagaaaaccctggtgttacacattatacgccctgtacaacatatccctctttcgacatggggtttaatacccaagaggcccacagatat

SEQ ID NO: 183480 - DNA, 328 bp, Arabidopsis thaliana
gactcaacaaagcttaaccataaactgtgagtaaaaaaaaaaaaacaacaaacaaaaaaaaaaaaaaaaaaaacaaaaaaaaaaaaaaaaaaaaataaataaaaaaaaaaaaaaaaaaaacaaagataaaaaaaaaaaaaaaaataaaaaaagaaaaaaaaaaaaacgggccgcctaaaaggttcaagcctaacatacccttcaaaggaacttaaaacccctccaacaggcccccccaatctaatttcacgggcgttcatttaacaccgcctagacgggaaaaccccggcgttgacccacataaacccccttcaagaaaacccccctt

SEQ ID NO: 183481 - DNA, 152 bp, Arabidopsis thaliana
tagcttattcaattcctttgcttatcaaggacttataccttcccctttgtttgctgagccgatttgctctcatgatttagtgatgctgcctggtcaatgggtgtccaccggacttggatcactttttcacaacatgcctatgccaggaccct

SEQ ID NO: 183482 - DNA, 148 bp, Arabidopsis thaliana
tatataaaaggtatggaagttcatgtgaaaaacccaatgacccaccagaaaaagcggccccgccacacgatacaatctaacctaaccttcgcttccacgtcacatcccatctctactataccctcacctaaattcacttcccggtccc

SEQ ID NO: 183483 - DNA, 158 bp, Arabidopsis thaliana
  unsure (1)..(158): unsure at all n locations
ggccacaccaatctccaganaaggggaaaaacaaaattggtttcccgaaacctcaaaaaccggttcgcccaaccattgagaaattccggaaaggcaaaatttggctccattccaaccaaagctccgacatctccaagggcaattcccgccaaaacatc

SEQ ID NO: 183484 - DNA, 236 bp, Arabidopsis thaliana
tggttagagagctgggagcgagaagatacttatgctgctcttgctgttgtctgtgctgctgcttccgtggctgttgcctatacttgctacaaacagttgtaacgaagaaatttgtagccctaagatgattgtgtattgtgttcttataagacattgtgattttgtttctgctttcaaactacattttcctttcgattttaaaagaggttcttgtcagaactgtttgatgatatgta

SEQ ID NO: 183485 - DNA, 435 bp, Arabidopsis thaliana
  unsure (1)..(435): unsure at all n locations
ggtccagattctacgtttcgttttctctgaaaaaaggctgctctaagattatatccatggcggaagaagttgggcttgatttggaagaactcaggcaactccagaacatcgccaagagacctcgtgttctcaatctcatcaattccgagatttcaaacttggagaagctgagagactctgcagtcagttcaaatgcgaaaccaaaggtaccagttacagttcctgcaccggtttcttcttcgggtaagccggtttcttcttcggcattgaactatgtaactctcggaacattcagctgggatcaagacaatgacaaagtcaagatgtacatatccttggaaggtgttgatgaggacaaggttcangctgagttcaagccaatgtctttagacatcaagatccatgatgtacaaggaanaaattaccgatgtgcca

SEQ ID NO: 183486 - DNA, 405 bp, Arabidopsis thaliana
agaaggggaccacgagaaaacctaaattttattgaggtagcttattgcacggcggcgattagttgttttacttgttacaagaaaatcattccacggcggtggagaaaaaacaaaagagagcgagacaaagagagactacaatggctgttccaagaggaggaaatggtttgaatgaagaagaagatgttgacggagaaaacgctatctttgaggaaaacggtgttgactacgacaccgattccgagcttccctctcacctccgtgacttggccgccgctgctcaggccggagatgtcgccgccttgcgcaccgccatcgacaatttgaatgggagagtcgatgagccactcgaggataatgactcggcacttcacttggcatgtctatatggtcacctaacttgtg

SEQ ID NO: 183487 - DNA, 399 bp, Arabidopsis thaliana
cattcaaaaaaaaaaaaaaaaaaaaaaaaaaaaaaaaaaaaaaaaaaaaaaaaaaaaaaaaaaaaaaaaaaaaaaaaaaaaaaaaaaaaaaaaaaaaaaaaaaaaaaaaaaaaaaaaaaaaaaaaaaaaaaaaaaaaaaaaaaaaaaaaggggggcccccaaagggttccacccttaatttcccggcattggaacttaaaaccccttcaaaagggcccccaaatttaatttccggggcccctttttaaaaacttcttttcgggaaaacccctggggttccccaatttaccccctttgaaaaaaacccccttttcccaacggggtttaaaaccaaaagggcccccacttttccccctcccaaaaattttcccacccaaattgggaattggaaccccccct

SEQ ID NO: 183488 - DNA, 360 bp, Arabidopsis thaliana
caaaaaaaaaaaaaaaaaaaaaaaaaaaaaaaaaaaaaaaaaaaaaaaaaaaaaaaaaaaaaaaaataaaaaaaaaaaaaaaaaaaatagggccgctcaaaaggttcaaacctatacctacgcttgaatccaacatcatggctcttctcaggttttcactcaattcacttcacctggcggtctttttacaccgtcccgcttgggacatccttgcacttccctgaatttactccccttgcatcatatccccctttccccttttgcccttctaccttggaggccccctccgtttccccttcctaacatttgggccacctaccgcttttctcgggacgcgtccctgttcccgtacatttcccc

SEQ ID NO: 183489 - DNA, 404 bp, Arabidopsis thaliana
gatggaagagaccggtggggctcagattcagactcagatgtggaaatgaatgaggaaacagatcccataggtgaatttgatgaagatggagagattagtatggaagagtccatactaataggtgaagttgatgaagatggcaagattgttttggatgacactcatgccagtagcaacaagaggaaacatgaagaactcggttccagtgaccttccttcgaagaagaagaataagaagaagaaaaagaagaagaatgtcgaagcaacatcgtcgtcatattaagtctgatatgttttgtatttcactttgtacctgctctatttcagcttgtgtgctcagttttgttataattggtgatggaaaatggtgatttacatattaatgaagcaatttatttttctcac

SEQ ID NO: 183490 - DNA, 422 bp, Arabidopsis thaliana
  unsure (1)..(422): unsure at all n locations
ggctttgatacgatgttgctgagataatagaccggagaaagacgacgaagagatcagcgattttgtttactcctccaatggattcagctcgagaggtcagcgatggtagacttaccgtcgaaggtttctctgtagcttctcgagcttttgccgataagtggaagatacataaccaatcgttccctccatggtcttgggttcctctgatcaatcgaactctacttgtttcaaagaagcaggaggaaggttacttgtcgctggagaagatcataattctcagttcacttgaggaggaaattccagaggatgaatctctaaatgtagctactgattgcttggaaaaagaagaaacagttgatcacgcgattttggtcncaaccatggaaaatgaagcacactactatgatttccatatagtttac

SEQ ID NO: 183491 - DNA, 418 bp, Arabidopsis thaliana
aattcgagcggcatctttcaaaaaaaaaaaaaaaaaaaaaaaaaaaaaaaaaaaaaaaaaaaaaaaaaaaaaaaaaaataaaaaaaaaaaaaaaaaaaaaaaaaaaaaaaaaaccgggggcgctcaagggtttaaaatttaacgtccgcggatacgcgatcacatccctcctcaagggtgacccaaattcacatcacagggggtgtcttttaacaatgttgatagggaaaaccccggggtttcccacaatttaccccctgtacaaaagacccctttttccagagggggtataatatcaaagggccccacacatttccctttccaaaatttttgcaccccctaaggggaatgggaaacgccctgtgtcggggcataatacgcgggggttgtgtggggtatacgcacagtatgggcgaaa

SEQ ID NO: 183492 - DNA, 367 bp, Arabidopsis thaliana
ggggcggggcacctctctcgtcttcctttattccgtcaatgtcacgtttccaagtcagttcctgagctgtatagctttgctcgagtctcgtctagctttgctccgcctctctctcacgacatgattcgatcagtccttcaaaagcacggatagtatcaagtactgtaatcagatcaatcacgtcacatgtcatgtcagtggagaggatggtgtaccattctacgttactcgagggagggcaatcgacagttctggccctgctgaatcaaaagcatatccaagagcagctcatatcagttcaatccataatgtgatggaatctcgtctggacgaaacagaagaagaatactacagtggcatggtacgt

SEQ ID NO: 183493 - DNA, 416 bp, Arabidopsis thaliana
  unsure (1)..(416): unsure at all n locations
gatctccttgaaggtcttgcagattttgaaaagcaattaaatgttcccggaggaactgttgatgcacaagatgtgaaaagtggtggaactgataaagctgatgaatcgaagggtccaaaaggtacaaaaacaggttcgagcaatggatccaagtggaagtctatgctgaagaacatcgttgaacaagtttcccaggtcccaattactttgtctataggggtgtcttcgcttcgagggacactgtgtgtacacatgaagccgcctccatctgatcaactgtggtttggcttcataagcatgcctgatattgaattcaaccttgtctcctctgttggtgaacacanatcacaaacagccatgttgctatgttcttggtcaaccggttcaagacggcgatacgagacgtcatggtgctc

SEQ ID NO: 183494 - DNA, 281 bp, Arabidopsis thaliana
tacactaaaaaaaaaaaaaaaaaaaaaaaaaaaaaaaaaaaaaaaaaaaaaaaaaaaaaaaaaaaaaaaaaaaaaaaaaaaaaaaaaaaaaaaaaaaaaaaaaaaaaaaaaaaaaaaagctggacctcttaaaggtttaaatcttactttaggttaattacaaattcattaattcttctaaattgattttaatttcagttcagtggccttcattttaaatgtctgaaattgggaaaaccttgccttattccattttattgaccttgattaaaattcccctt

SEQ ID NO: 183495 - DNA, 399 bp, Arabidopsis thaliana
  unsure (1)..(399): unsure at all n locations
agaggagtgtgaagccattaggaaacttatctctgcgcagccaccgaggtcagagacgcagaaggttatacatgaattgaagaaggagattgcagaactcgaggctgagaatacagcaagttggagacttcttgaactaaggaagaagcagtttgcattgttgttgcatgtggtggatgagttgcaggagacaatggaggatgaacagaagagtatggtggaagaaatgcggaggaacattaccgctgatggcgctgaagccatgtccatcgattagctcctaatcttagcaactttgtcttcctcttgaatgctaaagaaacaaacctttcattgataagaagaatctgttttataaaanaaatcnattggaatcaaaagaaaaaaagcggccgctct

SEQ ID NO: 183496 - DNA, 405 bp, Arabidopsis thaliana
  unsure (1)..(405): unsure at all n locations
gattgttgcgaatttctgtgagattgagaatgcaggcggaggagataatatgccgtgtttcagacgaagagatcatcgagaattacctgaggccaaagataaacggtgaaacatcttcaatcccgagatatgttgtggaattggcagaggagctgtacactgtagagccttggctgcttcctcgacaagcagctccaattctcaaccctggcgagtggttctactttgggaaacgcaatcgaaagtatagtaacttggaaggtgttcattgcganggatcgtggatactcgaagacggttgcatcgcagtcctgtccaaggagacgggtgaggaaattggtggaacgacgagatttaggtattactataggaacaacggggataaagagagtcgtctgaagatga

SEQ ID NO: 183497 - DNA, 313 bp, Arabidopsis thaliana
tatgttaaaagaaacaaaaaaaaaaaaaaaaggcaaaaaaaaaaaaaaaaaaaaaaaatttaaaaagaaacatcaaaaatagctcacacaaccccaagactttcaccagaaaagatgtaaaaactttcccctcaagggggtcaactcctaggttcccggctatgttacccttaagaacactgttgccggcctccaaggtccatcacgcaggccattttttggatcctcctttaatcagaaaactcgggggaaacccccggtatttccccagctaaaaaacccggcattatccacccgttttaaaatcgggcag

SEQ ID NO: 183498 - DNA, 359 bp, Arabidopsis thaliana
agaaaaaaaaaaaaaaaaaaaaaaaaaaaaaaaaaaagaaagaaaaaaaaaaaaaaagcggccgctctaaaggatgcagccctacatgatccagccttacgatatcagtgcatcttcaagtcatgtcatctacaattcaattcaccgagacgtcaatttaacagacctcttgatttagaaacaaccctgaccgttgaaacaccttgaagctccttacattaaatccccctttcgacatctggctttctacagatgaggtcctaaccaataggccttcacaaaagttgcttaccatgaattgcgaatgggaaacgcccagtagcagcccactaatcgcggcgcatttagcgcttacgctc

SEQ ID NO: 183499 - DNA, 396 bp, Arabidopsis thaliana
gaaaaaaaaaaaaaaaaaaaaaaaaaaaaaaaaaaaaaaaaaaaaaaaaaaaaaaaaaaaaaaaaaaaaaaaaaaaaaaaaaaaaaaaaaaaaaaaaaaaaaaaaaaaaaaaaaaaataaaaaaaaaaaaaaaaaaaaaaaaaaaaaaggggccccccaaaagtttccaactttatttccccttgaatgaaatttcaaacccctccaaagggttccccaaatttaatttaaggggccttctttttaaaactccttaccgggaaaaacccgggttttcccaaattaaaccccctttaaaaaaacccccttttcccaactggggttaaaaacaaaaaggcccccaccttttccctttccaaaaatttccccaccctaattggcaatggaaacccccct

SEQ ID NO: 183500 - DNA, 314 bp, Arabidopsis thaliana
aggcgtcagtagacaacagcaggggaaccggttcgtggattacaacatccaagcttactcatattaccttgtgacacacaactcactcatcaatggacgcacttacaatagatcccatcacacctgccttcaccgatcatgcagtcttgcattccccagtcgtatctaaactccctgtcactcgccctgtcacacagttgaatatcgttaccactcaacacgtccgatcaagtatctcaaggccttgattcaatcgtgtcaagtacttggctcgattctctggagaatcaacgatcaaccttatcagatacttc

SEQ ID NO: 183501 - DNA, 300 bp, Arabidopsis thaliana
tgtatcagcgaaaaagatgtcaggcttagatttgcatcagcttaatatcatcttgaaggtcgatgtacagggatccagtgaggcgtgtaagacaagcccttcaagtcctcgctcaggagaatgtcggcgtaagattcttgctacaagcaacaggggatgtgagcggcagtgatgttgatctaccatcagcgagtgaagctatcgtttttggatttaagtgtcaaggcgtcgggttctgttaagaaagctgcagaagagagacgtgttgagatccgagtagatagagtgatgtaggagctt

SEQ ID NO: 183502 - DNA, 328 bp, Arabidopsis thaliana
cccacgcgtccgcccaggcgtcagtagggctgcgagatgactagagaaagggggaatacgcaatgtgaagaccctttacctatcttaggatcctcgtgagacacttacactatggtgtcatttgctaccagtattcaacaatttgactcatccaatgattgagagtcatcaggaatcatgatgtcaatcactgcaaaatctttccaacatctctcaatctcatgcaaactcttgtcttctcaaggcatctcgtcacagcacacaaaatagatgtcgtgatgtgtgcatgtgcaacagttcggacaacagtcactctagcttaatcaca

SEQ ID NO: 183503 - DNA, 301 bp, Arabidopsis thaliana
gcggcaggaatgaacaccaatgtcaaaaccgtggttaagtgtgattttcttccttatggtatcaatttcgatagcttagttgccacggggatgattctgcgatgtactagtccctgccgatttgctatccaaaaaactgcgaagttacgtaactgtatgatgagacctagatgcgaatgtaatctcgaaagatctttttggcggtgtattctttgcctccggatgttctggttatgatcggagactcccgaaacttgtcgcagtaatatcattagaggatcagttcagttagttcgaggag

SEQ ID NO: 183504 - DNA, 279 bp, Arabidopsis thaliana
tgatttcaaaaaaaaaaaaaaaaaaaaaaaaaaaaaaaaaaaaaaaaaaaaaaaaaaaaaaaaaaaaaaaaaaaaaaaaaaaaaaaaaaaaaaaaagaaaaaaaaaaaaaaaaaaaaaaagggggccgcccaaagggttccaaccttacttccccgtgcatgcaacttcaaacccctccaaaagggcccccaaattccaattcaggggccgtctttttaaaacgctctgacgggaaaacccctgggtttacccaatttaacccctttgaagaaaacccc

SEQ ID NO: 183505 - DNA, 174 bp, Arabidopsis thaliana
ggagccttcagcttcgaggacgggctgaagcttgttaaacctaaaagaaaaaccatgccaggctcctgcaaatgctgctaaaattcccagggttattaccaaagggttggacccaaaaaaggttaaccatttttgtaatccaccaatccagaaatataataaacccaccaagtt

SEQ ID NO: 183506 - DNA, 175 bp, Arabidopsis thaliana
tctgatgcaagtatacaacagacgggtatagagcaggcgaacagagcaagtttacaataggtgcttcatcaacggatctctcctcgactggtttcgctggtaaggctgtgaagctttcaccatgcagcatcacaagtccatggaataggcagtgctgttatcaagaacactgttg

SEQ ID NO: 183507 - DNA, 169 bp, Arabidopsis thaliana
tacggatacgagaaacgacagaacgggggaaatagtgtttctcccaatccattccggtcgtggtccgcgtcacaattgcttcctcccctaacaaaccaatcgacgggttttaactgggaacaaaaaaaccttggtaatcaacaaaagttggtttaccaacttggaacca

SEQ ID NO: 183508 - DNA, 137 bp, Arabidopsis thaliana
tcgagaccatgatccatcggtagcgattctaaaggacaacagcagggttcggcttccaacgggcgccccggcaaggaccagcctttctttatgatgatgcttatgttcgcatgcattagacttcataacacatctat

SEQ ID NO: 183509 - DNA, 279 bp, Arabidopsis thaliana
aaaaaaaaatcaaaaaaaaaaaaaaaagaaaaaaaagaaaaaaaaaaaaaaggaacaaaaaaatgaaacaaaaaaaaaaaaaaaacaaaacaaaaaagcgggcgccccaagggttcaagacaaaattaagctttaagtggacttccaaacccctcaaaacggcccccaaaatcaaattcaagggccgcccttttaaaactctttaaagggaaaaacctgggggttaccaaacttaaccccattgaagcaaaacccctttctgccacgggggttaaaacg

SEQ ID NO: 183510 - DNA, 385 bp, Arabidopsis thaliana
caaaagcgatcagagaaagggagtgatcaggggagtgctaagtgacaaccaagtggtcatctaagtagcattgacaacatcgatgcttgcgaaaattgctagctcagttaatatggcagtgactctggttgtaggatttattggaggattttgctcagtacattgtactgtgcaaggaaattagtcaacacagaattcagctcagagtaacgatctgccaaatcaacttacatagctagacacattggtccatccagatcttcggcaggatctgatgaagcagccatatatacaaccatatctgttatgtcagctgatgtgtccgacgcttggctcgactatactcatagaaatgctgagagaaacgcattggatatcgcacagt

SEQ ID NO: 183511 - DNA, 398 bp, Arabidopsis thaliana
ctgagcacaacaacatttccaagaaatggaaattctcgaagggagaactcagttgatgattctgacccgcccggggatagatatagagatgcttggcaacatgggatccaaaggaggcaaaattttggacggcctttagggagaagagattaatttataattccaactggtcctgaacatcatacactggtggagatactatgttacttgagatctcagagcatccgacctagctcatggtttcacagggtcaataccacgaaagggtgactcgaagtcatgaactgttgaaaagaggaatgcttgaaggctgtgtacgtcaaaaggtaacatgctcacctgatttgtgctggcgaaagatgattcatgccatttccttcaaagaactggcgctcttc

SEQ ID NO: 183512 - DNA, 234 bp, Arabidopsis thaliana
gatccaagaaacaaataaacagaattgcagatcaaaacactctgtttcattcctctgttttttgctctgttttgctctcacgccataacgtgttctgcttacagtttcgacttcatttacttcggaaatggaactgatctgatgacattccatggagacgccgagtacgcttcaaagcctgatggtatgaccaagtcaggagcaattggcttgagccgtgacaatgtcccattc

SEQ ID NO: 183513 - DNA, 126 bp, Arabidopsis thaliana
cgcatccactcacacgtctacccacacatctccgattcgtctgtacggctgcgaggtaacacattttgatactgctgctataagactattgaagataccgctgctatattactccataatggtaca

SEQ ID NO: 183514 - DNA, 347 bp, Arabidopsis thaliana
agacgagggacttgtagccgttctcgtttaaaagaagagatttggtgcttgtttgtttgtttgatcttgcatatgaagtattggcgaaagagacattctctttctacggataggtttttgaatctcatgtcgttatactgatgcatcacactgagaaaacgttcatattcttatagtttttaacctcgtgttttgtgtgttgggttaaccctggtaaattaattgataaatataatggaatccaaaacaacaaaaaaaaaacaaaaaggtaagaaagagaaaaaaaaaaaaaaaggtaaaagagcaagaaaaaaaaaaaacgggcgcccctaagggttcaaagcaaa

SEQ ID NO: 183515 - DNA, 314 bp, Arabidopsis thaliana
ggggaggggagatcgaatcaagagtagtttgatcagcttgtcatgtgagtaatggctgcgtcgctgcagtgatcctcgctgccgttgcattgagctggtctcactgcacagaggacagcagcgaggcgattagagtcgcgtagctcagctcatctcgcctttccttctgtcgtgactcgagtgacgtcgatcaggtccggaacgcccttccgttctgacggcaccgtagcattgacgtacgggatcgactccacgcgtccagcaggcatggcataggatgttgagttgtccgttgagtcgtcaggtactgacct

SEQ ID NO: 183516 - DNA, 141 bp, Arabidopsis thaliana
tccgaaaaaaaaaaaaaaaaaaaaaaaaaaaagcggccgctctacaggatctcaacatgattaaaccttaattacacgtgaaagctcttccatagcgctaccaaaatgtaactcaaagtcacgtcacttgaccgtctcttt

SEQ ID NO: 183517 - DNA, 218 bp, Arabidopsis thaliana
gagggtgatcaggttcctggaggacatttcttccagtttaactgacttggctattaaagagttttccattttggtacacttgaagatgaaagaagaaggggagattccatttggcgtacaagatcttttacaccacataacgagggtacaggagttgcagtttgatcttgaatttggcgatatcaagcaatattttcctgtcaacttggtcctttccc

SEQ ID NO: 183518 - DNA, 304 bp, Arabidopsis thaliana
tgggatttgttggatataactcggactgactcggctgaaaaaaacccagtctgagacaagtcaatcgacgaagcggttcttgacacgccggaagcgcacaggttgtcagatgatatactctatgtcatgaatgaatcggatactgaaccagtgtgtcaggatgtcgacacggttatggttactttctgagacaagttattatgagtcaacaccatgatcgcgcattgctccactaacgaaggccatgctcaacctgatatcggatgtcatcttgaaacatccgatgatgatcttggcttagcat

SEQ ID NO: 183519 - DNA, 403 bp, Arabidopsis thaliana
ggcgttgagagaaaaacgttgaacgatgggagccggtaatggagaaacgccaaaacctacacagatttcaatttctaaagatcaattcctcgcttggaaacgccaaaaggatgctgagttattagccaaacaagctgaagcagcaaggaaacgacaagaggacatagcttcaggtcgtgttccaatgaatggtcgtgagcttttcttgcatgagccttgggttttcgacgatacccatcattgattctggtctattcactacttcctcataggtgatttaagacatttcctcgatgatttgtgatccaactctgtttctcttttgttgttgtactctcatgttcccacttttgtctcaagtgttaaatcagaaatttagtcctcagtaattgtgacttaatcg

SEQ ID NO: 183520 - DNA, 291 bp, Arabidopsis thaliana
aggatgagcaaaaaaatagaataaacatgtaaaaaaaaaaatggaagcatcaatgaaaaaaaaaatgggtgcgctcgaggatatcagctttcatgtacgtgaatacgacatcttaaagcttctcgacggtcacacaaattcaattcacaggcggtcttttttcaaattctcgaaagggaaaaaacactgatgatccccattaaactccctgcagcacataccccatttaccgcatcgagtcttatcgcaaagaggcccacggatatcgcgtttcaaaatatgtccacacct

SEQ ID NO: 183521 - DNA, 303 bp, Arabidopsis thaliana
aacgtataatatggctggagtgataaagttggaaatgcatggtcatggcatgcaatgaattgtggccggtcaaagccgacgctcaagaggatacaagctgaggtacccttccatgccaccttggcaggcttcaatgccgacatgaaacttcgtgtcccaggcagtcattggtgcagctcctgcctgggaaaccccaggcgtatcgccagtaaaaccccataccgtcaacacgcctttcgttaccttgagtctgacgcaaaagcccttggtcgatgtcccatcacagcacttgcacctcgacat

SEQ ID NO: 183522 - DNA, 319 bp, Arabidopsis thaliana
tggggagctccgaagagtggaaacataaatggaggaagaagagcacgaggtttacggtggagaaatccctgaagtcggcgatacggatgttcgcgatccggataccgatatgtctgcagccgatgaggacgcggttacggagcttgctgggatgaagaggagattaggggacatggaggaagaacctgctgctctacgagagatgcaggcaaaactcgaaaattaaatgggagctactcaagatcctgctactatggctgcaattcaggacggaacggagaaggtggatgctcgatcagtttatgtgggcattgtcgac

SEQ ID NO: 183523 - DNA, 174 bp, Arabidopsis thaliana
acgtgataagcacgataatgtcatcgacaccaggtgctgttgtgttgggagattatgtgatagagccgcataaccgaatgggatggctttgtccttgccatgatgactctagatccagtaacccgttgcttagagagtcatctgagctgtaatcttcatcttcgtcctctgcat

SEQ ID NO: 183524 - DNA, 272 bp, Arabidopsis thaliana
aggtgtcagtagagcagagaaaggaaccccagaaggggatcacatccatcacttataacatcgcggcagctctcaaggttccatgcttacatacccgtgaatgacaggtcagagctcatctatagtgtcaactaaattaaattcaatggccgtcgctttaccacgatctttaatggaaaaacacgatgcgtgatgcaacttaatcgcacttgcacgagattctactttctccaattggtcaatgaccaattatgtacgcatcgattgcccat

SEQ ID NO: 183525 - DNA, 388 bp, Arabidopsis thaliana
atccgtacatactgctgccaaaacatcagtacgggtggaaaaggactacagacagggggggaagcatatcatgtgaaaggttaatctctgaatcactgttcagttcctctatgtaaaacggccgttacgttacctaagcggccaactgtctcggttgccaataatttgcacttcaatcaccgggtaactcgtaactgctctacagagtcgggtgatcattatgttgtggcagacgaccatcagtactgtcaccaacatgttattaatcgaacgcctcgactttacaagcacagagggaagttaccaacggatgatggggttattaccatcgatgaggaggtaattaccaatgatgaagacgtaattaccacggatgaggatgaacatc

SEQ ID NO: 183526 - DNA, 216 bp, Arabidopsis thaliana
cgggtccacccacgcgtccggatacgcgtccataacgctgcaaaaatcagatgttggggtcataaaagattcacatacaactgtcatgttcacctcgtttgacatttaccggatgcttccatcatccgaactaccgagacatgttccacatctgtcttcaatgtcgccattacgtgagataggcgattaccttcgctctaaaagattccgatctcc

SEQ ID NO: 183527 - DNA, 123 bp, Arabidopsis thaliana
aagatgacagaaggcgggactttggtaccgctgcaatgcttcgacacttaggtccagattcgtcaccatgacatgacggtacggatgccactctccacaccaggtgggattcagttacacact

SEQ ID NO: 183528 - DNA, 422 bp, Arabidopsis thaliana
gggtccacgcaagcctctagagagaatcctataaaaggggggggaatttgatttgcatcggaaacaacgattctggtcagctcaatgttattgctccagatcaacctaacctttactcggttccggcgataacggctgatgagttgagtacaattttggatccgagagttggatcaccggagctaggtgaaggagatgcggtggagctggtggcttatacggctatgcattgtgtgaatgcggaacggagaaacacgccgacaatgacggatatagtagggaatttggagagagcattggatttgtgtggggatagtcatgggagtatctctagtggcatttgttctattgtctctgattgacagattaaattcaaacagattgagtcacttctcgttttacttttaaaaaggaactttttt

SEQ ID NO: 183529 - DNA, 304 bp, Arabidopsis thaliana
agatgacgacaacgagggagagggcccttcgctgttcatcggaatccccagacaactcaatttcagcaatctcttatcggcttcactgatcatcaatcatgttgggcaactgcagattctgcgattgtgatgacaggagccattgcgtgaagtaaggcacgaatggcaactgcgacagctacgccactgatgcaagctagaccgccgccatgttgattcacatcggtcccatagacacgaccgctaactgctactggtcctactgcaccgcttacatccgctgcagttgcaggtgccgttgcat

SEQ ID NO: 183530 - DNA, 169 bp, Arabidopsis thaliana
gggggagacagtgattaatgacgacaggatccttcgcagctgagatccatggacgagacttctctcaggcggatctgtttgtcatagcttatgtgaagcaccaacaataatgggtttgttggaagcttatcgcatttcgcttcatctcatcttcatcacagcatcaaat

SEQ ID NO: 183531 - DNA, 382 bp, Arabidopsis thaliana
caacacacaacgggatcgacgttaaggttactaaattgcgacagcaaggtacggattcttactaaacacagagcagtacagatgtggcaaaacaactcaacgccgttggcgtcaccgtactcttgctgggtcctttggtgacgtcaactcatctcattgtcatcgatgctgcatacttcacgttcttaggcaagtgtgtgccggattacatttacatgatcaaatgcagattgcgtaacatatcgtgtcgctctctacaagagtcaagcaatatgtgctgtacatgttaaaggagtcgcagatcaatgcgaatgtcacatctcgtaaagaggttaacgtgtaacatttcatttcaatcggtgtgcccacgggatttcacgtg

SEQ ID NO: 183532 - DNA, 207 bp, Arabidopsis thaliana
gactcccaacggatatattcagaatggcatacaacaacaacctcattcttccttctcagtagccgcctcaggcataggcctcatgacaccggtatacgcgtttgacgttttaagggattcgcctgcggaatcaaagcctctatgcgtcacgatcgtgatgtcatcggctgaaaactcttcccatgaaagcagggtcgaatatgcaaa

SEQ ID NO: 183533 - DNA, 154 bp, Arabidopsis thaliana
agacgccagcaaacaaacgacaggggggatcctctgagctgccaaataatctggatttcagacacgtagatgcatgtgttcatcatctcataggtactaacgccactgtctgttcaaagatggtaaaaaatgtgtgcatatctgtcaacgaatg

SEQ ID NO: 183534 - DNA, 159 bp, Arabidopsis thaliana
tgctacaagacaacaacagggtgctgctgctacaagacgacaacagggtacagctgcgagtatacaatcgacaggttcggttacgaaaacacaacacaacggtacggctaccacaatacgacacatgggtgcggatgcgataacacgacacaaaggtac

SEQ ID NO: 183535 - DNA, 406 bp, Arabidopsis thaliana
gacgaaagaaaggggggattggcttgtatgtggctgcgtgaggtgatagtattctgaaaagcatccattggcgtgagtgacgccaaatgagaattcgtcatcgtgagtcaatctcgaatctcatcggagcatatcttctccaattcggattcggcgctgcaattgaatcttctggtaagcgatgatggagacatctgcgaggatttgttgcggacgaggaagtgcatgctccgtgcgtcatgatcgtgcaacgttaaatttgagttctcgatcggcatgtgttgttccaatgatcaatggacggagtatgtgtgagatggggaagatttcgatgtcgatggacgttatgtcaccaccgtctgccagggtgaagattgacatgatcggtggcatgaaatgccgtgga

SEQ ID NO: 183536 - DNA, 94 bp, Arabidopsis thaliana
gtacgatctacattccgggtcaacctacgttaaggtgccaaaagaacacaagaaggggcaatcctccaaaaaagaaaaataaaagaataacttc

SEQ ID NO: 183537 - DNA, 265 bp, Arabidopsis thaliana
agatgtcagtacagcacagaaagagaacagaaggggatggaaacattctcaaacgctgcagtcagtattgtcttcagcatcatttatgcatctcctacgcaaggtctagtcaatctttgcgcaggtgtgactcttgatttaagttgtgtgatgtctggacctggatcatcaatcactctatccgagtccgtaattccctaatcaatagaatctcagcttcaattactccggatggatccgacacactcctatcgtttagaattga

SEQ ID NO: 183538 - DNA, 358 bp, Arabidopsis thaliana
taaagggaagggaagaaatcgatttcagcacctataaggtaatggctgccttatcatcaacaccagctgaaccatatcacaacacaccgctcaaatgtcccatcgaatggattaaaacaattgccacactgacacacgacgacagttttgctggtgatgttgaaactgctcaatcctcatgctgctactgggcttgtggaccagtacaagattgtatcgcctacggctctgctgatatcatatattctgccaacaattacagacacttcaatcagttacaatcacactcgaactacctcatcagggcatgatattatctctctaatcacgggacatcactctctacatgtcatagttg

SEQ ID NO: 183539 - DNA, 238 bp, Arabidopsis thaliana
tacagatgcgaaacagatgacagaacggtatcgtcgtcatcaatcatacatacgggtatcgttgcttgaagacgacagaatggtaccgctgcgagaagcttatagaatggtacggctgcgagaatatcacagattgggccataaatctcgccacgtgtcttccttcttactcacggtcgctctagagggtccatccttactctaccgtccatgcaatctcatcgctcttctataatgt

SEQ ID NO: 183540 - DNA, 233 bp, Arabidopsis thaliana
tacagaaaggggataaaaaaaaaaaaaaaaaaaaaaaaaaaaaaactgaagcggacgatcatgaagatctacgcttacgtacgtgtgactgcaacgttctaccacttcgacagcgtcattcaattcaaagtcagtggccgtcgatttacaaggtcgtgacagggaaaaccttaccgatactcatcgtaatccagtagaatcacatatcactatcaggagctggagtgataacg

SEQ ID NO: 183541 - DNA, 212 bp, Arabidopsis thaliana
actccacgggggcgtcacaaaggctgctggcatactacacgagggagtcgatgccagaacgcactcgtcagcgttgcttgcgacatcatatgtctaccgggaagttcgtttcgttccagacctactaatcgtttgtccaacgctacagctctccttgtgagtcacccactttcacatcatcgcccgtcattttcgaacaaccgttgtttcaa

SEQ ID NO: 183542 - DNA, 191 bp, Arabidopsis thaliana
gactccaacagagaagcaaaaaaaaaaaaaaaaaaaaaaaaaaaaaaaaaaaaaaaaaaaacataaaaataaaaaaatacatacaaaaacaggcgctcatcatgataaaaccggacgctctacatgatttaagcttacttacccttccatgtcatctcctagatcttctatactgtcacctaatttcaatt

SEQ ID NO: 183543 - DNA, 174 bp, Arabidopsis thaliana
gattctccgaaaaataaacataaaaagaatcgtcctaagacttctaaaaatgtcaaaaaaagcggaggcactagaggatccaaacttaaatacgcgtaaaagagaggctcgagccacaggataaaatgttacctaaatctaattcaaaggtcatcgtttttcaacgttgtcacc

SEQ ID NO: 183544 - DNA, 187 bp, Arabidopsis thaliana
aatcacagtacaggtttagttaaagcagtgacaccagtttcgccccacaacacggaggtcaacttttgagagagagaagaagaaccgggcgctcgagaggatccaagcgtatctaaggatgcatgcgacgtgatagcgcatcgaatgtgtccctaaattcagctcactggctatagctcgatcatcg

SEQ ID NO: 183545 - DNA, 157 bp, Arabidopsis thaliana
ctccctatagtgagtcgtattaaacatggcgaggccatgataatgagtcatggcttcgcataccattcgacaaagatattggttccgctactcgcgggcttctgggtgtcatcgttggtgggcgtccatactacgttagagttctccgagggtgtca

SEQ ID NO: 183546 - DNA, 375 bp, Arabidopsis thaliana
cgcgggtcgacgcaagagtctatactgatgcgtgataacgacagaaaggggtgtggtagttaactggtgagagagttcaacatctaatctttctctctctctctctatcttttatctctcacactcgtaaaatgcttcttcgagctcagatctcagtctcacttccaacgtcgtttcaccggggtagtttgatccggagatcaattacgccgttaagtagggttgttgcataggccaaggagtacagtgacactgttggatttctggagacggcagctatagcgggtagtttagtgtctacgccggttattggatggttaatctacactttgagtgaccacgggatgtggcttacctcagggaccggccggttta

SEQ ID NO: 183547 - DNA, 93 bp, Arabidopsis thaliana
gcaagtctctatactgagtcgtattaacgactgagtggggctacacaaagatgtaaaaatgggtctactcacaatcctgtggaatcggttaat

SEQ ID NO: 183548 - DNA, 309 bp, Arabidopsis thaliana
gactccaacagagaagcaaaagaaaaaaaaaaaaaaaaaaaaaaaaaaaaaaaaaaaaaaaaaaaaaaaaaaaaaaaaaaaaaaaaaaaaaaaaaaaaaaaaaaaaagaaaaaaaaaaaaaaaaaaaaaaaaaaaaaaaaaaaaaaaggggacgcccaaaaggttcaaagcttaattagccttgaaggaaagttcaaagccctccaaaatttcaactaaatttcaattcaagggccttatttttaaaactcttaaagtggaaaaaccctggcttaacccaatttaggcccctggaaaaaaaaccccttt

SEQ ID NO: 183549 - DNA, 202 bp, Arabidopsis thaliana
acattcttataaatgaggacgcaggagctctagcgtttttcagtcaccttgtagttctatggattgcatgaactaggattaattatacaactttgatgatcgcatttgctttgtcggggcataccgatttgtcgaatctggtgtttgatcatatgattaatgatccagtggtcgttgttaaattgatcgcatgaaacatgtg

SEQ ID NO: 183550 - DNA, 330 bp, Arabidopsis thaliana
  unsure (1)..(330): unsure at all n locations
cagtgcagggtacagatgccaaaagacggcaaaaggatacggctgctataatactacaggagggtccagctgcgaaaagacaattgaaggaaaccgttgcgaatagccgacaaataggtacagctgctagtccacgaccgacgggtacagctgcaataagaccacacacgggtatggctgcaacaagacaagagaaagggagagacactttttctaattttctcatcatcgtcatctttctcagcttttagatagaacaacgagattccgaatccatctgtttcacngagggagagaaaggcaacgacaatggcagattagctcaccgac

SEQ ID NO: 183551 - DNA, 256 bp, Arabidopsis thaliana
gaggtccagctgctaaatgaccacatcttggtactgctcctagaacactcctcaacgttaccgctgcaacaacaccacacattggtaccgctagctataagacgaccttaaggtctcgctgctcaaatcctccaccagggtacggctgcaataaggcgacattacggtaccgctgcctataagacgacataatggtaccgctgctacaagatcacagacgtatacggttgcgatacaactacatattggtacagct

SEQ ID NO: 183552 - DNA, 310 bp, Arabidopsis thaliana
gacgcaactctctatactgattcgtattaacgacagcatggtccagttgcgacaagacgattctaagggtgagctgcgccaatcacgacactgagttaacgctgcgctcacacgacagtgggctcacgtcctggaatatcctcatccggactctgggatgcaccgtcactctcttcactatcgggctctttcgagtctggtacatgtgacttctgccatctaaatctcttagggaggatctattgtgcgggaagtctggtgccgccagccgcggtcatgtcacctccacaagcttctgtttaaattgttg

SEQ ID NO: 183553 - DNA, 212 bp, Arabidopsis thaliana
tccacgctaggccgcagtagcctcaaccaaagttgcaatcgcaactctatacggtcttagctcctctaccattgcatctgacgtcacagctcttctctcgtctccgccgtttcatttcccttgcttatcgtttagtcagctccttgaatgactatcggcgtctcggttactcacggcttgttgcctctacatgccttggcccgtaccgccat

SEQ ID NO: 183554 - DNA, 277 bp, Arabidopsis thaliana
aataacgaccgaacggggaagagatgcaaagaagaatagtttgatcatcgtgagaaaaaagacacggatgcatctgtgatgctaacggctgtgagcaatgacctcagatgagtttcacgcgtgttcaagacggcggcacagaggattaccgtctcgcatcatatcacatccatccttcacgattatcaccattgccgtcaagaagatgaagactgtcaatcccttcgggattaatggcagcatcgacttgatgagacagcgtcaacacctctggcag

SEQ ID NO: 183555 - DNA, 304 bp, Arabidopsis thaliana
taaaggtcaccgccgataaagtacgacaaactcgctaccgcagcagcagacgacccaaaggtcaagatgccaatcgaaggaaccaaaggtactgctgcaacaacaccacacaccggtctcgctgcaagtacacgagttatagctaaagctgctcaaacaccacctcatggtaaagctgccagactccaacagggtggtatcgctgcaacctcagcacataacggtaacgctgccaaaagactacagtaagttcaagctgccagtagaccatcgcagtttgttacaaggctgagaagtatctcaa

SEQ ID NO: 183556 - DNA, 206 bp, Arabidopsis thaliana
ggagaaaagatcaatataataatcgtttgataatcatgtgggatgcatcattgatgcttcagtcaggctaacttcggtgacattgattcaaggtggtttcaacgtgggcaagacggttgctatcggactaacgtcgctcacactagctcgtcactctctcaaatgtgtcgccaatgatgtcaagaggatcacgattcagaagccct

SEQ ID NO: 183557 - DNA, 352 bp, Arabidopsis thaliana
ggaaaggcaaatttctcaaaggaagcgaagccctagcgtcctctctctgtcttctcgtttctgcgccgattcgtagtctgttgtgcgcttgcctctcctcttttggattagcatacctctcactcgcatcaggtaagaagtttggttcagatttagtgaatctcattgctttagtttcaaagcttattagctctctgtgtttttgcgttggttattaagttggaatacttaacccttaaagcaactactggaattttgctgaaacatagttagtctctatgctttgtttggattgaattgattatgatggaatgcaacatagttatcgctgtgccttgtttggatggaatgt

SEQ ID NO: 183558 - DNA, 399 bp, Arabidopsis thaliana
tcgttcggaccacgcaatctcgtctagacttcaatcataatacagagaggatacttgatgcatgaaattagaaagtaactggtcgaccttctctcgtttcaagttcttcatgatacagttcaccgacagtgatcgctggatgcagccgatgtgtaggatcggtcattgtagtaacaccgttagatgaagcttccattacatatgatctaggtagatatacctatcactccatactcaatgagtcttaggatgatcatactgcactcagtctcccacatctgatcaatgttctaggcttacatcgtatctattagtggatctcaggatctcagcaactctcagtgcatactcagctacagcttcaatgatgacatagcatcgtctttatgggatcatcgt

SEQ ID NO: 183559 - DNA, 127 bp, Arabidopsis thaliana
tctatagtgagtcgtattaacgacagaagggtatttaaaaaaaatcgataataaaaaaaaaaaaaaaaaaaaagaaaaaaaaaaaataaaaaaaaaaaaaaaaaaagataaaaaaagagggtcaaga

SEQ ID NO: 183560 - DNA, 395 bp, Arabidopsis thaliana
gacaagcgaaaagaaaaaagttaagcgaagaagacgaaagagagaaaattttaggtttttgatttttcaatggcgacgacgacgggacacgagagatcaaagactcttatcaatttctcgttaccgaagttgtgggggactcaacatccgaaacagagtcttctatcgcagtcgctaagcgtcacattcacggagaatccacagccaacggcggtggtcacattgcaggagcagcaattgacggattggattacttctccggtgacgcgacggttcggaatcggcgccgggtttacctgggctgggtttttagctttcggtgttgtctccgagcagatgaagaagtcacgactcgatgtgtttcaggaagaggataacacaagaggtttagaaaa

SEQ ID NO: 183561 - DNA, 115 bp, Arabidopsis thaliana
gcaactccctgatgtgagtcgtattaactacagaaggggacagatgagacattagtagaataggttattgattcgattggagtacacatggttacagctggcttacatatatatc

SEQ ID NO: 183562 - DNA, 202 bp, Arabidopsis thaliana
tgctaaacaacaacatcaacatcacacaccgataagaaataaaaagtaacaaaaaaaaaaaaataaacaacaaaagcggcagctcaaaatggatccaagcttaggtacggctgcatgcgacgtcaaaactctaccattatgtcagcggaattccgttcaacggctgtcgtttgaaacatatccgaatgaaaaatctgcttgt

SEQ ID NO: 183563 - DNA, 269 bp, Arabidopsis thaliana
aatccataaaaaaaaaaaaaaaaaaaaataaaaaaaaaaaaacggccgctctaaaagatacaaggcatcagtacgcgttcatgcgacttcaaagcactctcgataatgtcacctaaattcaagtaactggtcgtcgttttgcatcgtcattactgggatagaccacccagtgggtcaacttaaacgccatggtttaaaacacgttttctcctcttggggctggtcccaagatgcccctatggatcgcccttcttaacggtttcgcaacc

SEQ ID NO: 183564 - DNA, 250 bp, Arabidopsis thaliana
ttgtcaaaacgacaaaaagggggaattaaaaaaaacatgaaaaaaaacgaaaaaaaaaaatcacaccggacgcaaaaggggatcccaacaggattcaaccttacatacacgtccatgcaacatcaggagagcatcaaaatcaccactgaaaggcactcaagtgactctcggttaaaatggtactaccagggaacaaccatcagaaatccaccataacagtctcgagaaacataaagctctcacaataagt

SEQ ID NO: 183565 - DNA, 277 bp, Arabidopsis thaliana
attcgtaaaaaaaaaaaaaaaaaaaaaaaaaaaaaaaaaaaaaaaaaaaaaaaaaaaaaaaaaaaaaaaaaaaaaaaaaaaaaaaaaaaaaaaaaaaaaaaaaaaaaaaaaaaaaaaaaaaaaaaaaaaaaaaataaaaaaaaaaaaaaagggggccccccaaagggttcaaacctaacttcccctggcatgcaatttcaaaccccttcaaaggtgcccccaaatttcatttcacgggccttcttttaacaactcctggccgggaaaacccgggggt

SEQ ID NO: 183566 - DNA, 352 bp, Arabidopsis thaliana
tacggctgggaaagacgacagaagggttgtttgacaaaaaaaaaaaaaaaaaaaaaaaaaagcggccggtcgatcggatggatgcatacttacgtatgcatgcaaggtaagacatcttccatcgagacagtcaactacatttaattgaccgtccgttgacaaagaccttactgacagaaaaatgcctttagtcaactaaatcaacctgcatgaaatacatctttcgttagctagcttaagtactaacaagcacgcacggatcgatcgtcctaacaattacttacccagactgaatagtgagacggaccctgtctgtgcccattaatcaagggcggtgtgtttggtagtcaca

SEQ ID NO: 183567 - DNA, 135 bp, Arabidopsis thaliana
tacgcgctgccagaagacaacatacaggtacatcagacagattcctacaaaatggtactgttgccatatagacccaccatagcgcgaaaatcacatggacagtaccaatcaatgtcatctcccctgattcacgat

SEQ ID NO: 183568 - DNA, 200 bp, Arabidopsis thaliana
cgttacggttgctacaatacgacagaaggataccgctgccacaatacgacagaacgatacggctgcgataatactacagcacggcatcttgtcacgtaaacacttggagttccacatgaataagatccattacaagaatggcaacggtgctgcttagagtcacttcttatctgccttgagcttttgacttacaacatgtt

SEQ ID NO: 183569 - DNA, 263 bp, Arabidopsis thaliana
tacggctgcgcgacaaaaagggccggcggctaccactgacgatgaagactctggtgctgggcttggacgttatgcgaagatggctcagggttacttgaactgatttgatctttaactgttgttcatcattttcgtaatcgtaaattaaataactactatcgtttgtgactaatttacgttacttcgtctacgtttatgtggagtgacaattgcgtgtgagaccctctggttatcatgattctaaaccagctctgtcgtgatta

SEQ ID NO: 183570 - DNA, 125 bp, Arabidopsis thaliana
tttcgataaaagacatcaaaatgagggcaaagataacgagcgtccgacataaagggaaatcccctaagtatcatcatcgactactgtcaactgagcgctcatgcgcctgcaaatttaattacatc

SEQ ID NO: 183571 - DNA, 106 bp, Arabidopsis thaliana
tggttacgacacaacggtatcgctcctagaacacgacacaagggtacagctgccaataaacgacttaaagttactgctgctacaatacgacagctaggtatcgttg

SEQ ID NO: 183572 - DNA, 135 bp, Arabidopsis thaliana
attcaataaaacatctggaaaacgtcggtaatgctcagctgaagctccagccgctctatacgatccaaccctacatacccatgtatgcgaccttctacctcttcaacaatgtcccctacattcacttcactggcc

SEQ ID NO: 183573 - DNA, 102 bp, Arabidopsis thaliana
gaacgaattcatgaggatgagagaaatgataattcttctgttgtgatggagcttattctcatcaggctgcaaccttttccgttccctcctccattttcaaat

SEQ ID NO: 183574 - DNA, 372 bp, Arabidopsis thaliana
gacgacagaagggggaggaagataaagaaagttggaaaatggcaaaccctagaagagtagtgatcgagaaccagagattgtcacctttaatcaacctactgaagaagcctcaagcgattcctctgcttctctcgttgttcctcttgctcacatggatctccctcaggttacaacactcttcacaatcacacgtctcttcgtcctcttcacatccgaaatcgacggtaaatagtcatcccgatttgaaagtttacgacgacgacgataaggctaatttggtccggttcggtttggcgtcgctttctcctgctcggaaagacgaccgtggttggttgcttgatcccgttatccttgctcgtgaatctgagctca

SEQ ID NO: 183575 - DNA, 366 bp, Arabidopsis thaliana
cccacgcgtcgcccaccgtccgccgaactcagcgcaggaacattccgtatgccgcaaaagcgtgaaggggacctattaaactctgatgacaagctggatgagatggacagacaattcatttcgtcgtaaagactgatggtcaaacctaggtggtcatcaggcactgatgaggcttcatcctctaacaggcagtcaatactgggccacgattgtgagaagacaggcaggattcactaggcaggaccattgattccaggataaagcaacttggagaatctaatcagtcttgatcaaatacaatgtagattcagcagatcacactgatctcactctgtattgactactgaaaacgacgtcattacgcat

SEQ ID NO: 183576 - DNA, 333 bp, Arabidopsis thaliana
agccgtcagcacacgcctcagcgcatacgtcgccacaacactccgtaaggctacggctgccaaataacgacaaagtggtccggctacgtaaagaccactgaatgctacggctgcgacacaacgacagaagggtcctgctatgataatcagactgcaagctacggcgttcacaacatcacttaagagtactgctgccaaaaggctacatagagttacagctgcgaaacgactacacaacggatctgccgctataatactacagaacggtaccgctccgagacgtctacagtatggtactgctcctagcttaccacagatcggtacagctgctat

SEQ ID NO: 183577 - DNA, 65 bp, Arabidopsis thaliana
tcgactgggcgtcggttcagtcgagcggtcagacgtcgatacagcggggaagtgtcatcgacaga

SEQ ID NO: 183578 - DNA, 242 bp, Arabidopsis thaliana
gaagaagagatcgagagaagagtagattgttcatcttgtcataaatggagaggttgcttcaatgatgctatcctatgtgagattgagatcaactggtttcaccgttggcgaagacgtgtgcgctagaggattatagtcgtccacaacgagccgtcgctccatcatcattgaccgtactgttgtcacgtgtatcaagaactacattcccttcggtattaacggtagcatagacttcatggaca

SEQ ID NO: 183579 - DNA, 156 bp, Arabidopsis thaliana
acagccaaaaaaaacaaaacaaaaaattatattcaagagaaaaaaggaaaaaatgcggttgatctacagtatcgaagcttaactctcagtctcagcaacatcagagcccttccacaatgtcacattcgttcgattcactggaggtagattaacaac

SEQ ID NO: 183580 - DNA, 413 bp, Arabidopsis thaliana
gacagacaggggtgtttatagttcgatcaatcacactgatgctggatgtgtgtgtgtacagatggttgccatcccagctatctcttccctcaccaagctcgttcgagatatatgtgaacgccccatggatcgatcaaatgctggctgcgcccttgcttgcattccatataaatgaaacagacaaatactccatccactttcatgcaagctcgatcgctttcacgctcactgttgggagtcatccttcagtaactagcaagttaattattcattcaaatatgtctctctcacacataatggagtgtgtgtgtctgtcggttgagtaatgcatccatctatcatccaccttccgttagacattgtttggtatgcatactaattgcatacagtctaatcactgtctgattctagct

SEQ ID NO: 183581 - DNA, 168 bp, Arabidopsis thaliana
gatacgggtgctataacacgacacaaaggggcttaaggtaatgcagcacatcagtttgagataagtcagcatgcaccaaaaatgccagcagcatttgcagcaccatcgacggtgataggactcggaggatcatccatcatcaccaggtcccttctcctcaaccttttt

SEQ ID NO: 183582 - DNA, 149 bp, Arabidopsis thaliana
tggtgtttccagtggcgagacgggtgagtaacgcattgcaaactgccgttgggaagggaacatgcacgagatgctggtgctgttagctcgtatcctgaagatcatggggagcattccgccccaggaggggctcacgtccgaccaggctg

SEQ ID NO: 183583 - DNA, 417 bp, Arabidopsis thaliana
cgggatagtcgtgcttggtcatcaccatgaaaacatctgcggtatagagaaagatcagagtccggtgttcgaaggtcgcacatatttttattatcaagcatagcctcagagattccaaagttactggggtgtctccagctcccggcgtaggagcatttcggggtattcccaagattattctctcggaatcggaattatcattcgccacatacatcagaattgcccagggtctattgacgatcaagggtgattacacataggagaacctaaaggaaatgttgtctggtgaagacagggtagggatcggtgagaccatgaagttactcgagggtcgcaacactggactagtatcttctaaaacaccagactccggtctatgcacattgtgaatccagctcgtcaggacagttgcggtgt

SEQ ID NO: 183584 - DNA, 336 bp, Arabidopsis thaliana
ggaagaagacggaaacaatggcaattagcttaggtagagtcgtcgttccgtcgtgtaccatttctggagatcggctcttcatacctaacttctcggccatctgcagcgtctcttgtggacgaatcaatgtcggaaccggcgtaatttctgctcgtcgccgccgtgacattggcggggttttaatatctagctgtctctctacggattcatcttcgttttctgggccgaagacgaaactctatgtcagtgggctttctttccgcacaactgaagataccttacgggatacatttgaacagtttgggaaccttatacacatgaacatggtgatggata

SEQ ID NO: 183585 - DNA, 415 bp, Arabidopsis thaliana
gaacgagaagaatactctgaaatatcttgaagctgcgacatgaaaaatggacgcggcgatagggaaggttttcgattccgtctcagacttcttctccggcgctgcttctgcttccgccgatgagtttcccttgtgcgattccgacatcatctccggatgtgagaaagaacttgcagaggctcaagacgaaagacgtaagaaggaatgcattatgcgtctttcatgggctcttgttcattcaaagatgccttcggatattcaacgtgggattgcaatgcttgaagctttggcggttaatgatacaagtgcaatgaaacttagggagaagctatatctccttgctcttggttactatcgaagcggtgacttttcacgataccgggattgtatacaacggtgtttggaggttgaaccg

SEQ ID NO: 183586 - DNA, 203 bp, Arabidopsis thaliana
gggaataggcctgcttggtacaaggagaaagtatatccagagaacaaggttttctatttataactcacgagttcatatgtgacattccacttttggttatgacttagtggaaacttctcgttatctttttcaagtgccagcgcttgagcacaatggaaaaatcattggggagagtctggatttgattaaatatcttgataaca

SEQ ID NO: 183587 - DNA, 213 bp, Arabidopsis thaliana
attctcactagtgtcggtatcagcttacttacaacaagagaaagacatttcgattcaagatgctgaaggacgactaacacccccaaagtcaacagcagcggctctataggatccaaccttgcgtacgcgttcatcctacgtcgtacccctccggctctgtcaccacttctcatcggccatggcggtcctcgcataacgtcgtgcatgggatga

SEQ ID NO: 183588 - DNA, 383 bp, Arabidopsis thaliana
ctggtactcctggacgtcacggtccggagtatccgggttcacgcagatgtaagcttagctgcgcgagaatacaacatgataccgctgcgataatgtcacctaaaggcaatgcagtgagacatcctatttacaaggtacgtgacggagaaaaccctagcatggcacagcttaaacaccatgacacacaggcaccgttcccaaaatagcataaaagggtacaggtgcgaaacgatcacacatcggtacagttgcgaaaacacaatagaaaggggtaagcacccagtatcccgaacagtagacacagaatgtatgtagactaagcgcatcataaactggacacatacatccatcctagtggctctcctcataccgatcgttcctac

SEQ ID NO: 183589 - DNA, 206 bp, Arabidopsis thaliana
cccacgcgtccgaacaagcgtcagtgcgggggacaaaggagctcaaagtgggaagcagaactcttgagataaatcgttatatgcactgtacagcttcgtacccttgaggaaatgttggcactcagttaccgtggcggcctccgcggtggagtagttaccacggtacaacggcgagatggagaaagctggtggctgatgatgaggaa

SEQ ID NO: 183590 - DNA, 161 bp, Arabidopsis thaliana
gcagctcacactgttattctcctcatgaagaaatagaagtcaaaattgattttagctctttatcatattccttaaagtgtctcatcttttaagaaaaacatacttttgattgtaaagtgtaatcatcctttaaaggttaattaatcgaatcgtttcgtaga

SEQ ID NO: 183591 - DNA, 370 bp, Arabidopsis thaliana
acagggtggcaatcattgggtgcttgctatatatccatttctcattctcaagaatcttcgtcccatgtgtatcattcttcagtaatcagtccatctatcagaaacatttcgtgcaatgccgcagtaccatgtccatacagattattcactgatcgacaagagttcattccgcatctggagataaaacattatgctcactcggcagtttatgagggacatgatgtgtgacatacaagtctaaagatgggacatccaagtccgtttcctgtgactagttgtgatctcattgcgatactgaatcgaaattggtaaataacatttgcaaaatctgtcgtgcttcgtcatagaggatgtacaattttaccaaagg

SEQ ID NO: 183592 - DNA, 229 bp, Arabidopsis thaliana
gagatgcgatgcaaggacggggacaagcatggcgttcctcgctcacacgggcgagatctcacatgaagacgtacttcactgagaccaaatctgcggcttcagcacatgtctgtaaaactcatgcagcccgccagtccttccccagcgatgctcagcatcgtggacggcatatgccttgggtccaactgaggagcccacagggttctgtctctctagtagtcttcgcaca

SEQ ID NO: 183593 - DNA, 122 bp, Arabidopsis thaliana
ggaaccattgattagctgtcattgtcattgtcattccaacggagtttatgtaccctcaccactgcgtcggtcaagacatgatcgagcatgatgcactacaggtcaagtcacgagtgtttcag

SEQ ID NO: 183594 - DNA, 296 bp, Arabidopsis thaliana
gatgcatagtttgctaatcatgtgattatattcaagagagcttcgatgatgtgaacttcagcgccaatcaggtaaagtggctctcaagctcaacaccagaggagccagacgataacatgccactcaaaggaaccgcactagctacaagaccagctaacaacgccgagctcatgtgcaagtgccaaggctgttcctgaagctgctcaagccgcagctcgtggcaagtcatacaaactccacaaaggtaaggtcgccagagcctctgctgatatcttatacgctgtcgagaaatacgg

SEQ ID NO: 183595 - DNA, 218 bp, Arabidopsis thaliana
tttgatacaaaaaaaaaaataaaaaaaaaaaaaaatcggccgccctacaagatgatagcatattaagtcgtccatgctacgtcataattcttctacaatgtcatcaaatttcaactcattagccgtcgttttataacaacgtcattgctaaaaacatgctgttatccaacatattcaccttgttgcacaacatccttttttcaacagctgtcgtaata

SEQ ID NO: 183596 - DNA, 253 bp, Arabidopsis thaliana
aggcgtaagtacagcacagaaggggacacaatgcgtaactcaccacaggtaatctcacgggtcatagtttgtcagcctctgctcagccattatcactgtcacaacattgaaccgggctaactctggtttagcacgttaacgaatcaattcttaccgctccacatgggaataccgtcaattgatgcagcataccgttgccgcacccagttgcagatccaccgggcggacgaagtagacgattggacagatctga

SEQ ID NO: 183597 - DNA, 194 bp, Arabidopsis thaliana
taccgctgccacaagacgacattcgggtactgttgcgaaacgaccacacaacggtactgctgctagacgacgacacaacggtacggttgcgataatcacacagaaaggcactgctgccataatacgacataatggtacgtgctgccataagacgacacaaaggcaccgctgccaaaacacgacataatggtacg

SEQ ID NO: 183598 - DNA, 406 bp, Arabidopsis thaliana
gacggtctttgggactctgctactgccacatctcacgatcttttggctcgtttggctatagagcattgcgttcacgaggctagagggcttgatgtactgcccacaacgatatctcggttcaggaatggaggcgataacgagacagcagatttactagcgaaagttgcgtaccctgaagaaatcactcactgtgcagctggagtaaaatggtttaagtatctatgtgaacggtccaaggatcctgaattcaccatcagcagcaaagaatcagatgatagcaatgaagagataatcaacaagtttcattcggttgtaagggggcatttcagaggaccgttgaaaccgccttttaatgctgaagcaagaaaagctgctggctttggtcctcaatggtatgaacctcttg

SEQ ID NO: 183599 - DNA, 258 bp, Arabidopsis thaliana
gaaaaaaaaaaaaaaaaaaaaaaacaaaaaaaaaaaaaaaaaaacaaaaaaaaaaaaaaacatcaaaacgataaaaaaaaaaaaaaaacatacaaaacaacgtcaaaacacatccaaaaataaaaaaaaaaagcgggccccccaaagggttcaaaccttacttacccttgcatgcaacttcaaacccctccaaaagggcccccaaatttcatttcacgggccccctttttaaaacttcgtcacgggaaaacccctggg

SEQ ID NO: 183600 - DNA, 328 bp, Arabidopsis thaliana
tcaaaaaaaaaaaaaaaaaaaaaaaaaaaaaaaaaaaaaaaaaaaaaaaaaaaaaaaaaaaaaaaaaaaaaaaaaaaaaaaaaaaaaaaaaaaaaaaaaaaaaaaaaaaaaaaaaaaaaaaaaaaaaagggggccccccaaagggttcaaacttaagtacccgggaaagggaagtcaaaacccctccaaaagggcccccaaatttaattccaggggcgcccttttaaaaacgccgggatgggaaaaaccctggggggaccaccctttaacccctgttggaaaaaaaaccgcttttgtcaaaggggggggaaaaacacaaaaggccccc

SEQ ID NO: 183601 - DNA, 129 bp, Arabidopsis thaliana
taggtgcggtcgcaataatcagacacaggggtacgtttgccagattaatacttctcggaatactcgggaagtggtcgtatgcgtgttaattccggcgtagttcctgagcttgatgaagtttgtgcactt

SEQ ID NO: 183602 - DNA, 302 bp, Arabidopsis thaliana
ggagagagatagaaagagaaagaaatcgtcatggctcatgggagatatgatacttacaagaagaaaagtggacagattcctcggtttggagaatgggaagaagcaaatgagatgccaataacacaatactttgagaatccaagacaagctggtctgattcgtcaccaatacacaacaacttcttctgcttcttccactaccacttcatcttcatcttcttcttcttctgcagaagccttagagcttgcttctcactatcgccgtccaggtcacctccacgctcaaagacagacggcggggac

SEQ ID NO: 183603 - DNA, 246 bp, Arabidopsis thaliana
agatgtcagtagagtagagatagggcaacagaaggagcttcctggactcactgtgggaaattctataataatctacatacagggctatgggagactcgtctacacactgataatattctcaaagattttgtcatgttccgtgactcccgcttgaaatgattactgtacagaatccacgattctatccatcttggacatggtgcaggtgttggctacatgaagagagcagatgctatgcatactccc

SEQ ID NO: 183604 - DNA, 306 bp, Arabidopsis thaliana
tacggctgcgacaagactacagtttggtacggatgcgagaaaacgacatacgggtactgctgctaaacgacgacatcaggggacaaacaacacacttactaatcatacaatcacatcttctttacaacagtgcagtactacgaattaccgtgagaaagactactacgatgtggctcaaagtcaacgcactggatatggccagagccagatccacaatcatgacggatatggtcatagccacaaccgtggtggatatcgccagattcataaccgtgatggttataaccaaaaccgtgacggatatac

SEQ ID NO: 183605 - DNA, 231 bp, Arabidopsis thaliana
aggggttgtgcggctctgcgaatcttcagaaatgggtgcgtgcaatcaggttactgatcgttccgaggacgagacacttcacatgtcacgacattcctccaaagggttaagtactgtaaggatagaaaacaaccatcgattgtgcggctcgtaaagcccgctcgtcccgaactggtccaacatttcggttacaaggtctacctgggcattgctgtgtaccatgtacgtgta

SEQ ID NO: 183606 - DNA, 296 bp, Arabidopsis thaliana
agcataggctaccaacatggatgaagatgccgatggaaagaaagagcaaactgatgatggtgtttcagtggaagatactgtaatgaaggaaaacgtggaatctaaagacaataactatgccaaagatgatgaaaaagagaccaaagagacagatattactgaggcagaccacaaaaaagctgggaaggaggacatacaacatgaagctgacaaagcaaatggaacaaaagatggcaatacaggagacatcaaagaggaagggacactggtagatgaagacaaagggacagatatgg

SEQ ID NO: 183607 - DNA, 231 bp, Arabidopsis thaliana
tccgggtccaggcaagcgtcaatcctcctgtgattagagaagacaacaggacggtaccgatgctaagaagcttcaacaatggatgcgtgcaagtaaatgacagaacggtacgggagcgaaaaatccacagttagggatagtcttccagaaggttaagtgcggggaggatgcacaacaaccatcgattggtcctcccgtcaagactagacatcacggtaaggctccacaatt

SEQ ID NO: 183608 - DNA, 102 bp, Arabidopsis thaliana
ggaagacgacacaacggtacggctgcgaaaagacaactgataggtactgctgccataaaactacacactggcattgctgccataagacgaccgacgggtaca

SEQ ID NO: 183609 - DNA, 300 bp, Arabidopsis thaliana
tcaacttaagggggtgactgtatctaatgcaagccctcaaagtcaccatgtgttcatccgcgagatcccatcggatatagtcattggtgcacatataggtaatctcaaagcacctctagcgggctcccgctctatacttcattgcgtgttgcgttctgtcgctccgtcagggataaccgtggggggaagtcccataatcgtctgctcacatactctcctctcggcaaggagcgtatcagcttgttcagatatccagatatctaatcgaaatagtttcacgccatgtcaggctttaggtat

SEQ ID NO: 183610 - DNA, 308 bp, Arabidopsis thaliana
  unsure (1)..(308): unsure at all n locations
acatcanaaanaaaaaaaaaaaaaaaaaaaaaaaaaagcggccgctcgacacgctacaggcttaagtcttacttcatcctacatgatacctcatcgatcttctaaactatcatcaattcacaggtcatcggccgacaacttccagactggtaaaaggcagaagtctagccatcatacacgccatgcaccatatagcacattcgccattcggcatctgacctaatagcgacgaagcgatcacccatcgcaatacttacgaattccgaatcctgaatgggaaacgccatgtaccgggtaactaagcacta

SEQ ID NO: 183611 - DNA, 221 bp, Arabidopsis thaliana
  unsure (1)..(221): unsure at all n locations
gaatcanaanaaaaaaaaagaaaaaaaaaaaaaaaaaagcggccgctcaaaaggatccactctaaagtatccaatctatactacctcataactctactatagtgccctccaaattcatctcatagatccactttatagaacgtcgttttagaaaatcccctggggtaacccactttaatcacctagcataacatccttctttcacaaccccctttcacaac

SEQ ID NO: 183612 - DNA, 332 bp, Arabidopsis thaliana
agccgtgagtagaggagagagaggtcaactgaagggggtgacagtatctaatgcaagccctcgaagtcaccatgtcgtcatccgcgagatcccatacgatataggcagtggttcacatataggcaatctcaaagcacctctagcgggcgaccgctccagacttcattgcgtgatgcgttctgtcgttccgtcagggaaaaccgtgggctgacgtcccataatcgccaggtcacatactctcctctcggcaaggagcgtatcagcttgtacacatatccagatctcgtatcgaaatagattcacgacatggtcggctttaggtatcccagatg

SEQ ID NO: 183613 - DNA, 176 bp, Arabidopsis thaliana
ggagatcagatcaagagaagtttaatcagctcatcatatgagtaatggctgcgtcactgcagcgatcctctcttccatgacatcgaactgatctcactgcacggaagacagcaccgcggggattagagtcccgcagctcagctcagctcgcctttacaacagtcttgactccagtc

SEQ ID NO: 183614 - DNA, 320 bp, Arabidopsis thaliana
cccacgcatcagaccacacatcggtgaattaaacgacagcgtggttccgctgattcacgactatgttaagcttttgatgtgacactacatcaatgggcacggatgacacacctgacgaactgatacagcttagtaaccacaagaaaagggtacagctgcgattcccatactaacgggtaccgatgtgagaacaccctagaccgttacagctgcgacatgacaacacaagggtaccgtcgcgatactacgacagacggttacaggtgccacactacaacaaaagagtccagtagccagaagcctacataacgttaccgctg

SEQ ID NO: 183615 - DNA, 201 bp, Arabidopsis thaliana
ggagatcaaatcaagagaagattgatcagctcatcatatgagaaatggctgcgtcacttcagcgatcctctctgccatgacaatcagctgatctcactgcacagaagacagcagcgagacgataagagtcgcgcagctcagctcatctcgcctttccatcagtcttcactcgagtcgcgtcaatcagatccggaacgccct

SEQ ID NO: 183616 - DNA, 348 bp, Arabidopsis thaliana
  unsure (1)..(348): unsure at all n locations
gctgacgtacggctcgagattccnggggtcagacaagcactacataagggtgatacagttgttaaagccgttttgtcattttgtgacatggttgatttatttaaaaaaagccagaaaaaaaaaaacaaaaaaaaaaaaagaaaaaaaaaaaaaaaaagagaaatagaaaaaaaaaaaaaaaaaaaaattcaaaaacagaaatgtatccaaaaagtacggacgtccaatggggtccgccctaaggttcccatgttaggtaagccgaaatcctaccccagggccccccaagttcggttcaggggtcgtctttttggccgccgtttcgggaaaccccctggggtaaacccg

SEQ ID NO: 183617 - DNA, 188 bp, Arabidopsis thaliana
ggggaagaaaaatctgaacagagagacaataatcgtcgtcggcatcctcatcactgtagttttcacaatctattctctttgtctgccatgcgactgaccactgaattaaaaagtatagagaagagatatcagtgtatgataatagacaaatagaacggaaatatatctacttgggcggcacttccatt

SEQ ID NO: 183618 - DNA, 115 bp, Arabidopsis thaliana
aggtacggctgcaataagactacagctaggtacggctgccacaagacaatataacgatacagctgctataatactacattctggtaccgttgccataatactacatcacggtacg

SEQ ID NO: 183619 - DNA, 466 bp, Arabidopsis thaliana
  unsure (1)..(466): unsure at all n locations
taccggtccgaaattcccgggtcgacagtcccttgaatctctgcacttaaatggagccactagtgctcctcggttagctgaagacgatgaaaattctgttgctagcgacttgcattgctttgagttgaacatgcatggagatgctgtgcagactcatgaccttgcaggaactcgacgaacagtcgcggactgcatgtattcaccaatgagaagactggagttttccgatggtgtgtctgttgagggctcaaggatctcaaccgcaaggcctcgttcagaaaaaggcaaggtgaagccaagcagcagcaaagcacagctgcatacttcgacaccagaaatcagctctcgcaactgtgacaagatcgatcctatagatgagcagaatgaaacagtcatgacccaagtctctcgacggttgcacgatgacttgctgaagatcanatcagaggctcctcagcatgcattt

SEQ ID NO: 183620 - DNA, 474 bp, Arabidopsis thaliana
  unsure (1)..(474): unsure at all n locations
cgcctgccggtaccggtccgaaattcccgggtccacgacggcctgaaagctgcccctcctccccttcaccagcggaggggggtacgtccggatctgtaaccagcggtgaggatagaaagccagtgttttttgaagggagagagaaagtgttactacccctatcttttttagatctggagaggatgagagtgtgtgaatagagcaaccctagcaagcaagcgcggaggctccggcctatatatacatagtggggtagttttcctttttcactccatcaaaacaatcgtttaaaattgtgtactactacatgccaggtcgtggtttttttagttgttgattgttttttgagatagctacccgcttgttccaagtggtgttacggtgtgccaggtcgcactttgtatcgttcaagtctggtactacaagtcnctccattaaatgaacaaccaacccctcgtaaaaattgtgaacaag

SEQ ID NO: 183621 - DNA, 111 bp, Arabidopsis thaliana
ccctcctaaaagaagaaccaagatatacactggtgtgggatattgaatgccgctgatcataacattggtgtcatgctggagtagctcgctcaacaaaaagaacctgcaact

SEQ ID NO: 183622 - DNA, 241 bp, Arabidopsis thaliana
  unsure (1)..(241): unsure at all n locations
gaatataactaaaatttcctacaaattgatcaatcattgaattccagngaaagagactctaccaaatccaagatgaccaatctgatacaactctaaccacactctctcggcttcaactcttgcacttattcgcgactcatcatgatcttctcctttacacgacgtcgttctctcctcctcctcctcctccttcgttaaactcccatctctctctaccacaaaccggtgatcatcataatct

SEQ ID NO: 183623 - DNA, 215 bp, Arabidopsis thaliana
aattaagaacatctccaattggattttttacatttttaaacattaaaaaaaaactaacaatttaaaaaagctccccaattttctggtaattcaggtggctttaaatttaacacctttgaacgaaacagggaataaaacaaaagggtccgaagaaattagggaccaaaaaacttttgacaaagaaaaaaaggtttcgctggggcacgcggtttttt

SEQ ID NO: 183624 - DNA, 155 bp, Arabidopsis thaliana
  unsure (1)..(155): unsure at all n locations
tccttgacctttattatttccccgggcggacaaangatccttcgcacttttggtcggatacagatagaaatccactggaacttttttacaaactaaaagaatcataactgtttggaaagaaaaaaacatgaagaataataacacatggattgagc

SEQ ID NO: 183625 - DNA, 304 bp, Arabidopsis thaliana
ggggggggatacaattctatttctattgtatctaatgaaccttggggtatttatgcccttcaactatagtatactatacatatagacctttttttacttgtttgattcaacggaactcatttaacctttcctttcggatatgtattatgtatcaagtattatacattctttttgaacggctggattcacaacatgaacaaaaaaaagagaggggataaagcataattgcactttttttactaaagatacgtttaatttgaagaataaaaacttatcaaaattaataaatcctctgccaagaacc

SEQ ID NO: 183626 - DNA, 359 bp, Arabidopsis thaliana
ctgggggaaactggaactttgttatagattctgattcagtttacaatatacaaaattccatgacagtggatgtaaatatgtaatgtaaggacttgtttgaattagatacaaagaatgcagaattttgtgctatgaaaaacaaacttgcttgcctcatgggttgagtatcaatttggttctccacatctctgccatgaccttcctcggggcgggatcatctggacctttgtctctttgtcctgaggtgaagtataactgtccatcccaatacccagccagcgttgtcttcacacggtatggtaatttcccaatcacataccatttcagtgtatttaagttgaactggaagatttcaccaa

SEQ ID NO: 183627 - DNA, 299 bp, Arabidopsis thaliana
gggggggtaaataaaacccccctttattattcaaataataatctcacaaaaataaaacattttaaacattccgaaaagaaattgccttaaaaaatgaaaaaggttttttaaaacgaaccctaaaaaaacgtcaccgggcctttactattttttcccaaggcatgtgccttgctttttttgaatgcattttaggaaaaccaatccatatggtttattggggtaattaactttaaaaatttttcccttttttttaataaatcaattataaattgccgcccttgggggggggaactttttaa

SEQ ID NO: 183628 - DNA, 270 bp, Arabidopsis thaliana
tcctttttcttttttttttatattttcccccccccccccccctcctggccaaaaacgcttggaaatttttttataagaaagaaacagaggttacgtatgcggtaagccgtttagattacaagaaaaataaaatttttggtttattaagaattgaaactcttttctctagatgattatgtgaacaaaaattgatagtaaggaagatgttgacgataaaaaaaatttgggggaaggcaaaaaaagcttggggggattttgggagaaactaaa

SEQ ID NO: 183629 - DNA, 411 bp, Arabidopsis thaliana
  unsure (1)..(411): unsure at all n locations
ttgccgtcctttatccnnntcctccttccatggaataaggaatactattaattgtaaaatttttcaagtacaacaatttttgtataactgccgaacttaacttttagcaatcgagtctaatgatttgaaggaaattaaaaacaattgaaatgagaaatcaggctttagatgacatgcaaaatgctttataaaacttcttggtatatttgtccttcggttcatctacttgagctccatgaatcttcttcttcccctccagagcttgaattagatctttaagagatccatcagcatctatttcagtattcttcttcatcaagttctcagcaacatcagctggggcgatcttcgtttccttcaataatgattcgatctttttgaatagaggatgagttttaagatcaagatagt

SEQ ID NO: 183630 - DNA, 317 bp, Arabidopsis thaliana
tccttttttttttattattttttttttcccccctttttttttttttgtttaaaaacgcagggaaaattttttataagaaagaaacagaggttacgtatgcggtaagcagtttagattacaagaaaaataaaatttttggtttattaagaattgaaactcttttctctagatgattattggaacaaaaattgatagtaaggaagatgttgacgataaaaaaaatttgaggtaaggcaaaaaaagcttggggtgattttgggagaaactaaaagaataagaggtttagtgcaaatacccaaaattgccttcctcatggg

SEQ ID NO: 183631 - DNA, 400 bp, Arabidopsis thaliana
aagaaagcttaactctaggagcaaccagattgtacaaagaaccaaaaaaaacctatacagtttttatagtcactaagccaatcttagctttagactgtcactttaatgtgcacaaaagtacaaatttacagaatttgggggctgaaacataccctgactctgtttctctcttataaaaccaatagataaaaagcgtcttaaaaaccatcagcgataacctcttttaggttgtagcagcaacctcttctcatctactacttaaccttagcttcttcttcttctctatgaccaatgcctctgatttacagattgggcaaacgttcttgataaccaaccacttcttcaagcattctgcatggtatttgtgcatgcaatccagcgttgcgatcttatcttcgtt

SEQ ID NO: 183632 - DNA, 207 bp, Arabidopsis thaliana
aaagagagagagagagagagccatttgcttgataaaaacgtaccatgctggggataatactactagagtaaattatctattacataacggtgcaagcgttgggattctcgtcgctaaaaagagaaatgtagtggttctggggagctcccggcaacagctagaactgcgactgctcagatttccagacataaccggccggagcttttt

SEQ ID NO: 183633 - DNA, 400 bp, Arabidopsis thaliana
  unsure (1)..(400): unsure at all n locations
tccttttttttnntttattagacaatatcgactcttttatttccatatatattatctacatgttattgtatgaaactctactcaaccatgtctcaaatcttgcaatgcctcttgggttttacatagctacatcttcgtgtccattatgagagtcttcatggtatatggattttgattatcttatcttatgtgtctgattgtttatctattttaatctaaaggtaaaggtattgctcttgcggcagctctcggcaaagctagagcctgcaatggagtcctcatgttacaaagcaatccaggattctcgctcatgtcaatcctctctccaggaacaggggaactccatgagaagcaatgcaacaaatttcccatcaccaatgtcatcaagttcatgctgagc

SEQ ID NO: 183634 - DNA, 302 bp, Arabidopsis thaliana
caaaacctcatgtctagggtgcaaattgcaattagataactgatccttctttttaaaaaaacaaaaataatactaccaaactggacttttgagaaaaggaaaagaatcaaccctcgagtgggggctttatttatggtcttacttctaacgtctggtccaataagcaaatgctgactttgattaaaatctactcgacaagcttaactacacacaggttcccatcaccatgcataaaactccttgccgttttgtgccaagataagaagaaacgactacaagaaggctacaaagcctacaacatt

SEQ ID NO: 183635 - DNA, 117 bp, Arabidopsis thaliana
ttttcgcggccgcaccaccatctttgagaaaaacgaacctgaagaatccgaggggagcggcgccattcgctgttctccaatccaaatgcgccaaatcttcccaaacataaagaaacc

SEQ ID NO: 183636 - DNA, 439 bp, Arabidopsis thaliana
gatagaatatggggtttattcaatattattagagaataaaacattgaacactgcaagttcatctatatcaatgtacaaacacaaaagtcttgtttgaacaagaaagggttacctatcacctggaagagaccaaaatgctcactttgaaactaactgagagtagaagaacccagaaacacatgaatattaacattgcccatgctgaactattccctgatttttcgggggcggtattcccttggaccaaccccaaagaaaggatcaagtcaaggttctcgtttttgccgtatgaccagcccatgttgctgtctgatatcgtgatcatacctgcggttacatgaactgaacctgatgattgtgctgcgtgtaaccggatagctgcatcctttgtagggaactcagaagcatttgcaagcggagcaggaatagcacccaacat

SEQ ID NO: 183637 - DNA, 134 bp, Arabidopsis thaliana
  unsure (1)..(134): unsure at all n locations
ttnattttttnctcttnaccaaagaactcagctttgaagttaaatccaaaaacaatgggtgcatttgaagtacattaatggtctttgaacaccaaaaagaacatttcaaaaaacgaataccaaaaggagcaaac

SEQ ID NO: 183638 - DNA, 423 bp, Arabidopsis thaliana
aaaaggctaatagtagatttatatgaaactgtacatcactttcaatttttgtttttaaccaaaaagaatcataaatctaaatcaaatattttgaggttaagaaaaactgatgcttttagttttagctatacacaagagtaaaaaaaaaagaagatgtgactcccttgttccaaaaactaagggtgtcagtttatatggttatgctcccgccatttcttccgacggttttttattgatgattctgatcctccactggctttattctgtttaaaaattacatcttccttcggattctgattcactcatttaggttggaaatagctatcgtagatggcaagccgatcaaacgcatcaaaatttgcttttaacccgacaaactgacttccgacatgagcacatcctactttaggccatcgacatact

SEQ ID NO: 183639 - DNA, 171 bp, Arabidopsis thaliana
gggggttaaaaaaaaatgcttgttttttctcaatctcaatacatttggtagggaacaagattttcggatttggaaaaatcacttcgcttgggtcatttttcacactacaacttttattaccccctttcctttcaaaattaacgcccatttcgaaaaaagaaatttcatggg

SEQ ID NO: 183640 - DNA, 233 bp, Arabidopsis thaliana
ggggaaaaggaagggttaaaccgggaagaggggacccaccctgggtctttgtttccaaaaattctgaagacccattaattggcacaaggtttgggccctgccgttttacgggccaatggcccaaaaaaccaggggaagaagaaacccttggggttcaatccccgagatgaccccggaaaaacaaaaaaagaaaaaaccccttattggggtttttaaaaaaggggaagaatttt

SEQ ID NO: 183641 - DNA, 239 bp, Arabidopsis thaliana
atttttgcctttgtccacacatgcggaggcacagagttacagacacgcgttttctagatggttgcatgacgccgacagccaccgcgtgtatgtccttcccatacggaatatgccacgtcgcgtcagtataaagtgactgactagggctctagcatagtataagaaacgagaccagacgccattcagcggataggcaaagagggaaggaggagaaagccaatggcacatgccacgtttac

SEQ ID NO: 183642 - DNA, 228 bp, Arabidopsis thaliana
ggggaaaaaagttaaatgattttgaagatgagaatttgtagcaaagatgttgggagagacttttcagtagcaaccaaatgtgtgtttgaaggaaaaacaagtcaaaccaaaacaatagtctacacttttcatgtgaaatcatacaggactcaagataattctcatgacagatgtaaagggagaaaaaacccgcaagggggaaatttggtaaccgaacaaaaaccggtt

SEQ ID NO: 183643 - DNA, 204 bp, Arabidopsis thaliana
aagggcgactctttggtgaattttccagggaagtcacttcctttacatcttacacagccgtttaaaatgtgtgtagaaatcagataatgggcggaataaaaaaacaatattcagggtttttattaggtaacaatcacattaacctaaagattaaaactcttgccattacaaacaaacaaaaagacttgcctagccctgcgcttt

SEQ ID NO: 183644 - DNA, 215 bp, Arabidopsis thaliana
ctcctcattctcatctttcttcttaggtgctgaatcggattatcctcagcatagtaacttgaagagactgtgaccgaatagactgttcgtgtatggagataactatgcagacaccgtttacttacggaggagctccgtcgtctctcttctaccgccgttcagatatctctccattcacaaaccaggaagaacttccggcagtcgtggggattgaa

SEQ ID NO: 183645 - DNA, 144 bp, Arabidopsis thaliana
aacaatatctgtgattctcctttgaggagcattcaacatataagttgctaaaacgaagaacaaaacaagagaaagatgcaaaacttgatatataaatataggtgcacatattatatcttatgagcaaaaaacctaactaaccct

SEQ ID NO: 183646 - DNA, 374 bp, Arabidopsis thaliana
aaaccggaaccgctaatcaatttttatatgtatgcaaaaagcaagcgacgacgtattgccaaaacaagatttggctaaccgatttgtcagagttaaacaaccaaaacgtttacaaactccatcaaagagcattaagtcactgagtttttctctcaagtacatagacacacagcttcaaattgtacgttcttttccttcctattttctttctcctatggttttagttttctacaggagtcaccaacttcttcttccaaaaactttaatcgcctgttcagctgcatctagctcagtgaatcgtctctctactcgggatggaagactagaccggcacacgcttgccccggttcttgtcaaagaacgatctaatatat

SEQ ID NO: 183647 - DNA, 274 bp, Arabidopsis thaliana
attaatcatcgtttccaaaaagaaaaagaagaacaaaaaaccgagagatggccccttgaaggaataatatgaacatggggagggagacctaagaggggagacctgacatagaagagttgagggaactcctttcggctatctctctggtttgctttctggtggtggctctccacccaaaaaatatcctttttatggtcccgagttcatgaaagtttggtgaaaagaagaagagagatcttgggggaataagagagatttttttttatgaagaatt

SEQ ID NO: 183648 - DNA, 316 bp, Arabidopsis thaliana
caaaaaaaggagggtttgctttatttcttcaattaggagaaacagatccaatttttttaggggtggggttattcgacatgtccaactaaagaccaaagcagagccttttttgtcaatttaaactctgatgagacaaaaacaaacttgtttttccatgaacataacgaaaaaataccatcccattttcacgggctttgttttaacatttttgcatcttaggccaatcgttttgtcggcatccatggggtcttcttggatccttcgggtcccaaacccttgcagcctggaccatcagtccactcaagcatgagcttta

SEQ ID NO: 183649 - DNA, 261 bp, Arabidopsis thaliana
ggggggggaaaaagttttttattaaaaatgggtaactatttacactcttcaaagaaaaagcctcagcttaatgcaaaaacaaatagcggtttatgtggaagaaagagggtgaccgtttgggatgttccacaaacaaacgaaatttttgggttttgttcaagccaaaaggtgttgcaggggaacctaaataaagactcttcaaaatcttaatttctcagggacttttcaaaaaaaaaattttttaacgggcttttttacatt

SEQ ID NO: 183650 - DNA, 164 bp, Arabidopsis thaliana
atgtttttttaattccaaggggtgatggtgatgatcacttgcatggagactaacgcatacatggtgcagctactatatgcatggcgatgtggagatattggctgtagatctaaggaagggggctgcttctgccgaaggtgtcgaaggtcaactctggcaggttc

SEQ ID NO: 183651 - DNA, 295 bp, Arabidopsis thaliana
tttcctttctttttttttttttttttttttttttttttttttttttttttttttttttttttttgggggcaaaccaaatgttgctttgaaatctacaatatcataaaggtcccggtttaaagtcctcaacaaacgacttttttgaagaaaaagcttttcaaattaaacaaaatcgccttgtccaggaaaaaacaccctgccctatgagatgaaaaaatcccttgggcccataccaaaaaatattccggttaattaagaacgattgccaatttctctttttacatttacccttgaa

SEQ ID NO: 183652 - DNA, 337 bp, Arabidopsis thaliana
aaaaaaaactgggggaacggaaaagaaggggaaacattccagattggattaacaaagggggtggtcccaacaaaactaaactttttccaatgggtcccctccttttaaacagcaaaaaaatttaaaaccgccggaaaatccgaattataaaaggctttaaaggcttgtttttgggggacaacaaacttttttcctcctatggggaagtttggacccctttggctggttttttttaatccctttttttaaaagttggggggggggccctctccctgctttgtttaaggggttgggttttcctaacaggcccaggcttttttggggaaattttggccgg

SEQ ID NO: 183653 - DNA, 210 bp, Arabidopsis thaliana
acagaggtgccaaaacgtattataggggtttgtctttgttacaaacagagtattccagaaacagcatgatcattcaggaatttctctatttatacaaaggttaaagttgctactccagcgtgaggagtaaaacaaggcacacattttgaaaagaggccaatcttgtgataactagctagggattacatcacggcaaagattggacgggtt

SEQ ID NO: 183654 - DNA, 362 bp, Arabidopsis thaliana
gtaattgtgattgtaagtataaactaatacacaacactgtaaattgtaaaactcatctgttttttttttttttttgacaatcaccactattggattatatagtatacaacaatgatttgcaatagaatcgttatggaaaaaaaaaagtatattccgaaatagttcactaattcctctgttttctaacctaaagaaactggtacataaacactgcttgcttgctactaaacaatttgtaagctttttcctcttcaatttcacttcctgttaccattttgcctttatatatatataccatctgaaaaaacaaaaaccattgaaggataagtagtctaagtgagcataacgaacacagattttag

SEQ ID NO: 183655 - DNA, 389 bp, Arabidopsis thaliana
ggagagaaatagctatgtatatataatgcattaagattttaatcctatttaagtatattaaaaacaaatgagacattaatgtcaaaatgctaaaatgggcaaaaaatctctagctaagcactagcaagtagcaacactttgatcagttttctctccactttggatcttctccatctcactactcagtacttccttcactttgttctttagctcattgagaccttgttctgttttcaccgagacatgaattgattcatcaggtcctttttcccggtacttaatgatttccgcgtcatcactgcttctatcttctttggcatacatcaccggtgagcctcccagcagatcgcatttggacacagcatcaatccacaggtaatccttaaacc

SEQ ID NO: 183656 - DNA, 206 bp, Arabidopsis thaliana
gggggggcccaaaaaaacaatttccatagggggattattacggacttaaaaagaaacaacaagggaaacagggattacaacacaagattttaaagatgctgacaaacaaacaaacaaaaatcttacgggaaggggaaggggaaccaattggagaggagagaaatggccataagagttgtatgagacataacaaattatattaagct

SEQ ID NO: 183657 - DNA, 173 bp, Arabidopsis thaliana
caacgtgaactggaggataacactgaaaggagctaccatggttaccaacggttcacaaagaatcaagactatttaaaactgtgatgagactgttatatgttaaatgaattggatgaataactcttcataactcaacttggatcagatgaaatcggctgttctctataggcatt

SEQ ID NO: 183658 - DNA, 466 bp, Arabidopsis thaliana
gaacaaaatagtaatttattaatcccactgtaaataaaacgtatgatgacaggaaaaacgacaattttatgccgatacctcaatatcaaaactgcagacaaagaacaaaacataattatgcaaaaactgaaccaaaacaaaactgtgtatagttttgagacggaagaattgagagatttggtcattttttcacttccaagctttccttcctctaaactggcttccgctgatgctattcttcatcttcttaattcgttttgatttaccagcctttgatcttattgcagcaagaggcatattcttcctgtgctccttctgtttattgcttgatcctccagtcttcttctgtttgacggcagccttggatttgtatttccctctgtcctccctacccgctttaactaattccagtctttgttcctttgttagtttatgccttatgtgagcttcaagtttggctggatcg

SEQ ID NO: 183659 - DNA, 198 bp, Arabidopsis thaliana
  unsure (1)..(198): unsure at all n locations
tttattttttttttttttntttctttacaaacacaaaaaatttttctttttgggggaaccaataattttgaaacaaccacttccggttttggttacacggaaagagactatgcaagggttaagaaagaagacaacgttgggggtaattttacaacttttttctgctaccgggggggggaccacacaatcccaaacatg

SEQ ID NO: 183660 - DNA, 203 bp, Arabidopsis thaliana
ctattgtactctgaagctcccataaccagaattggatgtttttatacaagatccaaaatgttcacacaaggccaccatttttattgagctatatacgactaatacttaaaccctgaaaaatctcactaattcctcaagagaaactgtgcctcttattacattgactttactcctttgcagcatcattatcatcagttgcaaca

SEQ ID NO: 183661 - DNA, 270 bp, Arabidopsis thaliana
ctattggatagagcaaaatacgaaacaaaacgtaatggagttgtgacaaaaaagaaacggaaatgaaggcttcgaaattaaacaaggaagaacatcgggcattaacttggcattacatgggtggcccattctcacatcagtcacatttagttgtattatatgcggtatgcaccctaaaatggatcccatgctgggagtggcccgaccaaaatctacatgaacaaactctgggagggatggtccagcctgggtgcacagatgcaataaaaa

SEQ ID NO: 183662 - DNA, 181 bp, Arabidopsis thaliana
aaaaccagcaaggaactttaatataaccccagcataaattctttggtagggggttatgggaaaacaaaacccggacatgttctatttttggaaagggttttacttttttttaaaaaaaaaaaaagggggaaaaacattcagggggtcaaaccccaaaaggggcaaaaccccctggggtttt

SEQ ID NO: 183663 - DNA, 322 bp, Arabidopsis thaliana
gtctggttctcgcaaaaaaaaaaaacacacatgataaacaaaacactctcactcaaagccgtgaataaggatttgatattcttttgtacattctttctttcctcaagcactcttgtttttacaaggcttgagaacaccaacaacgatcactgcaaccacaatgaggaggatgataattgcaatacacatccattttcttgagttcttctgcaagctctttgctctttgaagtgccgtgtttcccgattgcacgtgatctactgcacttgacacctgagattctatattgtcaagcatttctccttgtgcatcaaccaaaact

SEQ ID NO: 183664 - DNA, 422 bp, Arabidopsis thaliana
  unsure (1)..(422): unsure at all n locations
aaatangttaaagaagagctttcatctccatcatgggttgtttttacgaatttagtgaaatccacttatcacgacacgaagttgaagttgttggggtaagttcctttctctatatcccgcgatatatcatcttgttcatggagttccttatgctgaggaactgaaggaaagaagtggctaattcggcgttgttagggcgatcacttaaaatcctatggtgaccggattcaaacggtggagacaagacgaaacgttccacttttgcatcacagaccacacacttatgatggtcttcctcaaggatcttctctcctgaagtagattgagtaatctgttgtttacaagagctgcaccaaagtttgtgtctgcaagggaagtttgcccatcgaatcatgttcttgttgcaccagaaacacatgcct

SEQ ID NO: 183665 - DNA, 414 bp, Arabidopsis thaliana
tcgaattaaatttttgtttgtaaatataagaaaagtttcaaaatcagtctaatgtattaccaactcttttttatctaagctgtaaactcggacaaattaccaaattcgaccacaaacaaaactttgttcctaagaatagtgcacaagggagaacaaaggtaagaagtagatcaaaacttcatacatatactacataaaccatctctcgaagatcttatgatttggccttaacctcacccttgccgtgaaacttccttccggcatctacagcttctctgaaagcatcaatgagctctttgctttcagggctaagcaatactccctcgtagaaagcattggctgcctcgtcaaaccgctgtagcaaacgcagagcagcgccttctctgaagcaacctttaggccaatctgggttta

SEQ ID NO: 183666 - DNA, 386 bp, Arabidopsis thaliana
  unsure (1)..(386): unsure at all n locations
aattnttcttttgggcctatctatctattaaccaaggcatcttcaagtgctttcccatatttacaacaacattctcctaaagagcacagacacacactacatgtaacactaacagacttggcacttgaaacctaaagatacacacagtaactctaaaccaccattgttcttcttatggttttgttcctttgtgcatctctctatatctcatcttataatcagcatagtaagaaacttgaagaccaaagttgggaattgttgcagagaactttacttgtgcgactttgtcagttttacctttttcttgtgtgttgttggtttgaaggaaagaagaaaacccaagaggaaactttgttgtggtcatctttaagctgagagaaacctat

SEQ ID NO: 183667 - DNA, 437 bp, Arabidopsis thaliana
ctagtttctagatcgcgagcggccgctcgcgatctagacccaggcgttcgcccacgcgtccgcccacgcgtccgaaaaaataatggcagctttggcatcaaacccccaaatgctaactagacaagctcacggtaacaagaaggaacaattgtggaggaaagagagtttaaatttggagaagaagtgtgggttttgtgtgagcgtttacagtaatgaaaagcttgggaggtcacatatggagaaagagtggagactaaaagccttttggtcaaacatagctcagcctacgactttggagatggaacccattaacaacgttgaagaactcgatgctgttctctctcacgcacgccaactctttgagcctatcatcatcgaatggatggcttcttggtgtcgaaaatgtatttacttgaagcctaagttggagaaattag

SEQ ID NO: 183668 - DNA, 238 bp, Arabidopsis thaliana
acgggggggaagggtacagggtttatatcatatatacgatcggatataccggattttaaaacactagttttacataggaccaaagtggtggggactcaaatatacagaaataaaccatttcttagaatatttaaacacatgtttttagcttggaatagaatttacaaaagttttcaaaatcaaccagacttatgtggaatttttccaacaaagggacgtgctttgcacatgggtacca

SEQ ID NO: 183669 - DNA, 172 bp, Arabidopsis thaliana
  unsure (1)..(172): unsure at all n locations
accaaacaacaggggcccattgtaagacagcgcacaaggggacccccaaacaccgcacaaggcacaaaacgccctcccaggcaaaaaaaaaaaccagggncnangaggcgaacangcaaacccaaaaggctcactattatccaaaagaagctttgcaatatcagcaacccag

SEQ ID NO: 183670 - DNA, 250 bp, Arabidopsis thaliana
cccgttaagaaccggcaaagaccaattcattttttggcaattagcccaatttgggaagaaaaaaaaattggggggcttttaggcccaagggtaaatggtttcaaaaacaatcctagcaaaaaccccacgtgtttcatgaaagtctccaagggcaagagacctggagtttatcctaccctctaaacttgggacaacaacttttttttgggttcctttttttttcacatttccaaacatttttttttctttt

SEQ ID NO: 183671 - DNA, 305 bp, Arabidopsis thaliana
ttcctttttttttttatatttttaacccccaaaacaatgggacgatatttactaaaaatcaggggtacaaatcctgggccacactcgatggccacatgtacagactattcttaaaaactgggtctgaccctctctctctctctgataagaattacatgaatagagaggcacaccaactacatacggataacctctgcagctcgcatcgcatgacatgacgatttctactggaactccatataaagaaggcctctctcacccaatgagagagcctatcaaaggccgctttagctgctattctttat

SEQ ID NO: 183672 - DNA, 256 bp, Arabidopsis thaliana
gaatcaaccgatttttatccccgaaaacatatttttgaagaagcttgttttcaatacaaatgaaatttgaaacaattcagtacttaaggccttaaacaggtccaatcatatgatcataaccatgtttttatgttccaaatttgttttacatttcttttagggctaacaagagcttctgggaaagctttttctttggaaaactggtgggaactcttgaaaaaaattttctgggggcaaaaattacccgaaggggggt

SEQ ID NO: 183673 - DNA, 239 bp, Arabidopsis thaliana
aaaccctttttggttatgggaaaatgttccccctaaacattaagaaaacttttcttggggtgaaataaagcaaaagaaccgcccgaaacaagaagaccctttggggcccctaaacaacccgaatttgaaaaataatcgtttcctttaatcagaagccacttggctcccagggtttttggagaccagttcgatcttcgggttttttttttttggggaaaaccccgggggcgacaacccca

SEQ ID NO: 183674 - DNA, 342 bp, Arabidopsis thaliana
gttgaggttcggactttactacatcgatttccagaacaacttgacccgtcaccaaaaagtttcgggcaaatggtattccgaattcctcaaaccacagtttccaacctccaagctgagggaagaactctagatgatcaagaatcctatcgggacaaaataattgagtacaagagtcttgaagatgttgttgaggataatatcagtttgtgtgttctatggatcgttttcatctaccggtccttcctatgttagaaggacttgtgagttgttcgagttttaataatatcaataaatgtcttcttttttaatatatgttgagttaataattaaatctgcttatcg

SEQ ID NO: 183675 - DNA, 135 bp, Arabidopsis thaliana
tttttctttttttttttttttttataagaacaacactgatactcaaaaccgtatttccccatcggttacataatttgtcatctgcattatatcgcagaagagagtcgaaaatgcatcaaaatttataaaccggaa

SEQ ID NO: 183676 - DNA, 229 bp, Arabidopsis thaliana
ccaactgttcttatcggatccgtaacgctacaaaaattctgatactgtaagttgtatgtacagagatgagatagagaaagcgagaacaaaaagctaaagacaactagagggactgataagtggtaagtagaggtcctttatttatcagccagattctcgtttgcagttcccaggtaataagtacttgtagctatcagcattctgaatcaagtatccagggagatgaaca

SEQ ID NO: 183677 - DNA, 228 bp, Arabidopsis thaliana
tcggatttttcagaaaacagaaaatggcgaaggcacggggctattttaatactgctccgaccttatgcttccaatcttcaagcaaaaaccctaaaccttctcactcgttttcaactaacgattacaccttttccttgggacagaagagagaactgcttcatacttcaagatcccaaagttttgaagttaaggcctgaaaccataatcctcagggcactaaaccaaaca

SEQ ID NO: 183678 - DNA, 185 bp, Arabidopsis thaliana
gctgccgtaccaaaaaattgggtttttttaaccgggttttccaaccataattttttaaacatttggtttttacaatgagccaatctttcttggctttgcaaatttgaaagaaacaatctttggttttcagtttttttatccgaatcacagggttcagtatactgggctgccccagttttgggtaa

SEQ ID NO: 183679 - DNA, 210 bp, Arabidopsis thaliana
tttttttggggggcaagggaacttggacaagatcacattctggaaagaggggggttttacattacttttacttttaaaaaaaaacactttttttttggggggggggaggaaaaaaagagacccttttatgggttaaaaggaatggttttacaaatcaaataattcggtgggtccttgggttgggcttttgggtcatctggggatgctttc

SEQ ID NO: 183680 - DNA, 351 bp, Arabidopsis thaliana
caaacaatttcgggggtgctcataaaataatcgggagtccccacgaacactaaataacttacttttaactattactcttcaacgatcttcaaacaaagaaatgtcgtcattacatccaaatcatcactaatttgggagaaaataataataagcctactatcgaatttacatcttttgaaaaaaaggaataagaagattccctcatctgggagcgaaagagacggtgatatccgttggccgtttcatattcgccgaccatttttccgattctaaatacagttgtgatatttttccggcgactcttcccatctccggcctattcactggatcatcctgaacacaatccaacgc

SEQ ID NO: 183681 - DNA, 311 bp, Arabidopsis thaliana
aaacttatgattacaaattaacacacaaaaacaaaaagaggcctttcacaaaaagaaacaacagagggaaaaaaaacaaacagaaaatataataaaaagagactggtttgatggatattctctctcagttctgtctccatgttctttaacttcaaccccaccattgatgcacagcaacaccttcatctcttagtttgccataaagagccaaacactcccaataagccctaccacttttactctgcatctttcttccccttagccctaaaccctttggcttgcactccaagaaaagctcatccaccattttt

SEQ ID NO: 183682 - DNA, 187 bp, Arabidopsis thaliana
aaaacattgtcagtcttttaaaatggaactttgttttattcattcaagcggtgcgagatcacaacagatggagcgtcagcacaaatttattatcaaacatcgcctaactgagtgggacagaatgattacaggaattaggaacgaccagaagaagtgaataacgatgtgattacttggtgtacaagac

SEQ ID NO: 183683 - DNA, 188 bp, Arabidopsis thaliana
tttcttttttttttttgtaacaacaccttataactccgatccaaagcggatcaatcattggatgagcatattctatgaacatgagctgaacatggccaacgttagagatctcgaactggaaaagacacagaatgatatcaccaactattataacagaacggggactgagaccgtggagaaaccataat

SEQ ID NO: 183684 - DNA, 190 bp, Arabidopsis thaliana
atacttccaacgggctccaaaccaaactgctcagaggtacagaggacacaatccaaggtgtggttacaaagtggaccaaaaattaacgaacttgacgtgtctcaaaattaagcagatagagatagggaaccaaaaaataagatcggggaacacaaaaaacttgaaacaatctagttttgcttttgggctt

SEQ ID NO: 183685 - DNA, 309 bp, Arabidopsis thaliana
ctatcagggggaatctttattcccagggaaaaaaaaaggaccaatgaccacaaccggggaccctttgggaaagtaaaatctgaatggggaacaaaacagatctcagaattttttaaaaaacaaacatttgcctttttttttcgggaacaaaaacttatgtttatcaatccctacaaaataggtttctccatagatcttataagactccaaaaagttttcttttaacttttgggggcagtcttttttttcgccttctgaagcttaaaaacctttttcacaatctttttgttcttaaaccaagaaggccct

SEQ ID NO: 183686 - DNA, 138 bp, Arabidopsis thaliana
attcaaacttcttccatactttttgtaataataagatgagaagttactaaaaacgactgatccacagctactttattcttttttcgttcctatgtaccttgattttgtagttataacatttgcttaagttgtaagatc

SEQ ID NO: 183687 - DNA, 215 bp, Arabidopsis thaliana
cggtgcgagaagacacaaggggcttgggatctgatggaggggtgaagctatactgggcatactgtgaggatcatgtagtccagctgctaaggaggtctcaggtttggtgagcgggtgtgaaggagaagaagagaagattgtggtggggaagaagagagaatggagttggagagaagagataaagctttaaaggaagagctagaggatatttggat

SEQ ID NO: 183688 - DNA, 277 bp, Arabidopsis thaliana
aagttggatatcttctgatgaacatgtttatctggtcgggtttacatatcagaagtaaattggtttacaaaggaaagtatcgatgatcatttatgtttcttcttcctcagtcgaactcatacgtatatccctaaaaccacctccttcggctcggtctcaaccatccaggggggcttgctcagtatgaaattgaatgttccttgggatgcacgtttgagaagaacttcccttgctttcactgcgaacccttgaggcttttttggaaaccaaacccctg

SEQ ID NO: 183689 - DNA, 348 bp, Arabidopsis thaliana
  unsure (1)..(348): unsure at all n locations
tccttttttttttttttttatcnaacggagacaagcctttactatcgatcactgttaaattcatggcttttacaaactactggaaaatataccttccataagcttaatcagagcttgttcttctatatatagctgcactgtatgaatccccgttcccgttccctctcaatcttctagcggtcctctgaatcgcaactagacgctgcttctgattacggttattagattgcctgatcaagaacattcctgctataagaaacgacattcccaaagaaattttctgaatcgttgtcatttcgcgaacccattggagaagatctttaaaacatgacaaaatctcagttttta

SEQ ID NO: 183690 - DNA, 312 bp, Arabidopsis thaliana
aaacggacaccttatttttcattcctttagaataacgaaaccaatgtacatatatttttttgagggtaatgcaattctgccagaagtaaataaagtttatgtaggaataacaatgccaaaccttcaatattcatcactgtctgcaacaacgctactcttttcaaaattctcaccttaattcgacatttagcttcttctgcacctcatcacgcactttactctgcagatcattgacctcctcgtccgtaagagaccgctccatggaacggaacacgattctgtaacaatgactcgtcagccatttcttcttat

SEQ ID NO: 183691 - DNA, 262 bp, Arabidopsis thaliana
gggcacatttggtcccaccaaaaaaaaattttgggtttttttaccggtgtttttttccccgggcgttcaaacccgggggggaaaaaaaagtttttataacccccctttttaggtgcgtgcccaaacagaggaactttattcctcgggtggtggaaggggggggggaaaaaaaaataaaaatgacatttcctcttcaaaaacacaggggccggtggggtgcccttccaagcgctggaaagaactatttttttaaggggggggg

SEQ ID NO: 183692 - DNA, 327 bp, Arabidopsis thaliana
  unsure (1)..(327): unsure at all n locations
ttgtttaggactatagagacttgagtgctgccgcgtcgtagctgatcttaagcggcgtcttnttttttttttttttttttgaaatagaggccattttttatgaacttttaataaaggtgaaccctgaattggggaaaaaaacggggaggggggaaaaaaagggcttttccatttatggtgttttttaaaaccccggcgtaaaaaaattggggactccccagtttttttaccaaagggctcccccccccccattttaaaaccccaggggggggaaaatttttttttgggggggggggaaaaaaaaccctcccccgggtgaaaaaaaaa

SEQ ID NO: 183693 - DNA, 421 bp, Arabidopsis thaliana
  unsure (1)..(421): unsure at all n locations
gcctgcaggaacccggnccggaatacccgggtcgatccacgcgtgcgggaaagcgcccgccaaaaaacacgacggaggagcctggagtgctaacgccgaaacgcaagccgacagatgccctgaacagggcaagtctcagtctctcacaacctctcgctgcgtaaccacaacggaaagtctggccgacaacaataaccacgatttttttttttcaggggtgggaccacggacgcccagccagcatgcaagggccccaacacagcaggacaaagacagaacggagaacaacgcgaagaggagagggctaggggagacgcgctccgagcgcctcgccgccatgatgcggccggccactcggctagaaagaacgcgagcaacgttcacgtacccagagagggtggaggagaggcgagacgcagac

SEQ ID NO: 183694 - DNA, 429 bp, Arabidopsis thaliana
agagcggccgtctacggggggaaaaacccaggagggaaagaaaaaaaaagaaaagagaggaggagaggcccggcaaagacaaaacggggaggcaggcgacgccagggccggcgacaaacgagagggaaggggagagaagagacaggacacgaggaagagaaggttttttttttggggggggggacggaaccccgccgaagacgaggagacgcaggcgcgcgcgcgaggggagaggcccggaggaaggagacgaggaggcgccaagggcgagaaggagaagaggcaggcgcgaacagagaaacgaccgcgagagcgcgccagcgcggagaggcgacggacaaggagagaagcgagccggaagaagaaacccgcggggacgcaccacgccgacgccaccccgggacagaacgaaggcagcgggaaacaacg

SEQ ID NO: 183695 - DNA, 525 bp, Arabidopsis thaliana
  unsure (1)..(525): unsure at all n locations
cccgcaggaaccgggccggaattcccggggcgatcaccgcggggcgaaaatcctcttgctgangagaagggacgagacggagggggagacgcagatgcggaagaaaagggacgcaacagaggggagaccagacggacgactatggggacgttagcacaattggctggatggttatacggccgcggcgggccggaaagttttttttttcgggggggggagagngacgccggaggacgaggccgcggcgcgcagccccccaccggggcgcgcggccgcgagacccccagcgggggaacgggcggggaggcgcagggcgggggggaaggggcggaaggaggacgagcggggagcgcgggcggcgagaggggggcggccaggagagaggggggcgaggaagagccgggggggaggggcggcgcggccgagagagggagagaggcgggggcaagcacggacggagcggcgcagcgaggtcgaggagggcggcggcgcggggaggtggcgcgggcgggctaggccgggggg

SEQ ID NO: 183696 - DNA, 309 bp, Arabidopsis thaliana
  unsure (1)..(309): unsure at all n locations
cgaaactagggcggcgggggggggggggggggcactcggggggcactcctgagggaccatctctgngcgcagcccccccccaccaaggcttgggttctctcttagaacggcggccccttcttcggttttatttttcaattataggatcagccaaaactattagaatgagacgctgatcacgcacacggccccacccactattgcgaatccgtcgccctctccaatgtatgggctctcgtgggacgacgcatcatttagattatcggaagatcctagctgagggacgaatgtcttttttggattatatta

SEQ ID NO: 183697 - DNA, 243 bp, Arabidopsis thaliana
  unsure (1)..(243): unsure at all n locations
aatgatacttccagctctactacgactcactatattgggaaagctggtcaccgcctgcaggtaccccggtcccggannattccacgggtctgatcccacngccgtcgcgcgacactgcgcttcggtatctcgtatggtgaaaactgctccatatcactatctttatctctacatgctcctcaaatcttttggatgatcttcttatacctcaatcgaaaaatgtctccatggtgaggatattca

SEQ ID NO: 183698 - DNA, 425 bp, Arabidopsis thaliana
  unsure (1)..(425): unsure at all n locations
ttgacgtcgcatgcacgccgtacgtagctgggatcctctagagcggccgcccttttttttttttttcagtatcgcaacaaattngtgttccatctgatcgaccggatcaaaaaaacctacctttttggtgggggcacaattaattggtcccggtagcaaaaaatcccgggtttaaaaaaaaacttaattcaacccggttttttaaagggtttactttcccccccaaaaaaaaggggcgcgttttataaaaaaaaaaaatttttttttggggcaacaaaaaaaaattttttttttatttttcttcgaaaaaccccccaaaaggaggggggggggccgcccaaataaaagggcgcccggtgtaataccataaaaaaagaaaaggggttttttttttttttttcaaaaaaaaaaagggaggggcgggg

SEQ ID NO: 183699 - DNA, 426 bp, Arabidopsis thaliana
  unsure (1)..(426): unsure at all n locations
ttgatttaggtgacctatagaagactttgacgtcgcatgccgcgtcgtagctcgnnatcgctgagctcgtcttctctgcgctcaaaattctcgcgcggaaaaccatgtcgactcgaggtcangtccaccgattanngaaactactaactttnnccctaaaaaacctcccaccaagggggagaacctttccccttttcccaaaatgagaaggggctttgggtttttccccaaaaaaaaaaaggggggtttcccgggttttttcttttccgggtttttttaaaaaacccctccaaccccggggaaatggtttttaaaaaaaatttttggcaaaaaaaaaaaatcccttttgcgcaaaaaggggccccccccccaaaattttctccgggagaagtggggtgccccccccccccccccaaaaaaaaaaaa

SEQ ID NO: 183700 - DNA, 433 bp, Arabidopsis thaliana
  unsure (1)..(433): unsure at all n locations
gatactccagctctatacgactcactataggaagctggccgcctgcagtaccggtcagaaataatnccgggtcgacgagctactagtncgcggcgnccttttttttttttttggagttagatgctatgattnccaacccagaaaattcaattaaccggggcctaaaagggtggtaaaacagaaaaaattttgggcctgaaaccttaccccaacggttacgggaaaaaaaaatcccggggggccctcaaatttttgggggggcccccccgaaaaagaggtgtttccccccggggggggccccccccgccctttttaaaaaaaaaaaattgggtaaaacaacaaggttttttttttaaacacccccgttttttttaaagggggggggggggctccccccccaaaaaggagaagagagtttttaaaaaaaaaaaaa

SEQ ID NO: 183701 - DNA, 520 bp, Arabidopsis thaliana
  unsure (1)..(520): unsure at all n locations
agagcggccgttctggggggggaaaaggctttagataaaacaaactatcccccccagggggaaaaaacgaccgacaagaaacgcacagatacgcggaccgaccccccacaagcacaatcgtacccccgagacacacaagcacagcactatccacgagctggcagcgcagaacaaattcctcgcttgggggggttcacccngcaaaggcgcaaacacatacttctaacaacccccccccccacgctgctggagggcggcgacccccccccggtccaccaagccccgccccccggcgcgcgcggcccgcgcgcgcgtcacgcgccgcgcgacccggaacgccggagccgtctggcggccgagcgacgcgcacagccggcggcgggaacgccccgaagcacggcgaacaaccagacgaacgagacacacgaggcggacccgcagcggcgcagccggccggcaggccgcgaggggggaggagacggagagggagcgggaaggggcgtggcgacgccgaccagga

SEQ ID NO: 183702 - DNA, 527 bp, Arabidopsis thaliana
cctgcggtaccgggccggaattcccgggtcttccccgcgggcggggggcgccggtaaacactatgatgcgacgctcgcgtgggtaagactttgcggtgccatgctcgcccagggtctggcctacgggatgaggggggtttctgcgcggaggtcgacgggtcggcgagggaccgaagcggggggaggcggcgcggttttttttttgggggggggacgagggcgggcgggggagggagggagggagcgcgggccgcggggcgcgctggcagcgggaggggcggccgttgcctcgggggggcggggccgggccggcctgcgagtgtctaggctggggtggtgtgtgtcgggtcgcccgtggcccctgggagggcggatcggatggcgccccccggccgcacgggtaaaggtgggagacagtgtggggtgcatagtggggcgtcgtggtgccgcgggtgcggctgcccgagggagaggaggagcccgcggcccgcaacagagtgagttgtgggtgggtgggggaggcgaga

SEQ ID NO: 183703 - DNA, 544 bp, Arabidopsis thaliana
tctgactcacatcttggcgggctgagccgcctgcagtgtgccggtccgctatacccgggtcgacccacgcgtgcgctttgtcgtgaccatcagctgacacctttctgttaaggatcgagatggagatgtcactcgttatactcccaagagtgtcgagattttgggagctttctgacccggtgagaaaggagtcggtggcactggaaaaacctttcacttcacggtatttttgttacggggagtgcaccctagcttgatgttcgatggaggataatcgaccgagcctaacggaacatgcgttgctgcgttctacgggatcacgaacgatgaccagatcttctagaggggctcaccgcaccgtggctactgactatggttaccgcctatctaggctcgaccgtgactcatgctttcatccgtacggagaagaccgattgttttgctgctaagctcggacagtggagacacatcggggcttgccatgattacgtggtgggtccataccaaagtgggatgctcatattcactcccatatacccccgtg

SEQ ID NO: 183704 - DNA, 128 bp, Arabidopsis thaliana
agatctaggtactcgactcatatggagctggccctgcagtacggccgatccggtcgacacgctcagtactgcataataactttattaaacaactattgcagaatgtatattgtggatgatgcttacag

SEQ ID NO: 183705 - DNA, 463 bp, Arabidopsis thaliana
gacgtgctgccgcgtcgtagctggattcgtcgagctcgtcttctccgcgctccaatttctcgccggcgggaaacctgtggacttggaaaggcaggtccacgggttttaaggaacctacttcctttttgggcctaaaaaaaacttttcggaaaaaggggggggaaatctttttcctctttttcaaaaaaaatggaaaagggggctttgtgggggttttttcccaaaaaaaaaaaaggagggggggtttcccgggttttttctcttttttgcaaaaaagttaataaaaacaagtttcctcaaacggggggggggggttttttgaaaaaattttttttgtgaaaaaaaaaaaaatttttttttgtcaaaaaggggccccgcctctaaaattttttcccggggagaggggtggtggccccccccccccaaaaaaaaataaaaaaaaaacccctctgggggggggggg

SEQ ID NO: 183706 - DNA, 590 bp, Arabidopsis thaliana
  unsure (1)..(590): unsure at all n locations
cccagcctatacgactactataggaagctgtacgcctggaggtcccggtccggaattcccgggcggcccccgccgtccggaaaattccattttttcttctcccggaaaaagcaaggggttttaaccctatctttcttggcaaatagccgcgggggaattgggaattttttttccaaaccctttaccctttttttgcccccctttttttcccgccccccacaaaaagggggggccctagcgccccccctccccccccgcccaaaaataattaaaaaaagggggggggggggcgggggggggggagacaaaaacccctctcaatttgggggggcgcgggggggttttttggtttataaaaaaaaaaaatatttttttgggcggggaaaaaagaggggggggggtgtttactacaacaaaaaagagaaaaaaataaagtgggggggtggggtccccctctattttattttctctccccccccctccttctttctttctcttttataaaaataaacagcgcgggggggggggggggggggagagaaaaaaaacaaaaaatattctttttttctnggagagaaagagaaaaaaaa

SEQ ID NO: 183707 - DNA, 577 bp, Arabidopsis thaliana
  unsure (1)..(577): unsure at all n locations
ctatacgactcctatagggaagctggtcgcctgcaagtcccgtccggattccgggtcgcccacgctccggaacgccccggccccgaaaatattttgggggcccataaaatttttttgaaacccgctttggtttccttttttaaacccggggggggccccgggcccctaaaaaaaccccccatttttttggtttttgggaaaacaaactctctttttttttaaatattgggggggaacccccctggggaaaaaaaaatttttttggggggggggaggggggtgtttataaaaaaaaagggcccccttctttttgggggccccccccaaaaaaggaggggggggggggcgccccgccccttcccccctttttttggggggggggggaaaagaaaaaaaatatttttcttgttgtggggtggggggggggggggttttcttctctcccgcgcggcgagagaaacaaaaaacccnnnctctcacttttttttttnttttttttttttgtgatgtgacaaaaaaaaaaccctctctctctttatttaanagacggggggcgcgagcacaccacccccccccc

SEQ ID NO: 183708 - DNA, 499 bp, Arabidopsis thaliana
  unsure (1)..(499): unsure at all n locations
aaattttgtattgggggaattttttttttggtggataaaaaaattttttttaataaaggggtctttaaattttttttaaaaaaaaaaagagggtgttttttttttttanaggaatataatttttggggggggggagggccgcnccccccgcggagaaaaaaaatgtggggagattttttttctccacccacaagattttttttttaataaaaaataccggcggggggggggaaaaaaatgctcccaccaataagagagcccccctccctgttttttttttgttaccaaaaaggagtttttttcaaaaaaaaaaaaaaaaaaagaaactcttttcttcttatactataaaaaaataatgaaatgaggggggggggggcgggcccgaagcactctatatacttttatgttgttgtcggagcgggagaagaaaaaaaattcgtgggggcgtggtgttccagaaagaaataaactcatgatatatctctatatatttagtttt

SEQ ID NO: 183709 - DNA, 602 bp, Arabidopsis thaliana
aacagcgaggcaagaaaagaagaaagagcaggggagacgcagacccacgaaagacacacccgcagagaaacaaagagcacgcacgcacaagacaacagcaacggccgccgcagaaggagaggagagaaaggccccgcttcggaccagggggggcaaaacacacacaacagcccagaacggaccaggacacagaagaagagacacgaagaaaccacggccagaggaggacggaacgcagaaaggaacgcgacgcaacaagccccgggggcacggcaacaaaggaaggcacagagcacacggaccgagacagaaaaacacagcaacacacaaccagcgacagcaccgagccacgagccgcagggcagcagagcaaacggacgacaacgaaacagcggagcaaacacaagagagagcggagacggaaggtgcgccccgcaacaggaaggagaaaacaagacaagggacggaaacaaagaaaagacaaacaaacagaaggggagcacagcgaggagcagcagcggagaaacagcgaagggagagaggacagagagggcgacagacgaagggagaggagccagcagcaccaaaggaggcagaaagga

SEQ ID NO: 183710 - DNA, 510 bp, Arabidopsis thaliana
ctctatacgactacttaggagctgtcgcctgcaggtaccgtcggattccgggtcgaccaagctcggtaaaaaccacggtttcggaagggggctttttttttggaccccccggggaaaggggttttcctttttaaaacccataaaaaccttttttttaaaaaaggttttacaaaaaatttttttaaaaaaggggcgcaaattattttctgggggagaaccccccccccgccaattttttcttttttcttccggggggggggaaaaaatattctctccccggggggggggggggggcccaaccccccttttaaaaaaaaaacaccctcttttttaacccctcttttttttttttttttggggggggggggagaaaagagaaaaaaaaaaaatttttttgttgaaaataaaaaacaaaaaaaaattttgtgtgggcgcacaccccccccctcctctgggggggggggggggggggaaaaaattttttttagagaaagaaaacaaaggcgtttt

SEQ ID NO: 183711 - DNA, 358 bp, Arabidopsis thaliana
caggcacgcgaacgaaagctgggatcctctatagcggccgccctaacccttatagtgagagagaaaacaacaggaacaaagagaaaagaggcccgaccacgccgacccacagcgccacaacaagaacaacccaaaccaaaaaaaccaacacgaaagagacgggagcagaaaccacgcctttaacacaagggggagcagagaggcaaacagacgcaacagctaacaagagccccagcgcggagggatcccgaaggacaaaaacgatacagggagaagcgcgggcgcaccagcgggagagaaagacccaagcgagcgaggggcccggggacacccacgagaagagcaaacgacagacaga

SEQ ID NO: 183712 - DNA, 505 bp, Arabidopsis thaliana
ggccgcctggggtaccggccggaattccgggtcggccagcccccgatggacaagagttttgatggcataactagagctctaagctatgggtgcaccaagattatagtgtgtgagcgatagagtggaagcaacatgcctagggaacaaccgggagcaatcgtcctatcagggggtggagcgagtgaagctactgactcagcgaggccagattgatgctgggcccgttgggtgtgaagaaaagtgggtgcgtgacgtagcgggggggactattagtggacgggcaggtgggggatggcgaggagaggctctggggagtaagcgccgttaagggtggaggaagagttgggtagggcacgggagacgaccggcgaaatttgggggaacggaagcggggccaggacgggggaggggccggatgcgaacagagagaacgggggaagagggcgggtgttggtagtgttgatttatggagcggagggagggatcacagcacaggctttcatca

SEQ ID NO: 183713 - DNA, 539 bp, Arabidopsis thaliana
  unsure (1)..(539): unsure at all n locations
tccgagcttattcgactacttaggaaagctgtacccctggcggtcccggtccgaattcccgggcggcccacccgttccgggccccggggaaacttttccccaaaaatttggaaaataaaacaccttctctcggggattatgggaaaaaaaccttncgccccccaaagccggggggtttttgggggcccctttgggctttttataaaactttttttaaaaaggggttttttttttttttggggggaaagcccctgtgcccccccccttttttccaaaaagaaaaacccctttctggggggtttttccccagaaacatataaggggggtgttttccccccggggggggcggcggggggagaaaaaaaaaaaaaaaaagagaggggggggggcgggggtcttcctctctctccctcctcnngggggagaaagaanaaagcgnccgcgccccccagagaggagagagaaatctcctctcccctttgcggggggggggggggcgcggcccccccccccnaaagaaaganaggcgcctctttttt

SEQ ID NO: 183714 - DNA, 473 bp, Arabidopsis thaliana
  unsure (1)..(473): unsure at all n locations
catagagactagacgcgcagccgcgtacgtagctaggatctctagagcggcgcctttttttttttttaaaaagaaaacacctttcctaaggacccaagttttttcaaaacaaagggcacatttactttttcctttaagggaaaagggcccaacacccaaaaaggaaaatcccgaaaaaaaatgggggaaagtttcccccccccaaaggagaaaaaaaatttttttcagaagggaccccccccccggggggggctttttttttataaaacaaaaaaggggggggggaaacccctctccaccattctcggaaagaaaaaaaacccccccctttttttctttttttttttccccccccggtttatataaaaaaaaaaaaaaacttttgttggtntnaggggccccccccccccccccaaaaaaaaaaaaaagggggggggggggccccaacccccttttttttttaaaaaaaaaaa

SEQ ID NO: 183715 - DNA, 528 bp, Arabidopsis thaliana
  unsure (1)..(528): unsure at all n locations
tctatacgactactataggaagctgtacgcctgcagtaccggtcagaatcccgggtccgaccagcctccggattttgttcaattattttcgggttttccgtttaattaaaccggggggccctttgttttaaaaacccgaaaagaaaaacgggccctttttccgggggggtggggcccttttaaaaccggggggggcgaaaaaaaattttgtttttggaaaaaaaaaaaaggtttttaaaaataaataagaaacctctttttgggggcgggggggggtttctaaaaaaaaaataaacacagggggggggggggcccccccccagagaggggagaggggttttttttttttcttcttggggaagaaagagaaaggatattttattaaaataaaacaaaccccccccccccacccaaaagaagagaggggggtgttttctttcttctcctnaaaaaaaaaaaaaaagaaagggggggggtgggtggtgtcactcacctcccccccccccccaggagggagaggaagcaatt

SEQ ID NO: 183716 - DNA, 615 bp, Arabidopsis thaliana
atgcacgcgtacgtagagctgggatcctttttagcgggcggcctaaacttttttattttaaaaaaattactcaaccacggaggtatgattacagatgacggccggcgtgactactaagaagcgaggaatggaccaggtcggagctggggaaggaaatctcacgatgcgctgtgctggtggcaagaaaggctagaacggaacattttcctcctttttggggggaaaaccgagagaagggtcgtatgtgagagagtaacccaccgctcccccgcaagaacaaccctcctcacctgggggcagaggaggaagcgggctcaactagacgacacgatgctcaggtgggttgcgagatacatgatataccccgtcgctccgaagaacgcagcaagtccttattgacgaatgaagatacgaccgcagaataaaaaaagagcaagccgagtagggagcgcaatagaaagaaaaagaacatacacgaaaagcccaaagacaaaccactgaaaattgcaccgcaataagaggcagacccgtacaacgctcagaggggcaagactcgcgcactacactagacgataaacaaaaaaacagaacgacaaaaagaagcggagcacaaaa

SEQ ID NO: 183717 - DNA, 589 bp, Arabidopsis thaliana
  unsure (1)..(589): unsure at all n locations
gccgcctgcagggaccggtccggactcccgggggggccaaaactcgcgggcacgaagcgaaaacacagcaccaccaacacgcacaagcggacagagcagcgggagaagagcaggctcagcggccgaggggacgcgacggccgacggaaagcgcgagaagcaagacaaaattcttcttttatgagggggggagagacgcagaggggaggcggcagcgagaacgggccccaagggaaaggggggagagaggcacccccccgcagccaaggagaagcgcgcccgcccacaaaggacagagaggaaaaggaacccgaaggaaccaaggagagagccgggacacccccgagcgggcgccacaagaagaccccccagccgcgccccgcggcggccgggtcacccnagcgccgatgccgacccccgccgcacccccaacaggggacgcacggccaggggggccgcgcgcgccgcgaggggcggccacaggaaccccggaaggcgagcacaaccgcgggagccgaaaggaaggacggcggggaggcgggaagaaggaggaggggggaaggcaggggaggggaagcgggaggaatcca

SEQ ID NO: 183718 - DNA, 540 bp, Arabidopsis thaliana
atgcacgcgtacgtaagcttggatcctctatagcagggcgccttaatccattttttttttaagagggatgtaagggtgtacttaatatgatacaatcaacgataattcatttaaaacgattgatagatttgagctataactattatgcgaagtttataatatagtaacccgacgattgtgagtttttttttttaggagtggggagggctaagagaaagaaccgagacgtgagattcttctcccaatgtatgcgtgaataggccaggaggtctccgggtaataagagtgcgactaaaaccctagcctggcgccttgttagaaaggatggccagcggggtaatttatgttgatttatttgtgcacagaagagagaataaggaggcgacagcgacaggatgttagtgtctaccacgagcagaggcagtgtagaacgcaagggcatagatatagaaagtaggttagttaataatgagaatagaagtgtcatagtgtggattgtaccagtagatagaagattaacgttaaattgatgatcagtac

SEQ ID NO: 183719 - DNA, 683 bp, Arabidopsis thaliana
  unsure (1)..(683): unsure at all n locations
atgcacngcatgacagtgaagctgagagatctctctttagagcggcgcgccgctttctcttttttttattttattttctgttcgcaacgattgggatgtgactttaaggtacgatttttagagagccaagggcacgagcagagcttgactccggtcgaaaacaaacaagaacgagttacggcgtcaggaaggaacaacgcaggacggggcagaatgaatttctttttttctacagagggggggaagactgaccaaggctgtggagcacctgtgacattaagttgttacgattagacgcgaggtgaggtgcgagcagtggggtcgcttgcagactaggacaggtgtggatatactgggggtggggcggggcgggggggtgagtacctggaatggaagaccgcggccggtccggacgatagcaaagcgtctacgggcaggggacaatggggagtggagccgcgcagcaagagaacagagggggcgaggggggtggggaggggtgaagggagggggagggtggcgggggggcgggtgcgccgggagagcagcgaatgggggcgaggagaggcaagcgaagtgtgagaggcacaaaagagcgccaacacggagagggaaagagacggggaggcgggggagggaacgaggaggaaggaagaaaaagggagaggggagacggggggggc

SEQ ID NO: 183720 - DNA, 314 bp, Arabidopsis thaliana
tggcacgcctgcaggtaccggtccggacctcccggggggacccaagcctccggtcacgcttgcacgccaccacgatggcggccggagaagccgacgaagtggcattagcgacggtcagtagctcctgtatcaacgaaaacttagggctgctactctgagaacaagaggacagggagagacatttctcttgtcaaggaggagggaccgctaagcaggcgatacccgggatgcgaggacgctgcggtgggggaggagacaccggagaacggggataagccaaatactatgggctgacacagaacgcagaaggaggg

SEQ ID NO: 183721 - DNA, 405 bp, Arabidopsis thaliana
tttaggacgacactatgagactatgacgtcgctgccgcgtacgtagctggatcttagacggcgccttggttttttttttttgcaaaccaccgcttgatgaaaacttattcggtttcccaaaggggaaccgggaaaattaaggggcccaaagggcccaggtgggtaaaaaaaaaaaggggtcaaaagggaaaaagttccccctggcccacaaaaaaaaaaggctcttttttaaaccccggggggggtaattttttcccaccggggggaaaaaaccccccccggggggggcggcccttttttgggggggggccctttaaaaaaaccccccccccccccccaagggggggggttccccccccccccccacaaaaaagggacgccccccccccccgggggggggggggg

SEQ ID NO: 183722 - DNA, 410 bp, Arabidopsis thaliana
  unsure (1)..(410): unsure at all n locations
ggggggaatatcccttcaggagaaagaaaagagagcaagcacgagcagaagcgagagagcacagaaaacaacaaggccgagaagaggcaacgaccaggacaacgagaggaggaacgggagagaggcacaagaagagagccagccagagcagaaaagcacaccccgaccgacacggcacgagaaagacgaaattatgtgtcgggagagggggaccggcagggcgacaaggaagaagagacgaggagaggacgaccaacgcgcacgagaccaagagagaangcaggcagaagcgagccaagcaggggcaccgcgcggggaagcagcaaggcagaggaccgcgagacgccgcacagagcgaggagaagaagacggcaagaggcgacaacgacgcggaggagcgcgccagcaag

SEQ ID NO: 183723 - DNA, 550 bp, Arabidopsis thaliana
cactatagaagttttaggggcaactgcacgcgtcgtaagcttggatcctctagagtttgcgcgttttttattcttttaagccaggggaaatgcgttaactgaacacggaacactagatatcgcggcaccacagaatggaaaatacgggccccataaataagcgcacttactttgaagcaacaaatagaataacgataatgcggccgagagccaaacagaactcttgtgatttaagcggatagaagcaacgctcccatcgcgaaccattgggagagactcaccgcacgaggatgtccgaactccgcacctactgagggaacagagggtgggaactaggctgagccaattagtcgactccgtgggaaagcaggcgaagaggggagaaggacgggaacatgcgagaacaccacagtcgtaccgaggcactagttgccaaatagagcaactgggcgcacatagagaactgggccttgagtaaggatgaacgcaggagtgggtgttgatagaggcccgcagaggtcgctgtaaggcggcgtcgcgagtcttgggg

SEQ ID NO: 183724 - DNA, 443 bp, Arabidopsis thaliana
  unsure (1)..(443): unsure at all n locations
cccccgccacaaaaatttgggtctcccttaaagacgtccgcccctcttttttttttctcttgggggcgcgcccaccccaacttttttttttttctcgcgggagggaggggggggcgcgcctccatatactacctttctctattnatnatttcttcttcttcttttgttttttgggggtgtggggggggggcgcggcgtgggagaccagcaacccnaccaaccaaacacaccaacacacacacacattttcttttttttacaagagagagaggggggcacaaaaagcagcagcacgcgacgccaagaaagagacgagagcgcagaagacggcgcccacgacgcgccgggagagagttagcggcgagcgaggagtccgcgccagaggcggagcgaggccagcgcagagccccggcgcgcgcgacgcgaagcgagcaaggagcgag

SEQ ID NO: 183725 - DNA, 471 bp, Arabidopsis thaliana
  unsure (1)..(471): unsure at all n locations
ccgcgtacgnaagctnggatcctctagagctgccggccgttattaaacccttttttgttataaagggcacaacccaaatctcctggcgctttttcgggttactacttcgcgccctaactcgcgcgacaacgcccaccgcgtatcacgttccatattgagtaccgcccccccgaccgcgcccgagaccgaatttttttttatagggggcccacccccccccccatatgggaggcgcggcggtctccctctgtttcatccgtatcagccccctaccgatctgagtgctcccctccttcggctctcattacgcacaccctcgcacggtcgcgtatccctccggaccgatcggtctccccgtttgtttctcattgacgactcccattcaagagatgtgttgcacctgaccttctgtaccgcgtctgcgcgtgcttgccgtgggccgcgtgagggccttccgcgggctgtagccgc

SEQ ID NO: 183726 - DNA, 547 bp, Arabidopsis thaliana
  unsure (1)..(547): unsure at all n locations
caacaccgcaggcacctggtgccactctcagagcagcacccccagaccgcccaacccccttctcctatcgatacaatcagaaagacaccacgcatattaagaccaacgctcgaggcatgggggaccccccaggggggggacccgtccgcccctttccaagaacaccccccccacagggggggaaaaatagtggttaaaaaagggggggaggggaacgcgcaacccccccccntttatgagaggnaaaaaaatataaaaccccttaatggggaaaacaccgtttcccccgcccccaaaagggcccccccccccccgccggttttaacccccctttaaaaaaaagccccccctggggggggaaaaaacacccccccccttcaaaaaaaaaaaaaaaccggggggggncccccccggccccccccctttttttgtggggggttgttgtttttttttctnctcttttttttttttttttttttttttgttttttttgttnttttgttttttttttttttttttnttntttnntgggggggaaaaaaaaaaa

SEQ ID NO: 183727 - DNA, 271 bp, Arabidopsis thaliana columbia
  unsure (1)..(271): unsure at all n locations
ggggttttttttgattttttgagggtttcggacccttttttttgggaaaaaatatttttttttttaaacttttcctttttttttccccccccttttttccttttaaaaaactttttggggtttttttctttttttaaaaaaaagaggggggggggcccctttccccnnntttttttttttttnttnnnnnnnnnnnnaaaaataaaaaaaaaaaaaaaaaaaatatatatttttttttttttttttttttttttttttttttttggggggg

SEQ ID NO: 183728 - DNA, 480 bp, Arabidopsis thaliana
  unsure (1)..(480): unsure at all n locations
tatgggcacactatgagatctatgacgcgctgccgcgtcgtagctggatctctagagcggcgnttttttnnnnnnnnnnnnnnnnnnnaaatcccacaggaccggctttatttgggggaaataccgggccctgaatggggaaaaaaattttaatttttgggagaacctttttggggggaaaaaggggttaaaatttttggtggggaagtttttcgcggactttttttttgggggttaaaaaaaaggggttttttaaattttttttggggggggttcccacccccctctcttcgggggggctctttctcccacaggggggggagattttcttttttgggggggaggccccctctttttataaaaaaaaaaaaaanccgnnaaccacccttttttttttttttttttcacaaaaacaaccggggggaggggggggggggtttttattttttttgtcacacaaaaaaaatttttttttttttt

SEQ ID NO: 183729 - DNA, 287 bp, Arabidopsis thaliana
gccgcctgcaggagccgggacggaatagctttgccgacccacgcgtccgctgaaacgcaaagacacataaacatatagacccgctgcgctcaccggagacatatcgagagtcgagaggcgcgcgttagcaacaacgaaatggctgatatatcagctgccgggcacgcggtcactgtgatcattaatcagtgcacccaaggcaccgaaaacgggggggctgttttttttgtagggggggcggggcggacacatacccagtcccagagatacatattaatccgccgaga

SEQ ID NO: 183730 - DNA, 404 bp, Arabidopsis thaliana
  unsure (1)..(404): unsure at all n locations
ccagcatctatacgactcactaagggaagctggtcgcctgcagtaccgtccggattccgggtcaccacgcgttcgaccgttaagaaacaaagtcttggactctggcctgaacttttggcatgaaatttaatggaggaggggggttttttccgccaacccttcccccccgggggggacacccccccccggaaaagggcggggcctttttataaaaaaggggccttttttccccggaaaaaatctttttttaaaaaaaaatttttttttttttttcttaaaaaaaaaaagaaaagagggggaaaatattttttaaaaagggggtttatagaaggggaggtantttttaaaaaaaaaaaaaatatttttttttatataaaaaaccttttcggagagaaaaaaaaaaa

SEQ ID NO: 183731 - DNA, 506 bp, Arabidopsis thaliana
  unsure (1)..(506): unsure at all n locations
acacgacaaatttagggaaaaactnccgcctgcaggaccgggccggatacccggttcaccacgcgtccgccactataaaaaatacatattagctaaggatagaaaagccaaagatggataagaagcaggacataaagagattttgaatgtgatccgaacgaacggtgcgagagaattattaaaaagccaagcgggaagatttttttatgggggggaggagcgatattggagatgttgaaaagagaagattttttattatttgagaaaagcactggacgcaagaacagagaatagggtttgacggaagcaggcgctgtttgataatatatccctgcgaaagtgacgcaagtcgagaatgattggaggaagaggcagaatgtgagcgcaggaaatgtagaatgtggaaagagtactgtaaatggaaaagagaagagaagaagagaggtaaaatgaagaacgcgagggggataagaaagagggggagagtgggatgaagtaggccacag

SEQ ID NO: 183732 - DNA, 545 bp, Arabidopsis thaliana
gacaactttagggagaagacgtgccgcctgcaggtaccgggccggaatacccggtgtcgacccacgcgtgcgccgtcacatagggaaataatataaatctgtgtagctatctagctgatgtggtctatcatgagtgcctcggcaggcaacacgaaaggggattttttcaacccaatacgaatcacaaatttgtaatagcgcccgtgaccggggacagatagaggtttttttttgagggggggcgggccgggagctcctgaacaaacccctagtgggatgtgttttccccggtgggagaggatcactagatgtccatagcgtgtggtatatatatgataacccgccaccggtgcttgctagaggccaggttagagggcgggtagagtgtgcgttgtaccaggcagacggcggatgatggatctagcactgctctatcccgatgatgggataagtagttgggggcgggtgggtcgatgctgtcatacttccactagagagagtcttttttagtctagtgggccgcgcaactgtgacacgcgaaggaa

SEQ ID NO: 183733 - DNA, 432 bp, Arabidopsis thaliana
  unsure (1)..(432): unsure at all n locations
tatacgactatataggaagctgtacgcctgcagtaccggtccggaattccggtcgaccacggcgtcgaactntcgaagacaaaatctaaaaaccccaaaatttcctccaactccaagtttagggaaaatggtcccttttaacaccccccgggcttttttttccggccccggggaatttttggattttttttaaaaaaggggggggtttttttttttatattatggtgttaaaaaaaaagggggtttttaaaaaaaatttttttttttttcttcaagaaagtttttttccggggggggggggtcttcccaaaaaaaaatttctcggggaaaaagggggggtattaaaacccgcgggaaaaattttttaaaaaagcggggggccctttttttttaaaaaaaaaagggggggggggggtgaaaaaaaaaaaaaaa

SEQ ID NO: 183734 - DNA, 513 bp, Arabidopsis thaliana
cctgcaggaaaccctgggcacggcaataccacggtgtccgaccccactgcggtccggcgccgacagcatgcaactgaaagagacactaaacagcagaactcaatagaggaaggaacgcgcaggcggcagagcaggagaagcgcgcggcgaccgcaaaggaggcagaccacacgcacgcggcggcagggcgaaggaaggaagggaggagcgcaaaccggaggcgtggtgatacaagaggggcaaacccgcccaagggcgaacagagggggcaggggcccaaaaagggctcgagaaagacgacccagggctcagcgagcgaaagaaagacagtcacggaagacaggaaggcaggagcggccggagaaagcccgagcccagagagaccaagggcgcggagcctcggccccgccgaaagcagcgcggaaaagaagagtcgcgccgcccaagagaaaaggagcgaagggagaagagccggagaagagggagggaggaaaaggaagccacagagccagg

SEQ ID NO: 183735 - DNA, 508 bp, Arabidopsis thaliana
gcacgcctgcaggaaaccgggcacggaatacacggttcgacccacgcgaccgcggacccacggggaaaagatggagcactagggaggcgacaacaaacgcaacgggcaagcagtgaacgaagaggagaacgaccacgaaggggacgaggccaggagcagacaaccacgcaagacgccgcgaccaaggagcaacagcgtgttttaccagaggggcgcaggcaagaaaagcgaaaaagagaccaaggggagcacgccgcagccaggggcgagcgcaaaagacgaaaaaaaggaagggaaagaagaagggggcaccgccccagggacaagggcaggaggcagccagcaaggaagggccagaagcgcaagtaggagcaaaccacagaaccgtgagaccccggagaagagcgagagcaggccagaggaaaggagcggggggcggagaaccaggagaacacggaggagccggagggaagaccaaggcgggcaggccccgaaaaggagaagagac

SEQ ID NO: 183736 - DNA, 448 bp, Arabidopsis thaliana columbia
atgatcgccgactatacgactcactataggaggctggtcgcctgcggtacggtcccgatccggtcgccacgcgtcgagatcaaacaaacttcagcaagcaatcattcatcaaaacaatcgaaactttgaaggtccttttttccgaaatgaacttgggtttggggaaaaccttcgggaaagggaaaggggtttttacgggggggggaataaaaaaattttgtttttttgggcggcggaaaaaaagggggggacccccccaaaacagagggggggggggggaaaacaaaagaaagggggttttttttttttttttttttttttttccgggggggggggagataattatttttttttgggggggggggggtttttttttcggggagggggagcggggggtgtttttaaaaaaaaaaaaaggagggccgtttctttttttaccacccccccc

SEQ ID NO: 183737 - DNA, 495 bp, Arabidopsis thaliana
ttcgactcacattagggaaaagcacggcacgcctgcaggtaccgggcacggaatacacgggtcgacccacgcgtccggccttcgagaacgaacattaatatgaggttttgttcactgttaccatttgggagatagataaaccaccatatccttccctgagccataacacaacaattgccgcgtctctagaatgaccatgctctacgttgctctttttctggcggggggagatatcactaccggcttcttatcgtaaagtctgcgaagcgatctacattagaagacgtgcgatatgtatcgcagacactaatgaaaacggttcggcagttcctctagagccggtatatgtctgatattgccaccattatatgttatcatgatgaacaatccatgatcgtcatcatgagagcacatgctaagcaaatgaggcggtcatagactggtctctgtacctgaaagagaatccgacacaaatcccagagccttggaacaata

SEQ ID NO: 183738 - DNA, 341 bp, Arabidopsis thaliana
ccgctctatcgctacttgggaagctgtcgctgcgtccgtccgattccgtcgacagggcgattttatttaagcggccctttcccaagaaaaggtcagcttggaatttggggtttccccaaccttaactttgggggggggggaaaaattcgaaagatttttttcctccggggtatcttttttgttttccccccggtgttaaggagggagatatccccccctttttttggtttttttgggggccccgcccctcccctcctcaagagagaggggccaccctttttttgttgaaaaaaaaaacaaaaaaacccccccccctgtggaaaaaaaaagggggggttttt

SEQ ID NO: 183739 - DNA, 316 bp, Arabidopsis thaliana
  unsure (1)..(316): unsure at all n locations
acgacaattttaaggaaaaaacggcacgcctgcaggaaccgggccggaatacatgtttcgacccagggcgtacgcgcggaataatatgaagacaatacaaatagggggaatggagggctgaatgcggagtaatattgggtaagaataagtacttggcgtgagagagaaatgatagatttaagagaggaatgaggcgncagggagagcaagagagaagaaagaaaatttagaaatataggcacaaactgaaaagaaaagacgaattatttttattttatagaggtggagcaaaacgaagagaggaaacgtttggaga

SEQ ID NO: 183740 - DNA, 461 bp, Arabidopsis thaliana
  unsure (1)..(461): unsure at all n locations
gttcccgcctatcgactcactatgggaaagctggtcgcctgcggtactgtccgtattccgggtcgacctacgcgtnncgtggacgcttggcggacncnttggcaaacngnntttttatttttgcttttggattaaacttccctttccagggggcgaaaaacctttttttctggctttttttttgagaaaattccccaccgaaaaacggggcccctttttttaaaaaattcggggctccccccaaaaaaggggttttttcccggggatttttttatttttttgggggggggcccccttttttttttttgggggagggagggaacccctcttttcttttttttttttaagacggccccccgctgtaaaaaaaaaaaaaccaccccctctttttttttgttggggggggggttgtttttaaaaccccccgccggagggaggttgtgtttttttaaaaaaaaaaa

SEQ ID NO: 183741 - DNA, 348 bp, Arabidopsis thaliana
  unsure (1)..(348): unsure at all n locations
cgcacttcgactcctagggagcctccctgcaggtaccgtcgatccggtcccagcgtcgctgatcacaganggaattgaccatgtntctatatcacctccaaattaaggtaatgcttggaattgaacctggtccttcccaacacctggtccgggttctttggccaaaatttccgggaaaacccctttaatttgggggggccccacccttttttaaacctttttttaaggccccccacggggggtttgtggattttccccccccaaaaaaaatttgggggaaaaaatttgggtaaaataaaaaaattctcccctgcccccccccccccccccttttttcccacgagaaaa

SEQ ID NO: 183742 - DNA, 415 bp, Arabidopsis thaliana
ctacgacaaacgttaggagagagcacggcacgccgtgcaggtacctgggccggaatacacgggtcgacccacgcgtccgcactctcggacgcacactctaccgctctagcggtcgagacgactctgacgatggaaagcgcgccatatccaagagagagagaaggaagacactatgttctcagaagaaacaatgagccgagacgtccaacctctccgtgaggtggttctacattaagatggcaaagcaccggagaggaaaccaagagatgcatagccgggacagggatggcctccgcacaggatacgacgaggatgtgtatgcacctcgagggaataaaacaactcgagtggcgtgagaatggatatgatacagcgatctcgcatagctatactacatcctcgtgaatgcgcacac

SEQ ID NO: 183743 - DNA, 404 bp, Arabidopsis thaliana
  unsure (1)..(404): unsure at all n locations
atacgactcactatagggaagctggtcgcctgcggtacggtccgaatnccgggtcgacccgcgtccgaggaataaagggttgattcttttttggaaaaaaaatttttgaaagggtcaaaggggaccccctttaacccccggggcccaaaaagggcaccttggaaagggcccacaaatttttaaaaagggggttcctaaaaaaataaaaaatcttttttttgggaaaaaagggggggtggaaaaatttatttttttgaaaaaaaatatttactccccccccttctggtgggccccccccccgcgaggaaaaataaaaaaaatttctcccgggggaagtatttctccccccggggggtttgtttgtttttttttattcccccacccccnctctctttttaaaaagg

SEQ ID NO: 183744 - DNA, 435 bp, Arabidopsis thaliana
  unsure (1)..(435): unsure at all n locations
cagctctatcactcattaggaaagctgtacctgcagtccgtccgaattccggtcaccagcgccgtatttcattttttcaaaccctttcattctaaaacccaaaggtttccccaaacccattttaaaaccccttccaaacctaaaaccaaaaacccttttaaaaaaaaccttgtaaaaaattttccccccagagttttttaaatttttttggaacaccccctttttttaaaaaaaaaaaaatattttaaaattttnttaaaaaaaaagccgctgaaaaaaaatcccctcccccccccattttataaaaaaaatttttttttttaaaaaaaaaaaaaccccccttttttttnataaaaaaattcttttttnacaaaaaaaaaaaggaaagagaccttttttttctcaaaaaatattttttttttttaaaaaaaaaaa

SEQ ID NO: 183745 - DNA, 211 bp, Arabidopsis thaliana
ggcacgcctgcggtaccggtccgcaattcccttgcgacccacgcgtacctctctgggggactacacctgggctgcacatgactgaaagatgacgcctcccgcacgtggggctttggcctctaacatgtttcttgaccactcttcccttctgaggttccataccctggtgcacgggagtctcttattggaattagaggagacgagcaccggc

SEQ ID NO: 183746 - DNA, 310 bp, Arabidopsis thaliana
gcacgcctgcaggtacctgggccggaattcccgtgtcgacccacgcgtacgccctaggcccacagtatgatgtattcgcagacctatgtgggttacacaggcactatacaagtgcgtatctacggtggcgcaaaacaaaaacaaaaggggcggacaggtgtatcaggatcaccagctgtacggacagcggtggcatagcgacgcccttttttggtggtgtgggggaagaccgtagattgacagtgacctgccgccggcggtggtgacaacgaggcgggacggggggaaataccgctcggcgcgggaccac

SEQ ID NO: 183747 - DNA, 474 bp, Arabidopsis thaliana
  unsure (1)..(474): unsure at all n locations
tatgacgtcgcattgcacgcgtacgtagctttgatcctctagagctgccgcccttttttttttttttttttttttttttttttttttttttttttttttttttttttttttttttttttttttttttttttttggggggttttttttnnnnnnnnnaaacaaaaaaggggtctgaacccaaacttttattttcaaaatttgggttttatttggcacaaattggaaactaatccaaccaaaaacgttaccctttttacataaagggaaaaagactgagtcaggttcattccctttctttttcattgggtcaacaccttcatgaacatagggtatacccatttatggggaaatttttcgagtttcgaacttttgacatattgggaggaacttactatttggccatctgaattccaacttggcgggaaattaattttgtgaaggaaaaaccccttaatccaaggcgacaaaaaaaac

SEQ ID NO: 183748 - DNA, 498 bp, Arabidopsis thaliana
tatcgactcatatgggaagctgtcgctgcagtaccgtccggattccgggtcgaccagcgtccgaattgtgtaacatgggggaaagtttggaggacgtttgcttttcccggggacctcattttaaaatttttagggttgggggcccccaaagggatttttcaaaaaatttggcccgttttacccctttttacccggtttaaaccccccccccctgtttgttcccccaaaaaaaaagaaccttgggaaaaaaacctccccccccccggggtgttataaaattttttttttttcgcgcggtttttttaaaattttttttaaaacagtttgtaaaaaaaaaaaaaatctttgttggagaaaaaaaaaaattatttttttcccccccttttttttttttttgcggaaaaaaaaaaaaaatatttttttgtttttttttatctcgggagaaacccccccccccacccacaaaaaaaagaaattttttttttttttttttttttt

SEQ ID NO: 183749 - DNA, 436 bp, Arabidopsis thaliana
ctcactatagggaagctggtacgcctgcggtaccggccgatccgggtcgccacgcgtcgcaccgtcgtcgctgcaaaacacagatgatcggctgcaaaagcgacagatgatccgctgcataaaccaccaagggtccggctccaaaaacccccaagggggcccccggccaaaatttttttttccggggctttttttttgagcggttttcctttttggccccccccccttggaattttttcccccccgaaaccccccccgggggggacaaaaaacaaaggggggggggaaaagcttctgcccccccaaaaaaaacccccccaaaaaaaacccccaaaaggttggggcccacaaacccccggggaaaaaaaaaagccccccccccacccaaaaagcggggggggggttttttttctccccccccccaaaagaaaaaacc

SEQ ID NO: 183750 - DNA, 424 bp, Arabidopsis thaliana
tagcttgatcctctagagctgccgccctttttttttttttttttttttttttttttttttttttttttttttttttttttttttttttttttttagacccttaaacaggggaggccaaagaaatcagaaatcaatggctttaaaacagggaaaaaggggccacaataataaaaaagggttttataaagcggaaaaagcttcttcctaaaaaaaaaaaaaaataaaaaaaacttccgcgcttttgcttaaaagactacctttggttcgaaactaatgggattaccattaggaaggaacggccccgggggcgaaaacaaactaaagtcttgggggggaaaccccccaaaagcaggagattatggggcgcggccacagacccctgggaaggaggtaaaagggaagtccggggtaacaccaccaaaaa

SEQ ID NO: 183751 - DNA, 181 bp, Arabidopsis thaliana
  unsure (1)..(181): unsure at all n locations
gcacgcctacctaagcttggatcctctagagcgctcgcccggggggttaaacctntaagccacaggaacgaccccgcgaccgagcggaaaaccgacagccaccgccggggagcgcggagcaccgggaagagagggcgagagagaccacagctcggaagcgcgagaggcagacggaagggag

SEQ ID NO: 183752 - DNA, 283 bp, Arabidopsis thaliana
  unsure (1)..(283): unsure at all n locations
cacgcccgcaggaacccgggccgcaatacccgggctgacccaggcgggcgagccctcagnngaagaagtcagccgagaacaggaccccaaagacgaaagcacgcccgcgcacgacgcgcaccagcgacaagcaagaacagcggagaagaacagcgacgggcgaaacgcgcacgacccgcaaagaagaagacgcgcaaccaacggactccccncggagggagcacaaccacgaacacgcggcagccagaagacacaaaccccgcagaccagcacgagacgacag

SEQ ID NO: 183753 - DNA, 549 bp, Arabidopsis thaliana
gcacgccagcagggaccgggccggaatacccggtccgaccgcacgcgaaagccgcacgcgaccgaaaaaatgagagacccagacggaaggcgcagactcaaccaccaccgaacaaacgatcacaccacgagagggagagaaagcaagcaacggaagcacccacaaggcccaaagcgagcaaacgagacccagagacactctttaagaggggggcggcgagaggacaggtaaccgcaggcagaaagcaagaccgcgacacgagacggagcagacgaccggctgcacagaaggatagggaagaggagaagaaccccccgaccgaccgacagatgagagagaagaacagaagagaaagagagcgaccgccagggcggggcgaaccaggacaggggacaacggcgagacagagcgcccgcgagacccgcgaagaccgggagacaacacacggaggggcaaagggaggccgcaggacacacgaaggcgcagaggggaaaagaagacgagaacaggcgaaaaccaaaaaccgaagggcgaggcagcacacgtgag

SEQ ID NO: 183754 - DNA, 533 bp, Arabidopsis thaliana
  unsure (1)..(533): unsure at all n locations
ttgatcctctaggctgccgcccttttttttttttttttttttttttttttttttttttttttttttttttttttttttttttttttttttattactttttttttgattaaagatgtaaaagatgggggggagaaagaaaccaaaaaaccaaaaaaaaggggcgcgagacccaaaacccttttagaaaagagcaccccaagggggaaaaagggtcctctggccctggacccttcgccccgcccccccggggaaaaacccccgggccaaagggccccaaaaaaacctgaacagtgctttccccaacacgcgtaggccccaaacggaacggcccgcccgcccacccaacccccccgggagccacccgaaacccgacccaaaagagaagcccccccccagagaaaccgcgggggacccccagggcaagaccgcacacccgcncgcgcgcggagccgcgcccgcccgcgggaccccggcgcggcgccgccggcggaggcgcggcgccgggggccgcaccggcgcgcgagcgccccgcg

SEQ ID NO: 183755 - DNA, 376 bp, Arabidopsis thaliana
  unsure (1)..(376): unsure at all n locations
tagcttggatcctctagagctgccgcccttttttttttttttttttttttttttttttntnnaaaaaggagaagaagctatatatgtcttcattagttgaaacttcttaagaatttgcagcgtttcaggaacagaacaaacagagaacacccataaaaagtcaaaggaaaaacaaatcttgtttgtgagagtgtgacggaccgcgctcagcgtgaaggaaacccgtgcgagggacagaagaaacagggggcgcagaccacagggaacgggcggaaaaggcgaggggacgggcgaagacgagatggaggagggtcggcgacaggaggaggttcgcggcgcgacgcaggcggtagtacggcaccagcgagcccacgac

SEQ ID NO: 183756 - DNA, 295 bp, Arabidopsis thaliana
  unsure (1)..(295): unsure at all n locations
ccttgagtgcttgacgtccatgccgcgtcgtagcttgatctctagagcgccgcctgttttttttttatatgaacggaggactataaaacataaaattgtgacataaaggccaaaaagatgcgccaaagggaaaaaaaaaaatttttaacacaaacaaagggggttaaagggggtattaggtgggggagaaaataaagggggatgtgggaagggcgctcgncacgagagggggcgcccaatcaccctttttggaaaaagaaaaaaggtggtggtggagatataattacgggggggg

SEQ ID NO: 183757 - DNA, 171 bp, Arabidopsis thaliana
tggatcctctagagcggccgcccctttttttttccttttcccaagtatgaacatttgaatgttggcaaattgcacttgtgtcagatgctcattaagaaatctacactaattcgcaaaaaaaaacacaggagaactgacaactgcggtcggacaggaagaagccgggagaag

SEQ ID NO: 183758 - DNA, 562 bp, Arabidopsis thaliana
  unsure (1)..(562): unsure at all n locations
tcctctagagctgccgccctttttttttttttttttttttttttttttttaaaaananaaaacanannacaaaacaaccaacaaacaaaaaaaacannaaccccaaaaaaaancaacaacattaaaacatccttaaaacaaatataggaaaaaatcttttctctccttntatttttttttaaaggggcggaaaaacaaacaagaaaaacctttattttggatccaatgaaatttatccacaatttccaactcttttctatatctcaacaatttcaaatctcttccataagtataccgttattacactgtgtttttactcttcgccggcatagtgggttgtctgttgtgtggcggtaagtatgcggacccgttgccacagtgcagagtagtgtacagagggtgtgggtgtgtggagcggtgggcgggagggttaggaggtggaggtcgcgtacaagatattgttatctgtccttcccgccttatgagcatacttattatttaggaaccgagacgatagctccatatcgatctctaaccacatattaagtcttgtatttagtgc

SEQ ID NO: 183759 - DNA, 143 bp, Arabidopsis thaliana
  unsure (1)..(143): unsure at all n locations
ttttttttttttttntcnnccacaaagacagacggggngtaatgggagctaaaaaacagaacgtcacggctgttgtattatacagagaaacggcgggggataacttgggcgcatataagaaacgatgacatggggggggcgga

SEQ ID NO: 183760 - DNA, 591 bp, Arabidopsis thaliana
  unsure (1)..(591): unsure at all n locations
cctctatatctgccgccctttttttttttttttttttttttttttttttttttttttanaaaaataaaatcnactnaaaaaactacaccctaaaacaccaaaaaaaactatnccacccacaaaaacactaaaaaaacttcccatttcttactctcaaaaaccacaaacttttttttacaaggaagancaacccacagggaattaaaagacccaaaaagacccactattttagattcctcttgttatccataacaaaacgacagtccttcttgattgcaccacttcgtttgactcctgaactatatttttagttattttagcatataaatctttagacattattattatatgaatgatcaggcatacgnttaataatctcacactcacatatcatactttaaaaatatacttataagaatgttataattaaatcataatcaatatgttttaattacctatatatatattgacgactctaatataatcaatataatttatagatatccatcgctatacatctcaatcaccttcaactcaattcaattacactatttaataacatatacgtatttattcttctctctactcaaa

SEQ ID NO: 183761 - DNA, 491 bp, Arabidopsis thaliana
  unsure (1)..(491): unsure at all n locations
actatgaggttatgacgtcgctgccgcgtcgtagctggatccttagagcgccgccttgttttttttttaaaatataaatcttagcttcctccgagaaattttccaaaatttttggagggaaacttattttagaaccccaccctttcccccaacctttggtgtttttataaaagaggcccaagaggtttgggaaccccaaatcccgggtgtttaaaactttttttgggaggagggaaacttcgggggggagaaaacaccgggggggggtgtttttcctttttttgtgagagaattaaaaaccgccgggagggtgtttgggggttttttttaccccccgcaaaaaacacccgccgcgggggggtttttttctaacaaaagggggggtggggttaaaaccccccgcccacttttttggggcgcgcccctccttttttttatanaagaaaagaaaacacacccgggggggtgggggcgccccccctcccccccca

SEQ ID NO: 183762 - DNA, 445 bp, Arabidopsis thaliana
gccgcgtcgtagcttggaccttagagctccgcctttttatcctctttttacatatatgctgcctatggcgaacaacggaagggcacagcgtacggatgcaaatgctgaagatcggaacgtactggcgcttgtggacagcctgcggggggcgccaacaaaattttttttagggggggggacgaaccgggggggaaaggcggggagaggggccgctgggccggaaggaagcgcgggtaatgagatcagtggaagaatgaggatggcacgcgcgggggctgggggtgcgagggcccgcgctgggcgtgtgagaggggtgtcctgaggccgcacaggggtgggggcatgaggcgcggaggggtgtggcaagctcgaggatagggaagggagggccgggatgggtggggatggcggggtggggcggggaggcgctttggcgtggatgggg

SEQ ID NO: 183763 - DNA, 497 bp, Arabidopsis thaliana
ttttgtactcccgcacgcgtctttaactaggatccctgcagcagccaccattattatatttagataaagagcgccagcgttatcttgctcccattcgacactgactagtaagtacagtacgtatacctacacgaacatggtacatttaagcccacgaatatgaaccgatcttagagcaggtcacgaactagtatcagtactttacaaaatatcgacctcgtcttgatacgccactgaaggtgcaccacccggctttgataccgctcgtaccacaaagagataggccttacacttacagcgtgtctttcactcttgtccacaaatactagtggcgcttatagttataacattctaaccatttattagcgtattatttatatcctgtatattcggtagttatctatgatgaggtagacgcgtgttcacacgcgaggcgatctataggagtaggtatttgatgattagtctacagcattcatcctaagtcctacgttaga

SEQ ID NO: 183764 - DNA, 398 bp, Arabidopsis thaliana
  unsure (1)..(398): unsure at all n locations
cgcctgcaggaaccggnccggaattcccgtttcgagccacgcgtaagcctaatttttccggatatcaaaaaggaacaacgaatacagaggcccggacgtagacctgctagacatgcttcgcaggcaataagacgccgctgatgcggcagataaactaaatcggcctatgccggaagagcggaagaacgagaacgtttttttttttttgcggggtaagagacaagacaggtgggggggatagtacgtggagcacgtgccgccacgtgatgctttagataatgagggacaaccacgagtgacaccgcgatgaggttggcaacgggcgcggaggagaagagagaaagtatgccaggaagcggagcgtgggtgtgggcagggagcttgccatgatgagtggc

SEQ ID NO: 183765 - DNA, 513 bp, Arabidopsis thaliana
  unsure (1)..(513): unsure at all n locations
cgcctgcaggaaccggnccggaatacccttttcgacccacgcgtacgcccaacgcgtgggaacaaaagaaagtgcttggtggtgattagtcctggaagacataattaatcgagacatagagttgcgatactaatgacaggggtgtaggagataaaataaccgaaggacaggaaatctagaaactcggaatgaagcccagcggaaagttttttttttgtgaagggggggagaagccgggaccgaaaggaccgactatttggggagaagtgttgcctccacgggatactattaaggggtcacggctcgtagagtcggcagggacaatcggggggggaggaagtggtgagatttgtggcgaacttgagagagaaggacttagggtgagggagtgtggttacatggagatacgggaggatctacgaggggattggtactggatagatgagaatcgcaggggaacaacattataaaatgtcggagtaggtgtgcacttcgcagagacgcggtaacatt

SEQ ID NO: 183766 - DNA, 140 bp, Arabidopsis thaliana
tcaaagacaatgaatcgacgcacaggacgagcgtcgcagcgggaaattatttggagaaccacctatacgaagttatcttggtctatcccctgcaccccttacctagagctagagtccctctagagcgacccgcccaagga

SEQ ID NO: 183767 - DNA, 490 bp, Arabidopsis thaliana
  unsure (1)..(490): unsure at all n locations
aagacggagcgggaggagcaccccgcaggacgtgcacgaggacgcggatgaagccacgggaaagacgggacggccaagagagagcacgacggaagaagcgaccgagcacgagcgggcagagcggagcccagagccggacgacgggagaggaagagaggagcgaggacgacagagacagccagcgcaacagaggaagcggaacgacacgcaaagcatgagaagagaagcgcgcggcgcagagagtgcaaacgaagggagagcaagcggacgtgaggaagaaaagcgacacagagcacgccaaagagaaagggngaccgacgcggagaggagcaggagcacagaagcggaggagacgagatacggtgcgaggcaataagacaggcgaagcaagacaagcagagaagagaaaaggagcacacaagacgcgtcagcgaggctcgcgggaaggcgagcacggacacgcaggaggaagtaaccagaggacggagga

SEQ ID NO: 183768 - DNA, 431 bp, Arabidopsis thaliana
cctgcagtccggccggaatacctttcgccgagggtaaccttatcagaacaacacagggagccgacggcagacgcacgagagcagggggcagccgggcacgctgggaaactcatgatgaggtgatgctatggtcttagcttgagggagcaaagagaacaagttttttttttgggggggggaccagcgggaggaagaggaaaacgagaaggacccaaggaaaggagcgaacggaggcgggtgacgaagagaggaagaaacaggggggtgggtgtagtagtgatagggctagtttgggtgagacgctcagaggaggggaaggtgtaagaagccagcgtggtggatgttgttggtaaggagatagagatgtggtgtcgaaaggagtagacactaggatcgggacggatcagagggagggcacgagttgccgacgg

SEQ ID NO: 183769 - DNA, 239 bp, Arabidopsis thaliana
  unsure (1)..(239): unsure at all n locations
gcacgcctagacaggaacccgggcacggcaaaaccacgggtncgaccccacgcggaacgccggagcagagacagaaacaacgcacataaaggacccgcgaaggaacaaacgaggggacgacaaaacagggaagccgcagagggacccaagaagaccagccaaaaaaaaacgccaaagaaaacagaaagcacagagcagagagacgggacgcgacaaacccgcggaggggggacaccaat

SEQ ID NO: 183770 - DNA, 445 bp, Arabidopsis thaliana
  unsure (1)..(445): unsure at all n locations
gccgcgtacgtagctnggtcctctagagttttccgcccggggaaacccgccccgcgaacgcccaaccccccgcgggggcgggcaagagacccaaacgcccagaagccgggcggggggcgaagggagacgcgaccggggggcgggcgggaggggagggaggggcgggcggcaggcaggacgggggggcccgtttttcgtttgaggtgggggcccggcaaaagacagagcgcatggcggcgagattggacccgtgaggggagcggtgcgcgatgcccaggtgtcctactagtagcagtcccgtgtgttggtagggcgaggggcagcaggaggtagttgtgggtgtttgtgggagggctggggcagtgcaggagcgaccccggccttgtgagcgggggggcgagggagggtgctgcgacgctaatagacgggtgcgagatctgaggcc

SEQ ID NO: 183771 - DNA, 533 bp, Arabidopsis thaliana
  unsure (1)..(533): unsure at all n locations
acccgacaaatttagggaaagactnacgcctgcaggaaccgggccggaattcccggtttgacccgagggtacagccacacgtacgcacacgcgcacgagtttgtgggggctcgcttaacgatcagaaactaagaaaatcatgcggttaaacatagagggttttgagaagcggcaaggagagacctcatgggatagatgatcataacaaggcgacgttttttttttcggaggagggagaaagcgcagagcggcaagagagaagtggcgtggaatggagggagggataggcgagtaataggacggagaaagcagagggggcgtgggaggacggggagagtcggtgtagcagagacatgaggcccggttggttgtggggacagggaagaagagagagataacgttggaggaagataagcagtagagggtacgtattgtgacggagacggggcacaggggcggatgcgccgaggagggagggaagagttgaggggaatgagggtgaggatgattggtgccacatgttgagcgggggc

SEQ ID NO: 183772 - DNA, 252 bp, Arabidopsis thaliana
gccgcgtacgtaagcttggatcctctagagttttcgcccttggggtaatccgttttatattttattcgatctttttttttatggggatacggtcgatgttgtgagaatgggtgttgtagagaggagcagacaaagccgcacatgctggtgtcagagtgaatagagctaggagatgggagaacgagtcgactcaatagtggcgcgaccaggatttgtggtagtttcaagggggggggggcacaaaaacgaggg

SEQ ID NO: 183773 - DNA, 236 bp, Arabidopsis thaliana
  unsure (1)..(236): unsure at all n locations
cgacaaatttagggaaaaaacgacgcctgaggnaccgggccggaatccagtttcgaccacgggtaaggcgattctttgaacaacttggaaagagaaaagagagtatttgggagggacgatagaaaacgagagcagatgacaaggagcgatacaagtgtgataagagtgaagaactggagtacatgaaagggcatataggagaaacagggaaagggaggatttttttttttgggggg

SEQ ID NO: 183774 - DNA, 503 bp, Arabidopsis thaliana
cgcctgcaggtaccgggccggaattcccgtttcgacccacgcgtgcgccgatttttaccacaagtacataagtgtctgtatcatggtaccgccgttatgagctggtcacagaggcatcagaatgaccaaaggctcgttgagctccggactactcccaagcgtgacactcggccgaagattggcgaagagttttttttttggggggggcgccccaaacacccggcgtgtcctcatagttatgcccccgcaccgttattcctggggcgacgttcatgattgtggtggcccgccgagacgaggcgcgctatcgcgtgcggaggagcgggcgaggcgtgtttcggtgcgcactcggaacgaggggatcagttctttcgtgaatcgcggagagtatctgtgtgttactaagaggactggggttttggggaaggtcgggggggagaaggtgaggagagcgcgtgtccgggttcgcgcgacggtcgtgagcgggtcgcagacagcccgcg

SEQ ID NO: 183775 - DNA, 414 bp, Arabidopsis thaliana columbia
  unsure (1)..(414): unsure at all n locations
atgattccagcctatacactattaggaagctgtccctgcagtaccgtcgaattctgtcaccacgcgtcgcacgcgtcgngatacgttataaatccncatgtaggattgtggaatggttgtttacaattttcctaaaaaaatttttttccaggggtttggggcccccaagggtttctttttataaaaaaagggttttaaaaaatacacccgggggtttttaaaaaaccccccaaaaaaaaaagaaaaaaaattttttggggggggggagggcccccccttttgggggagtttttcttccccccttttttattttttttttaaaaaaagaaaaaaattttcccccttttttatttggccgcggggaggggggggtttttttttttttttttttggggaagaaaggggggggtgttt

SEQ ID NO: 183776 - DNA, 538 bp, Arabidopsis thaliana
  unsure (1)..(538): unsure at all n locations
aggaagtcgacgaacgagagagaggaggacatgcgagaggcacaagcgctaaccggcaggagggagggaagctaggggaggggccaacaaaaaaaagttagtaacctgacgggagggctaccaanacggactncacttttagagggaaaagctgcgttacgccctagcaaggttacccgggtccccgggaaattcccgggggttcggaacccccaaaaggggggggggccccggattcaaataaaaaaccaaggggaaaaaaatgccccttgttacaaaattttttgcaaccttttaatttctttgggccgttcttctgggggcgcccccgcgttatacaaggggggcctagaaggggaggaaaattcccgaggagagtccccaagagggggcgtgggaaaaatacaaaaaaacactcccggtgtcggggagctatacaaaaaaaaacaacccccaccttctcttttttgggggagaaaaacacaaaaaaacccccccaaacacacccctctaaaaaaaaaaaaaaaaaaaaaaaaaa

SEQ ID NO: 183777 - DNA, 209 bp, Arabidopsis thaliana
atttttctcgccgcctccttcaacgtcactagcgggcggtagtatcggccttacgcgcgtctcggaagtacgggcgtacttttgtgcacatcacgtagctccgccaaacgagcggaagtactgtcacgcaagacaaggatcgggcggctcggcggcgactatagacacaaacggcggcctagacggtcctcatccggccgtctccccac

SEQ ID NO: 183778 - DNA, 465 bp, Arabidopsis thaliana
cacccctacgtaaacctggaatcctttagaaggggccgccctgggggttttttttttttttttattaagcattagggttatattttatttcttctcaattcgctcagagcatctttaccggaacccttgaggctaattaaagaacacatcgaatataaaacattagctcttctacaacaccacatcatttctctttttaaaacttcaatcaagcgcacgcaaatctagagacatgatctcaaccgcacgttcgattgccctctctgatatacccaacggaggaacaatcctgacaacattgcctgtccccactggtaagatcaaaagacccgattctcggtagcaacatcaagtgagctagtcggctcataaaaccacactcctctgaaaagacgttggtgcgtacacttcccgtaaagacccaacttccataaaagtgatccatctaaacgcgttaaaaactat

SEQ ID NO: 183779 - DNA, 386 bp, Arabidopsis thaliana
tactgccttgcagtgtacctggtcctcggaattccctgtgttcttactctacgggggctcgcctagtatatcagtatataatcactcatgctcttctttgctcttaacagacctctatctattcgttccctgactacgaccgataaacatggcatctcctctctatgcgtcaaaatcaacccactcgttcatcgcagcttctcataccgtccgatatcatatgctcacttcactactgctcgctcatatctggcagcttatttcgattcatttctgactcctctgtcatcagatatatcatacatgtttctaatctgctacagtcagtttctgttcttaatcgctagcggcgacccatacacctgttgtttatctctttacccata

SEQ ID NO: 183780 - DNA, 423 bp, Arabidopsis thaliana
gcgcggcggaccgggcggttttcgtttaccacggggaggcctgtgggtagtaatatcctctcgctagttcgatagcggcttaggaaccagagaataaagactacaaccagtacaagggcggggcgtaggcgtggtcaagggccgcaagactgatagttttttttaggacggtgccgtagtgtggatggatgtgtctaatgcactggctcaccccgactcaggataaaagggaggtgtgcgtcagggaacggttggaattagagcggaatcgtccgatatctcgtaatgtcgccgtccgctgtcctgagtgggccggcttggtagtgatttatcaggcgacgcgccgacagcaattgccagggggcgtgcggtctgttgttatttctgagactacgtaagtgctgttggtaggatgctaggcgc

SEQ ID NO: 183781 - DNA, 484 bp, Arabidopsis thaliana
tccaggtgccactctgacacctctatgaaaagctgggccgcctgcgtgtgccgggccggtattcccgggtcgacctacgcgttcgcgccacgcgttcggacatgcatagtagggcacgtaaccatcttcttcacgcaagtgcaaaccatcaacaacagaatcttccagcttgatgattgactaactacttaggagaactactactccttgggaaatactggggcttttactttttggtgaagacagccatgtttcagagattattactcttccttctcatagctcttctggtccaatcttgtttgcttttagagatttcctctggtctcaaggtaggaaaaacatgtgtgacaaacagccaccggtggctctggattaccctggcggaacatagtatagccgacactgatttgtggaccctatatggcgccagagccccagcccactgaaccccatgacctaatggaaagggggttcagccttt

SEQ ID NO: 183782 - DNA, 509 bp, Arabidopsis thaliana
tggggtcaactgcacgcgtacgtaagctgggatcctttaaagctttcgcccttgggggaatccttttaataaaaaatagatctcatattatagggtttgaggaatttacaacaagttgatagatattggaggatactggtgaggtgcaagagactagagagagagagagagaagggatgtaaacttttttagttacatagagggtatttttttttggagggggcggggtacattgcgtgtggatgctttttatactctttcgaatgttatgtctgggttggggcttacaacgagctgttcgtttattctgttgagttgttgaggcgagctagtctcataattaagctgtttgttgatgttattgagttatggcaataaaagatatgtgtgtgtggggaggaagttcacggtctgattatattagctattgctttgtgatgtgagtcgttgcgtttagagttgttccgctaagggttcggtggttaatatttttcgagtatgtatttggg

SEQ ID NO: 183783 - DNA, 498 bp, Arabidopsis thaliana
ggggaaaccggagggtgggagagggaataataaaatttggagtgaggaaaagccgaataaatgttatatgattgtagagagggtgagttaataagagaaggggcgggtgagttgaaagaaataaaggataacgatatgaagcaggtggaaggagaggaagtggagattaataaaagaagtaagcgattttttttatggaggggaagaagtttagagaggagaagagagagttcagagtgggcggagagagggaaagagttagtaagtaaatatgttttggacttggatggacgattaaaaaagtggccgtgtctctaatataagatgaattaagtcaatcagcaaaatgtaagtatataggattgaggtgagaaagggttgggtagacgtggggccattgagtggttggttagtccctgtggggttgtggagggggagtgtttgggttgatttttatagggatgagaggtaggtgatagatgggttaaatatatttta

SEQ ID NO: 183784 - DNA, 180 bp, Arabidopsis thaliana
aaataacagttaagaccaccaaacacccaagggcggggaccagcagacagggatctcacgccggacttttggagaggatcgagcgggggagggaaaggggagggaaggagcgagatatctgaggagaaacagaaaagcagctacggttacatacgcagctagggccgcaaggagaggagg

SEQ ID NO: 183785 - DNA, 547 bp, Arabidopsis thaliana
gcacgcgtacgtaagcttggatcctctagagcctccgcccgggggggaaaacccccaaaggagagaaacacggcgccgggagggggaggagagaaacacggcgagcaggaaaaggcaggcgagcgaacagagcacgaggcggaagaggggacacgagggagagaagggacgagagggcgccgcgagaagacgaggggagggccttttttttggggggagggcgggaggttagtagcggggtgacagacatcgaatattgtttgtatggtgtgaggaagtggaggagtgtgaggatgaagagatacagtagctctatataatgcatgttggtgtgatgagatagccgagtggatgaggagggtaacagcgtggggtgtgactttgcgcgtagcttatgagacggacgagtcggtggcagaggggtgctttgataattgagtttgtgggagggggagatgagggcgaggcggcgaggggttaaactgagcaatggtttgtggggttatgtgtgtggaggtgtgtgagaattgtgtcagatgtgattatg

SEQ ID NO: 183786 - DNA, 541 bp, Arabidopsis thaliana
acgcctgcaggtgctgggccggaattcacggtttcgcccagggggaagggccgctttaagattgaaggtggaaagctggggatgttaatagttccatctggatagagagtgaatatggtggtgatgtaggtacatataatgtgtgatgggaggaggaggagagaagtggtttgatcttcggagggtgttttaaaaaaactgtttttttttgaggagggggagtaagatatgagaggggaggatgatgagagatatagtagtataatttttggagaggagtggtgttgaatgttgtagaatagaaagtaacgaggtgatgtggtggggtgatgatagagggagcatgtatgaatgagagaggttgagaggggaatatgggtggggatagaggaaaatgagttaaggaagaagagacgtgggtgggtttgtaggatgtatgagagaggcatgtgtaatactgtagattgggggtgggaaatagtgaagaagtatggcatgtagagtagaggtagaaggttgtggtggtggaagggagggggcg

SEQ ID NO: 183787 - DNA, 634 bp, Arabidopsis thaliana
cacggcgtacggggaggtaggggatcctaataagagctattcacgcgtagggggagaaatacctaatgtgaatgatgaggagacatatgatgaaaagagagaagactagggagtgagagaagtacgtgtattaatattggagaagaagatatggatggtgcaagaagggagacgatacaggcagatagagagatcttggggagagcgacaaagagagctaagtgggatgaggaaatgagtgagaggagtcttttataaaaagagagagagggaggagaggggggaaaggaggtgggctgagagagaggaaaagagaagcagaggatggaaaaagataaaaggaaaagaggaacggaggagggtgtggaggggggagagaaaggggtgtgagaagggtgaaaggcgcaaggaagcaagaatagtagaggaagagaatatagaggagggagagtgaggcagatacgagcggggaagaggaggaggagagaaagaaagaatgaggtgagatgatgaaaagttgatgtgaggagaataaggtcgggatgacgaggacatgggtagggaagaggggatactaggggagggagacagtgaaagatggtgagtgatgatgagaatgtgggacggagaatga

SEQ ID NO: 183788 - DNA, 190 bp, Arabidopsis thaliana
agcaacgcacgcctgcaggtgccgaggccggtatagaccgttctgcccaggggtgcgacccataccaaagctgtagcttgaatatttagaagataccaacgacttgaaccagcggatatcttagagcgctagaagcaacgacggagcttgcactagtgagtagagtgacggctgaaaataggcggtgctc

SEQ ID NO: 183789 - DNA, 528 bp, Arabidopsis thaliana
ggagaagaacgcacgcctgcaggtaccgggccggaatacacggtccgacccacgcgtacgagcgttacgacgagaaaagctagttcaaggagcaggtcatgacactgaatgttcctctgtgctgatttcggctaggactactcggctccatcttgtagaagatctccttggcggggtccgatagcgtaatatctgggagagaagaccgtgcgtttttttgttgctggggggggtccagagttatggctacgggggcggtgtgactactgatagaaggccacgaagtgcagtgggagggcgatactaaatgaagataggtctggatggaggataccagtagcttaggggcgtgagtgcgagcacgaatcaggggggagaaaggatagacgggtgagatatacaatgggtgaggctctaggcggtcgtggtaagcatctagaaaaagggcatgtgtgcgggagcagtatcctggaggtagttcgatgtggctttacattacaaggcaaaaggaagtggcgaagactgaaa

SEQ ID NO: 183790 - DNA, 417 bp, Arabidopsis thaliana
ggcgagcacacaaatacaggcggtggttttcacatcggccaccaattgacggtcgtctcactttccagtggactttccaggcctccctgcggtgggcggcccctctagctaaagatacgggcataggcactatgccacaaatgaggggacaggcaggggggacacttcgcatagcagatccgaagaagttatgtacacagcagcagacagatgagacagtggcgagtggtatgtggtgcatatccaccaatcccaaagcaccagttcccagaaaacctcctcagatctttgaaattagggcgcgacagaccaatccagaaaagttcgctggggattggctgtcggctgtccctgggccgatcactcagacccagggaggcagagatgaaggaatgaaaataatcggttgggttcact

SEQ ID NO: 183791 - DNA, 222 bp, Arabidopsis thaliana
gtatagattctgggaataataaatgaacttttagcttcaaaatttcagtctttttccatgaatcttttaaggttttttaccaaatttttgaacaaaatttatacaaattcccaatgtcccccttccttttttccaacggagaaaatcctttcctttccccctttttcctgctccctccaccggagaaacacaaccagttaaaacaaccggaacaacaacaac

SEQ ID NO: 183792 - DNA, 377 bp, Arabidopsis thaliana
gaataaaaacttaattaaatcacataatgttgcattattttgatacaagcacataacgaaatgacctttttggataacaacaaaataaaaacacaaatgacttcaaccaattactgttacaaatggacgacccatacaatagaccatgcataatgactcggccgtgcttgcttacttgttctcaatggcgatcgcatttttttgagccacaacggttgactcatgacacgatgaatctaactttataggcaaacgacgctgctttatcaagtcaacgatgtgatttttcatgactactgttttcagccaagctggcctcattttcattttctcgacccatgccgttacattgggacgtgaatagatcaagtttttca

SEQ ID NO: 183793 - DNA, 340 bp, Arabidopsis thaliana
agacaaaatgtttgtgacacaacacaatcgaagtttgcaattatatgaacagcataaacttactgcacatgcttcgatatctacagagtcatcaatctcatggctttttgtctctaatatttaaaagaattgagtcttgaaagaaagtatcagcaaaaagctaaataaaagatagtcaaagcaaggacttgaatcatcagtcttttttcttatttgcttagaccagagctctcgccagatttccaaaccacatcgttaagtgagggttgagagcttcttgtagaacttatggaattctagtgtatcccctttcgttttccggacttcgatcatatgaaga

SEQ ID NO: 183794 - DNA, 248 bp, Arabidopsis thaliana
gaaggaccaataaaagtatataacagaggaagataacacaatgtaagtagattacaagtagtggaccacatagctagatgtatatttaaattatactgattttttctcccagttcaatctttcttggaggattagatttgctaatacatatatcacaagtgttaacaaatctagtgatcagtcatgagacttaaggtccatttctacttgatgaatggtccactgcatattttccagtttcttaacaa

SEQ ID NO: 183795 - DNA, 371 bp, Arabidopsis thaliana
ccacaaatttccaaatcaattgtacatatgaaaaactgattttcaatggctacaaattggatatactttcagacaaagctctctgtgaagaaatgcaaatgataacagcaaaggacatgttttttgtttctccaggttaaagacagggagagacattcgcagcttgcttatgatcatcatccttgaggtttctgtatctgtatagccaagaacacacaagaaaatagccaagattcaagactcctcctatgactaaaatccagtaaacattgtcaactcttccatggtttatgtcatctggtaaccacgccgtggtcctttgaatcagatctatcaaagcagtgcttgtgtagaaacatatcccaatcacc

SEQ ID NO: 183796 - DNA, 157 bp, Arabidopsis thaliana
gggaaccaatggcctgtataactgatagatttgggcaacaaccgctgggaagaaacaatacattcccaagggctttaaaaagcaaaagaaaagggttgattgagaatacaaaaaaccttgggcctgaatagggggaaactgggagaacattttttaa

SEQ ID NO: 183797 - DNA, 291 bp, Arabidopsis thaliana
cccctattaaaaggggtttctaaaaaaaaaaattcccaaattccaccccctctaaggcccccaaaaaaccaaaaaccaattgggcccaaaaaagggccggccggggcaacccctaaacttttagggccgggagaagaaatctccccccgccccggggatgggttatgccgggcccccccttggttggccccaaaaggcctcgggggaccatcaaaggcccggcccccgggttcccccgcgggcccccctctgaaggccccgccctggaaccccccccgggggggggggggg

SEQ ID NO: 183798 - DNA, 121 bp, Arabidopsis thaliana
aaaaaaaactgacaaaattttaccattattgaaaccaatttcaagaatacactgatgaggaatttaaactatatggggtttactagaaaacaacatttccaacaaattaaaaatggggccc

SEQ ID NO: 183799 - DNA, 425 bp, Arabidopsis thaliana
gtaaaagtgtccaactacttttttgtattcggaactttttatcttacaacaacaacataaccaaagcagcaaccaagaccatgaagctgatatgagcagtagaggctccattgaggtccttatcagcgcaaagtccatcctcaactccgagatcgaaggagatcttagttccgttaatagattcgacttggatgtattttcttccttcagtggtagtgaggtcaacacaagcaccatgttctccccaatcattgacagcttcttcagtactatcagtgttgtccaaagtgcagctcagggatttccagagtctaacccagccacttccgtcagtcttcttgacgtaaactctcttgttgctcaaaccagtctcggtgtaggcttcagtccagtaaaacttgcttcctccatcaggcagactgtct

SEQ ID NO: 183800 - DNA, 242 bp, Arabidopsis thaliana
cctcattccattgcttatccattcccacttttccttgcataataaggcacttctctgatcaaaccctaactgaatcaacttcgctgcgatttcctcccatagaaactcatccgagcaccctcctaatatctcttgaaaggtcgagtccatgctcgttcttatctccataagctttaaaatctcttgctcaccccagcagctactacttcctttaacacaaacattgttagtcatcgtttgat

SEQ ID NO: 183801 - DNA, 213 bp, Arabidopsis thaliana
gcgggggggcaaaaacaattggaattttaaaaagaaactttaaaaagcccaaccggttcttaaaacaaaactctttcccacccttttttgaaacccaaaaaatgagggggcaacttttccctttataatgggggggccccaaaaatttgcccaaattccgaccaaaccaattttcgggggaaatcaaaattttttccagcccccaaacattgg

SEQ ID NO: 183802 - DNA, 213 bp, Arabidopsis thaliana
ttctttttttttttttatttttttcaccatgaccccaaaaaagggcgaatggggctttataattatacgaaagtggcgaatatactaacaagattcacaaaatccatacaatacactcaaaataatattatttaaatatattcaataatatatcataagcttttgcaaacagataacaaaaaatcccaatcacgtgtgtgggaaaacaactta

SEQ ID NO: 183803 - DNA, 260 bp, Arabidopsis thaliana
ggaaaagcaaaagggttttcactatttgggggatcaaaaggagatttaaaggggggtttagacagagccacacaggggtcataataaagaatgcccaacttcatagaggggtttgccttactcaaaatcccttgaaatctttgggccatctttataacaaattgggaaaaggtttcgtttaaacagttgatgccatagcctgatcaaaaaaaaagatcggaccaaaaaaaaaaaccctttttgtaaccaaatgatggggg

SEQ ID NO: 183804 - DNA, 247 bp, Arabidopsis thaliana
attaaaccattaatacaattgaaatcgcggattggattaagcaaacatcccaaccttacaaattttcttgaataatactcaaaatgattcatcttactcccccaatttttatatttaagaaagatcacagatggttaataaaaatttgagtaaaaaagaaaaagtaggtctttttttcaagaagttcaagctgatgaagaacctgtatctcttggggaactccccgtggatagaggaagaaggggtg

SEQ ID NO: 183805 - DNA, 286 bp, Arabidopsis thaliana
caaaaaccacgaggctttacattgtatttgagaaaccctaattatattatttaacaactttcgaatgattttaacaaaagatccggttttactttaaaccctaaattaacacctaaaaccctaatttttctcatcatttgtgtcctaattccaaactttttttgattcttcttcttggtgcaattttgatcaaaattcacattctttgtgtagtattaatgggcaagaacttcccaaatcagtttctggaatcgaacgatggcaatcctcgctaataaaaacccat

SEQ ID NO: 183806 - DNA, 473 bp, Arabidopsis thaliana
cagacaaaatagaataatccttaacaaacgtcttcaaatcaacccaccagagatttccatatcaaagaaaaaaaatcttatgaacaaaaaaatagagtaatcttcaaaaaaaacaaacaatatatggacaaacgttatcgacccaccatgagatttccaccacacaaaaacaaaacccacgtacaccagtgaatctgtcatgtgtcttcacataatcttcagcaattgagccatcaaaactgaaaaagacttccatccttcgatcatgacagaagcagagagaataaacatcttcacgccatgagagaatgaaagccggtagatagtcacaatgagctacacagagtagacaacaataacaacaacaacaaagaatcttgatgtcaccacattttctggtttcttttaatttccccactataaatttgcttctttgcgcgaacctcacacgtaagaaacaatcaaaggctctt

SEQ ID NO: 183807 - DNA, 398 bp, Arabidopsis thaliana
aagcaggtaagtaacaaaaagatcccaaacgaaaatattctccaagtattttgatcacatttcatctcatgtacacatacacacaagtttctccccacttttatttttaaaggctttaattaataacctgatttggaggagaagaacctgcttattcctctagaggctttctctggggtcgcgttagtagatgaacctgaccttgagagcctggaacccactcgtgatggcgatgtcgtcgtatcgctagtctctgaatcagaggggcattttggagactccataaatctaggaacctcgttaaccgaatctcctttgtctactacggcatagttctttgggactgaggtagtggtggtgcctagttccttttcttcagaataggactcatttcgagt

SEQ ID NO: 183808 - DNA, 350 bp, Arabidopsis thaliana
ggaagtcaaaactttatacatttcctttttcataagaataaagagttcctaagataatttgtctaaaaataataatccgtataactaccaaattatgcccccctaaagagtaaagactgcccttttgggtcaactttttcaaacataaaccaaaccggtttttacatcgaacgaagaagcatcaaaccggttgcaatcagataaaaagaccaaggctctgctttcaccttcaaatcctttgcatctttcaagggtagcaacagagaacactgcaccatttgtttcacagctacattgccggatcttaccatggatatgcttgtaagtttcctaaagatatggtctttccg

SEQ ID NO: 183809 - DNA, 169 bp, Arabidopsis thaliana
caatcagagtcaaatcaattaaaataaggggatgcttttaaactaaaaaaggggtaaaaagagagccgtagacgatgtccaaaagctgataaatactggattgctggactggcaacaagacaaccactcttgccttataccatctaacatcacataatctggatgagtt

SEQ ID NO: 183810 - DNA, 343 bp, Arabidopsis thaliana
ggtccgattaactccggttaagtagatatccaatttattcacaaagataattagagaaccccaaaccaaaacctcacattgctcccaataattaaaatgaagagggacactttggtcaatacagcctcataaccctcctcgctatagagtggccgtgactattcgccttagccgccgtcttctcccacccaccaccaccaccaccgccttcgcctccaccactaccaccgctggtcttccagcttctccttatcggagtcaaataaaacctcaacattccgttcttttcatctttggacgaatacctcgaactcttattcctcgccgatccttcaccggagct

SEQ ID NO: 183811 - DNA, 371 bp, Arabidopsis thaliana
tcctttttttttttttttgccatcataacatattttctgaatgaaggatctcgctatcattgattttaagcttgcactcgttatgaaacattgcactggcacctattctgaaacttttgctccatgaatcacaacatagaaaagcttcgttctgggtatgtctctcaacttattctatccaatttcctctcggaagatcttcttccttccaccttttgggtcatgatgttgcgcaaaagctgagtatccagaaccagcacttgtcgcaaatacaagagctggattagaccggattgaggatatagaatcctgagctccatgtgatagaggtggatctctttacgaccccattaaccttatcccatttggat

SEQ ID NO: 183812 - DNA, 334 bp, Arabidopsis thaliana
gaaagggcaaaagggactattttttttttggtgaaaattcccagagaataagacctaaccccaaacaattaaggcaaaatccacaaactggaaatgggaaccttttgggggattcttccaaaatctggatcctttttttggtagggaacttaaaggcaaaaaaagtaattccgttttgcaagaactttaaatttaaggaaaacccaagtcaatgtctaaagcctatgggggctttttttttcctcaagggaagggggtcaatttgtaaaaaaatttgggagggaaaatccaagaggaagatcccataagtaagtaaggaaagaattttggtttt

SEQ ID NO: 183813 - DNA, 246 bp, Arabidopsis thaliana
ggggggaatgcaatgattgagcttgtaattgataacccctaatgaacaaatccatgatatggggaagacttacagacccgtacaatggcgaacagggaagactttaaacagcattaacccaaaaaagaaacaagaaattcccaacccccaggccgagtgggaaaaggaaagggtgaaaaaaaatgaaatgttaaaatttgtgtaggaaaaaaaaaaacaggtaaagcccatttttgaaaacacccc

SEQ ID NO: 183814 - DNA, 390 bp, Arabidopsis thaliana
tcctcctttttaatattttttttttttttttaattttttggggggtatgtaaaaaagtacaatggcttttcttgattatacgaatatgtttccgttagggtagttgacggaagttaactcggaggtacgattataccaacttttggattggttaccaaaattaattaaggtattttttttccaaattaaatccttgaggtcttaaaccgtcaaattaaaaataaatggcggcttttcactctaccatatatcaatcccttccccatcccctttttgttactcttcttgatctccctctctttctatatatggatgatcaatatatctctgtctatatctacagctcaaattataacagaggaacagctccaatccaacaatggggatttt

SEQ ID NO: 183815 - DNA, 208 bp, Arabidopsis thaliana
gtgtcagatgattagggattatggggtggcacataggaatggagagattgtaatattctaaccaagcaaatggaagagaagacctctggaacccttgacagatctactagtatgcccaatgacctaagacaagctcggatacgaactttctgaactggaagagaaatcaaggaaagaaaattcattggatatgtaccttgtcttgggt

SEQ ID NO: 183816 - DNA, 491 bp, Arabidopsis thaliana
  unsure (1)..(491): unsure at all n locations
aacacatgaatcattaacttatacttaacaaaataatgaaattgttaattatgataacaaaggcatttgctaaatatatgccttggcttggctttaacaactgcaccaaaactaatcagaaatgttcttcttctataggtgaaaacctattctgctactatctctcttttctcctacataaaaatatatatatatatcttcaacaagaatgtaatcttccctcttcacaagctactagatctcaacttcatgaatcgctgctgctgtaaccttctgattctctgtcgtaattgtttgctgcattattagcaggtacatcatcatcttcagagctctcactcatttctgcgtcatcttctccttcgacccgcccaacccccacaacttcttcttcctcgncttcctctattgccaatttaggttactattccaatctaacccccacttgtttctctgactataatccacaaactgaccaccaccatcttcat

SEQ ID NO: 183817 - DNA, 141 bp, Arabidopsis thaliana
gggattgacacaaaacaatttttattatttgaacaactgaacaagaggggtttttaagctcagaatttggcgggtgacccagcagatttattattagtttatacaacattacagtttatgaatttgaaaacttaaaattta

SEQ ID NO: 183818 - DNA, 449 bp, Arabidopsis thaliana
ggataactaaatcgtatcaaatgggaacatatgtttacaaccttttagaaagaaaaatgaagatatgttgatacaaaagatgtttctcttttccaaataatctaacaaacgaatcagaagaaaaaaaaacaatattgtgacaacaatcatcaaacctctgcaactgcattcttcacacaatcaacattacacaaccgaactgatctcaccatttcacccaacctgtcgaagctattcctagcccgatcagagctacccacgctgtttctcggcttcccaaaccgatgatcgatacttatctttcttgatttgtctctaggaggaacacattctatgctatgtctagatccaatccagctactcttcgttgatttgtcgttcttgtggtcattagccaatgattggcgtcgaaattttggaactggaagcttctcaatggctgaaatgaa

SEQ ID NO: 183819 - DNA, 309 bp, Arabidopsis thaliana
agcaccaaaattgcttctcatttgtttggtttttgcactaatggcacaagagttttgctaacaagaacaaagaatttaaggggtaatacaaggtcacattccgcgaaaatttgaactgtctaaaccaaaatcccaagacatacacagtttttgcatcagtaagagtttcccattttgcctttgccgccacgcccatcgtcttgtttttttttgtcaaagtgactgtcacgggggtaatttttgtgcagcgggggaccgcctcctttcaatgacggggggggaccatttttcaatggcggggggggaaca

SEQ ID NO: 183820 - DNA, 391 bp, Arabidopsis thaliana
ggggaaaactcttgggagaataatgtaacaacttttggttccaactacaactttgcttttgtatatatcccacgctgagtttttggggctcatgtgactttattcaaatttacatgatagaaaatgggacttgaatgaggaaatttgtaattagcttaataacgaaatcaaactgcagctggctttccattttttcggggatcactaactgcagtaaggaagccctttaatggtttcgatttttttccgattttccttccaatttcaaaaaacatttctttttctttctcttcctagaaactctgaacaataagttgaactatagctccacctgatagctcctttagctaatggcctctttttggtaaaacattttggttttttttgaaac

SEQ ID NO: 183821 - DNA, 455 bp, Arabidopsis thaliana
caaatgtcattttttaacttttttttttcttttttcttttttccatattaaaaattcacttaccaaaagcttctggactctgtcgtctgtccaacgcaacaatttgagttgaaatcccccgttttcttcacgtcaatagcctagaggacgttcacacagtggactttaagcttaaccttatctgtgacttctggaaagattctgacctagctctgtcttccgacttctccatcccgctcaccaaagagtttgactgaaggtcttccgacatgccgctttgagagtacaagtttttctttcccataggatctgaatttgcagcaggaaacccgaaaccctcataatcacggttctgccacaggatctgctcgaagaagggggagtcagtaccactgatggatacagacctcaaattacaactaagttttcttctgcccacttacacatgctaccac

SEQ ID NO: 183822 - DNA, 319 bp, Arabidopsis thaliana
ggattcagataaacgaatacattcatatgaagtaacaaattgagtacataaaggtttattggtacacataaaaagataataatcaaatcaaaacaataactttacaattcatgccactagacggcaacccaaatcgggtgtatcctcacaaattagctgcaacaaacgtaaatacgctaaatcttaaaagaaaacccaaaacacaacagcaaaaaatgaacaagcacaaactttatgaacaaacaacataaaaatttactagtaatacaaaaaaaaaaatgatcaaagagagggtcatatcacattattgagcaattgc

SEQ ID NO: 183823 - DNA, 119 bp, Arabidopsis thaliana
ggggtggaaaaccggtattcataaagagaaaaataccaagtcagcacgtatgggaaggatatgcacacagacttaactggttattattcatataagcttagtaagtggtttaaggtgaa

SEQ ID NO: 183824 - DNA, 297 bp, Arabidopsis thaliana
acctcggaagagagaaaccaaaaactagcaaaatggcttcccttctcagtttcctcctctgtttgcacatatcatatcgctatacaaacatctttaattctttctcataaacatatgagatgaaaatggttaaaggtagcaatgaagtattcttcgtgtagagagctgtcactgaataagccagcagtcaagaattgatgtaatgatctcaatggaagacttgaggggaggcgtagtattcactctcattgaagaccggtcttagatcttctttgcacatgaaatctaaagggaaag

SEQ ID NO: 183825 - DNA, 146 bp, Arabidopsis thaliana
tcttttttccggccctaataatggctggcatagcaaaagaacttgagtcgataatccagtttaagatctgtgactccaaaaggtctgattccaaaattgaggcacacgtggaagaagctgaggatttggaagcagaagcggaactc

SEQ ID NO: 183826 - DNA, 222 bp, Arabidopsis thaliana
  unsure (1)..(222): unsure at all n locations
aaaaagggaanatttctttcttggattgttgatataacaatggtactgcacaagaactatgaacaattttccctatcttctgctgggtcaatcgggtaatgattcccagattctgttaattaacacaatacattgggaagcaagggagacttcttgggggttactaaccttctttttttgaggtcaactttcattggcatcggttcgggtttgggccaaaac

SEQ ID NO: 183827 - DNA, 250 bp, Arabidopsis thaliana
agttacaatctgtatacaagctctatgcacgtatacaaaagggcatggaaacgatttatagagttatagtatggaaataacaaccttctaaatttcacaattttcttttgtttccttgggatgcttcaacaaccctctcaccaacagtactactagatccagagttgggtgcattccccaaagcaagtgaatctgcaggtccttcttccttttgagctttctgcttagttaagtgagtctctcgtatgct

SEQ ID NO: 183828 - DNA, 321 bp, Arabidopsis thaliana
aagaattaattagggggattaaattacaataatataggcttacaaagtccaaccataattggtggagtgaatgctaaaagctactacaagaaacgagcaaaatggtggacaaggaagacttcttattgtaacaagtaataacttttattaaaactctccgaaccgctttttctccattgtcctgggtttataacgtttttgcttcgtccttcttttgatgctgaaacattcacctccagagaacagtcgtattctgcccatccaatacgttggcgaactagatcgtagaccaccactttgtttttaagaaccaaatcacca

SEQ ID NO: 183829 - DNA, 460 bp, Arabidopsis thaliana
atgtaaaacaatcttcattgcaaaaactgaaaaagttatgaacatcatgaaatacatttaacacaataaactacttaaccaagaaatcgtaactaagtggtcgcgacgtaaaaaaaattgtcgtctcatttggtttggatgtccgagtttgaggtcttgtttaaactgtgcaactacaatcactggcaaatgtgacactttaccactaaaccaatcgactcctaatacatgttgttcaacgctttttggcttctgcgtttggcctaagaagaccactaattttgccacaaaagtttatagttagagactcttaacaccgaatattaaaaaatgactgtaatggctcagttcttagtcatttctgcagtagctttcttcagcgcctggtcgtggttgagcattgcgtttacactcttctccacaaacataaactgaaagcacgcatagcccatagcatttc

SEQ ID NO: 183830 - DNA, 317 bp, Arabidopsis thaliana
cgttcgcccacgcgtccgcccacgcgtccgcccacgcgtccgcccacgcgtgcgcggacgcgtgggttaaaattttcgattttgattattgggtttctctctgatcatggcggttgttgagactggagcagcagctactgctgctgatgcaggaggagtcgtgatccagccgccgccgtcttcaccaccatcttcaatgactagtcaagattccggcgtttcttccgatgatcagaaccatgactcttggatcgatcacgttctccggcacgatcaaggtctttacagcaagatcgggtcacacgtggcgagatccg

SEQ ID NO: 183831 - DNA, 254 bp, Arabidopsis thaliana
agcaacaactctttatctgggagaaacattattctctccacattagcctcacaaacaaagctttgcaatttattggtgtgggggcaaaagcaaaactgttcttgattcatacttttgagagctttcctatctggttacaacctcatgctctcatctaagctaaggtagaggtaaagggtcgggtatggatatagcaggtaaactgtcgtgcatatacgccatgacaaagaaggacaacatgccgatggaaagga

SEQ ID NO: 183832 - DNA, 290 bp, Arabidopsis thaliana
aattaatatgcgtcattaattcttcttctttgggagagaatgtcagggtacattcaaatattcattacactttctttttgaattattgattataataaacaatagcttaactaatttagctacctgatcaaaccgggcgctctctcaatccaattgaaccggagaaagcaaaggccggttcgagaaaaacgccttcaagttagctaaagcaatctgtgcaacattgtccaaagaccctggtgtagccacagcaaaatgaggagacaacactacattatccaaaccaaaca

SEQ ID NO: 183833 - DNA, 236 bp, Arabidopsis thaliana
atgagataatcttcttttcatttcttaaatctcataatgacaggcaaatggaataacttggctatataggattggttggttagaacaaatatgaatagagagagagactacactatactgtttactaaacagactttcctaaattagaaagtctctgttctcctcctccaccacccgtggcggatcgtggactgaacggagctcttccagcggacgatcgtggactaatctctcca

SEQ ID NO: 183834 - DNA, 259 bp, Arabidopsis thaliana
aaaggaacctgtctagcattttatggacaataaaagaatgaatgaggcgtcaaaatacaaaagaatgaataaacttagaggacaaaagttgactttcatggaacaatcaaaacttttccacacctctcaatagacagagagaagctatgaccaactgtatcccttaggaagcttcagctccatgtagaggttatctaagtcaaaagctctgtttcaccaactctaaataaacatcgtatttttcttctgagggctacta

SEQ ID NO: 183835 - DNA, 273 bp, Arabidopsis thaliana
aaataatgctttttttgttctttatttatttacatgaaacatatattaaccaaacataaaataagattcgcaaggcaacaaacaacacgcacaagcttacaaacaaagacccaaactcaacatacacatacacacacattcacacgtaaagattacttctgctttcagttagttccttggcttattaaaccaagatttctcttgatcacatgccattttgcaagcctctctactcgtaatctcatccacccacttacgcactttagatctttt

SEQ ID NO: 183836 - DNA, 143 bp, Arabidopsis thaliana
tctttatttgctcctgagaacttttgatcggatgcgaaaggctagttgtacgattcttctggtgtgatcgaccctgcgaaactttcggaggttactttagctatgattgcaatctaagagttctgaaaatggcggaggaaagc

SEQ ID NO: 183837 - DNA, 298 bp, Arabidopsis thaliana
  unsure (1)..(298): unsure at all n locations
gcttgancggatcatttagattcaacttcaatctataaatatatttacatacatacatacaacactcaaatctctctgtttgcaactgaagactgacttgaacaagagcgaggcagagaccgccttttctgcagtcagctatggattcagcaactaacagaaaacctctgtttgaaaccatggacgagaaaaaaagaagagagactgcagaaacatcaaactcttttttcttatttacatctcaaaaacagaaaaacaaaaagcaaaaattttaaaaaggttttttctttctttctat

SEQ ID NO: 183838 - DNA, 123 bp, Arabidopsis thaliana
acaatgtaaagatatacaaatgtagagagatccgtgaggccactgatgattgcagtgctgaaaataaaattggagaaggagggttaggatctgtgtacaagggctgtcttaaagatggaaaac

SEQ ID NO: 183839 - DNA, 331 bp, Arabidopsis thaliana
gattaaaatatggtttatacaaacaaacaaaaaggacaaaagtgtaacggtggatcatttgtaagaagaactagtataatgttcttccttttctttgtgtctatacctaatttaaaatctatagtatagtaacaactgccaattcattggagttgtcttttgtagtctcacatggaaaagcataggttatatatattaagccccattcgttatctgttccttcctcctttacagattatatcctttggacttttctcgaacatgaaaggagaccaaaacccagtagatgttgcatagatacgtatatttatatacatgtagcttgtactgt

SEQ ID NO: 183840 - DNA, 128 bp, Arabidopsis thaliana
gacgatcaaagaatcacactttgaagggaaaatgttaaaacatgtgatagatatatatatataagagagatatgagcacattactcatgtttttgggctgagaaatagtgggttatgttgattttccg

SEQ ID NO: 183841 - DNA, 179 bp, Arabidopsis thaliana
atatacaataatccatggcaaaatagaaacaagaataaatgttgagaatactctgaagaaatacgagattctaaggatgaaacagagaatgttgatagggaagtttcgacacattaaaaagattttgactaataaaaatcataattcaaagacaagaaacaaaggggcttggtcctcct

SEQ ID NO: 183842 - DNA, 275 bp, Arabidopsis thaliana
aaagagaagggggtatttttcacatacatgatcttaactcgaaccgtttttatcaaacatttcaaatctacgggggcgattttttctatgaacatcaaactgaagggaaaaaagcttatgcgaaaccgttgaccaaatcattttcacagaatctccaacttgggaaggaaagggattcttaaaacacccagcaacctttttaaatttcccccacttttttttccactgatcctttgttatccctctgggaatattcaccaagaacttttttttta

SEQ ID NO: 183843 - DNA, 252 bp, Arabidopsis thaliana
aaaaaaacgcaaggaaaattttttatgagaaagaaaccgaggtttcttatgcggtaagccgtttaaattacaagaaaaataaacttatgggactattaagaattgaaactcttttctctagatgattgtggcaaccaaaattgttagtaaggaagatctttaccataaaaaaaatttgagggaaggcaacaaaagcttggggtgattttgggagaaactaacagactatgagggttagggcaaatacccaaa

SEQ ID NO: 183844 - DNA, 266 bp, Arabidopsis thaliana
ggcccaggaaccaattctaaaacggataacagggtttcacattcacccttttaaacatttaaacttaaaagcaaatcaaaaatttgtttctttttaaggggaacaaaattggggccctgaagcagttaaaggaaccccgggggtatccatatcagggcctgggttttttttttttgaagggccctccccttttattacggccgaagcttttggggttttcaccatccttatccaaaaacttgatttcatcgaaaaagttttcggtt

SEQ ID NO: 183845 - DNA, 323 bp, Arabidopsis thaliana
aaaaaaaaaaaaactggggacaaaaaacccggggggggaaaaaacccttgaaatcgtaaaacagagaagtcaataaaacctttttgggaaaaacttgggtttgataagcaaagccccccaggggggggggtggcccttttttagtttcccaaaagaaagtttaggggggtttttcaaaaaactgaaaaaatggggccctaacccctggaaatgggtgcccaaagttttttttgggaattttataaagggggttggggaaaaacaaggggataaaaactaaacctccttaaagggttttttatgagttgggccttgggggggcc

SEQ ID NO: 183846 - DNA, 127 bp, Arabidopsis thaliana
cgaatacttaactctgttgtatattgccaaagagcaatcacgttttggtttctgtaaaagaacttgcctttgaatatgcacataaaataaactaatcaaacttgaatcttttcattatgaagtagtg

SEQ ID NO: 183847 - DNA, 233 bp, Arabidopsis thaliana
atggggggtaatcccaaaacccacccggggtttttttccaaaagggtaataacttgaaacattcagaggacttttgttttggcttacaaacttatacaaaaaggcgagagaaaccaaaacagatcaaagaaacccaaaatgaaaaagatttaaaccaccaaagggggttttaataagtaaggaacatttaccccgttggctggggataaaaccaccaccgggaaccaaaacca

SEQ ID NO: 183848 - DNA, 215 bp, Arabidopsis thaliana
acgctctatcggctcttcccttggaggcttcttagcacaactctgggggcatcaccgaccaaggcgggtttgatcattagttctatcacatacatactagcatacttcaactgctggttctattgtgccagggactattatagaataatgataccattaaaatttgcttatacgctacgttttaacaggaattcgtgacggacctcatgaaccct

SEQ ID NO: 183849 - DNA, 271 bp, Arabidopsis thaliana
gcaaatggggggtatattcaaatggggagtgtatatacatctttgccaacttgaaaacgggtgaatctatgggtaaacatttgtatatatgaaaaacaatgacaaataacaaatcaaaaatgaagaaggtgggatataaaaaggagcaaccattgattggtcttcttttctggacgacgacttgaactgctccaacaaaacagaaaaaggatgaggctccgatcaacgggggagatggctccgaccagcattcttcatgttcttcttcctc

SEQ ID NO: 183850 - DNA, 137 bp, Arabidopsis thaliana
tcgcgatctagaactagtcttgacgcctgggcgcggccgtgccatggatggcaggactgagctttgtcgatggacaggccataaactttaccctgggggagggatcagatctatccgaccgtactgtgaggtggttt

SEQ ID NO: 183851 - DNA, 433 bp, Arabidopsis thaliana
cattagagattttctttgtttcatatcattttgttcttgatggacctaattacatgagagagcaataacaactactagtgtttaccaaaagagagagagctaaactatttacccaaactttttaagccgcggaatgattaaaacatgtgacccgcgcagatatttgttagtctattaaaggagatttagctgatgcagttaaggatcagtgtttctggcttctttggtcttccacttggcaagcctttttcattcctgttgcagcctgaacgaatcccacaataacctgaagctcatccatttgctgagacatgaagtgtctctgaataatgtcaattagttgctcctttgtgggattcggaagagcatccacgaggttaaaatgtcgccaatatctcagtaatgcagccattatccaacttggtaagatcaa

SEQ ID NO: 183852 - DNA, 279 bp, Arabidopsis thaliana
tttgtcggccgccctttttttttttttttgggaagaacaatagacaacttcgaattaaactagaactcttttaagttttaaccaacagaagatagtacaaagttctaaagaacactggtgaaaatcaataacaaggggacagagcggtttttcctaatcaaaactacaagaaagtaaccccaaacattttataatctaaagaagttgaattccactcattttcaagtttccaaattagaaccagccaaatgaaaaatcccattcaccaggatttttacc

SEQ ID NO: 183853 - DNA, 149 bp, Arabidopsis thaliana
ggggaaggaaaattgtacctcctagttcattaaaataaaaccttgggccggattggggtttccccacctttggtaaatccaaacctaggggcaaattgtattaaaaaaaaaagggggttttggaccccaaaaccaaatttttaaaaccc

SEQ ID NO: 183854 - DNA, 395 bp, Arabidopsis thaliana
agaaaacaaggcttgatgcatatatatatatatatatggaaatattgagaagtcggtttgtggtctaaacgggccttctaaaaacaaatttgtgtgtggcctaataattgagtcggtaatgttgtgcactttaatgatgatactcacttcttgtttttcaaactttctccttttttacctaactcactaaaaagttggaaattaacttgtgcttgaactgctttgaatgttaagtgatgccatccgtctttctgcagcggctgctctcttttccctctgtgctgccattgctctcctcacttcctccactttagaaattggcttctacttctccgcctgcgcagcttcggcctgagccttcttttctcgggctttgcgtagtttcttcaactcct

SEQ ID NO: 183855 - DNA, 225 bp, Arabidopsis thaliana
aaaaatagtaaaacagagagaaagggggttatttgaggacaccacgggttattaattacagcacgagaaactaaaaaataccccaaatgaaaagcagagatttaaggttatgcagagcaattaaatacaaacatttatgcttcgctttttcttatatataacttcccatttctcaatcccctttaaaccaaatatccgagaccaaataaacctaaaccggaacac

SEQ ID NO: 183856 - DNA, 160 bp, Arabidopsis thaliana
agtagaacatcaacatttgtaagatatataatagaaaacataacttccatattaatttggtccaacgaaacattaaaactgaaactcaaaacagagttggatttaacaacgaaagcaaaacacaaaaccaggtttggtcgaaaatctacttagatcgctg

SEQ ID NO: 183857 - DNA, 229 bp, Arabidopsis thaliana
ctaaaaaaacagattggccccaaaataatcaacaaaatcaatcggggccccaacaaatgcggggaccgccccaaacaagggactcataggtaagggcggaactcacaaaaaacaaacaaactccacaaattcctaagagaccagattagctttccgggtaacaaactcagatcaatttataaccattcaatcccccaaacccggaaaatttagaaataaaaccctccaa

SEQ ID NO: 183858 - DNA, 295 bp, Arabidopsis thaliana
gaaaaaaaaaacccaaaaattttttggccccactaaatgggtttgggaacaaacaatccaggggcttttttaattcattaaatcgaaaggttttttgggccaatttttaaggggggggaggggatcctttatttccgtttaagtttaagttttttttttttttgctgggggttggacgggaagttcctaaaaccttttaatcccagtttggaacattattttcacaaaagggtggggggggcctttaaaaaaaaactaagggccacattttaatgggttggaccccttaattttt

SEQ ID NO: 183859 - DNA, 142 bp, Arabidopsis thaliana
aagattaaatctcatacttaaaattaatcaagaactttggcttagcaacaaccatcctagaatctaacataagtctaacacataacaaaccgtacccctctaacaatcactgagagactcgttaactttaagcatatcaaaa

SEQ ID NO: 183860 - DNA, 141 bp, Arabidopsis thaliana
gcaacacaaagatcacatttataggacgggcatgttttcttcaataacaattgcatctgatggaatcatcttatgtacaaacacaacaaatacaagatccaataaacacttatgactatttgtctctgactttctagatac

SEQ ID NO: 183861 - DNA, 367 bp, Arabidopsis thaliana
gaagaaaccaaaggaagctttaatgagtgatataaaagagttacaatctcgttgagtagcctgaaagtggggtggttctgttacattgagaatgttacaataaggaactgagagttctggtctcaatcctgaaatgtctggttttaacattcccagagagaaatctacaacaacaaagatgtgtacagcactcacataatgtatgctgctgctgctgcttccaagactaaagggtagtagtcggagtaaataggaagaaagactaataatgcttttgttttgaatcacccgcgagtcaagtcaatatcagtgagtgggtttctgctagagtcaagtgatctgcctgagcctgagcctgaaacgggcc

SEQ ID NO: 183862 - DNA, 315 bp, Arabidopsis thaliana
tttatttttttttttttttattttgaagaaacatagaaaatgtttctgctttggatttgcacacatcaattttgcaagtatatcaaatcaatatggcgagagagcatttacatacacctggcgtcatattcttacgtaatttctccggcgaacagttacattccaccgtcacacacaagaaaacgaaaagatgtttttttaaagaatctttttgtaattaattattccgtcagaaagagatcaaatcaaccgtcgccgatctcgtcttggtcaccggcgactgaggcaacctcgccgtgaaattaggaaaagaac

SEQ ID NO: 183863 - DNA, 130 bp, Arabidopsis thaliana
ataagaaaagaatgatcaactattgtaaactgtccttgttcatctaaactttcatggggagctttggcaaagtcatgcacgagagttccaagctttgcgcattttttgggaaagatacattgttgcatta

SEQ ID NO: 183864 - DNA, 197 bp, Arabidopsis thaliana
gggtaaacgaaaatggggaatccttcaaacaaaaatcacaagttcggattattcaggaaaaacaaggcaattttgctctaacaggccggaaaattttaattaaaagaaaaaaagaacaagggaagatcatcattcaaaaccaaactttgggctggggggcttttattaaacaaccgaggaggaacttatttttttcc

SEQ ID NO: 183865 - DNA, 144 bp, Arabidopsis thaliana
gtaggaaataaacagtaatgaaatttgttgggattacagtgttttagaattcaacagagagagaatgttgtaaatctcccaagaacaagacatgactccccagaggaatcactttcttcccgacatcattcgctacgcttagct

SEQ ID NO: 183866 - DNA, 214 bp, Arabidopsis thaliana
ataaataaaattttatatattcctaattagaaggtccatacacatttcgtgtattgactacaacaaaagaaacaaaacgtgaaagaaacatagaagattttatatgatattggttatcgatgataaatgatacctgcaaaaacactataatttaaccatcacgacaacaaaagcatactggaaataattaaataaaataggaaacagattgggg

SEQ ID NO: 183867 - DNA, 447 bp, Arabidopsis thaliana
atgaaaatcaaccaataaaataaggaaaaatgattccgacaacagtatatacgttacaaattcgtggtccaaatctttttttataacaaaaaaggaaaaataaaaaagagagaaaatatgtgatgctggtgatatccagaccattctggtatatataaatacaactaaaaaggagaattttaaaaataaaaaaatctagtgctcaaactcacaattttctaagatgattgttatttttcggattttttttcccacaattatatgaaacagaattaaaagaatgataaagcacaaactccatttctccagcttcaagaccttccttctctctatttacgaagcattggtgagagtggatacaggagagcttgctccatcttcagatcctgcgtttatattcatacctttatctgtactccaatttcgttcatacccttcaactttctc

SEQ ID NO: 183868 - DNA, 354 bp, Arabidopsis thaliana
tttttatggtctaggtatcctgggagctcccaccagacaaaagtacgaaaggactaatcccataaaaactgaacaagaaaaatcgaatcctattctatgaactggataattaaaagaacccaagaccattgacaaatgggtttcctcttggactacttcctgtggcgagcaatgtggtagacatgatatgaacattttgaccttgtgggggtttgggattcgggttgctgaaaaaacccaaagaagattgaaagaagggactcaagacaacaagctcggaccattttccacagcggtacgagcttggacatggctattgtgcccgtgccgtgacatttggatgtcatgagatac

SEQ ID NO: 183869 - DNA, 138 bp, Arabidopsis thaliana
gattctgtattggttttctttccggcatgattaaaccggtactaaccgcaaagacaaaaactttttcctccctcaagtcaaaaccggtttatataggacaaagccatccttctctgaagaatcacaaaccagaaacag

SEQ ID NO: 183870 - DNA, 298 bp, Arabidopsis thaliana
ggggggctgggaacttttcatttgaaacaaaacttatggggttacacttttttacattacaggcacagctttggaacaggcaaggggaatttgccgttttcatccccaataacgaacaaaaaattagatgcttttcttcttaaactacaacaattgataaaaaaaacagtttaaactcgcaggctaataataacctgggcgaagttaatctttgtttcctccctaacaggagtggttctctctgccagtgcagtggcaaaaaacttccaaaaactgggatttcgaagaagctccaaaa

SEQ ID NO: 183871 - DNA, 110 bp, Arabidopsis thaliana
ctaatgctgacgctttatctaaaaaatctgtgggttgttccttactttccattgacgagagtacgaatcgagaccagatctgcgtgaggatgatagagaagtgcgtagga

SEQ ID NO: 183872 - DNA, 153 bp, Arabidopsis thaliana
cataatcgtaaattcaatataaaagggggggagttcttatctcacacgaccatgtaaatggactcgtatctccaaaggatgacatgaaaacacaaattttataaacacagcgattatatcagttaatggattcactggtgtggatatagtgtg

SEQ ID NO: 183873 - DNA, 236 bp, Arabidopsis thaliana
gaagaaagggggttatgaatgatgaaaaaagtctatgttaaatggaaaacggattttaactagcccgaacaaaaaaagtaaaaagcgacagcatatatcacgtgtgctcaacttactgattaaatagcctaaaactcaaattatacgttctaaattaagactaagagtctcgatgattatcttcatgaatccggtgtttagggccggtaggagaacgaagaggaaacaggggcaaa

SEQ ID NO: 183874 - DNA, 138 bp, Arabidopsis thaliana
tttttttttttttttggttatttaatttaaggtgtgtaaaacttaaaagtgctatagaacttgttcttaaaacaaactttggctgaaacaaaaccaaagggcaatagaggcatgtggtgcgaaagcttgtctggacag

SEQ ID NO: 183875 - DNA, 114 bp, Arabidopsis thaliana
cgttggtgtttgagagaacattgcagaaattgtattcccgcaacctcattggagaaagatcttgagagattattatatctgtattgaccggttgctagggcggatggaaacgcc

SEQ ID NO: 183876 - DNA, 334 bp, Arabidopsis thaliana
gacccttgaagaaaacgcttaatgaaggatgaaaaaaggctaggtcaaatggaaaacggatattaactagccctaacaaaaatagtcaaaagcatcagcaaatatcacgtgtccccaacttacgattaaatagcctaaaactcaaattatacgatctaaattaagactcaagagcgctcgaggatttatcttcatgaatccggtgattagtgccgttaggagaacgaataggaaacaggggcaaaagctccggtgccggctcggagccggttatcggactcggaaggaagtagaaccctctttccgctatgggtttttgctcttccttgtccgg

SEQ ID NO: 183877 - DNA, 79 bp, Arabidopsis thaliana columbia
atgaacctgatcatcaaaatcagtcaattatatattacacaatgccagaaactccttagtattatctcatggacttggg

SEQ ID NO: 183878 - DNA, 78 bp, Arabidopsis thaliana columbia
cccatgtcatgagataatactaaggagtttctggcattgtgtaatatataattgactgattttgatgatcaggttcat

SEQ ID NO: 183879 - DNA, 142 bp, Arabidopsis thaliana
acagggccgtacaaaaaaaattggttgtatggatgcgcaaaacaccgagggttaacaagcaatgatgcccatccattatttctaccaccaccgttgtttttctttttagagccaggagaattttcgggttcgaccaaacaca

SEQ ID NO: 183880 - DNA, 206 bp, Arabidopsis thaliana
ataagcaaatacaccttattatttcaaattaaattgtgctggaacagctgtgtttcactctgacaaaaaaatgagagaggaaacatctaaacgctcactttactcataagccaaaatgacattgagagagggagagagcatgagttctttacgagaaagggttagcagctactttacgccaaaccccacgaaccggtaaaccaccg

SEQ ID NO: 183881 - DNA, 300 bp, Arabidopsis thaliana
ccccagggcaggggaccaaattttaaaaggcccccagggttcaaaaaatcaatcccccaggggggttttgatttttttaaaccccccgttttttattttttaaaaaaaagaaaattttttttttttggaaaagtctcgggtccccttaaacgttttttggtaaaaaacccccccggggtttgggaaggggaaccaccccattttccttttggggccttatttgggtttggaacccttgggcctttccccccgttggaaccatgcccccggaaaaaagcaattttttggggaccggggggc

SEQ ID NO: 183882 - DNA, 124 bp, Arabidopsis thaliana
acgcccaacctgacccgtctgggctcgccgcctcctatatcggttctctctcgattaatatctccaagagcaagcttcgttttcgagtggtgtcgcttctaattgtgatttctttaatattgca

SEQ ID NO: 183883 - DNA, 171 bp, Arabidopsis thaliana
gtgttcccacgcctttttggggatttttataaagccccatccttaaccccggaacttataattgattttcgagaaatcacctaacagggcaaaaaacagagtttaatttttaaggccaacccctgattgggttaacaaataaaagggcccctccagttacacaaacataaa

SEQ ID NO: 183884 - DNA, 164 bp, Arabidopsis thaliana
cttcaaaaatggaacttttttttattttttcaggctttaagagaccacaccagatggggggtcagaacaaatttttaatcaaacatagcctaactgaaggggagagaatgatacccggaatagggaccccccagaaaaagggaataaggatttgattcctgggg

SEQ ID NO: 183885 - DNA, 128 bp, Arabidopsis thaliana
tggtggagctgacactgctgtatttttgtgtacaccaattctttgtgatagtgacaggtgtcagagaggaaaaccgaacggtcccaaagccaccaccggtgaaacatgggccggagtgagctatggcg

SEQ ID NO: 183886 - DNA, 387 bp, Arabidopsis thaliana
aaagaacaggctcaacaatttcattccataaacagagcagaggatctgcaacgactaagttctgaggattcatcaatgtcatccacacatacacacatcaactaacattatgacgtttaaggatcttctgtatcctccatcttgagatcttctagtttctacaatgctgcaacacataggaaaatgccctaatcgagatcaaggaactccattcttttccgcattgtgccctttaaaagcatttcttccttctctgctttctgagccctttttatctctgcttctggaacctgaaccatatgagctggaagctcttctttttccacgtcctaagatcacagaaacccgattcaaacaccgaaatcgttcttaaaagtggaaactttc

SEQ ID NO: 183887 - DNA, 371 bp, Arabidopsis thaliana
gataacatccataagacttgatcattatcacagtagggtagtagcaaagtttctcaataaacaccttcttaaataacatccattagacttgatcattcactattactaaacatgggaacagaaacatcatcagatggataaaactctatgatgatttaagatacctcaacgatgactttaaaaagctactaagaagctgagagagggattggtttcacagcgctctgaatccgctcaaaagctactctcactctttccttaagacctgaatgctcactctctacctctccactctctttatccagctgagcgacattgccatcgaccctaatcaccagtttcccgttttctcctagtttcacatccccgaa

SEQ ID NO: 183888 - DNA, 166 bp, Arabidopsis thaliana
gggggagaaaaacgaggtttttggttaatgaaaaaaccccaaagccttgcaaatttaccttttaaacaggcttttttttttctctaccactgacgaagcaaagcctggtgcaaactccggataaaactgggttcattttccgggaccaaagttgggggcaaaggcc

SEQ ID NO: 183889 - DNA, 208 bp, Arabidopsis thaliana
cccaaaagtggggggggggattttatcattccgggacagagtcccatagagatgtaatccaaagaataatctaaaatcccgcccaaaattgccaaatcagggggctccaaaagtccccatccaaaagttccttttttttttatccaatctttggaaaacccttttccctttctttttttataaaaaaaaacaaaggggcccatgaaaa

SEQ ID NO: 183890 - DNA, 194 bp, Arabidopsis thaliana
cacaaaaaggttttttcgggggtaatatgcccacaaaaaatatatatctggggtgggagttggggttcgatgtttcacacaagaggagcataaattattgggctccttttcgggctctttgcccccattgtttggtcggttttttgggatctggcgaacttggtttcctttcatggacagggggcccccggcct

SEQ ID NO: 183891 - DNA, 176 bp, Arabidopsis thaliana
cggacgctttggttctaagacagcagaaccgatagcctgagaaatggggaataccaaagtaagggcagctgtttatggtccaagagagattcaaaacaagagccaggaaaagaagaacgaccatgcagtggggttgtgagagtataggatggctcagtttagtactggcgatcgtc

SEQ ID NO: 183892 - DNA, 100 bp, Arabidopsis thaliana
agggaatccttctcaaaactgggagattccatatattttcaagaagatggggcaactccagctctttatgtcacccaatatatatcaagctcactagatt

SEQ ID NO: 183893 - DNA, 360 bp, Arabidopsis thaliana
agggcacacaacttttgataaagaagttgacaaacgaaaacagaataacacatatcaacattacaaaatatcaatttgaacccaaacggacaaaagaataaattacagatgaaggacgcccacggctcaagctcaagctctcataacaacgaaaacaaaacaaaaattcttttcaattgcacaacaacctcctaataaaaataggtaacaataatagcagcccaaacggcttcataaagcagttggagaagcaccaagggcctgctgctcctaaggagctcttctctctcaccctcctcctttcactccacttagtcaaattagatgaccttcttcctttccactcttctttactcactt

SEQ ID NO: 183894 - DNA, 148 bp, Arabidopsis thaliana
ggttgcatgataagggggtttaatgttacatcggttacatgaaaagaaagatcctacccaaccaaaatgaaaacgaatgatttctgtgctacagagagtcttttgatgactgaattttaagagaaaaacggtgattaagcctaaaaca

SEQ ID NO: 183895 - DNA, 355 bp, Arabidopsis thaliana
tcctttttttttttttttttttttttttttttgtttgttttttttttttcaggatgaaatttctccatatatttgactgaagaaaacacaaaaacatttatggaaaaagaatttgcatttaaaatatttttgcaccaccaccaaacaaaaaaaagagaagccgaagaaacagtaaagtagcaagtccaggcaaacaaatttgctttgcatttgggagggtcatataatttacctatacgggtccacaatctcatgagagctgagcctatcctctccttgggttcctctagttctggggttgggtttccactggcgttctgcgaatataaaacttgtttacaaactccaaaggaga

SEQ ID NO: 183896 - DNA, 295 bp, Arabidopsis thaliana
atgagaaatgaaacttcttgataaattaatacaaacccaagctctatacatttcctatattaattaagacgataaaatggctgaactaccatatataaaccaaactcatcactataaaaccctaaacaaagggttcttgcatagattaaaaaaacatagaagaagaaacccaatcccaactactaaaaacaccgaaaataatactaatatcaccaacccataatcaaatcccattttgcaagtgtaattaactaaccctagttaataaagacttgacttaattaactaattataa

SEQ ID NO: 183897 - DNA, 350 bp, Arabidopsis thaliana
gtttttctctgtactattttgttttgtgtttagggtttctgaatttggttttctcccttttcttcaatcaatctttgtcggctcttccgatctgctcaatcacactactagccgttgttttccctgcggtttctagcttcaacactattcgccgcgtatcctactacctacagttgtctttgaagaacatgcatgatattcgaaatcctgaaagtttttggtcgggcaagtaatggcggaagcgatgaattcgtcggagaagaaagatgatagctcggaggagaaaggaggtgagcttttgttctgtggtgctacggctcgggatatcattggaaaacgaaaaggtgcga

SEQ ID NO: 183898 - DNA, 301 bp, Arabidopsis thaliana
aaaaaaaaaaaagacctttttttttgattttacaaagtcccctggctgggtttcagggcaaagatagaagcccggggaaaaatcccgggccccccttgtggatttaaggctcataatcaaaacatgttctccctggtggtcccccaattagggtttgccaagaagaagcgggatttttcttaagaggggcttttttcacttggggttcctggggcccataatgactgggtctccccccaggacccttttggtggtgaaacgacctttgtaaacaggaagagcttttttttttccttttccg

SEQ ID NO: 183899 - DNA, 402 bp, Arabidopsis thaliana
  unsure (1)..(402): unsure at all n locations
agatgtgaagaagcatgacatagagctacattgaatataacttttatgtatacataaatataaattttatgtgttcgtgatgttttttgcagtatttcaactacatgggtatgcttgcagtagaaggaacctattcaaagatggaagctcttcttaacctaaacattcacccagttgatatcttgttgatgttagccgctacagaaggtgacagacctaagatcgaggagcttctcaaagccggtgctgattattcggtcaaggacgctgatggaagaaccgctatcgacagagccaacagtgaagagatccgtgatttgatccttggctactcgactcaaaaggcttgactccgcttggttttaatacacaggaacaacacangttatgttcttgagtttt

SEQ ID NO: 183900 - DNA, 157 bp, Arabidopsis thaliana
ttccgtattttttctttttataggcatgctagacaggattattagcattaaccataatgcttaatatgccaacatatgatcttagaggatacatacttctacatacaagacatgaattaagccatacaaagaattttaaataacaaaaaaaatctat

SEQ ID NO: 183901 - DNA, 394 bp, Arabidopsis thaliana
tcctttttttttttttttttttttttttttttgttgttttttttttatttttgttttttttttttttttttttttttaaagggaaggagaccctgtaatataaaaagggtttttttgaaaagttatttataaaaaagggggggggtgtttattaaaaaaagacaagttccccaagatttaactttgtgggctgaaatcagccaagtggcacaaacttttaaattttggcctttttacgggccaggaacctttttttagggggagggaacgcatccttttttttttttggggcgttaatggttttcggcactttttttggtgccttttggatggaggacttttttttttaagggccttttgaacccatttttttttaaaaaactggttgctttgt

SEQ ID NO: 183902 - DNA, 394 bp, Arabidopsis thaliana
ggtacatcgctttcattaacatccccacatgatggtaggcctttttcctttaatccattatctggaaaacaggaggaaattattttggaaagtaaatcaagaatgaatctctaaatcaattaccaaacgccgccgttccattaccggtcaggcaagacagaccaacggtccgagaattcgcctaacgaaccagtttactcgcatttaaccaaaaattgcataccggttcaatcaaacaacagaacagaccaatctcagaaaatctgcagccatttcaccatcattgctatatgttgctttgaacttcactcttgcgaggggaaaactttgtcagtttcttcttgaagctatatgttttcttgggatacagcaatacaatcaaactccatgaagt

SEQ ID NO: 183903 - DNA, 282 bp, Arabidopsis thaliana
agcacaacattacttatatctcaaacgttgggttcaatacattaaagccgtgggagataaaaggttaaacgaacatagattctaagcacaacattacttatattactacctactattgtagttctatatttcttcctaccaacacacaaacaaaaagaactttacacaaaactacttcacttatcttaagacagaaaatataattaaggcttggacactactagcaagtttcgtgttcttctgcatcaaaccgaggaggcatgactctctttcgtaccagca

SEQ ID NO: 183904 - DNA, 256 bp, Arabidopsis thaliana
aaaagaagtaccttactattattacaaatcaaactttaagatgaagttggtgtattgggtacaaagaaggagagagagatctgccttccattacatagcaaagttggtctggactttacttacgagatgctctccatacacagtttttttgaaaacttggcatcctcctctccctcccgggtacttctgtttacatatatccaagggctccaccaccgcgttgaagttagtctcatagaagaatgcgacacaaaca

SEQ ID NO: 183905 - DNA, 307 bp, Arabidopsis thaliana
aaaatcttgggagttctctggttctccatcttctttatcagggcatttcaggccttctactgggcttttcttccttaactcaatctccacctgctctaccctcttagatccatcgcattccttcttatcttcttgatcacatatgtcatcactttttccactgcaaccttcctgagcttcattttccttatcttcttcaacatgacaggtcttcaaaaccttttctccggcattatcatttctagtctccttggatggctcctcatccattttcttcctctttgcacggcttttccgggcttggttc

SEQ ID NO: 183906 - DNA, 306 bp, Arabidopsis thaliana
ataatacaaacttggttattaaataattcacaatggagagaagaaagaaacaaaaaataaataaatttatcaaatattaatcaagagtaatgtaagttatctaagacaattattatcatgaatgaatgcaataaagttgacaagaaaaagaaatttagtagtccaggctgttcttaagtaagttcaagacttctttgtaagccaatttcttggccattttcttatcagaggcctttgctgtgtgagcaaaactcatcttcttagcttttcacctcaaccggaaagaatcgaaatctttagctttac

SEQ ID NO: 183907 - DNA, 271 bp, Arabidopsis thaliana
atattgaaaccatcactatttgccaagcacatgtacgaacatacaacttaagaaatgtgaaattattatatgctaatttctacgatctaaagcttatatggcaaacaactattaattgataactagtggggtagcctcaccagtatcattgattattgagcttatcgatactttcctcttcagtagtagtatcgcattccactgtcggttcttccaaagcctttgaaatttctttagaggctgggatgcttttctgagtttgcagacccgt

SEQ ID NO: 183908 - DNA, 182 bp, Arabidopsis thaliana
acggaaacatgttattcattgtgttcggtacatacgatattaactgcgacgaacccaaaacatgaagcattcttattggttcacactttaagtcgaaacgtcttcattatcatgtagtttccagaacctgatccagatgtagagccagcaaatgaaccggcggatgaaccagctgaaccacc

SEQ ID NO: 183909 - DNA, 144 bp, Arabidopsis thaliana
aaaagaaggatgcgggatgggactgatgaaaattgggcagggttattacaaccaaaccttccaatatccacaaagtaacatacagcaattcgtctgctacaaaactggtaaaaccggaggaacctatgctcactatgatcttta

SEQ ID NO: 183910 - DNA, 364 bp, Arabidopsis thaliana
atcagaaaatgatgaactttatttaggtggatcttcattatccaagatcaacatcaacaatactgtgattatattatacatcaacaatagaacaatataaacacaaacttattactcttacatctttctttttataatcttttgctcccgagatttttggtaaagtgtcagtcttccttcatcaatccactgaaactggcttcatctcctctgcttctttcctcagctcatcaaacagaacagacgacagatatctttctccgaagctcgcatgaattgtctatatgataataaacacaaaacattaatttctgaccaaatcataacacatagatcaataacaaagaccaaagaaaacacttgt

SEQ ID NO: 183911 - DNA, 403 bp, Arabidopsis thaliana
tttctttttttttttttttgacaataagacacgatgggaaacagtagtggtaaatggaatgtttaaacagagaagaaggaacagaacagagtctctgtctccaaaaattctgaagacacatcaattgtcacaagtcttgtgctctgccgtttcacgagcaaatgaccaaaaaaacaagtagaagaagaaaccattaggcttcaataccgaagatgaaccagtaaaaacaaaaaaagaaaaaaacccctaattaggttttttaaaaaaggagatgaatttttcttattaatgttattgaagcttctctcttatctgtcttcttcaaaatctgagaatggtgtgtcagccaaactccaatctcattccacattcatccttcctttccttttttaccatccttccc

SEQ ID NO: 183912 - DNA, 175 bp, Arabidopsis thaliana
aaaaaaccccaaaacctttttattatagaagataccccaatcggaaaccggttttggggaaaattatatggaacaaattggcggtttgttactggggaactgattacttgggattggtaaagagggaaaaagggaaaaaccaggttttgaaattgagatcgtacaagctaaacaa

SEQ ID NO: 183913 - DNA, 283 bp, Arabidopsis thaliana
ccacaattatatatttcctgcaacagattcaacaccaaaacatgtttagacatgataacagaaagagagagagggagagagatggagaaggggaatcagatttcagtcttgaaggaagaggagctgagctcgaggagagacacgtggatacctgggcaattcgataaccatatccattttcgcatctttatctgataaacttgatgatacagtgactgtctccaaaactggtgaagttcccagcaagaatctgataaattccaattcatatctgatgccagag

SEQ ID NO: 183914 - DNA, 178 bp, Arabidopsis thaliana
  unsure (1)..(178): unsure at all n locations
aagtggtgtagataatcagattttcacaggttgtgaatcaaagtaaattggatgaatgatgcataatgttactattacaggtgtatgaagcangcttattttggtcaaatgtaaaaaaaaaaaaaagtggtaaaaatagtagtcacgaaggaattgagacttgagatttttgaaaaat

SEQ ID NO: 183915 - DNA, 248 bp, Arabidopsis thaliana
atctctgctactgcttttacagtcacgggtgttgttaacaagttcttgactgttgacatcaacgttctgattcgggataagcatgccactcctgttggttcgagtcgtcttctttttactatctgtggaggtgtcggctatcaccagagtgtcaaattggataaacccattgagaaggtctgcgagaaagatagcgcgaagggagaggacgatgaggagttgacgcaggtgtttccggggaaactagc

SEQ ID NO: 183916 - DNA, 286 bp, Arabidopsis thaliana
aaacaaaaatttattttttcccaacaaaccccaagacaaacaaaaaaataaaacccatttccctgggttctttaaaggattaaaaaaccccgggggggattttatttgaagggggggataaataaaaaaggggcatcataaaagcagtccgtaaaagcccgaccgtttttccaaaaagaaacccaagttttgctaaaaaaaggggcttaaacacacgtttttcccgaaaaggctttgtaaaattcccaccccccatattcaggcccccaacgggggagggccgggg

SEQ ID NO: 183917 - DNA, 369 bp, Arabidopsis thaliana
acaatgtgaacatgagcataatgatttattttggtttttattcagtctacattctcatttttttcctgatacattggacaagaagaagcagatactatataataaagtacatcatgccttgtcatattaatagctaacactaaagatagtggcaacagttactaaatggctcacacaaaggaagcttcagaatgtgatgacttgtttaggttgccttcctagcttcccgagagctttatcgagagcaacagggaactcttcgaagggaaccaattccgtttcgtattttagcttcccgtctcgtgcaagcccgaggagatagtctatcatctctctgcattcttttactttacccatactcaaccaact

SEQ ID NO: 183918 - DNA, 241 bp, Arabidopsis thaliana
gttgggacctctcaaaggatatgaaactttattcaagcgttacaaagaaaaagacattgtcatgttgactacataggtgcttcaggatctatcaaccatcacattaatttctgcagttacgagttaaaaaaagaaaagagaggggctcaattatgtcagagaaagatgggacttagctgcatcatttttcatttttgggccatccactgcaaaagggttttcctgactacaccattgaacc

SEQ ID NO: 183919 - DNA, 144 bp, Arabidopsis thaliana
gacataaaaagaaagattttacaacaaatgaaaagagatgcaactttgcttaacctggaaaaggagaactgccttcttccaggttaagactcaagattagcatctgtcatttctctggatggcatttagaagcaagtcaaggaa

SEQ ID NO: 183920 - DNA, 326 bp, Arabidopsis thaliana
aaacacaatgggaaatcaattcccatgaagattcaggctttgcgccaagttcattaatcagatctgacaaaacctaacaagtaacaacagcctttttttcattgatacaaatttggattggttccaaaaatttcatgaaagaaactgccgcctgcctaaaagttagacaattcatgttgatgctgcagcaagttaagccgccttatcctccaaagccttgagtttttgcctccattcttccaacttaaagaatttctctaactgctctgggtttaggtctcgggaagcagtcttctgctgttgagcttttgggagtcggatttttt

SEQ ID NO: 183921 - DNA, 343 bp, Arabidopsis thaliana
cgttcgcgtgggtgatccgccacccgctttagtggagtgtttcttcttcctcctctctttcccaagaatctcttccttattttctcggcaacgaagcacaaagggtcatttttgtcggttgaattcacaagctagttttctcgatctctctctggatctatagctgatctgcattgcggcttgtagctggtatttgttccatagttgtaagctatggtgacaatcaggagtggttcaatcgtgattttggttctgctggctgtatcatttctggccttggttgccaatggagaggacaaaacgattaaagtgaagaaagtgaggggaaataaggtgtgcacgc

SEQ ID NO: 183922 - DNA, 390 bp, Arabidopsis thaliana
aaaacaaaaatgacaaacaaaatccagttgtgtaaaccttttcaatacaatgagagatgaagtaaaaggctgcaacaattttaaagacaatgagagaggattggaggatgaagaagagtattaaaggaatgagaaagaggaacagctcttaacctaattaagtaaatgcttcttttattccttcttgtttgttcatgtgggtctcttctgatttccacctcaaaagctgatcttttctatttaagatagccagagtcatacatagagagaagagaagagagagagagatagagataacttataacttcacatatcaattaagaagtcatataactaatgacagagcttacaaggatgattcttgttctgaggatattgatgtgtcctgac

SEQ ID NO: 183923 - DNA, 474 bp, Arabidopsis thaliana
ctcctaaaatttctttgtaactagataaccaaacattttttacataaaccatctctctgacaattactattaaactaatctgtttaaaacaaacattttgatggttgacacttattttgttggaaggaagagacaggggaatgtactttactggagctgtgaaaaccggttcttgattagagtggctacgtgctgcgcaacccatgccgagccagccaccgtgcagcagaatccgtgcgtgtgaccttccctctcgatagataaggaagtatgcggagcttgctttgaaatctcttcaaagagttgcagtggaccccaatgatcatcaatgccaaataaaaatgcaagcttgctctggttttctctcatgaaatcccaatctggctctgctgcaagctctctaaactctgactttgccatgaagagaacattgcgcatggtgtgatactgcctcaagtgagtgcaggtagcttg

SEQ ID NO: 183924 - DNA, 192 bp, Arabidopsis thaliana
agagaactaaagcatgatcgttcttaggagccatgaattaaaacaaactttttgggccttttaggatattcataacttggtccattttaaggattttgggttattattcgccgtccaaaatttatagattcaggacccttgaaagagcctggcataaaaacctaagcaaatttgagggtttaaacaggtttg

SEQ ID NO: 183925 - DNA, 390 bp, Arabidopsis thaliana
ggttaaaattgactttttattttccgtgacttggttggggtgtttttccaaataaagaagacataatttatgaaattactaataaggattgtaacagcttcgtcctctaccgttgtcgctactttgtttgctgctgctcgaaccgctgcatcccctatacggtggagaaggcctcggtggtggttgtggcatcgctgctagtccaggctgttgcaagacgtatcggatccttccatcaggtaacatgattggcatcatcgacattccaccagctgcgtgacctcccgcatgcattaatggttgtgaataggcagaagctccaaatccaccaagagcaccaagggactaagagccatgccataactaagaagaggaggatagtttggttgc

SEQ ID NO: 183926 - DNA, 300 bp, Arabidopsis thaliana
ggaactaaaagaggggggtatattacaaatgcaccagtagtatgatacataagtcttggggttaaaatcaaatacctaaacaatatacaaggtaaccaaaccaacccaacacatttaccaaagagttaatgaacaaagatgaggaacctaaaaaaccatttaaaagagtccaaagaatttcactacccttgagagcctatttgcattgatcattctgcaactgccatatatatgtaccattctgcaatggtattcccatgttacctccattcattctctgatgggcttgactgtggacat

SEQ ID NO: 183927 - DNA, 298 bp, Arabidopsis thaliana
acttaaaaccaatactttgttcattgagattaatgtgaacatatacgtaatacatgtaacagatagatttagtttggacttatagttctatgatttaagttctcaattagcttgaacgattattatatttcttaaaataaaaagcaacaacaacacaatttcactaagtttctacatatcacaatgttgtttattaatataagcagtttttgcgctgagggcatattccacgttgtatccttgcatggctataaccccaatgatgacatgtgaaaaggactccttgttattctggatc

SEQ ID NO: 183928 - DNA, 282 bp, Arabidopsis thaliana
attataaaaaagaagggttcaatactctttaattctgtatctgtattagtaaacaatctatactaaccacaagaaagaccaaacttaaggaccagaaatctgatgagtctctcttgagattttgctactctcttacatgactgaacagacgcatttgttcatcttcgggtcacctttaggcttcttttctttttccgtaaccggagcttggatgataacgtgcattgtggtgacagcgcctgcgagattagagacaggacttcggtagtctttaaccgtctt

SEQ ID NO: 183929 - DNA, 392 bp, Arabidopsis thaliana
gcctcaaccggggcaacttgcataaatattaaacaaagctaggaaaaaacacatagataagattcgaaacattaagcagacggaatttgaattttctagaacttaaatcccaacaaatcccaatttcatcttaaacttgtcgagtctcagtgtctctttagtgtcctgcaactgttggcagcatactagtacccatggaactgcaactaggtatgtttgaacttgcaacttggacacatggaggatcaggagacttctttttcttgaatgcaggttcttcattaagtgagattttgatgtcggagaaggtaggcaatccgaaatcgggtaaaggtagattactattagcactcccaggagctgcaaagtgttgctctaagtacatgcggatt

SEQ ID NO: 183930 - DNA, 470 bp, Arabidopsis thaliana
cttcaactcactttttacgtgtgccacttgcttcttgtgtttctccatctccaaatcattctctgataaagaatgctttagatcatcgcactgagatcttacggtttctagctctgtttgtaagagtgaaattgctgtttctttttcatctttggccagctttatcacttgtaactccgctgctagcgactctgactctttcctcattagtgaaatcttgctctctagctcaattttcttcatgttctctctctgtagtgaagcctcggcttccataaccgattttttagtcttttccaaatcaactctcaggttctctgcttgctctgcctgtaacatgagactatcttggttctttttcagattctcaatctcttcctttaggattttgatctcttggtttaaatttgcagtaacatcttcttcatgcctcttctgattatctatctcattggacttctcatcaagat

SEQ ID NO: 183931 - DNA, 301 bp, Arabidopsis thaliana
acagggcagaggaacaaatttttaaaagcctccaagggtcaaaaaatcaattcaccaagagggctttcgattttttataactaccggtttttcattttctaaaatatgaaaatttttttttttttgcaaagtcttcggttcccttaaacgtttttttggggaaaaaccacccggggtttgggaaaggggatcaaaccaatttcactattgagccttcattcggttttgaagcctttgagctttacccccgtttgaaacatgaccacgggaaaaagcaaaattttggggatcggggggactg

SEQ ID NO: 183932 - DNA, 253 bp, Arabidopsis thaliana
gtgggggaaaaaaaaatcaacgcaggcttgcctttggcttgccaattttattccaccgggggggccaaatttaaactcaaagaagggttaacccctgtttctccattcaaactattatgctgatccctttttttttcacaaaggggtcaaataatcagcctaggcaagggggcatcatctcttccattggcccggtttgctttaaaaagcaactcaaaagaatcctgggggactccccctccctgacccaaaa

SEQ ID NO: 183933 - DNA, 318 bp, Arabidopsis thaliana
agaggaagggttcttttgggtcttatgggtcttggaaagctgtttctagtcttaccatctcaaaaaaaaaaaatcaaaaaaaaaaaaatccggggatttaagtttgaaacaatttataacttcagataataatggatgtttatttacaaaccacattctttcaaacctccacaaactttgtacattcaagaattgcatgaatctatcccagataggtggcaatcattcttcccacgagatgaagcgaatcgaaccagtttagtcttcaaacaatggaaaaattgccggagaccgaacagtttcactccccattttttg

SEQ ID NO: 183934 - DNA, 313 bp, Arabidopsis thaliana
ataaaaggcgatttcattcatatggacaaatgacatagtatgaacatcttccaaggcatcagtggtttctttcacagcttgaatggcattgtatagaaatactctctaagaaaactatcgagtgagcaagtgagtctagagggtcttttttactttgcagtcttgtatatgtgttttaatcagaaaatctggaagaagaggctggtggatccatcaccgaatgatttcagatctgctggtttgaccaaggccctgcacaaaggacacgtcctctctctctcaaaccactctgaaacgcaatcttcgcaaaaca

SEQ ID NO: 183935 - DNA, 379 bp, Arabidopsis thaliana
ggcttcaaaaaaggttccttccattttgataaatccgcaatattccaaaataaactctttcaagaatcaatagaaaactaaaatataatataaaaaagccaagagttctaaacaaaagaggcagaaccaaaaaaacaaaaaccataaatatatctaagcgtttgatccaaatgcttcagatatctttgatagcacttcaaaaagaaaaccatgcttctgcaaaaagaactcaaattccctagcctgcatcgctttccactgctcgtaaaatctcttcatatcctttgaggcaagcttactcaatccttgttgagcagtaagttcatccatgccaagacccactatcgatctaacaagagaagactttgtaaaagagact

SEQ ID NO: 183936 - DNA, 358 bp, Arabidopsis thaliana
tcttttttttttttttttccaaaactcggtagaagtaaaagatgtaatatagcaacctttcaatactgaacaatcacatgaaactataaagataaaaaagcacggggcaaagtcaaaaagatggatcaaagcattcaagatagagttcttggatgaaacttgaaacaaagacaacttcagactcggggattcccttttacagacacagtccacatactattacagaccaaaaacaagaattggtttacttgcaagggaacactagaatttcaaaaacgtgttaataaatatgcatgacgagagcgatataattggctcatttgcacttctttatgataaacagcagacacatgtatat

SEQ ID NO: 183937 - DNA, 283 bp, Arabidopsis thaliana
gggggaagcggaaaaagggccccccgtacgaaaaaaccaaaaaagagggcccccctcaaaaggttctttaccttggagagggcaaaacccgcccgggctttccctttttttaattggggcccctgggaaaattggataaaggtaaaccccagcccatcccttcccttaaccccccccaaaaaagccccaatcagggggggggggaataaacccccctggaccccccccccccaatttctttttgggcctaacgccgcttttgctttttccccggggaaacccc

SEQ ID NO: 183938 - DNA, 456 bp, Arabidopsis thaliana
gcgctctttttttttttttttataaaaatgctaaatttcaactgtgataaggggtgatgttggcatatatagctgtgcaaaacacagtgaagtaaaacacaaataagtacgagcttagagatttgatgcgtcgtaccgtgaacctaagaagagtcattcctcattgtgacaagctactttctaagagggtctcagactcagagagctgctttcttcacctcgaaaaaatttgagcgttctctgtttgctgcatcaatgtcttcttgtgatgccacggccactgcaacgcctttatcactaacagagtctattgcctctgcgaattccttgaagtccttcaaacttgtagataatatctcttcacgccttatttgcctctcttcgtcggttacattaagtaaatgcctcaacaaactggtataacctttggcatcagggagttggtatgaatcgaca

SEQ ID NO: 183939 - DNA, 220 bp, Arabidopsis thaliana
attccatagaaatacaacactctgaatgcaatcaagtaatcatgattgtttcgttttagatctcttccgctttcccctgttgagctagggtttcgtaaagcggagcgtttcaagtttctagagccagagactcacgatgccgctcagcactgatgcaacaccaaacacgatgaacgacatcattgcgctttcccttcctaacgcaactagcagtggtgct

SEQ ID NO: 183940 - DNA, 260 bp, Arabidopsis thaliana
cttttattttttcccatggaatccgagaagatttaagtgggaattcatcctccgattcatatattttgctcaccggacacttcagatcgagctactgcaatttgaggatcgtgtttctttatgtttcaattcacggcgtatttatctcgtcagaagaaaaatggatactttcacggctgaggatctgtcggcgatcggcggaatagctacagaatcggtccttcactcttgcattccgacgcattggctacctttcatcc

SEQ ID NO: 183941 - DNA, 231 bp, Arabidopsis thaliana
aaagcaaacccccattccataaaaagggaacttttgcttgaacaaggcccctaaagggctaaaattaactaagggaccccggggggtgcccggaagggggccacccttgggaaaaaactaaaaaagggctaaagggaaatgggtcccagactccagaaaaccaaaccccttaaaaagctccccctccccccttggggggtttggtgaaaaaaaacttggggatgtggggga

SEQ ID NO: 183942 - DNA, 167 bp, Arabidopsis thaliana
gaattaggaaaaaaataacgatccaaatgatctgaattttatacagacttcaatggtactagaatgtcttgatttaaaacagatcaaaaaaaaaaaacccgaaattcatcgtcgagtttcgggaaaaattacaagagataaatgagagctttagaaacccataatgg

SEQ ID NO: 183943 - DNA, 143 bp, Arabidopsis thaliana
gacccacgcgaccgggaacagctgaaactccccagatcattaagggctatcgaaaatggaagatgatggagacaacagaaaccaaccaaaatatagagctaaaactccagaactggatccagaaagacgctgaaccgatgaga

SEQ ID NO: 183944 - DNA, 435 bp, Arabidopsis thaliana
ctgttcatcagctcctatgttatccaagttcttatcttctgttgaaactccattatttacttgagcctcttgatgcctctccttcgtggaatttccatcactttcattagcatctacctttggcttaacatcttctttattctccaaactattatctttagtcgagtctccgatgctctctccttgaatatttacattttcaccttttgttgtttctttgttcatataaacttcattacttctttgactctcttctcgcttttcttccttagaactttcattatttgtcttggcctctactgatgcattgccctttaattcttcattacctaccttgttctccaagttttcacccttcattgattcttcattacctgccttgttctccaagttttcacccttcactgattctccattggtttcgggagtctcttc

SEQ ID NO: 183945 - DNA, 228 bp, Arabidopsis thaliana
attggggtgttttttttttttttttttggggggggaattaggatatcacacgaccaaagtatctgaaaagcattggaaaattaagcaaaggagcttcttcaagcttgttttagttaaaacaagaaggggctaaatacaagaataggcacaaattccccttaccaaaagagggcccaaaagatttggggttgaactcaggctgctgtcctcagggggggggacaccaaa

SEQ ID NO: 183946 - DNA, 407 bp, Arabidopsis thaliana
actagttggcttataacggggtgagaaattcaatgttgcatttgcatttgatccgaatatacataatttatatttataatatatatgggctaatgacaggcttattaagtagattcaattgggctgatgaggtgaatcaaacggcgtcgtcttggcgtaggaagtgaacaaatttagaacgtatagaagatgggatgcgaacaggacggtacttgttgtcgagccacacagctattccttttgcctccaatataggctcttgatttggaagtttaaagatgaaatgatcgaagtaaatacgcgcagcagatgtccccgatatcctcgctttcaccacgaatttgtctccgctgtaaaggtgaaaggaacttcattgtcaactctgaaattgctaaggcttccccaga

SEQ ID NO: 183947 - DNA, 323 bp, Arabidopsis thaliana
aaactactgcgaaaaatatgataagccttaggtttcaaccaagcaccaccgccggtgttttatcggcgtcagtgagccgcgccggttttatcaagcggtgcggttcgactaaaccgagaagggtgggccggattgttacaatggcgacggcggccagtactttcgatcaccgctatgacgattatatcaccactcccaacactgtcggagactgtcactcgtttgacagatggtgtcactgacactggagcagaagaatgttccttatgacatgaaaattgtggatttgagtcacaaaccagaatggttcttgaagattagtc

SEQ ID NO: 183948 - DNA, 199 bp, Arabidopsis thaliana
aaaagcaccataggacatgccatggaatggaagaacaaaatattctaaaattaaattacctgatcacaatggcctgatcaaattcaaaacacacgttttgtttgttttaataactcaaactgatcacactttgggtgggaggggtctttaagttcatcttcatggccaggtccttttagttgccgaactggtccatgaa

SEQ ID NO: 183949 - DNA, 359 bp, Arabidopsis thaliana
gaaaaaaaaattaggtttggctttctaattggaaaccagttacgatggtcgaaacaagaattccagtgtgcaagactcacttattcagacgggtgatatgatgcactcgcgtcaaatccaaatgtttaaggttaaaatcggttatatatataacctcgtttttaaaatattaaacaataaacatgcatatatatgttattgtttctgtagcacggcatacatcaatagaatgacgattgagaaatttagtttcatcagtacgtaataattagtacttagcaaaaaaaagaagtggataaatatctttaatttatggaatttcaatggttgtagagcaaatttttccattatcgcatgca

SEQ ID NO: 183950 - DNA, 143 bp, Arabidopsis thaliana
ttgccctttttttttttttttacataggagtcacctaaatatgcgaaagtgtatgggtgtaaaacgatggttcgaataatagtggttggtcttaatatctattttcttagctaaaaataaggaagggttaatttattgaatga

SEQ ID NO: 183951 - DNA, 99 bp, Arabidopsis thaliana
acataggagtcaccgaaatatgcggaagtgaatgggtataaaatgatggtttgaataatagtggttggtattaatatctatatacttagcttaaaataa

SEQ ID NO: 183952 - DNA, 463 bp, Arabidopsis thaliana
ataaactacttcaatacatgccatttccatgaagagaaattcataacattttccaactttaatacaatcacaagaggaatttagtagtcaaattcttaaccatttgcagagaaaatgtgctcattacaatctctcgtctaccttaatttagatgaatcagaccttccttgtcctttagaggcttggtagaaacgcatcaaacgacaccgtgtattcatgaaactgcttcacgatctcttcatatttagcggctagttttttaactttagcttctcctgactgtctcacctggttagtcttcgcagtattgtcatcaaccatagctactactgattcaacattcgtttgcctggtttcaagttcacgtcttctggattcaacctccacttttaattcattcaactgtttcgtccaatcatcaaacatgactgctttttctttctctagttgtttcaatgattcg

SEQ ID NO: 183953 - DNA, 512 bp, Arabidopsis thaliana
gtttcttcgaatccagacacaacaaatccgaacctgaccaaaactgaaaactatgtcagcctacgagtacccgaggctctctcgttccgacattatcacggcgctcaaggatgctcaaatcgctagcgttacagagaccgatctcaaaaccccaacttccgactttgtctccgagctttacaccagaattcttatctatctcgacgccctcgacgaagaagagaaagggcaagttgattttgaggctttggagcaattggagaatccagatcatcatgccacttcaatgcaagctatgaagctttattgcaaagtgaaagatatgttagaaatgcttgattgtccattaccaattagtttcaaggatctcttacgccctgaatcatcccgaaccgagtttttcatcagcgcacttttgaactatggtctatacaaagactcgaaaatggatcttataagaccaaaggcagaagagttgggtctccttgatgagcagcgaaagcagtgtgagg

SEQ ID NO: 183954 - DNA, 402 bp, Arabidopsis thaliana
aataaaaattccatttattggatcaatatgaattcaactaagagttttgagttttgacagtaaaaacagaaaataccataccaatctagtctgattaaaattactgttcatgtgagccacacacaatatggcctcaaagattcaaacttacttaaatcatttatagatagatttttctaaagatgaccaaaaccaagcatggtcaagtcaaaagcggaaacggcctttcctaatccgagcccaggcgatggctgcaactgcagctcctccaaaatgagctgaacctgatatgttactgttcccctctgatatccttaaaatgtcttttcctatgagaaagataccaagcaacattgccggaactggaatgaaaaattccaagtatagagtagctcttgggtg

SEQ ID NO: 183955 - DNA, 408 bp, Arabidopsis thaliana
gccttcggctggttggatcctgatggagcggccgtccttttttttttttttttaacaaaacaaaaggattatttaaagaactcagctttgaagttaaatccaaaaacaatggttgcatttgaagtacattaatggtctttgaacaccaaaaagaacattacaaaaaacgaatactaaaagcaggaaacagttgagtcacttagacattcttggttttcttcatcttggaaggtggacatcgacccttcttcctcatcttacgcttacgaaccagacgtttcctgcgtagcctaatctttttggccagcttcatctttagcctgaattccaagagcagtttctctttagcttttttcgattccaacggtagtttatccactggaacaggagcaacaacagtgtttgggt

SEQ ID NO: 183956 - DNA, 155 bp, Arabidopsis thaliana
ataagattaaacttttattagtaggcgtgaatttacaatttaatcaaagaacttttggaactaaagttaacaggaagtgaaaataccattgccgtgttaaaaacatgatgtacagtaactgttgattcataatctaccttcaaacccaactggag

SEQ ID NO: 183957 - DNA, 450 bp, Arabidopsis thaliana
gttccattgatctcttaactgtaccacaaacagcgattagtttgatccgcaaaacctaaaactgcaaacacaatataaaccacatgcaacatttgaagtgaatctacacacaatccaccacaccacataacattaactttacttagcatcaaaaatacagagcagacacatgctactgcttcagtttcattttggcattattacattcggatttcgaatgtgtgtgttcgactttcccattttcccaagctctttccatttagacccagaaccagagacactccacaacttgtcaccaggctttgccgaacccaattttggtttcataagaggaagcttgttgttcccttttcccattccgttagccatcaaccaccttgaaccagactgcacctgctgctgctgagtcgtgattccccatggcttcttatctgtctcgctcttcatacc

SEQ ID NO: 183958 - DNA, 317 bp, Arabidopsis thaliana
gtaaaaaagacagaagcatagactagaagcaacagaagctgattacaagtacgatccgggtaaaagacaaacaaaataaaataaaaagactaaaaaaaaaaaggcaaaccaaaattaaaaacattaactaagcaaacaaaagatccattgattgatccaaagatcgtacaaactacaaaaacctagaagaaggaaaacattaaataaacaacaacaacaaaagtagattaaaagaaaatctcttacataatctttcaattaatcatatgatcactgattagagagtagttgttggtgttggtggtttcttagcattg

SEQ ID NO: 183959 - DNA, 433 bp, Arabidopsis thaliana
cactgtaatgaattcatacacttattactccctggggctgaagttacaaagattctagattacatacactctcaactaacacatactgagaatttaggaccaagattagcctttacaaaacccaaaaccaacattaaacttacgattaaaatcctattgaacaaaagaaaagggacctaagtagacaaaaggaatttcactgagcaacatcattccactgaagatatcctccgtgaccgccttcatctttaaactcatagacagcaccacatgctttgtagccaccttgaactggatcatcagccagaagaagcggagtgtccaagtcgatgaatctgaagcatccaaggccagcagcaaggtgaccagagaaccccattgctaatctagtctccaccattccccctatcataagctcaatgccagatgatct

SEQ ID NO: 183960 - DNA, 531 bp, Arabidopsis thaliana
cccatttttccgcggacgcgtggggcaaatactaccgcttcctcttcttctccaaaagtcgtttgttttcacatttctttcgattcccacttgactctccgagaaacctttgcagatcaacaaacccatcttctgattctggaaaccctaacccacccggttccgattcagacaaacgggtcggagaccgattttgatctcgaactcgattctttctcagatgaaagtatcaaaaattgagaatttgaggttgactgagtcttaatcatctcgatcaatgccgctgacacccccgtggatttgtggagaattcatcaatggaggaacccaaaatcgctcgtcgtccaactatttgcttcagaccaataaacccttctgatttagaacgtttggagcaaatccatcgtgacatattcccaatcaggtatgagtctgagttttttcagaatgttgtcaacggaggtgatattgactcttgggctgctgctgatcggagtcgccctgatggtcattctgaggaacttattggat

SEQ ID NO: 183961 - DNA, 401 bp, Arabidopsis thaliana
tcttattttttttttttttctcaaattataagggttggtttacaaacaatttcggggttttatctctccgaagagattcagattaatcgacataatatgcttctctgcattgttcttagctcatgagagatctcaagcaccaattgttgctgaatcttttccacaatatcagacacaacaccttcagattcaccaccaaaatccaaccaaagacatggctttattagatcagtttcaatgatctgatccaatgatcttgtaggagagtcagagcagagtaaacttcaaacaaaatgtcttatcgcctcgtgaatcagatcatcttctctaagggatgattctagattgaggactcttgagctcttcgatggcgagaaaggccaaaacttgatgtcttgacg

SEQ ID NO: 183962 - DNA, 284 bp, Arabidopsis thaliana
gtgaagacccaaaactcatcattagctttaagcacttgaaggaagctttcgctccttagtaatggaaacaaatagatcccattgtgatgtttgggggatccctggtcttaggacattggggagtttttggccccatgcgggggagagagagaactttgaaatgcaaaagtctgacccaagttctttccttttcaaccctaaagataacctttgaccaagatcgatatacttgccatcaaaaaatcctgacccggaaaaaaagaatcatgggattgtatttcaat

SEQ ID NO: 183963 - DNA, 271 bp, Arabidopsis thaliana
  unsure (1)..(271): unsure at all n locations
tttnttttttttttttttttttttgtaaaatattttccagaattactgtaattgtaactacaatgcttctgttactctctatggaaatgtctttttaacacttcaactcaggatttttacatggatgattatgaatcttatgctaaggctaaggccaaccactccatttctggtcttcgtctgggcgacaccactcagcatctacttgcttctttttgccattttcttgttgagtcgtgagagagccataagtctccccaaaaggatttct

SEQ ID NO: 183964 - DNA, 522 bp, Arabidopsis thaliana
aataaggaagacacttttcttaatgatccaagtatatatcagaacaaaaggacaacaatttacttttttactttttaaggataaatggttacgaatcagccaagaagtgaattaattcatgagattcagatttggataagtttttcatccacataaatggaaaaagcagatttagctccaaggatcatcccaaccactgggtccttctcttttgacaaaaccaatgatggcttgaacagcttcatgaactctattggagagagaatgattcccatgctctatctccactttctctgctcctcccattgctttacttaatctattgaccaatgcttttttgtcgacataatctggtacatactcatcacccatggagaaaatcacctgcaaggtgtgttagccatatggccaagtctagttttaactgatcatcactaaggtcagaactaaacatatcgtcatctcccatgtaagcgcagagggagtgatatctataagcagagattggagcacaggatcagc

SEQ ID NO: 183965 - DNA, 505 bp, Arabidopsis thaliana
gttctgttctttttatttttttaaagaatggcttcaatttctgcaactttgccttcgccattgttactcacacagagaaaatccaatctcacatcgattcaaaaactcccattttctctaactcgaggtacgaatgatctttctccattatctcttactcgaaaccctagcagcatcagtctgatggtgaaagctagtggagaaagctcagattcatcgactgatctcgacgttgttagtacgattcagaatgtttgggataagtctgaagataggttaggtcttattggtttgggttttgctggtattgtagctctttgggcatcattgaatctcatcacggcaatcgacaaattgcccgttatctcgagcggattcgaactagttggtatcttgttctccacggtaagtaataaggcttggtatcatctcaataagtataaatgttatgatccctgattcttctagcatttgatatctccatttctgcagtggttcacatatc

SEQ ID NO: 183966 - DNA, 81 bp, Arabidopsis thaliana columbia
ttctatcgcggacgcgtggggaaatatgtaagagtagtaaaattaataaattaaaaaaaaaaatcgtaatagttggatgct

SEQ ID NO: 183967 - DNA, 76 bp, Arabidopsis thaliana columbia
cgggcccccaactattacgaattttttttttaaataaaaaaattgaccacctttacaaattcccccccccgtccgg

SEQ ID NO: 183968 - DNA, 73 bp, Arabidopsis thaliana columbia
cggacgcgtggggaaatatgtaagagtagtaaaattaataaattaaaaaaaaaaatcgtaatagttggatgct

SEQ ID NO: 183969 - DNA, 381 bp, Arabidopsis thaliana
ttctttttttttttttttttttttttttttttttttttaagaagaagcaactgattccttcttatatcaaccaagtcataaaacaaatcatacaaatcagggaaccacagaagaagaaaaaaaactaaagctggagatcatcagacttatagcacaaactcaaacacaaacctttcccaatttaccaacacaaagaatctggttcccaatcctaaactttgaaacaagccattgaaaaaacaatctatgcaaaagacagaaaatctatgaggcagtctctaaataagaaacagattctcccacgcacctagattttaagaaaagaacctctgcatccctgggtcaggagagcccatgctgcagtcagcggttagggaaaga

SEQ ID NO: 183970 - DNA, 392 bp, Arabidopsis thaliana
gagagaaaaaggatataatggacggcaaacattttgtgtgtgtgcaaacattttctcttctaacaatctcataggaagccagtaaaacagtgtctgacatagcacaaatctttctttgtgatcaaactcaacttcttggagttgctactcgtgcttgtatccagacgccttcccgcttctcccaactatataaggctccggcaaagtattctcactatttatctccaaaccgcgataaactcggttaaggaaatactcaggtcctgattttgcagcggtttgtttagtcaatgagttatgatcattgcctcgcaactgcaatgctttctctgcagcttgtaccaatgtcattgtctctcctgtgtcttcttctccattcttagcttgatcat

SEQ ID NO: 183971 - DNA, 90 bp, Arabidopsis thaliana columbia
ggggcccccaactattacgatttttttttttaaataataaaattaactacttttacaaatttccccacccctcccggggcccgggggttc

SEQ ID NO: 183972 - DNA, 329 bp, Arabidopsis thaliana
aacgtatacaaaaggaaacaactctgtctccaagtaatttacacattctcattccaaccaaagaatagtagaatacaaaaaacgaaaagttgacactgcatatacaatagcaacgaacctagttatgtaaggtaagccaaaaaaaagaagagtttgatagaaatttaccttacacaattagttttcatcatcttttagttgtttttttaccggcgtggttcattcatagactttccttcaaacaacttacccaacaatctttcaagatcttcagctgtatactttatgtatttctgaggattcttcccacttttaaccaaaggcccaaa

SEQ ID NO: 183973 - DNA, 276 bp, Arabidopsis thaliana
gtgtacgaaactggttctttcaatagataagggaatatgcaaagaaagaaaagggaaaaagatacaaagatcacttcataacataagggggaagaagtttcattttgggaaatgttcaggggagcagctaatcatagaacgggggcataaatggaatttcccatttccttgccattcctgatataatggaacaaagaaaaaggataacaagaccggtaatacccgagttctcgaccaaatcaaattagccaaattaatcagatttagcagaatcca

SEQ ID NO: 183974 - DNA, 332 bp, Arabidopsis thaliana
ggcctaaaagggggcttaaaaaaatcttatttggaaaaatcccaaaacccaaaaaggccaaaacaaaggggggggcccccaccaaaaaaacaaaacgtttcaaattttgctaaagcttaagcgggccctactaatacggcccacgttgttttaaccattgggggcccccccccaccctggctgcctgggaagttatccctagggggggacccgtggggcccctttcctcctccctccatttttttttgggggggggtggccccacttttgcctaaaatggaggcccactttttaacacgtgccctttttaatgggcccacgtgctttttttc

SEQ ID NO: 183975 - DNA, 220 bp, Arabidopsis thaliana
gggggactaaaaaaccttttggtgttaaaatttgccagacaccagggggaatgtttttaacaaaagcccccgggggctaaaaacccaagaaaaaatggcggggtccaacgttgtttccaattaatgggtcccgacgaggggaatagggggggacttttaaaccgggggttttaccgctaacccaatgccttgggggggatcgggccgggtgtttctgaaa

SEQ ID NO: 183976 - DNA, 316 bp, Arabidopsis thaliana
aaacaaattgtaatttgatttctatactacaataaagaattctacagtttggttaccaatcggctagttttaggaatttactcatttgagtaaaaacaatgggatgcctttatttataaaaatcaatagagattacaaaaggatttaaatgaaaatgcaaagggttggcattttctttcagtatcataaaacatggtttaagttatgtgtcaggggaccaatgttcttcactgtccaaaagtaatcttctaaatcgtaaagccgcctgaaatatttacacccaacaacacaacaattttaaacttggaaggtgaaa

SEQ ID NO: 183977 - DNA, 414 bp, Arabidopsis thaliana
aacataactcatacatgaataacaaaagttataacaacacaaaaccacacccctccctctgtttgtatacccaatgaaagccacaccaaaaaaagaaatgtgaaactaaaaaacagatataaaacttgaaattaaactgttgagttctctgaccccatgagaaacccaaattaatccaaatataccctcctaatcccaatgaaaagaaacaccaacccatgtggtggaccttagaattacacagatgggaaagagaaaaggaaaaagatcaaagtcaggaccatattatgtacatacacatatcatttacctcgagtaaacttaacaagagaccatagtaaaccttgaaccaatcttgaaccctttttgttttttgttgaactacgcgaaggaagatgattgagatggtgagat

SEQ ID NO: 183978 - DNA, 222 bp, Arabidopsis thaliana
ggaaaaaaaaatttggtttctgccaaaggttttggccatggccctttcaaattctatttcctggggttggcccccccccgcttttagtttgcataaaatttaaaatctgacctggacggggaaacccttttgttccaggtaaaagaaatggcccctgacctcggttgatttgggggctgaaatactgttgaagctcattagtcgttggcggggggcttttcg

SEQ ID NO: 183979 - DNA, 438 bp, Arabidopsis thaliana
cggccttcctttttttttttcattttagcatttacatggtcaatcatagtcccagggtacactctctaaaacaaatacttgcgcttacaaccaaaatcctactttgcattccctaacaaatctaattttcatacattttcctgacaccaatttagaagaaactcactattgcatcttctgagcaacctctttgtcagccgagcacattggttcttcttaaatccagagtcctttgggcttcatgaccacagaatcctgagtaacatacagcttttctctcatccctgtggcattggatgatcatgcgaatattgttggatctccatccatttcgccatccgaagtatcagcaagccttgcaatggcagcaatgagtgcctgttcatgttccttgagcattttcttggccttgacgagctcgagtggatcaggatgcgt

SEQ ID NO: 183980 - DNA, 366 bp, Arabidopsis thaliana
ggggagaatctacagatctgattatgacttagtcgaatacttacaggggtgactcgtaacattacgatccgaaacagagatactgagatcacacgaagaagacgattggactttaatcttaaagattttaagaacgggtactttaccagtgactttaacaaaagtattaagcggaatgacgccagccatgacgtcagataaaagctgcgtttcagagagtaaccgatccgccattagcgtcaacgttatattcaacggtaccgttttccgcgccgggattcggttagccggaagaggagcttcaccgatcacttggcctctgtaattcaacaacgccgacgacgaatcgtagctaaacccgatgcg

SEQ ID NO: 183981 - DNA, 422 bp, Arabidopsis thaliana
ttttcgtccgggcggtgatgaagaggaaggaaaggtttctgacagaggggatgaagatgaagaggaagaggcgtcacggaaaagtagacttggacttaatagaaagagtaatgatgatgatgatgaagaaggtccaaggggtggtgatcttgacatggatgatgatgacattgagaagggggatgactgggagcacgaggaaattttcacggatgatgatgaagcagtcggtaatgatcctgaggaacgtgaagaccttctggctcctgaaattcctgctcctccagaaataaagcaggatgaggatgatgaagaaaatgaagaagaggagggaggtttgagcaaatctgtgaaagagttgaagaaactgcttggtaaggctaatggtttggacgaatctgatgaagacgatgatgatgatt

SEQ ID NO: 183982 - DNA, 337 bp, Arabidopsis thaliana
ggccatcaaattcctctttttgcacaatgagaaaaatttcgttatgatgggtcagattacaaagttgcaaactttggatcaaaaacgcttcaagacaaagatccaagggatcatttaatcatcatgatttttttgaagatccaaagcccccaaatcccatcatttttgcaacctcaggatccatcttaggctttttttccaccaccttccctttcttcttctctttctttttctctctacgctgcctttttagttcttcctcttcttcttgctgttttcggatgcgttcgtccagatctgttcccagatcaggaccaaaattcagttatcccaaatc

SEQ ID NO: 183983 - DNA, 197 bp, Arabidopsis thaliana
  unsure (1)..(197): unsure at all n locations
atgcgatnattgacacacaacgaacaagggatcttttattagtaacgttgtcagcccaattcacaaagttggaaaatggtttgtttgttcttggtactggccaaaacagagagggagagagagggttacaaacaatgaagctgattcaattttgccatttgaacaaggattgaagatattcaagagttttgtctttg

SEQ ID NO: 183984 - DNA, 422 bp, Arabidopsis thaliana
  unsure (1)..(422): unsure at all n locations
cattattaatcngaactaatctcgggttaattccggtacggtacaatgttgggtaagtatctcggattcggtgaacaaacagagaaactcagtgaaaatttactaaaaagctttgaacttatttcataaacatcttcacaaatattgaatcatattcttttttcgctgtataataagagttgttatagaaccaaagttgtaaagaaaaaaaaaatctagattctgtaaaatgggaactcacggaaccagataaagaaatttcaccggcggtcttacgtccccggcgggatatatatttcatctcttcctcctttcttccccgtatcgccaacacaagttggatgatttgattccaaaatgtgaggcattggaacaaaaaaattaaaaaagtggagaaaaacctgtgtctatgttcttcttct

SEQ ID NO: 183985 - DNA, 342 bp, Arabidopsis thaliana
gaaaccaattactatacttatatgtgtgtatataacagttaaatcaatctgtcagacacattttcacatctctagagaaagcataacaaatgaatatgtgaaaaattccctatgcaatttgtaccaataatctatcttctctttttcttcatgctgtctctgaagccgcgtggtttacatatattgaatctactttgtatctccttacacagcttcaggaccgtcttgcggtagaatgaattgacgcattggccttggcgacttggtacactcgtggcgtctgagagtgagtgggatcccttcttgctcaaacccattactatcttccaattgtttaggaag

SEQ ID NO: 183986 - DNA, 304 bp, Arabidopsis thaliana
aaaaaaaaaatctgctctctatagcctaataaactaggaattaaaaactaaacaaaatggggtggggggatatatatttcccttgaaaaggtttttttaaatggccaaaagaaaaacaaatttttgcttggggggggctagaccgagcccagaaactgtttttttcaccaaaaacaaatttagctccgaatccaagacgggtccaaaccaaaaagcttatctccacggttttgagcccctgatgtccggggcgggggtgcatgtccagtaatcggaagaacccattcgtttttttccctttccg

SEQ ID NO: 183987 - DNA, 164 bp, Arabidopsis thaliana
acatcaaataattggataaaaaccttgggtcatttgatggaaaacaagattctggtcggaaactacaaaaaggatcgagcgaacaaacatattataaagatttgcaaaaatcaaagtgcggtttttttttggatgtggcctcgctcttttttctctaagaagaa

SEQ ID NO: 183988 - DNA, 368 bp, Arabidopsis thaliana
ggggacaaggatatattaagcttcaaatagatgacccatacaaaatgttttaattgcccaacctaaacacatactgagttgaagtaccatatgttttttcaaataggccacacgagcagcaattttagtcagacataataaactaagacacatgagcgttgcagcaacctgaaagcaaaatgttaaagaaaaggagaggttgcagaataagacctttttaagacaaatgtactttgcaatccaaaggggcaatttcacgtttgtttcatgtcaccgttttttttaagggtctttagtcttttgtaccccttggcaggaccaaagatccagtccatatacacaaaagttgaagagtagtttccggactt

SEQ ID NO: 183989 - DNA, 286 bp, Arabidopsis thaliana
ccccacaaaaccgttttttatttaggatgggaacggcccgtttgaaaaaaactggaacccctagaatcacccataggggggggttaaacccaaaagggtttggggaattcggattggaatctttggggggggaccacccaaaaaagggggcccagttcattttggatcgggtgggggaaaggatttccgcaggaaggggtaaatggggcgtcacccacaaaacaattaacaaacgggttttgggtttttatggggggattggggggctaaagttttacccgttttt

SEQ ID NO: 183990 - DNA, 163 bp, Arabidopsis thaliana
ctggctatgtgtgttaaactttcagcaaagaagaaaattcaaaaaccaccggaccaatcacggaccgaaacaaaaagttaaagtccaaacaggtacaataatatgcttttaaggcaggttatggatatgactaaaaagcacatgatcacaattccaattgggt

SEQ ID NO: 183991 - DNA, 239 bp, Arabidopsis thaliana
atgggtgggggaacggaaacaacatttttttataatgaaaccaaatttccataaatcccaactcccccatgatatttaaagaaaagaggttttggtaattgaaagaaaatttcgccaaaaataatttcccccgttaaacatatttcggggaaaaaaggatgtaagtagaagttttaatttttagttttacgttttaattttaattttaatagggggatattaaagaatttacaaagcgg

SEQ ID NO: 183992 - DNA, 325 bp, Arabidopsis thaliana
caaaaaagaaaaaaaggggacctgcccatttattcatccacgctacatcatgttttaatacctgcctataaaactaataaattttttccattaaaaagaacatagtttattatcgaattagtcaaacataaatgcaaattagttgaaaattaaaaagcctatttacattaaaaatgtccagatgacccatctcaccaaaaagggcaccacccaacatagttttgacagagattctaatggaaaggggcttgattgattagttttggaacctgaactttcacagacaaaccatgttcgacttaatgagaatctcctccgagcaagt

SEQ ID NO: 183993 - DNA, 210 bp, Arabidopsis thaliana
gaagggggccaaacacaactttaaggggaagcagccaaatccaattttgggcaaacgaatatgtatatgggtgatttaccaacaacgatttctatattgacttctttttttttctgggtgaccaaaaaatagaaaaacctcccgtttgcaaggttcaatgtggccaggcatgttctttaacttgggacttggaagaatcttttggggttt

SEQ ID NO: 183994 - DNA, 356 bp, Arabidopsis thaliana
gaaaaacaaaaaggatctgttatattaattgtaactattttaagatacattgcgagataactaaattaacaaaatctcagcgcagaaaaaaaaaagaaaaatacaaattacaatattagtatagtaatacatttcatttaattgatgcaattaaatacataaatatatatactatgggcaaatgattttgctcctctcacttgtaaagccaaactccatgggcgaatatcaaacctcctttgaacgcatcaaaccctaattcttgtttttaatgtctccctccgtttaatcccaaatccttcaaaatggactggatgatggaaacgtatctcacttcctcaggagcccgcttgatc

SEQ ID NO: 183995 - DNA, 152 bp, Arabidopsis thaliana
aacgggggcatttaaatgaatttttcacaataagcaatgcaaacatacacaagtggggcactaaatccttaggatactttgcaaatctaattaagaatctatactcacttgaatcaatcacactatacaggtctataacactaccagacacc

SEQ ID NO: 183996 - DNA, 153 bp, Arabidopsis thaliana
gaaccaagcatatttagaaagactatcacttacaaaaaaaactccgttttgcggctgacgtgttcacggcggcaaccatcatggacaacggtgacctcggtaacaaccaccataacttcctcgggggagctggtaatcgtttatcagccgaat

SEQ ID NO: 183997 - DNA, 220 bp, Arabidopsis thaliana
tccttttttttttttattcacaaaaactttgctcataacatggaagctttggttagaggttcttactttctacctatgaatataacatgttagggtacaggacataaacaggaatctgcttatctactattacatggcatcccaaataaattatgttcatactatgaacgattcttgaatcattgctcgaactgttgatcccacaaaacacccgctccaa

SEQ ID NO: 183998 - DNA, 346 bp, Arabidopsis thaliana
cacaactgctccatgcagcggaaaagaagttactgattcagacataatgtagctcgaccttacaatatataacaatgggaataaatggcactacattgaactgttcataacattttaagtattttctaacaaaaactcaggaggctgaccaaaaatgagttaatgtagtgaagagagcttttctaacaatctgtcaaagtcgtatgtactcgcatctgtttccattattcttttgccaatcccatctgagttcttacattgcagcttttccagctcctttgggcattttctttgatgcagcgtcttcaacgtccttgagctggtagtagtgaggagctaactcaat

SEQ ID NO: 183999 - DNA, 170 bp, Arabidopsis thaliana
gtgcataaaagggcccaaattcgtggggcgaatttacatatgacacgaggaaagaagtggcccaaattcgctggacgaatcaacataacgtactacaaaagtaccctcagatatcatttgtaagttttgcctccaatctctgtttgctataggccctttggattggggcc

SEQ ID NO: 184000 - DNA, 246 bp, Arabidopsis thaliana
gaaggaagaaaaacattttattcatttattaccatgggcctccttcaaaccaaaagacataaacaaaggaaaccttggcaatgtctagaaaagggagcctcacaaataaaagacaatccagggggggttttatgttaaaggctatagacatacaagcaacctttccttgggctttgcagtttcttcctttgggctttaccaaaagaaaaggtgttttacgcagttaagactccaacaacaaaattt

SEQ ID NO: 184001 - DNA, 169 bp, Arabidopsis thaliana
aaaataaaaggaaaaacttaattggggggcttgataaaccatacaagggggaacaacactcaaactcatttcttttggtctcgactgtttcaaacaagcaacataacctatccacataactttatctaccatggtccgtgtaaaacaaaacacattcaaacgaactttc

SEQ ID NO: 184002 - DNA, 282 bp, Arabidopsis thaliana
tttttttttttttttttttgtttttttttttttttttttttttttttttttttttttttttttttttttttttttttaatgggggaaaacttcaataataggaaacaaaccaccttttggtaaacaaggtccctaattttattttgggatttcgtcattccccatttaaaatttgaaaacatgagctcaaaaactggaactcaaatatcacaaactttccaaaacccataaaccacaaacccattgccattgtaagggaacaaaattaggggtttttttttt

SEQ ID NO: 184003 - DNA, 347 bp, Arabidopsis thaliana
  unsure (1)..(347): unsure at all n locations
tcgttcgnccttcttttttttttttttttttttttttttttttttttttttttttttgaaaaatctttcgaatttttaaaatcaaccaaatcttgagagatacattagtgattggggcatgtgggattccaaagattttacctagttttagttggttttcacaggtaatgaattttatgggctagaccattgaacatgggattgaaattttgatacaacacgacacttatacacaaaagaagtacgccttaacgcatcccaggactactccttgagatattgccacgtggccttttgtggccctttggattattggtacagtcatagttaacgccatttccaccaac

SEQ ID NO: 184004 - DNA, 219 bp, Arabidopsis thaliana
cgcactgcgccgacaaaaaaccggggtgaaaccctttcctcctcgcgccgtcatgcaagccaccatcttctctccacgcgccactgtctgcccctgtaaacctatcctccctacccacaatgtcaactctcgccgatccctcaatcatctcctgctccgcccaatccgaaaccgactgatccttcaccacctaacacctgacaccaaataaagctcaac

SEQ ID NO: 184005 - DNA, 220 bp, Arabidopsis thaliana
cccacgcgtccgaaaatcagtgactctacgatcgtttcatatcccaattgagtacaacgacaccaaatccgactcacggactcgtcacctggcgagacccttcccggcggcaaggtgttcaagcaccagagacgtacctaagctggaactcttcagacgcggaaaagaccaccggaagtactaaagaaccgccacttattgaaaaagccgaatgcgaact

SEQ ID NO: 184006 - DNA, 152 bp, Arabidopsis thaliana columbia
accaaaaaagcatttttttttggaaccaacaattacaccagctttgggatggaagttattttcccccacaccaaaaaccaacgggggggggggggttttcccacaattttgggggaaccaccacctctaattttttgggccgcggggggggc

SEQ ID NO: 184007 - DNA, 200 bp, Arabidopsis thaliana
agaaagtacacgctatggcgtttttaaactgtattgataagtttattacaaaacgtctcaagtctctctcaatagggtctgttgatcatatgcatccatacaaggacttagtcaacgagcttaaacaacagacgaatttatcgttctctaaaaccatgaccagaaacacacttttaggttttatgattttacccaggcaa

SEQ ID NO: 184008 - DNA, 247 bp, Arabidopsis thaliana
ataggggcaaaccatttttttaagatttagggaccttactatttatttcaataaagcacaagacagtacaacattttacaagtttattctgcaaaaaaaagctaaatcacacccccggtaagaaaattgagtttatctcaaggaaatgggtcctcgcgaactccctttgtaatggcagcctcctccatgttgctgaaccccaggaaaagagggggtcgatgctcctcgggaaagaactcctttgggg

SEQ ID NO: 184009 - DNA, 218 bp, Arabidopsis thaliana
ccaaataaattagaacttttttttttgagtttttacatgtcaaaacacacaattattgaatattgatacaaacaagtgaaaaaagaagataacattattgatgatacattgcaagagcttcgattgtggacagagtaatcagaatgtaattattttgtttcccctagagcgtttctgaggttagagtacttggtttcgagctcataccatgaatccaa

SEQ ID NO: 184010 - DNA, 341 bp, Arabidopsis thaliana
cttggttgtctcccttttttttgtttatggaaaaagggtcctactccattaaaactaatgccattccaaactcctaaacatgatcaagacgctaaagcccacccttattgcttgtttctttcactacctaaagcaagctggatgctttttctagtttttgcctgccccctttgggctgactccgccgggctcatatcctcctccaccgatttcaacaccaccaccggcgacacctgggccgggtccaccaccaccatatgccgggcctccaccgtcggagccacccgttgggagttcacccttaaatccggttacctgtgggatactctttccaatctcac

SEQ ID NO: 184011 - DNA, 245 bp, Arabidopsis thaliana
aagcaaggaagtcacatgaaactttttccttgggagaaccgggtttgggcaaaaaagcctgggaaaaccaaagggaaaagaaaagaaaaaaacccaacatttcactttattagctagctgaacaacacagatcaacccctaatccttttacaaggacaaatacccaaatctttactcttttaaaaatctggttacttcaccatcattttttcaggctcttgaagggacccctctctttttttttc

SEQ ID NO: 184012 - DNA, 356 bp, Arabidopsis thaliana
gctgccacgaattggcttattatagattgatacgacaaagctcctcctcgcgcacgttagctaaaggaatgactgagactctttttgatgatgttgttgattttttgaacaaagaaagaaactaatcaaaaagactaataggaagaagaagctcaccgtttctatctctcattttaaccactgatcttctgcgattgcgccttgcttctcgtcgattgcttccaatctctgtctggattttctcaattttgtacggagtacgttaattgtgtataaaggagtttagcagatcattgatgtgtacattagggatgatgacgcgaactgttgctttaccattgtcccatgatctgaat

SEQ ID NO: 184013 - DNA, 278 bp, Arabidopsis thaliana
tttgtttttttttttttaatttacgcttcgtgattaaaaattaaccagagactcatttacatgcatatagatcgcaaacacatgcatgtgtctcatatataaatagatatcttataagttattgtaataataaagcaaaggaacattaaagaaaggaagtaattaaaagaagatgagagaaactagcaaatatattaaaagctcaacacccaaccaactcttgttcttccatccattactcttcactggtacggcttttcctcctactgtcccatctt

SEQ ID NO: 184014 - DNA, 294 bp, Arabidopsis thaliana
acgaaccgtgaacgtacctgaacttaaagccgatactaatcagttattagttattacattctcccaaaactacccaatgaactgagttaaagctacaagtctaaggagttttaacgatttgggatcattttgggacttttctcagtgctacgtatttgccaaacacatttttctcctgccacatgtgcgggatgaagaacgatctatacttagctggcgacagctttttgtccaaataagggaacaccgcaatagccttccatgtagataagtcgctgcctcgatactgatacg

SEQ ID NO: 184015 - DNA, 276 bp, Arabidopsis thaliana
gggcccaaggaaatatatcccaaatttttggtaattcatatccaaaaaagggccataataaggaagcttttttttggtctccatggaccaaaagcttttcaaatatacatataaaatggacctataataacttatttttaaaactcaccggaaaaaaaccagaggggccaactcacctagttggaaatagggttgggaccactgggaacctgatgggcattatttccaaactctttccttttaaaagggcggctgcgtcgggtgctaacctttgga

SEQ ID NO: 184016 - DNA, 362 bp, Arabidopsis thaliana
aaagatcttgcggggaccaaaaatacttatcaagtaaccaaaactagtaagctgtcactgcagattttgcacatatatactataagtatgtgggttatgaagacataaaggcaaacaaacaaaagaaagagatcaaaatgttgcatctgtcttattcagtatgacatcttacaagaagaaggatgatgctgtgttgttcaatataagttacatcatattcaatgatttgggaaaggtaacccaaagagtgcggttttgtcgaatgttcttcaagattccgaggatgtatatttgagaatagctgcgtcgatcctctccttggctctagttgcaaatgattctaagagaactccgtttttgta

SEQ ID NO: 184017 - DNA, 380 bp, Arabidopsis thaliana
cgcattgctcttcttcaagcaaaataagcgaaaagttcaaacaagagactgaaacatgacacagattctcatattgatagagaatttgtgtaaaattgagagttgtttgaagcagtaatgttaaaccactttgattcaagaaagaagaaataaaagatcagcgtatgaaaaatgaatatgctgctctcagggactgtgttacctcaaaagactttaaaaactcccaaaatcaaggattttgccttgagagatctaaggtttcaggagagaggagacccatctgttgagtcagattatccatatgcttagttttgtcccatccattttgatcctgctctgtaatattgtccactggtgttgaatccatattatctggaacc

SEQ ID NO: 184018 - DNA, 110 bp, Arabidopsis thaliana
cggacgctagtttcggacgcgtgggtgctgccgctactcgttggatatcttcgtctccggctcgagccgccaagccgagtatgcagcaatgactaaaaagaagaatccta

SEQ ID NO: 184019 - DNA, 227 bp, Arabidopsis thaliana columbia
aaaaaaaacagggggtttataaaaccaaaaaaaattttttttttgaacctgtttttttaaaaaaacaaacggggagcataacccaccccggttgggtttccattttttacaaacctccctttaaaaaaaaaaaaaaaacttaaatcaagattaaaattagaaaatccccccttctgtgcaaaggatagggaaggttgcaaaaaaaacttggtttttaaccttccttt

SEQ ID NO: 184020 - DNA, 261 bp, Arabidopsis thaliana
ggaaacttaaaaacctttaaaaaacacagattttactccatctgtttttacaaaacccttttacacaagagccctttggaaggccaatgaaaaacctctaaccttggcaactttgtccttgtttttacatacactgatttagcctttgactaccagaacgggggaaattttaagattaaattatgagaccttgtaaagccgcacaaactttagctggcttcttctgttttttcatccatggggcagactggaatttcccag

SEQ ID NO: 184021 - DNA, 413 bp, Arabidopsis thaliana
atacttaacagggtttaatgtatatttcttagcggaagacaacaatatttcataggtacataacagctatatggtcaccaaaaccaccaaatgaacaacaagaagcaagaatggacatgtatcaatctgggttcaactctgggcaccgatgttttgagcctggaatcacaccccataactgttatatactagaggctaattacatacatataaacactcatttacctttggattagaaatccaggatcatactttgcttaaagcctagttaagaccagcctgcctctcccacctgagatcagccgagaactcagacaatgcggatctaggatcaccttcagcgatagccaagtagtatagagcagttccatcatcaacttgcatgcttctccttagagattcaattagcctac

SEQ ID NO: 184022 - DNA, 131 bp, Arabidopsis thaliana
gggaaaaaaacccaaaccaatggggtctgttgtttgatgattggaaagaacaactgttttttttacccaatacaatttcattcacatatatgggtgggggggagaacatgaattttgatcattgggggaaa

SEQ ID NO: 184023 - DNA, 100 bp, Arabidopsis thaliana
agattggactttcaacagaactgagtcagctcattttacagaacaacagattttccggcaagattcctcgggagctcggaagattgactaatatagagag

SEQ ID NO: 184024 - DNA, 110 bp, Arabidopsis thaliana
cccattcgtacgaaagacaagggtatcaagattgcggatcatgagcgagagaagctgcatcagcggcttgctgctcataccaactgccctactggagctgacatagcaac

SEQ ID NO: 184025 - DNA, 323 bp, Arabidopsis thaliana
aaaagggggggagagcacctttatgtttcaaggaatttatgaatttggggggagagattcaaaatttttccaaaacagaactaaccaaaaggaacaagaaccgaaacccaataactttggttttcagggaagaaaaaaaaaagaacttaaacaagctttgcattggccaatgcccaagaaaaacaaaaacatgttctccattcttcaatggctggacaaggccaaacagttttctaaaacctggtttttccctcacattacacaacaatttggggaaaactcgagcatgtccggagacatttggcccaaactagcgaaaccaa

SEQ ID NO: 184026 - DNA, 351 bp, Arabidopsis thaliana
tctttttttttttttttttttctttttttttttttttttttttaggagaaagaattttaattcctcaaaattataaacaatctaacgttatccaatagataaaaaaagggactataaaaatccccaactaaacttagagcatcaaatttagattatatcactttacagaaccttttgccagaacgagtcttcccatttgtccacttgccggatgagagatcaatttcttcctatggaacttctcaagaccattggaatcaaaagggggaggacagggaacacgggccagaagcatgaggcctactaactaacgagcctatcataaatttgttataaaccccattaacatct

SEQ ID NO: 184027 - DNA, 333 bp, Arabidopsis thaliana
aggaaaactgtgattatacaaagattgattctaaaacctaaacataactctatctatctcctaaacactctgaaagctataaaaacattacatcttctgattaatgccaagttaatgaatgataagccgtatgcgtcgtgcaagtaattaagagttgcctcgaaggtgtctatgctctaccagaagaaacgtgtccaagattgttcaccggttgaatctgattcactacccaattcgtcatcatagctactatcagggggaagcaacttgattctgtcagcatgctcaactaaccaatcactaaatcctggagaagctgcaagtcctgccatt

SEQ ID NO: 184028 - DNA, 390 bp, Arabidopsis thaliana
gggcttcattttacatttgtttgatgactggatatgtccaagtgaagttacattttgactcatataacttgggtaagttcttaatttctgattgcattcttgtgcagctcacttttttatttgaagactgcactgttgtacaatatactttgggtaatgcacaaagtcttaagagtcttgttgcagaaacctgaagaattttaaagctgtcctgctgtcttcctcactcaaaactttcagctggaactgctcccggtcagtaactcatgatctcccatgatttcttcagttaactcaaagataggtttatcagcactgttcggaaccatagctgcaaacacaactggttccagcccagtttctgggaatgcatcaatgaacatcatcatc

SEQ ID NO: 184029 - DNA, 101 bp, Arabidopsis thaliana
ggttatttggccgtgaccagaacatcccctgtgcacattctatgctgttcaatgtgctgattatcatgaggcagttctactagtatacctccagacatttg

SEQ ID NO: 184030 - DNA, 279 bp, Arabidopsis thaliana
atgagaaaacgcgttgaaaacgatttattgtactaagaaagatccgattaaatcagccattgtccataacagagactatacaatgcacaaatttttcttatttctatcccattcagggcaaccggggcttaactcgttttccactcggggaacaagcattggcaaatatttcttttcgatgtccagatactataacagagtgtttacttagcctcgccacatactgcaataggtccgtttggaaagatgggcaactgtttttcagataatcaaacccat

SEQ ID NO: 184031 - DNA, 308 bp, Arabidopsis thaliana
ggaaacaggaccaaaaattagggggggttacaaaaaccccttgtaaagagttaaagaccgtttttttaaggaacatttttatcgcccctaacgaaggggggggggggaacaaaacaaacccctggggcactagttttcgggaccataataataaaggggaaaatttcctaaaaccccgggaaaaacaaacaaaacccttccctcccggatcaccctttgaattttttcccccaggtttggggattaaccaaaaaaatttccgggaaaggcaagcttttcctttttggggggctaaaaaatttttgggg

SEQ ID NO: 184032 - DNA, 315 bp, Arabidopsis thaliana
catcaaataaaaagtaagaaagttaccggcttcaattgaaagattacaacatgggagacattttccacaaagatatcaaaacttatgtcaatttttcaagaagaattaataattattcattgaaaataaaagacaaaatgaactaagcagagattgggactgtctcaaattgggtagttgttgctgttaggatcctcaagatcatagcctttcagctttgcagctgattcaaccttccccttcaatggctgaagctttctcattcttgcaatttctgcacgccttttagcttcctcagccatattggtaagttcc

SEQ ID NO: 184033 - DNA, 319 bp, Arabidopsis thaliana
ttctctttcgtattttttctagcccatgatattatagagccctccgggtcactcactctcatgacacacagaaaaaagccatcaactctctctctatctgtcacatatccgcaggcgagaacggttgtgactagaaatacaaatacccccacccaaaaaatgaaagaaagagaagaagcgtcagagaactaatagaatgatacaaacgtagatgacgctgggacaaaatcaataaaaatggagagagatggacaaggagcgctagctagggctccattggatcaagaagcatctacatatacaggggagagagaggttt

SEQ ID NO: 184034 - DNA, 238 bp, Arabidopsis thaliana
ggcaattcaattttttggttatgactctctcaagcaccaattgttattacagtgactgagttttattgaaatgttgtttttcggagtgctctcaagctatcataacggtcttgtttagatgtacttagagaggatagattcaacaactccctgagctatggggtgataagtttctcgagcttttgcaaacacctgttttgccagctgcttctcttctgttccaccagattgtgccaga

SEQ ID NO: 184035 - DNA, 346 bp, Arabidopsis thaliana
ggggaaagattgcatttcatttcaaggcccatcatattgaatacaatcttttaaataaacaaaagagttgttttttaaataatcatctgacagttttctttccagttctgggtcgattcaaccttaaatttaaaaccaaatttcgatctttgcaataataattcacatgctaaaaaacaggcaattgcattatcaaaaattcgaaatttgcagagtacacttgttggtctatttaatggatcaggaagaaacctgattatcagagccaatcctgctgttgaagtttcaggggcaagtaaacttccgataagtactggaaaccaaaagagctcaacgcctgaatttt

SEQ ID NO: 184036 - DNA, 139 bp, Arabidopsis thaliana
ggggccgaatgatttatgaacgtggaagataaaagatacgtggcgcgagaatctgaaaaataagcgtgtggatctaaacaatgacaaggagactattgactaaaagatgctgatggtctccttattttagaatggaaca

SEQ ID NO: 184037 - DNA, 313 bp, Arabidopsis thaliana
agaagttttgtccgttaggcaagtactacaagggccatcagctgttccccgctcttgagccaccaatttaatgccttcacaagtaaccctaatttctgatttaggagtttttagagctcccatctttactttcaccttcgagttcaaaacaatcttaatcgccactgcttttattcgccttcagatctactttcagcttacccgtcgagatctaatcgagttcatgcggaggacttccgatcgtacttctaagcgtagtcgtgttcttcttcccgtgagaaaacgccgcgaatcgttcctttaccaatgacta

SEQ ID NO: 184038 - DNA, 107 bp, Arabidopsis thaliana
ggatcataatgccaccatatttactccattgccggttaattttcataagaatctgggggtcataattacagaagaaggtatcaaagatttaaacaataaagctccat

SEQ ID NO: 184039 - DNA, 185 bp, Arabidopsis thaliana
gggggcacaactgtgcctcgatttatgtaacgggtacattagaaattcaaacggttggatcttactatatgtaaaaagaagtcgcatactctaaccagagacatgccagaccaacgcatcacgaggattcttgctttattagtaaagctgcgattggagattaaggcttaatagcatatgtaaaa

SEQ ID NO: 184040 - DNA, 274 bp, Arabidopsis thaliana
ctgttccgggggttttgaacattggtttccgaatttggaaatgggttattaaatctaagagagaccgttcttgcataaggttgtgtcacaagatattttgtagcttttaaaaaacatggacactttttttaattggtttcttgaactggaacagagttgttattgtagcccgtctttgtagtattttcctctgacactttgaagaaagtgtaagacactatcaagttgttgattccgtccattcttggaccagtctcaaactcaggatcaatgt

SEQ ID NO: 184041 - DNA, 327 bp, Arabidopsis thaliana
ccctctattcacgcagccgcaccattgcgtttcttcatcgaggaaaaaaaaaccaaatcaatctcactcttgtagctcactattctccagaaatttctaagatttagctttctctaaagctcgatcgaactatctgggttttggtttaaaaggagatgatgagttcgtatcgcagcttacacggctgcgatgttttcgatttgggtttgtgatggatggtttgaagatttcttgtcctgtggatgtttcgttgccggctaagcttatgggatctgaagggtgtggtggtggagttagggttttcgtcgaataaagcagataacaact

SEQ ID NO: 184042 - DNA, 181 bp, Arabidopsis thaliana
aaaaaaaaaaaaaccaggcattggattttgcccttggttggccaaatttctgaaaaaaccacccatgggataggtaacctaaccccggggggggtcattcctcttgacccattttacgggcctttttcccagctcttggccccggccccagcttaagggtgccccctttttggggcaaccc

SEQ ID NO: 184043 - DNA, 178 bp, Arabidopsis thaliana
cccgaaattatgttttcaaagggtcaaataccgggataacaaaatgggacatttggttttggtcccaggtttgaaaaagggcaaaacttgttccaagaaaaattttgaaacaccttaaggggccaagagacttaaaaattcttacctttgggggggcaatttttctaagcccaacccc

SEQ ID NO: 184044 - DNA, 271 bp, Arabidopsis thaliana
ggcttccctaaaactgaaaactttgcataatcacaatcaaactattccagattacatacacattatgttcagagacatcaatgatccaaacacaacaaagaagaactcatacctaagatccaatttcatatctcccatcattctgcaaaatcatatcatacacctgagaagaagaagaccctccatttctcaatctcccaccattaccacgattttcagtcctccttttacctccatcattacctttttttcttaccctacgaccacgtaa

SEQ ID NO: 184045 - DNA, 291 bp, Arabidopsis thaliana
gaaatgagaggcactgattttattagaaagaaatttaggtccaaaaaccagtgttttacagacaacaaggaaacctaaaactacaaactcaaacaacaaaaatcttcctttaattcagaaaggtcaatgaaaagagtttctctcccaaactaacgggataacttaaaacaccagaaaaggcgacaaatcaagatcacaatctattttgtttgtttgtatattgttcctcaacgcatgaaaggggctaaccaacgcatctctgctccatttccatttgccagatagtatatc

SEQ ID NO: 184046 - DNA, 122 bp, Arabidopsis thaliana
agtacattagacccccatattcaacagttaatggaatacattgaacggttgggggcaagaaacccattccattttgctacggtggcctagtcaacctaaagcgagttttatatgctaaaagg

SEQ ID NO: 184047 - DNA, 348 bp, Arabidopsis thaliana
gatcaaccacaacttttattcaaagagatctatacaaacagaactcaccaatcttatctctttccttgtccaccttgctttccaatctcaagctttaactctccctgaaaatgatgataaacgcaaagaagctcatgaaaatcgcctattactggaagcagacatcatccctcaagaaaaaatgaagttcatttcacagatcaagtattactactagcagccaaacagctgcagaaaagggttgcttcgtgggtcacacggctgataagagccgtttttcatttaccttaagtcacctaagcaacactattgagcaagagctcttgaaaatatctgaagaagagttcg

SEQ ID NO: 184048 - DNA, 205 bp, Arabidopsis thaliana
ttctttttttttttttttttgacatgaagaaggcgtttcaatttggaaacacccaccacacacgctcgacggcaagaggctactttctccacaagctaaacatactttgggggggaaaagaaattaaactagagctaaacaaggttacaaattaactaatattagaacaaacaaagcgcgaaacaaattcaaacttaccaaccct

SEQ ID NO: 184049 - DNA, 58 bp, Arabidopsis thaliana columbia
tcgaattcggacgcgtttttctgacgcgtgggcagacgcgtgggcggacgcgtggtca

SEQ ID NO: 184050 - DNA, 784 bp, Arabidopsis thaliana
  unsure (1)..(784): unsure at all n locations
ggtttcgagtgccgggcgcaccgggagtcctctcccccgtcttgttcgattcctccggggttctcagttctgcattcccctccgggagaagaggactggttcggacgcgttcgttacggtcccgggggttttattaatctgcnnnnggcntttcagttttgtctacccgccgttcgtgagtttctcgatcgattcttcgggtgcgacgtaancanctcttcgagtgttattttttgtttctggatttttcttttctgtgagggttttaatctctgttgtgnnnctnacttgttgccacccctttgagacggtatcctgcacatgatggtctttggttttgggatttccttccccgttccttcatgaggaggtgtgcccctgaagacaacctctgcggagtcaaggaacaactggtggaggcaacaggtgataatgggtaatgatggattgttttaatcactttccgctgctgcgttggccttttaacgtttcgccacnnnncctttggagtggatgaactgccccattatggaattgctttgccttacttcctcttatggcttttggtgcacggggattaaatccatgcggggctcaccagcggtaacgcccttttcttttatacttggcttcagaccggaatgggagactgggcaattgtttcgcgcgtcttggcttatggccaaaatttgggcgtcaaatcttcggtttatttacccccatttggtcccccaactgggccttaaatgggccacattccctctttatttttaacgttttttgg

SEQ ID NO: 184051 - DNA, 1119 bp, Arabidopsis thaliana
  unsure (1)..(1119): unsure at all n locations
ggtgcgtgcggttgggtgctggttggttgcgctggtgggcgttgtgtcggggtggattcggtgtcgggtgggcgtggtgttctcgttgttttgggttggtggtctgtttggtggcgtgtgggtggctttgcggcttccgggtcgtgtgggtggttgtgtgttgcgttgctcttgttgtgtggttgcgtgtgttggtgggtgttggtggtgtgtgggtgtggtctgtcgtggtggtggtgtttgtcggttgtgtggttggttgtggtgtgctggtttgggtgtgtgcttgcgtggtgtcggtgttttggtgtgcgtcggcttcgtggtgtgcgtgcgtgtccgtggttgtggttcgtgctgtggggttgtgtgtgtgtgcgtgggtgtgctggtgtgtcgtgttgtggttctttgtgttgctttcgcggtgtgtggcgggtgcggtcgccgcccgcccgcccccctcaactcactcccgccgccgcgcccctggggtgttgtgtcgtgtctggggtgctggcttgctgctgtgctggcgtgtcgtggttggtcgggtgtttgtgtggcgtggtcgcgtccgtctgtggttgtgttgtggtggtgctgtggtgttcgtgcgtgtgtgggggtgtcgtgtcgggtgttcgtggcgtgttggtctggttcgtgttggtgtgctgtgtgtgtgtgtgttgcgtgtctggtctcggctgtngtgtctcgtgggtggttgctgtgtctggcctgtgcgggtggtgtgttggtctggcgtgctggttctgcttgtgtgtccgtgcgtggtggtggctggncgtgctgtgtgnggctgcgtggttgctgtgctctggtgttggtgtggtgcgttctgtgtggctgtgctcgttgttgtgctggtgctttgtgtgtgtctgtgttgcggtctgctgcncgttttgtcgtcgctgtcnctgtgcgtgcgtctgcgttgttgctcgcgtctgtgttgtgttgtgtgctgngttgtctgtctggcgtctgtctgtgctgtctcgtgtgtgtgttgtgttgctgtgctgctggttgcgtgcctctgtgtggtgtgtgtgtgcgctgcgcgcgtgcngtgtgtgtgtgctgttg

SEQ ID NO: 184052 - DNA, 1003 bp, Arabidopsis thaliana
  unsure (1)..(1003): unsure at all n locations
tattgcgattgtcacaatcatcgaactcgataagtcatatacgtaaaatctggtaggagtatagagtaagtattaatgcgatagagtaactttactatatgttcacagaatgtgtcagtatcttaatagtaaatggatagtaatggtacaatatagatttggaatattgatccaatgaatagaaatccgttctaaactgaaagaaatacaatctatccaatgatttagacctgatctgatacaaaatcaactatgaataccatcaatactctttagaagatatatacagtcgcctcagatcatattagacacatataataaaattaaggaatgttcacaattggcaataagaaaaccaacgcaagtgtcgatcaacagatagtacatatatcccaaatgtgagatgcctgtaggtagtagtagacgataatgacagtaaccgtcattaaatcatccattgttgactatgatataacgatgatagtacacataagataagatttgagtagagcgttacgaacgacagagttcaattgtacagtacgcacaagatgatagcattgctagtgttactgtgtagcgcacacaatcactcagagctcatgtatgtagtacatatagtgtgtaccaactgtcggataagataactaccatagagaagtacagtagcctgtggactgacagagcatatcagtatgataagcacgtcgcaatgtgtagtaggtagcgagatatgtacgtagaacgcatatcataaagatgcacacaagtgagtccatagacagacagcacagaaatgagattnagacagaggaccggcagtgagctagtgcatcatgggaagtatagtaagctgtgatagtaggtgatacaatagacaagagtatttgttaatagccatcatgtaccatacatgatagttaggagagacatgtatctgagagacagtacaatacagtacactgaagtacgctatgcagatagtcgtactgtacagtatgat

SEQ ID NO: 184053 - DNA, 941 bp, Arabidopsis thaliana
cccgggatcctctagagtgcacctgcatatgcaccctgttggtgccatgccttcatgcacatgaccagagcggatcatcagatttggagccatccgtgcattccacgttgtatggccgttgcctcgggtgtcgtgcctcgggtgggcaaggtgaagcagatagggttgacccatgcgatagggtgatatccgtgggaacggaaatagaatcccatcgccagaggatccatcgaacataggcgagtagccataagggacacatataggtccgtgcaggggaacataaaccaaaccctctcaaaaggtacgcgcataacccctaccggggggaaatgggacccggtagtggggccatatttggcccaagggaggaaccggcctcgagactgtctgagcccgacggacaccgaggaagacgttacctggtgccaaagtctttcctaaagcaaattcacgaaaggggccaagggaccaagtattgacaccgaggttgctatggccaattggcggcctacaagggcgccccctttgatggctttgaaaatagccattcgcccccggggtcttcgggggaaccaacccggctccaggggggggcgcccatctgcttattcacccttaagcagaagagggggtgggcctttattgtaaacccttgccctgtaagaaccccctgggagggcccctcaaccgctccagggggccgggggaacataaaaaatctacagcccctgccctaccgaagggggccacaggaagacccgtgaacaccagccgggcaccagtgggggcccatctggccccaatgggagtgcggggctatgacccaatgccatgccagccttaagctagtctgtatcaacgccgggccatgccccgccctggaaattaacaatggatcgagggccccaccgcaggtaagacccccccccccgcccccc

SEQ ID NO: 184054 - DNA, 791 bp, Arabidopsis thaliana
cggtacggggatcctctagagtcgacgctgcagaatgcagcttctgtaccattgcctccatgtcaataaccacagcggatgatcagatggggagccatccgtccatgccacgtgtatgcccgcatgcctgtcgagtcgtccatccgttcggcaagctcaagtcacaggcatggacggtcgagatcagcagctatttttagaacagtcgacagatgccaatctcatccgattcgtaccgatagaggtcgattgcacatatggatataaactcgcccatatcattaggatctaatccctaaacttagcactcacgaccataatgaaccacatacaacctgggtgaaatttgaggccagtcgtgtaagccaatgatctgcgcccaaaagcagcaaaccgccaatctatccccggctgaatcctaggcagcattgcatcagaaaatgacctcttgatggcaaagcttcctaacggcaattccggagtcgaaatgaccaaaattccccgctgcaccatgcataccagcaaagcccccctaaggttgaaaacctacccggtcattgttaaacctaccggatagccaaattggaaaaccacggaggatttggaaaaaaaacaaaggcggaccccgaaaagcttaaccccaaagcagggaacaaaaaaatttcgggatcccgcatccgagggcccaacaaaccctttaaaacactttggggcggtaagggtttcccgtttccccgaaaaggaaaaatttcccattattcaatcaaacccagccaaatcccttgggttac

SEQ ID NO: 184055 - DNA, 779 bp, Arabidopsis thaliana
cgctcgcgatcctctagagtcgacctgcaggcggcagcagcgcttcctcctcttgctgccgggcgccaccggcttccgcggcgccggagggcacaccgtggccggccgcagcaggcacggcgacgccgtcggggtcacgcacgcggcggagtcgatgtccagtaggccgccgcccaggcccaggcgcggcagaagggagctcgcggccgtcggcgtgacgcagcccgtgtcggcggcgtccgggccgtcgcccgccgccgcggtctggaccggccggagcacggccaagtcggagaggtcgagctcgacgcccatcgggtgggtaatctaacactcagatggagaggccccggcccccgaggcgcctgcacaactggctaggtcaaggaagataagatctgcccgcaggggtcgtctcgtcgtcgtgtacgtgaattgtgacgaacagggcagcactaggtcgcaggcggtgtgctcttttgtagcggcggtagtgcaaaggaggagggagggagggaggcaggcaggcaggcgtgatggcgaggggatatggaggtgatgatggtggcaatggggagagagatgagcacgctcgcagttttggctaacttattattttcaggcacgccggctttttgccacagcagttcatatggtcccatcgacttttcaatgcaaaaagcgctgggctccggccccaacgtcgaacctgtcgtcttcacacacatacatctctccttctttctcacctcttcgtctctttgctcctttcttctcct

SEQ ID NO: 184056 - DNA, 743 bp, Arabidopsis thaliana
cggggatcctctagagtcgacctgcaggcggcacagcgcttcctcctcttgctgccgggcgccaccggcttccgcggcgccggagggcacaccgtggccggccgcagcaggcacggcgacgccgtcggggtcacgcacgcggcggagtcgatgtccagtaggccgccgcccaggcccaggcgcggcagaagggagctcgcggccgtcggcgtgacgcagcccgtgtcggcggcgtccgggccgtcgcccgccgccgcggtctggaccggccggagcacggcaagtcggagaggtcgagctcgacgcccatcgggtgggtaatctaacactcagatggagaggccccggcccccgaggcgcctgcacaactggctaggtcaaggaagataagatctgcccgcagggtcgtctcgtcgtcgtgtacgtgaattgtgacgaacagggcagcactaggtcgcaggcggtgtgctcttttgtagcggcggtagtgcaaaggaggagggacggagggaggcaggcaggcaggcgtcatggccacgggatatggaggtgatgatggtggcaatggggacacacatgagcaagcaagcagctaaaggcaacagaattatatgcaggcaggcaggcagctgcaacagcaacacaaaaagccgcatgacattagaggacacaatgaggggaagggcacgggaaagggtggtgcatatcattgttgtgggggggcaatatgagacacacacaca

SEQ ID NO: 184057 - DNA, 697 bp, Arabidopsis thaliana
ccgccgatcctctagagtccacctgcagcctggcagccagaatggactagcgatagattctcaaacagctgatcttgacgaaaaaaaatgacggatcgagacactggacattcggtcgccgtgggaggaaacctgatcatctagatggtagacttttggtggaagacaccgttctttctctctctgaactctgaagactcgtgacctgccgtgcgacgtcctgataccaactgcggcagtgtaccaggtcgacggggagatctgttttgctccgtaaatacacactgatgcgggtgccactggactgccgtggcgtgtatgccagtgcgttcgaagtcttcgttttcatctttctctctttttggctgtttgtaccgcacctttctctcagtttgtaccgcgcctttctctcattttagtgggagtagttcctttccttgcctagacccaagcagacctgtgggccgtggccttggtcgagaccaacagcaaatttcggctgtgtctttggatgtgctaacaaggccatagtggaagaccggcccggaccacggaaaccgtggtgtcctttccttgggaaccagcccatagaggcaccgccgtcgggcgggctttgcttacaccgctgcgcggcccccgccaccgccggcgggccccgggaagacccgagcccgttgcccccgctcaagcagtgtcc

SEQ ID NO: 184058 - DNA, 816 bp, Arabidopsis thaliana
ccccgcgatcctctagagtcgacctgcagctcctcctgcttcggcgccggcgccggcgccgccatctcagggcgttgcgttgcgcgttggctctccgcttcttgttgcttcttctcactccctctccggttttcgtgggaagggaacggaagggagctagcgaaagtactaccgactttggtggtggcgatgcgctatttgaactttgaagcaactggtcgtgtaggcgcaggcacgaggcagcgcaccaacggcaggcagggcactgatgactccgcggtgactcacgcacgcagcggcagcggctgcggctgccactgccacccacgcacatcacatccaacggcaacggcaacggcaacggctcccccgcgggccgcggccgaggccgagcagtaaaatattcgcacggccgagcagagcagagcagaggcatccgcatcccgcgggccgcgcgtcaaaccgggtctcccccgtcgtcgtcgtcgtccgccctccgcgtaggtgccgccgagttagttcccacgcggccacgcctgttgtcctccccacaggtctcatgcatggccgttggcgcggtgcccggggtgagtgcatgcaggtgtcctcctgaacacacacacacacacacttgattggagggatccccccagggggactggaccgcaccccacggtcgaggctccactccagcagggaggaaggaagccgaaagttggccagggaaagggatctccgggaaaccctcccttccctcgggggttcttttctcctccaatcctggggccgcggggattccgtggggggggcaaaagc

SEQ ID NO: 184059 - DNA, 843 bp, Arabidopsis thaliana
actcgcgatcctctagagtccacctgcagctagcatggagtgatggagacgtgtagtggatgctgtacgtaggaagggtaggtgatcgtcgccttcatcgtcgactcgtcgtcgccggccggccgtcgtctcgtgctgcatggcaagcagctgtatgattttgacaccttttgagctattgactttgacgccggccgggcaagcaacatttgtcagcgcagaaacccgagctcttctttttttttttttttgtcaatgacctgtttgacagacagcgcagctagctagctgtatgcacgaaagatttcgaggcctcattttttttctctctatggcaatgcagccgtgcaggtaagttcgctcaagttatgtttacatcagccaatagcgttttggcaagactgctgtaaataaaatattgatgtgatttgttaggcattctgtcctcgataactctcgttcacagaaaattccaatgcacatcatgcgctagttaaatactcatccctagaaaaaaaatcggagatttggacaactggatggagatcattgacttcaaaagtaccaatgcagccataccgcacatccatcggccgccattaaaaacagcccacaccccagatgctggttctgaaggcacaagggggcacccactacttggatgggctacatcccggattataacccacccttgcctttcccacaatgccctggaagcccccggtttggtaccttacgcttgccaagaaaaagcaatccacaaaggcggccaccacccacacattttcttaccgcccagggcacgccatttccccctttgtggccttgtttgaataaccgccc

SEQ ID NO: 184060 - DNA, 720 bp, Arabidopsis thaliana
atgacacattttgctaattctctaccccattgctctgatgtcatgtatgaaaggctgatgatgcacatgcattgctaggtaccctaacatcacgcaaggaccattcagcaccacgtaagaaactaattaatatgctacctgacaagggggcacgagtgttagaatcagcatacatgagtctggacaggcatccgtgtcctgcatgcacgttgcataataccattgaccgcctattgctaagcttgtgcaattccaagacacttgttggtaacaaagagttgggccatcggggggacaatacgcatcatgtgaaaatttatgtacccatgtttcctgataatttaaaattcggagtactcaatatctagaaggcctgttgtaaactgacagagtgatatagaccagaagagtttgtgctgtgaggtctttcacgtttatgacagaataggcatgccatatatcatatagtggtagaagtcacaatcataggatattcagaacctaatatcttgtttctgtgatatctaacagttacggtctgagtgcatctgaataaccgaaccgttaaactcccttgtcttcaggaaaaaggatgctggacccatatggtcagcaggtaactgcggtgtagatgaaaacgggagcctggacccggatttcattggtgtttcatttccgcgcaatgaccggaaaaagtctttggtttcaaagcttgttctg

SEQ ID NO: 184061 - DNA, 751 bp, Arabidopsis thaliana
gcggtctctagagtcgacctgcagctagcatggagtgatggagacgtgtagtggatgctgtacgtggaagggtaggtgatcgtcgccgtcatcgtcgactcgtcgtcgccggccggccgtcgtctcgtaatgcatggcaagcagctgtatgattttgacaccttttgagctattgactttgacgccggccgggcaagcaacatttgtcagcgcagaaacccgagctcttctttttttttttttttgtcaatgacctgtttgacagacagcgcactagctagctgtatgcacgaaagatttcgaggcctcattttgttttctctctatggcaatgcagccgtgcaggtaagttcgctcaagttatgtttacatcagccaatagcgttttggcaagactgctgtcaataaaatattgatgtgatttgttaggcattctgtcctcgataactctcgttcacagaaaattccaatccacatcatgcgctagttaaatactcatccgtagaaaaaaaatcggagatttggagaactggatggagatcattgacttcaaaagtaccaatgcagccatacgcaacatccatcgggcgccattaaaaaaagcacacacacagatgctggctctgaaggcacaaggagcaccactacttgatgtctagatccggatatcaccaccatccattccacatgcctgtagccgtgttgtactacgctgccaaaaaatcaaaagcgacaccacattctacccagc

SEQ ID NO: 184062 - DNA, 731 bp, Arabidopsis thaliana
tcggctgcagctacatttcaaagacacacgttcctaattctctatcgcattgtactgcgttcatgtttgaaagggcataaccacaccgtaactgatatgtacataaccccgcacaatccacattcctaatcacctacgtccattattaagttgttacctgacataggggcacgagtgttagaatcagcatccatcactcttgacatggtgccgtgtcctgtatgcacgttgcataataccattgaccgtttattcagcgcaatgctcaattccaagacacttgttggtaacaaagcgttgagccaccggttgtcccagacacagtctgaaatcattccgctcttcatcgttccagatgattgaattgccgtagtactcaatatctagaaggcctgttgtaaactgacagagtgatatagaccagaagagtttgtgctgtgaggtctttcacgtttatgacagaataggcatgccatatatcatatagtggtagaagtcacaatcataggatattcagaacctaatatcttgatactgtgatatctaacagttacggtctaagtgcatccgaataaccggaccgttaaactcacttgtcttcaggaataagatcctcgaccatctcgtcgtcagctacctgcggtgaagctaaaaaggtaagcatgaccacagatatcattctgattccatctccgcgcaatgaccgtaacaagttctctgctaacaaggct

SEQ ID NO: 184063 - DNA, 133 bp, Arabidopsis thaliana
aaaaacgggccaaaattatgtacaaaaaaccaaccgaaaattaatacacttcaaaaccacacaaggggggttttataacagaaaacattacacgggactcggttttagttttattgccacataccaaaaggac

SEQ ID NO: 184064 - DNA, 306 bp, Arabidopsis thaliana
cgactcagcgcaaagcttctccaaagattcccccagaaaccatccaacttcctcccatttccacctcatcctcccgctgaagctgtactcttaagctgaagcatcgtcgtcctttcttccttgtctttgtaataattgtactctttctaataaacaatccacacggcacaatgcagcgcgcaatgagctcccgcgtgcgagcttcggctctgaacgcggctaccaagtaccgcaccggtgccggtcttggacagcaggttccgctttgctcacaaggagctcaaggtcggtgttgagggccgcgct

SEQ ID NO: 184065 - DNA, 356 bp, Arabidopsis thaliana
aagagaatccgacaggttttattaatatatgaacaatttgctaaagtagcagtttacaagccaactcacagcacatattttcccatgtttttatgcaataaaatctagaataaaaagcgaaatacagttagctaaatcgatttcctcactagctcaagaagagagaaaacacaacaacgacgaaaacaatgagtaacaatatcctcaagtgatggtcttgatgtccttgtcgacccgtgtgccgctggtaactatgcatatgcgagtgtcctccatgaaacggattcgagaaaccgtgagggaagccgccagaagcagcagctccatacatggctgcatcagggaaaccatggaaa

SEQ ID NO: 184066 - DNA, 304 bp, Arabidopsis thaliana
cacatataattttttattttcttcttcacagaaggaaaaaaagatgaattttgttacaccatgaatgaaagtaaatggaagctgcacattaatacactggataagttggcactgttcttgaaactccccaccttaaagcgggatggtaagattaaaaagccttactcttttctctctgtgacaacatactttatgtacttattgacaaaaaaatttcgtaaaatccaattcgttttcgtcaacctcatgcactcttttcttgtgtttcttcttcttcttcttcatcaccattttattttactat

SEQ ID NO: 184067 - DNA, 223 bp, Arabidopsis thaliana columbia
cggggaaaaaaatttttttttaatcccccaacccaaagggggggccaacccggggccccccctaacaagaaatcccgggggggggggggggcctattcaaacccccttaaaaattcccaaggcggtttcaaaggggaagaagggcccccaaaaaaaaaaaaaaaaaagggggggccccccggaaacaaaaactaggggcccccggggccgccccgggggcccc

SEQ ID NO: 184068 - DNA, 203 bp, Arabidopsis thaliana
aaaaaaaaaaaaattggaatttcccccgaaattgggccccattttataagagtctgaattttggggtaaaagccccaaaaaaaaaaacttggaattttttagagcgaaaaacaaagagtttgaaatgataagagtttgggaccaaagaacaaaagattgaggggagaagacaagactttcctcgtttaaaaaccaaacccccc

SEQ ID NO: 184069 - DNA, 138 bp, Arabidopsis thaliana
ggaaaaaaccaattccatattaatattaacggtccagtcttccccggttgggtttaaaaccatgggggggatcctctatagaaaggggtgtttattatagggggggtgaagctcatgaaaaaccttttcctcaagctg

SEQ ID NO: 184070 - DNA, 237 bp, Arabidopsis thaliana
ctaaaaaaggttttgatattccataggtaataaaagggaccctcattgggatatgaattttatcaggaacccacacctgaggaaggcgcccatattactttgggacatggcctgcttaaccaaatcatcccgccattttttttgccgattttattatttggatgattcaagagaatccaaaaaggtggcaaataagatttcatatcctgccgtctgtcggccattttttttgggttg

SEQ ID NO: 184071 - DNA, 289 bp, Arabidopsis thaliana
tttccgcccttttttttttttttttaaggcaaaggctttaaaagataattgtgagaagtatatgataacccaaaggtttagcaatctcgagagttaaagaaagaaaccattatacaatcctcttaaaacgaacaacaaagttgcttactacaaaatattaaaaagcagattgattcataggtaaaacggtgcgactttagatttactcttcgccattaccgtctgcatcaccgcctcctgaggcttttttggaggcagacttctcgttccttctctttactcttccctt

SEQ ID NO: 184072 - DNA, 298 bp, Arabidopsis thaliana
agggaaaagatcgttcttttcaatcaaaagggttacaaattggctgaattcgaaatagagaaaaccccgaccgaccttttttcccattacaaagggtaaaaccgcttggggccaacaaataagcccccaagagccacccagacttgtgggggggtcaaataaataaaataaaccaaagggttaagatgaccaccagacccccagaaccaaccaattgcagaatcccgtaaatcagatttggtgggagagttttggcccaatcatgtaacataatttacgaggttgacctttttcattg

SEQ ID NO: 184073 - DNA, 321 bp, Arabidopsis thaliana
aaagtcttagcatatagttgactaaaaagtcaaaacaaagtttagagaacaagttgtttaaagagacgtgagagatacaatcattacatgttggttgacacgagtcagttctgagatcaagctaaaacgtgctaccaaaaacacacaaaaaaataactagattgatacaagtagacactgagattcaagaagcttacgaatctttcaaagcctgtgtatgaacacttgaggagcttcttccttctctttagcatcttggtaagtgtggcttgatgcaatggccaagagttctccagtgtggtcaaatgctaaagacgcgat

SEQ ID NO: 184074 - DNA, 289 bp, Arabidopsis thaliana
cttaaaaaaacagagctcactcaaattacataaaaattgtagaagcagagattatcaagaacatgatctcataagctcttctaagtattcagcacctaaatcctcaagaaccacaagtgttgtattactttcttgcgtcataacaacactttgttttctacttctggacgacaaagaagaagaagacgaagaagatgaataggaggaggaggaagaaggagaagaatgtcaacgtcgaagaagaagaagatttcttctttcctctaggacggtttttcatggagtgttt

SEQ ID NO: 184075 - DNA, 274 bp, Arabidopsis thaliana
caaaccaaaaggttaaacctttggagggattataggtgacttacatacaacgacttaatacgaggaaatacaggggttataatgatccagtttattatgaaacatgaacaaatgcttgtaccaaaaactctaaatcttttgttttttccaatgcgataagttcaaaagcagctctgttgagggataatcagtgtttccggttgggcgtggaccgttttaaaagacatgaccaaaaggggggttccaaaccggaaagacaactttttggctaggc

SEQ ID NO: 184076 - DNA, 178 bp, Arabidopsis thaliana
aggaaatcaacattattttttgctcactttataacatcaaattacaaccaaccatctattccgcaataatgatcttttaaactcaaaaacttgtgcatttgataaagaagaaaaaggctatttgtaattaacggtacataatcgagctggtgcatcattctctcaagcaaaaaacatg

SEQ ID NO: 184077 - DNA, 551 bp, Arabidopsis thaliana
  unsure (1)..(551): unsure at all n locations
ccccccctcatcccaaccgcgccccaaccccaccaaatctcacccccccccccccccccccccccgcccccccccgcccccgccccctttaagcccccgcggggtgtctnnnnnnnncnnccgcgctcactgaggacccncccgggttngggnnnacnnccgcccgagaggcccccccctctgccttttccggtgggggggcctataccccccccccccgccccccccccccctgtcctcccccccccgcgccccccccccccatcccctcccccccctcccaccaatacccccccccccccccccccctgtcccccgccagcgctctcgcgccccccccctcgcggggggcccccctcctcgcccccctcccccccccaaaaccctctctccccgtgccccccccacccccgttatttccccccccacccccccccccaccccactcatccctcccatcccaccccatcacccgccaccaacacccacgcgccccaccccctagccaactcttttccgccgaatgcctcgccccaccccccccccccccc

SEQ ID NO: 184078 - DNA, 638 bp, Arabidopsis thaliana columbia
  unsure (1)..(638): unsure at all n locations
tcccccaccccacccccgcccccacccccccccccccacccgtcccccccctccccccccccccccgccaccctcacacacacgtaccccctaatctcccccgccccccccccccgcccccccccattttccgccacccccccccacccccaccccccccacgcgcccccagacacgcccacccccccccaccacttttctcccccccgcgccgcncgctgccgcccccccccataatcacccctccgccccccaccaccccccgccccccccccccaccccccccccacacccctcacccccacaccccccccccccccccccccccacccacccgacccaccccgccccacccccgcaccacccccccccccacccgccccccccccccccccccccccacccccccccccccccctcctcacgggggttccccccccccccccccccccccccccacccaaaaaaccccgcccccccccccccccccaaccccccgcacccacaacccccccctaccccccccccccccccccccacccccccaccccccccaccccccatccgccccccccccccggccccccctcccgcaccccaccccccaccccccccccccccccctccctcccaccccc

SEQ ID NO: 184079 - DNA, 600 bp, Arabidopsis thaliana
cggggcggaaggaaacgaagaaaagacacaccccggcccgccttcaaaaaaagggaggaggggggccgaaacagaagaaggaaggcgcaaccaacagaaacgaaggaaagagagacggcaagacggggccaaaagggaggccacccaagaacagacccaaaggcgccaagggcggccccaggggaggggccccccccccccgggggggcgcacccacacaagagagggcaaagaacacacagagagaaggccccccgccgaaagcaagggaggggccacacaaagcaaagacaccaccacggcggaagaaaaacacaagcgagcgcaaacgcaagaagccaggggggccaccccacccagggggcgaagccacccacgacagggacccacagtgggggaacacggagaagacaagaaaacacaagagccgcccacaacccccagaaaacagcaccaggcaaagaggaggaggcaccacgaaacaaacagccaagcacaaggacacgggaagaaccgcaacggaaaagcaagaacagcggagaaggcggagaagaaaaataaaggcgacaaaggagaccccacccccaaccaacagaaaac

SEQ ID NO: 184080 - DNA, 157 bp, Arabidopsis thaliana
  unsure (1)..(157): unsure at all n locations
gggggtttanggggggagaacgcggcgcgtcttattttattttaattatccccccctctattttgggggggaggccccatataaataaggttgcgaagaatatgtcacatcacaggtgagctgggcgtgccacataaagtgccccccactactgtat

SEQ ID NO: 184081 - DNA, 534 bp, Arabidopsis thaliana
ccgccacggcgaggaggaacgagaaaagagaacgccccgcgccacaattaaggaaaaaaaagagggaggagccgcccaccaccaaagaaacaatcccacccaccgaaggcgacaggacggggagagcaagcgagcgcgaccgccaggagagacgccccaccaccgcaatcaccaaagaggcccacggaaggaccaggcggtgaggcagccccccccccccgcgcgggagcaacacaccgcgactagtgcgaggagaagaaccaaacaaaaaaaccccacgccagaggagacaaaccggggggcgagcgataacagacacacacaggcgcggcgacggagagagcgcaagcgcccacgaggaccgccaaccgacagaaccgctcaggggagaacgcacagccacccccccggcgggaagacccatcacagacgagacacacacctaggcagaaaatccgatggcacccagcacccgccacagagcgccaccccacccccccccccgagaacgcaccccccacgcatacaaagcga

SEQ ID NO: 184082 - DNA, 424 bp, Arabidopsis thaliana
attaattaacctatctaattattttcttctttcaaccataattactcttcaatttatctatcccctttctctccccgggggccacaccctcccccaaaatttctattactatctatcttatacccatcttccccaacctttcttatacttaattcccttctctcctactccccacttctttttcttgtattacccctctttttttctctatcttatcattattaaaattataatccacccattttccacctcttatataccatacaatacctcacaaatacaatgtggttaatcaaaccctccctccaccacttcctacctttcattcatcacatcctcattaatattctatctataactcttataaccttaatcttttactttatatttttatttatatactctcacactccatatactactt

SEQ ID NO: 184083 - DNA, 704 bp, Arabidopsis thaliana columbia
  unsure (1)..(704): unsure at all n locations
cacacacacaccccccccccacccccacccacccccacccaaccccacccccccccacccaccacaccacccaaacaaacacccacaaaatccaccgcaccaccccccccaaaccccccaaacttccccacccccacacacacacaccacacccaaaccccacaacacccacaccaccccccttttcccaacaccccggccccgctccacccccactcccacactactcaaacccccaccaccctccaccacaccccaccccaccccaacccccaccacacccccacgaaccacaaccaaacaccacaccacccaccacccacccaccaaccccacaccccatccaacaaccccccacaccaaccccccacacccaccccacacccacacaccaaaccacacacccaccccaccacccacaccacccccacacccaccacccccccacccacacaacccacaactcagggtgtctgttcaccccaccccnaccacccccccaccccccaaaccccaacaaaacaaaccccccctcccaccaccacccacaccaaacaccacctcaacacaaccaccacccaccaaaccccacccccccccccccaccaccccccccaccacaataccaaccacccccccccccaccccaaccaaacaatcacaacccccacacccccccccccacaaacccaaacaacaaaaaa

SEQ ID NO: 184084 - DNA, 231 bp, Arabidopsis thaliana
tacctataaccatcctctttacacatctatcatacttccagctacatatctcttcatcatccaccaaactcctatctacattcaacaacgatcaccattattaatacaatatccaccattttaattatcaacgggggttcaccaccaacaccaaaccatattataatatctcaatattatccaaatctcatacatatctcccaatctacctctctcactctcaccgctccc

SEQ ID NO: 184085 - DNA, 418 bp, Arabidopsis thaliana
tatacgtcactctgcccctcacttcatttttcatcttcactccctcttccttctttccctcttcattcctcccctatttcttccctttctctccattttctcccctccggggtgctcctattccttttcccataaacctccccttttatctttctttactctctccactccttccctatttccttttctttcaccccaccatcctttcctccctccttcccaccccactcctcttcctttcctcccccatctacccctctcccactctctctctttcattatcctcacattttatcactaatcccccaacttcttctctaagatctccttctatactcacatatttatcgtggttgttttccaccactttcctcctacactacgctcttaccttcttcctttcactaaaaaacccctt

SEQ ID NO: 184086 - DNA, 310 bp, Arabidopsis thaliana
  unsure (1)..(310): unsure at all n locations
aaaaaaaaaaagaaccgcgccagcctaaagaaagggggggaggcgggccccccaaacacaaaggagaaacaacgacggagaccaagcaggaaagggggcagggcgaggaccgaaagaaggcccgcaccagangacacaaaggcccccgagccgccaggagggggagcgccgaccacccccggcgagggacaaacaaccagcgcgaagggaagaccaaaaggagcaaagagcgcgcggaacaaacaggggcggcgggcacaaaacaaacagagcggcgagcgggaacacccgcacccagagagaccagcaa

SEQ ID NO: 184087 - DNA, 558 bp, Arabidopsis thaliana
  unsure (1)..(558): unsure at all n locations
cccccnnnntttnnnnngnnnaaccacccacggnggggaagatagtatttatccccgcggcttttaaaaaactgggggtgtgggccgcgagtccatgtgatgttccgtcctcatgtaggaggcaatgctatataaaatgagtcagatattatcgcccccccatatatttatattgtgccctttaggcacagtgtagtgggtgcccccaccccggggaggttaacccacacggggtagagagttgaacagaatagaggaaccggcgcaccctcttgagttggggggcggggattttcacgaaggggcggcgcagattgggttctcacaaccgtagcgggacaacagcatgggggcgtgttgcagtcgcgcgcgccgcgggagtgtgcccgtacgacgggagcccacgcgatcagatggcacgatgtggtcaagagtatgtcacgttcaccaccccacccgacaccccgtatatatttatcgggactgtagaacacacagtggccgcggagcaacatttcgtccgtgaggcagtctggctcggattcatcgcacgcatgc

SEQ ID NO: 184088 - DNA, 510 bp, Arabidopsis thaliana
ccacgggggaggagggagaaagagaacccgccccgcacgaaagagggggggagagccccaccacccacggagaccgaccacaagagagacgacgcacgagacgacgcggcacggcaagcgcccccaaaagaaacagaggccacgggggcaagggggggggggcgccccccgcggggggggcacccaggggggaagaggcacaaaaaagaagcaacccgcgagagggagggaggacggaaaaagaagagagagccggaggggaggggccccacgaggagaaccaacagggcgagggaagaagaaaccacacggcggagacacacggaacgagggcccgcaaggagcggagtaagagaccagagcaacccaggaccacagcccacaccgcccaggagaaagaggccacagagagagcgagagcaggcggaggaaaaagcgccagcgagccaagggcaaaacaacgggaacgggccaaaaagaaggggaaggagcgggcaaaacaaagaagag

SEQ ID NO: 184089 - DNA, 618 bp, Arabidopsis thaliana
  unsure (1)..(618): unsure at all n locations
aaaagaccccgcccccccgcgtttacataatgcggggggccccccccacgccgaccggcgccccccccgcgagagggtgcgccacgacgcagaaggcggggcccaggaggacgccccacgcccgcgcgccagatgagcccagggcgcccccgcggggggaggcgcccgcccccggccggggcgcccccacccggtgggtgtgatagaaagccagatagaggccggcacaaccggacgaagggcgggggggacacagccgcagaggggcgcgcggggcgggcgcggccgcgcgagcgacgacggaggagggcgcgagggcgagcggagcacaccccgcccgggcgagatgcgcgaccgaggccgagagcgccgccgtggaggcgaggcggggagcacccgacggcgccgcgagcggcccaccccagccaccccacgcgaggactaaccgcggcgacccgcgatagcaggccgggccgcgcagactgcagaccagcagcgagccgaagggcggtgactccgcgccagcgcacagagacagagcgcggcgaggacgggtggnacgcgcgtgaagggagcgcgccggggggggctcccgcgcccgcccgacgccccgcgcgg

SEQ ID NO: 184090 - DNA, 425 bp, Arabidopsis thaliana
gtcttcatgcgatatcacatgttaacccccccactatttgtctatttgccacttggatacgggtggtggtgcccccccccctgggttttaccacccatgtgggggttttattatccataatgtgatcgccgcgcacataagagggggggaggcacaacacaggagcaccatgtttttaataatccaaggggccccgaagtgctcgtggtgccccgctcacccgggctgttaccccttttctagttcacacacttgttgtcaatatatgcccagtcagaccctttccccccccccccccatttatatgccagcttaattaggaaccgcgtctattgtccatgattacagacgtttgtggcataatcttgacgttcgggatatacaaataatatattttccccctttgccccccccccacccctcac

SEQ ID NO: 184091 - DNA, 491 bp, Arabidopsis thaliana
cggagcggaggaaagaaacacccccccgaattaaaaaaagggggacggggcccacgccagaggaccccccacggaaagaaggaagaaaagacagagggacaaagagacccccaacgaagaacagagccccgagggacgcgggggggccgcaccccgcgggcgcccccggaggggaggaacacacgagaacaccggcgaacggggggaggggggggcagaaaaaaggagggagaagagggaagaccaagaggggccgaccaggacgaggggacgccccccccgccgcgggggcaccccggcgggaccacgaggaggacacggggccccggagaaaagaggaagccccaacacgagaaagaacgcccaagaaggcaagggcggcgcaccaaaagaggaaaccggaggaaagagaacggagcagagaagagagggcgcacaaggcggaaaagaagagagggcggcaggggagaacgcccacgcgccgccgagcg

SEQ ID NO: 184092 - DNA, 543 bp, Arabidopsis thaliana
aaaacatcccccccgcccttttattgctttgggtgtcgggcccaacgcctcttcttcttccccccctttgtgcgttgtttctgcctacttgcgcgtccctgtgggtccgccctctgattcgctctggtgcccgttgtgccctggtggtggggccccccccccgcgcctttgtcccgcctcttgttgtggtttgtttccatctttgggatacccccgcccgcccgcctctgccgccggggtgtaatcttccgcctgcgcgcgtcgtgtgtcgcccccgcccgtggagcgctcctgtgacgccgttggcccaccctccccccgcccgtgtgccgcggtctctgtcccccccgtgttgccctgtggcacttctctcccgtgtcccccccccctcccccgcttttatgccccgctcgatcgccctgcgcgcgcccgctttatctgccttccctctcctcttcattccgcgcggccccgctttgtcttcccccatctgcgatgacgttttttgcgccccgtttggacgcccccaccccgccccccccg

SEQ ID NO: 184093 - DNA, 510 bp, Arabidopsis thaliana
aaaaaaaaccccccactttttaaaacaagggggaaggccccccccaaataacacaccaaaaagcaacaaaaaacagaccaccggaccaaaaacccccccccaaaatccaatggtccttttttcactcttttttccccaacacccttaattataaccccacaacttttgtttaaaaaatattatatcacgaaccaatttttattacgcgtgggatactatatatataatttcatacattaaacaattttaccacaattattattaatgatcattcaccactttatatatcacacctacattaccctccacatctctttacttattaaccttatatcccttatcccaccccccacccccttttttttaccttctttatattctttcttacctatttattttctttataatctattatcattcttcggcattttaaattatttatatcactattcacccaaaactatattatttcccatttatatcccccctcactaaacccccacaaccttt

SEQ ID NO: 184094 - DNA, 715 bp, Arabidopsis thaliana
  unsure (1)..(715): unsure at all n locations
gaggaaagaaaagagnnggggggggctaaagaggggaaaccacccaccccnnnnaatttaagaagagaggagacacaccgacggcaaaaaagaggaagaagacaagccccccccgcggcgcaaaaaaagaagggggaggaggcgcgcccgccagcgccaggacgagccgcgcccaagaggacggcgagcgaaagagaagcgacggaggacccaggacgagcgcccccaagccaggcgaccaaaggggccccgagaggcacgaggaggagggggaccccaacccgagggggggggcgcccaccccggggaggcaggaagccaaaacacaaaaaaacgcacgaacgagacaggggggggacgcgaaacgacacacgagaagccgcgcgagcgggagccagcacgacaagatggacagagcgcagagcaagaggcgggacgaaaacaccccgccgcagagagaacaccacacagacgaggaagcgccaccaggcgggacaacacacagagggaccaggaaagcgcggagagccgccgcgcaacaacccaccagaaagagaacaacggcagagaacggaggaagcacggggcgaagagaaacaccgcccgcgagcgagcagccgcagcaaggccgaggggagccagaaggaaagcggcgaaaaagggagaaaaaggaaaaaagagaggccccaggggaggccgaacggccgagacaaca

SEQ ID NO: 184095 - DNA, 333 bp, Arabidopsis thaliana
ctaccattagagcggtagaacgaccggacaggcgaatgtctcgtccgttaattatcgatagccagggtgaagtagacgatgtatagatagttatatcggcttggtacgaacgcgtacgcacgggtggcaatcgagtgtggaaaggatgcgtactaacccccgagagttcttgcgccgggagaggggtgataaacgcgatgctgtgaattttgttggtttggggtagctgagtttgtggtgttataacgggcggagctgcacggagacggtcatagtagagtgtgggtggacagcgagggctatctggatgcacgtagctatatgagaagaact

SEQ ID NO: 184096 - DNA, 560 bp, Arabidopsis thaliana
  unsure (1)..(560): unsure at all n locations
ccgccgcaggaaagaagagaagacaccccccccccccctctaccagcggagaacgaggggcggcgccaccaccccacgagccagcacccccccacgcaaaccgggcgcagaaccccgcgacgcaccagcaagggncccaacagaaccccccccccacccgccgccaggggccccgggggcccccggggcgggggccccccccccgccggggcgccccccccagagagggagggaggccccccgcagccccccgcccacccagccggcccgcccggcgcgccccgccccgcccccgccgcggccgcccgccgcccccaggaccgaaccaagcgcgcgcgggaggcccacggaaccccccgcgcggcacgccccaatcgcaaggggcacgccagtgcggaccccgcatgggccaccaggcaccgccccagagccccaccccaccgcccccccgatgaccacccccgcgccccaaggacaagcgcgccgcggctccaagggcgcgccgccgaagcgcggaccggtccggtccccgacgccaccccaaagaaacccgcggagaa

SEQ ID NO: 184097 - DNA, 486 bp, Arabidopsis thaliana
aaccggggcataaaaaatagtctaccccgccactttttatatattgtatgccccgctcgcataggagtccaaacacagagtgagacagtgagcatcgtataaaaatccgcacacagatgtaaattggatatgagcagtgggtggtgccgccccaccggaggttaacaccacaggggtgattaggtacaatagaaaatagacaagcgtcgaagagaacggagcggagtaataatcctcgttcgcccagtagcacgcatctcccgtttgtcaaacacgagatcggttggtcacatccacaccgggagaagcccgataagtataacaccatatatggcggggggtaccagatatagatattcacactccaacaccactatgactacacgcgagttagtaggccgcagcgacaaaaataatacgagacatcaaatagcaattaagcgccagtgagagttatctaccgggaatacggggataaaagaaata

SEQ ID NO: 184098 - DNA, 671 bp, Arabidopsis thaliana columbia
  unsure (1)..(671): unsure at all n locations
tttcttttctctcttttttctctttcctttctcctctctctccctctctctcttctctcttctctcctcccctcttcccccttctttttncttttcctcccttcttctcctctcctcctcttcttccctttccctcctccccttccatctttttcttcctccgtctctctctcttctcctttctcttttggtcctccctttttttttctcctctcgggcgtctcttttctcctccctaaaacacctcctctctccttcctctcttttcttctcccccatctcttctctcctacttctctttctcctttcctcttccttctcttctctcccctcctctcttcttctcctccgtttcttctttcttctatcctccctctttcctcctttcttctccctttctccctcccccctttctcttttctcctttccttctttttttcttccggggttgtttcctcccctttcctcccctttctctttaaaaaaaaaaaaatctctctntcttctcttcctttctctcttctttcctgtcttctttccttctcttttttttcttctcccctctctctttttcctttttcttcctttctctcttttcccctccccctcttccttctttttctttttcctttttcctcctcccctctctcctctcttttctttctttcttt

SEQ ID NO: 184099 - DNA, 264 bp, Arabidopsis thaliana
ctcattattaacacatcccaacactatggggggggggggctctctccacctctacacacatccctacctctcccccaaaaaaaatcccgtatattacccctctacactccatttttgctaatataaaactctccatattatataagccacaccccctcattctttttatccctcatgtgacattatatactccccccgccactctttccgatttgttatcaattttgtgccactccgagatagttccattatataatatccttt

SEQ ID NO: 184100 - DNA, 626 bp, Arabidopsis thaliana
  unsure (1)..(626): unsure at all n locations
tgcccccataatatgaaaggaggcggggaagaaggggnngggggggctaaatgtgaaaacaaacccccnnnnttttaggaaaaaggaaacaggacgaggaagaaaagaacgacaacacaaccccacccgccttaataatatttagttttacggcccctagtaataagtgtgcgcgacccaaatgcggacgcatgctagtaaagtggagggaaaacggatcccccccctattagtcactatgtcgcaagtgagacacgtggggatcgccacacaccccgggaggtgacaacaaacatggtggggtgttgaacaacaagtataaccgccacgggggaaaagaacggcccgggcagctaaaagttatggttcccattataaatcaatacccaacgaggagacaaagcgataataggaaggatggcacaatccgccccgcggcgtatatcccaatgagcatgaacaccacaaagcaagtaaaagtgtgcgcacttgcacggataggtcactgccgcccacccccctatttatactccgatagataaagtatatcgcccgcgccaatatttacctaggtagaagttatttggtatagtcccgagtgaggtaaaaaagatagggggatacga

SEQ ID NO: 184101 - DNA, 553 bp, Arabidopsis thaliana
  unsure (1)..(553): unsure at all n locations
cccgaaccgcaagaacgtttcccccaagagggggcgcccccacaccagggcagcgaaggagaagggaacagaaccccaaataaagtaagcaaaacaaacaccggccgcggacacccccgccgcaaaaacaaggcaagcccgccccacccgacccgcgacagccaacaaacaaaacacgccgacaggcagtacccccgcccaaaatcaccgaaggagaaccccccgcgcccccacggataagaaacccaggcccccacacgcgcgaagaaaagcgagcgaacccccgaagaccgcagaaccataacgcaaacgccagctacaaaaccatataagaaggcccaaaagccaaaagccccccagagcgccantgcgcgcaaacccgagagcggagaccccaggagcccccccgcccaacgagaaggaagcacccccccccacggaagagaccacacagcagcgcacgcccccccggggaagaccacgcacaccccgcgaaagcacaaagaaagacacgaaaccagccgcccgcccccacccggaaagggccaaaaag

SEQ ID NO: 184102 - DNA, 398 bp, Arabidopsis thaliana
cccaaaacgccaattcccactttccccggggtgacccccacacccccaagggtgcgagcgccactttattatggtttatgggggttccaccgcgactttagagctttccggcgcctcgtcttctcaatgtgtacccaagataagcccccctttttgcgggggggcccccccccctcttttatttccgccccagcgcggttttttgtgtgtctcagggctcgcaaggaatcgttgacgataaaattagggccttcctattcccctcgatattcctatgcgataagttccctttacccagcccgtggatgaccccaaggttgttactccaccccccccaagttttacggcaattctccctccctcaaagttgataacccctgcccccccccatttccatt

SEQ ID NO: 184103 - DNA, 351 bp, Arabidopsis thaliana
  unsure (1)..(351): unsure at all n locations
ttccataattttaccttttttaaaatattttgggccaccttttttttttccctctccngtatttaattttaacccccaaggggtggaaaacccaaaatttaaatgantttaaacacacttataaaactcccccaataaataaaaacncaaccattaacaaatttcccaaatcccccccttcnctttaaaccaaccccccaattttcccaaacccacacttccctcccttaatttaattccccctttataattaaactcaccattctacaccccaccaaattaaattaaacaccccccccctatcccttttttacccaaaaaaaccctcctaaaaaaaaaaacaaacactac

SEQ ID NO: 184104 - DNA, 278 bp, Arabidopsis thaliana
  unsure (1)..(278): unsure at all n locations
ccccccgccattcctccaaggtccgcttttttcccccctatgggggggtgcnccccctccnctctttctagcgcatagtcacattagcgcgagtttccccgccttttccctcctcttttctttataatatataaatagatcccatccgcgccccggcttcttcccctcccgcctcttatattcccttcctttattactccctcccccacacccgccctctccanttactctccttcactgtacatgtatttgnaccccgactcccatcttcttccccc

SEQ ID NO: 184105 - DNA, 601 bp, Arabidopsis thaliana
  unsure (1)..(601): unsure at all n locations
gcgacaaccacgaagaaaagcgacaccagcagccttagccaagggcgcggggggaaaagcgccaagccaaaaagaagaagacggagagggcagccaccagaggcccccgcgacagaaccagagaagacgaagcgacgacaggaaggacgccagagaggtcacggacaccacaggacacgcacctcaacagagcagaggccaacccacaccaacgaaccacgagccgcagacgcccaccgacgaatctataatcaaacgcgcgggggagaacgaccacgatgaagaacgcgacacccgccaaacacacaaagctggaggaagaaggacacgcacatagacacgagacccacaagcgcccgacagaagaacgagggcggcgagaggcggtcgaacgagaaccagccgtagagagacgcaggggagacgcgggagaaacacaacgnagagagacggaacacgggagcaccctgacgggggcaaaagagccagccagcaggagacaggcaccaccgaagagcggcagcagactcgacaagagaacgctaagaggacctagcaacggagcaagacaccgagccgagcagcagaacaagcgaagccg

SEQ ID NO: 184106 - DNA, 607 bp, Arabidopsis thaliana
aaaccccccgcccaccacacggggacctcactgacaccacccccccccaacttaacaacagccagcaccccgcccacaagcagagaagcacaccccccccctttcccgaccgcggggggacacccgccgaccaaagagcccgcaggaacgcccggggcgctgcccgaggccacgcccccgcggagagagcagaaccggccgcccccccaccagcgccagaagcccgcgccgacgcaacaccacggcgcagcaccacgcaggggcggccgcgacagcggcccaacacactaaacacaagccgggggccccccccacccacgcaaccccacggaccgccacccggccaagaccgcgccagcaccacccccccccaccccccagaggccagccgcacccacgaccccccccgccagacgaggagccgggcgccgccccaccacgcaccgcgccaccgcgggcgcgccaccccgaagccagccgcgccaccaccaaaacgcagcaccaccgcaccgcaccccgcacgcgcccgccgcgcgcaccccccggaggcccagacacccacgcccgccaacgcgcacgcccacgagcaccacgccggccccacgcc

SEQ ID NO: 184107 - DNA, 526 bp, Arabidopsis thaliana
  unsure (1)..(526): unsure at all n locations
caaanaaaacccgccccaacagggaggcatctaacccccggggggaaagcccacccacagacgcggccccgaaaggaaaacgaaagacgcccccggaaaaaagacaaaacagcacacagcacagggcccaccgcgccagccaccaaaaaaatcacgagggcggcgacggagtgaaagacaagcaaaaagcgcgagggaaaagcccccgccaaaaaagaggggcgaaacacccccccccggcccaggaaaaacgccgccccccaccaacgccacgaaagagcggaggcgaagaccgccggagcgcccgcaacaagaccgcgcgcacgctggctaaaaaaacagggaaccaaggccggagaccccccgacacaagaagggaccaatagaaagacgacacgccgaaaaccccacccccccagggggaggccccccgcaggagggaagtctcgggcccgcaacgcccggagaggagacccggcaacccccccccaacccagaaagagcgcgaggagcccccggccccccc

SEQ ID NO: 184108 - DNA, 448 bp, Arabidopsis thaliana
  unsure (1)..(448): unsure at all n locations
gagaaggagcatttcccccccntttttccctcccccccnncgggggggcacttatcttttttaccccccccccccccntttnnnnnngnccncccaccnacccaaccagccccccccaatccgccagacacgtttttcccatttgtgggggggcgcccccccantacaagctatagcaagtcgcgaatagaaaaagcgcgcccgatttaattgttcgtggcgacttctggtgcgcggggtgcccaacccactaaggggagatgcaggctcggggggccgcgcgcccgctggctaacaaataagataaaagcaccgagggtgttttcccgccatgatagcggcggaggggaagaccccggcccgccgcagtttcatatggcaggagcnccaacgcacagttatagagcaaacgagattttcgagggcgcccgggccggagcggaatcct

SEQ ID NO: 184109 - DNA, 601 bp, Arabidopsis thaliana
  unsure (1)..(601): unsure at all n locations
tccccaatttccacttattaaggggacaagcttcttcacccccctctccacantaacccccctccccctttattccccccatacggacccacccccctccataattaaaataaaactcaacatttccccttcttttcctaacagacgccctcaccgcacaacaataaccctctttttttttctttaaccccatttcaaaattcaccctcagacctccccctcaaccctttcacccctttgttgttttttaacccttttttaaaactttccaccccttcttctctttaaccttttccctctttaccatttttatgctctttctctttttttcaaactttcaaccctttaaaacccctctcaattttacctttaaaaacccttttttcttcccctcccccctcatttaaacactccaccccctttaaccctttataaaaactggccccccctttttccctttccacctctttttttaatcccactttctcctctttaattcccctcccccccctacatacactcccaccaccatttttcctcactacacaccccccaaacccccaattttcaacctctttacccctcttttttttttcccccc

SEQ ID NO: 184110 - DNA, 513 bp, Arabidopsis thaliana
  unsure (1)..(513): unsure at all n locations
gaacgccggaaagcgcgcgcgcaaaagagggggcgcggcgggggattgtgggagcggcccccaatttaaaggagagccagcccccngaaacaaaagaacggcaaactcgcaacacggggagagcggggccaaaaaaacgggcgcgcgcgcgagcacgacgcagcgcagcagcagaggagaaaacggagcacagagacccgggcgcgcgccgcccgagccaagccaggccgcgaggccggacgacgagcccaacgtttttcgaaaaagggggggcccccccgcaaaacacgaacacccgaaaaggaacgagacacagggacgggagaggacgaaagcgaacggacgagcaaagccgacaagaagcacaaggagcccgcaaagaaggcaccaaacgccgacgacaaaacggcaccgccaccccagagagcacggcgcgcagcagagaaccggcgcagacgaaagaaaagagcgacagacccacacgcaacagggacacgcaacgagggggggaga

SEQ ID NO: 184111 - DNA, 443 bp, Arabidopsis thaliana
gcccccgaaagggggcggaacagggggcgggggaggcgagccggcgagcgacattccggggcggggggggagagcgaccccacaaaaaaagcgcgggggggcgcgccgcggcgagcggcgacagacgaggggggagaggaggaggagagaaggccgaggagagcccgacagagcccgccaggacggagacggcaacggagcagaaggagccccgggaggcaggacagaacgcaggggacgaaacttccgaggcggccgcgggggggggagaggacaggagagagagggaaggaggagccagaggaggaagaaacagaccggggccgacgggagaagccggcggaagggcagcgaggggggagacgcaggcgggcggcgccggccgacgaaaggcgcggcaagcgcgggcgcggaccggaacgcgcggcgcggccgcgaagcgc

SEQ ID NO: 184112 - DNA, 464 bp, Arabidopsis thaliana
aaaaacgcccagaccgcaagtttgccggggggagggcgccgccaaagggcccaaaggaaacgaaagccccagaaacaaggcaaggggcacagggggggggaccccccgcaaaccaagaaaaaaaggagacgcaagggagcgcagcaaacgaaagacggagagaaaaacccccgattaaggcgggggaaaacccccccccccgcaaaaacaaagaagacccccaccgccagaaaggagaggaagacccccgaacgcagaccgaccgatgccaacacgaacaagagagagccaaacccgtacccctcaaagcgaagaaaccaaaccaaggaaagccccaaaccccacccaaaagaagaaggcacgaccgaggagagaaacacggccggcaacaaaggggaagacccacacaccccccgctcacaaaaaaggcaaataagcgccccgcccccccccagcgcacagga

SEQ ID NO: 184113 - DNA, 550 bp, Arabidopsis thaliana
  unsure (1)..(550): unsure at all n locations
cgccgccgccggcccccccccccccccaatttacccccactttcctccccattcatatatgggacagctttttcgcccttccggtacccctcccctatttccccccntggggccggggggtncaatttataaaaattttctccttctgatatgggaagtccttctcaaagagactttccccatccttttttctccccccggggggcacccttttcctttcattccaataaaaatgtgtgtttagcgaagcaactaatcggcagaggggtttttttttcacgaggggggtgggggccctcccccccncccgtnaatccataaaaaaaaaaaatttttcccccccccaaaattattccccccttccccccttattattaaaaaaattacccccccccctccctcactcaaaccccccccccccccattcaaaaccccncccacacctttttttctcaccaacccananttccattccccctcctccttcacccctacactccccttcccccaaatcttcccccccccccttaaaaaaacaacatttttcccc

SEQ ID NO: 184114 - DNA, 516 bp, Arabidopsis thaliana
  unsure (1)..(516): unsure at all n locations
ccagagggccattttcgtgtaggggcgtcgcctttcctgcccccaagtgaagtaccatagagcccccgtttttgtagttcattctctcttttntccttgtatcccctccgctccctgtattcatttttttatttaccatctccgtctacgctattaatacttgtaatagttatcacccgtacgttttttctcccccttatatgttctttgagggggggctcacccccccccctttatttattgccttgccccacacctcattttattctctgaggtgtaccccggagccccccgctccgtttgcagttctcctctcctttttcttttttattcccatttcctattcgccccgctgtcgtgttggtggtctgtccctttgcgagcncccatttcccccttcccccgatttttattgccctctcccagtgttatctcttccttcccttctctcgttgtagtttgccctaaagcgtccttatcttttatagtgnttttgggccccccgtcccttttcag

SEQ ID NO: 184115 - DNA, 568 bp, Arabidopsis thaliana
  unsure (1)..(568): unsure at all n locations
aaaaaaaaggacttttcccccctattgtccnnanccggcgccatctttttacacccccccccttttnnnnncncacccnnnnggnnncccccccatccccaagacgtttctcctaggggcccccccatatcgaccccgttttagaacccacaaaccccaattttttatctcactcccccctccctcttccacccccaatactttctttatattcccccccgccccctacctcttttaatatatttatcccttatttttttccccctttttttaattagtgggtccccccccctcactttttctatccacacccctatcccttattttttccgccggtcttcaacccctcattaataagatatccactatataataattaataaagctattccttgccccccctccaatttaaccaaatatcaaatactctaccccttgtaaattcccaaatagaaaaatccccacacacaggatcatactttcagtccgtctatccaagatataatagccatgaatagccaagatatagcttatataacaatataagtaccccgtccccccaccccag

SEQ ID NO: 184116 - DNA, 333 bp, Arabidopsis thaliana
  unsure (1)..(333): unsure at all n locations
aaaccacggcaacacaccacaccgcgcccacacaagcgggcgcacacgaacgacgcgagcgcattccagaggaaaacaacccccccgcgaatttaanaagggacgagaaccgagcgaggggcgacagaaaaagaaaggccacacagacctctttagcaaccacggggggggggaacgccaaagacgaaagaacagcacgcgagccccaaccgaccccaccccaaacgcaaggcagcccacagacacggaaacacaaagacaagaagacgacaacaagcggcaccgaaacacccaaacgagccccacgggacgggaccgacccgcgacaaccac

SEQ ID NO: 184117 - DNA, 450 bp, Arabidopsis thaliana
  unsure (1)..(450): unsure at all n locations
ggagggggggggaagaccgcaacccacacacagaagcgcgacgcgccgcgagcaccacgccgccgcccgagcgcagcgcgcggcaagagacacacaacaccagaggacaagcgagcgagggcggccgcgcgggcgcgccggggcggagcgccacagcgacgagagagaggagcccagcacgcccgcaanaccgtcaaacagagagggggggggcgaacgcccacgagagccgcaaacgcaagagcgcgacaggacaggagaacaaaacaccacgccacgcagacacagccgaacaagcgcgagcgcacagacgcgccggggagcaggagagacgagaacaaaacacgaaacgagagcggccaccaagcccgcacgacagccgagagcagccaggcgacaacgcagcggaggcgcgcgcgagagaacaaaacggccagaggggagaccaaa

SEQ ID NO: 184118 - DNA, 523 bp, Arabidopsis thaliana
caacaaaccggcccccccaggagacagaagaggaaggaacgcccccaagaaaaagagaagcaaagagagaaacccagaagcgcggggggaccccggccggccaaaagccacaaagaaaaggacaacggagaagcgaacaccgggagaaggtgcacgacgaacaagagacagcccgagccggaagacacccccccccaacaaaaaacagaaggggggcgccccccccccccaccgagacaagaaacggcagacgcccaaagccgccaaagataaagggcgggggaggaccccggcgccctcaagacaagaagaagatgcacgagagcagaaaaaaaaaagggccgaaagcggaagccaccaagaagagaagcgcgcaagcgagagacaaacccacgagacacacccacgggggaagggccaccccgaggggaggacaacagaccgccacacacgcgggatagaccccacacccgccagagaccaataaagcaaaaagggacgcccgcgcgcccgcccaagaaac

SEQ ID NO: 184119 - DNA, 251 bp, Arabidopsis thaliana
  unsure (1)..(251): unsure at all n locations
ccccggncgcccgcccagacctcagtatttttcccgagggggggagggcccatttaaatcctcccaaaggtttgcctataccccccattataaatataatgaattctatagcggggcgatcgacccgccatataaaaagaatataatcgctgccgttatccgaactttaacatgattagtaagaggggttgagttaaccccccactagtttttcttatagagggggagagccccccccctttatgtttttc

SEQ ID NO: 184120 - DNA, 591 bp, Arabidopsis thaliana
  unsure (1)..(591): unsure at all n locations
cccccccccccccntctcccccccccgccccccccccccccccccccctaattaacnccccacctttcctccccnattccacttttatgggacaaactttctccccccttcccggtaccccccccccccttattcccccnngntggaccccccccctcccaaaaaaaatccntcccccaccccaaanccaaatcccccnaancccattttccccactcctttnttcttagaatccattccgcatccaccttcctaccaaaataatggaaggtctcaaaaaattttccccgcatctttcactcgcgggaaatttaaaacaatttttttttcaaaaccccggggggggccccccccaacnaagggggagtccccctacaaaaaaaaaatcctccccccctaaaaaaacacaaatattttcctcccccatcccccccccttcaaaaccaccccttttcttttttttttcccccaaaaaattttcttcaaaaacccaccccccctctttacaaccaaatcaatatcccctccccccaccctccccaaacactttccccaaaactcccctctttccaaattttttacccccccccc

SEQ ID NO: 184121 - DNA, 155 bp, Arabidopsis thaliana
  unsure (1)..(155): unsure at all n locations
ccaccacncatatagacggccccgtcgtccatgcaccccccagtccgctacactttcccttaaataggggactcgcttacagtcgacagtcagtttcatctaacccccgattttttttatagattatcacatgcggatagccctacccgctaaga

SEQ ID NO: 184122 - DNA, 591 bp, Arabidopsis thaliana
  unsure (1)..(591): unsure at all n locations
ttgacggggcatcgccgcccccgtaaacttggatcctataaagaggttcgccccggggtttttttcctttaaataatccttcgtaacttttcgggggacgaaaattccccctttaaaaaattatttggagggttagatttttttggccccaaaaatttttaacagggggccggggggggaaaacaaaataaaaaaaagggtgtgccggggggggtttttttttctataaaaaaggggtggtggaagaaacacnccccaaacaagaagatgttaattttcttttaaaacaaccacccccgggatccgcagccgtttttttttttttaaaacccccggaaacacccctccatttttccttttttttttttaaaaaataaaatattcctctttattacacaaaaaaaaataattttccatagtttctgcgcgggagaaaaaacacccccctttggcgtttttaaaatctttgaagaaccacgtcacacccgtctatcattcgggcgattttttttttccacaaaaaaggctccccccccgccaaatctctttcttttctagcacccgtcgccgcaaacaaaaagaagggcgatt

SEQ ID NO: 184123 - DNA, 427 bp, Arabidopsis thaliana
aatttgacgcgccgccgcgccccagccggaatcttagggggcccccttttttttttttttcacccaaaaaggggacccccttaaacccccggggaaagggaacaaccctcttcccaaacaaaaaccgaaaacagggccgttttaccggaaacccccaaaggggaccaaaaaatttacccccacgtgggccccatataaaaaaaaaggggccccctttaacgggcgggaagacccaaaagcccaccaaaaacccaccccccaaaaaaccccttgacaaaacccaaacccaaaaggcttttagagaagagcgcgaccccccccaaaagaagtggaccccaatgggaggatggagagaaagcgcgccggggaccccgcgggacaagaagccgaggcgccttggaggcccagccgccccaaacaacggaag

SEQ ID NO: 184124 - DNA, 400 bp, Arabidopsis thaliana
agtggggggccccccccaccctccaacggtatcagaggccagtttttggttgggccatctcggggatccaccccaagcacaagaaggttaggaccgccccgtttttttctattaaaaccgaaaagaaaggaccgcttatggtgaaggagggccccccccccaattaaataagactccaacggatatttttgagtggaatttcgagagttagtggaagattccaatatcaaaataaaatatccattgcctaagccccaaagaatattaaagatatataggaatgccttatgcagcccaaagtagagagcagcccgcgtgtagactcggtgcatacccgggtaaaataccgctcgcccagaaccaaatagcgaatagagcaaccgccccacatcaacctatt

SEQ ID NO: 184125 - DNA, 619 bp, Arabidopsis thaliana
  unsure (1)..(619): unsure at all n locations
tttatgcttgttttttttttttatacgacagttcccntgctaatggtcttacttttgtccaccacaagcactcctgttattttcttaacatccatcagacgcgtatattgtccttttctgttatttatttattttctattcttttctatatattttgggtaattttattatttttattctatgtctatcctttcttgctttcgttacgacttaattttttctgagttttatttatatccttctttcttttctttcttttttttatttgttgttttttcttctttctttttcttcttttcttttctttttctcgctaataatctctttttttttacttattatgtttttcctcttatttcctttttgtgcttgttatcgtttattttttctttgttttcaccttttattttttcttacgtttatggcgcttagttttttttactctgttttttgtttttttttttctgtttttcttaccgtcctttttcttttcttatatcatctaactatacttttctttctctatctttcctacttgtttttctctcctctttttttcttagtgttttccacttttttctttaagttttttcattttcccttttttgttttttttttt

SEQ ID NO: 184126 - DNA, 545 bp, Arabidopsis thaliana
  unsure (1)..(545): unsure at all n locations
ccccccncggacaaaaagacgcccccatacccaagccttttccccccagggataacgccccgcacgtcacgcccccgaaccggataagaagaagcccccgttttatatcaaagaaaaccacaggggagggtcccccccccgcaatcataaaaaaggacttaccaccgcccctccggaagcactgttagctgttagcccggaggcggaaagcccccctccttagacgaggcgaaatccccccgcccccgcagtattctttgcgagccccccagcgcccgaatttgtcggcgagtattcgaggctcgaggtcaaggagcttcggcggaggcagaataattgaagggccgaatgaaagatccccccatacgtaaattcctcttaacccatatacaaaccccagatccccgagcccatgaaggaggggcccgcccccagcggaagatttcatcggctcggcacctgcgggatattatccccatacatccctccgtaacacagaaaaggccggataaggagcccgcccgcccaactgattacggcctaga

SEQ ID NO: 184127 - DNA, 549 bp, Arabidopsis thaliana
  unsure (1)..(549): unsure at all n locations
cccctatcaacaggttcccccctctgtgtggtttttttctttttttaaaacaaaaaaaaaccagaacccccactacccccccattaaaaataaccaacacccaacaacaaaacccttctgccccccccccccctcttttttttttttttataaaaaacagacgacagactcgcttttctgtcttctttttgtatataaccacagaacaaaaatacgccccccccctcttctttcaacgggggggggcgcccccacccccccataaaaacaaaccccccccccccacaacggcgggttttttgtttatcttgttattcctacaacaaaccaaccccaccacatacccatatttcttccatacnaatacacctaaagtaatacaccccatataccccaatcacccccccagagaacaagagataacaaaaataccactaactctccgcccccccaggtcgccccgtnctcctaatatctcttatattcccctcaccccacagagagaaatattccgcccgaccccctaccaaccacaaagaaaaaaaacca

SEQ ID NO: 184128 - DNA, 509 bp, Arabidopsis thaliana
  unsure (1)..(509): unsure at all n locations
ttttttttaacacaccacccaccgttttaagagcgacgccagagccactcgtgttttccccccatttcccctattaagtttttcccctattaattgtgcgcctcctatttataggccaccccaaatcctattatcaacagtccgccccgatatttttatctaatgagtgctcatcctgccgaagtagtcctcccgccgccttatcctcctcgaatttgtntcgtctgcctccagccctccccggatagtgtttcttttttctattattcccccgggcgtttatttaccccccctttttttttataatttcctttttcccccccccccccacattatttatttttccgctacccccactctgcccttttttatgttataggatattacagttcgcgtaccggtgatggcgtttcactattttggttttatttttttgtgcccttttccctatgtgcccccgatgcctatgattcgctatcccgtttttggtatccctggtagcccccccc

SEQ ID NO: 184129 - DNA, 154 bp, Arabidopsis thaliana
ccgcgcccggcaactttgcgcgccgccccccaacggcggggcggatctgatgccacgggcccaggccacggagtttccacacagcaggcagcctgtgcgcaacgcccgtccaagacatcgcgcgcgcggcccgttttgctaagactgcgggggg

SEQ ID NO: 184130 - DNA, 569 bp, Arabidopsis thaliana
  unsure (1)..(569): unsure at all n locations
cggggggaaaaagagccccnccaacaaacaagcgcgccccgaaagcgaaaaaccgagaaaccccccccggaaaacaaacccacaccaacaccaaaagggcgcagaatcccccacccgcccaaatacacaccagaagacacacccgagccggccgaaccggcaccaccaaacgaaaacacaagaaaccccgaccgagcaaaaagcaccccccccaaacagggcgcagcgaaaccccgcccccccccagcagaaatcgaaaagccaacacccccacccccggaatccaacgccgggagaggncggaggagacgcacgggcgaggaagcagaccgccaatgacacaaacaaaaaaataagaccgccaggccgaagacccccccagcggcacgagacgcgcccaaaaaccaagaacagacaccacacaagcccccgccccccagagagcaagaggccccacaccccagaggaaaagcgcaccggaaggggacacaaccgcgagagaagaacgcccaacaaacgccgcgacggacgcaaaaagccagagacaacagccgcccaccccccccccc

SEQ ID NO: 184131 - DNA, 522 bp, Arabidopsis thaliana
cctcacttttggagagcggccgcctgcagtaccggtccggcaataccgggtctaccacgcgtgcggggcggtgtaaacatggctcgaagagcccagaagcatctgatgaggcctcatcgctcctcagcattctcatgctgtgacaaaattgcatggtaacatatcgtcaaacaccatgctctggacctcacatgccttaggaatgacgtcccacttttttttcgaggggcaccaggccaaccatactaggactaaactagaaaatttcctctcccgagccaaggcctcttccatgatgcaagcaaggacaggaacgaccggacctactccgacgaatcatggatgttagcatcctggcccagatcacttacaaacttctgcttctttacaaaacaaaaagccgtcccatttccattccttaaagattcaaaaaccaatttcaagctttgccaagttatacttattaaaactgtctcataggaaggcattaccgcaccacttataaagtcccccctccctccc

SEQ ID NO: 184132 - DNA, 473 bp, Arabidopsis thaliana
gggagctactaccctgcagtaccggtcccgaataccgggttacccagcgttccgggcgagggacaaaccttgccttgggggctgactttacagcgggggtaatgtctaccggaggaacctatattctggctggccgtcctccacaatatgggcaacttggtcaagggaccggatattaattcaatttgaaggaaagttttttttggatgggctaccaatcttattcacgtactaaaaccattcgctttcttgcaagggaaaacacttgcaaagttttatgttgaaccaatcattcttgggtccgaaaataaaattgctttggttacccctggggatttagtggattttgaaaggtttgaccttgggagccaaaacaataatgggcttcaaccccgattgatgggctttaaaaggattaatttttggcttcttaaggccttcctttttgtgggtctgcaaactccgttgtccac

SEQ ID NO: 184133 - DNA, 562 bp, Arabidopsis thaliana
  unsure (1)..(562): unsure at all n locations
attaacccggggttttgacccaccgcaggtccgtcacggggtgattcatattcattgttatataatggccaacccaacagcgcctgcctctctggcctatctcaagacatgcggagcctaaccggctcaattagtaagtggtagcggccttcgcgcgggggctgtcgccgaagcaacccgacgacagcgccgaagcacaagcgcacaaccacccccgcactagcccggcaattttttctttctggtggtgagggaccagacaaaagaaccaccctgtggcaatcgctcgccgtacatgggaagcaggagccccgacgccgagacagaagtgcgcgccggttcgcgcgcccgctccccncagcccaatcccaaacagcccaaaacatcttaaaccacgccatctcgaccgactgggccactcctaacagaggcaggtcctccacggcaccgagcactacgttaccccacccggagccccccctcgcgcgcgcccgctcccccgctccgcctctctcgctgcacgcggcttgtaccgcctcccgccctacgtggctcatgcggc

SEQ ID NO: 184134 - DNA, 361 bp, Arabidopsis thaliana
gccggacccgcaccgaaatacccggttttaaccacgccgggaggagaaaccccaaacatcagacataacaccccacatcaggaaagatctacaccgcaaacccacccccccagcaccgccacgggacacagatcactccgcatgccaacccacacccaacgccacacgacccacaccaaccccaaacaacaagacaacaaccaccactttttttttttaagcggggggccgcccacccacccaacaccccgccaacgccgcctctgcaccaccacaccccaacccgccaacaacacacaccgagactatccacgcaaagaaaacacacaaaaaacaccaatagagaaaaagaaacaccaca

SEQ ID NO: 184135 - DNA, 552 bp, Arabidopsis thaliana
ccccctccaggaaccggaccgaattaacgggttttccaacgcggccggaacccaatcgacaccccatgggcccacgggtggggagaaatcccgcgagcgagcgtgggtgcgagtcaaagtgctaaggccttgctgtagagggtatggccggtggctcgttggtagcgcatagatgaagcgggagtagatcgcacgcggctagcggaaacaggaattttttttctgggggggtaagccagccactgcgaacaggctgggaactataagaagagggctcgtttgaggcaagccgggacagagcggggcgatattggagacaatactttgcggtaatccggaatgccttgacaaacttgacgtataatacggccatttagatggttgcataatcgcgagccaacacgtcagcagcgaagagagatagctgacgcgcccagaacattttacgggcttccacgcctggtgctttctcctgtgaatccagcgactccagtttccttcgcatggagcccgcccggtaatttcgtggggggtcataccacatttccgctt

SEQ ID NO: 184136 - DNA, 319 bp, Arabidopsis thaliana
gaatccgggcttccagcggcgaaaagacaaagaccatgacatacagaggggaggaggctgaacagttagccaaggtaaaatggaacgaacggcaccctggtggagacgggagaatacgaaaaagaccaaaaaaatggaccatttttttttttcgggggaacaaacgaaaaaattgggactctatacaaaactaaaagaaaaagggaacacaaagggccgaataacctgggctatgatcgaacttcaaaaaaaaaaagaaatgaaagctgttatactataagacctaacacacctagaacgaaactccgaaaacaacaga

SEQ ID NO: 184137 - DNA, 576 bp, Arabidopsis thaliana
tcctcctatactcatatccaccttctaactctcctactttccctctcccacctattacttctctattttttctcctctttctcacctatcatatatattacttctttttcctctccctcctacctctaattatatctacctctcatccacttatacactcaccatacactttctcaccctaatatcatgggcgtatatcatctatcaaccaaaatctatcactatctctctacctctctccctcctccttctatttacactcctcatctcatcccatcttccatcaacctcatatctccacatctcccctctctttaattcatctattctcttccctctttatctctattattcaacatcactctttatatatattattcatttaatcctctctttttctttttcctatcttctttcaactacactgggggtatacttaatatcttttctatcttcttttattttcttaataaaaactcttcccatttcctcccctcctccccctccttatcctcccctctcactcaatatcttttcttcttcattctttctccctcccctcttcttcccttctca

SEQ ID NO: 184138 - DNA, 540 bp, Arabidopsis thaliana
  unsure (1)..(540): unsure at all n locations
tgcaggaccgggacggaattaccgggattatccacgcgtgcgagcactcggncaaacaagcgancgacaagccagggccgaancttctttaaatgacccgaaaacgcaaagacttaggtgtgatttcaaatataatggataccttcgaagggctttttcttgcggaccaagtaacgagtggagggcccaccatctttttttattggggggccaaaaaacaacccaaaaaggtactaaatcacttgcatgcgcatcattatcaccatgaacaacatatgttccaaaaaaaattctttcttccatatccttttggtacagagcaccaaacacaggtctaccaacaatgcctcaagaattccaaggttgactcatgaaccacgggcctctacggaacagtgttttactatctcataagcccaatttataacccccaataatgtcttcgttatatgccaagtttactcggatcttaactaaggatataaaattataaacggtctaactaccgggccttcgacaattcttaaaataaacactata

SEQ ID NO: 184139 - DNA, 457 bp, Arabidopsis thaliana
ccgggcccggccgaatacccggtttcccgcggcccgggggggcaaaagggccgaacaccacgcaaccagcgtccggcgaacgccgggggccccagctggcgaagacgacggaggaaccgaggacaaggacaaccgaaccacacaagaagccacaaggacaaaattttttttacgggggcgcaagcaaccccaaaggaagagaagaaggaaaggacgccttccaccaccagcacttgacaagcgagggaagaaaaccaaaaaacagggcgaggaacgccgccgagaaggcccacaccgaccaacaaaaaaaaacacgccacacgacggagggacgcaccagagcaaataagacggagaggagcgggaccacgccgaacaagcgcagaagaaacccagagacccccacggccaggtgaggcaaagaaggcacccgaccgaggcgccccccgaaacaccg

SEQ ID NO: 184140 - DNA, 425 bp, Arabidopsis thaliana
gaagctccgcttgcaggtcccggtccggattacccggtttgacccaggggtccgggagcggttcggatcttttgaattttttaaaaggcccacaatctttcccttgttgtaccggaacttttggaggttccagaattcagttttagattccaaaacaggtgcttcgcgagcgttattgggagagaaccatcgagctttttttttttgagggggggctccgggaaccaaggaaaaaagggctacccatttaataagtagatagtgaagcggcaagggagacgaccattattgttttcaccggggtgggggaccggtaaggactatgtcggcataggagctactttaaaaaaatatcgaagggggggagatattaagaacagcttgtccagcgaagaagtcagtgccattcatagctgagtgaggat

SEQ ID NO: 184141 - DNA, 556 bp, Arabidopsis thaliana
cactagtcgcatccgacctctctcctatcccttgcgcccacctttgtcatcgtattttttcttatctatgctcttcattcgccatctttctcattccccccgcgcgcacacccgaccgcaagctccttcccgcgtgattacctcctcacaatcgtagcgctgtacgtcctcccatcacctcagtataggcgctcggccgctcttcgcctcccttcccctgcggctcttattcttttgtgcgcactatgcgctcgtcacctgctcatccaggcgcagtccgtggcacgtgctccgcccgtccaccgctatctcacgactcacccaacaccgcaatctcctcgacgtcgagcccgtcctcccctccaccctaatcgtctctttaacgatgcatacacaacaaatttctgatcatattacttccttcggtagtcagattgttatgtgtcgctttacatcgtctccctagcgtatcgttctctctgacttttccacttacactcctagcgggggggagtcgtctctttttctgactactatcaatggttatatttttatc

SEQ ID NO: 184142 - DNA, 459 bp, Arabidopsis thaliana
  unsure (1)..(459): unsure at all n locations
acaataaaaaaattaaagatttccttagatgtacnaacacacacaaacctaaagggggagagaaggcacccccacgcaagggggccggagccggcaaaagccggtttccacgcacgcaggacggcggggattaacacgtccggacgcaaaaaccgggacgaccggaagaaagacagagcgcgcgagaagcgagcgacacacggcggcgccgagggcgacgagccccgcccgcgcggggcagccgccacgcaaacggcacacaagcaaaggacagcgccgggacggcgggaacgcggccacccattttttctctctggggggggcagcgcttcgcagggacggggaaattctatagcccgcgcggggccatcgggatcacctagcgtggcgcggtgggacgcggggccacaagttcaccgcggggtgcaagagggacgagcggaaagcacaagcccaccg

SEQ ID NO: 184143 - DNA, 508 bp, Arabidopsis thaliana
gaacccccctgcacggaccgggacggaatttccgggttgaaccaagcgtggggttggacctaaaaaaagtaaaggtcccaaagtgaaacagtccacttaaaagcgacaaacattggggagggtaagaagtggcaaaccgagggaagctctgcctaaagctgcagaacaaaaggcgttgccaaaaaaaggaaaatttttttttttggggggggggccaacaacggaaagatcggattaatcctggaaacccccaccccaacgcaaaacagaacacaggtagggaatggagagtgtattacgtacctccgtcaaataacacgggacgctacctgcaaagccaagaagtatcccaagagagggacccggagaggggcgccaaaaggcgacgcatggaagcggagccaagcaggtgcgatgtacacccgcccacgacgccacagggtcttgttccagccatacgggtaaaccaacgccagaggatcggcggacgactgcctaataaaaaacc

SEQ ID NO: 184144 - DNA, 500 bp, Arabidopsis thaliana
gggaggcggccccccttccaggacccggcccgaattcccgggtttgacccaggcgtccgcgacccggggcaaagtctaaggagaagaacaacggtaaggttgcttccaaggtccaaaacctggccgggacccttacctggggttgattaagcctgccaccgacttccctcaggaagccccgtttacggactatgaaaaacatgttttcggaggagggcgaacggaaaggcaaaacacggctaagggggctaaacaaagaaaagtttccattgaaccttaccttgggggcttgcccccttagagaaccgaaaatatgccttttggaaaacatgccacacatggatcgaattgtatcccggttatggcgcccctattcaccacgcaatacggaaaggggatgttattaatgctattcaccatccttaaagccaaaacaagcttcgggactcattggcctgcccacacaccccccccggcctttcccctttcctttccggtac

SEQ ID NO: 184145 - DNA, 137 bp, Arabidopsis thaliana
taataccgaacattacaacctcaacacgccggaacgaacccactcatccgactaatcattcacccaataagcttgatggacacggttattctctaaaagcccaaaatctcagggggtattatcacagttttccatca

SEQ ID NO: 184146 - DNA, 319 bp, Arabidopsis thaliana
accggaggggcgcctacctatctaacctcactccttgctccgtgaccattatgaagaggtcatccgctcatccttacttaccaaatcactgggaagcccgctaaaacatcagatatccactcgacactccccgcagagctttcttttttatgggtggtgcaaaaacacaaacactctgcctataccaacttaataggaacaatcaaaccatagcagaatctgccccgatagtatgatcctgctcccggaaaaaagcacaaagtactcgataacgtaaaaatctctccttcgaggcagagaccaccctatcctacgtaat

SEQ ID NO: 184147 - DNA, 490 bp, Arabidopsis thaliana
cccccagacccggacggaaaacacgggcgttcaccggggcgggagcgccgaccccacagacaccgccgggaacggtcaggagcggagacaaccaaacgggcaaggggcaggcaaagaccagcgacccagcccgcccccccgcgacgcgacccaccttttttttcaggggggccaaccccccaaaacggaccaagccacaagaacacgcgcccccccagccagccggcccaacacggacgcgccgccaaagaccccaccaaacaacaccgcccacaacagagtgaagcagggcaacgacgacgcaaaccccgggcaaccacccacagaggaggggaaccgccggcccacgagagacaaagcgggacacggagaagggcgcaccccggacacgacgcacccagcgcccccgcagcgcgccccacacaaaactcgacagcgacaacaaacgccaccaagccccgcggcgagcccgagcccgggcagacaaaac

SEQ ID NO: 184148 - DNA, 345 bp, Arabidopsis thaliana
gaaaggtggcacccctgccggtaccgggcccgaatttccgggtcgacccacgccttcggttattttaagggaccttgtgggggcattggctttggacctttctggtttctacccccggaaaatctaactggttgaccgggagccttccaaggttaatggccatggaacttccaaccttaagggaattccggttatttgacctccattcttaaaacaaggaagggtttttaaccgttgataccttttaaaaaaaactcggtgtttaaaggtccgtggttagaagaaccaaaatgtgttcagaactccttgaggcaggtcccattcccaacaaatggtggttcgtga

SEQ ID NO: 184149 - DNA, 517 bp, Arabidopsis thaliana
  unsure (1)..(517): unsure at all n locations
cccccaacagaccgaaaccagaaacccggttagcacacgggaggggacccctaaaagacacgcagagcaaaaaagcggaacaaagcagagggcaagcacacaaggacacacaaagggggacgaccctgctcaagcgaggccaggaccagcaagcaaacgcacacgaacacacggccaacacaaaaaacgacccttttttctaagggggggggcaaagaaccccagaaagcaacagcgaaacgccaaggccaagcaccagccaggcgcgggacaggcccccagtcacacaacaaaaagagaaaggaacagagagagaacacaacccaaacgaaggacaaggcaacacccacacgcagcaccggaaaaagagaanaggaagaaccacacagagcccagccagcccacccaagaacaacccaccagcgacaacgacagacaggccaagcaaaacgaccgcagaaccaagaaacccgcgcagaacggcaacgccaccccccgctcaaccaaagaaaaaacg

SEQ ID NO: 184150 - DNA, 220 bp, Arabidopsis thaliana
cgcctgccgggaccggtccggaattcccgggtttacccacgcgggccgaaccaaatcgcctaccttttcaaaaccaaaccggtgaaaagaatgcacacacccggctacatgcaggagatggctacggttgcagttcttgcagggaggacgaccaatttccctctcccacatgtccgggctacaaacggcctacagcgtcgaggttcgacccaacattttt

SEQ ID NO: 184151 - DNA, 639 bp, Arabidopsis thaliana
  unsure (1)..(639): unsure at all n locations
ttatatactcctctctcttcttcatcttatctcctttcccaccttaccctcctacatcaactcccacctctctcctatctccccctacccaccatcttatataatccaatcccactatccctcacaattcttcctcctccactactatctttcctctcccccccttacccatctcttcccctcctaccacatactctcccttctccattctctcacatacctatcgggctccatttccttcctctcatacaatttcacttcattcttccctccttttctctctcactctcatcactcctcatatttatctcctacctttcatcctccacactcttcaactcacacccttctccttctcttttactctatctcctccctccttctctcccccccattctacttcccatctatattcacacctttcctcaactaacccctctatacaccatatcaatcatactctctttcatttatcacttnagctaggggggctaatatttacaacctaatctaacacacccataatcatctcactatcacacaaaaacatatctttctcaccaatttattctctattcttttacattattctctattttctttcataaactatcctccccatcccctccaacacctatt

SEQ ID NO: 184152 - DNA, 559 bp, Arabidopsis thaliana
actatatactctctcatatatcacaccttctggtcgatagttaaccagtatcgaatatgtaattcgaatctcatacactccatacttcaatctctataccatcaccttaataaatctatcgtgtttatgtatctcactatccatttacattacgattacggtcccacccttaaccaactacacatgtacttttactattaattcatactccccgtctcttctgattcgcagagaatcagatgttacgccctacacaccccacgattaatcacaaacataagccataaccaaacacattattgtagccagacgaccttacctcattgcaaacagaatactaccccgacacacacaacacaacactaatacaccatataagatcttacaaccacccatcgtccaatcttgcacatgtctatcccctatttacgccacaagaagagcacacaaccaacaccaatcaacgcactactacaaacaatacaacaacagcacaacacactaatcttaaggtgaggtcaaatgtatataagaactaacgacttagtaggaaaaacaa

SEQ ID NO: 184153 - DNA, 497 bp, Arabidopsis thaliana
cccccagcaaggaaccggaacagcaaaaaccggttttaaccccagggggagggggaaaaaaaaaaacagagcaaaaacccccgccggacggacggggccaacaaccccgagacaggggtgaggaagaaggataccccacggacaccccaggtagggcgcggccaggcagaccccaacaccaggaccgaagaaagtttttttagaggggagaccaaacacaaacaggacacaagctacccagacaaacagcgaacacagagagaaaaacgggaccagcaaaaacaccagacgcacggcaagagacagggacaaaaagcaacacaaccgatagaacccgaccaccacgagcagccaaggccgggatcacgagaaggagccgcgcgagcagggaccccgcacaacgaggagccggacggaggggcgggcgaagacaaggggcacgcggataccccgaaaccgcacgcacggagaccccaccgcagcaaaaaagaaaaaaa

SEQ ID NO: 184154 - DNA, 242 bp, Arabidopsis thaliana
ctggaccgggaccggaatccccgggtttgcccaggcggtacgggcctcctgatggcatcgacaaaaggatctgacaagaggacaaaagcaaaggacgattgcattctcaaccatcgcactgctgaggcatgtttgctagaattacgcgcacatcgtcagagaatcttcgcgcgcgcgataccgccgtgggcagaacaccactactacccccttttttctttttctaggggggcccccgccgc

SEQ ID NO: 184155 - DNA, 343 bp, Arabidopsis thaliana
acgccctcccaggaacccggcccgcgaaataaacgggtttgaaccaacgcaggacggaaccaagagaaacgaaaggtcaagggagaaaggcccagaaccccctgcaagaaggctaaggacaccagacccaacacaacgggcattaaggaggacgaagcgctcgagcgacgcttaaacaacagactcaatagcctaggagagaacaccacagaaccacaaagatcgcacgaaaactttttctaaggggggagagggagccaaacagagcccaagccgtcaaccgaactaaggagccccacggaactggcgggaccgaaaaccaccacatagaagaagccaacac

SEQ ID NO: 184156 - DNA, 213 bp, Arabidopsis thaliana
cactaaattttaggggggagccgcggctgcagcgactggagcggcataccggtttgcccactggcccgcccgagcgatataagtaaagcccctactccagggcagcggggaagccagcgaatacatctcgttggcctgaagaggggccaactcgattggcaagactgcagtgccaaaaagcactctggccatcgaccaccgctcttatctatt

SEQ ID NO: 184157 - DNA, 407 bp, Arabidopsis thaliana
aaatattctatccacttcatctcttactctatctcatcatattaatataccttcaccaatcaatcctgattctattttttctaatcttaccacatctctaccatccatttgccacattagtatatatatatctctatcttctcattatcctcaaccacattcacctcacactacacacacctactttaacactatccctcacactatcaactactaatatccgacaaaccactcacacacatccaacaaataaggggggggggcacctacctcccaccaatacgccccacactccccttcaaaaaaaattcccctctccctctccaccttctaaattatacacttattcaccaaacatccataactcatctcatctataaattctacctacatcactctaatccact

SEQ ID NO: 184158 - DNA, 496 bp, Arabidopsis thaliana
tactcaccaacaacatataataacattatatctcactttaacactcacaatatatattaatcctctcatatacatatattaattcctatacctcacctccacacatacacacaccttgggccctcctcctctcaatataaaaacaccatttatatcctttatttaccttctctttataactatttaactaatcatccaaaaaccatttctctccccttcctcatacactaaatatttattactatacaattaaccatttacccatatcctcattataaaataaccattatatatttctattatttcaactcaattttctctaaatattaaaaaaaaacggggtcaaaaactctcctactataccctaaacactctattatctaataaaaatacttatttctcctcttccaccttctcctatactctttacttctcttttttctatttaatacccattctctctattaacctattcactcctccaacttactaatta

SEQ ID NO: 184159 - DNA, 293 bp, Arabidopsis thaliana
accctatccttcttactatcaatttactctacattaccatccttcaattattcaaaacacccatcttatcatacatacctaccttccttattccatccaccatcttattcattcacttctctcctcttcttttattttattggggtatctattattattctcctttttcttattttattttaaataaaaaacattacttctattctccctatttttaaacatatattaatattcatctttatatctactatcctcacctaaattataataaaacatataatcaatcctctcaa

SEQ ID NO: 184160 - DNA, 520 bp, Arabidopsis thaliana
ggtttgggccaaggcggtaggggcccccgttggtttattgtaatctttggcctgcgccggatggggtgaagggtgatgattggagcaggcacagcagaggattcccgaggcccaccgcgtgttggtacggctgcagtagcgagccctaaggaaatcgcgcacagaagacccccagcggttttttttttcagggggggccgtacgacacacagtgaccctttcggtgctgtcattggtgcccctgtcgacaactggaacgtgtaggaccgcccgttcgggcctaggcggcagcagggcggaagttctaatagatgtacaacgtcgaagataagtggtggagatagcctccgccgatcgaggtcggcccacatagctcttaatccattactcaacaatggtaatatcctacactccgagtcgtgacgatcctcccaccgccgccatcggtgatgggtagcgcgcgcgccgcgcgaagcacacgacagctgtatcccggacccgtttctttgagactacaaac

SEQ ID NO: 184161 - DNA, 322 bp, Arabidopsis thaliana
  unsure (1)..(322): unsure at all n locations
ggaaaccccaaggggacccgatcttttttagagggttttcaagggctttttaattaaaccaacgcgcgaaaagggttttgaaaacaaaagtggtgggcgagaattctcccacagaaaaaaaattttttaaaaaaaaaacctcccctttttgtggcaaaaaaaaaaaaaaaaaaaaaaaatcttttttttttgaaagaaaggggcgcccgcctttatcccccccaaagaaattttttttttgtggggagaaaaaacaaaaaaataanantttttttttttttttttgtgggggagagggaaggagattttttttttttttttt

SEQ ID NO: 184162 - DNA, 509 bp, Arabidopsis thaliana
  unsure (1)..(509): unsure at all n locations
tggatccctctattagcggcgcgcgcgctgtggggccnaaaatataaattttttattttcgcgttattctgcgtgtgggctggggtctggtggcgtgggggcggggtttggaaccccccccctttttttccggaggggggggccttcccctgggaaaatttttcccggggggggaaccccggggggggccaaaaaatttttgagcccgtaaacttggggggggaggaaccccttttcccagaaacgcgccgaaatagggggggtgtcctgggggggcctttttttttgaccccccggtttttaggcccaagcggggggttccccgaggccttttaaagggttgtccgcgagaaaaaagaagggggggggggaccggtccccccgaagcggggggcctttggggggcgcgccggtggtgggacgggtttttgttttgtgagaccccgtttgttgcgtggggccgatttttgcgggggggggcttttggcgcccgtttgccgggagggggg

SEQ ID NO: 184163 - DNA, 498 bp, Arabidopsis thaliana
gacgtggcttgcccgcgtccgtaggctgggttcctttagagcggccgccctttttttttttttttttttttttttttttttttttttttttttttttttttttttttttttttttttttttttgttttgaaaaccatttccccttttttttacctaaggttttggaacttttccccttggacaaaatttaggggtcccaaaataactggaaaccccggaagggggaccaaaaaaaattttttaattccggttaaactttggggggggggggaaccccttttttaacggaaaaggtggccgaaaaaaattggggggttttcttaagggcttccttttttttttttaaccaaccggccgttttttaaagttcaagaacggttggttgttctatgggggttctttaaaaggggtttccaaaaaaaaacaaacaggggtcggaaacttgttttttcttagaacccggaaatccttttttgggttcccctttaatttttttcc

SEQ ID NO: 184164 - DNA, 323 bp, Arabidopsis thaliana
ccccaaaaaaaaaattcttctttaatcttttacagggcccagaaacaattcccccaatgcaccaaatctcctgccccccccaaaacccttccctccgccccgaaaaatagccgcggccttccaaaaacccacccccccccccaaaaaatttttttccaccgggttgtcggacccaactcccgggttccccacaaaccacttaacatcccctttttcccaaaccgcattgaaatgccaaaaccctctttaaacaattctccacgaacctcccacaaaaaacccaccctccccccacccctttctcatccttccccagaaaaccc

SEQ ID NO: 184165 - DNA, 272 bp, Arabidopsis thaliana
ggggagccggcaagaggaagaaaaagagcgcacagcacacgggaccaagggaaccagaggaaacaaaccccagcaccgcacgacaaacgcaaccgcgcaaaggggcaccacaacaccccctctaaggggggggacacaagcaccgaaaccaagagacagaaacaaccgcgccaccagggcaggccagcaactacgagcagaaccgcgcgacccccaagagccacgagcaccaggaaagagcaccgcacgcacgagaacaccaagcaacaaac

SEQ ID NO: 184166 - DNA, 584 bp, Arabidopsis thaliana
ctctaccacggactttggaagaaccaaaggacgcgaaagcatgcgacaggatccatatggagagacacaaccactttttctgcttgttcaagcccgactctcccagtgcctacccaacactgggagggctacacgctccgatcacactatcccactttcagccttcccacccgcttcacactgcctaacttcattttctctcggcgcactttactcaagaatttataaattcttccgtaccccacattttcctgatatgcacccttatttatgtttctttcacgtctgtgaacgattattgtgcgtttcgaacacacattctcttccagaatttacatcaatgaccaagcgcaagatgcggatggttcgcgagaggcacactgtgtcaagcgaaactgaccgcgtctgatgccgctgacgacagtttattatgccgatcatttgtgttccgccatattgtcggagccgtcagcgatttcatacttcagccctcttacaacacaaacactcgtgcattacccatactatcgagctgcaacacgaccattcttataacaccgcgcaattgtcaaagacaccatacg

SEQ ID NO: 184167 - DNA, 594 bp, Arabidopsis thaliana
agaaatcggggccggggaggagccgaggggggtttcatttttgtgtaattataaagaattatgacgtggcttgcccgcttccgtaggctgggatcttttagagcggccgccctttttttttttttttaccccgtttttttttgcctcgaaagggaatggaaggtatgtttttttgttcctcatgaccataccatgttggctcaaaaaaggacccccttggtttgtaagacatcggccaaggcacatttggttaaaaattaccggtcgcggaacataaaattgtctgttccggcattatgcattccgagagtccttaggggatttattaagctgtgcccgttttgttttacgcgaatgaactgtttcattttctagctcatgcccagccttattattgtcagaggggatggatatactcattaaacacttgccgttaggtgtgtgggatatgtttacgctccatacatgttgaggcacgggcttttgggtgaacatttgttcacttagccggtaacaacattatacctgtagagtgggtccctaggaacctttttcattgggaaatagcggcgaaaatttatgggtaaaacaaat

SEQ ID NO: 184168 - DNA, 517 bp, Arabidopsis thaliana
ttaatacttgacgcctgccgcgtctagctggtccttaacggcggctgggttttttttaccccttttttgcttgaattctggagatccttttgcttagacttctggggttaaagatcttttggtcttgaccccaccaatccctttaaatttccctggggggtttctttttttgagccttgcttaaaaaattggggaatttctaaggttctggtttcttaacaattcttttgctcttaagtatggaagccctctttttatccaaagcttcccactcttttctaaatctttccttttctgggtaagttcttacggccttaaaaagcacccccccccttgcttaccttatctacggggggcttaaggaaacggggcctaaaaaccgggccctcttttttttgggaacccaaaaactttgatgggtgcctcaaagaaacccctggattcccggcttggggggcccaaaccccgatccctttcaaacctattcttttaagggaccgcaaacttttcttttttt

SEQ ID NO: 184169 - DNA, 567 bp, Arabidopsis thaliana
tgacggcccgctgcacgcgagcgggagcttgtatactgtacagcggccgtccttttttttgtgatgtggggatttaaatgcattagaaaccctcacaagacttacccaaccaggaatgaaagatatattaaagagtctcatcatgacatttgtagctccgggttactttttcttaatggtagaaacatggtggccaaacataggccaaaacgatctgggcaggacaacggaattctcgtgtgttgggctcatgcgattccatgagtatgactgaatttactaacgatgatccaagagtcaagtcatgcgggggctccaaagctgtcgaaagctcggattaatcaccaactgcacctggaaactgagtgcacgagcccttaggggatcaaccagaaccctaggagcatggctgaccccccaaacgtgtctggcaacatatgcgctaggggctcaggctaggacttcaatgcccggtaggttgccgtataaggtgctaaatgcgggtgcatcgaccggactcccggtgagggggacgatgaaggccactttacgcggtcacacattttc

SEQ ID NO: 184170 - DNA, 482 bp, Arabidopsis thaliana
ccccccactttcaggaaacgaaaacccccgcggaggaaccaccctccccacgggttataaaacacaggggcacgcccccccccccaacaacacaaacacaacagcaccacgcgccgcagccgcgacgagccaacccgaaagaaaacaccccacgccagcccggaggcccccgccgaacccaagcaccaccacaaagcgaacgcccgaaggccccaacccgaaaaacgctttttcacacaaagaacgggggacaccacaacccacaacgccccgacacccaccaccacacccacccgagccgccccacccacccccagccaaccaccgcaacagcccgcgaggcagcccaccacacaagcaccccacatccacgcagcccaaaccaaaggagacaagcacaaacccacgcgacggcacgagcaccccccagaccacaccaaaaccctaacaacgcccgccaacgacacaacacccgacgccgc

SEQ ID NO: 184171 - DNA, 511 bp, Arabidopsis thaliana
gccaagcaggcagagcaaacaacaccaggaggcggcgtcgcacgcaacggcgggccttatagccgcggccccccccccccgcaaccgccgtcgaccacccctcagagaggcaaccgcctttttaaggggggccggaaggacgaaaccccccgacccaacacgaggacccacccccggcaaagcgagacccccagctcgcgcgtaccgacaagaacccagtatccaacacacacgcagagagcgcaaaggcgaccccgcgcaaccaaatgaacaaccgcccccacggcgaccccaggggatccaggacaagccccgccggccccacgaagccacctcgaccacaaggcaaacacccgcgccccagcccacaggtagacacagaggggcacaaacgacacccacctcacacgagctgaccccagacctatcagccacccagggcacacgggatggacccaacgcaggccccgacaacccaccccgggccgttccccgccacggagaaaccgcc

SEQ ID NO: 184172 - DNA, 494 bp, Arabidopsis thaliana
  unsure (1)..(494): unsure at all n locations
gaggggggaaacacaaaacnanaaacaaacaaaaggaaacgagaaagaaaggaattttacaagggggagagcagagcgaagccgaagcaaaagaaaggcaagcagaaaaggggagaagagcagcaagaccaaagcgaacgaaacccgggagcgaggacgcgaggcaccaaacaaaacaccagacgacacatgaaacacaagaacagagacacaaaaacgaggagagatgattgcgaccacagcacaagttttttttaagcgagggtcgtacgattgagtaagttcgcgtcagtggcgtattcggatgcgttatcncagcggggtggaagggggaggaagcgagtagcggactatggcgcagattggagagcgggaggagtagaggagcacagtcagggcacaacgcagtgatcggccagaggaaacaatgatggaagcagatatggaatttgccggcggtttcggtccgagctcacgaccttatacgctacggc

SEQ ID NO: 184173 - DNA, 240 bp, Arabidopsis thaliana
acaaccagaaacattcgacgggccacgaggagggaacggaggagaaagagaagcatcgacataagaaggagtaaagtggtcgtatcgtagataggtgcgtcggtggtgtttcgttaccaccacatacccgcaacaacacctccttttagaagaggggggggaacgaatatagaacataatccgagaaagaaaaacggcgacatgagaaacacacaaacgtgagaataataatctataaac

SEQ ID NO: 184174 - DNA, 223 bp, Arabidopsis thaliana
ctgcaggtacctggccggaatacccgggtcgcccacgcgtccgcgacgagaggaccaaacacatacagagacagagcataatggcgatacaactgtcaagacctgcacacaccgtcctatagagatccatctcagcgcaccgacgccgctgccatggcatgcacctccacacatgacattgcttgtctctgtcaggtgcacataccagacttctacaccagac

SEQ ID NO: 184175 - DNA, 519 bp, Arabidopsis thaliana
ctgaagctgggtacccctaaagagggccggcctttttttttttttttcccaaaacaagggctccaaaaaaacacacaaagccccttcccgggggcacatccatagacaccaacggggaggacaaaaaatccggattcacccccttcccaacccaaacacaaatctcttctcagagcaaaaccccgggccttaaatcttctttcgtccatcccaatctttaaaaatgggaacccaacaaagaataccccttcccaatgggggaaatgggcattcaccagaatcgcgcaatccacactcactgccgcccccatccggcgatgacgacgaccatttatatcccaacctccggaccgccgagactcgacgacaaaagagactgaaactccccggtattaaggagccgcgctatttctgctggacacacaccttctcctcatggaaacgatatcttgacacacgccccaccggtcggggataagatcgcacccgaaacccgccctaacgaacaaaagaaaacac

SEQ ID NO: 184176 - DNA, 494 bp, Arabidopsis thaliana
  unsure (1)..(494): unsure at all n locations
ggaagctggacgcctgcaggaccggccggaataccgggtcgaccaccgtcgcggcgcggtgtcgccacgcgtacgccactctgtcagccacagcgtcgatgtttgtttttggatacaagaaaagaaaatggngtgtcatgctgntacangcggacaanaaccacacgtagtttgataccttatccggctcaaggctatatcaattcgatgctcacagtggctaactcctctatgcagatgctgcatgtaccttcgtacactactacaccataccagattatctagcacgggtccaactccttgatggcttcttctttcgtctagccatcctgacgttaccgagaacaagactatgagagactaccttggagcacataaactgtaatctcaagagcttcgcgacaccacaagtgactccgaagtgatctccacggcaaactatctgtctgaagagtgttcagtgcctttgccactcgtggcttgctgcacctcaa

SEQ ID NO: 184177 - DNA, 471 bp, Arabidopsis thaliana
ctggcccccttccttaacctggaatcctttaaaccggccgccctttttttttttttttttttttttttttttccggaaattggtttttgtcatccttggcactaaagttgggggggcattttacaacatttttttaatatttttacatgccaaatcaaactaaaatgccaaatggtaacaaggttgcaagcttacccacatgaaattaagaaggggttcccttagccagtgaaaaccctcgtggataactagttaccaaaaatttacttgactactttaacagttcacatttcctaaacacacaaaatcaccaaacttgactttccttcctttcttgatgggtatcagcatttcttcgataacaccttgctttttctgcatcttcttataccgaactccttaggtttttaccccaaatttctcctgaacacccgcaaatcgattttccgttttagaacgctcctttttgta

SEQ ID NO: 184178 - DNA, 487 bp, Arabidopsis thaliana
  unsure (1)..(487): unsure at all n locations
actttggaagctggaccctgaggaccggccggattccgggcgcccacgcgtcgccaccgtcggaccttattcgagcgcttaaggactgatttgttatatctgccaagagagtacaattctgaatggaggtatttgcttaaaaaatgaatctacaaacagaattgctgtgcaggtacttacgattccaggatttgtataggatgccagccatcgctgctactttctctctgaaggaggtggatctgagctgatctactatgattgtgctagacctcgagtgctggttctctgagggtgctaagtctcacctgtgaatcttctcattgactgtgtctgcagctaagacactcgatgctcatgaactgtgtctctgacacgatgctatttgtcaaagtcttgcctgttntagatcggcacttctactcatagagatcagcttgtgctacccagataacgtggcagagttgcaacagtcttagattcagct

SEQ ID NO: 184179 - DNA, 477 bp, Arabidopsis thaliana
acaagagccgcccgttcatttggccttacagacttgacgtccatggcccgcgtcgtaagctggaccttagagcggcgcctttttctctccaccgccacttacacccacgaattcgggtatcgaccgcgtgccccccactttaaccaccgttgctactatgaccaacgccatccttcccccacttttcaccctaaagttccgacctggcccgtatcttgggaaccttaaccagcccatccttccccactgaccagacgcctcgcacacatttttactagagccggaacttcttccgtctccccttggcccaaatcccaaccatagtaaatcttggcgggacaacacaaccccactttttgtatcgcagtctttacccccaatttatcacccaaccagctaccctccttcccttgtccatcctacccccctcaacatcgctagaccctcttgttaaccgatcgacgccacacaacccgc

SEQ ID NO: 184180 - DNA, 236 bp, Arabidopsis thaliana
  unsure (1)..(236): unsure at all n locations
gcctgcggaccggccggaaacccgggctgaccacgcgccggagcgaacaaaaacaaaaggcnacncaacggcgacaaggccacgccggtccgaggtcagaggacacgacactcgtcgcacagcatcaggcaaccctacaaagaacacgtacgaagaaaaattcgaacgctcaaagacgacttggagcgggagaanggccggaggacnncaccggagcacagacgcgccancgagga

SEQ ID NO: 184181 - DNA, 410 bp, Arabidopsis thaliana
gggggagggcgggggcaaaacaaacaacatgcagcactaccaaacacgcagtacggcagtgccaggcggcaaggttcagagcaaaactccggttgaggctaggcggcgacgggcggctccacgaccgagcacggttggagatgcggggggcgcggcgcggctcgttttttatcacacagcgggggggggcgcggcacatatcccactggctcccggcgagaaaaacctcgccacccacgcacgaccgacccgccttcccgacccgcgccccttgctgatcactagagcagtctgctgctgcgcccctccatacactcagcggcgcaacgcacgcacacccccgcaccccctccccgtgctcgggtgacccagcgcgccttgccgcgcgcgcccaacctcacacataccgt

SEQ ID NO: 184182 - DNA, 505 bp, Arabidopsis thaliana
acttgggaagctggtccctgaggtaccggtccggaattccgggtcgcccacgcgtcgacaatcattcaaagcaatgcagtctagggttatttgatcaggcagcgatcggcacaatatcgcactagactctgctacgtaggattggtctggcagttgaacgctcgaatgatcggatcagcagtccactgctctaattaattgtcgaatcttggaagttaagaaaggtgtactcctacggccttgtatgggaaggtgggtggagtatcactgtgatcagtatggcgaaagctgtgagtagtcttcagctgaggctgagctccttgtcttcccaagacggattaattgaatatcacctctgtctattgggaggattggatgacagcatacatttaaacattctctcacatgcttaatgtctcttacgaaccgctgatggtaccgggagacttatggaagtgtcgacttactgatgcttgaagagattgagagctgtctcgttaccatc

SEQ ID NO: 184183 - DNA, 515 bp, Arabidopsis thaliana
agctgggagctcctgaagaggcgcccccctttttttttgtctttgagaagcgcggcggaaatcatcacaatcactagggctctgttacaaagcacaaatgcggtggaaagattacatcacgccgaaggagcggtcctaataacttcactgggaacagattcaaggctcactttttttgatgaccatggagttctttttattaggggcggcgtcacaaccatcgatcgacccatgcgcttgtgcggaaccttcagaacgaaaagcaaccccgtgatattcaatcgtagggaaagcctgggaccgtttggtagttcggcatgaaaccggggcaacgagcaaatcattcatcgaccaacgccccaaagagacatgccggagtccgaaacgtatgggccctcgatgtaggcaagggcgccctcccatttgacccctctccgcgggaaaaaaccatgtgagggaggccttatgccgtgtgggacggcagcgctacccggagggagggcgaaacgattccc

SEQ ID NO: 184184 - DNA, 487 bp, Arabidopsis thaliana
gggccctacaaaaaactttgccggccaggcccccgtccttaaccttgggtcctttaaaccgcgcggccttttttttttttttttaaataaaccattgtgtaccaccacttggggcactatcgttctcttccaaaaacgctcatgggaaaaccctcccgtcgcagagaaaccccggtggtgccatcaccccatcttattgctggaacgcatcaggttaaacgcacccctccatagctcttggctgacgcggagttaactccgttctatccctctaatataactccctttccccgctgggcatccaatagagggcaacccaagatggcccgaaccagtaagagcgcctgtgtctcgcacaagagatcatgccgtatataacccactaagctagccaatccgcgcgatttggccccctatgcgcgagcctaccttatgtgggacggtgcctctgcaaattgccccaccacttcgaatcacaacactgtgc

SEQ ID NO: 184185 - DNA, 674 bp, Arabidopsis thaliana
  unsure (1)..(674): unsure at all n locations
acgactcaccttanggaaagctgcgacgcctgcaggtaccggtccggaataacgggttgacccatgcgttcgcttcaacaaagatttgtctacgctcggaatcttgaaaccgagctgtgatgatgtgtgttagaactccatgggtctcggctatgatgaatccgaagatcactataaacaggatgtgtttgtcctacaaagacaccaccgaagatcgacacttattttttctgggggagacacacgctatggatgaacattcacaaggtcgccatctaggagtggtcctcgcctgctaaccaaacatcccgaaactacattaaccgcgacactaaactgggcaatcacctcctaaatcttctccgtggactattataccccgacgatatgtctcgcttactagttcaaaaacttcctatggctattttgttgtgtgatagacacttctccaatttccctttagacctctcaacattgttgtcacttgggtgccattcacaagaacctacatcatctgtttggccattatccattcccctaatcaaagttacggtgtaagttaacattcaccttgccattgatccactcaatcgatcctttggagtccaatcttataggcattttccggccaataactccccatctttcctcctctgtccattgacccgcttctc

SEQ ID NO: 184186 - DNA, 501 bp, Arabidopsis thaliana
acccccccacacttacgagaggcgagaaacacggccaggcgaagcaccagcacaaaccgcacaccccggctttacaaaaataaagggggcaacgcccgaccacccgaaaccaagagagaccaaaagcggccgcacgcgcggccgcacgcccaaaacgccgcgcccgcgaagcaaaaggacccagcaacacgcaaccaccctagggaagcgcaaacacagagcagaaccagcaacaaccgacgacgccgacaagcggaaccgacgacacgcacaacaagaagcaaacacttctaaaagaaacacacaggggggggcgacaccagagcgagccgcagaaacagccaaacccaagacaacaccaccaacaaacaacacacaccgacgcaacgaccacaagacggcacacaaagactacacacggcgaccaagaagagcaaacagccacaacccaccccagcgagccacacaccggggaccaaccaccgcggcaacagcaaacac

SEQ ID NO: 184187 - DNA, 478 bp, Arabidopsis thaliana
taaagggagaccagggggaggaggagtgtatcactcaattttttccaggggggggggcggcatgcaatatatgagggtgcgggttcgcgcgttggcttctaataatatttatgcatttggtcttttattttttatacgtactatcaatttactatctagagcctcaacctaagggcgggggcggttttctcatggtgggggcgaacacgattaatatatgacaaatcaagcaatctgaacataaaagatgacttaatattttataatggaacccaataaattcgatgcgaaatgcagcgacaccagaactcctttctacacgagagcggacaattagtcctaacgaaaattcccatcatgcatattattattatcgacgttgttagtgctcgctatagaggcaaagagtcgtcgaggaagacgcccaggggaacgtgaccgggccgtggcctgtaccactcccgagcccgtctcccgg

SEQ ID NO: 184188 - DNA, 527 bp, Arabidopsis thaliana
  unsure (1)..(527): unsure at all n locations
cccgcggaccggnccgaaacccggcgaccggcggcggaccccaaaaaaacggccccggaaggggggacaaaagccaccgagacccaaggaagcgacgaggccaggccgcaaagaaaccccgagaacaaacccaagccaccccccgaaccaccacagaccacncgtgaaaaggggcggacccaaaacccacagaacgaggaaagccaccccccacgggcgggggggagcggaccacacaacaaagcaccaacaaagcccccgagccggagggagaaagcggcaccacacacacgcgccccgagagccaccccaaccccacccaagggccaaaacccacaagcgcgaaaagaacgaagcacagccgcccccaagcacagaggcgccgcgcccagcccaccaggagcacaacggcggccacccagcacaccccccccgaaggacgacaacagaccacccgaccacccagaagcacggcgaggagaaggaaacgccaagacaccacccacacagcccgcggcggcacagcg

SEQ ID NO: 184189 - DNA, 159 bp, Arabidopsis thaliana
gggtatatttgtgtggcgaacggtggattgagagttcgagagaggtgtagtaggccacagaaaggaggatgtacggctgtagaatcggagtgggatgcgcgcaggcctcgacggtacgtatgatggctggggggcggagcaagagaaagaattttcatg

SEQ ID NO: 184190 - DNA, 415 bp, Arabidopsis thaliana
gtctcacattcgtccaaacggctacgtttccgtatcgttgtcggttctgctttaccctcagtctgaagtgccggccgcacgatctgcgtgtactacgcacacgttattcgctttctcgcttttccaacttgcgggcttctcacatctagctcttacccgggctatgcgcgatgaactagtaggcgaaagcgttcctatgatcaggtagataggtgtatcatcgcgtcgcttatccattattgcttttccgcgatcgtcttttttatctgttcgtttcgcttccgttagcggtatctagtacatttcgcagtggtggcgagttggttgactttgcacaccggtattttagttagatcgagatggaggttgcgcgatggtgtcgtaccctgatttccttcggtgtccataagcggag

SEQ ID NO: 184191 - DNA, 565 bp, Arabidopsis thaliana
  unsure (1)..(565): unsure at all n locations
ggggggggcccgggggggggggtggttnggttaagccctcttactcaggggggaaggcctggtttattaattacctccaccccctccccccacctcctcttacatactacaccggcgcgtctaaaataacgacgaataacgaagtgagggcgcaccttctcttcactataacatcacctcaaccccaccacaacatctttctttctccaaggggagggacgccaccctaccacaggttgttacagaataaaaaaacccccccgcactgcccatttcccacgcggtaccgctccatattctatatcaccacctgagcaatacaacgcaaccccccatcattcctgtcatctgcgcctccacccgctcaccctctatcactctctcacctccctcacctccaacccggtccacctcctctcccaaccaacaaaacaatcccaacaacaacagcacccgcccgtccgacacccgcgcacccgcactcatcgcacaccacccaggacacctcagcccccactctaccccccacccaccccacctccctctccgtaccacccacccccct

SEQ ID NO: 184192 - DNA, 484 bp, Arabidopsis thaliana
aaaaaaaaaagccctaaataaacacccaactaaaagaaacaggggaaggaaaaaccgacagcctcacaggggggaacccgagcaattcagccccccacccacacaccacacgcccaacccgccagccgcacacgcacagccccacaaaacacaacccacaacaaagatcaaaaacaacacaaaccaaacttttcaaaacacgggcacaacgaatccacacactcccgaaccacacctcacccgagcagcgcctcacgccacaagcccgacgccagacagaccaacgagagcgccaatcctacacacactcacccaccaccacaccccacccaccacccgacgagaggccacgaccacagacaaagagacagcagacagtagaaaaccacacaccgacacaaccagacgagccccgccccacccgccccacccccaccgccccccaccccccccacaccccccccgcaccacccctcaccaccac

SEQ ID NO: 184193 - DNA, 540 bp, Arabidopsis thaliana
gctccccctccaacttgatcctaaaaacggctatgctttttttttttaatgtacccatcaaccaaacaatatcgggaggtgctcattataaaatatcaccttattgactttatttttttaaaccaaaaaataaaaaaactaacccttctaaattctcataaaaaaaagagtggtttttcaaccccctaaaaaaactataaaattccccatttttcgctcaaattcaccccaaaactaaaaactccccacctaatggttttttttttaaaaaaaattcaccaatttcttcgcccaccctaacaaacaaaaaacaactcaactcatcccccaattcacacagaattcctccttcatctcttcctcctttctctttgttcggactcacctataaccttaatttttaacttcaacttaacctttccctttaaccgcgcaaaaaaaaacacactcaaccctcctttagaaataaacctctcaaaaaacacccacaaattttctccccctttcttttttttcctttaatcaacacataaaaacaat

SEQ ID NO: 184194 - DNA, 669 bp, Arabidopsis thaliana
  unsure (1)..(669): unsure at all n locations
cccactccctccctccccccctcccncaccccgcccccccccggaggnngggggggggaaggttaattttcgaggacgtccctcccccagttttnttttagggggaaaccatagggctcccccctgccgagaaacccccccccccccatttcccccnntcgggcccaagccctccccaacaaaaattcanacaactccccactctttttctttcaaaaaattctcctaaaaaaaaatttttttccccaattaaaattctttttcaaaattcttccaaaaaccccccctttctttttttccatcccttaaaaatttttttccccatttttttttctctctttacacacccgttgtcgcacaacctcctcccttagcttttttcctcatattccacccattccccaaattcaaccggaccccttttttttttataaataaataacaaacattttcccccaccttttccacttatcttccccacttttctttaaaactcttctcccaaaaatattctccccccccccacacactctaactaacaccctatattttttcttttttccctacaaaccccctcaattttttcttcccctcccaaaaccttcccaatttcctttcacctccttctttcactaccccccctttacagcttacttctcccttcttacc

SEQ ID NO: 184195 - DNA, 456 bp, Arabidopsis thaliana
  unsure (1)..(456): unsure at all n locations
gccaagccccccgtaccgaaggctggaaccttaaaaaggggccgccctttttttttttttctttaaaaacaacaagaaccggcacaacaggaacttcttaatggcacaacaccgctactcaagaacggacctctactcaaccaacgacctatcgcaacaggctctagcgagccccaccgcgacagaaaggaacgttccaccggcctacatctttgtttcgcacgaaagcgcaccaacatcaataccgttaagaacatgcaattgtcaccgccccaattaccaagaagcgggccccataacccgcccagaacacatgtcccggtggtttgcgcccagaacccaatcgtctgagttgccgacacgaatagtttcagaaaccgataccccgcgattcgcccccgccccctctnatcgaccttccaacctgaggacagcagcccgtagcacaagcaacag

SEQ ID NO: 184196 - DNA, 482 bp, Arabidopsis thaliana
  unsure (1)..(482): unsure at all n locations
cggaaacccccacgcccgattttcccaccacgagggagccaggccgtcccaaaaaaaaanaccccctttcaccccccgcgggaacaacccaattttaaaaaaaaattgatcgaatcaaatcgccatttttccttaatcaccccaataaaaagaaaaagaaatattgtttcaacacccggcccctccccctttcccctccttttttttaacccggcatgaagggctacactcggacgcccccccaaaaacaaaacccccccccccgcataccccccaaaaaacccccagagaaagtctccgcggaccccctcttttcccacacaaccaccccacccccataaattttaaccccccccctttctgcacaacccaacatccaacaccgacccaaaataacaacgtcccctccgcaaaaaaaacaccttatttacaacccccccccaaaccttctcacaaacataacaccactcacccccatagac

SEQ ID NO: 184197 - DNA, 325 bp, Arabidopsis thaliana
agcccccccagcctttaaaacgagagacaaaccaccgcaggagggaagaacacacaagggagaagactttagcaaaaaaaggggaacaggccgcgcgggagcggcggacaacgaaaccaaccaccgaacacacagacgaacggggaggacgcacagacaaaacgcaaagcgcacgacccgaccgcgggggcgcccgcgcaccccgacacggacaacaacccccacaaagagcgagacgcgagagcaacgaacacaacaaaaacaaagagaattttaaaaaaaaaaacaaggggaggaacaaaccaggacagaaccggacaaccgc

SEQ ID NO: 184198 - DNA, 514 bp, Arabidopsis thaliana
tttcgcgttttcccgggtgtgacggagacgaggagtggcagaaaatttgtgggggaaattatgccatcgaaaggattatgtaaactatgatcttatgttcggtggagtataaatacgagacacggagattacataggttttttcgaaggcagggggggggtgcaatgtctgcggtgagtactactgctggcatgtcgtatacgtacgtagtacgagcaatcggtacaaaatcaaaccgtgagcgggagcgtgtaggtacagaagatacgcggaggatagccgcccgtcaactgtagctctgatatagtaaatcacaccggtgcgcccggcgcggccccgcgatgctctagtgctatccgtccttacccgcttctatcccgtgccggaccccctgcgtccgatccggtcgcccggctctacgccttcctcccggtctcttccactcctacacgcctccccgaaccaaccacctcgtctctcggctcttgctatggctatcagtcgacggttcaat

SEQ ID NO: 184199 - DNA, 525 bp, Arabidopsis thaliana
acccccccccttagggggaacacacgccacgcgaaaaagaaaacaccacactttccaaacaagggggaaaggcgccaccaaacaaaaccgcaagccaccccgccacgcgcccagcgccggcgcgcaacccgaaaaaaaccacaacacgcgggcccgcgacgccccgaggcgacccacccagcgcgcgcgcgccacgccaacccaccaaccaaaaaacactctttccaccaacaaggggggagcccaagccgcaacgctcgcgccccccacaacaacccgccacgaacacaccacgcacaggaccaccacgaccacgcgcgccccgaccgaggcgcgccagacgacccacaccaacagaacagcacgagagacgcaccaggcacccgcaagggacgcgagagcgccgcaccacagcgcgcaacgacgcccacacgcccccgccaccccaacaccaaaccccccccccccgagaccacaccaccccccccagcgcacccacaaaccggcgcgcgagaacgcgccacg

SEQ ID NO: 184200 - DNA, 310 bp, Arabidopsis thaliana
  unsure (1)..(310): unsure at all n locations
actacacactctagggagagctgcgccgcctgcaggtaccgggacgcgataccacgggtcgaccctacgcgtccggtgacagcnntgaattccccagatcattaagaggctatcgaaaatgggcgatgatggtgacacatgaacctacctttctatagagctaagacttcagaacttgttccagatagcgctcgacccgatgagatcaggaagcccaaaagcctgttatagcaggtgggaaaattgttgagcttcatggaacagaagtccaaagactaccctagctggacccaatgaatgggggccctac

SEQ ID NO: 184201 - DNA, 267 bp, Arabidopsis thaliana
ggggggaacgccgagcggggcggggagaaagacgcgcaggccgcttccggccgaccaggggggacacgcagctgaaccaggcgacaaacagccgaccaagccccgcgcgcggcgcgggcgggaaggcccgcgagaaaggagaacaaaacgagaaccgcgaccgcgcgagccgcggaggcaagggaccacaccacgagcagaggaggccagcgaggacggcacgagcccggacacacgcgacagcgcgcgtatttttgcacacaccag

SEQ ID NO: 184202 - DNA, 494 bp, Arabidopsis thaliana
  unsure (1)..(494): unsure at all n locations
gaagctggacgcctgcagaccggccggattccgggcgacacgcgtcgtgtaaacagagaattttgctgggctcgtgactctgagagaaaacttttcttgtgacctcgctagcatcaatggtagatctgcactgactcatgtgatataccagcgactgatgtttatttgacagacgtatgctggacatgctatttgcaaactgcagcggaggatgactgaatctttgctacactctgtatcctctcgacgccgttccatggcaggtactaggagagacaaagttccttgttgcagaagngatggcattcccagaactcttgtgctctgtcccacctttacgagttgtgagatgtggaatttaagtttgtgagagctgatatgcaatcagctccctttgatgaatagcgccaaaccaactttgccactaatctggggtgaaaatctatacatcaggggtaaacaagggaggtgccatgtcgagaggataacaccac

SEQ ID NO: 184203 - DNA, 619 bp, Arabidopsis thaliana
caccatgtggcgcggcacacaatataaatgggtaaataggtgccacggggagcgcggaatcccggagtggtcgatttcctttcgcatcacattgcccaacccttgatttaactggataggaccacccatgagaatcacacaccaacaacgaattttttttttaggggggagactacccacccccccatcccccattatattgattaaaccgcccttgctagctaacgactgcatgatctttatttcatttaacccactcgggaggacgggacgactggtagatgagacaggtgtacatgcccgcggtgtcctttacagcacgtcctgccgccctataaactagcacggacacagggctgcagtgtgaggatgcgcttgtgcccctgatcctagtcgacacgtcaccctccccaaggggggtcacgtgtttggaccacatcccaccccaccccatggtttgtccgccgttccgcgcaaccaacctggtgggagggactggtccctgtcaattcacatgcacaccacccacttgacatgttgtttacattgttattgtcaatggtccaatgaccacattaccctggtgcccccatctgaattggccacccctagccgctca

SEQ ID NO: 184204 - DNA, 136 bp, Arabidopsis thaliana
  unsure (1)..(136): unsure at all n locations
ctgcaggaccggccggaaaccagggcgaccacgcgccgacacctgacgggcacacagaacgaatgacggcaagcagagatcgacagaaaatgcggggagacaccgacacacanaaaactgccgaaacacacagcag

SEQ ID NO: 184205 - DNA, 469 bp, Arabidopsis thaliana
  unsure (1)..(469): unsure at all n locations
aaaacccccgacaacacaacaagagaaagaagcgcaaacacctcngtgtggccagaaaaaaacctacaagggcaaaagcccccgaccaaaacccaggaaccccaaaaagggccgccccaagggaacgacgcagcaggagccagacacccaccggaaaacagggcgaacaagccacaccacacccaaccgccggaacccaggcaaggcaacacagacacaccccgaccaagcaagagccaaaaaggcggcccaaccaacagacagaaaacaccacacacccaccccaacaaacgagggggccccaaaccgaacgacccgaccccaacaacaaaaaacagcacccccgggacaaagggccacgaaccagacaggcaaaacgccccagccccaacacgaacagggggaacgaagangagcgaccgaggcaccggaaaagagagcacaacagaacacaaaaacacacgccgaa

SEQ ID NO: 184206 - DNA, 416 bp, Arabidopsis thaliana
gcaggcacgccgcggaccggccggaataccgggccgacccacgcgccgatcagcgtcaagggaacacgcgacaccaggcacaggaccgggcgacacgaagaccaaacccagagacgcacgggaccagcacgcgcacccagacctcgggagtcacgcaagacgggcggacgccgccttttaccggggagggaacccccaagcgaccgacagaggaccaggagcagcaccaaccccagcaggaaaaaaccggcccgcgccaacccccacacaccgcgaacaagaaccaccgagaaacccacacaggcgggaccagccacaggacccgaacgaccccccaccaccaaccccagaccagcaacacccggaagcgcgccctccaaaaggcccgaccacacacgggcgccagagccaggccc

SEQ ID NO: 184207 - DNA, 380 bp, Arabidopsis thaliana
  unsure (1)..(380): unsure at all n locations
agaaggacctttcgaacgaggccaagccccgccgagcagcaggccgggacacacagaagcaagaaggccgggacccgaaagaggccggagagagcccgggcacccaccaccgcggaagcacgccaaaaaggaacccgaagcaaacagcacaacaccagagaacaaggagaggcaaaccctgcacggagagcacagcgagccaaccacaacacgaacaggcagcgcccgccacgggaggaaagagaacgacggacgcgcgacccgcagtttccgacgcgaggcggcggccagagcaggcaagagcccggaaccggaagggaaccacagccgggggcgnacagcacaagggaacagagcgaagaagaccgaggccgaagaaa

SEQ ID NO: 184208 - DNA, 251 bp, Arabidopsis thaliana
cacgcacaaggacagagcgcgcgcccacgaagccgaggcgcggagggaaccgccacaaaacggagcatggcagcagcgcggcggcgcgccagcgggccgagagcacaaccaacccagcccacgcaagcaccgcgagcagcaaggcagcggcgggagggcgaagcgaacacggcgcccgccacggccccgcgagcaacgaccggccagagaacaccctttacaacacaacaagaaaggggggggaacaaaac

SEQ ID NO: 184209 - DNA, 334 bp, Arabidopsis thaliana
aaaaaaaaaaagagggccttcttattttacaacccccggcctttagggaggagacagcggggaggtgataaagcagaaggcggctttacgacatgcgggaagccccgtcattaaggttggggtaacaagacaggtgttgtgataggaagatataggaagaggaaggaatggatagaaagcgaaaggaggggcggtcttttgggagtgaattttcaactaagtctaacttaaatagagaacacttttggaacgatagggggggaacagcgacttgagtgcacctgagcagttcggtccctgccgaaagaacgtaggaggaagagagaaaggtaaa

SEQ ID NO: 184210 - DNA, 216 bp, Arabidopsis thaliana
  unsure (1)..(216): unsure at all n locations
gggggggaacggggggggggggagggagatgtgactgccttttaccacanggggagaggcggatgtaataaacgaacgggctcggaccgtgttacctttccataatctcctcacatcgccgtgcgtacgtaatctgggataatctgtggatgatggacggaggagagagttagagtataacagtgatgtatacgagagctttttacataagggggg

SEQ ID NO: 184211 - DNA, 401 bp, Arabidopsis thaliana
agaaaagaaccttttcagacaccacggcaacacccccggcgaggccagggaacccctcccggaaagggacgacccgctctttcaccagcatcacacacgcacaaagcccgacggaggcccaacaagcagagaagacaagaagcaccagaggcgcgcaacccacagaagcacgctataactaccgaagtggagcaggccaaacagaacaatgcgagaaggagacgcggcctcccctgcacgaggggaaggaaagcgacacgccccacgcgattcttcttcaccgggcgcgggaacacaggacgagatcgggtgcggtaccggaatcacagcccagatccaccgagcggggcgaaccaaggggacggcaaccaagaaccaacacaaaagacgaagaagacgag

SEQ ID NO: 184212 - DNA, 400 bp, Arabidopsis thaliana
cgcgggaccggacggaaaacaagggcgaccaggggcggggccagcgggcacaacaagagacgacgacacggggaaccagcagagcgggacccaccaagacagcgccaagcacaggacgaccaacaacacccgaccgcaggcagaaggagggcggcaacgccacgggagagcgacgcccacacaacagacggtcttttctggggggggcggcaggacacaccaagaccagcggggcggggccgaccacacgcccacaacacgccagcccgaggacgggccgggagcccgccagcccaacaagagggaccccgacggcgccggagccacacaagaggaccgggaacagggcaccgggagccagagcaccacccagacccacacgcgccaagaccaacgcaga

SEQ ID NO: 184213 - DNA, 616 bp, Arabidopsis thaliana columbia
aatcgggatcaccggcctcgaatatggcgcaaacgggcagcccgagattattttttaacacgtgccccagtttttttatgagggggacaaccaccacacgagtggccgcaaaaccccgtatttagtgaaatggggatagcgtactggccatcacaacgctgagttagaaacagcatacactacgacggtgatgagtgtctgtatgcgatttcatacacctaaataacgagtcttgttttatctgaaatccactaaaaaaacatcagagcgctggtcgcaggctcatcagttctattttttttctccgtaaacggcgtgcgagacgaacgtagcacatcttcatctcctctaacctgccctgactacacgacatcacaaagtcttcttcgagcactatctctcatatcactttcatcgagactttggtctccactcccgtcgagaaaatggatactctccgtgatactacagacgagagacgtgcctccgagatgcatacgcagcacgcaaaggggtgtcggtaatatttacacgtaaccccttcccaccgatacctcggtggggcgccgttcataccaacaacaccactcattctacgtaccggatgatcttgcat

SEQ ID NO: 184214 - DNA, 645 bp, Arabidopsis thaliana
caagagtaaaaacccgctatcatttttgggggactttagaaggaatttggacgggcgcatagcaccgcctaacctaaagctttgggattccctttaaagaggggccgggcctctttttttttttttatttctcgagaaggagaactggcctcgacaaaatcacaaacctagcacggaaggccgacgtccatcatttaaggctctgcctccttcttagagcccgggcgtcctaacaccccgaaccccaccgactcgagctatataaagcctaacatgaataatggctccaattatagacaccacctaaaaagaaacgttggggcgggagcacattaaactcgcctatcatggaccatcgctccggacctaaaaatgggttgttctcgagcagaacggtgaatcggacttcactagaaccaatttctacactaggtgccccggcatacggcactaaaaaaaaaacaattgtaacatctcattcgttcatgcccccctaatgagccgagtcggaccccaatgtcataaatgctcctctagccccagaatgctaaatcgtctaagacccgcaaagcctccgacacgaacggccgatacaaaccgcagtggagccaccaataaaaacaatagcgactctcgccacccttc

SEQ ID NO: 184215 - DNA, 562 bp, Arabidopsis thaliana
ccccagggttaggaagaggcaccgcccgcgcacgcgagagagcgacacccctttctccccggggcggggggccgcaacccacacatctctctcccctcgcctcccccccctattttgagaggccgtcccatgggcgttcccgcagagcataacggccagcagctcgcaggtcagtccactgcaccacagttgccccagccaccgtcctttctcccccggtggggccgacgctacctccactgacagcgcagacaggggtccgcctggctcagccccccccgtacctgccttccggatccatgtcgccggacagatatcgcgcagaagttcgttgttgagagagcgatctcggctgtcagaacgacgctacgcaccacctcgtttccgtcagacttaacctatccgatctctaaccgcggacccgcgcttccggcgccagcgtttgttacagggcgcgcagttccacacctcctctcaaccaaacccacccactattcactacgatttacccactcgttccgcgacacggaatagccgcgaccaactattagtgtatagcacg

SEQ ID NO: 184216 - DNA, 390 bp, Arabidopsis thaliana
atcaggggggaggggcgctcaaaaaaaaacattatcacactctcccgcaaatccccggcctcgtctcgctgcatataatccctccttacctactcgcccgaggcataccgaccctcctcatcccgcccgaggcgaggcatgcgctgagcagactcagacccacctctttcttcccctacggggggggcacacccccacttctcactccactccccacaaaaacactctatcaccaccctcccccacccgcggccatcttagtatctgcatcgggccttgccaaactaactacaacactcactaaagatatgtcgactacatccggccgctcgcgcccaccccgccgcccccacccccacgcacacgctaccagccccacccaaaccataa

SEQ ID NO: 184217 - DNA, 241 bp, Arabidopsis thaliana
ccccaagagcgggcggccctcccggctgtcgccccagcacacgcgcccggggcaggcacaacgggggccgggaaaacacatcgaaggcggcgtcacgccagggacaccggccgaaacccaaaccacgggcccaaccacaacaaccagcgaaaaagaccccccggcccgcggaagaggagaaagaacaaagcactactttttttcaggagggggggacggcaaaactaggacccgatcgaga

SEQ ID NO: 184218 - DNA, 345 bp, Arabidopsis thaliana
ggagaagacgccgcaggacggaccgaaacccggcgaccacccgcgagcaaaccaccaggagccgacaaccgcgagagaaaaggaaaaggacagagcaacccacgaaccagcaccaaaaagaaagcaggaaggcgaaacgaccagaaaagactcaggggggacgggccacaaccaacaaggaggcgaaaacaaaaaaacagaccaccaaacggacggacccaaggaaagaagaaacgaaccaggggagagaacacaccaccacccaaaaaacacgccgcgcgaccaaagaaagcaaaccaaacgccacacccacaaacgcgaggcaccacaaacacgacccgccgc

SEQ ID NO: 184219 - DNA, 326 bp, Arabidopsis thaliana
aaaggaattttgcaaggagcacccaggccccacgataggctaggcatcttgtccatttggtctgtgatgcgtcgttatggttgctccaggggcaagaaacgtcagagcgggggctcaggagccgagactttcaccgccaggtaacgggatcgcccatattccaccacgcggtgacgccatgggctagccttcagttcgagatcaaatcgaagaagcgcgcctacatacgaatatatttttcgccgcatccaactcttttcctctggtcgcgccggttaaagcacggttcacttcggtccgtaccggaatattctgatgtggcgcta

SEQ ID NO: 184220 - DNA, 578 bp, Arabidopsis thaliana
ctatgacgacccatgcacgcgaacgtaagcttggatcctctttagcgggcgggcgaggggccttcttctttttttttttcgcgtaccttctaaggaatgaaccacccttttttaaaaatgctagggcgttggaactttttcattcgcggcctttaagggactaaaaaacgggaatctagaaatttttttctcctgggggggccaaaaaaagccttgttgccgggagaaaatgttctccctccgactctgggaggtctcatgccttggaggggcctcaaatggcggcaattttatagcgtccgtgcgggcgaagatgatccgtctaagcgtgacaattttaacaaaaagaccaccccatcttttgagcccggcaacgttgttgagcgacagagcctcccccacgcctctccattcgcctaagaacccaccgcgagggtcaccggattctcaccctttcgatgtcgcgccgcgcgaaccaggccatatctacaaaatataagccttcttgaacaatgagcattcctgacgcgcagggatccgccgagagcagcgttggagcgggtggggtgtgcccggcg

SEQ ID NO: 184221 - DNA, 535 bp, Arabidopsis thaliana
  unsure (1)..(535): unsure at all n locations
tcactcactttggaagctggccctgaggtccggccggatcgggcgccaccgtcgccacaaaataaggtcttttgcttaatagtatttattattttatttattatttttatagatgaaatctctgctgtcttttaccttcttgttcatcaatcttaagttcgtcttgtctagtttctgaggagtgattntgttgtggtgtggtagagaatgatcngaacagcagtgaacgtagagaggtaatatgaagtgggagaacattggagaaaagacgttgctaagtnnagttgtagaactctgaactggagaacctgtgtctcagattcttgataagagaagtctcagcatanatgctgacagattagagagagatagctctatgaagttgtaaacatccaatgttgttcatatatgagggatggcagtagacgaaatattatatcttgagtatgtacaggggagactcttgatagattgtaatgatggcggatgaagagataggccngnatatttcacagctatcatgctggactctgca

SEQ ID NO: 184222 - DNA, 433 bp, Arabidopsis thaliana
cccagtttttaagaaacggtaaggccagccgagcccagatccgtaaaccacacacgcacgtaccgtccggggccgtagagatataccaacaccactaacctcaaccggagaagccggccgaaaaaagaacccaacacaagttgctattctggccgtccgccggctgctaagaagatttatgttcaaagtaaagtgtagcagaggcacgcgcgtcgcggagcccaccggcccctcgcccacagaaagcgaggaacaccctcgcactcgccagcgctacagacgctcaactatctcattcgtatatggcccggttcccgcaaacactcctgctatcggccgcgatcacctttacccgccgggtcccacaaccgccccgagataggcaggtccgctacctgacccctcaatatatgaactcctcatccctctctcg

SEQ ID NO: 184223 - DNA, 457 bp, Arabidopsis thaliana
ttgacgggcgcagcccgcgtacgtaagctaggatcctatagagcgggccgccctctcgtgggcggtctacccccgcaagacaccgaccctaacaaaggggcaggttcgctttgggttagcctacactcataacccaacataacatgccaaaggcactccttccacccgtacgacctggcagccctcagcaacagacgccacaatcgcccacgtacttttttcttcgcggtatacttgtcccaaccaaacatccgtggattcacttagtctaaacagggtccatcttaaagaccacctcacaatacgtaaatgccgtgccaacacaaccccctatattaagtccaaaagtaacaaagattcggcctccttattgatgcccaagcacccgacccgaaagtccaacctcagcccaaaactaaccacaggtttaccgatttctccccttgcacaaacccac

SEQ ID NO: 184224 - DNA, 610 bp, Arabidopsis thaliana
  unsure (1)..(610): unsure at all n locations
gacgggcggcaaggccacgccgtnaccgtaaggcatggggaacccctactagaaggcggcccggcccctactgcgtagacgagccacaacgcgcccgaacggcccgccacggcccaatcgagagcgcgaacgctacagggggggacggggaggacacccccagaaagccaagctgaccccacgacaaccctgaaacaatgcacccgcagaaccacgccaaagagcccacgaggaggaaagagggcccaacaaccacgcgcagaaaaattatagcggggggggagaaacaaacacacacaaccggggccgggcaaacaccgaaaccagcaatgagcccccgcagaccggacgccacagaggccacgacgagacaagaagaacaagaagcaaccccagacaaagggaagagaaaagggaaaaacaagcacaccaacggcgaggcaacacccgcaatccccagcacgatccaccgagaaaaaccaacccgcagacccgcgcgcccaccggaggcgcacacaacagaagaaacaagcggcggggaaaaaaagcgcacgtacgcccaccaaaccgcacaagaacgccgaagaagacccgcacgggcacgaccaaa

SEQ ID NO: 184225 - DNA, 442 bp, Arabidopsis thaliana
cccccccagcttttaaacgagacgaccaagaccgccacagacacgaccaaacccagccactttacaaaacagggggaaagacgacgcaacaaaaaagcagcaccaaccacacacacccaccccacaccacccgcgaaacgcccaaccgcaccagcacaccacaccagccaacggaccccggaaacagcaagaaaacaaaaccacacacaaacgacgcaggaacgaggacaggcaaaaagagatttttcaaccacacacgcggggggagcgagacacaagacaacgaaggccagcgcacgcgctgacaaacaacaaacgacaccaccccaacacacccaacacaacaacacaacaacgcatacccacagcgcgacccgacgagacgcacaacacgcaccaacaccaacgaccacgcaccgccagcacccccgcagcacacaac

SEQ ID NO: 184226 - DNA, 204 bp, Arabidopsis thaliana
  unsure (1)..(204): unsure at all n locations
aagcaaccacgcctgcaggaaccggnccggaatacccgggttcgacccacggcgtccagacccacgccgtaccggagaacagcgggaccgacgcacccccagcgagcagactacgagagaccggcccccggccacagagaaggccgagcaaagacctcggactcgcgcgggaaaacgaacaagaagcgacagccgagaacatcg

SEQ ID NO: 184227 - DNA, 687 bp, Arabidopsis thaliana columbia
ccacccccaacaccaccccaacccacaaaacacaccaacgcaagaccagccaaaaccgaagcctccttccaccaacaaccccccccccccttccacaacaaagaaacccccgccccccagcaaaccaccaccccacccccaccccctttcccccacaaaaggggggcaaggcccccccaaaaacaaaacaacccaacccccacccacctcacccaccgccgccaaacgcagacgacaacaaacacaccaacaaacacccacaccacacccacaccacccgcacaccaccaccacaccaacacaaccccccccaccaccgacacccaccgacacaccacaccaccaaccacacctcttccaccccaccccaggggggggaacacccaaaccccaccagacgacgccaccccgaaaaacaccagacgacacaccgaacaccaccccccacccaaccccccacccacacccgcaccccccaccaacccacaccccacacaccccaaccgcccacacacgaaccacacacaccagactaccccacacgccgccaacccccaccaacccaagcaacccgaaccagccaccccgaccgcaccccccaaacaaccaccgaccccacaacacacacgcaccaaacgcaaaaacaacagccgcccaccgctccccccaacacgacacacaccccac

SEQ ID NO: 184228 - DNA, 240 bp, Arabidopsis thaliana
  unsure (1)..(240): unsure at all n locations
gaagcagcgccgcctgcaggacccggccggaaacccgggtcgaccacgcgtccgcgttcnacagagacgcaacgaacacaggccggcaagccagaatacagacacaccagcagcagcaacacagcaccaagcggcgacacgccaagacacacggagcggcgacgccgacccactcaaacaagacgatgctcaagagcggggcggcgcaacagaagactgatcgagtcagagacaccacgg

SEQ ID NO: 184229 - DNA, 257 bp, Arabidopsis thaliana
ggaagctggcccgcaggtaccggccgaattccggcgtccaccgtcgttctcaactaagacaggctcatcttatatatttactatctctttgctatcttgacctcgtctccttactttcaaagacttcttaatgcgttgtgcactcaggtatcaaggaggacagcacgtgatgagagaccagctatggatcgtctctaacatatcagaaagattcagatggagcatggcacgttgcgacgaatttattaccgtttcac

SEQ ID NO: 184230 - DNA, 572 bp, Arabidopsis thaliana
aagggcgaacgagccagaagagcgcagacaggagggaaagaaagttagttggggcggcgcccgattaagaaggggaaccaaccgcgcacgaggcgagcacgccacaccgttagaagagggggggggggggggcaaaaaaaaaaagaaaacacaaaacaaaccggggagggcccgcgaggggagaaagagacaggaaaggaagaaggaggaaggaggaaaagcgagaaacacggaaggagaagcagagaggaggagcgagaacacgacgaccgtttttcaaacaaacgatgttgggaacgcaaccaaagacagcaccgcacaaaaaaaaacaacccaccaaggcgcgacgcgacacacaccgcaggcgagagcggagcggacgagagaagcggagcacaccaacgggggcgacgaggacgaagagaggaaaacgaaccgggagcagacaacgcagggaagagggcgcgaaaggagaggaaggaggagacggggagcagaacagcaacaggcgcgccgcgcccgcgcacaacagacagaggggaacaccgagaacggaagagaagaagaaaaag

SEQ ID NO: 184231 - DNA, 567 bp, Arabidopsis thaliana
ttaacttgacgtcccatgcgcccgtacctaagcttggatcctctataacggcaggctttgtttttttttataaataaaacaaacagtttcttcttaattttccaaaacatatttatatgcctcataattccttccccaaaaacattaaacaaatctccctttcttatttataaaagctaaaggatatactctaggggtggcgaggggaaaaaaaattaaccttaaaaaaaaaaataaccccctttgaaatccaaatttggggtgggaggggtctaaacaacctttttactttaaaaaaataaggtgcaaaacttaaaaaaaaaactatgctttaaaacttggtctggaaaaatttgtgaataattttttttataacaataagggagtacccttgtgaccctttttttttctgtttttataaaacctacccaggatttttttcgaacaaaaaataatcgcccttttggaccccttttcttttgtaaaaaaaaaaattttctgggcaaataaatttgaacccctccctcggttcgtgaaaaactaccacaaacccctttttttttttgg

SEQ ID NO: 184232 - DNA, 364 bp, Arabidopsis thaliana
cgatacacacgtatagctagcagcattcaatcgataatttgaacgctggcaatatggtgtgaatactcgcaggtcacaactcgatatgcagagacctgcaactcaactcactcacaagacgaatgcttacaacaggatcttcacttgaggttactttagcactaaacttgcctgatgcggccaacctctgccccgtgacgtaagcacaagggctcgtatcatcaacccagctcttcactttaaagaatagatgtctaatcataagacaaaacaacggtttatgcaaccggtcactcccatatgccgcggagacccttacgaccaaccaacctgggggggctacggacgaatgaacttcccggga

SEQ ID NO: 184233 - DNA, 334 bp, Arabidopsis thaliana
  unsure (1)..(334): unsure at all n locations
acgtcgcatccacgcgtacgtaagcttggatcctatanagcggtcgctccattgggttaggggctttttaannaaacgaggcgatactttcatattaatattaatttccagttccgggagtacatactcaaaagtaaagatctaaatgtacaaaactcatggggggaatacaanacttctttgagttaggaaaacaaaagagggggattttttgggaagtgcgtataaaattactgtctttttaaaagaaacatcttcaaatgcacaaggtgggttcccccgccttctaggcataccaaaagggaaaggaaactcacccccccccttttcgagt

SEQ ID NO: 184234 - DNA, 407 bp, Arabidopsis thaliana
  unsure (1)..(407): unsure at all n locations
cctctacttgtcttaacgtctacatgggttgtcctaacatttacaaaaaactttgtttattatatttcacaaaccagagagactatnttcaaccaatcaaaaatctttcctagaataattttatactaccttaaacccaacccttcattgaggggttaaaaacctatatcccctaacaaaaaaacccaacttgaaggagactgagcacttgtaataaacactatttcataatttaacaaaaactttggctttccatttatgctgaatctcatccactataatgcaacaaccaaacttccctttaaatgtttctaaacaattctctaaaaaagaaattttactttaaattacaggtattttaaaggttttcccccttaatagtcttttaaaaagcttaactaaaaaat

SEQ ID NO: 184235 - DNA, 438 bp, Arabidopsis thaliana
  unsure (1)..(438): unsure at all n locations
ttaacccttttgtagaattctcacaaccgtacctctttgagaattctcacaaccgtacccttctgacaatatctcacaaccgtacccttctgacaatatctcacaacgctacccttgtgtacaatttttcacagggggtgcccttctnacaatactaccaaccttaacaaaaaaaacaaacccttggcccacccttcctccacctctaaattcccacccttacctacaagcctaccaaatttattatattgatttatattaaacctaatccaatcattggcataccttttccattttaaaatttttaacccttacaattccacaaaataaacgacctggaaaaataaactctaaaccccgggttcccaataaagaaacttacctaaattaattcccttccaatcactgcccattttaaataggaaaacctatcccccc

SEQ ID NO: 184236 - DNA, 507 bp, Arabidopsis thaliana
  unsure (1)..(507): unsure at all n locations
ccccccgaaaatctaggtgcctctccaagattagacgtgctcgcccgtctagctggtccttcgcggctctcattgttcggggcggtcataatanacagaacgtgtttaaacctatctccaaacactgagcaaatgttttatggaggctcggctgtcagcttactgaagcctaattgcttatccaagaatctataaacaaaggccttgctcacaaggggggtgtctattttaagcttcatgtggatcacatcaatactttgtagccctgtttttcaatctctgatgatagaattttcatggagggtctataagtgataactccatcgatctaaactagaagggtaaaacgcaattgattcggtctctgtcccaaacctttgattggggggatattattatctctcccggtgaggagactgacaaagaggctatttggtactacatgttttgacaaacattccccggcgatcgaggtccagaccaagataagccaccccaacccggtgg

SEQ ID NO: 184237 - DNA, 617 bp, Arabidopsis thaliana
  unsure (1)..(617): unsure at all n locations
accccaacccgcggggggggggggtagttgcgcctttttttttcttctccactttgttgaaaggggcccgcnccgcggaaccggncccgaaaaaccgggtttacccacgcgcggcagaacccccgcgaaaaaaaaaaaccaaaaaaaaaacgacaaaaaagcccacccaaaccaaaaacaaaaaacacaaggaaccgcgcacacagaggcaaacaaaaaaaacaaccaagggtccccagataaaaccaaaaaaaaaaaaaacgccacaacaaaaacacacaaaaaagaaaaagttttttttttggggtgtttaaaaacaaaacctctttttttttcattataaaaaaacactttcattcttcttttttttcaaaaaatcctttacaactttttttatttaaatcaataatatcaaaatatccattttatttctatacccttttactattttcaccttaatctacatccaaatatactcctcttccctttttaaataaattttttcaagtatttccaccgcattaatatctcctctaataccacctttctttcaaaatcttcctctttttttatccatttcttaccatttttatcctatattttctttcctttttttt

SEQ ID NO: 184238 - DNA, 362 bp, Arabidopsis thaliana
ttccttttttaaaatactaacaaacctacccttttttaaaacactacaaaacctttttcttgggggtggccacaaaaacgggcgcttttaaaaaaaaaaaacacccctaccctttttaaaacatttccccccggtaccccttttaaaaaatctacaaacgggtcccctttttaaaaaaccacacaagggtcctctttttaaaaaaacaaaaaagggtcccctttttagaaaactaacaaggggtactgttttaaaaaacttaaaaggggccccttttagaaatactccaacggcgcccctttcaaaaaaaccacccccccgccccctttataaaatcaaccaaggcccccttcttaaaaacc

SEQ ID NO: 184239 - DNA, 525 bp, Arabidopsis thaliana
  unsure (1)..(525): unsure at all n locations
ctgcgtaagcttggatcctatagagcggttgcccacgtgttcggaggctcttacaaaaangaggcaaaacttttatattaatttaattaccaattccgatagtgcatactcaaaagtaaggcatctaattgtacaaaactaatggaggaataaaagacttctttgttttaagaaaacaaaagagggggattttttcgggtgtgggtacaanacgactgtttttttcaagaaaaacaccttcaaatgcacaagtcgcattcccaccgctctctaggcctaccaaaagggatagggaaactccaccaccccttttttcatggtcgtggccccaggtaaaattgttgtaactcttttttccctttcattttatataaaaaatctgttaaagaaacgaatttgacgcttttaaaataacgttttctagcatggaaccccctaaattctgcttggtttcttttaacaccatcactccgcggtgataaatgaaaaacatattcttcaatccaaaattcatcttcatttgag

SEQ ID NO: 184240 - DNA, 478 bp, Arabidopsis thaliana
  unsure (1)..(478): unsure at all n locations
gggggccgtagcagcgccatttttttttccccccccttttggagggcaccccgngggacagagaggaaggaagattgaaaggggggggaagccgaaaaagaagcggagaagaaaggaaggcccaggacccaaggcaaccggggcgcgcgagagaagggcagccagagaggaagacaggccaaagagaaccacacgaggaccagacggcgaggggaagtttttacgcggggggagagaaaagacccgagagggccaaggaacaaacaaaaagccgagagacacagccggggcgagagcagcgaggagcgaaagacgaaaaccgcgaaaagacaaacgcgaaggagaaccccaggaagcgaggcgcagaaacccggacacccgaggaaacaggaagccagaagacccgcgggagggacagaaagagggcgggcagcaggaacaggaacgacaaagggagagccgagcgagacaaaaccag

SEQ ID NO: 184241 - DNA, 359 bp, Arabidopsis thaliana
  unsure (1)..(359): unsure at all n locations
aaaaaaaaaaaacccaacaacacacaccacacacaccacaccacaaccaccacaccaccaccataccanactcacaaccacaaccnaactccatcaatccaactacacatcatcatcctcaacatatcttatcaaacttattaccatcacaccctcatacccccacccactttttttttttgaggggttttttgaaaaaaccaccaaaangacgccnncccccctaaaaaaaaaaaaaaacccccacatacctaaaaaaaaacatacacctcccacacaactcactatcacctaccaccctaaaacacataaacacaatctctaccctatcacactaccaattcactatattcacaaaa

SEQ ID NO: 184242 - DNA, 481 bp, Arabidopsis thaliana
  unsure (1)..(481): unsure at all n locations
aggccaacaaacggggaggggccaagtacgcccactttttttttcccccccccataaggggggaaccccagnnnnaaaaaggaagnggaggccatttagaggggggggaagccagagaccaagaagaaaaccagagaacccgagcaaacaccacgaaacaaagcacacggcagaaaagacagaagacgggcaagaccccaaacaaagagagagaaccccataaaccaaacacccgcgagaaaaaccccaccccaaaaggcgggggggaaccccagaggggccagggaaaaacagaaaaagccccccgagggcagacccccgacacgccgcggccagggaccccgaaggcccaggccccccagaagcccccgacacaaacatatatggcccgcgagacggcaagccgcagaagcccacggcccaacgagacaccccgagccgcaagaaacacccgcgcagccaaaagaacgcaaggccccaa

SEQ ID NO: 184243 - DNA, 447 bp, Arabidopsis thaliana
  unsure (1)..(447): unsure at all n locations
aaaaaaanacaacaccccccccacaatcaaaaaaattaaacccccaccaaaccttttgctccacctcaaaattgaacacaccatacctaaaacttaaaacataatcatcataatataaaccacctatataaacccaaacaacaactctttttttagggggggtggggacccaacaaaggggggtaaaaccctaaaaagaaaaccccccccatatgggggggggggagcgaaaaccccccctctgctcctggggtgaacttataccacccaatactaccctcgccacttgttgtccccctctcccaccactcttccccgcaatgtgtaacggagggaaagccgcgacgctgcacaatggtaccggaaatataaaagagcccggcgcgccggtgaaaagagaacgaagaagacgcttctcgctctacccttggacgcgatcaaatttcg

SEQ ID NO: 184244 - DNA, 303 bp, Arabidopsis thaliana
  unsure (1)..(303): unsure at all n locations
cggaccggccggaaacccgggtcgacccacgcggncgacgcgtgaagaagaaacagaagggtgcaaaccacaaaaatcgcaactcaaaccttatgggtccgttctcatagagcacatattatctacccgctcaaataacatgcatcagtgtagtatctggacaccacagaacaacttttttctccggggttggacaccgcccagaagggtacaaatttaaatcctctccaacccatacggccggggcccaccatcccccgctgtgcgtggcgatcgtaatatctgaatgcgccctgtcctcac

SEQ ID NO: 184245 - DNA, 489 bp, Arabidopsis thaliana
  unsure (1)..(489): unsure at all n locations
aaaaaaaaannacaaaacaccaaaaatttgttaaagtgcggaggcgagagatcggggagatggggggagtgagatgagataggggttaatgtatgtaaggagtatggggtagttaaagatagataggaagagaaaattgtatagtaaaaaaagaaggagcttattttttaggggggggggggaaaacaataagacaggggnaagaggaaaaagaaattttccggtttgagggggggaaatgttgttaggtgtatatatgtaaggatgtaaatgatagattgagagtggtgttgatttttttgggtttataagggatgttgagtgaagtgtttgggttaagagttggagttaggaagtttgtgtatgtagaacacgatggggagagtgggtgtagattggaggttatgtgtatggtgtgggtggggaagaggagttgtggttagtaagtagagtgtaggaggggagtgagagggtggtatagtaagaaga

SEQ ID NO: 184246 - DNA, 214 bp, Arabidopsis thaliana
  unsure (1)..(214): unsure at all n locations
ccggnccggaattcccgggttgacccagagggttgaaccanacacaaaaaaaaaaaaaaagaagaaagagggagtataccggagccgcagagacaaagccagcagcaagcgagggggtgcccaagggtcaccaagcaaggacacggcgctattgggaacacgcaaagacacgaagcaccgggcaaactttttttttgggttgttttagaaaacc

SEQ ID NO: 184247 - DNA, 339 bp, Arabidopsis thaliana
  unsure (1)..(339): unsure at all n locations
tgacgtggcctgcacgcgtacgtaagcttggtcctctaagcggtccccttttgtttggttttggtaaaaaaactttnaatatcaaaattaaaaacttttccaaacgaaaatgtccaaaggcaagaggacatttnagaaatcatgcaagtatatacccaggaatttataaatttagaatcagggagaaaaattcaggtcaacaaaacaaggggtgttggggaaaccgaagggggatcataacaataaaagatcttgaactgaatggagcaaaggagctggggaggtattgcttccccaaggttgggttattcatcgagtggctggctcaaattgagcaaa

SEQ ID NO: 184248 - DNA, 474 bp, Arabidopsis thaliana
  unsure (1)..(474): unsure at all n locations
cataaacttggatcctatacagcgttcgaccttttgttttggcttttcctattaaattnaanctaaccacaaattcaattaaagagtcttcttttttttctcattttcaaaacaaaaccaaatatacagagaaatatgcccaagcttttatgggcaataaccagctaaaagactaacccaaacaaattttattgggtgggggggnaaacactaccagtaccctctataatataacaatccacatttnttaggctccacctctttcttccctacataaaacacccttttataaattacttttctcaactctaactcaaatttttttaaacaaacttccttaaaacccttttcaaaaaagggacgcggtttctaaattttttacacgctccccgtgctcaaagggtggaaaaggggcctccccggaagcttctctttccacaaataaagggtagtgctcttttaaaagagcgaacg

SEQ ID NO: 184249 - DNA, 464 bp, Arabidopsis thaliana
  unsure (1)..(464): unsure at all n locations
gtagaggacgggccccgcccgcgcccggggcgggccgccgcgaccgagcccgttggagatgcgcgactgcgggtgccagcgtgaccgccgcgaggcgaggaacgcccggacgcacttttttttttcgagcttgtttgggggcnaaagatcattcgagggaggggacagagagagaagaaagcccccccaggcgggggggggggggcaggggaacccccgcactagggaagacggagggtgcgagagtaggagggaggggaggcacacgcgcgcgggagcgcggccaccgactcgcgggccagagcgatacgtcagggcccgccgcccggcgcagcgcaggacaccgcgcgggatgaggggggtgcggggagattttcgcataaggtggtagtcggcggttgagggggccagagtgggcgctcggggccgatcggagccacgtcgcagtcgagcagacacacccc

SEQ ID NO: 184250 - DNA, 541 bp, Arabidopsis thaliana
gaggggcagaaaaaagtttacaagggggggggggacccgcaggaaaaagaacgaaagaaagaaaaagggaagccgcgagaaggcccgcgcggaccgagagagggaggagcgggagcaacggagcacgaggaaagccgcaggcgaagaaaaggagaaggacacccgaagccaagaggcacaccgggaatttttttaaagggggggggaagaaacacagaaagccagatgaagtaaccaagagacgagccgaaggaagccgggagggggggcagcgcaccaaaaagaaaagggacagggacagaaagaaagaagagaggcgacgaccagagcgcgaagcaaacaagaaaagaggagccaaagaggagagagaggagaggaagccgcacgcgcaggaggagagcaaacgagagcacagaggaggagagagcagagaaaggaagtgaagacagagaaggaaagaagagaaaggaggacgaggacagagaggaaacgacggcgtgcagagggaagaagagcaaagagaggaacaggacgaggagaa

SEQ ID NO: 184251 - DNA, 264 bp, Arabidopsis thaliana
acgtggcatcgccgcgtacgtaagcttggatcctatagagcggtctacctttgtgtttttgtttgcaaatggtgcgtatatttaaattaaacttgtatttactttttctccaacttgtaaacgtttggttctatggaaaaacatatgtctatctcaaaaacagtgacacatctcagatcaaatattaagaaggtggtatataaaaaggatctgagagtgagttcccttcttttatggacgactacttgaactgctcctacaaaa

SEQ ID NO: 184252 - DNA, 496 bp, Arabidopsis thaliana
  unsure (1)..(496): unsure at all n locations
caggaacccgggcccgaattcccgggcttacccacgcgactcaagactctnnaaataaaacatnaaaccaaaaacaaaccctaatttctcaactccatttctctcttactccataaatcaatccttcacaaaatacaccaactaccattttccaatatcttaaaaaaccttttccncactacccttataatattttatttcaagtgtttttancaaacacaaacccccctattcacaaaaaatccccccccacaacccaagcattcctcatccccccgacaacgaactttccctttcaaattactaaccctccttcccccatctcacccacccacatataattcacccctttttcctccctcccccccatacataccccctctttcaaccccccctccccaaacttctctcccctcttttctaaaacttcacctaaaaaattcctccgcactatcatttctgtctaccaaaaaaccattcacctatccgcatttca

SEQ ID NO: 184253 - DNA, 483 bp, Arabidopsis thaliana
  unsure (1)..(483): unsure at all n locations
gacgaggaacgcacgcgtacataagcttggatccttaagcggtccccttttggtttgggtgctcattaaanatttactttaccaaatataaattttgttcttgaaggacctaattacatgagagagcaataacaactactagcgtttaccaaaagagagagtgctcaactatttaccaaaactttttaagcctcggaaagattaaattatggggggggggganatatttattagcctattaaaagaaattttcctcatccaattaaggatcactgtttctggcttctttagtctcccactaggcaaggcttttttattcctgttgcagcctaaagaataccaaataacctgaacctcatacatgtggttggacatgagggggccatgaataaagtgatttggtgcgtcttttggaggagccgaaaaagaaacccgaggttaattggtggcaatttctcagtatggactcatataaaggtggga

SEQ ID NO: 184254 - DNA, 481 bp, Arabidopsis thaliana
  unsure (1)..(481): unsure at all n locations
cccccaaccaaaaaaataaaccccccccctaccccctttacccttttttttaaccatccacaccttacatccacaattatgctctcacctactctctccacaccccttcaanctcaaaaacaaccaattttttttggggtggtggtgccaancaantggggggcgcgctcaaaaaaaaaaccccccccagtgcgggtgggccccctccctccccattcctcaccccctctcccttttcccccccctacaaaccacaccgcctcctctacactccccctactactgctttcccttcttcgccaccctcccacaaacacccccggtctccagctacaggaagcgctattgacattgtgaatataaagatctacgacggccaagtctaagccttcgtcaccctgcgtcgcgcacgccgtctctccccacccaccccatgccacccatttattccattactcccatccccgccaccccctcccca

SEQ ID NO: 184255 - DNA, 491 bp, Arabidopsis thaliana
  unsure (1)..(491): unsure at all n locations
cctaagcttggatcctctagagcggtctccctttttgttttttttcttttataaaacaccatatttttcatttaactgaaaaagtatatctgtacacaaaaataaatcttaaaaatccatcgacaccaatctttgatcaccttttcttaccctttaatttagctccatctctacagcaaaacaaattctatttttaacgggtgtgacctccccnctttcccaatctcaaaaaaaaaacaacaccaccaaaagagttttccttaacccaaactgagactttatccattgctttaaatttttcaagcctttctttttaaaaacacatgacttctccacgatgctatattatttggaatattaagtttaaagaacattcaaaaggaaaacccccattttttgtattttttatttttagaaacccccatcgatcttccctccctcaccttttaatctccctttcttccccttggggaaacaccatttttcccttc

SEQ ID NO: 184256 - DNA, 650 bp, Arabidopsis thaliana
  unsure (1)..(650): unsure at all n locations
ggaaaaaacacaccaaaacagaggagaaggggggaggtagtgaaacaccaattttttttttcccaccccacccttttggaaggggacacccccccggggngggncngnnnnaagaaagnagaaagttttagcaagggggggaggggggcgcccagaaaaanaaagaaagcaagaaacgagaagagaggaaggaaacccaaacgaacagcagagcagagacacacacagccaacaaacaccaagcgagcagaaaaaccacccacagaagacaaacaccgcgacacacaaaaagagaaaagcgaccagaccaaacaccaacacacacaaccaacaaaattttttctccagcgggggggaggcagaaaaagaccaatagaagcgcaacaagagaacaaccacaaaatacacaccccaccaaaaaagacgcggagaggaaggagccagacccaccgagacacacagcaagcacacaagagcagccagaagaagaccggcgacccacacacaagacgccgagacgcacgggataaagcatacccgcagagacgaacagacccgaaacaagaccccacccccggaacaagacgaaaaagaggcccggagagaagcacaacagaaaaaactaacaaaaaaagagaccaacaaaaagc

SEQ ID NO: 184257 - DNA, 325 bp, Arabidopsis thaliana
  unsure (1)..(325): unsure at all n locations
ctaagcttggatcctatacagcggcctccctttttgtttttttttaaaaataataaaacatnanacaaatatttctttatttaagtacaccacacanttattaattacagcaccaagaaactaaaaaataccccaaatgaaaaccagagatttaggtgtatgcagagcaattaaatacaaacattgacggctttttttagggtgcgggtctaacttcccatttctcaatcccaaaaaaaaccaaatcgcgcataccaaataaacctaaaccctcaacacaaaaattatacccctttactaaaccctataaaagacctttttaatt

SEQ ID NO: 184258 - DNA, 674 bp, Arabidopsis thaliana columbia
  unsure (1)..(674): unsure at all n locations
ccccccccccccctttttcccctctttttttttccccgccccttccccccnccccttttcncccccccncccnnncccccgggcgccccccccctccctctccccctttcccccccttgtctttccgttcccccctcctccctctttttttccccccccccccccccccccccccccncccccccncccccccctcttcccctcntccttctcccctcctcctcccccttctttcttctctttttttttttttttttttttttcccctctcctcccctctcctctcctcctccncnncccccccccttttttttccgggttgtgggtcgnccnccnccccgtggtgcggcctcccctcctcttccttttttttttctttttctctttttttcttttccttttttccnctccctcctcccccctctctctctctcttttctccctcctccccttctcccctctcctccctttccttcttttttctccttccctttctcccccttcttcttttctctccctccctcccctctttttttttttttttcttctggnggngttccctttttgttttcttcttttttttcttttctttttcctcctcctttctctccccctctcctttctctccgcctcttcttttcctccttcttttcctctcttttccctccttctct

SEQ ID NO: 184259 - DNA, 598 bp, Arabidopsis thaliana columbia
  unsure (1)..(598): unsure at all n locations
cccccccccccnttcccccccccccctttatcccccccttctcccccccctttccccccccccccnccccttcccccccccccttcccttttccccccttgttaggtccccaatacaaccnccccccccccccccccccccccccccccccccccccccccccccctccctctctcctccccccccctcttccctccctttttttttttttctccnccccctcctccttctccctttcccccccccccccccttctctttgggaagtcccccccccncnccgtgtggcgccctaaatccacaaccccctttttttcccctccccctctcctttcccttttttcnccccccccccctctcctccccttcttcttttcccccccctcccccctccccctctctctcctctctcctcctttcctttcccctctctcctctcccctcttcctccccccccccccctctttctctctccccgcctncccgggttttctttccttcctcccctctttttcctcggttcccctctccccccctctcctccttctctctcctccctctttttcttcccctctctccctccctcctcccccttcccc

SEQ ID NO: 184260 - DNA, 424 bp, Arabidopsis thaliana columbia
  unsure (1)..(424): unsure at all n locations
ccccccccccccccccccccccccccccccccccccccccccccccncccccccccccccccccccccctnttcttcttcctccccccccccccccccccccccncccccctcctttttcttttgtctccccccccccggcggccccccccccaccccccccccaccccccccccccccccccncccccccnccccccccccccccccccccccccccccccccccccccccccncccccccccccccccaaccccaaccccccccccccccccccccccacccccgccccccccccccccccccccccccaacccccacagggggcccccccaaccccgccccccccccccccccgggggaggacccgccccccccacaccccccccccccccccccncaccccccccccccccccccccccc

SEQ ID NO: 184261 - DNA, 477 bp, Arabidopsis thaliana columbia
  unsure (1)..(477): unsure at all n locations
ccccccccccccccccccttcccccccccctccttcccccctcccctcctccccccctccccccccccctctctcctccctccctcctctccctccccccccccccccctttcccccccccccccccccnccccccctttttttttcgtnctggtattcnccccccccccccgggcccccccccccccaccccaacccccncccccccccccccnncnncnccccccccccccccccnccccccccccccccccccccccccccccccccccccccccgccccccccccccccccnccccccccccccccccccccccccgnccccccccccccccgcgcccccccccccccccccnccccccgccccccggctccccccccccccccccccccgccccggnccccccccccccccccccccccccccccgcccccccccccccccccgccccccccgccccccccccccccccccc

SEQ ID NO: 184262 - DNA, 444 bp, Arabidopsis thaliana
gctgggatcctatagagcggttgcccttggggtttgttccttttttaagaacaagcacgaagctgtacgagtaggaaaatttgtatgcttccttacaacgagagcaggggggtggtggccagtaaatgagatcaggtggcttcggctagtttggcagagggtcagtgctgatgtgaggggagagagaagctggtttttttttttggggggggggggccgcacgcccgtcatgcggagaaatgggtttcgacaatgggcgccaccgatcccgtatggtgggttatagagcgagggatgagttacacggcgtttatggggatgggtgaggtgatggtagtaaggggtgtatcgctcgattcggtggagtgggaggtgtaagttagggcggtgacgtggttcgtagtatgagcgtattgttagtatctgctcgtacgggctatggcg

SEQ ID NO: 184263 - DNA, 444 bp, Arabidopsis thaliana columbia
  unsure (1)..(444): unsure at all n locations
ccccccccccccctcccccccccttcccctcccccccccccccccccctccccccccccccccctttttctttttccccccctccccccccccccccctnccccccnccccnccccctcttctcctttttnagtaatgtcccccccccccggggcccccccccccacccccccccnttccccctccncccccctcttttccctctcctccccccccccccccccccccccnctcccttcccctcccccccccccccccccccccccccccccccccccccccccccccccccccccccccccccccccccccccccctcccctcccccccctncccttgtttttttttccccccctttctttgtcctnccccccccccccccccctcccctcccccttctccccccccccccccctctcccccccctccccccccccccccccc

SEQ ID NO: 184264 - DNA, 609 bp, Arabidopsis thaliana columbia
  unsure (1)..(609): unsure at all n locations
ccccccccccccccccccccccccccctttttttcccccctctcttccccccccctttcggcccgcgcgctttccccctttcgcctccccccccctctcccccttttcccccgtgtttcggggctctcacccccccttcccccccccttcccccccccccttttttcccttttccccccccccccccccccccncctccccccccctcnctcntttttcncttttttttccctccctctctcccccccccccccccccccttttttggggggtcggccccccncccgggggggggcccccgcacccccccttttttttttttccttccccctntccccccccccnncccccgcccccccccccccccccctttcccttccccctcccccccccctccccccctttccctcctctccctcccctccccccccctcgtcggggggcttctctccccccctcctccctttctccctccctgcctccctctccctttttccttctttttttttgttctttttcgtggtctttcctttcttcccctcccctcctccttttctccccccccgttccctcgtccttcccccctccttccgccctctcccccccccc

SEQ ID NO: 184265 - DNA, 306 bp, Arabidopsis thaliana
acgcgcacgtgagctgggatcctatagagcggtcgaccttgggggttggcctggataaaacattatccattggctgaaagggtgcaaagggtctgaagtatagagccaccattgacgtgtacaaatagaaatgaagcagcgaaacatggttagaaccatggtaaatcataacgagagcggaggtggtgaggcgtttttttttttggggggggaggcgggactcacccgggtggagagaggaaacaaaatccctggtgaggggggggatagccttatgcccatatggtggggagaaggagagtgttg

SEQ ID NO: 184266 - DNA, 472 bp, Arabidopsis thaliana
cacgcctgcgtgagctgggatcctatagagcggtcgacctacgggtgtcggcctttttatcatgaaactccgaatctcacatgacactatttggtggaatcactctcgtcggacggaaaaacgaacgacccccaactttaataaccacaaggtgagaatagcacagcaccggagggtgaacgtgtgcaggccatctctaggtttcttgcggggaggggtggggaccccccccgcgcgctggcggtgggaagcagacgccccttttgtggtgggggttgtggacaatacaaaattcgcgatgttttttttttttgaaatgggaaaaaggtggtaggagtcggaataagactttaaagagaggaaagtgccgattattaatagagggtcgagggccttgtaaccggtgtttttaagggtgaaatagtggagacaaaagaggtgtatgaacgggtgaaaagggatatgtaagggt

SEQ ID NO: 184267 - DNA, 548 bp, Arabidopsis thaliana columbia
  unsure (1)..(548): unsure at all n locations
cctcccccccttgtccccgccccncccaccccccncccccnccccccccccccccccccccccccccccccccccccccccccccccccccccccccccccccctcccctttctccccccctccttcccccccccccccccccctcccccccccccccccccccccccttctttccccttgtctccccccccccccccccggcgccccccccccccacccccacacccnnccccccccccccccccccttcctccccccccccntccccccccccccccccccccccccccccnctccttcccccccgcccttcccccccgccccccccccgcccccccccctccccccccccccccccccccccccccccccccccccccccccccccccccctcccccncncccccctggcctcctntttggtttttcccccccccccttctcctcctttgttttgccgncctcccccccccccgcgcccctcctccgtcccccccccccccctccccctctcccccccctgtccctccccccccccccctccccc

SEQ ID NO: 184268 - DNA, 522 bp, Arabidopsis thaliana columbia
  unsure (1)..(522): unsure at all n locations
cccccctgtccccccccccaccccttcncccccccccccccccccccccccccccccccccccccccccccccccccccccccctcncctccttcctntcttccccccccccccccccccccccccccccccccccccnccccccccccttttctccccttgtccccccccnccccccccgccccccccccccccacccactcccccctctccctccccccccctcccccccccctnncccctcccccccccccccccccccccccncccccccgccccccccccctccccccccccccccctcccccctccccctccccccctcctcccccccccccctcccntctgggtccccccccccccccccccccccccccccccctccccctcctttntgttgggttttttttgtctttccctctcccctttcctcctctttgctccccctcccccccccctcccccccttcccccccccctccctctcccctccctccccccccccccccccccctcccccccc

SEQ ID NO: 184269 - DNA, 480 bp, Arabidopsis thaliana
cgaaagctaggatccactacagcggcctaccacggggggaagggcccccgaaactaaaccagctctgagaatgcgagacccaaggcggggcgcaaggaagccccaatacagagagaaagaaggccagagggccgattcgaacaggggagacgcgggaccacagcccaggggaacgcgcccggagaaaacaaaaaatttttttttcgaggggggggcgaaggacgcgcgcgcacaagcgcctgccaaaaagaaaagagccgcaagaccggcgcggggggagcacatcctaccgcggggagagagcgagcggaaagggaaaagggaccaagcgcgccggaaaagcggagagagacacaggcagagacacgaggcgggacacggccgcgccgagagcagcagacacacaccacaaggagcaggaagaagaagagacaggacacggggacggagcgcgcgagacacgacaagaccagcaacgaa

SEQ ID NO: 184270 - DNA, 491 bp, Arabidopsis thaliana
cgccgcgtcgtaagctggatccttagagggtcgccttgggttggtctttaatcaggagccatcttattcttgctggcaggatgaggaacaagatagacattatcaacttgtgtgctgagttcatatgaagaactgcaaactgtgaggaaactctgtacattgtaagacacggttttaaaacttgtgttcgtgggggtaaaggcacagcttggacaaaatcaggagcttctgccccgcctggtgggggggtcccggcagaatctaaaccaccgtgcccaatggcatggttggggtcgatggtactagggtgaggatagtgactaccatggtggacgacagccttgcatgggggaggggaaattttggcaggatagagatgactgcaaggaggtgggcgcgtcctgtggcgccgctggctggttgccggggtggctgtgggggtggaggagaaggtgtgactgggtgagggccggggtcgacgagacgccgga

SEQ ID NO: 184271 - DNA, 746 bp, Arabidopsis thaliana columbia
  unsure (1)..(746): unsure at all n locations
cccccccccccnccccccncnnccccnncccccccccccccccccccccctctcttaatcgcgccgccggcgcncctcccccccccccccccncatttctncnnccnnncnncccccctcccccccccccccctctcccccccccccccccccccccctttttnnccccatttgttttattttccncaccaccccaccccncncnncccccccccccccccccccccccnccctctcccccccccctctcccnccccccccccccccccccccccctccnctctcttntttcntcttctcccccccccccccctccccccccccccccccccccccccccctccccccccccccccccccccccccccctcttttctttccccggtttgtgctcccgncccccccccccccgctcctcggccccccctcccccaccccctccncttntcttcccctccccctccccctcccccccctcctccctctccttcccctcgtccccccccccccccccccccccccctcncccctcccccccctcccccccccccccccccccccctcccccccccccccccccctcttcccccccccccccccctctcccccccccccccccctccgccgcnttttcttttcttctttcccccctccngcctcccccttcccctccctccccccctccccccctccccctcccccccccccccctcccccccccgccccctcccccccccccccccccc

SEQ ID NO: 184272 - DNA, 626 bp, Arabidopsis thaliana columbia
  unsure (1)..(626): unsure at all n locations
cccccccccccccccccgnnnccccccccccccccttcaatcgcctcctcccccccccccccctttcccccccccctccccccccccccctccccccccccctcccctcccctttttccccccttgttttgtgttcccctaccccaccccccncccccccccccctccctctccctctccnccccccccccttctctccctcctctctctctttctcccccccctctttttttttcttctcttcctctctctccctcccctcccctttcttcctccttccccccccccctttttttccccgggtcgttcccccnccccctggttcccctccttctatcttttttcttctttcccttttctttctttttttctctccctttccccccctcttctcctcctccctctccctcctcccccctcccctttctccctcccctcccccccctcctccttctccccttctctccctccccctctctccccctctcccctcccccccccccctccttcctcttttttctcttttctccttctttcttttcttttctttctctccctcctcctcccccctctccccccctctccttctcttctctcttcctctcttcccctctctccctctccct

SEQ ID NO: 184273 - DNA, 497 bp, Arabidopsis thaliana
cgccgtcgtaagcttggtcctctagagcggtcgcctttggggtgttccgttagctattaactgccttacaagatcagagaatagatcaatttttaattgcgtattattattcttgttaaaactaaataccacagccccctcttactgaaaaaaatcctggaaggcatacatggtctgcggacacccttttttggagggggggggtgctcccccgctcgcggtccttgatattaaaaaaaggcctcttccttggggggggccgcgtttctctctcctcctattaccggcgcttgcccccttagccgcgccaagggggaattctttaaaagacttgttgaatgccaacttggactcctttaaccctcactccccctgactgactgaagtgctctcttttgtatgaaagctcgtgtcactctgttgccttttttgcgggtggcgcgtagcttttcgaatatgaggggaatctgtcgcccgccatgtctcacatgcccccc

SEQ ID NO: 184274 - DNA, 712 bp, Arabidopsis thaliana columbia
  unsure (1)..(712): unsure at all n locations
ccccccccccccccccccccccggccaccacccccccccccccttaattgtcgtncgcccccccccccccccccttttcccgnnnacaccccccgccccccnccccttccaccccccccaccaccaaccctttttttccccccccctgttttatcttcccccacaataaaacacccccccccccccccccctcccctctcccctccctctcccccctcccccctcctctctccctcctctctccccttatcatccttatttctcctcctcctcctcctccccccctccccctccctcccttcctcttctctncccccaacccctccttttttttccccctttttttttcncacccncccccaatccccccccgcctcataaaaaaataccctctcctccctccctctttttctcctcttcctccctttctcgcccctcctccccatccctcctcccttcttcccctctctccctcctcctccccccttccccccccctctccctctccccctccctctcccttccttcctcttctcttccctcccccccctccccttcccccttttccccccttccctatctttttccctccttcccttctctcctcctctatcctgcctcttactcccccctcctctcccctccccctcctttctcctccacccgctctcctcccctctcccccctctcctctttccctcctccccttccc

SEQ ID NO: 184275 - DNA, 586 bp, Arabidopsis thaliana
  unsure (1)..(586): unsure at all n locations
cacggtgagctgggatcctctancagcgtgtcgacctgtttggggggggccctaataaaatataaaacaaaacaagancaggaaaccttgcctagggagtcattgcnagagtcgaaaagcccggagagtcggcgctgcaatctggttgctagaaatggccaagcggcgggaaggaagaggggcggccggcgagtcagagagagaaagagaggcgctgttttttttggggggggtggggggacnaccnccgagccgagagggatatgcaggaataaagaaagacccccttgcgggggggaggggagaagagcgacgatgggtgcgtaatgggcatagtgcctgttgtcttgtgcgcgaggcagtcggagcatggggcacagagcgagggtccgatcatcttggtgttggcgatgtgcgcggcatgaaactgctcggactgcggtaacggtctatatcgccccgcggcgagtgcgccctcggaggaccgccgagcgccgccgcttgtcgtgcagttgcactagtgagcgctgaacggattacagggttgcggaggcggtggcgaacgtttccctgtcacagctgggcg

SEQ ID NO: 184276 - DNA, 512 bp, Arabidopsis thaliana
cgcctacataagcttggatcctctaccacgttcgcccttggggttggttcctttttaactaaaacacaggaaattcaattaacatttgttcaaacaccaaaactacggtattgccctttacaacactaaaaaaagctttgacacttaagcaatttaagcaggagcaggtggctttagaaacaccgcatgaaacttttttttcggggggttgggagacaaaactccataggctctcgtcaaaaaaattccccaccggcggggggaagcattttttttccaacagggcgccctcctagttgtacaaccacgaaactagaaacatcccttttacatgccggaaagaaaccaccacctagacacccgtcgctagctccaaaagaagtccatgaccgcaaacctacaaacagactaaggttcagcatgggtacaagagtcgggcaaatcccggccttcttgaatatctcccatagtcctctcgcagacgtatatagacgcgatcgccatagagcaac

SEQ ID NO: 184277 - DNA, 508 bp, Arabidopsis thaliana
aaaaaatcaaaactaacaacattagaacaacgtttgctccttgaattatagccagcgacacttatacttaaagtcaaattgtacttttaatatctcatccatttattatatacacaaccaccctaagaacgtaaggaccgcggaccaccatttctcgtttagggggggggggcaaacaacagccagtaactaacggctaacttaaaaaaaaccccctcccttacattgtgtgagtcgcttatttatctctatgttctatcagccctcatctatctcttaatcggcctgttatgataacatattccattataatcgaatattatatttattgtttctttctatcctgagtctgccgaactagatagtttctttgttgaatatctaagagagtcgatcaataactattccgaggcatttaacccatcctactacacatattatcccggaattcgccatacgcttacactcatcattaaatgagaggtaggacatatggattctactgcct

SEQ ID NO: 184278 - DNA, 370 bp, Arabidopsis thaliana
  unsure (1)..(370): unsure at all n locations
gggggggggctatatagatagggcgccagctttctaattccgacttgagatgttggggggggaagggtcggttgccccgccttcacggttaccccgtttcccgggatttctcccgttttctaacnccagggggggtgggggggcccttttaatcaacaaaatttttttntnngnacnggcgggtggaggagaaaaggaagggggcctctctcttactcttttttttggtgggcgtaataactcgctcggcacgagagctggcggtggttgggcagcgtgggtttgtttttttgcgaaggcggtctggcgcggttggcgagtttttttttttttgggggggggggtttttttttaggccttttttttaaaa

SEQ ID NO: 184279 - DNA, 390 bp, Arabidopsis thaliana
  unsure (1)..(390): unsure at all n locations
gcgcgcgtgagctnggatcctctagagcgttcgctgggggggttcagaccgntgnnnnnnnnnnnnnnnnnggggagagaggngttaaattggaaaacgtgttaatttcataaactacacaacaatttgcattaaaacatgtaatgcgtctactagtgacaggggaccaacaaagctgctatagaatttttttttgggggggacacctcaaacaacggtcaaatgctcttactaaaatttcaaattctcaaactaaattttaaatttcctttcccggcgggtttaacaatgacccgacttaagaacgggtcgggcgctacggaaccaaactggcacgtggggaccttggggggacttgttttagctgatgtccactaacatcgtagtaga

SEQ ID NO: 184280 - DNA, 471 bp, Arabidopsis thaliana
ctcactccactactctccatcacaacatcacaccctatacaccacctactcacactcactccacattccctcctcccatcactccacccacccaaaactcgtccacaccaccacaccccccctcctccacccttttcctcactttttctccacccccacttatccctcaatctttccccccacacatatcatacctcacttccctctcttcctcatctttcaccaaggaactcacaaccccccttctcaacaacaaacaaacatcactcatccccctcctcatcctccaactcacccaagcttccactcccccctcaatctttatccacactcttaccctccctctcccacccacacactccacccaccccctccctcctcccttattctcccgacctcacaccacacactcacatcccatcctccattaattccccacacctcacctcctcctccacccctccccacatc

SEQ ID NO: 184281 - DNA, 499 bp, Arabidopsis thaliana
  unsure (1)..(499): unsure at all n locations
gaggaaaacggagccgctgctgtaacggtaaagattttcttttccccaaggggagggggcngtaaacaaaaaattcttcctcntctcttttctcttatccacttacacccaactcttcacaccctccatctatcccccaataaacttcatatccccaccgcctccaatagccagaacacattccttgtctaacgcctattctttctttttttgggggggggggggggggccttttctcccccatcttaccaccgtggggggggcggtcgcgtcgataaaaaaaaaaaaaaaatcatcccgctctgccgttctccttcagggggggtgactgcctccccgtagcgaaatctcccacgccaaaaccacgcatcagagacacccttactactggacgagtcgaggaacgccgcgtccgcggactccgcgcagccgttcggacggtcccctttcaatcatagtcggttgtccgcatcatcgctcctcaacgttatcgggacga

SEQ ID NO: 184282 - DNA, 214 bp, Arabidopsis thaliana
aaaaaattctggcctttcggggggggttttccctcccccccaagggctttcgttttcatcaacccccaccatcattttttttcctcctaatcccacggtcccgtgttccttctccaaaccttgtcaaatccttctgtaaaccgtaaaccgtcttttaaaaccccatttcctccggcctcctcccgacctttgggcctccactcctccccggccc

SEQ ID NO: 184283 - DNA, 484 bp, Arabidopsis thaliana
  unsure (1)..(484): unsure at all n locations
gtaagctnggatcctctagagcgttcgctccantgtttagggcggtttcataatttttaaaaaagattcaagtggttacaaatccaaacggggttttgggggaaaacccaggtttttgaataatagcgggtgggaaatttcatgcttaggttttatggtcccccctaaagaccaattcaggacgcctagttgggcggggggaagccaaaccgggacatccaggggaaccggctttcccgatgatgtgaggtcttcaagtttggggacaaatgggtcgtggattacccttgggggagattgtttaagggtgacatatgcgctaagctaggagctttgggcatagagggtttaagctggaggggctaatgaggaagctctctacattaatgccggtcgctcagaggagagattgaaacggtaactggcctacctgtggcgtcatggatgttgacctaccacggggagagggcgagagattttgggt

SEQ ID NO: 184284 - DNA, 539 bp, Arabidopsis thaliana
  unsure (1)..(539): unsure at all n locations
tccaataccactcacctaanggaaagctcctacccctccaggtacccctcccgaattccccgttccacccacgcgtccgggcgactacaaaaaacccccaataaattcttctcctatactactacatacgggttaagttgaaataccctctattcccataataacatcttccctttctttaaaaaaacaccttatccatctcaaaatcccttccctctctcatccctttccccgcgcgcccgancacccacccccccttcccccaaaaattctccccnntcctccttctaaaatcccccccccctttcacataacctacccttccttcacccaccctatttccctttaaaacccctaccccccccccaccctaacccccccccccccccctccccctccaccaacacaccctcattccccaaaacccccccccccctcccccctctcccctcaaaccccacccccccactcgcacctcccccccccctcctctccccctccctaacacccccccttcttctaacctcccccccctcccc

SEQ ID NO: 184285 - DNA, 297 bp, Arabidopsis thaliana
gggcgtaagcctcctaaaccaaaaaggaagttggactaagagatagtaagggcgaggcagttcataattgtaagctaaagctgagtgtgagaattttgcttgcttttcatgttaataacatatagataacgtcgtgttagatatattccttcattttttgttcgtgaggggggaggcttaacaccctatagaacagagaagaaatttaatggaaaattactacaccttatatcaattacgttatatgatctacttcaagacttaatatatataataatatgaattctctatagtgag

SEQ ID NO: 184286 - DNA, 446 bp, Arabidopsis thaliana
gtggagcggaggggggcggtggggggggatagaaattgcctaaggtaccaaccccggtaagtttttggggagggaagcctccacgctcctcatgtctccccgccggaattgatccaatttttacccagggggtgggtgcgcttaaaaaaaacaagcttgtgggtctcgaccacacaaggtggcaatcgtcctcgtggcctgggcctagccaggtcaacgtgcttgaaggtatgctgcgtaggttgaccttgcagccgtcgagtccttcgctatccctatctcagtggccgatgctcgttcttttttggaggggggggggtggagcacctccagtgttgccgctcaacaaaaaaatactacgcatgttgtcggtcgcggccgccgatcagagcaccacaggtacgaggtgtggcgtttgtacttgggcggtcggtgaaacgctatgt

SEQ ID NO: 184287 - DNA, 610 bp, Arabidopsis thaliana
  unsure (1)..(610): unsure at all n locations
ggggggtagtactgccaactccataccactgactttaggaaagctcctgcccctgcaggtaccggtcccgaattcccgggttcacccacggggggagggcgcgtgtaaataangttttnataanaccacaataagggttccgtcttccacaaaaccacagaagggttccggctctccacaaaaccaacaaaagggttccttctttctaaaacactacaagaacggttcttccttattaaaaaccaacaaatatttttcggggggggagggggcctattataacgggttcctttttataaaaaaaaccaacctaacgcgttttcttgtccgattaacaccccctctccctggccccccgttcctcaaaaacacccccccgaacgtgatccgcctgttccaaacatactccctcattgtccccgttttcctcatacaaaccatcacagcgggtgcctgtcttttaacacaactctccggatcgtgttcttttttcttatatactctccccatccggttttcttactcttcctcaccgccgctcatccgtccgcttcccttcccccttcttttctcatcccgtccactttctcccttcactcgctgctgcccc

SEQ ID NO: 184288 - DNA, 629 bp, Arabidopsis thaliana
  unsure (1)..(629): unsure at all n locations
tcccggggggngggggggggggggggggggtaatactaccaaactccattctcactgactttagggaaagctgctccccctccccttcacccctcccgtaatttcccttctcgaccccggagctcagggcgggttaaattaaaactacatgagggcgggcgctcctactcctctccaccgcccccatcttctctgccctactcgtttcctccctcttaatgcgccgcccctctctatgcctattcacttcccccccccaccacgaccaactcttaacaacaaacatcttttctttttcgaaaggggagggcgntcttaatctcaggcacctncttctaaaaaaaaaacctccctcactctcaaccaccctcctcccccccccccctcaccccccccccccccccttcatccctccactcttccccacctcttttctacctctctccctcctccacctccctcacttacattctccccctcccctccttccccccccccaaccccccctccactctttcccaccttcttatctcctttctccctctctccttctacacctaccctctacctctccccatccccccactacccccctctcatctctccacaacctctccctatccatcccc

SEQ ID NO: 184289 - DNA, 492 bp, Arabidopsis thaliana
gcgtgcgtaagcttggatcctttagagcggtcgcccacgggttcgagccctcgttcttactgccacaaagaagactgcgtttatgagcgagaatcaaagaacaattgtcccatttgaagtcactatgaaatacaacatggatcaaaccctatttacactatttacacacgcatggctcttaatttaaaatcattttctcggggggaaagacaaacccaaagataggtgaagatcattattcccactgtcataggataagatggacctcttattactttcgaagagccttaagaacaaccttgttggttggatgaacacccttagcagttatctacagtacaccacgagcttgggataacccttcaaaggcatgtccccatgtggacagggtgtagaacattggccaagcatgccatatatccactaccttccctaccttgctgagagcgataactttttgcaccaaaagattctgaagctttccaggatcga

SEQ ID NO: 184290 - DNA, 548 bp, Arabidopsis thaliana
  unsure (1)..(548): unsure at all n locations
cagctccaatcccactcactttagggaaagctcgtacccctgccggtaccggtcccgaattcccctttcgaccccgcgttcgtcgggtaaanaaaacnacagaagggttcccctcccaaaataccaccgaagggttctaaaaaaaaaaaatttctctcctccccctttcttctctcttctttctctctcttcccccccctcccccgcccgccgcccttttagaatttcctttttttctcgggccgctggggttnaaccctctttgctttttttttataaaaaacccccttccttcttttccccggcccccttttttcccccccctttttgtccttgaaaaaccctcttctctttccccccttttatttcgcctttgccccccttcccccccttttaccctgctctgcgtantttccccatcaccccccccccccctttcctctttccccccctttctccccttcctgtattgctgttttccccccccccctttcctcctctctttctccgccctcttgtcttttattcccccccccctctcccccctc

SEQ ID NO: 184291 - DNA, 506 bp, Arabidopsis thaliana
  unsure (1)..(506): unsure at all n locations
gggggaacaacaggacgcccgncggaagccgnggaccctatacttttttccgacccagggggggggtgccttcaagcaaaaccccaaccaccgcgccgttgcggttttgtagcaggcgtcgtgcaacaaccccaatgctcaaggcagtaatccacctcggccgcccagacgccagcccccgccgagaaagatatggccaggagatgcgcacgaaccgccgcggtttttttatcgggggtgtctgaggaccacacgcccccgcgttgcagcaggaaagaaaccgcctcccccgggcgggccggaggccgcatgcgcgcacaccgacagccgcgctggcccacgccgcgcctcgctggtctcgtcctgctttcgttccccgatcctgcgactagtgcgggccgtgcgtgtggctggggcgggggcgctgcgcgcgccgcccgcgtgctgcccctgcggccgcacgtgagtcccgcgcggccggcgatcctgaggcgcacattacggcc

SEQ ID NO: 184292 - DNA, 397 bp, Arabidopsis thaliana
aggaaactccaccctgccgtccgtccgatttcagtttaccagcgggggttttttaaaaaaaaattaaaaaaaaaggccggttggttttctcaaacgcaacaacaaaaggggcgtctttcccttagcgaacacccttctaaacctaatcctaaccctcctcacacacccccctttttttcgggggggcgcactaccacgacccaacctaaaaaaaaaacctccgctgccaggggtttctaccccccaaaatttcttcttcacaaaaactctcctacaaaaaccttttctagtcaactctccctaacccccacccctccctcccctctccacttcgcgcacaaacccaacattgtcttcccttccaacgcaaacacatccccgcgccttctcttctccc

SEQ ID NO: 184293 - DNA, 514 bp, Arabidopsis thaliana
cgcgtgcgtgagccgggatcctatacagcggttcgcctagggtgtggggcccgtttaccaaccacacacccacataaaagacattaaactgtagccctattcaacacaaaccttctcatttggcactaaatggtcctaaagtggtcccgttcttgatgtgtaactataatgtatcttaatgggaaaaaagacgcctctttttttcggggggggggcgccacccacctgtgacaaccttttgtacaaggttgacccgcagcgttggggcgtaattgtcatttttgaaaaagtagctaaccaatccttaggagcgcaaatgagttggttctgtaggcgattactgttaaaaactgagaagttgacgtatactaaggctttgtgtttacaataagacacataccgaaagaaaaaattgtgaaggacattgggtggcatctaattcaaagtagcttctttgtactgtgacagtcattcggggtgccggtacgtgaagataaattctacaactcgtttt

SEQ ID NO: 184294 - DNA, 248 bp, Arabidopsis thaliana
ccccccgggcctatggggggagaaccgaaccccggcggcgtgagggagagaagtgagcctcacttttgatgcaggggggaaagccttttcttaacacatacccccgccgccgaccccggaacccacgtggcgcgcgcggccagcgtccgtctgcaaacagaactgcccagcacgaccttgcccacgccgccgcacgcgcctcgcgcggccggtcgcacgtcacgcgccgacctccgcccacgctcttt

SEQ ID NO: 184295 - DNA, 365 bp, Arabidopsis thaliana
  unsure (1)..(365): unsure at all n locations
agctctaatacgacttaccttaggggaaagctggtgcccctgcaggtacccgtcccgattccgggtcaccacggggggggaccgtaaaacacttntncnccaancttttttcttcctcggaacggaggagaacaccctcccatctcaatttcccttaacgcccactctaaaaaacccggcggccctctctcttctgcttcttccttcttcctctcacactccttgggggggggggggttntttctctattgggtgcaaccccacaaaaaaaaacttccggggaatttgcgcgggcgagggccttccccctgggttcctttttttgcgatctccaagcgttaaaaaaatccggggcctggagtggg

SEQ ID NO: 184296 - DNA, 178 bp, Arabidopsis thaliana
ccgccgacgtaagcctgggacctctacagcgttcgcccttggggtgggtcctattaacataaaatgcagagagaagaggcgatgaagaaatagaggctacggaatagttgtcttcaccgggcgagttataagtgaaggggacggcgactaagaagtgaggagtcgatggcggcatgat

SEQ ID NO: 184297 - DNA, 260 bp, Arabidopsis thaliana
ggccctgggggtggtggttttgtcacaaagaaacctatagaggaatagatcgcgaagatatattaaacaaaagcgcggacaacttcacacgccgtcggtggttattaagagttctaggcatgacggacatagtcagcaatggtaggatgtagaggggtagaggaaggaggcaccggccggagctttttttttgggagggggggggaaaacaccaacgcgcgtgagcggtggtaagcagaaaagaaaggacgcgtacatgc

SEQ ID NO: 184298 - DNA, 290 bp, Arabidopsis thaliana
tgccgaacgagcacctaaactaattcttttttacataggggggagagggcttaaaaaacaaacttaattacatacatcctacgacactcactgctgatactttctctcatttcacgctatagtgtaacttcaatacgcgcaggcatcttcccactaagatttcgatagagctcagtctcgtatctaatatctgcttacttttgtttagagaggggggggacataaaattctgggctatgctataaaaaaaaaattaaacccatgcaaagaaaagagacgcggaaacgtca

SEQ ID NO: 184299 - DNA, 209 bp, Arabidopsis thaliana
  unsure (1)..(209): unsure at all n locations
ttgggggggtggggggtaaactactaaggtacaaccccctgacttaggggaaagcccccacccctcctgtacccgggcagaattcctgttttnaccagggggggggccttttaaaaaaaaatatttttggtttttttcttagggcgccaaatatctggtgaatttttgtgttttctggagcagtgcttccctatggggtttctcgaatt

SEQ ID NO: 184300 - DNA, 400 bp, Arabidopsis thaliana
  unsure (1)..(400): unsure at all n locations
aggggagattttttacagatacattaagaaaggcagatgaaagggttacccaatgtggttttggttgaaacataattggatgttgattaatttataaagcaaaaaagatttttangttttttttgggtggttgggacaaacccccctgtacattaaaacaaaaactacccaccctggggggggcgcgtaccacaatttgtttttgatcctcgccacgggcggactgataagctgttggggttatcccccaagcggcgtggactggcgagcccttgccatggtcgacccgccgcggggcaccacgctgcgtggagacgggctgttcgcgggagggcgcgccgggtccgcggccgcgatctgtgggcacgcgggctccgtgtgcgcgctgtgtgcgctgctc

SEQ ID NO: 184301 - DNA, 531 bp, Arabidopsis thaliana
  unsure (1)..(531): unsure at all n locations
ctgcgtaagcttggaccctctaaagcggtcgcccctgggggtgggggtcctttcaaaaaaaaataaacaccttttaatccctgcgatgaaagatagaaaccccacacagtgtggtgatcgcaaacccacaaatcatcaggagagattgcggtaatgatcccaccccagagaatgggggcttatgtatttgtggtaaataaaaaagcacagaacaaggaaattttttatatgggggtgttggggcgnccacaagaagggggcttgtattaaaacaaaaaattacaccccgttccaccgtgttcttggcatcccttaacggatcaagcggaggtcccttccacctatccttgccccaagctttgctcccccgtggtggggcgcactcccacgaaaagaaaaatatccaccgggggcacagataagtcccgaggcgtgcggccgcatcgtataaatccttgcgaggtgcccaaccggcgggccaaagctagaagacagatgctgtggtctcccacggccaattcacggcggggg

SEQ ID NO: 184302 - DNA, 573 bp, Arabidopsis thaliana
cacctacctccgcccccccggggggaactccggggacttcccggggggctccccggggggccccgccccggggaacggcgagaggcctggggtttgccgcggcaggcgagcgccggtgtctcggcgcgaactcgacatgccccgccttaaatagtccctcacccgcgcttgagcgcgagcgcggcttatttgttgggcgcagtccacaagatgacgcttaatgaatttgttttgattctcggatacatcggctctagccggaggagtagcgatcttgcggtttactggcctagttgtgatgtgcggtgcgaccggaggtatcacctactttctgtttcgtaggcgcggctctagaccatagctatggactctattctatttgatgtcgctcgccgccgatgcctcacgtccgttccgttgcttgcggaacttcagtacgttctagatctgcttgtcagcagtcgtaggtcgattgcggtgagtaatatgacgaccaaggcgctgcagcgctataggcgagtctgtacctatcttagagttctgttatcctctttcctgctagcaatgaccgtt

SEQ ID NO: 184303 - DNA, 615 bp, Arabidopsis thaliana
ggggggggggtagtaactgctcaagcaacaataccactgaccttagggaaagctgcgacccctgcaggtaccgctcccgaatttccggttttacccaggggggggagaccttaaaaagagacctataccttaaggcccaaacaaacccgaagggaaatctatatcatacctcaaaaggtaaggggcacactgaagaaacaaatctaactcggcgggggggaggccgcaaacacacatcttcgtgcctgaacttcttcggagggggaggggattattcccgaggggtttatcgaaaaaaaacatgtccctttctctcgcggtggcctcctggacaacatgtactgccacacgaacccttctaatctcagcgttgcgacgcgcgccccccaacgcggcaccgatcctcggcttgctgccccttcgatgcacgcaatcccatacgtacgggcctgcggcgcgcgcaccgacccatacagtctccactaccctgcacgccactgtccccctccccgtcctatccttcctacacacccaccgcccgccccgctatcgccacaccacacgtgttcaaacctcctctcctcgcccagatagccgacatcttcacgttagctc

SEQ ID NO: 184304 - DNA, 402 bp, Arabidopsis thaliana
  unsure (1)..(402): unsure at all n locations
acccccactgacgttgnagggaaaggtacgtgccgccctgcaggtacccgggcccggaattcccctgtttctcccagaggcgcggggctctttaaaaacataaaatatccttgacggggtgtgacctcaacaataagatcgtccaacattgtttggcatttaattaacggcgtgaaaccccgtgtttttcctgacgtgtacctaatcgtgcattttgcccagaagcacttgcatttttccgtcatatagtaccttgtttttttcgggggagggtgggctcccgatacaacccgaaacgcgctcttcctataaaatgagcccccctagaacagggtgccggtatcagcgactaatacacataaagtctttctttgcgccctacctggctcgcgggtggatcgt

SEQ ID NO: 184305 - DNA, 339 bp, Arabidopsis thaliana
gggaacccccgcgagcggacttaagggtcgccgggggggctaaaggactggagggggggcgcctaatcgcgacccgcgaaaccaagaattggggccgcgggagaacagggggatgcaaaataaaagagaaggattttttgggggggcgaaagaggaaaggtaagtgggcacggatgaaggaggaaggagggggatgcagcccaggagaggggtggcgggggaggaaagaaagagaaaggcgagccaaacccagcgagacgtaaacgtagagggacacgacgagcgagccggccctacaccgagagaggaagagtatcggagacaagcacgcaccgatca

SEQ ID NO: 184306 - DNA, 249 bp, Arabidopsis thaliana
gggggggcggcaccctcttccctttccaaaaaacccaaaaaaaatcctacctccacccgtcaatggggttcccgtcgcccacaccgcggacaaagctgggacactcactaactacccactccctacacgggcgcgtgcgggtccgcgcggatctcaacaaactctgccaccccttccgaagcacggcgccggttaccgctcctcgtctaaatgcgccccgctccaggccaatgttgaacgagcgccccc

SEQ ID NO: 184307 - DNA, 599 bp, Arabidopsis thaliana
  unsure (1)..(599): unsure at all n locations
acccgcgcggcggcccgcgggggggcgggcacttaacgaggtctgactctcanaatcatttatgagcgagccccgcacgccgtacgtgagccttggatcctctagcagcggtcgcccttgggggtggttttttttttaaaaaaaactgcatgggggtgtagaagaacaagggctatggcaacacaaaatgggcgcctctaataaggtgacgggaccaaataccggtcacctaggagtgtattctgcggggacaacctcaggacccagcggcccttttttgatggggggggggggcacaccaccacccctgcaagagagagtgtgccccaccccctcagcacgggcggcgtggggagccacccggagtagcgggtccgcttgaacgacctgggcctgcacccggccggagggccgacgcaagcaagccgcggcccaggccaccgacccggggacgccactggaagggcgaccccagtcactgctgttcggtacgaccgtcgtcggttggacgcgtccgccataaaccgagaggccccctacgagggtgccccggactgactgtgcttcaggcggggaggatgggaagtgtcggtagccga

SEQ ID NO: 184308 - DNA, 299 bp, Arabidopsis thaliana
  unsure (1)..(299): unsure at all n locations
gggggggggggtagtactgcccactgccatacgactgacttaaggaagctgggcccctgcggtcccgtcccgaatccccgggtccccacggggggggggatataaataaancancacgggaagttcttgatgtcctctggtttacctccctaccctgggctgtgcgcgaaattttgaaaaaaatgaaacctaaaaccacttataaggagcggaattgtgcgggaaggagggcctcttcccatttaattcctttaagggggggggggggcctctaacaactcacgcgtttcccacaaaaa

SEQ ID NO: 184309 - DNA, 544 bp, Arabidopsis thaliana
gaaaaacaaacccctccggaagagtacaaataaacattttttttcaaaggaggtaatccctttttaaaaaaatttattactaataaattatattatacttatgataatataatattatctttataatttttatttaacaagtaattataaaatactagaatcattaataaaattatgttatgtaacttaaattacacacaaaacaactttttttttagagaagttgtgaaaacaacaaataataataataataattaaaaaaaaacccccaaaatatatatatttataactatttttaaatttattatagaattatatagatttttataccagtataataaaatttctctaaactaaatataaattagactatgacaaatcagaaataactaaaggaaaattgatacatcatataaataattaaaatgattataatctaatcttcataataaatatataaagtagaaattgaaaacattaaactaataagaaaaacaagaatagccgataatacttcatatatcaggtaacatagtatattgtg

SEQ ID NO: 184310 - DNA, 510 bp, Arabidopsis thaliana
  unsure (1)..(510): unsure at all n locations
tcttacgggggggngggggggggggggggtaggactggggggtacaacccccggactaagggaaagaccggcccccccatgtacccggcccgaattccctttcgaccagagaggaggccgtttaaaaaaaaatttaaagggccgaggcgagaggattcctctccttaactccgttcccgggcctcctaatcctcacccttcctcttctgaaaaaccaagaccccctgactctgaaccggcagaacaaatctcgcccccacacaaccctttttcttaggggttgattggagacnccaccctctccagaagagcctcacaaaaaaaacacaccccccccccctcgttggagaggttcggccgcgctcccgcatatacttggttaccttcactccagttgcgccacataatactacgtgcgcggcagcatacagcaatcgcgatttacgctcggagcgcgtggctgcgcgctcaatccccaccgccatctcgttcgttgtgcgtgctgcgatc

SEQ ID NO: 184311 - DNA, 344 bp, Arabidopsis thaliana
  unsure (1)..(344): unsure at all n locations
aaagaaggaaacaacggcgggaaggggggagacaaaaaganngagggaaacgaaggggcaccnacagncgcaagggggangcaagggggattttcnncgtttttttgggggggggaanncccacccagggggaaacccaagagagaagcctcgccggcggggggggggaggtggaacacttattgaagcggtcagggggtgtcacgagcaggaagggctggggtggtttgtgggagagtgtttaatcacgtggggggcggggggtacgccaggggggtngggcgggggagagctagtgctggagtagggggcggcgtaagggtgggggggggnggagcgtgggg

SEQ ID NO: 184312 - DNA, 366 bp, Arabidopsis thaliana
  unsure (1)..(366): unsure at all n locations
ttcctataaaaactattaaccttcccacctcttctttttaaattttctacaaaacaaacacacacaccttttctatctctctttcatcattcctcacaccaccctcataattcctcactttcttcttcacacaactcatttctttttttgcagagggaggaattttttttntaaccccctcctncttcataaataaaaaaaaacacctacaatcctcctcttcctctcttctccccccccctaccttctccctattctttccctctcttcccccctccttctacaataccctctcatccctaccctacattctttctctatcaaccatatccactcaccactccctcaaataaacccactcctcca

SEQ ID NO: 184313 - DNA, 640 bp, Arabidopsis thaliana
ggggggtattactcccccaacttcaataccacttacttctacggaaacctcctcccccctcccactaccccctccccaatttcccgctttcacccacggggccagtctttctttaactaaactcacaccctttttttctcctaacataactaacccctaatattttctcacaacccttaacctccactcctctaacacccttacccccaaacccccctcaacccttttccttaccccccccccttccaaccccccctctttccacgacgggggccctctcacaatatctccacccctctcttaaacaaaaaaccactgtctctcctacaaacagtttcctgccctctcctcctccctacaccccctctctctccctctctttttccctcctcccctcccacgcaacacttcacccacctataccctcctctcgtctctctctctcaaccacccccccctccccttcccacctaatcgagccatcttcccccctcgccctcccccccctcccctccctcccccccccactcccacccaccccccacccccctcccctcccccctcctcccttcttcactccactcacctccctcccctccccctccccgcccgccctcctcctccccccccctcacatccc

SEQ ID NO: 184314 - DNA, 456 bp, Arabidopsis thaliana
  unsure (1)..(456): unsure at all n locations
gccgcgtacgtaagcttggatcctctagagcgtgtcgccctttggttttgttctttagatattaaaaaacaaaagccaaaggatggtggtattcaacattactacatatgagagtgacgtaacatcaaggaaacaacccttagtttgctcattggctccaagccacatttgagtgcaacctaataaggaattcatattctttacggggggggggtttgctactatcggcctaacacaataatcagcanagtcctcagacccaaactagttttgactacctgtatctaataactattggtgggtttttccatattcttgacggtttgtggcgttggaacccaccataattgttgtcttgatgccttaaaaaatatgcatccccatgatttggatttctctcccttgggaatcattggcatatttggtcaccccataggggggggggaatttgaaaga

SEQ ID NO: 184315 - DNA, 581 bp, Arabidopsis thaliana
  unsure (1)..(581): unsure at all n locations
ggggggtatgtatcctccccaaactatcaattaccaacttaatcttatnggaaaacttcctttccccctctcttcttccctctccccaaatttccccttttcacccccagggggccaaaacccttaataaaaatctttcataaactccacttcccgcaaccaagacctcccaacacccttctaccactcctctcaaacccctttttctctttctcacaccacttaaaacccacttctaatcttcacgcccttttcttttatttcaactcaaacaattattattttttgtagcgggggaggatttttcttcccttcttccccccaaaaaaaacaacccactccccccctttcccccccccccccccccccttcccctccccctcactactcaccacacttcccccttccctcccccctcccccccaacccaccctctcccccccacctcacctcccctaccaacctcctctctctctcccacacccacccccctcctcctcactcctctctcctcccccctcacccacctcccccccccccctccctcctcctcccctcctcatctttattatcttctctct

SEQ ID NO: 184316 - DNA, 450 bp, Arabidopsis thaliana
  unsure (1)..(450): unsure at all n locations
cgtaagctggatccttacacggtgcctacggtcgggccttataaaaaaactccatgataatataccaccacatttatcgcacacaaatgatcaaatttctagtaaccgggcaaaactggatctcatgtgattctctgggactagttagacaccctatccgatatttttccggggggtggccaacacccgtcaaaagcatttacatactccccanaatgccgggggttgtccactgatttttaggacctttcgacctaccttcaccggcgggttaccatccccacaacctttgttaaactaataacccggtctttcttctttttgacccctctcatccatttaagagcacctttgggaggatttgataacccaacacatcctcacctccctggaattaggtgggcgacattaaaacctgcttcactcgagggaatcctatcccgaatggtt

SEQ ID NO: 184317 - DNA, 378 bp, Arabidopsis thaliana
ggggggggggggaatactaatgggaaacacacccgccggattgtaaaggagggaacgcggccgcggggttgcccgccccgcactataactatttcttagcaaggggggaaaggcacataaaaaaaaaaacttcgtatctatctaagtgataaggcccggctacacctatcttactaactataccatacgacgagtaagttcgacgtgctgtcatataagtatcggtcaacactatgtacgcagaatatccacagactgacaatatacatcaacaaccaagagagagtttttttaggggggggggtgggagacacaagcgtatcgaacctatagtaaaaaaaaatccaacctcacaacgttatcggggtcggcgagcga

SEQ ID NO: 184318 - DNA, 472 bp, Arabidopsis thaliana
cgcgtcgtagcttggatccttagagcgtttgccttgggtttgagctcgtttctttttttcttgtgcttttttggtgactttttgtttttgactcggcgagggaaaaactaacccccccagggtttttgattggggaagaaaaaaatgaaggacccctccagccattggcgggccattttttggtaattttttggggggggggaaccaatggggaaaataaccgaacaatgggaaaccactgcgtgggggggtttaaagggcaacatgaaccacgggagtaggctcccaaaccatgcaggggccgtttcgagggcaacccttttttatgggacccaaaagggtgacctttgaagaatttttatttcccgcgggctatgggggtttcctaggagaaggttgttggggagggggtccctgggaatggggggctgactatttacttggccgttgtgggctgtggacaattctgggc

SEQ ID NO: 184319 - DNA, 491 bp, Arabidopsis thaliana
  unsure (1)..(491): unsure at all n locations
gcgtgagcngggatcctttagagcggttcgcctgngggtttaggccgagaaaacaaaaaatttggcatgtaaaggagaagcctaagaaatcgcaaaaggagattaattcggttgacgaatgttaggagcctaaaagagccaaaacaagaaggataaacatactctgttatacaagaacattcaaagaatattgtcggggtgagtcctatgaaatgaccagaagcctcttatttcacggccacggggcggagcaccaccactgtagtctttcctgaccttggccccggcctaggactttgtgactgcctttaccaccaccgagtgagattccctcagttttagtaggtccagcctggttgggattctgcgcacgagcctttcttgaacccacgttattgccggctttacttgctggccgttttgctgcagacggggtcgagggctacaggttcgtcactttggtgggttctttccacgagggaggaacactg

SEQ ID NO: 184320 - DNA, 321 bp, Arabidopsis thaliana
tttttaaaaagaacgcccccacgcaaaaaattttttaacggggggggggaacattttcggggcggtcttttcaaaaaaaaagcgcgggagggggggcgttcctcttccccccccctcttgcttaagaacccccccaaccccacccgtcgcggagcccccctaattctttcctcataacctccatctcgcaagaagcccatgcccctgagaaaaccgggggcacaaacgccccttccaactcggcccgcggctccttatacccgccgcatgctccgggcgcaaccgccgccccaaacccccacccgggctcgcccgcccaac

SEQ ID NO: 184321 - DNA, 392 bp, Arabidopsis thaliana
  unsure (1)..(392): unsure at all n locations
ctcgtagctgatcttaaggtcgcctaggtgggcccttaaaaaccttatgaactcactactttctcctcctcttctccatcccaaattcacgaacttcatcctaaacacaataaaccattcaaccncccctttctctttagggaaggtggatacacccggagattnttaaaaaactccacctaggggggggaaggtttctcttggtatttcttgagggctaccatgactgattgccatgaagaatcatccacaatgggggggagttgggcgcgggttcaagccgggagccgcgacttggttggacaagcggggctgtggcctcacacaagaacaaggcgccggttgggggagaacccagaacggattgcgggtaaagcggcccgggctctgag

SEQ ID NO: 184322 - DNA, 496 bp, Arabidopsis thaliana
tggcgtcactgcacgcgtacgtgagcttggatcctctagagcgtgccgccctttttttttgtttttagtttttttttttttattttttattttttggttttctggggtgtttaaaagatctttctataaatagatctctgtgacggttatataattggtgggatgtgaaacatatgattgaaaaagaaaaaaaaaagacagactttttttaaggggggggagctcacttgcgtgactagaaactgaaagaaaccctctacccaaaatgatgaatttttgcagataagtaatctaatagatgcattttaaaattctttgctcttacacttgaaagtcgagaggacctgtctcaaactaaataactgtctctggtgtgcatggaggagggcattcgaagaaaacacttaatcagtttagataagatctggagaagggaggaggttggataatatttgacaaaaagtttggactcactaaaaatggtagggggggaggg

SEQ ID NO: 184323 - DNA, 184 bp, Arabidopsis thaliana
atacacgtctactcgctcaacctccccttacattcgaattattcatttcttttttggggggggggggtcaaataaatacgcccctgctctcataaaaaatctttcgatatgaaaatggtgttatgactatcgatatcgttacgactatacacaccccaccactaccaacgccctccgcttaacc

SEQ ID NO: 184324 - DNA, 611 bp, Arabidopsis thaliana
  unsure (1)..(611): unsure at all n locations
ggggggggngggggggtaatactgccaagtacaaccccactgacttgggggaaagctcgtgcccctccaggtacccgtcccgaattccccgcttcgcccagggggggcgggcggaaaaaacactaanccactgggaagttagcgagcccctcctaaaaatgttgccattttctcacgaatgtcgctggagttaaaaaaaaattgtgggagaaaaaaaaaaacaactccacttggggcgctcgtgtacttatctcccccggggtctcatctttctagggggaggcgggggaaaaacctcttgtgtgtgtcttcacaaaaaaaaaaaactccccccccgcccgcgggggggactgatacgcgccccccctatcgggctcggcgccgcacacccccttgtgggatcgcgcgcccactcggggtactcccctgggccgcagcccggatgatgtaacgcgcgcgccgttctccccgcgctctccccgcgctccctcgcgcggcgggcgctgccaggcggtcgccgcgcgcggctccctggcccgatgggcacccggcggggggggccttccagcgcacggcgcgcgggctcgtgcgacccgacgggccgtcgcgcg

SEQ ID NO: 184325 - DNA, 397 bp, Arabidopsis thaliana
  unsure (1)..(397): unsure at all n locations
tcctccccctccattacccgtcccgaattccccccttcnacccacaacggtcactcccaaacactatatttttaattcaccaaaccctaattctaatctcccatcctnnaaaattctcacctatcccccaaccttcccttnaataatttcattaaaaaaaattctcttcccaaacatttcccttctcataactctctttcttaccgaatcctttaannccataaaattttnttctaaatacaaacccccccccctttcttgcctccttccccccccctcccaacacctaactctctctctcctaaaacaaaaccccctcccccccccctttttctacacactaactttcttcaaactacttcccctccccacatcccaacacccccatcaccccccc

SEQ ID NO: 184326 - DNA, 484 bp, Arabidopsis thaliana
  unsure (1)..(484): unsure at all n locations
ccgcgtgcggagcttggtcctctagagctttcgccttgggttaggcgtntgagaacacatcgagcactaatatgagtggtctaagatgcaagatcttgccgaagcttcactaagagggtataggcttgagtggactctataacgcaggatgctatgaatcctaataacgttcacaataagcaccactttttatacgggggagatcagactaaaaccgtaacgactcggctatggctcatatcagtactctaagttgtatatatactgaccattggtgaacttatgccttatttatgacactacgtatcacgtctgctacgacggcacattattgatctgggacttatgcgtgacgtcagagcttacctagaattacttattgtcggaggaggctctgccttagattgagaggaactaggattggggctgccaggctgtgtttcaacatccatcacatctggagatcggaggacgtgaccctata

SEQ ID NO: 184327 - DNA, 487 bp, Arabidopsis thaliana
  unsure (1)..(487): unsure at all n locations
tgggggggaaaccacccccgcccccgggnnggggnggcccccnggaagaaacttccccccgcggggggggaaaacccccnnnnaaaaaaaaaaaacgccaccgacgcgcgcccagcgcgaccaagacaacacaaaaacagccagacaccaacgcacccccccagaaaacaaggacccgcccggaaggacaaccgcacccagccaggaggccgcgaacacagagcgccgcgctcgcctcaccaagcccccccgagagcacaaaagaaaattttttttataaagggggggggggggcacccccccacacgggcagcaagcgccgagacaaaaaaaaagccccccacagcgagcggggggggggggccggacacccaacaaaaaagacacaagcgagcgcgaggcgccgccagggggcgaaggaagagcagagagaccggcgacgcaggccgaagcccgccagcacggcgcgcagggccccacaacggac

SEQ ID NO: 184328 - DNA, 576 bp, Arabidopsis thaliana
agcgcaggccagcgagagccggggggggaggcattttttttacacccccccctttcccggaaccgcccggccggggagggcgcggcgccaaattttccaccgggggggggggccgcacaacacaaaaccaccccccggcgcggcacgccccgggtgcagcgaggcggcgcagcggggaacggggagagaagcacgaagcgcgagccgacagccccggtcgaccaaaacgcgagcgtcacgccccgcgccacaccccgggcgcggagagtttttttttgggggggggggcaccacgcgcgacgagaggcaagaaaaaaacggccgcgcgaggagagcgggccgcggggcgaccgccgggccgggccgagccgcggggcaaggcggcggcgcggagagagcgcgcgacgaaaaaaatccccccccgggcgcgaaagaccggagacagaccgaggccgcgccgggtgacacgcagcgcgggcgggcggacagcagacaagcccgaccccaacgcccgaagacccagcccgtaccgcagacacacagactacccggagccccccagcagaagaagaaaaa

SEQ ID NO: 184329 - DNA, 588 bp, Arabidopsis thaliana
  unsure (1)..(588): unsure at all n locations
cccccccccaaccaattttgcgggcggngnggaaacacgccacgcccgcgccgtgaagacatcggagagcccctctagaagacttgtacgccccacgggaggggagaggccccgccacaaaaaacacacccaagcagcaaccccagcaggcagacaccccacaggaacccagcaccgccaaccgaggcaaaccccagcagacccaggcaacaccccacaaccgcagggcaacctccccgagaagggccccacccaccacaccacgcccggcccacggcgccgccccccacagagacccctttttatccccaacggggggggcaaagcgcaaccccaagaggccgccaccagggaacaacaacacccccgacacacacaaaacaccaccccccgcgagtgcaccgcgcacgaagcaacgaggcacgcccgcgacaagaaggaagaacaccaccacgcaagccaggcagaacaggtcagcagcacggccgaaggcgtagcagacccacaggaagacgcccagaaaagacccaaaccgccccgcccgccgcgcaaccaagacaggcaagccagcacgagaaccgaatcgac

SEQ ID NO: 184330 - DNA, 547 bp, Arabidopsis thaliana
aggcggcagacgcccagggttaaagaagaccattttattttgtttttacaatctcaaaattttttgatacaagcgacacaagacgcacgagccccggcgaaacattcacacctccacctttatttctgggggggggggacccaacaccaaacgatgattccactggcgtgatcgcagagtaatgaagcgttagcaccgcgggtttgtcggcaggacttgaaagccggtctaccaccgcgattaccatacccttaatcactggataagtaacacccggaccgggaatttttttttcgggggggggggcgaagccacgagaatatgcaagtaccgaaaaccgagcgttgtattacgagtggtgaagtacggtaattaactaagcttccctctaacgttaagaccggttattgtgaatcggcgcatcaattcatgggctgtctggaatgaccgaatgcatatagtataataaagctgcgaaaatagccacagaccgaccgcattagtgtcgatgcctagtttttctatgcattataggaaaaaagcccca

SEQ ID NO: 184331 - DNA, 490 bp, Arabidopsis thaliana
cgacgaagcaccagtgaaaaaaaagacaacctcttcaacccaatttttttacacaaaacaaccaggagcccaataaaccgccactttccccttttttcggggggggggagtgtccaacaaaacccaacgaaccccccgtccctgaacgctaccaaacgaacccaaagcaccgcgaaaaatacacgaaataaccaatatccatcagacgcacgtatcacttccgagaaagtatactaatgaaaaaccgtcaatcccgggttttttttttccagggggggaagaaaaaactagaaatacaagaaatatcgcaagacactaccgacctactcgcgtaaattccgaccctgtacagacggatcggcacactaatccccaccgcctttcaacctccgactgagagcaaacaaccaaccatagaataattgagaaatctcggctagtgatataagtcccggaacgaaagcacatcgacagatcggtgaacaggacg

SEQ ID NO: 184332 - DNA, 379 bp, Arabidopsis thaliana
gacccaatagagcggcacgccacaagggagaaccgcctctctacaacgatccgcaaaacacaaaaacaagaacaggaccacgacaccaccgcaccacaaccccgcaaaaggaaaaaaaggagcgcccaagccgagaaacccgcgcgacgccgcgaaagggaacgcgggaaaaaccaaggaccacgaagcgcagcacacgattctttcaaaagcgaggggggccacaacaaaacaaagcaggaagaaaaaaaaccccccccaaggggcggagagagaaacacgcaccagagaggggacacaccaccgggcaaaaaaaaaagagcgagaggcagacgacacgcaccgagaagcagaaagaacggggagcaagaagacgcag

SEQ ID NO: 184333 - DNA, 486 bp, Arabidopsis thaliana
  unsure (1)..(486): unsure at all n locations
cccccccngggaccgggccccaaacccgttttcacccagagcggagggcccgcgaaaaaaaacaaaacaaaccccggggcccaggaaaccaacaaaaggcgccggggaaaaaaaaaaaaaaaaaaaagaggccgagctccaccaaagaaacccgaacccgagggccgacgggggggcaggcggcggggaccgcaaaattttttttgggagggtgggagaaaacaaaagtggcgggcccagaaaaaaaaagccccaccacgccgggaggcgggactgccggccggcgggggggcacaagcccaatacacggcccgcggccgcgggcgaccacgcagacataagggaaccgagggcggaggggtggaaaagacgacgcaaagcgaacgcgaccacccgcacccagccgaagcacagaagacacaagtggacacgaggagcacagacccccccacccgacaaaaccacggcggagcgcgccgaccaaga

SEQ ID NO: 184334 - DNA, 385 bp, Arabidopsis thaliana
cgccgcgtcgtaagcttggatcctctaagcggccccttgggtttggctttttataaaaaaagcatcaaatagggaaggttataaaaacccagaaacacccgagggaggaggaaaaaaaaaaatggcgcaaaacaaaaaaaaacgatagccctatagggggctcttcacttaacaaacttttttaaaaaaaaggggggggattatccggagccaaaaacaaaaaaaaaaattgctagggtaactgcaaatactaagcgccccaataaaaaaaacaaaaaaacgtccccagttggcccaaaacaagagaacctgcataggggtcaaaaaacaaacaaaaaagaggggcaattcccgggcttaggggtatttaccaagaaaagggggg

SEQ ID NO: 184335 - DNA, 389 bp, Arabidopsis thaliana
cacgcgtacggaagctgggatcctctagagcggtcgaccttcgggttaagtcctttgtggaagaacactctaatcaaagaaagggaatttataaaccaattaggacaaaaaggaacaataactgccaacccaagaatcccataaacgcaaagaaaaaaggagaaaggcgagggcacaagggacccgccgttttttttttgggggggggcgatcgcgcaagacggggggatacagacaaacccccccgaccaccaggggcgggggggagaaacaaaaatgaggcgcaaaggaaagcacaacaagccgagacgggaagaataaccacgaggagggcaagcggcatgagagccaaaggggagagcaggaccggaggaggaacaaggagagcc

SEQ ID NO: 184336 - DNA, 515 bp, Arabidopsis thaliana
  unsure (1)..(515): unsure at all n locations
aaacggggggggggaggaccgacnccaagcgacaaacgcagagacaaagccgacgacggaggggagcagaacgaaaaggaaaaccaagacaaacggccgcggaaaaacacgagaaaacacggaaaacgacgcgaagcaaccgcccagcgaaggaccagagaccgcgaggtgggaagaaaagggaagaaaccgccgaaggcgcggttttttttttcccgggagggggggagggccaagacagaacagaggggagcagagaaaaaacccaccaaacagaaccagagaacgaacaagcaccagcgaaaaccaagccggggagagaggcagacaaacagcgagggagccgaaagggagcgccgaagagagaaacgaaagaccaacacagaaaaaacgcgaaaggaagagaagaaaggagacggaaaggagcgagaaccggcaaagacaccaaaaaacagagaaagaccggcagcccgcacacgccgaaaagaacgaccggccagacaccagccgaaaaa

SEQ ID NO: 184337 - DNA, 392 bp, Arabidopsis thaliana
  unsure (1)..(392): unsure at all n locations
cgcggacgtacccaccagcacatctctccaattttacaatccagggggaggtagccccttcaaacaacacaaaccaattacatacactcccctagtacgcatgcctaaataaaccgaaacgcaccctctccacgtattcccatactagccacgcaagatcccaattcaataccaccaccaaatatacgatgtttctcgaagccttctcttatttggaccacaacgcccgagtcccacgaaggacattcttttttatttccgggggggggcgagacacgagtgattcagtcctctcacattatccagctagataatcaaatctgtgttcagacgcacacgactaactccatctccctacanattcaatactgtaaccctattgcatcatgtat

SEQ ID NO: 184338 - DNA, 396 bp, Arabidopsis thaliana
  unsure (1)..(396): unsure at all n locations
catcaacttaaccccatcaaacggggcgcggggcgggagagagcgatttttttttttttaatacacaacacattatttaaagcaaaccccgacngggacgcgggggaagcgaccccaaacccacaattttacaaggggggggagggccccgacaacaaacaatcaaacccacctcgcggtatccgattagactgcgctatgcaccccaccatgtacctatgcaaacccaaatcccattcgacgccactcattactgaacacctaaatgctaaaagagacaagacccattcccgaagaaatttttttttgggggggtggggaaacataatgaaaggcaggtagcgaaaaaagaaacaacaggcatacgtaaagcagccgatcataaatctaatctat

SEQ ID NO: 184339 - DNA, 365 bp, Arabidopsis thaliana
  unsure (1)..(365): unsure at all n locations
aaacaactcacaaaccccacccacccaccagccccccgccgcggatagaaaagacaatttttttttttttattttcactcccacctttttttttacaccaaaccccccacgcggncaacacaaaaccaccccaaacccccctattttaacaagggaggccaaaaccacccaaacccaacccaatcccatcccacattccctttaaacccaatcaaaaaaacaaccaaaaaacacactccaacatataataacacctatattaaccaccactgacacaatccataacccaataatacacaccatctatcactattacccccaaaatattaataaattcaataaaaatccacacaacacaccaaaca

SEQ ID NO: 184340 - DNA, 442 bp, Arabidopsis thaliana
  unsure (1)..(442): unsure at all n locations
aaccccaccccccccgcccccccccgcccgccaccaaataatttttttccaccccccccccccattcacgcgcacaaaaacccgcccccccccccaggaaacccacccccaacacccacactttcccaccacgncgttgaatatccttcccaaaacacaaatcaatccctcctcccctttaacaccccctttatattccttaaaccaccccaaaatatatccacaactacttcccattacctatcctttctttaccaatacccactcacctttatccttctttttcaatacaccaccatccccctatattattaccctctttttttcttgggtggtttgaaacacacttcaataaaaactcacctaaccaaaaaaacacaatccccaaaattctctccctccccaatttatctcgtacctcatattatctatccccttaccc

SEQ ID NO: 184341 - DNA, 126 bp, Arabidopsis thaliana
  unsure (1)..(126): unsure at all n locations
acttaatacactcattaggaaactctccctcagtaccgtccgaattccggtcacccaccgtcggtcagccatcacactctttccacntctccccnnctccttcnattcttttaccctaactaaatt

SEQ ID NO: 184342 - DNA, 517 bp, Arabidopsis thaliana
  unsure (1)..(517): unsure at all n locations
ggggaaacccgtcccccttccgngnccccttccccaaattccccctttccccccccgggttacgcgaaanaaaaaaaaaaccctccccncccttctttgaaagttttcaaaaattttttttaaaaatccccaaaatcccattttccctttttttttttaatcacaaaaaaaaacattccttcaaaccccaaatccattaccttngcctttttcccccctttatcaaggttgttggggcanacaacacccggccctttaaaaaccacccaaattctccgcctttctttggaaaaccccccttcaaatatttctttttcccattccaaaatttttaaaaaaaaaattttcccttttgggctcaaaatgtaggaaaaaggtctttatcttttttaaaaacctttctttgccagtttcccttgtttcacaaccccccacccccccaaaacatttcaagatcctcttcttttatccacaaaatttctttccaattccaaaaaaaaaaaaaccataacctctt

SEQ ID NO: 184343 - DNA, 477 bp, Arabidopsis thaliana
  unsure (1)..(477): unsure at all n locations
ccccccttccttcctcttcaccggggttcctcttcgccaagccacccccctctcctctcgcacacttttccccgccccattgccccagccccttttcgcccctttcataaatccgggtggtgtggggccnccnccccttggggcgcgcctccaaaagcgagccaaacaccccctccctgttgtggcggggtacgtctccccccccctttttctttttttccacccctccctttctcgttctttgtaaatcctcctctcctttccctcctcccgcctattcttcttttttaacccctacacttctccactcccgttcatactttcactcccctcttctcccacctcactcccctcctcctcttctcccctttcttcccgcttccttcccctattttcttcttatcccgccatccactccctcccctacccttcccccttccctacatcatctcccctatctccaccttcttcttttct

SEQ ID NO: 184344 - DNA, 528 bp, Arabidopsis thaliana
  unsure (1)..(528): unsure at all n locations
ggccgccccccccccgggcccccnnnccccgaattccccggatccaccccccggggtacagggcggcttaaaaaaaaaanctaaattttnnatcaaaaaaaattcccccctcccttttttaaaaggggggttcattaaccctttccaaactttgcgggatttatttggacaactcttttttaaaaattttttttccactgttattggtttggggaaattccccaactttttagcggggggggggaaaacccccctgggttcaactaaaaaaaaaaacacttcccggttttcttctcccattttnaatctcaacgaccaccttacccttctttttttttaaagaaattcccccacaacccaaaaaatctttttaaagggcaaacaatcccttacggcaaccctaaaaaaaaacaactttcaaaaagggaacccccctcataaaaaaaatcgcgcacccccaaaggggccctcccaaaaaaaaaaaaaacctcccccccgctttccttaaaaaagcaaactttctaaaaa

SEQ ID NO: 184345 - DNA, 149 bp, Arabidopsis thaliana
  unsure (1)..(149): unsure at all n locations
tctacaactcttcgcatcccgattcacatttgatcactatactaactcattaatcttggaattcaatcccttaacgagcaattnttattcctccaaaaatattctaaaaaaatcttaatctctacctccccactaaaatcaaacttttt

SEQ ID NO: 184346 - DNA, 471 bp, Arabidopsis thaliana
  unsure (1)..(471): unsure at all n locations
ccccccaagaccccgcccaattccccggtcacccccggttacggttctaaaaaaaaaacaaaaannntttcaaatccttttaaaaccccttccccaaaaacctactttttccnaaataattttttttnattaatttaaaattatccctccccttccacaaaacccacaatcccttccctatctttggggggggtcccaatcccctggtttccccaataaaaaaaaaattccccnaaaaaagcccttagaattccccttcccgtggcttttttactccctcttccaccttctaaaaatcaaaccccttcccctcccactttttaattattattcccttctttctttttcgcccccaacccaaaaaaaaaaaaacttctcccccagaacggttttctcttaaaaacaatccataaaccccttaaaaactccaattttttcccctctctactttctaaactcccaaattaataa

SEQ ID NO: 184347 - DNA, 478 bp, Arabidopsis thaliana
  unsure (1)..(478): unsure at all n locations
taccgggcccgaattcccggggttacccacgcgtccggtgcaaatcaatctcaaaancaancctgcttcattaaatggcgagcttcattctctccaggtcattactccttctactcctgtctctcaccccattactctccaacatctcgatttccgaagctacctcatcgttctccttcacaatctctcggaagggtgccaactttnantccgaaaactttaaaaaaaacagccacgcttaactcgtggacgggggttcttcaattcaccttacttactaaggaatcaccggggtgggcaatccatttataaaaaacccattgatccctaaaccaattaaaaatccagtttttcacccgtatctctacttcttatctttcacaaatcctccaaaccggggggggaaactcaaattttaacggcttcctataaaaaaaaactttcatcacttttttttcccaaaaaagtttaaactttt

SEQ ID NO: 184348 - DNA, 485 bp, Arabidopsis thaliana
  unsure (1)..(485): unsure at all n locations
ctgcaggtaccgggcccgaattcccgggtttacccacgggtncgggcacgcntacaatatctaatactcatataattacnctcattagtgcaataatccagacatcatacggtacaaatttgtaatccattctctcatgggggttgctatcatgaaagattcagacctctttaaagagtgagagtattaagatctttttctgggggggggggacctttaccctaacctccaacaaaacataaatnaattattcccgccggggccattagtttcctgccacttttaaaaggtaccaataaactataaaacatctctcgtgacaaaanctcctagggcctgttcttttggtcacacttcacttgtgaaatcaatggaaagcccaattttccctcatcgggggggcaaaaaaaactaacataacgttggggtggatctttacgataccaccatgttcaaaccttttttgggtctataaaacaaaaaaa

SEQ ID NO: 184349 - DNA, 401 bp, Arabidopsis thaliana
  unsure (1)..(401): unsure at all n locations
tttnccgtgctctcaaaacttatatcggatctcgaatcttgaatccgactcaccacctccggatcttcaaaaatccaccaacatgtcttctcctggcgaattctataactcacttccacctataacttatgcttggggggccttnnnccttttcactaccaaaaacaaaaacatctcccctttattgctgcccgtcacatttctttaaatcccttaacttttacctaagcagtttccaaatctgggaggctaataacaaacttttttttttctccgggggtttcttctatccattctggaaataccccttttcaataaaaccaaaatttggacttcacctccaaaaaggcccctttaaaaggccccccccccactttttttggaaaaataaatctcccaat

SEQ ID NO: 184350 - DNA, 657 bp, Arabidopsis thaliana
  unsure (1)..(657): unsure at all n locations
ggggggggaagaaaactttatttttaacaaaacaaaacttattgaaagaaacccccccccgcccggaccccngcccgaaaacccccttccaccccgccgcncgggggcaaaaaaaaaaaaaaaaaannnaaaanggcgcccccacggcggaaaaaaaaaaaaccccaacccccaaacccccccccccgcggaaaacccccaccccccaaacaccccgccccccacaaaagggggngcaaacaaaaaaagcaccccacaaaaaaacacccccnncatttttctaccgggggtgttgggcgnacancccccctgggcccgctgtttacaaacccagccacaaccgcccccccacaggtgagaaacccctccnttttatatataaattgccaaagggccccccccccaacccgcgcaccaataccaccacacacaaaaagaacaaaacaccccgcccccccgacaaaaaaaaacacccccacaaatcccaaggcaaccaccaagacaaaaaacaccacagcgacgcgaaccaccccacaaaaaacaacccgacacacaaataaaaacaacccgcccgcgcctataacctaacacacacccccaacaacaaacaccccgggaagaaacccccaccaacatcaacacaccaacaaactaccc

SEQ ID NO: 184351 - DNA, 307 bp, Arabidopsis thaliana
  unsure (1)..(307): unsure at all n locations
aaaaaaactttaantttcaaaattaattccttccccctacaaaatcaccatgaaaacttcataagcttgatggggggtttttttctgggggggggggtcaacttnnccctttccttncccaaacaaaaaaaaaaaatctcaccaaaaaaagagaattcttgtaaaaccccgggctttaaatggatacacttaatccccaaactttactaatggaaacttcccaaagggaagaaattttatttttatctcccccctcaccctaaatggcttgcgccttcccttaatcacaaaattggggcgggggttt

SEQ ID NO: 184352 - DNA, 354 bp, Arabidopsis thaliana
ttcctctctctggcttgggtcagaagctcttcaaacttcttttttaaccaactacccgcccctgttttataccattcacggatctaattcgggttcgaatttttttttcacggatgttggggaaaataacaaccggtttcaaccaaaaaaaaatcccccctaaaagggggggggaaaagtacgtccattttccttaactagccaacctccactgggtctcaaacctgaaaccgaagttcgggggaatggggccaagagggggtaagttttaaggggcccaaccaaaaaattacttctaagagtgcgcgcccaaaaatactccagggcgtaacgaaaatttaaacgccgggggaa

SEQ ID NO: 184353 - DNA, 201 bp, Arabidopsis thaliana
  unsure (1)..(201): unsure at all n locations
ggacaaaaaattatttccttaccctcacacctgcgctctaatcaccttacacctttttagtccacttacatcagcttattctggtaaacctaatctcaacttttgcagggggttacatttacaggantttaaaaaaatttataaatttcatctggctcgaaaacacagtcccgtaaaatatcccataaacccccaatccta

SEQ ID NO: 184354 - DNA, 164 bp, Arabidopsis thaliana
  unsure (1)..(164): unsure at all n locations
ctgcggaccgggccgaattcccgggttacccancgtncgggcngcgtaccanatttcntnacttattcttacctttctctaaaggaagcttatcttttactcagatcactgccctgggcttattccttgatctggtatatacaagatggctctgcgactctgag

SEQ ID NO: 184355 - DNA, 430 bp, Arabidopsis thaliana
gggggggggcgagccccaaggggggccactcccttaatggggcggggtggggaagaagggaaaccgacgccccccaaaactccatataatatcgacgagttatggcacggacgatatggttcagtgcgacccgcccataatcgatccccggggtcgcactcccacgattaatgttggtcgtgctaaacatcgatgcgacggcgcccacccccccttaaagtcatgtcgtctcctgcccttgtttcatcacgtcagccctcatcgtgataaacaaagggcgtgcggacatcgagtgtcgggtgggacccactgatgagaaacaaattttcctacccccgttgggggtgcgaaattgcgacgggttgcgtgccactggtagtgtgtgctgtcacagtacgggactctatatgtctaatacagaggcagcgag

SEQ ID NO: 184356 - DNA, 657 bp, Arabidopsis thaliana
  unsure (1)..(657): unsure at all n locations
cggcggggggggggcggcggggggtgggggcgnactccaactttttttttttcggcccccttgtggggggggnggngcgggcgcgcgggcggggcccgcgacccccacgcgggcgcgggcttttnccccggccgttttcgggggcccccccacccaacaccncnccgcccgccnngcngcggcgcgcnacgggcgcggccgccggcgcggcgggccgcgcgccggcggcccgccgggggcggcggcgcgcgggggcggagcccccccccccccgcggccgacggcggccgggccgtttcccgtgggtgccggtgtttttttttgggggtgtggggggcgcnccgncgtggggggcttcgtcttgagaagcagttgtcctcccccgcccggttggttcggttgctgtgtcttcctgttttctttgtggttcgcgtgctgtctggttttttgttgtcttgcgcctctggtgcttctcgttttgtttgtttgttgggtggtgttgtcgcggcttgtttttcgtcctcggttgttttgtgctcgggctgttgttgcttgcccttgtcggcgtgtgtgggtcttttttgtgttttcccgtgtctcgttgggttttttttgcgtggcgtggttgttcgccgggttgtgcgttttctcttgttt

SEQ ID NO: 184357 - DNA, 438 bp, Arabidopsis thaliana
cccccgggaccgccgaatcccgggttaccacgcggccggtcatgaaacactagtctaaaggatctttctatgctcacacccatacccttattttgatatacatccacaatcattccaacattgaagcttcaaatttttaccaactctaatttaactcattttttggggggactccattttccaatatttaaaaaaaaattaaccatctttttcgggtgggaatacaaaattccaactttaaacttttattgaacttaaaatctcttccctttttttccaatcaaattcttttttccacacaaactcaaaacctaaacctttaacctttaaaaaaaaaaggaacttctaaacccttttattgaagaattcaaaaaaatttttacaaattccacaactccaatttccctttctttattttcccaaaaaaaatattctttc

SEQ ID NO: 184358 - DNA, 388 bp, Arabidopsis thaliana
ggggtttttaatcttgtaaaagaggtttttgtgttttcaaggggacccccccctccctttttgtcaatttcgaattatcacaaacatgcggaaaaaactatcttttcggggggggggggaataacttcggggggggaccaaaaggattaaagttccattcacaagaattcccttccctccacttcgatttgtcttcccacacaatctttttgttttaccacgaaaatccgcccctctctttttttacagaactatggaggggccccccccccccccgctttcgaaggggcagctgaaagaaaatcccatttaacagtgggaccgggggaaacctcccccgtttcctcggaaagctcgcgcctttttgtgccccgttgcccgcttttgc

SEQ ID NO: 184359 - DNA, 124 bp, Arabidopsis thaliana
  unsure (1)..(124): unsure at all n locations
aaccccctcctcctcgattcgttcccgtcaatcaatataatttcggcagagttnattcacctccctcttctctacatattgatccatattaaataactgtcttttntcctaaaacatttatcat

SEQ ID NO: 184360 - DNA, 353 bp, Arabidopsis thaliana
  unsure (1)..(353): unsure at all n locations
ctgcaggtaccgggcccgaattcccggggttacccacgggggcggggagggttatgggattctcccacgttttatgacttcaactgttgctatccggcaaaggcgaacactgttagagaaggagatcaatgctaacgctcttaacatacgaggcagtggctaaaaatcttactcacttctacacttctcantttattggggggggtgactcaccaacgatatctctcctaagaacatcatacacataaccgggttgaggctcagcctacagttgaacaccaccctaaacgggtatatgacatataaaaaatgattctttacggggaaagaatttcaatgttctttcttcacca

SEQ ID NO: 184361 - DNA, 267 bp, Arabidopsis thaliana
gccccccgccgccaaccgtcccggcggccctcacacctaatataccccctttttccttttataaattcatccctgttgtaacaatgcttccttctttctcacattttagggtgggatttctccctacaaatataacttcccaaacatcaaactaaaactgtctttcctatctttgcaactaagtcttcgctcattctcaatcatttttcaatttatgtctcccaatttttcaaatttccactttaacaattgtggatataatttcct

SEQ ID NO: 184362 - DNA, 494 bp, Arabidopsis thaliana
  unsure (1)..(494): unsure at all n locations
ggaccnggcccgaattccccgggttaccccgcggccggggcgcaaaaaanatancaatttcctccccctccctnngttatcatccctnnaaaaatcttttttcngtttacctttnatattacttccatcacctctcccccctttatctcttaaaccttctcccccccaagattaaaaggggcccctttttttcccgggggggggccccccctcccccggtnggcccattacaaaaaaaaaccccccccaacctgtgggggtgggcccctccctccccgaaaccattgagaattggttgtttccggctttctccctaaaattcccccctcttttttccacttttccccttattttttcgcccccccctcccccccccccggcgggctattttaaaacagcgacgcgtttcccgggtatccaccccctctttttttgcgaccttccccccccgcttcctctaaagtgccgttcctatatcccaacccctttccccc

SEQ ID NO: 184363 - DNA, 472 bp, Arabidopsis thaliana
acgccgtgcgtgagccgggatcctatagagcggtctgcctatctgctgttctttcctgtgtgaagaaggtctagaaaaaaaacgggaacagcttgcaagactagatggcacataaacaacgaactccccacaatggagtgtcaccacagtttacatatggcgtaatgtgtgatgtggacacaaagcttcacacccattttttttttggtggtgggggctaataataccgcaaacccaagaatatctccgcattaggggttgggtcaacagttaatcattattccctcaactccaactggcctggacaatccaatttacatttggaattaaacaacagcatgtgggatttggataaaactacaaatccaactgtgcgctcttctttcaacggctattttcaaacgaattggaacaatttgagacgcgccagacgaagatcactttgctacaatctgggggttacagggtcctc

SEQ ID NO: 184364 - DNA, 367 bp, Arabidopsis thaliana
  unsure (1)..(367): unsure at all n locations
cctacctccattgtaacaaaaaaacaaaccttactaagggtacacaaacattttttttgggtgtgcgggnccttaccaaatgagaaaaaggataaaaaccactcggcccccggtgggggcggacttctcataaacccaaaactccccctctnaaagataacccgtcttttctttttaactcaccccccttccttcagccgcatatctaaatattattccgggaaaatacttactacccccacttcacacccatcacaaatatttttatagaaattcaacctttccccaaaaaaaaaaaccctgtagacccaatacttttcatttataacacccacttttccctcaccccaatatccctaatgaaaat

SEQ ID NO: 184365 - DNA, 372 bp, Arabidopsis thaliana
agttgggcccagtggtcaaggagacctattcctaaacctggggaattctttttcgggggggggggggtaccctcaaggggggcggcttttactaaaaaggaacccctcatgtgcggggggggccagacaaatcccaacaacccttccttgagggcccaacccttcacatggagggctcctcaaccccgaggaggagattggcccaccccgggatcttcttgtttttgggtcccagggaggggggagaaaccccaccgccggggggattccggggggcagaaacccgggggcacggaattaaaaacgggggggggggggggaccgcttttgtttaccaaggaagcctgtggggggcttgaaccgggttttttt

SEQ ID NO: 184366 - DNA, 394 bp, Arabidopsis thaliana
  unsure (1)..(394): unsure at all n locations
caaatccttttcacaaaaancaaccaaaaaatacaaaccataacacttccatcattttcaacaacattcctcaatctcttcacccaaacccctaaaaaatccaaaaatttttttcttcaaggggtggtannaaactcattccnatcaattaaaaaaaaattctccccccaaacgggaaaaaattcaaangaatttccttctaaagtttcaaccaaacccaatcacctacaaatcctaccctttaaacaacttatccacatccaaaatttaaaatccattccccacattttccctcgaggatttagaggatccttatctcttcgttgctcttcctccaatcccctcatctcaccctttcttccctcctttccccccccattccacaatcttttcc

SEQ ID NO: 184367 - DNA, 350 bp, Arabidopsis thaliana
  unsure (1)..(350): unsure at all n locations
aaatggacccttttctgggcgctcactgaagttttcnattaaaggtttggtggaaaaatccccaaagaaaagcaaggagtgtggggaaacactcttcaagtaaaaagcatgctattttttaaggggggtggctaanttcgaggctggaattcataaagagatcgatcttagagagggggctgggtggtgttagaattgataatgccggttcccaaaatcaccaacactccggccgttaatagtactttattttgcgtttactcaccccataagccttaaagttaaaaccccaccacgggttgcctagtcctgctggcctcctccaagattgcctttagtgcctttcggat

SEQ ID NO: 184368 - DNA, 640 bp, Arabidopsis thaliana columbia
  unsure (1)..(640): unsure at all n locations
ccccccccccccctcccccccccccccctttttttctcgccccttcccccccccccccctttncccccccccccncccncnncccccccttccccccccctccttttttctcccctttcccccgcggggtttcggtgtgtcctcaccccccccccccccccccctcccnnttttttcttctctccccccccccttctcttcccccctccccccccctccccccctcctccttcttctctctttttgtcttttttcttctccccccccctttttttctctcccccgcccccctttttttcgcgttagtcgtccccccccccccggtgtgccgacccctctctcccccccncctctcctctccccccctcccccccccttctcttctcttttcctccttctccccccccttcttctccctttcccttcccccccccctccccccccccttctttccccctcctccccttctccgttctctctctcttccccctctccccttttttttttctccctcccctccctcctccccttctctcctctcccttcctctttcccttctccctcctccccctcctctctctcccccctctccccccccccctttctcctcttcccctcctctctcctcctttccctccct

SEQ ID NO: 184369 - DNA, 653 bp, Arabidopsis thaliana columbia
  unsure (1)..(653): unsure at all n locations
ccccccccccnccccncccccccccccccccccccctaatccctcgcccccccgcgcccccaatccncccgcgccccccncccccnccccgttccgcnnnnncccgcccccccccctttccccccccgggttccgcggccccccaccccccccccccccctcncccccccccccctccccccccccccccccccccccctccccccccccccccccccctttcccccctttccttctctccctcttccccccctttccctttcctnctnnnntccccccccccccccccctttttttcccggttgttcgccgccccccccccgccccgcgccccacacaccaccataacccccctntccccccccccccntctttntctttccctttcttttccctccccctccccccccccccccctccctcccccttccccttccccccccccctcccccctccccctctcccccctccccttccctccccctccccccccctccccccccccccccctcctcccccccccccctctctccccctcccccccccccccccctccctcccccccccccccctcctttctccccccctccccccctccccccccctcccccccccccccccccctcccccccccccccccccccccccccccc

SEQ ID NO: 184370 - DNA, 624 bp, Arabidopsis thaliana columbia
  unsure (1)..(624): unsure at all n locations
ccccacccccccccccccccccccccccccccgtttactccttccccccccgcgcccccattcccccgccgccccccccccccctttttggggccnncnccggcccccccttttcccccccttgttttgtttttcncctattcccccaccccnnnnnccctcccccccccccctccccctcctnccccttttttcttttctcccttccttctctttttttttcnnctttttttttttcttttttttttttttttttttttttantnatcattacnccccccccccccctttttttttttccctttagtaattgccnccnccccccgcgcgcggtgcccctttattattttcttttcctctttcttctttctttcttttttttttttttttttttttccctcttttttcctctccctttttttcccctttctctttcttctctccctttttttttcttttctcttttttctctccttcctctttttttttcttttttctctctttttttcccccttttttttttttttctcttcttttcttcctcttcttttttctttttttttctctctcttcctttcttttttttcccccttttctttcttttctttctcttcttcttttctt

SEQ ID NO: 184371 - DNA, 504 bp, Arabidopsis thaliana columbia
  unsure (1)..(504): unsure at all n locations
cccacaacccccccccccccgcacgattaggggaaccccccccaatcccccgccccccccccccccccccccgggcccttttncntgttaagggcccaacaaacccccccccccccttttcttcccccccctcccccccccccccctccccccccctccccctttcttccttttttcttttttcctctttctttccccccccccccttttttggttgtttccgcncccctgggggggcaaaaaaaaaaatcctccccctctcctccctctctccttttcttttgttttctctcctcccccccgccttccctcttcttcctctccccctctctccccgccttcttcgcttcctctccctctggggggggcctcctccccctccctcttttttcccccctctctccccttctcctccgtcttcctctcttcctttttttgctttcctcccttctcctccttcccctctttcccttctcccctctctcccctcttcctttcccctct

SEQ ID NO: 184372 - DNA, 564 bp, Arabidopsis thaliana
  unsure (1)..(564): unsure at all n locations
gggggggcggccccccccccgcgccngcgggctctccttttccccntgttggggggcccccacccactctttncntcctcctcttctccttccttccctctcttccccccccccccccctctcccttcctccttttttcttttttccctctctctttcttttttttctcnntttcctcttttcttttttcccccctcctctcccccctttttttcggggtttgattggggccccccccccgggggggggcncccctttctactctctccccccnctctcncggggcgcccccccctctctcccccttcttttttttctccttctttccccgccccctgccgtgtcccccgccccccccccgccctcctctcgccctcctccgctcgcgcgcgtcccgcgcgccgtgggctcgctgtgtcccgtctttcngcggtcgccccttctccctcttctctccccgccttttctcgccttgtgcctcgtcttcttgggctcgcctccttgtcgtggtccctgctccgctcgtttcggggctgtcccccgttcccgccccgcgctccctct

SEQ ID NO: 184373 - DNA, 451 bp, Arabidopsis thaliana columbia
  unsure (1)..(451): unsure at all n locations
ccccccccccccccccccccccccccccccccccccccccccccccccctccntntntcctcctttttccctccctcctccccccttcctctcctctntntnncccccccccccccccttcttcccgttagtaatggccccccccgccggccgccccccacccaccccccccnccccccccccccccccccccnccccnntttnnngcnccccccccccccccgccccccccgcccccccccccccccccccccggccccccccccccccccccccgcccccccccgcccccccccccccccccgccccccgcccccccccccccccccccccccccccctcccctcccccctccccctcccccccccccccccccccccccctccccccccccccccgccccccccccccccccccccctctctcccctccccctccccccccccccccc

SEQ ID NO: 184374 - DNA, 531 bp, Arabidopsis thaliana columbia
  unsure (1)..(531): unsure at all n locations
ccccccctttgttttgggggccccccaccccaccaccccccccccccccccccttctcccctcccccccccccctccccccctcccccccccccccccccccccccccttcttttcctccttttctctttcccccttttttcccccctcttttttcccccccccccccccccccccttttccccctattgtatttacccncccccccgcggcgggcnctaaaccccaccctcccaccccccctctccctccctccccctccccccctcctccccccttttcctccctttcccccccccccccccccccccccccctctccctcccccccctcccccccccccgcccccccccccccccccccccccccccctccccccctcctcccccccctcctcccccccccccctccccccccccccccttccccctccccccctcccccccccccccccccccctcttcccccccccccccctcccccccccctcccctccctcccctccccctcccccccccctcccccccccccc

SEQ ID NO: 184375 - DNA, 637 bp, Arabidopsis thaliana columbia
  unsure (1)..(637): unsure at all n locations
cccccccgcccgncnncnccccccccccccccccccgtgaatgcttcgcccccccggtcttcccaatcccccccccccccccccccccccccccccnngnnnnnnccgcgcccccccccctccccccccngtagtttcccgcctcccccccacccaccccccccccccnnccccccccccccccccccccccccnnccccccnccccccccccccccccccccctcccccccccctnnccttcccccccncctccttccccccccctttcccccctccctttcttttctnntcttcttnnccccccccccccccccccccctttcccccgtttgtttgccccccccccccccccccccccccccaccaccacccccccccgcccccccccccccccccccgngnccccggcggcccccccccccccccccccccccccccccccgcccccgcccccccccccccccccccccccccccccccccccccccccccccccccccccccccccccccccccgcccccccccccccctcccccccccccccccccccccccccccccctcccccccccccccccccccccccccccccccccccccccccccctccctccccccctccccccccccccccc

SEQ ID NO: 184376 - DNA, 171 bp, Arabidopsis thaliana
  unsure (1)..(171): unsure at all n locations
cgggccggagttccctggtttacccagggggcagagcgtaccaaaaaaaannaacacnncccaggggcnctcnagnnnnnaacgctatgaancgccgagacgatgctgctactactctattatgtggcaaatcaatgtctgcggaatccctaaatcttcggtccgaggcca

SEQ ID NO: 184377 - DNA, 499 bp, Arabidopsis thaliana
  unsure (1)..(499): unsure at all n locations
agcnggganccaanagagcggttgacccgggggggangaggccaacaaaacaaaaacangaagaacaaaagggggaacaacacaaaaccacaccccccccncggggnggagacccaaagaaagccacaccaaaaaaagaaangggaaaccaaaaaacagaganaaaagccggaaaggaaaccgttcctttaagggagcngggggagaaacccaaannaaaccaaaaagaaacgcccccccccaaggaagagaagacccaacccaggggggggaccnnagaaacacacaggggggaaagagaaaaggaaaaaaaccaaagggnggaccaaagggggggcagaccccaaagaaaaacccgggggagaaggccaacaagaggacccaagaaaacccggaaaccaaacggaacccccagggggcgggcgggggaaacaccccaaaggaaaagaaaagaaaacgggagagaagaaaaggccccccgaggaccccaaaaagagca

SEQ ID NO: 184378 - DNA, 430 bp, Arabidopsis thaliana
  unsure (1)..(430): unsure at all n locations
gtaagcngggacccacnagagcggttgcccggggggggggaggcggnanaacnaaaaanagcgccgnnnaccggggggggaaaacagaggcccccaaaaaccagaaaaccagaaggggccacccaaccctttaaggggacaaagggcacaaagcaagaggccggaaaggggacccaaacaccaaatcctccttggaagataggagccaaaacaaggggggggccccgaaaaagcgcccccaanngggggggggggggccccccccccaaaaaggccaaacacaggaaggagggnaaacccggcggggccaaacaccgagaaaaggcggggagccccacccccccccaaaggacccaagggagggaaagggccgcaacaaggcccacaaaccagaacaagaaaaaaaacggacccaacacccccgcggagc

SEQ ID NO: 184379 - DNA, 181 bp, Arabidopsis thaliana
  unsure (1)..(181): unsure at all n locations
tccgggccggaattccctggttacccacgggtccggggcngntaaaaaaaaaaaacccnccnnaccaggatancaatcttccacctcacaaataccaagttaccgtcnttnaaatctattatcattccagggcggggaacaaaaaatgggtggaaactcattgctgggaaaagcacaaaaa

SEQ ID NO: 184380 - DNA, 438 bp, Arabidopsis thaliana
  unsure (1)..(438): unsure at all n locations
acacacaaagacaccccaggccccaacagacacaaacccnaaaatttttccccacaccgacgacagcagcggcaccagcgaaagaaccaacgggaaaaaaanntttcccgcaagtttgagnnaaacagcgggggaacctgaggaaagaggccccccccnggggggggggggggggggccacccaccaaaaggggggaccccnncccgacncaacaaccaggggggagggggggaaaacaaaggagctacacaaaagaaaaagaccgccccaacgacagaagcaggccaggaagcgacacccgccaagcgacgctgagcccaaccgaaaagggggcaaaaaaggccaaagaacggcgccggtgaaacacaaacaaacagccaaaagaggaacaacgaaacacccggggggggagcacaaaaacaaaaagactaaggacg

SEQ ID NO: 184381 - DNA, 442 bp, Arabidopsis thaliana
  unsure (1)..(442): unsure at all n locations
aaaaaaaaaaancccgggcccaaaagggacaacatccccataagcaaaaccnaaaaaacacaccgccaagagaccgagatgtttcacaagataaatgaacccaaccaaacaaggagccctgggcgaaaaaaaaatttctcttaagagagagggagaaaaaccgggcgccaacccaaaaagaaaacgcccccgcaacaggaaggggggcccgcacaaaaacaagggaccaaaaacccaagacgagggggccccgggggaaacaggacgcagaaaaagacaacgggcccccccaacaaggggggaaaagcccccaagcgccgacacccgcaaccccgaggcaagaaagagaccaccggggggccaaccaacccaaaaggcgcgggaagccaaacacaaaacgaaaccccgacccgcacacaacgcccccgacggaagggcaaga

SEQ ID NO: 184382 - DNA, 401 bp, Arabidopsis thaliana
  unsure (1)..(401): unsure at all n locations
ggggggacccccccccacaaaaagcctctccgccggcccccacaggggacgcaaccaaggggcacgaaaaaaaaaaaaaaaaaaccctcccgggaagttgggcccccaaccgggggcccnccggaaaagaaagccccccaaaaagggggggggagggggccaccccttttggggggaaccaacccnccccacgaacgaaccccggcgcggaaaagggcggcgcgttagaaaaaaagaggaaaccccccaggagggcggccacgggggagcggggccaacaagcagaggcagggacaaaccaagtggcaaaaaaagagaagaacacgggggggggcggcgccacccaccaacagagcgggcaaaccacaaaaaacaagcggacgggcgtcccgagggggagg

SEQ ID NO: 184383 - DNA, 487 bp, Arabidopsis thaliana
  unsure (1)..(487): unsure at all n locations
ggatcctctagagcggctgccccggggggaggaggcgnnnnnnnaaaananaaggcgaaaaaagggganncacnnacacgccaacacgcaaggagcgcncggaaaccaaaaaaaaggaaaaaaggaaaagaaaaaaaggaggaaaaagaaagaaaccgaagcccacccaaaggccgcntttaatggaagtggggccaccatcaaaaaggacgttaatgaggagacagcccaaacacagtgggggagggggccaaccatatcttggctatacggcacatacgtcaggcggtttggcactgcccttacccttccttgttcctgtccggccaccttggacggggggtacctgttttttctttgagcggagacccgactcggcgagtttttatacccggggccggaaaaacgagcttaacactcccctcactacgggcttataaacggacaaaaaaaatgccggggcctcccaaacgtttggaaaacccca

SEQ ID NO: 184384 - DNA, 502 bp, Arabidopsis thaliana
agctcttcatcgactcactttaagggaagccggtacccctgcaaggtccggtcccgaatttccgggtcgacccaagccttcccaaaaacgggaatcttggaaccattgcttccattgaaatccggtttattggtggaaccaaccttttaacctgaagaaccttctttggaaccctcattaattcccgccgggcttttcgacccaccggggttaacctgaacatgacccacccactgggcttcttggcccgaacctttcgtcggaggagaattccttgacctatttatacaaatttccttcttaaccacaacacacgagcggttccaaacaacagactacggaataaacctctcttttactctctggtgaaatttgatccaacttggaatttgattttaaatgactttttaattcccgttggtggaattccaattcattcaggggttaatgaccgttcaatcttttaattgaaaaggaaatatgaattaaaaaaaggccggcc

SEQ ID NO: 184385 - DNA, 416 bp, Arabidopsis thaliana
  unsure (1)..(416): unsure at all n locations
aacacccgccgagagacacacgccaggaagggaccagcggtttgaaaccggagggggaaaaaaaagcgggaaaaaaaagaaaccccacagagaaaaatttaaggaagtaganccccccggggggcaagggcaaaaagcccccccnaggggggggggggggggcccccaatttggggccagtccccaaaaccaaacccggaaggggggaggcccaaaaaccctgaagcgggggcttgaaggaagcagaaaaccggggaaccggctgggaacccaaagagacgcgggaggaaacggaggtcaccggggaggaccagacccccaccccgcccgggaccccccgaaaacgaagggggggggatatcggcggacccaagcgagctccacaaaaaaccccgaggcgagatggggaaaagggg

SEQ ID NO: 184386 - DNA, 166 bp, Arabidopsis thaliana
  unsure (1)..(166): unsure at all n locations
gagggccttccccaggggggcgaagtcccggaaacaacagaaacacagcanccacagagaaccatgaggcctccttcaaaccaaaagacataaacaaaagaaaccttgacaatgtttcaaaaagggagcctcacaaatcaaagacaatccaaggaggcttnnaagg

SEQ ID NO: 184387 - DNA, 500 bp, Arabidopsis thaliana
  unsure (1)..(500): unsure at all n locations
ggtaccgggccggaattcccttgtttacccacgggggcgagggcgcgtacacacattaccaaggctacaacagagaaggaagatattattacaaaactgtttgagtttttggagaaacctcatgtgacatgtgatgtgaccggtgacactacaggttctgagaaagagaagtcaaggaagggagcaatactcggtggtgggccaanaaaacttgacctacaggtagagagagcatncctccaacgatcagcggaggagccaaaaaattgtgaagaaccacaaaggttgtcaaaagaagttagctcattctgatgatgaatctggagaggagaagagagaagaagaaaacccgggggggagaaggcggaaaagaaagaagagaaaaaggggggggagaatgaaaatggctttccttataaaactgagggtgaggcgccttaaccttttaaaaggaggggaaaaaatgattttgggggacttttaaaaaaaaaacacaaaag

SEQ ID NO: 184388 - DNA, 132 bp, Arabidopsis thaliana
  unsure (1)..(132): unsure at all n locations
caacaggacgcctnanaagggggggngncacacaacaggngcactactcagagctgacttatggcaggccaaatgccaagatgtattatctcatccgaagaatatagacgagtaaaatctgttgggaagaac

SEQ ID NO: 184389 - DNA, 354 bp, Arabidopsis thaliana
  unsure (1)..(354): unsure at all n locations
cccccggtccgccgattcttttacccgggcgggccttagagagactctctacgagccgttggggtcctattgctgtatgggggctttgtatgtggactttagctaaacaggactggttggcgnngaccgattttattttggggtgggagncacggggcagcgggctatgcaaccagggtggaaagaacatatttgtggggggtgatcggacgggagttatctctttagcactaggttatacccgccggtgctggtagaggtccacttcctttaaaggccaaggtgcaagcttttggtactactaaactatgcccgaatgactgtcaccgaggatgtgtccaaagtatctttggc

SEQ ID NO: 184390 - DNA, 298 bp, Arabidopsis thaliana
  unsure (1)..(298): unsure at all n locations
aaacgggaaaaaaaggggaagnagattacatgagtccgcttcgccatcatctatgagactattaataaaagtcttcaaaaaaatttcgttgtgacactacaaaacaaannnagaacttatatggngangagggccnanaaaccacgcggaggacacaaaaaaagaacccacccnngggggggggggagaaggaccccatgcgggcgggaagcccaaagccccgaagcanaaggcgaagangaaggcgaaaaaaacggggaaagccangagnccaacccccccggggcccaaaaaggca

SEQ ID NO: 184391 - DNA, 489 bp, Arabidopsis thaliana
  unsure (1)..(489): unsure at all n locations
aaaaaaaannacnccgnaaaggggggcaacaacacccngggggcaagcccccaatcagcgccgggcggcgggagcgggggtgtccacccagagcaagaagggaaagccggcggagagaacgggaaaagaaaaaaacaaaacaaactttcctctttgggggggggggggcccccccccggggggagactagtggaaaaaaggcccccccgacggggagggggggacggccccacatataatataaaccccggcaagcaggggggaggagacttggggcgatagataaagggaataagggtgcccacaacccgcagcggggggggggagcggcgtggagaccagaggcccggcggcgcgcgggcgagaagaagcgggggggggggacccgggagaatgccagacggccggccccggcgagagcggcaaggggcaatcgacgtaagcgaggggcgagcggcgaggcccggcccacacacgagagggaacagg

SEQ ID NO: 184392 - DNA, 442 bp, Arabidopsis thaliana
  unsure (1)..(442): unsure at all n locations
acaacnaccaaggggagncaaaaggggaagncagaaacaagaggcagaaaaaccacggaaaaaacctagtttgacggaaacattaaactcatttcccaaataaaaccccaaaaccgaggaaaattcccttctggggggtggcccaacanncaggagggaccaagggagaaaggccccccccaaggcggggcggggcagacccccaggcaaagggcnnggccaaacccacccaacaaccgggggggccaaccaccnacaaaaccaagggcaagaaacccggcacgcccagaaaggaggcccccacccaccaaagcccccaggccgaccccaaaaagagnggacaaaaaacccccccggcaaaccaagggaaaaaaagacccaccccagcaacgcccccgccgccggcgcccgggcgagaaaagaggcacaccccaaaaacccc

SEQ ID NO: 184393 - DNA, 402 bp, Arabidopsis thaliana
  unsure (1)..(402): unsure at all n locations
agggaccggnccggaatccctggtgacccggggccgagcgccaaaaaaaaccacgccgacgaggggccncnacccgcagaaaaacaagaaaaaaacgacgagggaaagaacaccccacccgagggaaacgacggacaacgggcgagggcaaaacctcctggagtggccaaaggggggcagaccagaagaacccccanaggggggggggagaaacaagtgggggaggccaaacccccacacgcggcgggagacaggggagacccaggggggagaaccaaagaaggccaaacgacaaccggcccaaaggagagggaaagaaagaggggggacaagggggcgaagaaaacccaaaacaggagggaagaaacccccaagaaagggggcgccgcgacgcaaagggga

SEQ ID NO: 184394 - DNA, 375 bp, Arabidopsis thaliana
  unsure (1)..(375): unsure at all n locations
accgaggccggaattttcttttttacccacggggccggagtcggaataataaaccaaccccccannacggggaaaaaccancactcacaaacaactnnnccatcccaaacaacacaancacnggtatttaanaaccaaccaataaactttcctacaagccatatacacgtgcgggagagggaaaannnntttctcgggttgtggggaaggcccacgaaggggccattaaaaaaagaaaggccccccaaggaggtttgggggggccaaggctttttttgggggggaacagggtcctgggttaggggtaccctaactggggggagcgctcgcgcccacgagagtttgggaaaaaaaaaaaaaaactgggggggaaca

SEQ ID NO: 184395 - DNA, 401 bp, Arabidopsis thaliana
  unsure (1)..(401): unsure at all n locations
caacaaaggggaaacccccccccccttattttttaaggggggcaaagggtacaaggctccaaaacatgcaaagagagggaacccnntttaaagaagttgganaccaggcccggggaagcctggaaaaaaaaggcccccggaaaggggaggcgcacgccaaccaagaaaaaaaacnacccccccccccgacaggggaaaagcccgcaaaaacaagggagnnaaaaagacaacggggaaccaaaaaacgggcaaagcgnncgaaaaaaaaaaacccggggggggcngaacaaacccngaaccccgggcaaacccccgaccaaaaaggggaacccccgaggccaccggggggaagaagcccccaaggaaaaaaaaaaggccccccccccccgggggaaaacggc

SEQ ID NO: 184396 - DNA, 151 bp, Arabidopsis thaliana
  unsure (1)..(151): unsure at all n locations
aacaaaaggcggacgaatctttattatgcccatataaaaagcctctttgtttaatgaagaaagccaccaccctgnntttccgcaagttgggagggaccacacgggcgngacccggaaaaacncccccaaaagggggggggagggcccaacc

SEQ ID NO: 184397 - DNA, 147 bp, Arabidopsis thaliana
  unsure (1)..(147): unsure at all n locations
ggtaccgggccggaattcccttgtttacccacgcgggcgaggacgcgtacaaaataanccacaacaaaggcgtgttcnctcggcaggaggtgntgctctcgtgcttccagagccatctaccaccgggcgttttattgagcaaccgta

SEQ ID NO: 184398 - DNA, 400 bp, Arabidopsis thaliana
  unsure (1)..(400): unsure at all n locations
aaaaggggaaancacaccccaagaagtcaacaaagggaacgaggancaccccaaggatctttttgagaaaaaaaaaaccctctttgaccaatgtggtggaaaaaaccaaaaaagaggnaataactgggaggtcgggcnaacacagcccccaaaacnggccaaaaagaccccccaaaggaggggggggggcaaacccaccacctggagaaaccaacgcgaaccccgaagaccccagacgggggagggncaaagaggggaaaagaaaagccaccgagaaaggaaagcccccacccaggaaacccgggggggcggggcccaaccggggaaaggccaaagaacggggnggccccagcgggaagaagggccgaccccaaaacaaaaccggggggggggaaacaag

SEQ ID NO: 184399 - DNA, 402 bp, Arabidopsis thaliana
  unsure (1)..(402): unsure at all n locations
aaaaaanananaagcccaaagggggggaaacccccccnngncaacaaccaaaaaccccnaccnccccaccacnnccccctctnnaaagaagaaccaaaangcatactcgggaaaccagcagaaccaaacagngnnttanctgggagttgggacaaagcaaccggcccttttaaaaaagaacccccccctccgagggggggggggggaaaagacaaaaaaaaacaccacccccaaagccgccattctttgggggcgggggacaacgaaaagctttctcgaaaaaaggaacccacgaacccgaaaaaggagggtgcgcaaacccacgtgcgcctaaaatctgcgcgaaaaaggaaagaggggggtttcccaggaaccttggctaacacagctggcgcagggggg

SEQ ID NO: 184400 - DNA, 482 bp, Arabidopsis thaliana
  unsure (1)..(482): unsure at all n locations
aaaccaaacaggggggtngnntnngnactaataggacacggcgcaaaaagaaaagccgaaggaggtttttttcaaaagagcctaaacgacaacgggaaggcgaaaaaagaagagggacggggcgannnctccagggattgtttggaaaaaacgggggggcgaggcaaaaagaaggggccccccaagggggggggggggggggagcacacaaatggggggaaacctcttcctccggtcggcctcgtaagaggggagggcgggagcaagagaggcgggtgggggagagcccaaccccgaaaaaggcggggggtcggggtgggggagcccgccacacgcgggcgagaagacgggggaaaaagggagaagaaacaagtgcgggagcgcgggccggggcagaaaaaagggcttaggagaaatgagaaagggagaaagacaccggggggcccggggtagtaaacgcccgaggagaacaaagggagggg

SEQ ID NO: 184401 - DNA, 509 bp, Arabidopsis thaliana
  unsure (1)..(509): unsure at all n locations
ggtaccggaccggaattcccgtggttacccacggggggcgagacggataacaaaaaaccacccggcccncggaggagcaanannnnaagnagnngagagacncccaaaccacacgaagacaaacanggagctttataataacaaagcgggggagcttaaggagccgagacgcggaaagccccaaaaaaaantttggggatgttggaaaccccccgaggnaccaacacagaggggcccccccangggggggggggggggccacccaaaataagggcaccgccccccggngaacaacgggggggggggggaaagccccgccggcacccaacgaaaacgcccgggagcacaacccccgcnccccaggggggaggaaagaaaaagggcccccccgaaacggccacccaacaaaggccccccccgaagaggcaaaaggcacaccccccgaaggcgggaaaaaacgcgggggggggaggggggcccaccacgagagaccccaaaacggacgaacg

SEQ ID NO: 184402 - DNA, 379 bp, Arabidopsis thaliana
  unsure (1)..(379): unsure at all n locations
gaccaaaaagcggctgcccgggggcggaggccgaaaaacanaaccccaccacnagggggnagngaacgaaacgaaccaaacagaccagcggcggagacagacgccaattttaggcaggcggcgcacaacgcaaagaaaccaaaaaccaaaacaaacaggaannttttaaggaggttgnggacaccaacggggggcaaagaccaaaaaagggccccccaancgggggggggagggccccaaaacaaaagagggaaacccccccccggggagaccacacgggggagagccaccaagccaagaaaacacggcaacacaagcccaacgggcggcgaacaaagcccaaagccaccggggaggggccacggcgcacaacagccaa

SEQ ID NO: 184403 - DNA, 226 bp, Arabidopsis thaliana
  unsure (1)..(226): unsure at all n locations
aaacgggcgaggacacaancanagaaccaggggaggcaaccaccaaagggggggcccaaagcagnccggccanggaaaaaaagacaggccanagnncagcagccnaacccaacaaaacnnaanttaataaggggtggcaaaaacccacggcgacaggaatngcgggacgagcccaccgacggggggcgggaacccccccacagncgccggagcccccaccaaagag

SEQ ID NO: 184404 - DNA, 491 bp, Arabidopsis thaliana
  unsure (1)..(491): unsure at all n locations
aagcnngganccactagagcgtcncgcgcggggggtattgtntnttaacataatacanggccgaaaacagaggaaacaccaaaaccaaatcctttatctcatcattggcacaaaacacacagaatttggagacgaaactattggcagctcaagggaagggattgctaaaagcacacaacacgcttttttgaagtggaggggccgaagacggaaaacaaccgaaaaaaaccccccgaancggggggggggggcgccccagaacttaacgggtaccacatcatgcgcccaggagaaagctgggaaggcctataaggctgactctaatcaggcactctccagcatgtcgaacccatcctgttccccatatcgaaagaacccaaaaacccggaaagaagatgggaaactctccccctgcaagaaaaggggtgcccgaatatgggatccgtgaaagatcggcggcacaccacccccaccccccaaagacaatgaat

SEQ ID NO: 184405 - DNA, 430 bp, Arabidopsis thaliana
  unsure (1)..(430): unsure at all n locations
cgaagcnnggacctctagactttcgccccgggggaaggcgtgagggccataaagggcttctctactggggggcaattgtgacaaaaatatgaaactttttaaaccaacaaaaatgaacaaagatatcaaaagtaacattctcaagattcacactacgggtgtcttggagccaagntttgctggtgctgcgcgacanacgcngnnaacatggagaactggggaggaacagcaccgaaagggggggcaaagacgaaccttaagggggccctcccnaccnnncccaagnagaaaggggcacaggaaaagcncncagccacggcgaagagagnncacgacagaccaagagcccccggaanaacagaacccacgancccaagcagcccacgagacaggcacggcgcagggcccaccaagaacccgaccaacccga

SEQ ID NO: 184406 - DNA, 396 bp, Arabidopsis thaliana
  unsure (1)..(396): unsure at all n locations
cgaccaggcgagagaggacgaaggccccccaacatcttaaaccttaaaagaacaaaagaaaccaccgagagggggagggaagacaaaagaggggggcccctcngggaagtttggggaccccgggggggcgacatggagaaagaaaacccccccnngggggggggggggcgaaccaaacactggagggactcccacagccaaaaaacccgggggggaggaagattgaaagacaaaaagaaaccgagggccaccgggcgccccgaaaggaaaagggaaaaaagcgcgccccccagccgaagccagaagaaggaaaggccgggggcccgcgaacgcggccaccaccaagagccaacgaaaagggggatggaggaccaaggaacgccgggaagaaaagca

SEQ ID NO: 184407 - DNA, 297 bp, Arabidopsis thaliana
  unsure (1)..(297): unsure at all n locations
gagttcatgccgctacctacttgatcttacacggttcctttgttttttttttttaaaaaagaattcataaaggactccattacaatcaccctaatattatgatttgatcttacaaactctgtatcatacccttttgcaactaataggggaaaaaatacccaccctttatatggtgcggaaccaccccaccgggcacggacaaagaccttcttacactagtctttacccttcaggagtccttccganaatgaaaaaatagaaataaaccttttcttttggaaccaattttgactaaac

SEQ ID NO: 184408 - DNA, 190 bp, Arabidopsis thaliana
  unsure (1)..(190): unsure at all n locations
aggtaccgggccggaattcccttgtttacccacgcgggcgaggacattaaaagcaacccgccgcagaacaccggggccnacctgctagaggcccatcagcngagagaggcacacctctaatgcacagcggagactaccctggatagcacaacttagagctactaaaaaagcttggattgccggagggaac

SEQ ID NO: 184409 - DNA, 288 bp, Arabidopsis thaliana
  unsure (1)..(288): unsure at all n locations
tgggttggtggggccttaagaactatgacgtgctgccgcgtacgtagctgatcttagacggcgnctttttttttttttttggacactagcttctctagaagacagtccaaaaggtccaaaaggttttgccttttaaacccttaatttttaaaattgggggggtttaagccggggctataactttcccgaattccggggggggggggggaaaaaatggggggaaaaaggaaaaaaaaccccctttttttttttttaacccccccggggggggggaccccccaaaaaaaa

SEQ ID NO: 184410 - DNA, 537 bp, Arabidopsis thaliana
  unsure (1)..(537): unsure at all n locations
cccccccgggggacnaaaaaacccccccaaaaancaaaaaaacccaaaaaaaaacccccacgaggggaaacaaaaaacccacggaggacaaaaaacccccccccaaaaaggggagggacagacaaccccccccttttttttaggcaagtttaaggccaccaccaccgggggggcctcaaaaaaaaaaaaaaaaccccccctnaccaaagagagaggggggggccaacccaaatgatgaccgcgccccccccccccaaaaaaagagccagcggccgcgagggacccaaccccccacaagcaacaaagaaacccccacggacaaagaggggcagcccccacagggcgggcaacgccgccggggacaaggactcagacaaaaacgaaaaaaagagaccgcgaacacaagagcacaagaggcatacccgagcgacgggccgcgtatacgaccgcacaaaaccagaagcgcnacccccgcgctgacacaacacacaacacacacggccgcggcgcgcacaacagcggcggcacagacaaaca

SEQ ID NO: 184411 - DNA, 397 bp, Arabidopsis thaliana
  unsure (1)..(397): unsure at all n locations
cagctctcatacgactcactataggaagctgtacgcctgcagtaccggtcccgtatttccggggtcgaccacgcgtncaggccttgcactctgttgttaacaaagactgtctggttatgctccactgtccaagttggcttgcttcaggtaatccaaaccgtttgctaaaaattttcggggggggcaattcccccaaatttttttttttttttaaaaaagccctttgggctttttaccttgtttttttaatccccccccccccaaaattttttaaaaacccccccttttaaaaggggttttctttgggggggaaaaatttttttttttttggaaaaaacaccccccccctggggggagaaaattttttttgccccccccccttaaaaaaaaaaaaaaa

SEQ ID NO: 184412 - DNA, 327 bp, Arabidopsis thaliana
  unsure (1)..(327): unsure at all n locations
ggttgttagggccttagaaggctatgcgccatgccgcgtcgtagctgatcttaagcgcgctnntttttttttaaccattctaagggacccccatcactggtgggagggaccacccaccttcaggcttttctaaaaactaaaggttttaaaaaaaaaccaaaccaaaccccaaaaattttttggggaaaaaatgggagaaaccccccctttttcccccgggggggggattggggggcccgccccccccccggggggggtggggggcccaccccttcccccctttttaagggggggaaaccgggccccccctttttttaaaaaaaaaaa

SEQ ID NO: 184413 - DNA, 400 bp, Arabidopsis thaliana
  unsure (1)..(400): unsure at all n locations
aaacaaacanaaagcccacaaaggaagaacaccancanactttttgggggagacgcaaatcacactctgaccaaacaggaaggaggaaanagggaggaaatacacgcntgttggcaccnccccgggggggcannggccggaaagagcccccccggcgggggggggggggcccacccacactggggggaaccccanagggcccaacacccggggggggggggaggacaaaacnnaggagggaggggcccccccgggggccggaaccggggccaggaaagcaacgagagcgccgcgcgggggaaagggggccaacaagaaggaacccccggccgggccaaagcccgggcggaagggaaaaaaaaaaaacccaccaccccccgagggaggcccgggaaggggg

SEQ ID NO: 184414 - DNA, 459 bp, Arabidopsis thaliana
  unsure (1)..(459): unsure at all n locations
aaaaaaaaacccccccccaggggcnnnnnnnncccncnnncnaccccnncccaccnacaaaccacaaaaaaaacccaacccaccacaaacaaacaaccacaacccccacaccaaaaaaaaaacaccccctcccggggagacgggccancccagggggccctccaaaaaaaaaaaccccccaccaggggggggggggggcaaccacgacagagggcccgcccccccgcccgggccaccgccgcgggcgccagcccggcagaagacccgggacacaccacggcgcccgcaggcgcgccagagggacccgcaaggcaggccagacgcaacgaagaagaaagaacgaagagcggcgggagccacaccagcagaccgcagagacggcccgcgagcgcggccgggagggcgccggaccgacgccaccgcgacgcgcgagcgaaggcggcacagaggccggaagga

SEQ ID NO: 184415 - DNA, 489 bp, Arabidopsis thaliana
  unsure (1)..(489): unsure at all n locations
cgtaagcngggancctctagagcggtcgcccgggggganaggcgcnnnacnnnnnncncacaacgaaaacggggcangaggcaaacaacnggggaacccaaaacacaaaacaagggagggcagcagggaaaccacccccccgcggggggggaagaacagggagcccaaaagcaaaaaggacagacccctcaaagacgattggcacccggacaggacagaaagaccaaggaagaaccaccccgnagggggggggcgggaaaccaaacatggggggacaggggngaccgccccccgaccgccagagacacgcccgggcccggaagccggaaacccncgcaagggaccccgacccgggccaacccccagggaggagcccgccccccgggngccagcagcaaaccgcgggaacaagggaacagngcngaaaaggggggggagaaccaaaaaccggacccaacgggcccaaaagaaaaaacgcccaaggcgggg

SEQ ID NO: 184416 - DNA, 568 bp, Arabidopsis thaliana
  unsure (1)..(568): unsure at all n locations
agggaccgggccggaatnnctttgttgacccaggggggcgaggcgtccaaacaaaaacaacccccnccnnccggggagaccanggcacctngcaaagacaacacgggaggagccccccgccgagggggacaaggcgccttcttttgggagccctaaaacgggcggtcagagggagtgatgaggaacagcccaaacaagggccctccatggagagttggggcacaaaacccggaggggggcccgcgaaaagagagaacgccccccccaaagggggcgggggggacccaccacgcgagaaccacgcgcgacgacgcccccgaaaggggggggggcngcggggaggggcccaccagcaaaagggggagggaaacccgcgaaagggagggggcccaacccccggggcaccccagggggcaaaagagggggggcccccccagcgaagaaacagcaaaagggaagcccgcgcaacggccaaagggccccacccgcgggaaacccgcgccccgaaggcgagccccacgggggcaacggaagacccccgcaagggcgggcccacaaaacgagaaag

SEQ ID NO: 184417 - DNA, 464 bp, Arabidopsis thaliana
  unsure (1)..(464): unsure at all n locations
tctccagctatctacgactcactatagggaagctgctcgcctgcagtaccgtccggattccgggtcgaccacgcgtccgcgagctcctgagctgnnaacgaaatcgtcttgtaaaagagaacagacccgtccagaaaccacggctgggaaaagtttgaaaaggggaaatgtttttctttggcttttttcaaccttagccctgcgaggctttgggttttaaaaagccaggcccccttggttaaaacccccggtatttttcccaaaggggtttgggttctaaaagtttgggaaaaaattattccccgtctaaattttggaaattttggggggggggggttttgttttttcccaaaaacatccacacggggggtttttgggggaatttttttggggcccccaaaattccccaaaaggggggaaaaaacccccaatttaaacaccccgccctctttttgggggggggg

SEQ ID NO: 184418 - DNA, 453 bp, Arabidopsis thaliana
  unsure (1)..(453): unsure at all n locations
aaaangcgggcagaagggggggnaacaaancaannnaacnnaagggaaccacaggaggacacancggaagnnagttttactatatggaactacgggatcacacaaggaaaacaggggaaccgggaaaaccnntttaaaganagttgaacaancacccggaggccncaaggcaaagaaggcccccccccaggggggggggggccaccacccctttttggcgggggctggnggcttaaaaactgggacccgggggaatccaaaaagaaggaacaaaagaggcgcccgaagggcggagatagcgaccccccccaaaggaaaaaacccaaggcgggcctgagagacgggaaacctctgaagcgattaccacccagggaggggcagcccttaaaaagagaggggggggggaaaaaaaccccccgggggggcggcaggggggaaagggcagcgacggaa

SEQ ID NO: 184419 - DNA, 434 bp, Arabidopsis thaliana
  unsure (1)..(434): unsure at all n locations
gccaaaaggggggggcccnncggancacaaaancnacaaaagcgggaagaacaacgagaagccacaatttattaaaaacaagctcacagacaaatattaaaacggaaattaagagacaaaggccccctttaagggaagttcagnaancccacagcgggganatcgggaagaaaacaccccnnnggggggggggggggccacacaaaatagaagangccaggggaaaagcaaaaaccggggggggaaaaaagggctaataaaacgggggggccgacgtccgctgcgccataaaaaagtcccaaaacgccggctccgcaaaaagcgccaaaaaagtccttttggccaaaaacccaaacgccaagctaaaactaagcggacgccgggggccaacccggaaaaccccaccgggaacccgcgaggggaacaaaattacc

SEQ ID NO: 184420 - DNA, 495 bp, Arabidopsis thaliana
  unsure (1)..(495): unsure at all n locations
aagcnngganccacnagagcggnctgcccaggggggcggagacgctaaaacaganaaaaccaccgcnccgggggaacaanaacgaaaaagacggcacgaggccgaaacggaacccaacacgcaccggttttttcaaccaaacaaggaagaaagaaacaaacaaangccgaacagacaacaaaantttccccccagtangaaaanaacaggagaaaannggggggaaaaaacccccccccnagggggggggggggggccccaccccanaggggggagcaaccccccacaaaaggcancacagggggggggaaaaagccaagngcccaccggaggccccccgcccaaggaaaccaggggggaccccgcancccgccacaacccccaacccccaagaaaaggggaaccaaaagccgcccgaagccnaggccccaccagggcccaaaaacccaccgccaaaaacccgggggggaaggaaacccccccaaccaaaaacac

SEQ ID NO: 184421 - DNA, 491 bp, Arabidopsis thaliana
  unsure (1)..(491): unsure at all n locations
atgatactccagctatatacgactcactatagggaaaggtggtacgctgcaggcccgggccggaattcccgggcgacccaggggccggacgaatttttataaagggaacccattcgggggccagggggttttaccggaaaanggggggggccccttcccggaagaaaaccccttcctgggggccagagaaaaaaaaccncaaccccctcttctttatatncnccnnttttttgagttttttataagggggggggggggggaaaaaacactctttttttgcagaaaaaatatattacggggagggctccttttggttgggcgcggggggggggaggaacacaacccctatggaggggcagaaaagaggggggtgcccccaaaaaaaaaaatctgtgggggggggggggggccccccnacaaaaaaanaggaggggggggggcggcccccccccaggggagagggggggcgccccccaagagggggagggggg

SEQ ID NO: 184422 - DNA, 479 bp, Arabidopsis thaliana
  unsure (1)..(479): unsure at all n locations
ctaagcnnggatcctctaaatcgtccgccccgngggaaagggcngngaagacaaaanaaacacnnacccaggggaacaccacaagcaaanncacagggacagcaagagaaaaaaagaagaaaacagngaagagagagaccaccaaacaaaananagggggggagacaagagcagaaaaccggggggttctcattcgggagaggagacaccncccgcgggggagaaaccagaaaaacgcccgaggacccggggagggggcacccaaagaaaaaggccaacccanggccncggggagnncccgaaagacagccaaaacaagaaagggaagccccaaggggagcgccgccaccggggcaaaaaagccgggccaaccccaacaaggagggggaaaacacaaaacgcggcccccgaacgagaaaaggccagaggcacggaaaaaaggcanccggcgggggggaggggccaaagggggcacacca

SEQ ID NO: 184423 - DNA, 461 bp, Arabidopsis thaliana
  unsure (1)..(461): unsure at all n locations
agtaccggaccggaattccttttttacccacgcgggcgaggcgactcaaaaaaaanacgaacagcagggagancccaaggggactatcaacaaagggaaaaacatggcaagaaaagaaatatcaagctatcaagtaacatttcatgcaaaagatcgcataaaccccaacggctcntttctggaagttgggcaccccaagggcggaccccagaaaaaacccacaaggggggggggggaccacgaaatttattggacaaaatacacaggaggaagccccgggaggacaccaaagcacgacccgcgcagcgagacaatgcgtcgcactacggcaccaaagacaataaaccgacgcggggcccgcttacagaacgcaaaacccacgcggacccccagcaacaagcccgcgcaaaacgacactaaccaaaagagaagagagcgccggacctccagggcgaaaaaaa

SEQ ID NO: 184424 - DNA, 325 bp, Arabidopsis thaliana
  unsure (1)..(325): unsure at all n locations
cccccngcaannagccaacaacagaaagacgagncccaaaaaagaatccagggaggcgacaagacagagcttacatatagagacaagccaggagacaaaattttctcgaaagttggggacaagacccgggacgaaacaacagagaaaagcccccccanncggaggcagggggagnacccccaaacccggggcgncgcnngaacancccacgcacaagggcgggcgggaaaaagagcaaaaaaaggggagacaggagacccgaaaggccaaacaggggacacaaccccgcaaaagggggaaaaagcggacaaggggcagaaaaaaa

SEQ ID NO: 184425 - DNA, 170 bp, Arabidopsis thaliana
  unsure (1)..(170): unsure at all n locations
gtaccgggccggaattcccttgtttacccacgcgggcgagggcgcnaaaacaaaaaacacagggnaangagggaaaaggngagcacncancaccnncnaaacaacggagcaacaagaagcacaaggaagacgaggcggcgngggggcaanaaaaaaccaaaggcgggaca

SEQ ID NO: 184426 - DNA, 435 bp, Arabidopsis thaliana
ggggtccactctctagagcatcttgacgtcgcctgcgcgcctacgtaagctaggctcctatgaggagcggccgcccttttttttttttttttcgagaaaccaaaagagagaagaacactaggaggggcgatgagcccgcttctagatagggagggagacgagaattcatctgattagcgaggggcccgaggaggacacaggctctcttcatgagtagagataaccccagaccccacgaagagagtatatcttttttgtgggggaggcaagcaccgattccccccgggattagactataagaggttatcaaacccctaatcgatccagggccttatcaaaccatacgtctgttttattatttcgcgcccccacacccaccctttcgcacagaacattaattttccccctaccgccccctcccggacgttacccgct

SEQ ID NO: 184427 - DNA, 238 bp, Arabidopsis thaliana
tgcaggtaccgggccggaattcccgggtttacccacgcggccgaagtctgttttcactaaaccaaagagcgcggagagcaatgaggatcaactaaatctcgctgagccgcggctcaccatatgggacaattatgtgtaccgctctcgaaaggcgacaatcccatcgtgaaataaacctctcagcgagggtttttttaagtggggtggcacgacagccggcgaacaaaaagagaaggag

SEQ ID NO: 184428 - DNA, 203 bp, Arabidopsis thaliana
  unsure (1)..(203): unsure at all n locations
agcnggganccactagagcggcttccccggggggacgaagacgcnnaccagccaaaacanccgcaaagggggggagaganganngncgangggaagaaaacgggaaacacaaaaaaaaagagcnaagcncacagacaagaagaaaggccnanaccccaggggcaacgagcgacccaacattttttttggcagcggggagaaca

SEQ ID NO: 184429 - DNA, 127 bp, Arabidopsis thaliana
  unsure (1)..(127): unsure at all n locations
acccacaanaccacagaaccggggggcncnacgggganccaaagacaaaacgagggccacggncncaagaccgggaggggtcttgagccacatggatcacacggaccccacatcttctcactgtgaa

SEQ ID NO: 184430 - DNA, 155 bp, Arabidopsis thaliana
  unsure (1)..(155): unsure at all n locations
gagcggtttaccgggggggagtaggcgccaaaaaacnaaanaccgacacannaaagagggcaaacngaacaacaaactataagaagaaaatctaaggaaacgcagaccacacaaatctcataaaacttaggtttgatctggggccactaattaat

SEQ ID NO: 184431 - DNA, 492 bp, Arabidopsis thaliana
  unsure (1)..(492): unsure at all n locations
aggtaccgggccggaattcccttgtttacccacgggggcggggcgcgtacnctttanngaagaaacaaaaaaggacagaaagatctcaacttttttcaacccaaatcttcaaatctggaggaacgaaacagtaagagattgaaatcaaacatggaagaagatgaatcaacaacaccgaagaagaanttanatttgggagttgaancncccaccggggaggaatcgaaacgacaggggcactcgaggcacgaagcaaccggnaaaacganncgaancattatcactctccttcgaaacctatttactcagatgggtttattccaaggagatctgggtccaatttcgcgcttttcgattgggcattttttccccgaataagaaagatgggaaagaggagggggctggtcttatgcaagttttttaaaaacggcgctttttggtccgtgacgccggaaaaaaggaatgttgtaaatgggtttcctccggccgggg

SEQ ID NO: 184432 - DNA, 388 bp, Arabidopsis thaliana
cagctctcatacgactcactataggaagctgtacgcctgcagtcccgtccagatttccggtcgaccccgcgtccgccctttcccatttcgggaattttcttttaccttccggctgatttcccggaaaatcctctttatttaaccgccctaaaccctcccaaaaacaaggggttttttttgttgaaaacctttatttggggggaccctttggtttttcccattggggggaaccgggggggttaaaccccttttttgggttttttagagcaaactctttcttgagaaagaaaaaaaaaaaaccccccccaaaaaatttctaaaaaaaatttttttttttttttttttccccccgcgtttttttcccccccgcccaaaaaaagaacccccc

SEQ ID NO: 184433 - DNA, 361 bp, Arabidopsis thaliana
cagcttatcatactaggagctgtccctgcagtccgtccgattccgttgcccaactcggaattggaacctaatggggccttactagggtttaatcacggtttacccaaaataaaggggggggccccccccttttgtgaaattggaaaaaagaaaacttttttttttgggtcccccaaaaaaaaaaaaaatttttgggggttttttccccccccttcacaagggggggtgttacccccccccccgggggggaaaaaaaggggggggagaaaaaaaatattttatttggggggggggggggggggtttttttttcttttttgtgggggggaaaccccaacacccccttttttttttggttgggg

SEQ ID NO: 184434 - DNA, 153 bp, Arabidopsis thaliana
  unsure (1)..(153): unsure at all n locations
ccaaaaggattaccgggggttagccggacacccaaaaacccgcacaagagggacanaagagaagccgaccaacaaaccaccgcncgcancccaaaaggcacancacttgaggcgacagacacagcccaccncnaaaacaagaaaaaacggggg

SEQ ID NO: 184435 - DNA, 438 bp, Arabidopsis thaliana
  unsure (1)..(438): unsure at all n locations
cgtaagcngggacccactagagcgttcgcccggnggggttatgcagaatcacccaagcaaaacagggnccgggggagaaagaaaaaaaaacaaacagggcacaagaaaaaaaaaaggaaagagaagcctttatgaaccccatcataagggacctgggaaaaaaacgaccagcgccgccacaattctcttcttaaggggcggaacaaccgcaagcggagaaaaaaaaaaaaaaaccccccaaggggggggggggggaggggcaaaacaaaccagcgccacccncncccaaaaggaaccgaccgaacaaagagagcaacgacggggccccccccgcaccaacggaagaaaagggaggcaccggaacaacccaagagaccaggggaggacggacggcggaaagaggaacaccaggaagggggggcccggggacgaaacaaa

SEQ ID NO: 184436 - DNA, 503 bp, Arabidopsis thaliana
atctctggcctctcgtgcgcgctcacatgagcttgggtcctctagagagggccctctctttttttttttttctttttagaagtccacaggacaccacccggggcggtaaaacgtcgaccctattgagtgaagatgctgtgggacgactcctcgagcaaggtggagcaccaggataagcatacagaaagaatcccaggcccccgcacggggccttttactatgagagcaggtgcatgatctcccgccgaggtcctctgtagagacggagactcgccgagcggccgcatccttcaccggagccataggctttctatagctctcgaaccgatccataagcgcggctccgggatcctaagccacctaggggtcttgagatttcccatgatcacctccctgggggaatgcggccccgtgccccgttgtaggagcaacagccccgatttaccggacaagctaagaagcccgccccggttgtaaagtaccccttttccccaaacctaacc

SEQ ID NO: 184437 - DNA, 494 bp, Arabidopsis thaliana
  unsure (1)..(494): unsure at all n locations
ccgtaagcnnggatcctctagagcggtcgcccggggggtttagtgcaacttacctaaatttaccttcaatttgaggggtttttttatttttctatcttttgggtgaaaaagaaaacgagaaaaactataacttaggcccccctcccccaaaggaaaaaatttaaagaacccgaaacaaaaaagaatttcctctttcggcgtgggaaaaaaaccccccgaaaccggggaaaaaaacccccccaccccaggggaggggggcaaaccacgcacccacccgaaaaaaacccccgggggcagccccccagagaggaaaaacccacagggggaagggcccccccccaaaaacacaaanccccaaagggaaccccgggcccccaaagggcaaaaaaccgccccacgggggaaccccaaaaggggggcgagggggaaaacccgaaaaccccggcacccccccccggggggggggggaaacaaacccccccacacccaaaccg

SEQ ID NO: 184438 - DNA, 464 bp, Arabidopsis thaliana
  unsure (1)..(464): unsure at all n locations
cgtaagctgggatcctctagagcggctgccctggcggtttgaggctttttatttttattttttttctttttttggggtttttttttcttgttctttatcccttatcgtttgtttttttgaaaaaaaaccacaaaggggcttccttttttgtaaagacgcaaaaataaagggggagaaggccccaaactttctctttggaagtgggaccccgccacccccggccccaaaaaaaaaaaaaccccccccccccccttgggccgcgaaaccaccccccgggggggggaggccccccccaacccacaccgggggagaccccgaaaggagaaaaanangcgggcccccgaaccgggggaggaaccccaccaagccgggcggaaaacacacccacccggggggagggggaaaacaaaaagcccgggggggcaaaaaggaacaaaccccccccgcgggggcccccccccgag

SEQ ID NO: 184439 - DNA, 490 bp, Arabidopsis thaliana
  unsure (1)..(490): unsure at all n locations
ccactagagcggtctcccggggggggagaggccannnaaacaaaaaaancccccnnnncccgggggccaaaaaaaacgcaaaaaaacaccccaagggggcgccaacaccaacaaaaaaaatcaaacccccggggggcgggagaccaaagaaaggaaaaagggggaaaccaaagtttcctctaaggaaagataggaacccacccaggggctcctcccagaaaaaaaacccccaaaagaaaggggaggggggcccccaaaaaacacaaaccccaaagaccccgcttcaaaaaaacgggtatgcagaagcaaaacccccgccgcgcgcgcaaaaaacaaaaaaaaccccggcggaaagtccaccgggacccaaccccggggaaacagcggccccacgggggggctcgacgggccccccccaagggggagccccccaaaaaaaaaccccgcccaagaaaccccaccaggccccccccccccaatagaaaagaaa

SEQ ID NO: 184440 - DNA, 340 bp, Arabidopsis thaliana
  unsure (1)..(340): unsure at all n locations
cgaaaaaaaccaggcncaaacggggcnnggnngcaaaaacaaganccacacccccgaaggccgcaagcggaccaagagctttacgcancaaacgcaccaaccaggggagagaaccacaanacccggcnacggggagccnctcttggaaggtggaggacccaacagggggcngggccgaaacaaggagcccccaagagagggggggggagccgcccccacacaagggacggagccccngagacgagaccaanccaacaccgggccgggggggagggggaacggagcaacccaacaacccggggccgggnggggggggccaaaggggaaccgggccacaagg

SEQ ID NO: 184441 - DNA, 331 bp, Arabidopsis thaliana
  unsure (1)..(331): unsure at all n locations
tgcaggtaccgggccggaattcccgggtttacccacgggggcggagagcnngacacacaaaancangcgnaaacccggagnncnncgagnnnnnccgancnacgacaagggcggacgcngaaaccnnngcnnnccaagcngagaacaaccaggngcnnncccncagcagcaagacccgggacgcgaacttgtanttggggggtggggaacncancaggaacncnncggaggcgggggaccagacnagaggcgaggccgggacggacaaaagcaagcgcganggnncaccngagcncnncanncacagcaggcccgacaagacnaacaacac

SEQ ID NO: 184442 - DNA, 424 bp, Arabidopsis thaliana
  unsure (1)..(424): unsure at all n locations
aaaaaaaaacnccaaggccaggggaacaagaaaccgaaccacacgaaaaagcaacggacacacacacagaaacncagagggagcggaaggggccacaccacagacaccaaagaggggcagacaaacaaaaaaaaactcaaggcagatgggaaccccccgaggggaggngcaagcaaaaaaagcccgcccgnngggggggggggggggggcccccaaaaaagaaggggcncaccccgaccaacaggaggccgggggccgacggcccgcaaaagaaacagaccaagcggggggggaccaaggggcgcccccgaaagaggaccggagccgggagagaaacaaaaaacacgaccccaagggggacaaccacccccccacaccgaagcaacgaagagggagaacaacccggagcaaaggaaaaccgaac

SEQ ID NO: 184443 - DNA, 406 bp, Arabidopsis thaliana
  unsure (1)..(406): unsure at all n locations
agacgcagngaagcgaaagagagcgaacggacacaccgcacctatcaacggagggccancagacacanaagaggacgagcnaaaacaaagggggaggaanntttangggaagtagccaaaaaaacgcggaagggcangaaaagagaaaacccccacnaggggggggggggggcacaaagaaagagagagnnccacccggcccgagggggaggacggaacagccaagccggaagcagagagnangggnaccgcaaacgacgaagcaccaccgagccccccccccaacccacnccacaaagccaagccggggagacggcacgccagaaaggagcgcaaaagaaccggaaaaagaagggggagcaanggacgaaaagggcccacagggggacccggaaccgaccccccc

SEQ ID NO: 184444 - DNA, 486 bp, Arabidopsis thaliana
  unsure (1)..(486): unsure at all n locations
ganccacnagagcggtttcnccgggggggcgaaagcccnaaaaaccaaaaaacaggcgcaaggcggggaaaagagccccagganacgcccacccacangacccaaaacaccaccagggcgcttataacacccagggcagacaaaaggaggaaaacggggaaaaaaacaacagagacatanttccacgagatggcgacaccgcgggggaccaggcgcaagaaagaaaccccccaagagggggggggggaagcccccgacaaagcacngacccaggaagggccgccccagggccgggggggcccccgggccaaagggaaaaaagacgaggggccgcgccccagggaccgggggaaaccaaggggaaaacaaccggggggggcccggaccaaagcagggccaaagggagggcgcaagagccccacagagggacaaaaaggggaagaaccccccggcggggaagcaccgcccccaaaccgacacaggggg

SEQ ID NO: 184445 - DNA, 508 bp, Arabidopsis thaliana
  unsure (1)..(508): unsure at all n locations
accggaccggaaaacccgggtttacccaggcgggcggagccgcgagagacnnacaaaaccgagagaagggggaaaaaaccccagcccgccccgccgnggaggagaannacaccacgacgagcgcttaatcgccgcggggcgcctaggggcacaacgccaagagagnaaccaccgagcgngnntttcccccccgttnggggnaaaccngggggagcaagcgaacagaagagacccccaangacggggggggggggccaacacaaagacggggggcncaacnaanangagaacaaanggaaacggagcggggncggggacccagccaaaggaggccnnggaagcaccgccccccccgcaaaagggccgaaagagaaaagggggncaagaaaaccaaagccncggaagagacccaaaaacagcgagacgccgacgggagaacacgggccccggcaaaaagggccaggccccggaggcccccgggcgaaaaaaccccaaggaaaaaggggcc

SEQ ID NO: 184446 - DNA, 490 bp, Arabidopsis thaliana
  unsure (1)..(490): unsure at all n locations
aagcnnnggacccactagagcggtttcccgagggggtgtagccgngaaccccacaaaaaaccccgaccnagggggaggaggacacngaaggaacaagaaaaccgaagaacaccgacaccacggaagattaaacccaaaaaacccccgaaaaagacaaaaaaccaaaaaagggggaaaaaggcccctttacaaaaagatggaaacacccccgggggaaagaaaacaaaaaaagcccccccncncgggggggggggggggcacacaaccgaggggggngccacccaccacaggacgggagcaaccgaaanagggagaaaaaangcagggcgagcccgaaagaagaaaaaccaaacggcccccgccccagaaagcaaggaagaacccaccgggcacagggggaagagcacgggagaacccccaaaaaccccaaaaggaaaccgagggggaaaaaagaacaacaaggggcacaccggggaaaccggggaaaaag

SEQ ID NO: 184447 - DNA, 458 bp, Arabidopsis thaliana
  unsure (1)..(458): unsure at all n locations
aacccaaacgaacaccacaannggggagcnganacggacancgaaacaagggggccccacgcaagagaagacngaaacaagtttctccagaaaagagacatgcagggacatacaaagaaacacacanacggaacccccnttataggaagatggaagcacncaaagggaaagagnngaagaagaaacaccccacngggggggggggggngacaaacaanggaggggggccaaccccggacacgaaggggagaggcaagccacaccggggggaacagggcccgacagggnaggacaaaacaaaaacaagccaacggggggcggaagcccacgagggcagcggcccaaaacccaccaacggggggcgggaacccccacgaaagaaaaaggaagaagaaaaccgagcaagcacggacgaaaaaaaaaaaagacgcgcccccaaaaaaggcgggaacagggag

SEQ ID NO: 184448 - DNA, 401 bp, Arabidopsis thaliana
  unsure (1)..(401): unsure at all n locations
gaccnnnagagcgttgcccggggggttaggcgncnaaaccgaaagacngcccgganggggggcaanaagacncagannccaanacacaaaccccagaannnaagnncncacacttttagaaccagatatatatatatatgtagagaagaaacgaaaccacgcgcgaatacattaactccnggtaagaaacncnccgaacagagagnganaaggaagaccccccaaaccagggggggggaggacagaccaaacccagggagaacgggnaaagcaaggaagcnaggaaacagggccaaagagganaagnngggcggaaacgcgcgaaacccgccancaccagacaaacgaggagaaccaccaacacgncggaggagaaggacagggcagnccccgaacggaga

SEQ ID NO: 184449 - DNA, 586 bp, Arabidopsis thaliana columbia
  unsure (1)..(586): unsure at all n locations
cccccctcccccttccctctctcccccccccccccccccccccccnnnnnnncccccccccccgnnnnggaattaaggccccccctccccccccccaaataggannggagacgcccccccccccccnccccccccccccccccccgcncnccctttccccccccctggattcccccgccccccccacccccccccccccnncnccttcccctcctcccccccctcccctccctccccctccccccccccccccccccccccccccccccccccccccccctctcccccccccctccccccccccccccccccccttccccccccccccccccccccctttcttttcccggctgttccccccccccccccccgggcccnccccccccaacaaccccccccccccttcccccccccccccccccccccccccctcctccccccccccccccctcccctccccctcccccccccctcccgcccccccccctcccctccccccccctcccctcccccctcccctttccccctctcncctccccccccccccccccctcccccctccccccctcccccccccccccccccc

SEQ ID NO: 184450 - DNA, 715 bp, Arabidopsis thaliana columbia
  unsure (1)..(715): unsure at all n locations
cccccctcccccccccccccccccccccccccccccncccgcccnncccnncccnccccccccccccccnnnggggggtaatggcttttgagacccccttttctgccccaaattcccttngnngccgcncccccccccccgccctcctccctctaaaggtctttncactcccctcttttccagctctcccccccctcttctagtttttaccggccccccccccaaacccaaaaacancaccccccccactcccaacctcccaccacccccccccaccttttctncctctttctctctctcttttctccnccccttttttttcccccctctttcttcccacccctcctttttttctctcccccccacccccaccccccccaccttcaaaagaccccccccccccccttcccttctctccccccacctcttttttttttcggggtgtcttgtttgccccccccccnncnncctctccgcccgcccccccccccaccccacacatcaacaacccccccccccccccccccccttcctttctcctcccctcccccctcctcccccccccccccctcctcctcgcgccccccccccccccctcctctcccctcccccccccccccccccccccccctcccctcccctctccctcccccttccccctcccccccccccccccccctctccttccccgcccccccctcccccctctccccct

SEQ ID NO: 184451 - DNA, 665 bp, Arabidopsis thaliana columbia
  unsure (1)..(665): unsure at all n locations
ccccccccccccctcctcttctccccccccccccccncncccccccccnnnnnnnnnnncnncccgcnnnnaaacacacttttccccccctcttttcccccccccttttaagnnggcgcccccccccccccccccccgcgcccgccgccccccctccccccttttccccttttccccccccatttgtttcccccccgcccccctacccccacacccccccccccncccccccctctctttcnctccccccctccctcccctcccccccccccccccccccccccccccccctcccccctccnccccccccccccctcccccccccccccccctcccccttcttccccccccctctttcccccccccccncccccccctttttctttcccccttgtttttccccccccccccccccgcccggtcccctccaccacctcctncctcccccctccccctcctctccccctccccccctctctctcctcccctcccctccccccccccccccccctcctcctcccccctctcccttctctcgcncccctctcccccccctccccccctccccctccttcccccctcccccccctcccccctcccccctccctcgctccccccgcccccccttcttctccctctcttccctcccctccctccctcccctt

SEQ ID NO: 184452 - DNA, 559 bp, Arabidopsis thaliana columbia
  unsure (1)..(559): unsure at all n locations
cccccccccccccccccccccccccccnccccccccccccccccccnncnccccccccnaaaaaaaaactcctccacccctccccgggcagcccgctttngngnggggaccctccccccccccctctccccccccccctctctctccccctttccccccccttgttcccccccccccctatccaccccccccccccccccccccccccccctccctccccccccnccctctccccccccccccctccccccccccccctccccccccccccccccccccccccccccccccccccccccctcccccccccccnncccccccccccccccccctctctccccccgctgttgtcccacccccccccccgcccctccccccaccacaccatccccccccccccccccccccccccccccccccccccccccccccccccccctcccccccccccccccccctccctcccctcctccccccccccccccctcccctccccccccccccccctccctcccccccccctccccccccccccccccctcccctccccctcccccct

SEQ ID NO: 184453 - DNA, 588 bp, Arabidopsis thaliana columbia
  unsure (1)..(588): unsure at all n locations
ctccccctctcctccccccccccncccgccctccccccccccccnnnnnnnnnnnnccccccccacaacaacctctcccccctcccacagcgccccttttggnnggggacccttccccccccccccccccccccccccctttccccctttccccccctgtttcccctccccaaaccacccccccccnccccccccctccccttctccccccccttctttttttcccccccccccccccccttttcccccctcctcccccccccttccttctccccccctctctcctccccccccctccccccccccccttttcccccccccccnccccccctctccccctcccggtgtgttcccccccctctccccccccccccccccccccatcatataaacctttccccccctcctcttccccccccccctccccccccccctccctcccccccctcctctccccccccctcttcccccccccccccccccccccccccccccccttcccccccctcccccccccccccccctccccccccccccccccccccttcccccccttccccccccccccctcccccctcccctccccct

SEQ ID NO: 184454 - DNA, 436 bp, Arabidopsis thaliana
  unsure (1)..(436): unsure at all n locations
aaaaaaaaaaaaaannnnccttcccnccccccccccaacactctaaactttttgcacaccccaccacaaatcttttctctcatattagttttttttcttttaaaaaccacatttacgcccttatttatttccccccccctaaaaacacccccccttaacccctttcccaaatttttttttttccaaccacccctcccctctttttttttnaacggcgggggtgagagnngnttttataanccccacaagcgtcccctcttttaaacccaccaaaattttcccttttaaaaaatttttttcacccttttttttaaaaaaccccccaaaatttttttcttttttttccccacatccaaaaaaactttcaaaatttctttttccccccccccttttccacaaagccctttttattaaattttcacacctaaaacctttt

SEQ ID NO: 184455 - DNA, 402 bp, Arabidopsis thaliana
gatgttttggtgccttagagacttgacgtcctgccgcgtcgtagcttggtcctctgagcgggcgcctttgtttttgtgtttagactctctatcttcctattcatatttgcagcttcgtttcttgcttaatagcttctgttttcatttgctccagtttcaagctctcttgcttgagagcttccaacttttttgtttcctcaatctctaatctctctgcttctttctggggggggtcttcgcgttctcttctcaagtcttctagttccatcctgagagaattcaccaaacttggggagagagcattcgtcatcagcagcttcttgtagcctcatcggtgcttcattaagctcatttggaatgatcttaaccgggttcatctctgattcatgagctttcttcatc

SEQ ID NO: 184456 - DNA, 396 bp, Arabidopsis thaliana
  unsure (1)..(396): unsure at all n locations
cccccccctctctttttccttttccttttcctcacaaccccctttattttaagggccccgtttttccaatgcgctcccccttcccccccttttttggtttttttcttccaaaaaccccgacccgcangttttttcccttttggcgggggggtgcccccncnnccccttttcccaannccccccaccagcaaattttctcgaaagccttccctccccccaaattcccgcttcttttttcccccaaaaaaattaataaaaaagtttttaaatcccttttccccccccccaagtggggcccccccaatttaaactctccccccctttttccccgtgttaaaaaagactccgcgccccaaaaaataccaacaattccccgcacttttccccccccccccc

SEQ ID NO: 184457 - DNA, 440 bp, Arabidopsis thaliana
  unsure (1)..(440): unsure at all n locations
ttcccccctccctaaactttaaacctttaaacccccccccttttggttttttttttttaacaaaaaaaaacctttttttttctttttaaaaaaatgcctccccaaatagttttttcccttaatttaaccccaccctcaattgggtttaatttttaaaagaaaaaaatccctttaagaagggccaaaatttatttgaggctcctctttttttcccctttaggggggccttnctctttctttcttttccccctttaaaaaaaaaattccangtttgccttcctttaaaccttctttaaacccacttttaggggatttggatttccccttcccctcctttcttaacccaaaaaattaaaaaccaccctttctttttttcccctttttttacctcaacccccccgagaaaacacctccgtttcccttaaactttaaaaccctaa

SEQ ID NO: 184458 - DNA, 172 bp, Arabidopsis thaliana
  unsure (1)..(172): unsure at all n locations
aagcttggatcctctanagcggtccccctttggttttgttttttaaaaaacacanattttactacatctgttcttacaaaacccatttacacaagagccctctgtaaagccaatgaaaaacctctaaactctgcaactctgttcttgtttttacatacactgatttaccatt

SEQ ID NO: 184459 - DNA, 599 bp, Arabidopsis thaliana columbia
  unsure (1)..(599): unsure at all n locations
ccccccccccatcccccccccccccccaccccaccacccccctctctccgcnnccccggggggggnnncnnnnnngggccaatataaattaggggacaacccctccccaaattccttnnaccctccccttcccccccctccccttaaacccttnnaatccccctaaaaaccccccccccccctggggttaagggccnttcccaataaaaaaccccccccctccccccccccccccccnccccctcctccccccccacccnncccccccccccccttttccgctcaattcttttcgccccccccccttcaaaccctccaccccccccacaatttgccttcccccaaaccaaaaccccccccccctctttacagttttaccccttggggggggtgaaaaaccccctccccggcggcccccccaaacaaccactcccccgctcgaaatcctctcccccacaacacccccctccccacacaccaaccccccaccccccccccccccccccacaaccccccctccccccccccaaccctcgcggacccctcccccccccccccccactacacccctttacacaccccccacccccccccccccc

SEQ ID NO: 184460 - DNA, 370 bp, Arabidopsis thaliana
  unsure (1)..(370): unsure at all n locations
aaaaatattttttcctttcccacttttttttacaacgcggggttgtctgtttttccccccctctaaaggaagcccccccaatttttttccttaaacaagaggcgcgcccctcttttaccctcttttatancctgagggggtggggnggaacatccaccccccaggggccgtnntttaaaaaaccataaaaaattccccttccccttttttttttcccctttcccccccccttttttttttctttttttcgcccggngcccccccaccccgggtttttgcccccccctcccgggccccgggcctctccatccccccttggcccaacttccggaggggggggttgctctttccccacaaccgctctccctta

SEQ ID NO: 184461 - DNA, 731 bp, Arabidopsis thaliana columbia
  unsure (1)..(731): unsure at all n locations
ctcccccctcccccctcccttctccnccccnccccccccccncnncccccccccccccnccnccncnnnnncnccccccccncnccacattaaactacatcccccccctccctcccggcgggccccggttttttggngnggggngcacgcncccccccccccccccccgncccccccccccccaccccccccccttcccccttttttcccccccctttgttctaccccccccccccaacccccttttttttttccccncnnncttncnnncccctccccccccccccctccctcccccttccccccccccccccccccctcttcccccccccttcccccctctcccctccctctcccccttcccccctcttccctctcttcccccccctctttctctctccttcccnncccctcctttctccccctctctccttcttctcccccccccgggtgtttttgcccccccccccccccccgcccgcttcccccccccccaaaacaacacttccntctcctctccccttttccccccccnccccctttcctccctccccctccctcccttcctcccctccctcctcccccccccccccctccctcccccccctcgcttcctctccccccctcctcttcttcctcccctcccccctctcccccccctccccctccctctcccctcccctctcccccccctccccccctccccccccccctccctccctctctccctt

SEQ ID NO: 184462 - DNA, 578 bp, Arabidopsis thaliana columbia
  unsure (1)..(578): unsure at all n locations
ccccccctccccccccccccccccctccccccccccccccccnnccccccccccccnnnnanaattaaaaccaacctcacgcgacccattggggggggggccccccccccccccccccgcccccccaccccattccccttttcccccccgggtttcccccccccctatncaaaccccccccccctcccttcctttttttcnncccccccnccnncccccccccccccccccccccttcctctcccccccccctccccttccctttttcttttccccccccttcccccncccccctccctcccttccctcccccccctcccccttttttcccccgggtgttttccccccccccccccccctcccctcccacacaaacccccccccccttcccccccccctccccccccctcccctcccccccccccctctcccctctccccctcctcccccccctcccctcctccctccctcccccccccccccccccgcccccccccccccccccccttcccccttcccccccctccccccccccccctccccccccccctcccccccttcccgcccccccccccccc

SEQ ID NO: 184463 - DNA, 665 bp, Arabidopsis thaliana columbia
  unsure (1)..(665): unsure at all n locations
cccccccccctccccccccctctcctctcccccctccctccctccccccccccccccccncccnccccccccccccnggccgggtcctcctcctccccccccttcctcccccccccccctttttcgtcccgggtcatttcccccccccccctcctcccccccccccccctcttccccccctttcccccccttcgtgtttttccgcctccctcctttatccctccccccccccccctcccccctcccctctcccctcctcccccccctctccctccccccctccctctccccccccccccttcctccctcccccccccctctcccccctccccccccctcccctctctcctctccccctccccttccctcctcttccctctcctcccccccccctcctcttttccccccttggttccccccccccctttcccccccccccccccttatatatctctccccccctttccctcctccccccctccccctcctccccctctcccctctctccctctctcccctccctcctcccctccccccccccctccctctcccctccccccctccctccccccccccctccctcccctcccccccttccccttcccctccccccctcttccctcccccccctccctctcttccccctccctcccccccccccctcc

SEQ ID NO: 184464 - DNA, 395 bp, Arabidopsis thaliana
tacgtcacagccgcgcggcaccccgccccccccctctctcttgggggggggggggccctcttctttttgggccaccttctcaaaaaaattaccgcgacgtgctcgccgggcggcgggctctccgcctgcgcgctcgaggccctttcgggtcggtacgcgggcccccccgcctcttcgtgtgcggtcggcttgcttcgcttcccggttgggcgtgccactgaccgtcccgtgttgcgccctcctgcgaccggcgccgctcccccttcgttgcggcgcggcgcgacgcggggcgcctcgtgggcgttcgctcgcgcgggttcgcgcccccgcccccggccgccgcggcggccgggtcgcgccgcggccgacgcccgcccgccccccccgcgcccctg

SEQ ID NO: 184465 - DNA, 525 bp, Arabidopsis thaliana
  unsure (1)..(525): unsure at all n locations
ctgcaggtaccgctccggattcccgggtccaccccacgggtcncgggtgtcnggtacccggtntttanngaaaaatacaatcccgtgccaatttcattaattaaatgggcggacccacccgggggccggggggccacccacccgaggattgggtaatccaaaaatataacacagccctccgagcggatatttttaacttggacgggcgggtttcttttaactcttgtgggggtgtgggaatcctttcggaggctccaatccggatttaaagaccacccgaaaacttttntattcccagagggggggggggaggggagggtaaaaaagtttcccaggggcgggggggaattttttgggcacagatggggcccttgtnaataacttgtgaaaaaattgggggttccttgggctcttttcaaagaaccacgccctcccccactttaaaggcgcgaatattttcttgccctattaccacttcaacgtgtagtgggttccttcgcaagggttttttttaaaagagggaaa

SEQ ID NO: 184466 - DNA, 463 bp, Arabidopsis thaliana
  unsure (1)..(463): unsure at all n locations
acctccctgccccctcctaacttgacctttnagggggccccctaagcccggggggtataataatatttttttttctctggccctccactctccccccggcttcaacccctttaacttcaaccaacacaaaacaccttaccccttttctaccctctcctcttttccccactttttaaccttccaaatttttaggggggggggtctcctttaaggggatcctttaaaaaacctcctccacctttacctaacaccctccccccttcataaactaatcccacccccttcaccttctttaataactccttctcctcagcgggagggggcgcttaacggcgggcccgccccccgggcctgaccctgcccgggtggcgcggagcccggggcccctgttgggtttcccgcggctgcaaagacaaacgcccctcccctcggcgtcggcggccggggcgacgccacaccctgg

SEQ ID NO: 184467 - DNA, 401 bp, Arabidopsis thaliana
aattgtccccacattgtgataatatcgcatcccgcgatttatccgcgactttttttttgtttatttctcatttttgaagaggcacccggccgtccccgggaccaagcgcaccggaacccatttttccaacagggggccggggggcgaaaaaaagaagttgatcacccatataatagaatcaactccgcgtgtcgccgtttactacacgcataggtgagcgcaccgcgagtcatagtctctctctataaccatccaattccctcatattgatttgtatggtaggtgcgcgcgcgaaacgacattttttttttggcggggtggggcgaatccgaagcccgagcatggggtcaatcaaataaataaagattcatcctattctatcagcggcgttcttttacgtc

SEQ ID NO: 184468 - DNA, 358 bp, Arabidopsis thaliana
  unsure (1)..(358): unsure at all n locations
tcttcaaaaccccccacccttttttnaaaaattaaagggggggggggctnaatcctcaggggtgtctctaacaaaaattttgagtgtgtttgagggggctcaaggagccgggggttttgggtttccccttctccctggggctcccgggttggggaactcgtgggttcaacccgcggggggccgggggttgggggttaaaggtgggaaaacccccctccctccgtgtgtccgggggccacccctggggacctggcgtgtgtggccccaagggagagggggcttttggggtttctggggggggggttccgcccccaaaaaacccggggggggctgtggggagacgggggagggggggggg

SEQ ID NO: 184469 - DNA, 440 bp, Arabidopsis thaliana
cctccactacattttatacaaaaaacctccccttcacatccttacctttcaaactccatcccactctatcacaacttttttctccctaaagaattaaacccccccataaaaaaacaaatactcctttcttatcactacttcatttccccttctcctttccttaatatctatcaatctatcacctcaccactttacactctctcctccttccccttctcaattatataattacattatacatacaatatataaccaatataaattctacccttacaaacacttatcctccaccacataaaacatccatctttcctcttcctcccacaaaaaactaattacttatctaccatcttaacccaaaaccatctcctctcttaaacaaaaaaaaaccatattcccttctctctctctcttaacttcaaattacacaataaaatatc

SEQ ID NO: 184470 - DNA, 496 bp, Arabidopsis thaliana
ctacctaagcttggatcctctagagcggccgcccttaggcccgggggttataattaaaactttttttttttcactcctcccaacacacttccccaacaccctggaaaagaaccaatctttaaaagcctcccaggtttaaaaaatccattccccaaagggggtttttattttttaataccacccgttttttattttggggagggtaaaaatcttttttttttttaaaaaaaaaacgtttcccttaaagttttttttggaaaaaaccccccgggtttttttaaaaaaaaaaacaaccaatttccctttaaaacccttcttccggtttgaaacccctttacctttccccccgttggaaacctggcgcccgaaaaaaacctattttttggttttgggggggccctctcccctgggaaaattcctcttttaagggaacccaaaaagccctgacccccctctttttttttttcacaaaaaacatcttttttttatcccccaa

SEQ ID NO: 184471 - DNA, 541 bp, Arabidopsis thaliana
  unsure (1)..(541): unsure at all n locations
ccctctcaattttttaccacctccctaacttctactatacatcaaacaattatctaacccctctacacacatcaaaacaccttattaggggtcctctcttaattcactcactcttctctaattatttcttctccatattaacaaaactacaatgctatcctcactacactctatttcctctaganagaggggggaaataaaattctccttaatttcgaaaaaattttgaccccccacctttttttttaaaataaaaaaaaaaattttttttttttgtaacaccctttctccgctttttttaaatcccccccaccccccccccttttttaacccctttataaaaacgacctcctttttgggaaaatattaacccccctctttttttaaaaaaaaaaaaaaaccggtgggtaagatacccaaccacccccccttttttaagaggagggggtttttttttttactattttaacttctcttttcccncaaccnctctttcctaatcattttttaaaaaaaacccccctcttaccccccaatcttt

SEQ ID NO: 184472 - DNA, 536 bp, Arabidopsis thaliana
ctacatcaccacctagaaaccgctaaccactgatcattttcacgctgttctgctttctcgtatcccacatagtgtctgatcattgacatgcaccagacacgacatagtgcgtctcactctacaataacagctcccacacagttctatctctcttatttatagggggagggtggacgatttaatcttcttactcatacagagtaaaaaaaatgagtgtcctaccaggtcgcaattacatctaagatatgaactcaataaataggcacttgtatctttataccgcaacggtactctgacgacagttatgattacgaagtggtgcacttcgcataacgataataactatcagaacacttcgctaacacacaacatactagacctcgagtgagcaagaagtaagtagaaactatgtatattgaatatatctttactatcatacacacctacttctcatctaattatcgtaatcaactggtaacttatatatcatcttttgtataattcagtgagcttatatccaaactcttgcccttcca

SEQ ID NO: 184473 - DNA, 502 bp, Arabidopsis thaliana
  unsure (1)..(502): unsure at all n locations
cctcccctccccccctccctaacctttgatcctcttaaaccgtccccttggaggttttttttttttattaaaanaataaagattctattcctaaaatttaaaaccaccttattttcaaatgcccacaaggaaacaatccttttaaaaattaaaactccccaaccaaataaaatcttccccatccaaaatcaaactaaaaggggaaaaatccgggggtggaatttccttctgtgcttaaaaaattataaaaagccctctttgttcttttttttcaaaacccccaattcaaagtggacaccctaccctttaatcaacctcttcttatactaaaacctcttacaaaaggaaacaaacctaactactccttaccaaaaaccgggggaaatcaaatcctcccccccaaaacctaaaaaaaaacctttttattttcaaaaagataacaaaatctttcgaccctttggctccccccttaaattttccccccctctccttttaggcttac

SEQ ID NO: 184474 - DNA, 125 bp, Arabidopsis thaliana
cccgacggcgtataatccgaccggccaaagcagatactggttttttagacacaccccatgtaccccaagaggaaccacgccggcgagagcacacaaagtatgggccacgtttttccccggggggg

SEQ ID NO: 184475 - DNA, 194 bp, Arabidopsis thaliana
  unsure (1)..(194): unsure at all n locations
ccccactggtctcctggatactttatgccgacacgggccaaacagacacttttttttttctcttatctcccgcaccctttcttactngcagaaggaacaccgccgccccgtaccgccgtagccaaagatcgacacgccacacccctctattccccgggggggaagagggcgcgcgataaaaaaaaaagatgggt

SEQ ID NO: 184476 - DNA, 521 bp, Arabidopsis thaliana
ttgacgtcgcctgcacgcctacctaagcttggatcctctagacggtccccttaagtgttggtttttttatataacatccataaaacttgatcattatcacagggaggggagtagcaaagtttctcaataaacaccttcttaaataacatccattaaacttgatcattcactattactaaacatggggaacagaaacctcatcatatgtataaaggggggggattatttaaaagacctaaaccataaatataaaaaacctccaagaagctgagaagagggattggtttcacagcgctctgaatcccctcaaaagctactctaactctttccttaaaacctagaaggctgactctttacctctacactttgtttttgcagcttaaacacatttgccataaccctaaacaccaggtgcccggtttctcccaatttcacatcccgaaaaaagcaaccaaaaagggcgtatataactttctaaattttttgtccggtgttttccttagaattcaaaggatcttgct

SEQ ID NO: 184477 - DNA, 508 bp, Arabidopsis thaliana
ggccccccttgagtgttggtgttaaaaccaaactaacaatttccttccctaaccgagcagagggtcctgcaccgctaagttctgggggttcatcaatgggcctccacaccttcccccctcaacctacccttttgacgcgttaagggtcttctggattccccccttcttaaaaggggggggggttctacaaggggggggacccactaaaaaaaaccccttctccgggatccagggcccccccttctctcccccgcgtgtgggccctttcaaaagccctctccccccctcgccggggtctccgggccccttttttaactgggggtcgcgtggaccctggcccctttggggcgtgggggctcgttctttttttccccgtgctctaggacgcagggacccccgggtgcaaccccgccagattgtcttcttaaggggggcaccctcgccctctcaaaccgccgcgagagtcttgctctcttcttttgaaattgccctcccccttcccccacgg

SEQ ID NO: 184478 - DNA, 543 bp, Arabidopsis thaliana
  unsure (1)..(543): unsure at all n locations
acgtcgcctgcacgcctacctaagcttggatcctctagagcgggccccctttagttttggtttttttaaatttatttggtttttttttttttttttttttttccaaaagtggtggggggggcccaaaaatgtgggggggaggattttttatttacggggccaacagggctaatctttgttcccccacaaattttccaaagggcctttctcttcttggggggggggccttnttttcagagggtccctttaaaaaaaaattttttttaatcttaaccaacccttttgaaaaccccttcaaaccccaatgtttgctaaaaataaataacaaaggggcccctaaaaaaaagaaaaccccccttctacctaaaagaaaggccctcttgtgcgggaaacacatttttatgctgcccaggggggcaacttggtcggcgccaataacgaatctccttccctctgcaggaagaaaacccacttggggaacaaattatcctacccctaagcataaactttttcccacctaataaaacccacagccccaaaggg

SEQ ID NO: 184479 - DNA, 498 bp, Arabidopsis thaliana
  unsure (1)..(498): unsure at all n locations
tggtttttttttttttaaaactacaacccccaaggggggggaaatttaactttttgaattttggaaacatacccaattaataccttgccaaaataagtcgccaacttttcgaacaaaaccattaaaactttttgggcgaaaggtaatgaacccttctcaaaaggtgggggggtaataaattgcaaaaggggttnggccacaaaaaaaacctacccccactggaaattaaaaggggaggaaaaaagtgggtgttctgaggaatttcgcccaaaaaattaaatgggggttgaaaaccctgcaaaagttgaacctacctaaaaaggggcaataactcgggagggggggggaaccgcgacccaaattgattgtaaaaagacaaaagccccccccaccataaccaaagcctctaaaaatagatttttccctcagaaaaagagggggactactccccacttccaaaaaggaaaaacatattttggccggggcccttcctcaaaa

SEQ ID NO: 184480 - DNA, 523 bp, Arabidopsis thaliana
tctggcccctgttcacgtattatacccgtcccggggataaaaacaaagtttttttcttttttttattccccattttttcgccggcggcgccacgccgcgattgccctgcgtccacatccccgatacgcctacgcctttttccccggcggggggggggggcggaacaaaaaaaatgttgttgtctctttatattcaattaaccctttgttcgtctttttttgatcaggctcttttcgtccgcctcctccccgtctaaccctcccttccccctccgacctccaccccgctcctcctccctcgcccggcgcttttttttttcggggggggggcgcggctcccgttccgcgccgttccctccaaaaaacaccctctcccgctgccctctcctctccacggcctggttttgtcgcttcctgttgtccgtcccaccgcgcttgccatgtttatctcctcgtctttccgtcctccctcgcactcttcgccccgctcggccctccgtctcccgcctctctctttccgccat

SEQ ID NO: 184481 - DNA, 694 bp, Arabidopsis thaliana
  unsure (1)..(694): unsure at all n locations
cccccccccccccccccccccccggggggggganatanatttgggacccgtggcgncccccaattctttngcccgcccccttccccccctttccttaganttttnatttcctcttcaaggctttcccccccttaggggtttgggggtctcccccacctccacaaaccccccncnttcnnnccccccccccnccccccccccctttctgccccccccacttttcccctcctcccccccccccgccaggcttccttttttacccacccccctccctcttttattccccccccccccccccacccacccccggttttttttccctctctttttttgcggcctgtcttggccacccnctccccggctggggccgnctcttataacccatcaacacccccctctttttcccccgccctcccccccggccccccccccctttttttccccttttccctctcttgggcgggcccccccctttcttttttttttcccctccccccctcccctccccccttttcccccctcctttnccccccccccccttcctcttcccnnttttccccccccgccccttttccccccctcccctctttttctctctcccccctctcttttttcccccccctcctctttttttctttctttccccccccccccctttccctccctccccccccctcccctccccctcctcccc

SEQ ID NO: 184482 - DNA, 381 bp, Arabidopsis thaliana
cccccccccattttaccaacaaacctacccccctattacatcacattctccatcattttttcccggggggaagcttcaaaaaacatatcaccccaaacatttatccccttcccccctcccccaatccccccatacatctcaacacacatctctaatatctatgccatattttactcactttactttaaactcctccaatattattaaagactccctccacttcccacacataactaccacaattttttttttcggggggggttacccaccaacactacacttgtccatctctaaaaaaaaaatacccccccccatttcctaacatcttttactttcactacatcctttcctcaatctattctgtcacctcctttccttccc

SEQ ID NO: 184483 - DNA, 486 bp, Arabidopsis thaliana
  unsure (1)..(486): unsure at all n locations
ttaaatccccacctttccgccttttcctggtgtttagtgttttaaaacaaaaacncccccccccccccccccctcgcctctccccacctctctattttaatattataacatcagtcccttccccacgattctcccatctccactatctcctcttaactattcccccataacccatatatacaattttttttttgggtgtggggccacnacccaccggtgggtcggtaaaaaaaaaaaaaattccctaccatttacctccctccgctcccccacccccacacttctcccacttatatgaccctactcccatcatttactcaaataagccactatctccttaccacgtctcacctactacatcactattgtagactcaccccttccacctacccccttaccatctctcctcctttcccgtacttcttccaccactcacttttccactcactcttcacctcattacttcccacattctctaccaccacc

SEQ ID NO: 184484 - DNA, 453 bp, Arabidopsis thaliana
  unsure (1)..(453): unsure at all n locations
aaaacaatttaattaatccatgaacccacccaactttaacaatttaccaccagtaaacaaagccttccaaatcaaaacaaggctttaaaaaaaatattcgcatcccaccctaattccccttttttccccaaatttaatagggggggtaatcctcatatacggagngagttaaccagnatccttttttgtttgggggggggttttttgaatccttgtcctttaacccaacaaaaaaccaattgcagaacccctctttttattcttcttaaaaccagaaaaaacttacacccttttgtttttcaccaaccccttgcccattttttttccttttaccttggccattttaaacctttttccccttccccttttttataaaaagagcccccttttcaaattccccccccttttgaaacaaccccctttttttcccctctgacaccccccaatttttcc

SEQ ID NO: 184485 - DNA, 366 bp, Arabidopsis thaliana
  unsure (1)..(366): unsure at all n locations
tcggcccccccctcccccccacttttttttttgggttttagtacggggnncccctcctggtggtgggggtttttctagaaaattaaatgtctcccctcccgctttgcgtgttctcgtttcctccttgcgtcgtcccgctggttcctgcgccccgtcgtgcgtccggttgtgtgctttccttttcgtcccgctctcttcctgtctttgtccctgcgcttccctctgctgtctgtttccctttcttctccgcgtcctgctccccctcctcgttctcctcccttcgtctctttttgacccgattgctcgcccgcctggttcttctcgcctgtcgggcctcgcattcctctccctgttcttctcgctcgt

SEQ ID NO: 184486 - DNA, 321 bp, Arabidopsis thaliana
  unsure (1)..(321): unsure at all n locations
accccccaaacatagaccccacctccctccccatattctcctgggggggggagtggtgtatacaaaacccgaatccagtttatgtccgtcggtgccccacctccccatacctattctcaatcaaccatccagtaacgctcaaccacccgtatcccgcgtccccaaagtatttattgttaccccccacaccgcaaacaaaagcgatttttttttgggggggggggcgcggcccccacgcgcgaggcnctacaaaaaaaaaaatattcctcccaagcgttcgcctcgccgggtgcgccccctcacgccagtttcacaccgcac

SEQ ID NO: 184487 - DNA, 509 bp, Arabidopsis thaliana
ttttctcactcccctccctttttgagagagctcgacccccccctcgcgtccccccacccgcctttcctttttccccccccgggggagggggtggtaaaataaactctcctctgcttccagcctccctcatcccgccttatttcctctgtgctcttactgcacccttccatcgtccttctgagtgatctctctttattgccctctctaccaggtcggtttgcgactgccgtcccctcctcccggggggtggtgcgcgtctcaccccctcctttcataaaaacatcccacacgcgtcccagcttttgtcttcattccacgtcgctccatctcccctctttacgcttgtactgtctgctttctctccccatcgtactccctggcacccccccttcactcctcctcgcgttcgacacctctatcgcttttttcatattctcctgcactctcattcgcgccttccccctctcactgcctctccctcgtgctctcacctctcttctcctctcttt

SEQ ID NO: 184488 - DNA, 348 bp, Arabidopsis thaliana
cttagaatatcgcatgcaagagggggcgaatcttttggacgccccccgcaattaagcgggcgaacccgcgcagagagacggacgcgggggcgccatttaaccggggggggggggggggaaaaaaaccaaggtccatcgcaattagtgaaaagcgaaagatagctaaatcaaaaatatcgtctatctcaccagttagcacccatatccgccgcatgagcgcaaacctgcttgtaatacactccctcgccagcagcacgcagaagcgcatggagtttttttttatacggggtgggggaggaaggagcaaacacacggcagttgctgcacaaaataatagagtcgatgcgt

SEQ ID NO: 184489 - DNA, 668 bp, Arabidopsis thaliana
  unsure (1)..(668): unsure at all n locations
cccgcccccccngcgtaannaaanctccccacgcttttgcctcttttccccgtcggggtgtttggggtttccctacccccanccccccncccccccccncccccccccccctccccncncncccccccnctcccccttccnctctgcgtcctttccgttctcccttccctctctcttttctcccctcgcccntctgccggtgttccttctcgcctctgttctgccgcgcccccgctccgcgccccttcgcgccctttttttttttgggtttgtctgggcgccccccccccgggggggcgccccccatacgcattctccccctctctcttttcgtcgtgtttgctcccttcccccctcctcttgccctcttctcctctctctccccttctcgttctctcctctcgccgcccttttccctgtgtcccgccccgcgccgcccgccttccccccgttnttcctccctttnccccctctccccgtggtgccgtttcctgcttctccgctgtgtcccccttgcctcctctctgcgtcggtctttctccctcgtcctgttctgcgttccttcccgctcgcctcgtcttttctcgtttccgcccttcctccctctcccccctctccgttttctctgctcccctctctccctccttttctcgcgccctccctttccc

SEQ ID NO: 184490 - DNA, 502 bp, Arabidopsis thaliana
  unsure (1)..(502): unsure at all n locations
gggagaagcacccgacgcccgcaggtaccgggccggaattcccggttccacccagggggcgaggggggggaaaataaaattacattctttacaccgctttgatcagctccgaggcgtgttctcaatagtcgaaacgggtaatgacacacggggctctacacgatatcagacagctgcaatgtatgcttagaaaccccacacgccatctttttttcccgggagtcggggcacaccacggggggggtnatacggatccaccgtcgcgtcccgaggagagcgtgagccgcctccgggggttacctatctgactgccgctcacgggggtgtactggagcccctgggactccttcttgaccgtttcctggggtctttccagctcaggagcgtatggctgaagctcggagggcgggaaagcgggccccgtgctccgcgtttgcgcgggggaacccgaacggggccgtaagggtggtcttgcccgcgcgggcgggagacggcggtccag

SEQ ID NO: 184491 - DNA, 339 bp, Arabidopsis thaliana
  unsure (1)..(339): unsure at all n locations
cacgcctacgtaagctnggatcctctagagcggttgcccgngggggaaaaggcggaanaagaaaanancncancacaagaagaanacaagccancanaancancaanggaaaacccgaannaaacaccncaaaacnngcaanaaagcnagcnncncnagncanngaaggggagnccancaaacnanngcanctccgctcgttggggtggaggcccananncancnaanaacacanccaacncngcngcnagngcagnaccngagggcaccaaaanngnanacccnccaccanancancgannnagaacancggcncccgnnnnccaacccaggaagaaa

SEQ ID NO: 184492 - DNA, 548 bp, Arabidopsis thaliana
  unsure (1)..(548): unsure at all n locations
tcgcactgcaccgccgtaccgtaanngcttggatcccctctagagcgggcctgccctttggggtttgggtggtttcaacttacataaaagcttcaaattgccggctactgtcttttgatctcacaccgggctgaagcctcacacaaagacagaagtcgggcgaacgcaggccagaagccaagggaaacacaaggaagaaaatgggaggtgaaccccgggcccgttcctggtgggaagagccaacccattggatggtgcacgacgaaccacaacaggtcgcaagctgcgagacccttgccagagaaggcccccacatcaccactgaaagaaacaagctgccggccacccagatggtggcgggaacttatcatagaagtgagccaggggcccctaatgcccgtgagaggcgcccccaaagccaaaggtggcagaacgaaccatatgtatgccacatcaacctgctaaatcgccgacgtgagagaacgatgcacttgtaattctataaaccagtgctatacacgagggcggataaaccacacccggtgggc

SEQ ID NO: 184493 - DNA, 135 bp, Arabidopsis thaliana
agggcatctagccacggccacagcacaatctgcctctatctatcttatattccatttactaaactgcataacctcgcgctactgatcttcgattactgaccaatagtatgggtggccgaggcgaatagagcgagg

SEQ ID NO: 184494 - DNA, 374 bp, Arabidopsis thaliana
tgcgccagagttctcctggcccgcgttcataggaacccccccacgaggtgggttcgccgccgtcctgtatgacccctcacggcactgctactcagagtacatctctcttctatttgatcccatgcaccctctccacaccagagtacgccatgttagttaccagctctcatccacgcgtgagggttcgtcctttgtccagtttgtgtatatgcacttactacttccttactgccgtcgttcattcgtgtttttctgtctttagtgtattgtgagctcttttctcgtttatcttcggaatttctactttgctgagggagaggtgtacggctacctcggcacccagagttagtgtatgcggagaccccggcccacat

SEQ ID NO: 184495 - DNA, 185 bp, Arabidopsis thaliana
tacgatagtgggccccccgagccagagacacgcagccacgctcgcgcgggcttctgacgctgtcggggcgcgccccgccgcccaagcatgacgcagcgcgggcttgcgtgctgatcaagggaccagccgcgcgcgcagaacgcgtctgcggatcgacggagccgcagggtcacgacaggtgggcg

SEQ ID NO: 184496 - DNA, 327 bp, Arabidopsis thaliana
agttaaatacttaacgccgacatcggtcacgcgcagtgatcggaacgtaatagctatgtcactgtccgagacgcccctatccccccaaaacagtacgccctcgagacgcgaattggtgtgtgtactacgtcacaccgcgtgtatcttcctgcctctattgccacgatctgctaaccagagcgggacgggcccttaagagattacgcgcggcacggagcgcaagcgacagaagtggtatgcgcatagttggatgaatgttgttacgccccacggtcgcgccccccgaatatacgccagaccagtctatcgagtgacagacccgacctt

SEQ ID NO: 184497 - DNA, 580 bp, Arabidopsis thaliana
  unsure (1)..(580): unsure at all n locations
cgcctacgtaagcttggatcctctagagcggcttcccttggtttttttttgctaaccaaaagattatttttcacagatacagcttatgaatcacaatgcatcaaggtgcagagatgggtttcataacattctagccaatcattaaaaaaaaaaaaaacaacagaagaaacaaattattatttncctaatcaaaccgtcgaaaacggatgaaaaaccctncttatacccaataccaataaaagcatatcattctctcaagcatcaatcttgagattcacatccctggaggaagagttcccatcgatgcttctgctttcaacttcatcaaaatggtcttcacgggcgttatcagcgagcatcagagcaaccaaccagaaaaggcacgagtccaaagacacaaaggcacctccaccaagcagaccggtcttagccgtggggcaactggtttctaagtttcggtgaacattacgggtcaagtgaagtttgtctgtaatggttggccagagcaacagaatacaggccagtccagatgttatcaaggcaattgttgaagaacacagagaagctggtgctttttgac

SEQ ID NO: 184498 - DNA, 346 bp, Arabidopsis thaliana
cagagctactcgcattcatccgcacccacctcagcactgtagcatcccctcgattacgcttgtagtcgaggtgacttgcgtagtgtggcgattagcatgtcgacgttgcctatgggtagtctgctcgagcatcacaagtgcgagcgtgtctgtcgctgcggcgcatctttaacgacggaattggaggctgtcagtccgagtaattagtcagcgacagcaataataaatatgtgcagtttgtctcgcagacgtcgtcgagcatcgagagtcgtagagaatgcagttactaccatattgctccaccccatgtctgcgcgtacgccgacgataacgaatcagagctgag

SEQ ID NO: 184499 - DNA, 166 bp, Arabidopsis thaliana
gtgcgcggacatagtatgagagggaccagagaggtgatgctgactgcgtcgcagcgctagcacgcggatacacagatgcagtgacaggtgacgatccgaacgctacgcagtatcacctcgagcacaccgacgatcacatatcactacttacggtgtccacgtactc

SEQ ID NO: 184500 - DNA, 105 bp, Arabidopsis thaliana
ccacgcgctgcgccattcggacgtcctgtatcaattgtatagacgagtaccgcatctcccgtccgcaacagtttatattatgtattacgcgccccgcaagcctac

SEQ ID NO: 184501 - DNA, 476 bp, Arabidopsis thaliana
aatttacccccccccccccccaaaacccaaatttataccggggccgttttaaaaaatttaacccccccccaaccctttttttttttttcccagcaaccttaccccagccttcttccctccccccacaaaaccaacacaccccaactattttaattcccgggggcctccttccccggaaaccaaaaaaaatttttacatccccacacacacattaaactttccatccccccccacccactccttacacccatcaccactctcacaccctctacctccccaacctcacccctaacaaataataacaccttattcatacacccttcaataccacatcccatccccaccatttacataccccccattctaacaacctctcactcccttcaatctataaatactatcaacataacctccaacacaattaatacacacacaaaatactaaaaaccacacccccccctcactcaactcacccc

SEQ ID NO: 184502 - DNA, 497 bp, Arabidopsis thaliana
  unsure (1)..(497): unsure at all n locations
ctttttaaattttactcctcccccttcctactttatcttttaacggggcctttttttaaattaaaccaaaattttttcttctcccttactttccttatttcaaaaaaaattttttcccaagttttccataccaaaaacccttgtgcccaaaataaaatttttctatcccggggggggaaccccctagggggctcccaaaaaaacccctggcgttctccanccctttttttacccgatccccccattactcaaccttttttattaagcccccccccttcctttttctttaataaaaaccccatttggaaactatccccccctccctttttacctcttttaattctaccttcttaaagaactttttttttcccaaacaaaaaaggttaaaaaaagtccccctattaaaccctttctctaacccccccaccttttttatcccaaaaaatccttttccccacaaaccctgatctacccacccttaaccccccctcttaaaa

SEQ ID NO: 184503 - DNA, 718 bp, Arabidopsis thaliana
  unsure (1)..(718): unsure at all n locations
aaaaaaaaaaagcctcattattaaaggaaacgttcccctaaaaaaccaaaaacaaccccccccccccctccctaaaacctctaccccttctaaaaacgggggcaacggtgttaaaaataaatttaaaanaaacaattcccttcccttctcctccccccacatattaaaaaaaccccacctttttctttacttcccaaaaaatactactcctctcctatacccctcccaaaaacataacatcacaacacctcaccacaactcttttttacccttagggagggggtgcgcnccacaaacagggcgcgtcttcccataaatttattctaaangcccaacttcctctccccttcttttngtcctcccaaacaccacactcaccacccaccccacacctctcatacncaactcccctctcccctctccaaaaaaccaccatacaaatacgacatccccctcctcgttaatcacaccataaacaccatcacccctccccccaccccctctcttccccctcctcccttacactcaaaccatctctcacaacaccaacactcttcctacccacccctttatccctcagctctccaacaccctcccccacccaaaatcattctccccctaacaacacacatacatactaaacccctccctctcccaccctcactacccttctcctcacctctcctcaccaactcaacactttctccaccccacacac

SEQ ID NO: 184504 - DNA, 578 bp, Arabidopsis thaliana
  unsure (1)..(578): unsure at all n locations
ccggggngggggggaggattgtcggtcaaaccactgaattaggaaagtctcccctcagtccggcccattcccggtccccccggggtcgggcaatttataaaaactcttttctctttttgctgggtttgaagaaaaaacccccccggctaaattttgcggcacaacaccccccacttctgagtggaaaaaatttcctccttctttttccccccagaaaaacattccctcctccatcttcttttttacgggggcgggggacctcaatttgcgcgttttttttttaaaacaaaaaaatcctttcacaaaaatccatcccccaacgaaacaaaccccggactgcgctcgtttcctttgagcctctttccaaataaataccgggagaggaggcattcgcctccacctctccaacaaagagggcgcccccccccagggggtcgcgaactcacaccccaaccttccacaaacaattacacctcgtctccttcaggggggatgagcggcgaataacacatggggccacctcgtccgcggcccttccaagctctccacccccctctacccttgccctaccaaaaaac

SEQ ID NO: 184505 - DNA, 390 bp, Arabidopsis thaliana
gggcgggtttttttttaggaaaaagaaggggtacattttaaacaactcctttgtggtctgggatatataaagggaacaatacataaactgggttataccttccttaacataaaaaaaacagaaaaacccccatggtgggggggggcctccctttggggttataaacggagagggtggttttaaaataaaaataaggcgtggggtatataataaatgcaggggggggccttcttttttttcctggacaagctttttaaaaatgggtcctgtaaccttctcgggtgggtaacccaattcctaaaaaacctatttattctgggggggggcgtgggtttattgccccaatcatacacacacccccttttttttattaaaaaatccggttttttt

SEQ ID NO: 184506 - DNA, 579 bp, Arabidopsis thaliana
ttcgtgcgcgcggggggggggggggagtatcgccgggtccataccactcatttagggaaagcccgtacccctgcagtaccggtccggattaccttgtccacccccgtgttcgcgggctctaataaaatatattggctcccaatttttcattgagataatcctccttagaaaatacaaaggggttttttcccaatccattcttaaattccctttaccatgtgcttgtttagtcttaccatggaccaacactttgtttttttttttggggggggggggccccacccttagtgatttggatataaaaagggtggctaccacaatttagtatgaccccaaaccttttttcccaagtcttaaacttaaaaaaaattcgaatctcccccccctttttttttgggggcgggacgccttccaaaactgcggggggggagggggggctcatagtttcagagcaaggccaccctcttattctaaaagttcgcccgggggtctttcttctttgtttcaaaaaaaggggggcccacccccagtctccaacaacgcatttctattttcctttcgctggagaaagataaaaag

SEQ ID NO: 184507 - DNA, 184 bp, Arabidopsis thaliana
  unsure (1)..(184): unsure at all n locations
ctacttgatctctaacgggggctttttttttttaaanaaaacttatcattcattttccttgtaatgtacataccatttatatacatggtacattttatttgatacaatttgtaaaactagagggaagattccacagcctttaaaacacaataagggggtaggaaaaaacatattgattcattac

SEQ ID NO: 184508 - DNA, 536 bp, Arabidopsis thaliana
  unsure (1)..(536): unsure at all n locations
ccgtaagggccgacgggggggagtattgccgggtctaaaccatcaattaggggaagctggtgcccctgcaggtaccggtccggaatttccttttccacccggtggtgggggggcactcaatatttcnagatcctctcggcttgttccttcttcgtgcaacgatcccatctttttgtttctccctaggctagattcactactttgaatctcccaactcaaaaaccctccttctttttttttccccctatttttctctgcggggggggggggggacctccaagggggggtgtctcacaagaaaaaaagagggaaaaccctccgagtgatgggcctcctttttcgcgtggtacaaaccgttcttccatcgatctcggttaaggttccctcttaggggccaaaggggcgcgggcataaaagtcttgccgctttactgcggagaaggggcgatgcgggtcacgtgttacctaaccgatgggtgcctcctaattttgccaggcgcctttgcaaataaaaccaccccctgggcggctaacgtg

SEQ ID NO: 184509 - DNA, 461 bp, Arabidopsis thaliana
tttaactgccccttataaacttgacctcctgccccctcctaacttgatcctttaacggcggccgggtttttattatattacacttactcttaggagatcaacataaacaaccaaccaacttaacaaataagaatttccccctatttaatattttttttacaaaaccaatcttcaattccggggggctaaaccaatggttaaaaaaaaaacatactttataacttccaaaaccacttttaaccatttttaaaatcaacttgtttacctcacttcccataaaccaaaaccctctacccttttttgtaaaaataaaacttaaccaccacttctcccaaatcatttcaacccaattcataaacctattaaaacttcgccaaataacccccctataaaaaaaccctaactttcttccaaaaattttttaataaaacccccccccccgtgtaaaaaaaaacaaaaca

SEQ ID NO: 184510 - DNA, 174 bp, Arabidopsis thaliana
  unsure (1)..(174): unsure at all n locations
ttattaaaatttntttttttatttttttttatttttctctntcttttgggaaagaattttttacaaataaaacacaccggccactttggtttaaacatgggccttttgtattggggattcttaactaaaccccgattggggggtgtttcaaaaatttgtgagaaaaacacaaaa

SEQ ID NO: 184511 - DNA, 315 bp, Arabidopsis thaliana
atagattatagcggcgaagggaaggaggagggggggactcatttgtgacacagacccccacagttttatgagagagaaaagagcacgaccacgcatcgacgtcggtctagctattttttaccccagggggggaggggcggggcacaaaatctatgtcgacatacctacccctcttatgttggttcatccgcgtaggagtggcatagcccagatattttaatgcaggcagcccgtgcgtagttcccgtaggatatttggaccagcgcaacaatacactagccacgagcgccacgcccagacgcccgagatcttttt

SEQ ID NO: 184512 - DNA, 464 bp, Arabidopsis thaliana
  unsure (1)..(464): unsure at all n locations
aactttacccccctccccctcctacctgatccttaaccccgccttttttttttattatttctatcaattaaaaatatanacattccttttttttatcaacaactaaaatccataaatatttctccaacccaaaacaacttatcccctatttttaccccaggtgaaaaaaaaacccaaaccactaaatataaccccttgggaaaaatttttncccctacacaaacccaaataattaacccttaacctctttcctttagccaataaacttacccccttaacttaacggtgtttctcaatcccttatcctaaaaaacccttgggaactcctcttccctttacacttctttaaacttaaccaactcccccaacccacaaaaaaacttcactctttcaatcccctacttttattttccgataatcaccccctcaaaaaaaaaaaacccccctcaactcaaaaaacaaaa

SEQ ID NO: 184513 - DNA, 484 bp, Arabidopsis thaliana
  unsure (1)..(484): unsure at all n locations
aaaaaaaatttttttntttttccttaaaaaaaccttcctttcctttntcataaaaacccaatatttccaaaataaactcttttcaaaatcaatacaaaccttaaattttttttataacaaccccctattttttaaacaagggggggggcacccaaaaaaacgggaacccatattaaatatttgcccctttctatcccaaattccttccaaattttttttgtaaaccctttcaaaaagaaaaaaacccttcttttttgaaaaaaaaaacctacaaattcccctacccttacattccttttccccttggtccaaaaaaatcttttttatattcctttttagagcaaacctctacttcatcctctgttttaaacaaataaattttcttcccttcccaacaaaccattttttttatattatcaaaaaaaacaactttttacagaacaaactcttttctttctcccatcaccctttattttaaaaattt

SEQ ID NO: 184514 - DNA, 685 bp, Arabidopsis thaliana
  unsure (1)..(685): unsure at all n locations
tttctattttctcccccacaccacccctcccccccccccccgtaaatattcgcccaacctacaaanaccgactctctgtaannggaaaactctctacccccttccaaataccccttcccctaatttccctttttccaacccacggggtaccgccccaatactaaaaaaacccctaacatcccaccaacaccccccacccccacccccacaaatttcaaaatattttctcctctcccccatatccccttttttcaatccctccccataacccctcccccctaacaaacaagacacaacaacccccttctcctttccccccctttacctttcggtgtgcacacctctcccaatcttttccccctctaaacaaaacaactctctcacctttccctccacattttccccccacccttcccaaacaacatccctatctaccatttacaacaactccaaaaccacttccttttaacttccacaccaccctttttctccaaacactcaccctctctacccccaccccttattctacccccaaccactctcccccctctcttccccccacctttcctctccaattctattcccacaacacacacaaaatacttatctcttataaccacccacccctcatactcccacctcaccccaccactccatccaccccctcaacctccttacaacactc

SEQ ID NO: 184515 - DNA, 301 bp, Arabidopsis thaliana
  unsure (1)..(301): unsure at all n locations
gacctcgcatgcacgcgtcgtaagcttggatcctctagagcgggggggcgggggnncaataaaattttttttttttctatttttttttaaagnccaaatgcaacagaaacaatgttgaaacaaagaccttgtttaatttaaccccatttttccggaaaaccttccggggggaaagctggttttttttaaaaaggagggtattctccttcctggggagctttttttaaaaaagattcaatattccccaaccaattctcttttttggtttgaattggaaagagaagggttcttttaaaaccaa

SEQ ID NO: 184516 - DNA, 533 bp, Arabidopsis thaliana
ccctcccccccccccggggggggggggagtattgccggctctaaaccactcatttagggaagcctggtccctgcaggtccggtcccgattccctttccaccccgggtcgggttcacaaatactacccaatttttttaataaaaagccacctcccaaaaacatccattatagaacaccctctccccacacacaaaaatacaaccaacttctccccctccttacatggcatatcagcacccgcttctcttttttaggggggggggggtccccctggtggcggcctaatacacaaatgctccccgccccctttttttcctcctccgctctttgacccctcctctttccccgttccgttgaaactttcttcaagggaatggctgccgaaacgattgaattgtgcaaaaacaagcacgtttttagaaacgcacctctcctctcggtcccccccgtcctcactcccgcgtttgaaagggaaagggggggatgctcttcaacaccacctctccctcgccttcctgaccgggcgacggccc

SEQ ID NO: 184517 - DNA, 286 bp, Arabidopsis thaliana
  unsure (1)..(286): unsure at all n locations
actatactccctcaccctactaacttgtccttaaacgcgcgccttttttttttttattttaaataataagctttatagaaagtaatccccataattcattactttattttattttactcccattaaggttggaaaagggaagaaaacacccacaaaatccttctcctaacttccggggatcacctnaacaagggggttaaaacaaagaatttttttggtaaaacaaaacaaaccgaccttttttttcatggtggagaaaaaaacctttcttttttaaacctcattc

SEQ ID NO: 184518 - DNA, 532 bp, Arabidopsis thaliana
  unsure (1)..(532): unsure at all n locations
tactaaacttgacctcctgccgcctcctaacttggtcctctanacggcggcccgggggtttaatttattttatttttttttttttttttataaaccaaattttttatatttttcttttttcattttaaaaggggaaaacctttaaaaaaatctttttttttcccccccctcttaaatcccccaaaattttaaaacccgggggggggcgaaaaaaatgggggcccccccccctttgggtttaacctacccttggttcccaccccccccccccgggcaatttttttaactttttttaaaattctaaaagttaaacccgaagccctcttatgtttttacaacaataaaccccccaaggccaaaaaaccttgtttctttacccccggggggaaaaaaatttttaactttttttatcctccccattatttcctgtcccccctccccctaaaaatattttttaaaagggggggcccccccccctttcccccccgttttttcagggacaaaaattttttgaaagccgacaaaatttccc

SEQ ID NO: 184519 - DNA, 332 bp, Arabidopsis thaliana
  unsure (1)..(332): unsure at all n locations
taacccccattacacccccacaattctttaaaccacaccctatttcctaaaaaaaacaacatccccccaatctttcttgggggtggggctataaaaacacaagagggttttaaaaaaaacattaaaaacttcaacaccagaactttcacttccncacattttcctcttttcacattttctctttcaacacaaatcttcttttattcttctaaaaaacagccccctgaaaaagaaaaatcatcttttctctctctttcataaacccaaaaattatattcttttttcttctttcccccaccccatatcccctaactattacaattctcacattt

SEQ ID NO: 184520 - DNA, 489 bp, Arabidopsis thaliana
ccaccctcgccccccccccgcgcccgggggggagaattgcggggtctaacccactcatttaggggaagccggtcgcctgcggtcccgtcccgattccctttctcattgggcgggggtaataaacatataaagctttttacaccgtgttaaattatgctcccggccacggacctatttccctgtttggaaacgaagctgttttcaacggggaagcacaggaactttaggaaccaacccgatcttcccgtgggggggtctcacacgggggggttaaaaaaaagagttttgatcgtaccccaccaaacgcaccccacattttttgtcggggttctacccccccccccccacgggcaaacacggggggcctgggattttattttatcatgggcggaagagatccacccccacaactatagcggcctctttttggttgtcaccgaaaaccaccccgtgcgcgggaaattttcaaaacatgccccccctcggctc

SEQ ID NO: 184521 - DNA, 563 bp, Arabidopsis thaliana
  unsure (1)..(563): unsure at all n locations
cacccacccccccccaccccccgggggggtaatatcgccaactctaacccactcatttagggaaactcgtacgcctgcagtaccggtcccgaattcccctttcaacccacggctgcgggtttntttatataccatttttttccccaccaaaaacaaaaccactaaatccagagacacattttataaatcccacgaatccctcccccaattctaacaacctcaatcttttagggttgcccaattttcaactctctaggataaactttttttaagggggggagggagaaaccatctggggtccttattaaacaaattttcaaaacgcaacctcattttgtttcccatcccttaccccgagaaacccttttcttcaaggtgtgtttgggtttcaaaatctcccttccattgctaccacccatcatcggcgcccctcttccttaaagcattcttccaacaggctatccccaacggtgtccgctcacccccccaccccctttcttccctcactaggcctctcaccccctcctaatcccctaacccccaaggttcatcctcgagaatct

SEQ ID NO: 184522 - DNA, 530 bp, Arabidopsis thaliana
  unsure (1)..(530): unsure at all n locations
cttttttttttttttttaatatgaaacttttacattttattccaaatcaatactctaaaaaacaacaattaaatccttcaaaagagaattctacccattcctacattgttaattctcccttcaacctaatcaaatttttgaaatggggggggggaccttcttttggagacttnaaaacaaaaactttgtaccccccccccaaatataaaaacccctcttaaacaccaaaccgggaccccccttttccatttaaaaaacaatttttcccaattaacgttccacggctgttctcttcctcaacaaacatttactttaacatacccaaaatcttcaaagcctcccgatttgacaaaatcttcattcctaactcctcttaccccatacctaaatgttcccttcaaaaaatgcgcagtttgtatacctttttgccataggcaaacacaagctcattctttcttgttaaatttagaaaacacccatagcgatttccgcaattgtcgccatcccacatctgccaatactccccttct

SEQ ID NO: 184523 - DNA, 393 bp, Arabidopsis thaliana
  unsure (1)..(393): unsure at all n locations
taccccccncccgccccccccccccctaaaatcgcccactactaacccaatccattatacggaaagctcttcccccctccaataccaatccccaaattaccttttccacccaccgtgtgggggcaaaaaaaaaaaaaacactcctattcttacttaacccctctatttccaatatcccttataaatattactctcccccaacacaatcacccctccccaacctctcccacttctactctctatacaaaccttataacactcctaccacaaccaacactacttcttttcatggggtggggaggccacccaccaacctgagactccacaaaaaaaaaaaatactttattcttcctccctacttcttcaccctccctcctaacttaaccattacaa

SEQ ID NO: 184524 - DNA, 414 bp, Arabidopsis thaliana
  unsure (1)..(414): unsure at all n locations
ttttttttttttttttctnataccaacagtcctttattcaatttcttccctagaaagggtttattaccctctaagtttgggatcatctattaaaaacaaaatctctttaaatccaaaatacatatccttaacatttagaattgtcttctaagacggggccccnaaattaaaagcgtggccaaaaaattcccttaaaattccccgtgtttaactttaccaccacaccctgtccacaaccattaaaggctttttttttaccctttgttttaaaaccattattttttcaccccctatacctaccaaacgattatctttttttaccgttacactccacgtttctcttttctttacttcgtctacacctccacgattctaaaacttttcctgctttaaaacctttttttttttttgata

SEQ ID NO: 184525 - DNA, 370 bp, Arabidopsis thaliana
acttaccccatccgcgtcgtagcttgatctctaacggcgcctgttttttttttttctcatataaaattatttattaataaatattgttactccaaatttaataaccctacaaaccaaaacatattaaaaaattccttctccttactggggatcaactcaaatacttctttaaatcttgtgcatctaatgtctaagcttttgaatcctccgaaccttcggattcccttcacccattacgagcacttaaaccattctcagcccctttgaaatattattatgaaataccattatggaaataggccgttatgatatctatccccaataaggtttctccaaacctcgttctcatccttaatttcctctttcctcc

SEQ ID NO: 184526 - DNA, 358 bp, Arabidopsis thaliana
ttctttccccttcttctctctttagggggcttcaagttcccaatcctggttttggggtttaggacaaaacacaagagaagaatgatgtttggtttaacacaaaaccatgacttttgaaccatcaaattctaatttaaaacggggggggctctcttcaaagggggtgacattcataaaaaaaagggttacccctgcctggggaaccttcccacgcttttaaatccccaccatgaaaaaccaagcttaagggcttggaagtgaggaaccccccgtcctccttttaggagatttttaaaaaaaaacaaggggagaaggctttacggctcacaaaccacttttttcgggagataaaaaaaca

SEQ ID NO: 184527 - DNA, 528 bp, Arabidopsis thaliana
  unsure (1)..(528): unsure at all n locations
aaatatacaaaaccccccttaagctcangccccccccttaaccaaaaaacaaacctttaagggaggaaaaaataaacccactgtggatttggccccgccttccaaaactcccataacaaaagatattctgttacccgcgtttttaaaggaatctttcttccctcggggtggagaagaacctcntcttaccgcctcctcataaatctaaaaacaccccttcacccccgatttaccttgcccatcccctctccaatcacctggaatcctgctttttttccttaatttccccttcccggtggaaccctctctttctttattctaaaccaaacctcccgccttttttttcctcccatacttcccccccttccttccggttttttaaaaacaacttctcccccataaaattcttatccccttcccccttttttttcccccagtacccccttcttttctttcttaatgcctcctcttcctgtgttggaacctcggaaagaattttttaacccttctttttcttcttcccccaat

SEQ ID NO: 184528 - DNA, 548 bp, Arabidopsis thaliana
  unsure (1)..(548): unsure at all n locations
ggggggcacaggggggggagtataccccactctatcccattatttaggaaactcttcccttcaatcccttccaattcctttcacccaggttccccccaaacaaaaaatttcaaatctaattataacccttacaccaccttatttgccctttcttcaaccaatttttcaaccttaaaaaaaccaaaacacccccttccaaaattttcttccccccccaactcttatttacttgcttggaggaaaaaaaattcttgtcnttaaaaacattaaattaaccggaaaatttccttccctcaccctctccaaaaaaaatttcccaccccaaaattcttttttcccacaaaaatcccccaaaatttcttttcccctttttctttcaaaatattccccccccctttcttcaattccttcccttccttcccaatttttcaaaatccccccatattccaccctatttctacaccacctctcctcaaaataacaatttattcctccacccaaccctccccacaacaccccacttctccaattcgtcatttcccccctct

SEQ ID NO: 184529 - DNA, 586 bp, Arabidopsis thaliana
  unsure (1)..(586): unsure at all n locations
ccaccactcccccccccccgccgcgcccggggggtaagaaatcccgaatacaacccccctcaatanaggggaaaaccggtcccccccccacaaaccccccccccaattaccctttcccaccccgggttccggggactcaaacaaaaaaacattcccccaccctaccaatattttcctttctcacaaaccctttataaaccacaaaaccttcttcaattacattcatttcatccccaaaccaaacctataaaaaccccccctcactcctccttaccccacaattttctattaaagagggggggggcccctcctcccgcgtcgcccctaaaaaaaaacaaaaccccatctcctcccccccaaatcccccccccccccccactgcatattcccacacaaactccacacccatccttcctccaccaaccctcccaacaaacctccacaccaaaccaccacccaccaaatcgctccccccattatcaccccacatatcttttacctacacccacccaaaacaaccacccccccccctaacccaccaaacaccctctaacatctactacctaacaccacaaccaccccctct

SEQ ID NO: 184530 - DNA, 715 bp, Arabidopsis thaliana
  unsure (1)..(715): unsure at all n locations
cccctcttcccnnncgggggccccccgggggggtagatattaccccagctactattcccacttaattaaaggggaaagctcgttccccctctccggtaacccggtcccccaattccccctttcccacccccggcttnccgggggatntacacataanaancaccctttacctttatccaaaaaaagggaaaagatgtnntttgtcttctttcatccaaccaatcttttaccccttggtgccccggttcattattggggttggtaccctaccctccattcccccttttccaaccaacccagattgttttaacccccaccccctccattttttccttttggtgggggggggccccaaccccacccttgcgaggtttccnctaanaaaaaaaacacaacaccgggcaaanganaacccccccccctttttcccccattctcttttgnccccttgtgtaaaccaattttcctccccccccttctaccccctccctttttatcccggggaatggccccctatttggaaaaaattttcttccttggccccccccaccccttaaaaaacccctctttcccttccccccaccggttttttttcaaaaacttacccaatatccaaggcccaaatacactttcccaccttttttcaaccactttcccctcgaacatactctccccttttcctccccgcccttttcgaggcccccaaatttccccc

SEQ ID NO: 184531 - DNA, 383 bp, Arabidopsis thaliana
  unsure (1)..(383): unsure at all n locations
ccttcatattggaacttccctcgacgccgatccttcccaggtcgacctataaacctaactttctatcttttggtttacatcacattttttactccccgatcctaatgatcaattttcttaccttcaaatctccttccaaattttttctacgatctttctnncaaggttaanttaccacacatatnatagttacccctatccatatactaggtggatatttttaagagtaaatctccaaaaaatttcctacatttcctgttaacctacacacgaaaccaaaaaaaaaattacccaaggtgatgcatcttaacttattcttattggtttctttcacccatacaataaaaacccaaccttccccaatacaatactatttccaaaaa

SEQ ID NO: 184532 - DNA, 447 bp, Arabidopsis thaliana
tttaggggaagctggtcgcctgcggtaccgtcccaattccctgtccaccccgggggtgcggggaattaatgatcacccctaaaaaaaaatctacaaacttcctgttctgggccctaccttaaacttagaccaccacaagttggggttttccttatttatggccaagggttcaaaggtaatattttaaactgggggggggcctctttttgggggtgtgggtaaaaaaaaaaaaaaagatcccctttaattccttttcgcccacccaaagtttcattgggttggaaaaaaattttgtgggagctttttttttctttggaatttttaattccccttgaaattttttgggggaggggcgcaaaaccttttggaagacgttttttcgccccccctattggcttttcacatggaacggcccccagaaaaaatagtttttttcccctgccattt

SEQ ID NO: 184533 - DNA, 496 bp, Arabidopsis thaliana
  unsure (1)..(496): unsure at all n locations
ttacgtgacctatataaaactattacctcctgccccgtacctaagcttggatcctctagagcgngggggccttttttttaaataaattttnttttttttntntttttttttnntntctttttcccgccacaaaaatcttttaataatataactttaagagagagccgtgaaaaccataaacaaaaactaaaaaaaaatcatttttaaatttccaaccgggtgagtccccaaaaattttgcaaactttaaaaaaaaaactgaaaaattaancccttctaccccctccccgggggggcacgtgaatcttccaccgttaaaattaccaaacctcacccaaatcaaaaaaaaccctttaaaaaaaaaaccacccaaattttcttggggttaaaaacggggaaatttcaaacccaaaaatttttttttttttcccttcttttcgccggaaacttttatattttttcaaataaaaagttccaaatcgctaataaaaaaaaaa

SEQ ID NO: 184534 - DNA, 297 bp, Arabidopsis thaliana
  unsure (1)..(297): unsure at all n locations
aagcttggatcctctaaaccgggcgccctgtgttttttttttttanaataaaaccanattgattcaagtaaaggccacacaaacctatatatgtaaatcaggttcacctctcaaattataggtctacctgaacataaacgaacaagtgaaagaattgcatcaaatcaagtaacgggggggggatataanagaatctggataaacataaatacctgattagaagaacattggttcctttgtctaaacaagtagatttcataaaaaaaaacttaaacttgtcaatcaaaccaataaaaa

SEQ ID NO: 184535 - DNA, 188 bp, Arabidopsis thaliana
aacttgacctcctccaccctactaacttgatctctaaacgggcgccttttttttttataccaacaatgtgtatttttactaaaaattctctttttataatctgtttcatacccccccacactaaaaattaccaattcatttacaaataaaagggtatccctttcttttaggggttacacttacatgga

SEQ ID NO: 184536 - DNA, 583 bp, Arabidopsis thaliana
ccctacctaaacctgcatcctttaaaacagggggccttcttttttttttatattttaaaaaaattccctttttcaatattccaaaccaaccctatttcctaaaattaaaataatcctaaattacaaactttcattcttccttaaaacttaaaaaatccctcataaaaaaaaatttttttttctcccggggggggggaatccaccagaccgcccccccacaaaaataatttccaaaaacctcaactccttttcacccctaatatccctcaaccaacaaaaatttactctcctttcaaaaccaaataataccctttcttttcttccgcttacactctcaacacccgttatccacaaaacaaccctcttattcattcgccgtcttcttctctctttcttctctaaaaaataacactcttccttctttaaaagccttttttttaccaccaccacattctaaaaccctctcttatcatataaaaaaacaattttctcatattcccccggtgttaaaacaatttttacccaaaacaacctttcctcacccaacacttcctttttcatctaacaaataaaatctactcca

SEQ ID NO: 184537 - DNA, 439 bp, Arabidopsis thaliana
  unsure (1)..(439): unsure at all n locations
ccccccccctttccccccgccccgattttttttttttccccgcgggtgagggggggggaaaacacaaaaatctcctttttctccttctttcttctttccccttttcacacggaggccagcaaaaactcgcccgctcccacaacctcgctcccccatatacagccccctctttcttcaccacacccacgccttccttcttccccccaccagacaatttttttttcaggagagatgggcgnccncncccccggcgcgcctctcaaaaaaaaaaaacgccccactcctccctccccgccggcccccccccccccctcgccccccaacatctaccactctcctccaatcccccctctactacaactatcaatcagcccgctctcccccgcctagcacacccgcttcaccccgttacaccgcccttctctcctcctctcagccc

SEQ ID NO: 184538 - DNA, 598 bp, Arabidopsis thaliana
  unsure (1)..(598): unsure at all n locations
tcccctccatttcccctccccttttccccctggggccccgcccccccacaaaaatattttatcatcatccccttcccctctctttctaaattaatttttttttaaaaacacccatttttttaatcttcgcccttcataaaaaaaaaaaaaaaaaaaaacccccccccccttttttaaaattcccagggggggggccccccntcctttgcccccccataaataatattttggcggccccctaaatttcatttccctcgccctccttttttccaccctccttaccttaaaaaaacccttggccttccaccccattttaatccctttcaaacaacatcccctttttccccacttgggttaatatccaaaaagaccccgaaccatcccccctttttcaaaatgttccccccccctcaactccccaattcccccccccccctctttaacccaactttttaccgccccgcgcgttttgtttttctttccccccatctcttacccctcttcttctcttcccaacgctcttctaccccccgccttcctttaccttcctttcgccttttctttctctccacccttctcccctcttttcccccactaa

SEQ ID NO: 184539 - DNA, 642 bp, Arabidopsis thaliana columbia
  unsure (1)..(642): unsure at all n locations
ccccccccccccccccccccccccccccccgcgggccggggaattgtttttgcgcagccctcttccccgtttnccgcgcccncaccccccccccccccctccctcaccctcccccccccctctcccctttccccccccctttgtttttctcttttccccaccacaaaatcccttctttcnctcccctccccccccccctctccccacttaccctcccccccccttctcttatcctaccttttttcccctttcccccccccccccctcccccctctctcccccccaccccccccccccctcccctccccctacacccccctttttttccccccggtgtttgtccccccccccacccccccccccacaaaacaacaaccctcctccccccccccccccccccccccccccccccctcctccctccccctccctctcccctcccccctaccccccccccccccccccctctcccccccccctcatcacccccccccccccctccccccccccccccccccccccctctcccccccccctccccccccctccccctcccccccccccccccccccccccccccctcccctcccccccccccccccccccccccctcccccctccctcccccccccccccccccccc

SEQ ID NO: 184540 - DNA, 279 bp, Arabidopsis thaliana
ctctatacctctaagagctgtccctgcagtacgtcgatcagtgaccacgtcgcagtgtttgcctgtaaccgaattttggttcaattaaaattggtaaatggtttgttaaacaaatttccggattttttaaaaatttttttggggtattggaaaagaattttttccccaaagggaattttaaattttttcctttggactaaaaaaaaaaattgttgaaaaaattagttgccccccacaaaaggggttttttttttttcccttttttttgaaccactcccc

SEQ ID NO: 184541 - DNA, 142 bp, Arabidopsis thaliana
ctcatcactacttaggaactttccctcagaccctcccattcccggcggccaggcgtcaaaaattctatattattgttgcaacaatcctcttttctccttatccgaagtatcacaaaaccctgtaccgtcttttctctccccc

SEQ ID NO: 184542 - DNA, 370 bp, Arabidopsis thaliana
  unsure (1)..(370): unsure at all n locations
ccccccaaatggtttcctctttcccccctccccttatttntttctccctcccaacaaatnccctcattttacctaatttaactttttgaataacaatccccttattaaaatcccaaccactcaccatccttcttattccccgttcttgatgtaaaaatttttaccttttaccccctcaaattcacttaaaccacctttcttcccccttctccacaaaaactctcaataattataacacctcctctccccccatgcaaagcctcccccctcacacacccttcctcccctctaactccccccctgccttcctctatttccacccacccacactcctcccatctcctcccaacacccctctccttctctcttt

SEQ ID NO: 184543 - DNA, 290 bp, Arabidopsis thaliana
  unsure (1)..(290): unsure at all n locations
atttttaatagtaaatacaaaacttcttcagtttaaagatttccttaactttggggtcaataaagttggtnaaaaaaaaaattagaaatgtcctctaaatgttataacccaaattaaaacctcaccatgattcctaaacttctccaacctttaatcgggaacaattttaaaaaattcctttccaaacaggaattccaacccctaggacttctcctttttttattgtaaaagtcttttcctccatttcnaaagggtctttaagaatggttggaacccaatgaggccccaac

SEQ ID NO: 184544 - DNA, 496 bp, Arabidopsis thaliana
ggcgcatacccgcgcgcccggatagacgcgtgtagatccaaaatttttcacaaacgggggcgacggcgttaaaataacaagaattccgctccctcccccataccaaccaaaactaacagtcacccgccctcccaacaaaataataaccccaacatcatttcttatttttccagctaatcctgagtcccacaccccccaagcttccgattttttttcggcgggggcggggtgagatctgctacgtggtgtcatacgattttccccattctatattacaggctgtcctcgccatctaaaactcctatctaattactttgtgtttaatcagtgttatccttcacttcctaagtaagtatgatttcatactactcaacatgggtggggtacctttgcgatggtcgaccgcatcgctctaaaaaacatgaaacaatgccacgagacccactaccaattactccttcgttcttcgatctccaaaacgcgaactcacaaacca

SEQ ID NO: 184545 - DNA, 522 bp, Arabidopsis thaliana
  unsure (1)..(522): unsure at all n locations
gcaagcacgcgtacgtaagcttggaacctctaaagacgggctcgcctggggggttgggtttccaccaaaaccaaaacanaaaaacacgaggggacgcaacaccaccccgaagaaacaccgagcaccggacacgggcaaaagcccaaaacgcgcaatacccaacccccgagcggggagaacgaaacagaaacaacacacagaaaggctttattttgggggggggaaactcccaacaaaccaaaagagccaggaaaaaccagctcgaaaaaaacccacaatgagggcacaccccaaacaacaaagccccaaaagaccacccagaggggacggccccaggagcccgcggcagggggggcgtggctcacccacggaaacaacagaacggacacaaaccaccggggggaggacccgcaaaggacccgaaacggcacgcccattcccgcccagaccacaaaacccaaatagcattcccccgcccccacaccggggagaaggcccccgcccccaggtaaacccccgcgc

SEQ ID NO: 184546 - DNA, 547 bp, Arabidopsis thaliana
  unsure (1)..(547): unsure at all n locations
ccccccccgagtttggggggggttacaacccaaaaacccccccccctctcctccngccccnngggggcgggggcgcgcggggcgtgncnngngggttcctggggcgctccctccttccccttagaggagaaattttttttcccggagcccccccccttttttttttttaaggggaggaagctttctcacccctttttcttcttcggggggggggggcaccccccccgggggggtccccccccaccacgcaaaagaggggggggccccctttttttttctttccggcgggcccccccccgtctgggcccctccctagaaaattccccgggttttgagccccccccccccgcccttggcgccttttgcacccccttctctttttttgggcggggggggggggcggcggcccaacccccgccgcctcctcccctctcccggggggatctcaccttttcttgggccgcccgccgtcccgggccgcccgccccttttctctcgtccccccgggggggccgcccgtcgcctcgtttcttcctcctccccccgg

SEQ ID NO: 184547 - DNA, 381 bp, Arabidopsis thaliana
  unsure (1)..(381): unsure at all n locations
aaagcccgccgcccccgggggtatataaacactcttcaatttactcctcccctcctacttatcttaaccccccctggttgttttaaaaaacaaaactttttttaaaaccctatccaatanaacccctttttttttaccccaatttcatctcaaatctctcatcttaaattttaccattaaatttccataaaaaagggccccttatcaattcttttacaaacttggggggttaaaaattttaataagcttttctccaaaagaataaaaaaaactccccaaaaccataaaacaaccccccctcttctttcaaaaaaaattctattttttttttttttttccaaaacccccaccctttatttctaaattaccccctcccccccc

SEQ ID NO: 184548 - DNA, 482 bp, Arabidopsis thaliana
aggaaagctgtcgcctgcagtacccgtccggaatcccgggggggcgggcgtcgagaaattaaatagaatttccggataaatctcttattcccggggcccctttatccgttacaatggaagatttattagaacttcccaactggtaaccatttctttaccataaatatactacgggggggggtcttaccggggcgaacctataaaaaaaacctaaaaaaatttaaagtccttctaaaattttggctccgggattgaaactgcattaaaaaaatgcgtataggaagaacaatttttttttaaaacatcccaggtgtttttgattgaccttctagagggaggccattggatttcaaaggggtgctttaacttaatgtctaaggtctttgggggataatacattttttatgggaaggtaccccctaacttttttagccttaaataacctactgggggctgtgcccttcattttaaatttaaaaggg

SEQ ID NO: 184549 - DNA, 485 bp, Arabidopsis thaliana
tgcgcggggggggggggggggggggactattgggacattcttcaaatgtggggggaccgcccctccgtaacttaatccttaaaagctccccttgagttgggggtttaaaaaaaaaccacaccctttccccccctcacacccgggcaacagttccgccccactattcccctcaacgcgggcgagacgtgacatctcttaaaaaaaaaaaaccaacgccaccttcttttttttaggggggggggcttcaaaggggggtgtttaagacacaatcccccttccgtcccgcccggcacccatccggggtcttgccccttctgcaaaaacggtcggccggaacaccaacactcttggccgcccgaaaaaagaccaccccgctgaaacctcccacacgggcggtcggaacgccccagcacacacaacacgcgcctcgtttacacgcgacaaaggcgaggccgcagtggcgcataggagagggggggggagat

SEQ ID NO: 184550 - DNA, 586 bp, Arabidopsis thaliana
  unsure (1)..(586): unsure at all n locations
gttgcccctccggggccggggccctatttcccngggggggcgggggggtgccattaatatttcttccccaaaccaccctcccacttcaccccttcttttaaaagagctcggggcnccaagggtgattgaatggcgcggctcgtttatctctcgccccgagaagaaaccaatctctgtattggttgtgctattaaaaaacataaaaacaccccttcctcccctggggggtgtggggaccccccgggggggggaaaaaatatattaaatctggggttttcccccccccggcccccgcgccaaaaataaactcccctcttaggcgttttttccctcgtgggagagcgctgcgccttcccccgagttttagaaaaaaaaagaacccctttccccagggggtcgtcctacactttgaaaccgctgttccctccctcgctcttacccgcggggggggctttttttgggaggcgacgggggtgctgtcccctcgcctgtcttttctcttttaacgcactaaccgtgggggcggttccgtcttaaagaacaacacactccttgtcctctctgtccctcagggtgttgggtcggc

SEQ ID NO: 184551 - DNA, 641 bp, Arabidopsis thaliana
ctctagcttttaaagcgaaaatcaatatcggcgcaaagcatgcccactccatgtagggcccttggtcctccaatccctgcattgtactccaaccccactgatatatgaattgtcctacatccaataaacacgaatactctaccataagcgaaagaccatacctacaattgaggccctcttaggcaaccatttcaccaacttcacaaaagcccaaagaattcattacgaaatctttcgctcccctcacccctccctctccgtaatataacttttaccacactccaccagtcaaacctcaaccaccttcacaacacatcatacttataaccccgcactcccacactcctcacccctctcacaccccacccatctactacccccgtaactaatacaccagccaccaactactatacacctcaaatcacaactctctatcctacacctctctttgtgctcttctatacccacctcaacatcatcaaccataccactaattaacaaatgcactccgaccatcataacaatccaccaaaatttcagacatacatacacatatcaaataaaacacccttctctctacatcccatacaaactcgctaactcaatacaaatctcccacctctaatataatctccactcac

SEQ ID NO: 184552 - DNA, 416 bp, Arabidopsis thaliana
ctgtccctgcagtccgtccgattcagtggaccagcttcgtcccgcgtcgaaagagttagaaaattgggatgggagggtttaaattttcaatttttggggttttaaactaaaaagggtttttttttctttttttttttaaacccccttttttttgggggttttttgggaaaaacacatttttttggatttttttaaaccccctttggttttttgaaaaaactctcttcctccccaaaaaaaaaatttttaaccctcttttttttttttttttttatttttaaaaaaaaaaaaaaaatttttttctttttggggggtccccccccgcgggggagaaaaaaaaaaaaaaaaaaaaattttttttttttttgaggaaaaacaatttcctccggccgcaaaaaaaaattggtgggggaaat

SEQ ID NO: 184553 - DNA, 518 bp, Arabidopsis thaliana
ccccttaacttaaaatttaaaatccctctcacaaccccccccctttggttttttttttttttttaaaaaaaccaatatatacaaaccctatctcccactctaataaaccctcaaaacacaacaatacactttccccctcttctccacccccaaaccctttccaactacctaccaccccctcccccaccacatcaatccatcttctcaattaccaaattctccacaaacctactttacacgcttccataacaaatctctcccaatcttgagggtcgtcccctccttcccacctttttcctctctatccttcaaaaaaaaaatacccacccgccccttttatccccctcactacaccccaccccccaatttatacaaacacaacctttccatttatctctacctataacaatacaaacactcactcccacacattctcaccatcccccccacaatctttactatctcctgcacccgcctactctcacacaaacatatccatcacaccaccacacacactc

SEQ ID NO: 184554 - DNA, 458 bp, Arabidopsis thaliana
gggggcccgcccccctgttagcttcatccttcaactccccctggggggggggggttaaaaaaaattcctctcttcttctcctcctgatcgggggcctttccccgcggagagtttgtttgcggttttggctgcgggttcgaattttttcacgcgggttggggcgagaccgtaggcggcttttttttcggggggggggcgcaccatgggggggcatataaaaaaagtctcgcggctcttgtgtgcctgttgcgctcttcgcgtgggggggccgtttttgttttcgtttttcgctgtggggggtgggtggggggctcactgggcgctgtttttgctccgtgccgagcgcgctcttttttgttgggtacccaccgtcggtttgtcgtttggtcccggggtgctgggtgtggggtcggtgcgcgcctcgggttttcgtcggggccagtggcttgtttttgtgt

SEQ ID NO: 184555 - DNA, 513 bp, Arabidopsis thaliana columbia
  unsure (1)..(513): unsure at all n locations
ctccgctctcgctcgttctaccggtttttccctgcttcttcccctttggcctgcccccctagtattcgccgcctctattcgactcacttagggaaggttggtccgcctggcgggtccgggcccggaattcccgggccgnnnnnntttgtgtcccaccaaccccgaatttaggtttgggtttttttcccgccccccggacttttttttattaaaccccgaattttccccctttttttgggggggggggggaaaaaacccttccggggggttttaccccccccctttttgggngagggtcccccgggctccggntttttttttccggggggggtttgcccccccccccggggttcccccccccccncgtgtcccccccccccccggggggcccccttttttttttaagaccccccccagagggctccaaaaagaaacgctccgcgggggtgtctttttttattttatcccccccgggggggggggggnccnaaaaataaattaatttgtaggggg

SEQ ID NO: 184556 - DNA, 244 bp, Arabidopsis thaliana
ggcgaaaacaacgcccacgaagacgagcacaagcaaagaaaaagctttttcgcgtggtgggggagggggagtaaacaaaacactccgactggatacctgtaacaggggctggtagtagctgaatctcacccccaccaccaaaatcagcacgcgagacgctatacgtacgagatattgtcgacgtcgtcgtttgcgactgggcggggcgcgctaggcgagagaaggacctttttttttctcgtgc

SEQ ID NO: 184557 - DNA, 607 bp, Arabidopsis thaliana
aaaaaaaaaaagggctcttttaaatccccccccttcagcagcgaaaaagaacctcaccaacaaaccgaaggcaccctttatctccggggggagtgggggaaaaaaaaaaccccagccagggcgcgtaggaatagcacacctaaattaataacaagaccgctcaccgactcatacacagcgcattcatcagacgactgcgggaacgatacttgcatagaagccccccccattctttttaaataagggggggggagaccccaccatcggcccccccgcaaaaaaacacctcgcatacctagccaatcgcccagcacgccgttcacaaataatcctcctgcgcgtcactccccctccgcacaccaacattcaacaaaactaaaccacacccgataccccacacactcctcttcacaacaacacatatcacacatcttatccacataccacataactccgccactgatcacagagtactacgtacacctccactacacgcatcgtcatccatacgtatacctaactttattacaccggaaagtcgctgttcaactatgactgcttctcgcaactcacgtccaggataccctgttgcccccttgttgggagt

SEQ ID NO: 184558 - DNA, 366 bp, Arabidopsis thaliana
gggaagctggctccccctgaagtacccggtccggaattcccaggtttaaccaagcgttccaacacttacttgtaaccaccgcgcaaaaactgggaaggttacttgaagtttacctctgatgtaaaatatataatagattagcaagctaaacagctacctatgtgtatcctcaatgcgttgaagaggagagaaaagaggtcacggctcaatgggagattgtctgtgtagcggagtgtcctagcacctataccctttacataattgaagataataaactggatgtcatgtatagaaaaagaaaaagcgccaactcttaactatgatgacaatgtgccataacagaagtatgcctatgttttattacaa

SEQ ID NO: 184559 - DNA, 575 bp, Arabidopsis thaliana
  unsure (1)..(575): unsure at all n locations
tccccccccctttttccccngggggacgggcggtaaaacaaaaaactttttttttttccccttnctcaaaccacttaaaaaanaccccccctttttttctcattccacttcccctctttataaactcctcccactcccttttccttttaaaacccccaatttttttccaaaagggggggcccccnngggcctttccaaaaaaaaaaccccccccccccttctttaatcctcaaacccgtcttcaaacttttattctcacaaccctttccctcccaaaaaatacaaaagcgttgcttcccccacccacaaccagacaatggcccccctctatattttccataaaaccccccgccgttctctcttttttgagaccttttcaccaaaaaaacccatcccccctttttctcttaccatctctgcctatcaacgcttttccttctcccttgctcccctcactaatttttacaacaccctaaatctcctccccacacccccggctctccttcctcatttttttccttttacatacctncactccttcctccctcttctctcctacaccctcnctacccctc

SEQ ID NO: 184560 - DNA, 458 bp, Arabidopsis thaliana
  unsure (1)..(458): unsure at all n locations
ggggggccccccgggggggggaaaaagcaccgtttcttttttttgtccttttttgtctttggagaaagcccccttcacacaacctcccctctcttttnttaagagaagatgtgggaaaaatactcgcgggggggttgtgttttaaatattataaaacgcgcgtttgtttttttctttctttaccccaaactttttctcctttcgccggcggtttgttaaagagccctctatatctttcgcccctctttaaaaccccctcttcccctctttttagggggttttaaaaaaccccatggtggggctctttttttgccccaggttttttttttttggggctcttttttttttgtgttagccccgtttttgtgttttcttttgggttggggggggcggcttttttttggcccttcttcttttgtgggggcacggcgggctccccccggcgcggtttttttctt

SEQ ID NO: 184561 - DNA, 119 bp, Arabidopsis thaliana
  unsure (1)..(119): unsure at all n locations
atttagggaaactggtacgcctccaggtaccggtccccaattcccnngtgggccacgcgtccaataaatttcantacctncaactcctttttctcaactttccaatcatatttctcaat

SEQ ID NO: 184562 - DNA, 660 bp, Arabidopsis thaliana
  unsure (1)..(660): unsure at all n locations
ccacctcccctccccccaccttccacccgccccccccccggcaattaatttagagacaacctctcagcatatcntttgaccgccccccttccctccttaccttaaatcttttcttccttttcaactcttcccccctttggtgttgtggactttcaaacaaaaactcacacccaatctccttccccttttcttcattacccacacactttttaacacaattcttttctctttccacccccactccctagctccttttccccctcttcaacacaaaccatccctatctcccagggaccaccccccccccccctcccacctcccacccccctttttttttcccgggggggggccccttttttttggggggtccccctcaaaaaaaaaacaccctcctccctcccaccttttctttctccccccccccccctttcttgcctttctcttcttttttttccaactctttcaaacggatctttttctaaacctttacaatttgtctcctccccccatctcacccccccacccccctcccacccacctcccctctctcttcccttctttcttgtacctcccccccacttcatcttcctattcccccaccctcttttataatccgccacacctcccccccttctttccacacacaactcgccctccccc

SEQ ID NO: 184563 - DNA, 183 bp, Arabidopsis thaliana
caggtacccggtccccgaattccccgggtggacccacgcgtgcatgtatttctcactcactcgccgctttctcttctcttcttctggttaacttctctcctaagaataacaccactgcatgtttctctcttaagacactccaaaccatttctctccaaaaatagtcttctccttctggcgggg

SEQ ID NO: 184564 - DNA, 163 bp, Arabidopsis thaliana
gccccccgcaggacccggtcggaatttccgggtttatccaccccgtccactccttctgcttgtttatatccacaaaacggagcctccgcgttaaaggatagacgaagaaacctttcgatttcatctacatcactatactcgatgcatataattcagtcgctga

SEQ ID NO: 184565 - DNA, 316 bp, Arabidopsis thaliana
  unsure (1)..(316): unsure at all n locations
cctctactgaccttaccccccttgttttttttattttttaatccccccacctttagatagaaattaattatttcatcttaaaagaaatctcctaacttttagttcaattttacacttcctttttggagaataaaactataaatgagggtggtncataaacccccccccaaaaaaaaaaaaaaacttcctccctccctctttttnttggcaaccttatatgatcctctttttcctccccaaactctttcattatcagctttttgttaccattcattatgcccccccccaaaaataacataatccatccccccctttt

SEQ ID NO: 184566 - DNA, 249 bp, Arabidopsis thaliana
  unsure (1)..(249): unsure at all n locations
tgagtttccactctacactctaggagctgtcctgagtcgtcgattcgtgacactcggtttgtggacgtacccccgaccatgggtgggtttccttaaaatttttaattcccaaactacagtnnttcgggggaaatacaaaatggttttaaacttttttttttttaaaaaaagggggaaaaaaaaatttttttttaaacgggggggggtttttttttttaaaacccccctcccaaaagaaaaaaagccctt

SEQ ID NO: 184567 - DNA, 255 bp, Arabidopsis thaliana
gatcgcagcttatacactattaggagctgtccctgcagtcgtcgatccgtcgcacgcgcagtatacctactaaatatgagactgggagtgtcctggcagggctgacaacaagttaaggacgtccctaatcgaaaggccccgttaagggggggaaaaccggggaattccccggttgaaaaaccgttaatttccaaaattttttcgcggcaaaaccctttttaaaaattttaaaaaaactttttttttttaaaaaaa

SEQ ID NO: 184568 - DNA, 456 bp, Arabidopsis thaliana
  unsure (1)..(456): unsure at all n locations
cctcacagctccgattagggagcccgggccttgcggtcgcaccgaatacgtgaaaaccatccatagcgggagcagaaaacggcaagtataggggtgcaagaggacatatccgcgagtggtttaaaacagaactttcgatttagacgtagatttataacggcataaatcggagtttgaatagtgtgccccaagacgcatactatataccccaaaaantttttttccaacccccctgggaattgtggccaaatncttatagcgactcatctttagggggaaaagctgggggccccccccggcagggtccccggggttcccgcgggaaaaatttttccccgggggggtttggggaaccccaaaaggcggttcccggccccaacccgggtacaaaaataaaaatttttttttacaaaaaaaaggaattcttttggggggaaacccctttattttggtggg

SEQ ID NO: 184569 - DNA, 483 bp, Arabidopsis thaliana
  unsure (1)..(483): unsure at all n locations
tttncaaaaattttnggggtccaagggggcccaaccaaagctgggacccccaaaaggggttgcccgggcggtcaaaccccccaaaagaaacccaaacgccgacccccaggagccgacaaacccacccggggggccccggccccccgcgacccgaggaaagccccgggaacaaaagagcagaccgccccgcgccacggaaagagggggacagcgaggacaccgacatcccggaagatttttcgggcgggggagacccaaaaaaccccaaccgcggacccacagacccccacccgcaaaccgcgaacaaaacaacccccccacagacacccaaagccccaggaaacgagcccgagggcaggccccccacgccccaccgacgcacgccgaagaaggcaccccccccccgcaggaagaacaccagcgcacccacgacaccgccgcgagacgcgaccacaccagagcaacaccacacaacccgacccc

SEQ ID NO: 184570 - DNA, 538 bp, Arabidopsis thaliana
ggaaagcggccccccccgcaggacccggcccggaattccaggtttaaccaaggggcccaagcaacgcccaacgagcgctacaataacgaacggcggcggaccatggacccgcaactctcgcaggcaacgagctgacaaaccccacgacacataacgtcagaccgctagcagggaggacgatccccgtacgaacacaatagttggagagcactaaagaccttagcctggaggagcaaaaggggttcgacgcacgacacgcccaccactaagcaacaccgaacaggcccaccggacatcggcacccacacgcccacccgccccgggtgctaagcgcggtgcaccggcacaacaccaaacaacccacccatagcgccagacgatatagcaggatgggagtcacggaccccacaacccacactagcaccactcttcgaccaaggtgtacaaaccgccctcgagcgacacactcccagctctcacgagacctggcctcaccaacaacatacatcagaaaatacgcgacacaccacgaccccaa

SEQ ID NO: 184571 - DNA, 330 bp, Arabidopsis thaliana
  unsure (1)..(330): unsure at all n locations
gatctactctanctttatcttactttaacaaaaatttcgcattagcttctgtgttattgaaaaactaaccttaattcccacattgggggcgaggaagattacacgggtgatatttttatcaaggggggggtgtttcacaaatgggtgaaaccctcataaataagcgctagaggtttaagggcaaaagctccaccccattatggagggtgatttccttcggccgggggggggggcctccctgtgcttcgttggccggaccatattcccctgacacttgctccggccaccttttattaacaaaaaacctctctcttcccccccttggcttga

SEQ ID NO: 184572 - DNA, 255 bp, Arabidopsis thaliana
agagctgtcctgagtcgtcgatccgtgacacgcgtcatggaaatgggtcgaacttagggtcggaacttaaatttgggtccaaaccttgggaataacctttttgaaaaacggtttttgccaaaattcaaaaaggggggggaaaattttttccccttttgaaaaaaaaattttttttttgggggaaaaaaaagggggggaaaaaaaatttggggggggttttttttttttaaaaaaaaaaatggggcccccaaaaaa

SEQ ID NO: 184573 - DNA, 449 bp, Arabidopsis thaliana
gttttttaaagaaattatcctcatataaaatctcaaccaattaaatgtgaaccaaaagctggtgttttactctgaaaacaaaaaattttgggggtttaacctcaaaaaataaaaaactacaaggaggcctgaaattaatggaagggggggggtgggttacctttttgagggggccctaaaaaaaataataacccacctgggttcatttgaaagggcgttggactctttcaaaacaacttggtttttctctcctggaaaggaggttccttcaagttccccctcttggggtcttgggaaccagtttcacgggttttctttgggggggggcaacacaaataggtgcgaaacctttcttggacaactcctaaagggtttaatttcacacctttttttaaagaaacccctaaggaagtttaaactttttttggctattttttcccaaaaggttt

SEQ ID NO: 184574 - DNA, 558 bp, Arabidopsis thaliana
tggaatcggcggggcgggggggggggggccttttttttacagccccccggcttttataagaaaacgagccctctgtcgtattaccagcgacgtccttttttcccggggcgagggggggtaaaaaaaattacactcatctccctattggttactacagacgatctcccgtacacgtcactacactatacctcccggcgactgcataatcgactcgtttcgcgttgctaccaatcaaggccttagcatgttaccacaatttttttttgggggggggggggcacaccacccggaatgccatacaaaaaaaataaccttcattccgacgagttctggccgtgtacgagcgcgtttccattgcggtacgcttaaccatcctatcgtttgcggtaccggggctcgctgtactggcgtcctcgattgatgagagtcttggagttgtccgctccgctcgatggcgccgcgtcgttccccgcgcagtatagtcccgccgctatgatagcctttcacttgtgcatcgccgcgggcccgtgtgcgacggagtgcgtattgttattaata

SEQ ID NO: 184575 - DNA, 500 bp, Arabidopsis thaliana
tttcaaaccccccccttaaccaaaaaaaatatattcactccctttattcactctttcttttcccctcgggggaatgggctcaaaaaaaaccacctcctcctccaccccatcacctcttccctacctatatttctccatctttaacatatctgaactctcaccatcttacacatcttatctatacccccctacacccctcacctataccctttttatcaacctggggggtgtgcacccccttttcatttccttcctcaaaaaaaacaaccattccctttccaccatttcacttatcttttcctctcctctcgtaacccactaatctcataaattactattcacatttacctccccctatcttaatcacattacttctttcttattatctctacatattatctccctctcctctccttcttacctctctattactaccattcccacccatcaccaccccaatactatatcccttttccattctctcactctttactaattct

SEQ ID NO: 184576 - DNA, 517 bp, Arabidopsis thaliana
  unsure (1)..(517): unsure at all n locations
cattcacctccttacaaacgaccacaacaatacacataataccttcacattcgagccgtcccnccaccaattaccgtacataatgaattcatctctttaactgggggtttgttttcaaaaaaaaactccccccctcctttccgctttataatacaattttatagtgcgcccctcttatctactcctattccctcacttcatcccttttctccacactttcatattattgtttctatcggttttttctagctacaagtcttttctcctaggggggtggtccttatattaggctcctctaataaaaaaaactctctacttgcaattatctctacactaattaacactattaccctaatcaagtaatgcttatattacacattataatactctattatctgatacttcccttgattttcatctctcttattctctcacatattttttcaaatatgtataaattatctccgcccttagccaattatccttgtacactaatctttatcattatcaacactta

SEQ ID NO: 184577 - DNA, 455 bp, Arabidopsis thaliana
  unsure (1)..(455): unsure at all n locations
caactcttcccccttcaggtccccctcccctattccccgntgggcccgcccttcaactaaaaatccaccccttnnttccaacttcttcaaaaaaaatttaaccccccacattataaatttccttatctccctacatattccctttctctattacaaatttctaaatttttaaaaaaaattctcctttttttcatccggggggtggcccctccccccggcctcaaaaaaccattatttccctgtgctccttaaccccccccctgcaaagtgcttccctttctttcaaaaccttccttaacccccattcctaacctctctctctaataatcattttcaaaaacaatttcaaaattctacttctaaccccttctcccccccttacaaaaaccctctctctttttttaaaaaaacctttttcttcgtcccaccacacaccaaaaccctccctcttttcc

SEQ ID NO: 184578 - DNA, 422 bp, Arabidopsis thaliana
  unsure (1)..(422): unsure at all n locations
gggccccctaaggccgattttcccccgggaaccggaatattcaccggggtgtcgccccctcagcctgccntcggcgggagagactatagatatccctccgcatcatcccctccccctttatataaagcaacgttatctcccaactaaaagtgattctacccaccgccacatacaatctcccgcggataagaaaatatttaaaattttgttccaacaaccccctgggtaggtttttcgccccaaacctcttttaaaacccccctccccctctaggggaaaaacctggggtcccccccccccaggggccccgggcccccgaaattttcccggggggccccccccccccccccccaaaaaaaaaaaacaaaatgggggaaaaaaggagattggcgaaaaaccccccccggggggggggccccccc

SEQ ID NO: 184579 - DNA, 366 bp, Arabidopsis thaliana
  unsure (1)..(366): unsure at all n locations
caaaacaatacgcaaaaaaaaaacaaaaccccccgaccaagcgcttttttttacgcggtgagggggccnctccnaaggggggggccccaagaagacaaaaactccactaccccccctccttctcccccccccgccctccgcttgtcctctgtgtgccccccaacaagcagcaaaagactttcccaaaacaaccaacccgccgaaagaacccccaccacaccaaacaccgccgctccaccaacagttacccacgcgcacggcgccccaaaccaacaaccgcccaagaacccggcgccacaacaccatcgacaataaaatagcacagcggcgcctatacacaacaaaatcttcccccaacccaaaaac

SEQ ID NO: 184580 - DNA, 142 bp, Arabidopsis thaliana
  unsure (1)..(142): unsure at all n locations
ccaatcacatctaatctcagattttccctatatcatttcaccataacctagtaaagaagattagaaaccccagtgatctttctttactttatacaaatcccaacaaacangcatctaatactatacccattatctaactttt

SEQ ID NO: 184581 - DNA, 720 bp, Arabidopsis thaliana
  unsure (1)..(720): unsure at all n locations
cccccgcgccccgcgcgcggggggggggggggattagggtgggggaccggcgtcttcgccgggaattcgtggngccgccgccccccgcccccccccccgctggagcctgtgcgttcccctttcagccccttcccccccgttgttggggtggttttcccaccccacacttttttccggcctccgctttttctcgggggcgcggggggcggggggccgccctctccttttcctcgcccgggcgcgccccctttctccgcgggccgcctctttctcccccctctcccccggggggggctttgccccccgcgccgcgctcgtccctccttcccccccttcttcttctccggcggggggggggggagnccccncccnccccgcgcgggggnntttcaaaaagacaaaatctttcctcgggcggcggcgtgcggctggtgccccccccctcccccccccccctcgtcttttctccccttccgcgccgcggtgccggccgccgggccgcccgccgcgcggtcccccctgtcgtcggccgctccctttccgcccccctcccccgcccgccgcgtccgtccccgggcgtgggggcccctccgccccgccgtctccaccgcgccccgtctcccgcccccgcctcccccgcccgcccccccgccccccccgctcaccggcccccggcgtcgttccctcggcctgccgcgggccgcccgccgccgcgccccg

SEQ ID NO: 184582 - DNA, 309 bp, Arabidopsis thaliana
atttttgggggaaaaatttaataaacaacactttctttaaaaaaatggtttttttgggggggggcttctccctttggtggcttaaaaagacaaaccctggggtccttctttttttttccccccccttttcctctcccatggggggggatttggtaaaaaaatgctcaaggcaaaacccccccttttaagcctcttctttttttctttgcccgcctattcctccccttttttaaccctcctaggcgggtgcccggggcttcccttaccaccttaattttcctcttttgggggaggttcttccacacggtt

SEQ ID NO: 184583 - DNA, 508 bp, Arabidopsis thaliana
  unsure (1)..(508): unsure at all n locations
ccctgcaggtaccgggtccggattccccgggggggccgggcgtcaatttactcttaatcacttaattataattnccttttccccttttttttcaaaaaaggaactatgatttctgcgtctgagttcggtctctcgatgaataacaatggtagtggcacctccatgatattgaagggggcgtgggggatcaaacggggggggatgctaaatatggttatggaaaagacggggacaccatgatgaccatatctatgtttttgctcccngagcatgagtgggtcttatgatacatggttgtgcgcctttatttttaatgattttttgccctaggggtctttatggcagggagttaatcccttcaggctttaactataatcctctatttttggttttatacccaggttttgtttcccgtataaaagcgaccgagcgaaattttcaagcgttaccgtttttttccccgtggaatctttactattttttttataaagcggggggggctaccttc

SEQ ID NO: 184584 - DNA, 374 bp, Arabidopsis thaliana
  unsure (1)..(374): unsure at all n locations
atttgccacttatacgactattaggaagctgtcgcctgcagtccggtcgattccggtgaccagcgtcggaacccccatattgggaacaaccgttaggaactaagtgaaaacgtaacttcggccctggggtgggtttaaaacctttttggggaaaaaatttaatttttttcccgttttttttaaacccccggggttttagatttttttgggggttttttttgagaaagccccccacttggcccttccaaaaaaaaaaaaaaaaaactttttgggattttttttttggcccccgggggggggttttttttttttttntttngggagggaacacacacccccgcggggggggnnnnntttttttttttctctttttt

SEQ ID NO: 184585 - DNA, 492 bp, Arabidopsis thaliana
  unsure (1)..(492): unsure at all n locations
agacttatatagggaagctggtctgctgaggtatggtacggattatgggtcgaacagtggtgggaggggaaaaaagaaaannntttttgtgtggaaaaaaaaaaaaaaaanattttttttggggggttttttaggggttttttttttttttcggccagactttattaaaggattaatttttagggggaaaattttggggttaccccctttggaaggaggtacccgggggcccgggataatttttccggggggtttggacacacacaaggggttttggggccacacaggggtttgtgggttttttaaaaaaaaaaaaaaaaaaaaaaggggggggggtttttcacaagggggggaaattttgtttttttttttttaagaaaaaattttttttttgtggggggggaaaaaaaaatttcggtggttttaaaaaggggtgtgtataaaaaaattttttttttttggggggggggaagaaaaaatattttttttttt

SEQ ID NO: 184586 - DNA, 377 bp, Arabidopsis thaliana
  unsure (1)..(377): unsure at all n locations
actgtccctcagtccctcccaattccgtggccacctcatattcctttttttcaaatcacgcatactcaccaaaaccctatttctacatggattttcaaaaaaacttttcaatctacatccacagtggtacacaacacgttaaaaccaaactaaaccctacggtctaccaaaaacctcatggacctccaacccggtcnggattctttccatttattcctcttaaagcttttacagaaatactaacccttctaaccaaccgtccttcttgggctccagaaaaaaatattcattaaactgacccgtttattctcttttaggggaccccttaaaaagggctaaaataacctanactaatctcgtaccttttccaggaatgg

SEQ ID NO: 184587 - DNA, 623 bp, Arabidopsis thaliana
  unsure (1)..(623): unsure at all n locations
ggggggggggggggggacttatttggggccacttcttcaaactttgtnacgngncaccccccccctcccttaactttcttcctcttaaaccttccccccttttgttttttttttttttttaaaaaacaacccaatttcctccccacctttttcctaatttctcccccantttttcccccccctcctcattttcnctccctctttttccaccttccaaacccccccccaaattttttcccccccaaataaacccatttctccactcatttcataatttttttttttcagcgtgttggaggcanacccccccccgtgccccttcaaattaccaaaaggttctttttttcacatcgcttttcccctttttaaaagatcttccttttttccttaaaaaaaagtccctcctttgcccttcccccccattataaccccaccccccttcctctccccttctactttgcgggagggcccctttttttttaactcttccccacaccccctttttttttttttcacctttcaattcaccacccctgtgggtctctccccagtttttcctcctcccctttctttattcgccttcttcggtttttcctttagccgggcccttcctttccccccca

SEQ ID NO: 184588 - DNA, 303 bp, Arabidopsis thaliana
tgatatccagctctatacactcataagagctgtcctgagtcgtcgatcagtgacactcgcttgtgtgatgggtggactaaggattttcccttaggtaaattggcccgaagaaacttggccccccgggcctgggcctcagggatttttttacccccccggattttttgggaattttttttggggaaattttttcgccctttttttttttttttgggggaaaaatttttaaaaaaaagggggggttgccccctttttttaaaaaaatttttccaaaaaaaaaaaagggggctttttaaaaaaatt

SEQ ID NO: 184589 - DNA, 506 bp, Arabidopsis thaliana
  unsure (1)..(506): unsure at all n locations
tcaaaaaaaacttttttttttttnatttttcctccccaaacacaaaattattaataaccctcacctttaacaacaaaaattngaataactaataataataacaaccanaacaacccttttcaaatatttttcccaaaaaaggggggggggccaanccccggggccttttataaaaaaaacaccttnnntccctcccttctttggttcccccccnncgcccccccctttatttttttaaccccttccccttttttgggggggaagaaaagaaaaaaaaattttttttttttttccttttccgggtttttgcacccaccccttttctcacaaaaaccancccaaatgtggctttaaaaaaaacctctctttatccacaaaaccggggctctgggagaggccccctttaatataccccccctcaaaacgcacagggggcggaaaaaataaaccccccctttttttttttcttccctcccaaaacaaccatttttgtttttttttaaaaa

SEQ ID NO: 184590 - DNA, 390 bp, Arabidopsis thaliana
  unsure (1)..(390): unsure at all n locations
ctgtgtttccactctacgactattaggagctgtccctagtcgtcgattcggtgaccagctcgtgcttgtcaactttgtcggagaaacttatcctgacaaactaatggaaaccttaagggttccccctcctaaaccccccaacccttaggtttttggggggggaagggcaattccgggttttttttgaaaaaaaaaaaaaaggggaaccccggggtttcccccccttttttcccctttttttttggggggaaaaaaaaatgttttttttttttcccccccccggtggggggtttttttcccctgtaaaggntaaaaaaaacccccccccgggggggttttttaaaaaaaaaaatttttttttttccccccaaaaaattttttttttttttt

SEQ ID NO: 184591 - DNA, 284 bp, Arabidopsis thaliana
tgagttccattatcatataggagctgtcctgcagtcgtcgatccgtgacagctcggaattttaattggtaggatccttaagattaagtttgtaaaagttcccaagaaaaaaattccaggattttttttttgcctttaaaaaaaaaacggtcccttttttcccccccaaaagggggggggggccccaaaaaaaatttttagggggggattattttggggggccccccccttttgggggccccggggggaccctgggttttttttaaaaaaaattttttgtgaaaa

SEQ ID NO: 184592 - DNA, 374 bp, Arabidopsis thaliana
  unsure (1)..(374): unsure at all n locations
ccctttnccctttaaaccctaacaaaaccttaaccctgaaaatgattaggtccctctttctccggtcccggaaaaaaatccctcaaaatccatcctaaccttattttttgaagggggggggtggttccccttggggggttcccacatataaacaacaatttctcttttcccccttcttccgttngggccggcccataaatttaaaaatttcaagggggggggggataaaaaaccggggtctttaaatccttttgggtggagtttataaccacccccccaggggtttatccaaacttttttctcccaaaggaagggggttttacccggtcttttggcatcccacagactcttttttttttgggtgtgccctaaaa

SEQ ID NO: 184593 - DNA, 398 bp, Arabidopsis thaliana
  unsure (1)..(398): unsure at all n locations
acaaaaaaaaaaaaaaaaaaccttttttctaaaccaccccccactgtgaaagggggaacccccgccgagccccgccccgaaacccggggctccccccggggggggccgaaacaaaacccagaggcccaacagccggcccggacgccagaggcacaggaacggcacgcgcaaaacaaagaagagcgagcaacccacccgcccgcaagcgcaagggagaaaccagagccccancaaaccgaggaagcaccccagagggggcacacacaaacgggggagggcggggcgaggccacaacgcgacccagcaggccaaaggcaagggaaaggaaacacacaggcgccagagacacgacaggaagaactcacgangcaacagaagacgcaggaggagacagccag

SEQ ID NO: 184594 - DNA, 425 bp, Arabidopsis thaliana
ggccgcccttttttttttttttttttttttttttttttttttttttttttttttttttttttttttgggaaaataacttaccccttaatttaaaaaattcaaattgggggaaaaaaatttccatttggggtttttttttttttttgcctcctttttatgatttttttttttaacgggaacccaacaacacaggtgaaatttaattttttttccaaaccttttaaatgatttcccaattcctttccccaaaaaaggagctttgcaaggtaatccctggatttttccacctttttaccagttccattaccaccttttttagtccttttgccaggatttttcattaaatttgaagtagtctggttttcaaaaagccttttttatactttttggacaagcttgtttacaattttttccacttccggtga

SEQ ID NO: 184595 - DNA, 181 bp, Arabidopsis thaliana
cttccgtaacctgggatcctttaaagcggcctgcccttggggtttgaattcttagaagcgagaaaatcctgttcacccacaataaaaagccacccaggccaccatcctgggacaacgctatatttggcgtaatcacttggtacctttacgagcacggctttgacctaaatccaacgggggc

SEQ ID NO: 184596 - DNA, 474 bp, Arabidopsis thaliana
ctaccttagcctggatcctttagagcggtcggccttttttttttttttttttcaattaaaggtgtgttgatcttattaattagagggttacctttcatttgggggaattatttgaagaagggtgggttccatttttggttaccttcccaagccttaatggggggtttcctttctttccaaaccggttatttttaggcccagttttgaataaaaaaattatccacttacttgaccattcttatgaggaaccccaaaaaacttaaaaccattttgaggaaaaggagcaaagtcttgaaaccttcaattcaagtgattgaatcgttctctatcatttccttgacttcgttaaccacaaaatgcgctttgtggccgccaataccttcagctggtttttggccatctctccatagctgaatcgtcggcattttcgtaactcctgcacggaaaacaagtctatatggcacagcgttgact

SEQ ID NO: 184597 - DNA, 661 bp, Arabidopsis thaliana
  unsure (1)..(661): unsure at all n locations
cagcctctaatacgactcccttatagggaaagctggtcacgcctgcagtgtcccaggccccgaaatttccccgggctcagaccccaccgcctgtcccggtcaagccttcttggcatgaacactcataagaattctttatcgtcgtccataagcctcggaggctctgttcggaggcctaaagacctctattcctnctggacaaaccggagcctcctaaaataccagatacgccacagcaccgtggattatttggccagttgtaatactatccgggttctttcgtcctgggtgcggaacgactagtaggaatttttatcggcctgccgcgcctaaaacttttttcctaacgcacgcaacggaagcaaacggttcaaaagtctcccaaccttttcctttgtgcccnggatactccaagaacgggcgttggatcgggatgagtgtcctgctcctccccgggtcaccctgtgagccaggctcggaaaagaacactgttgccgcaatcaatctcttgaaagaaagcttggctcgtcgacaacaaccagcccacgcccttaacctgccggtgccttgcctctggtcggcccatacagacacctaacgcttcgcttgaactgaaccatccaggtgtgcgctcctcaacgaccaacgaggaactttcccc

SEQ ID NO: 184598 - DNA, 435 bp, Arabidopsis thaliana
  unsure (1)..(435): unsure at all n locations
gtaagcttggatcctctagagcggccgcccttnngtttttttttttttttttttttttttgnntnttttttttttntnnnnnnttttttntttttagacccaattttcttggaaggggaagatgagttttcaaaaatccccttcctagggatcacccacttttgtgtgttaacaaaccaagcggtttttatttatttgtgacctttttttacagagttattacttgcctacctcgggttataagcctgccatgctttccttttccgatcttagttttatttaccagaaaaattatctaatagttaactccctattttaatatttggcgttaccgggtgggtctttcttggagaacttttgcgccataaaagaacctcccctttaaacccaattagacttgaccattgccgcattgcccctctgctgaaaaccccc

SEQ ID NO: 184599 - DNA, 541 bp, Arabidopsis thaliana
  unsure (1)..(541): unsure at all n locations
agcaaggagccccaagagcggtcgcccgggggggaaaaagccccgaaaagagaagaaagaccccaggcgaggaggaaaagcccgaacaaaaaaaggcaaagaggaaacgagacacggccaaccaaggagaccgaacgcaggaacccagaccccaaaaagacgggaaagcgcgccgaacaacaagaggtcccctcccagggggggagggcaagcacacaaccacaacgccaagaccagaaacaagcaccgcaacgggcacggggggggaggggagccccccccaaaaggaagacgcagggaagcaggcgccaaagaaacggagaccgcgcccggggcgaccgcgcnggggaggacaccagaggagggcgagcccgggcgacaaaagaggaaaagcaagcacaagaggagacccgggggagcgggagagcggccacaggcgcccgcgcaaacgacacaggaaaggcaggggggcgccggagagcagcggcaagcccgcagcaacgaaaagcggagaccagacgagaaaccgagaggaaaaacg

SEQ ID NO: 184600 - DNA, 478 bp, Arabidopsis thaliana
  unsure (1)..(478): unsure at all n locations
tagcctggatccttttgagcgggcggccctttttttttttcttttttttttttttttttttttttttttttttttttttttttttttttttttnncccnnnnanaaacccaaaaaaaaaaaaaaatttggccccaagcggggtttaccagggtggccaacgggaaaaccttggggccaaaattggtggtttaacgggggtttaaacccctccccaaaggggttttttgggggggccctctttggcccctctaaatttggcccccaggttggggggggggggtcacggccccccggggggccccgggggcccccccggggggttgacctcctagggggccccccctttttttttttttttcccaaggggggcccgggggggggcctttttcccccccccttggttgccccccgcgggggaaatcacaaacgggacaaaaagtgggttaaacgcttttttacgggcccggtttggggaaa

SEQ ID NO: 184601 - DNA, 493 bp, Arabidopsis thaliana
gacgtccacgcacgcgtacgtaagcttggatcctctagagctttcggcctttttttttttttttttttagtgtgaatttttattataaatgggattaaagccgaaagggtattaaactttttcacttccaccccaaagccttaaaacctggtggaaaataggattgcttctattccaatggggtaagcttaaaaaaaacctttttttttttggcttggggtaccaaaaccagggttgaaccaccgaacctttttaaaacctgtaaaaggttttattttttggataaattcaacgatcttccaaataattttttttccctttttaaatgggctttggactaatgaaccttcttggcgaaaaaaggcagccaaaacgcacctaaaggaatctcggacttgaaaaactccaaaggtccatttgttcggttggaccttttcgccaatggggttaaggggggggtatagaagcaaacatcaggtccttacaattaaac

SEQ ID NO: 184602 - DNA, 478 bp, Arabidopsis thaliana
  unsure (1)..(478): unsure at all n locations
ccagctctatacgactcactataggnaagctggtacgccctgcagtacctgtccngnantccccggtcgaaccaagcgtnccgatttcctctaactcacctaantnataattccctttcccccttttttttccaaaaaggaaccttagaatccgggtttcgaaaattgccctccccacaaaaaaacaaattttttggggcccccccccaaaagagagagggggtttttacagagacacaccaccattgggggggcccccccctttttttttaaaaaaaaagggcgcccccccccaagaacaaactttttttttttttttttcctcccccccccgggggggggggggttttaaacacacaagaagagggcccccccccttctttaaaaaaaaaaaatatccccccccccccgccggcctctttttttttttggtgggaaaaaacaccaacccaccccccctcctaaaaaaaaaaaaaaa

SEQ ID NO: 184603 - DNA, 482 bp, Arabidopsis thaliana
ctctaatacgactcaatttagggaagctgggacccctgccgggaccgggcccgaattcccgggttgacccacgccttccgccaagttggaaagggttcagaggacggggagggtattggatccgtgggctccccaaagggatttatctgcgatggagaataaggtttctttgttaagaacctttcttattgcctcagctatttcataggaagaggaagcccgggatggataatttcggtcatgagttggccaagttggaacggaacaggtttaggctcagccctcagcaccactctgaggggaaggcaaaccacattgatgatatagccatgaaactcactccacatggctcatatgactacatcaacaatgtctgaaactgctctgacgtactagactagaaccaaccgcactctgattactatagagcgctagacgatcctatgtcccagagaattgcttcgtatgcgagaaggctgaca

SEQ ID NO: 184604 - DNA, 409 bp, Arabidopsis thaliana
  unsure (1)..(409): unsure at all n locations
tattttccagcactatccactactttagggaaaccggtcgcctcaggtccggtccggaattcctggtcacccggcgtgcggtcgagcctctaaaccctaatctctctaaacccttacatncagctaaaataccggaaatcgcaccctaaacgatcccttcaattctagttatcatacattcttacctcttcacagctctacgcggcactcagagggtctataactcgaaactctatcgtgatctccatttgtgcatgctcaatgctaccttaagatctcttatctccctatgctaggataaatttcttattttttcctcaaacacctgaagagcctggttactcccttttccttttcgcccttaacaccttcattaatccaattactctagggtctttagacctttatc

SEQ ID NO: 184605 - DNA, 607 bp, Arabidopsis thaliana
  unsure (1)..(607): unsure at all n locations
tacacaagggacagacactatttttaacaacccccatttctactacgttaccccgtccagtttctaatccacgtgagtttttnccgggggggggccctctaatctcaaataaagctagtccgggttacacgttgactagagccccgagcccttttcgagtttgtgtcggtgattccacgtagctcgtaatacagttatttgaacagaccgtactcacctttttttttctgggggggggcccctgctcaggttgttctcagccacacacccccccggatcactccattatgccccctacgttgtttttgcctctacctaggttctcccatagactattcatcaatagttcttctcgcctgttattcttgtccttgtctggattcgcggtcgcctcagatgacgctgcttcaagtcacttaggacgcgtctccccttttctccctccaatgtaccctatcgatgttaccatattcctctattatccccctcttctccccacgttccccatcccccccgtcttgcttgctattctctcccgcctctcgttatctctttaaataccatcttccccttagccaaaatcgccgtttgtcttcatatatttttg

SEQ ID NO: 184606 - DNA, 376 bp, Arabidopsis thaliana
  unsure (1)..(376): unsure at all n locations
aaaaaaatggctccaatttaattacacaccaactaagctttcttatttcaatactatcacattctccaatcttcatatactccattatattactttctaacaccctaaactattttacatcttcaataaaagcctttccctttaccttttataactataccctatctatctcctacctacctccatcttaaatatctacctaatatctcctatcccttccctcttcntaccacttacctctacctaatataaatcacccactatatatcacttcaatcccattcccactaccattacttactccaccctactcatatatcactcctacacttatttatataatatatcagtcattctcaccaaaatatcttatact

SEQ ID NO: 184607 - DNA, 555 bp, Arabidopsis thaliana
  unsure (1)..(555): unsure at all n locations
ttttaatcgttgttcntcgttcatagcggcaagcggcccttttttctacgaagaggggcggagttgccctgccgctccaacttccttagtacaatttcaccctctttggcagcacttgcgatgtgagcccgacgtacgcgttacgcgtcttttatcattagatattggtctatgatgtaattgcacggtgacgaagacagtttattcttttttagtcagtggtgctctctaacccccagcaatctattcatttaatatttactcttctctcccgccccccccgaccccatcgcgttgccccctttttcgcagccgctcatgcctccggtctccttgcatcctctctccttgagttactccctccacagtccatcctatgtctgatcgtcggccctcactgcccatagcctgagcagatgaagatcatgctcttgcgatccagtttctggctatgtcccgccccttgttgccgctatatatcgtgacccggatcccgccttatgtggccacttgtcgctccgtcgtgtctccctgcatgccaggactggtcattac

SEQ ID NO: 184608 - DNA, 368 bp, Arabidopsis thaliana
  unsure (1)..(368): unsure at all n locations
cttggatcctctagagcggccgcgctttttttttttttttcatgcataaaaagtctagctttgatttctgaatcactcttacaaactggngaatcaaatttttcttaagagaacaaaacaaaaacccaagaagagagattggtctatacaaacggacaaagataccaaaggcggggggtcccacgaattacatatttcatttacttccgaaatgggttcaaacttatcacttgccggattcttgatcgaaaagagaagaaaaaagattgcgcgctcccctttatttggtcaaacccattatggatggagaaggaaaaaaacccaattttaatttgtaaactcagaataagtcgtgctcggtgaacccc

SEQ ID NO: 184609 - DNA, 600 bp, Arabidopsis thaliana
ccccgaagttagggggagaacgaacggacggaagaaagaaaggaagaaatttaaagaagggggggggcgagaaccaaagacaagagaaacaacaagccaagcgcagcacaaagcagttgaaagacgagcgagaacgacataacacccgaccgggaagcgaaggaaaggaatgacgacgcagaagagaagcgggcgctttctcctaaacacaggggagagagcaacccgcaggcgcaaagaacacagacgcacggccggcaaagacgaccggcagaacaggaagacgagaatagaactgaagaaagcgaaggagtaggaccaagtgcagaccacagcccactacagccaagcgcacgccagacaaggcgggagcagaacaaaggcacgacgccagcaagcgacgcaaccccaaccagggagcctagccagaagagagagcagacaagagcgatgaactactggcgccgggcgagaagaacgccgccgcggaaagaaggagaaggcggcaacaggagggacgggccaaccgggatgcgaggacagaatagcaccagagccaggggggaggggagggggcgcgaccacgcccgaggaagagag

SEQ ID NO: 184610 - DNA, 572 bp, Arabidopsis thaliana
ggggggagccgtttggacccggcgccttggggggcgggaccggcccggccccagacattcagggccggaccgccccctccgccccccccccccgccgcccgccgccggctcgtgctgagggagcagcgggcgtgcgtgcgtgtcaccgcctctgccgcgcctccgcgcccgctgtcgcgcggccctaccgccgacgcgcacgcttttcctgggcggggggagaccgcggccagcccacagcagccaggagcgagcgctcccccgcacccgcgcgccacggcccggcgcgcgcggcgcccaggtgtagcggcggcgcgccgcccgccccccgccgcggcgccaggggagcgggccggagcggggactcgaaagacgcgccaggcgggacggccacagccccggccgcgcagaccgcgcggcggggcgtgggcgagccccgcggggggcccgacgccaccgcgggcgggaagaggccccccgccgccagcgtgcacggcgccaaagcgcgggccgccccgcccaccccgcccggcccgcgagggccatgacccgcgacccggacgccccgcgcc

SEQ ID NO: 184611 - DNA, 610 bp, Arabidopsis thaliana
agggaggaacacgcccgccgccccacgacgcaggaaagggaccttcaaagcgaggggggggcgacacagacacaccagcgacgaacgcacagcgcagagccgacggagcgggagagcgcggcgcagagagaagcagaccccgccacgggcgcggccgcgaaacaacgaccccacccccgacacgacacgcgagagtttcttaccaaggggggcgcgaccagccacgggacggggcgcgcaagaacccgcccgccccccccaaaaggacccgccgcgacgaagacgcgcgcaggagcccacccaaccgcggaacgcagaagggcagccgcgcggcccgcgaggcggccacgccgggccccaccccgagcaggccaaacccagacgacccggccagcgggcatcgagagaacgcaaaccacagcacaggggcgcggcccagcgcaggggcacggcaggaggccgcacagagacccaccgagagacagccgccgaaaagggcgggcgggcccacacgacacccgggccccagacggcagacgaagcaaccgcacggccccgcacggacgagagaggcacgaacccgcgcaccgcaggagaagaaagcccgcgg

SEQ ID NO: 184612 - DNA, 352 bp, Arabidopsis thaliana
ccagctctatcgactattagggaagctggccctgcagccgccgattccggtgacggcgtcgactctacacataacaaagacagagggttgtggtcctttttgtttaaaccccgggcccccgaatttgggtttcatttccgggggttttccaaacctttggcccgagggggaaataaaagggggccccaaaaacaccctctttttggaggggctttttttacggggggttttttcggggggggttttttctcaaaaaaaaaggggggggaaaaaaaacggggttttccccccctttaaaaggaggccgccctttcttcttcggggggggaaaaaaaaattttgtagaaaaaaa

SEQ ID NO: 184613 - DNA, 403 bp, Arabidopsis thaliana
ccagcctatcactacttgggaaagtgtccctgggccggccgattcggtaccggcgcgcaccgtcgtctgggtgcatgtatcatattgcagggtatggggaatgattctcatggtaagagctctattgccatataattctatgtgcctcgggctctttgctaaaaatgacaagaagaaaacttgtagtttgtagtatacatcgctaatgtgtgctgtatcgacatctaagacctggaagattacctatattgcgagatagagaagatcgtgtctgcttgtacagataaacgaacacaaacaaatgactgttaaattgcgttacttctgaggagactgatccatcagtaactccctgtaacacactgtctacgtagggcatgattttctaactctctgagggagt

SEQ ID NO: 184614 - DNA, 247 bp, Arabidopsis thaliana
cacctatcatatttgaacttccctcgcctccattcgtcacgcgtcaattattctcccttattaacaaacttcaaatcttaaaactatactgttaattttttgtccccatcttgaactcggattctaggggctacatttaatataaactccttttttaaacaatttagactttaccttacaactatttactcccacctgttaccttcttgctgactgtacttatttaaccaccattaactggaaataa

SEQ ID NO: 184615 - DNA, 209 bp, Arabidopsis thaliana
ccacctatcactattagaacttccctcatccgccgattccgcacgcggcgtatatagccttactatatatgtttacaataacattaccgttttcttcacatacatcttgtttatccccgtataacacaatctacgactagggtgggtcgctttattcccaaattccctcctaagaactatctcattacctggttggtgatgatggggaa

SEQ ID NO: 184616 - DNA, 420 bp, Arabidopsis thaliana
  unsure (1)..(420): unsure at all n locations
ttccagctacttcatattaggaagcgtccctcagtaccgccgaattccgtcaccggcgtgcggaaaatcaacaccttttccctagtgttgacccaatgaagggatctttgtttaaaaatcactggaacaatttaacgggaggcaaagtttcctagggagttctttcccaacctncccggggggggaaaaaaaaacccggagaggttacaaaaaaaaaaaactgtttttttccccttttaagcaaaacaaatttttttccccccaattttaaagccttttttaaaccccctttttaaacaaaagggggccttttctccctttaggggccaaaaaaaaaaaaaacttctccccggccaaaaaccacaccagttcttttttttttttttgggaccctccctctcccccacagggggggaggaa

SEQ ID NO: 184617 - DNA, 364 bp, Arabidopsis thaliana
  unsure (1)..(364): unsure at all n locations
gggggggggcttatnggggacccttacttcccctttctttattgaaaagcttgtccccctcccggtgccgcncgccctattttcccctgggggccgggcgctcccaaaaaaaaatnttcaaaactcaaaaaaccaattcccgagcgacacaaccgtttttcaaacctttaagccttgctaaagctcgtgctgctccttttgataaaaaaaaaccttattttgcctcccaatcttcctaaagggggggggctctctagggggttctcgtaaaaaaaaagcctttgccccctacccgaagtctccttaaaattgacccaacaccattaaaaagggctcaattttccccaaattctcaagagaaggg

SEQ ID NO: 184618 - DNA, 511 bp, Arabidopsis thaliana
  unsure (1)..(511): unsure at all n locations
ggccccctttggttttttttttttttaaatacaaacaccttgtgtcccaatcttgaatatgaaaatctctcatcaccaaaataatacaccccctcttatatcctcaattgggaaactttaaattaaaccccctcaaaacttgccaaataagctaaccttctcctacccttttgaatgggagcgggggcanactatttgcatctacaccactctttttaaaaaagggcccttatttcttttaaataaccacatcccctcttctggttgttaaggcccacaccctgagggccccccaaaatttgtttacccctccccccttttattcagatttaaaaaccctccgtgtcttcgtttcccatttaaaaaaaaaaaagttttgctcgacctcccctttttgggccctctccaattttttcttaaaccccattgtaaaccccctaaatgctcttacccttcctaaaaattcttctccactgtcctttcttaacgcttgggccccttttttcttttt

SEQ ID NO: 184619 - DNA, 495 bp, Arabidopsis thaliana
  unsure (1)..(495): unsure at all n locations
ctcctcaggcccgcttataatcccggccttttttaccgggtttcaaataagaacacacttttcttagggccctaacaaccgaagggcaatccttttttaaaaggggggggattttaattcgggaccctttaaaaaaacctctccttggaaccnctccgcaagggccaagccttccctcttttcccaaaggtttttccagggtggcctccccaatttaccccccttggcttttttttattaagctacagcccttccccctttttacttaaggagcttgcccggaggacccttacccccttcttggggtgggacaattaaccccctcttcccttatttgaacaagggcccgaggcttttttcttccggcttcttttgaacctttaacacccaccgcggtgggggtcaaaaaaccggggggttgtggggtttcttcttcttaccccaggggtgggaccccctccccagccctttaaaaccataaagggggatccccct

SEQ ID NO: 184620 - DNA, 445 bp, Arabidopsis thaliana
taaacatgttttttgaagacacttatccaaatgagatcccgctttttatttacccaatttcatctcaaatggggatcttaattttactttattggataaaaaggggcctgtgatttttttcaacttgggggggggatttttaagctctttcccttaaaaaaaagaaaaccccaaaaccttaataaaaaaaccccctttcttgccaaaagaaggggattgtattttttggttgggaaagcggaaccctaaatgtgtaattgggcccgcggtgcccagaatcattctctttattaatgttaatcaaaactacttattgttgttgggggttttgaaatccttttccttaaaaagaaaacctgaatcgcaactctaccccaactgggggatttctttattgcgcttcaaccccctttcgtgcaaaacttgggggggggggtctgaattt

SEQ ID NO: 184621 - DNA, 453 bp, Arabidopsis thaliana
  unsure (1)..(453): unsure at all n locations
cttcaattaccctcccccagattcccccngtcggcccacccctcccaataaaactcactaaaaccctcactcttcccacatctcttaaaaactaaaacctttaatttccccatctccccaatcaaaaattggccacttttttcttcttttccaaaaacccctattaccttttttcccaaattctgttttccaanaaaaaacttttattaaaaataaactttttcgaaaacccattccttaccttcccaagcttaaaaataaaaaccaaattcatgaatttttcctctctttaaaaaaattttattccccctgaataaaccttaaatcctccaaattccattttaaaaaacctcccacctttctttacaaaaacctacccccaagccaaaaacccccttattgaaaccattttatctccatttttacccaaaaattaattttttttttcaaaaa

SEQ ID NO: 184622 - DNA, 451 bp, Arabidopsis thaliana
  unsure (1)..(451): unsure at all n locations
aataaaaaaanggaaaattttattaaatattctangtcttacatattatgatacatacattgggataggaattattcaaacaacatcngacattctttttggggggccctaaggatagtctattaaatcatttcatcgatttcttgggggggggggtaactttatggggggggcttttaacaaaaanaaaggctgtaatggggtaaacccggcctttgcccgggtttccccggaccccattacccaaagggtgaacccatattaaccccccccgcaaacgcggaatggagataaatagaagggaatcccccttttgccccggtggaaaatttctgtttaccccatgcgggacgaatctttgccgacgggggaaattttttaaaccaaccggcccaggggaaacttcctaaggtgccttgaaccgggcgaaacaataaaaaaaaaaaggaag

SEQ ID NO: 184623 - DNA, 499 bp, Arabidopsis thaliana
  unsure (1)..(499): unsure at all n locations
ttgggtttttgttttttaaaattaanaaaaantaataattanaccaacctttcaacangcaccttagaaaaaaaaaaaaatggcaaccttcacttccctgttggtttaaaactaaatattcacccccttaaaaattctaataagcccaattttctcccaatatgcaattttcttggggggggctttatttttttggccccctcaaaaataaaaaaaaaagaagggaaccccaaccctaanggattttcttccttatttcctcaataaaccaacaactttttttatcattcaataaaccttcacttaacccttgaaataaaaaacccttgtccccccctttccttgtgggaaacctccaaccccatctgtttttttagaaatggccccacccttcccccttcaggttttccctttattggggaccccaaacccctgtttttttatttcccaatgcccaaaccgttgtgaacctcaaaaaataaacccccttttttcccca

SEQ ID NO: 184624 - DNA, 546 bp, Arabidopsis thaliana
  unsure (1)..(546): unsure at all n locations
gggttttttttttttatataaaaatcttttattttttaattacttccctcccccaaaaatttcctccttttttttcccttaaaaactaccccctcttttcccccctcaaaaaaaaaaacccctcatttcccccaaaaaaaaacaaaaaaaattccctctctaccccccttanaaccaaggggccaaaaaaggagcggggggtggggcttttcccncaccccgggannnnataaaaacatatccgcncncccggcgggggggggntcctcacccccttggaaatccccttccttctccgaaaaaaccctcanggcaaccccccccaaaaaccctctccccctcccctattaaaacatctttttttattaattccccccttaccaattctttttaaaccggggccccctgtttactctttcgtatttggtcacaaaaaaaacctctcttaaaaatcctttcttgaagccccaaatatacaaaccccgttaacacattcccccggtgaaaaaaaaccccccaaagtctctccctctccctctcaactcc

SEQ ID NO: 184625 - DNA, 495 bp, Arabidopsis thaliana
  unsure (1)..(495): unsure at all n locations
cccccacaggtcttttttctctttagagcccccttttcttttattcttcaaaaaaaaaaattaaaaaaactcttccccanagaaggaggggagggnnnccccctccccgcgcccccccaacaaaaaataaacccgnaggggtgtcctcttcttctttccccccgggggggtctccccccgccgcttttctttttaaaaacaaaaacccgcgggggggctttctcttaaaacacaatctttgtctcccttctttaggcgggtttgggcccttctctttaaaaggagagaagaataccacccccttccttaagaagggggccctcccaaccccaccacccccccccccctttataaaaacctctccaaggccgcctcttccctttataaaccccgtcctagactcccgtccgaccaaaacaaactttttttttttctttccccgagagcccaagacggtcttctccgcgtatagaaaacctccacagtctttcccca

SEQ ID NO: 184626 - DNA, 417 bp, Arabidopsis thaliana
  unsure (1)..(417): unsure at all n locations
ttttaaataaatttttaaatcaaaaaaaaaactctttacaaaaaaattgttaccctttcaaaaatcttttaaacccggattaccaaggttttgggtttcnaacaagggggaaaaaaaaaaaaacttcccaggagtttaatttttatccgggggggggtnttccttcagacaccaagtttaaaaaaaacctttcctcccagtggtatttttttctctttcttaagaattttcatgctccccctttttgggttcaagacttggaaaacttgcgggggggaaaaggggggtttaaaaaaaattttgggctttgagagggaacattaaaaccttggggggcccttataaaaaaaatatttctcacagtggtttttttaaaggggtaataatttcttaatgtttaaggttatcggttagaaa

SEQ ID NO: 184627 - DNA, 553 bp, Arabidopsis thaliana
  unsure (1)..(553): unsure at all n locations
gaaagctggtacgcctccaggtacccggtcccggaattcccgcgngtggagccaggcgtgccgacttaaacatctaaattaaaaaatacccttttagtttatgttcttaaacaaagagaaaggcatctttttgtcatcatcaaggtgccagagcaacatttttctcttcaagatataacccttcctccttttaggcgggggtaatctccctctttgagggggagctaccacnccccgtgaaaaaaacctataaaaaatattgggcttctggcaaacccgttttgcacccattgtagaccattataaaccttttccttaaaaagaaattctctaaaatttccccttagaaatacttttatcctcgggtaattctctttcccaaaaccttaaattaaagcgtaaaattttcttcaatcctaaaactcctttcaccaggaaaaaaaacaaccaaccggctttggcaaaatttaaaaaaacaaacttttctaactttccaacacttatcaaaaaaaaaatttataccttataaaaacgggtgtttattttttttttc

SEQ ID NO: 184628 - DNA, 563 bp, Arabidopsis thaliana
  unsure (1)..(563): unsure at all n locations
tcccccctgggcgagggagaaaagnnnnngggggccttttggtgccctctccaaaaccatgaccgtccctcgccccctacgtaagcttggatcctctanagcgggcgcccccgcggggggggggttttaatttatttctttttctccctctctgaaatccccccctcttttccccttccctttggggccggggggggaaaaaaaaaaatcctttaaaggggggggggtttctttcccccccttggggggggggtggaactcttcttctttttttttgggggggggggggaccctcccggggttctccccccacaaaaaattctctttttgtagtgagaagggggggagaaacccccttttcttgtttgccccccccaacacccctttggggcggatattttttgttcccccttatgggggggcgttccctccgcggatacaaccccctcctctttgtctctccaccacccacaaaaaagtctgtctctcggcctctctgaggggggcgcccggtttccccctcgtgggcggcggggcgccgtccctcccgggcgggcggcacc

SEQ ID NO: 184629 - DNA, 544 bp, Arabidopsis thaliana
  unsure (1)..(544): unsure at all n locations
gacgtcccatgcgcgcgtacctgagcttggatcctctagagcggggcgcctttgggggggggggggttatttatttttttctttttttttctttcgatgcgtgtnggggggcgggcgccgcccgccgtaaacgaaacccccttggcctaaaagagggaccctgtgtgtggagccgggcgcccctccgaggtgccaattccccttactccccccccctttgtcgggggcgaagggggtcaccccctcgggggttcccctcaaaaaaggggggggggggcggggggtcccgtgccgcgcggtgcgcccgccgcccttgagcggcgcgcccccccccccttggggggtggtgtaggaacagaaccctcgtggggcgggggggcgccccccccccccccggcggggggctcttgtggggggggggccgcttcctctccttcgtcgatgtccgacgggcggggccactggggtgttccccctgtttgtggagcggtgggtgagggcgtccccccccgcaaagaggccgcggggggtgagcccgcggggg

SEQ ID NO: 184630 - DNA, 318 bp, Arabidopsis thaliana
gccttcagcgttgtactgtaaatcatcggttctcggtcgcacccttcccacctccactccgtccggtcacttgccgctccgtaccgatttcacgatctttttttttcgggggggggggggtttcatttcggtcgggcgctctcgaaaaaaaacaacttcttctggtccatcacctttcgtttgtcttacgtccgctcctgtaatattgtgcgcactccagtttcgacccaccccacttcgcttctcgcttccttcatatgtgttagttaggttctccgttcctatactagaggctgcctggctatcgactcgcgctct

SEQ ID NO: 184631 - DNA, 450 bp, Arabidopsis thaliana
  unsure (1)..(450): unsure at all n locations
gtacccgtccccaattccccgntcgggccacgcgtccaaaatatcattgaaacaaaaacccaccttttaaagggtcatattattttctttntcctaactattacgtcactcaatccccccaaattatcaaaccatttttttcttctgacctacacacttccctttttaactcacgggcaactcctcacatctaaaaatccaactaaaaattcctcctggccacccttcaatgcagccatttacttctacccaaaaggttttactaccttatgattaccttaaaccacttacgggaacccttttatttttttcactaaaatggatttaaccccccacgtaataaaacttttaaaaagctccttcccattaacaaccaatttattttcttcttaatccttcttttttccctcaaaaagcctcaaaaaaaaaattccccctaaaaggtttttt

SEQ ID NO: 184632 - DNA, 150 bp, Arabidopsis thaliana
ttcactcttggaacttccctcggccgccattccgcggctggaaaacaaggtaaattaacaattttcagctgtgggactttcggccacattccggacattccggggggtcaagcaaaacactcgtaggttttgcaggggggggcaaaaaaa

SEQ ID NO: 184633 - DNA, 384 bp, Arabidopsis thaliana
aaaaaaatttttttttttttttctttttaaaaaatcagggtttccttttttcttaatagaaaacaaaccatttttttaggggttgagttattcgacctgtccaactaaaaaccaaagcaaaaccttttttgtcaagggaagctctaataaaacaaaaacaatcctcaaatattcctgaacataacaaaaaaatcccctccccttttcacgggctctgtttaaacatttctgaattttaacccaatacttttttcggaatccatgggttttttttgaatcccttgggtcccaaacccttggaggctggaccattattccccttaagcatgaactttacttccccacactccaaattttttaattaaaaaataatctcttggaaaa

SEQ ID NO: 184634 - DNA, 304 bp, Arabidopsis thaliana
  unsure (1)..(304): unsure at all n locations
tcctaaaaaatatcttctccaaaaaaatcccaatctttccttttatcacctttttttaaaaaaacccaacccccccccctttttttttcacattctctttaaaaaccacttattccccaaaggcaatnttttctccattaacctccacctaaaaaaaaagaacccttcacttctctttataattaaaaccccccccaaaacttccctcccccccaacaaaggaccaacgtttttacctctctttttagggaatccccaaaaaccgccaaagtgcccttcccattcttttgaacccaaaaaaaaa

SEQ ID NO: 184635 - DNA, 550 bp, Arabidopsis thaliana
  unsure (1)..(550): unsure at all n locations
ccctcagcctttcatcccttaaaccttccccccctccagggtttagggtgttaaaaaaaaaaaatttttatatctctttaataaacctttctttttacaatacctaccatcctctttttctttacacctctttctttaaaaatcaacatcgccaactnccaaatttcttttttctaccaccccctcttttcctccaaacaccttattatttctttttgaggggggagtttccatcctctccctctttcccaaacaaaaaaaactttttctttctcctctaccacctcccatcaccgcctccacctctttccccccctatctaattaacctctctctaaatgccacctttccctctcttctacagtataaacacacattcttctttttccaacccacccatacccacttcaccaccctctcccacctttccccaatcacttccttttatcccccccctgctttactcccatatatctcctaatcctttctccactcttcctctcataagacctactcgtccaccacttctcacctttttctctcctatcct

SEQ ID NO: 184636 - DNA, 482 bp, Arabidopsis thaliana
  unsure (1)..(482): unsure at all n locations
tccgacttactttaagggaacgctggtccccctccaggtaccgtgccccgatatcccgggggggcgcgggcgggcccgaaataaacaaanaaagaagttgggaaaggttttttcccacgcaaaaatttccccgtaacctttccttgtgcgggttatggaatgagcttcttttatcccaagctttccagtagggctttaattgttttttacaaagggggggcggccttttcgggcgagggaaaaaataaaacggcgngggggtttcccccctccttcccccaaggtgcctgnaattccagaggatacctgaccttttttaaggataaatttaactttcgttttcctctctcccccttgaaaggggaattttcttcaaccttaagattcttttggtaatcttacattgggtgggccaataaaaaaaacaaccccttttttttttttcaacgctccccgttgtggaccgtgcttttccaggggct

SEQ ID NO: 184637 - DNA, 374 bp, Arabidopsis thaliana
accacttagaacattcaggcaagctcgcgattgctgtcgtatttgagttactctcagatcacatactaagcgtgtaatgtctactcgacatgacatttatactcgactcccgtctctaccatcatttttttgtttattagggggggggtcttgtaccactccttgtccattcgtcacaaacaaattcgtttctcgcctcttccataactatatatcctacgttaccctctctatccgcctcaagatctctccccgacttgatcgtgtccgcgcctggcttctcaggtccaaagcactctcctcagtccgctataccccgttatatgtaatgtattttcacgtactcttacagctactaccgcatagcaaaatat

SEQ ID NO: 184638 - DNA, 634 bp, Arabidopsis thaliana
aaaaaaaaaaagaaacctctttttaaaaccccccccacctaaaaaataaaaaagaagacgcccaactcataataaacctataccttttttactcgagggggaaaggcgacaaaaaaaaaacgcccctccccactttcataactcctcaacttccctcacccccacaattccaacctctcacctaccaacaccctcctcaccacctcataatcctcactatcatcatttacttcacaacaaaaaaaatcttctttacaccggggggaggtcaccacaccccttacccccccacaaaaaaaatccctctcgacttcctcctttcctccaacacttataatctcacctttctcttcctttcttcacctcatattctacatatcatattacacatcatctttttctccatataacatacttcaaccacccattacaatccctctttcacatccattcaaataaaacacaccaatccaactctacaccccacacctaccaatacaacacccacccctaatctactactaccctccacctaccacactcactacaccaagcctttactcttatctctatatctcacccctacaaccacccacctctccacaaatccataactcttcaatcctactcctct

SEQ ID NO: 184639 - DNA, 124 bp, Arabidopsis thaliana
ctatatatatatcttggaaaacaacgggacccgggaggttctttcccctctaacaaattgggtcgtttttggaaaagggaggcattatccaaattttcttactccccagggggggtccttttta

SEQ ID NO: 184640 - DNA, 444 bp, Arabidopsis thaliana
  unsure (1)..(444): unsure at all n locations
ttcattcttaggaactgtccctcagtccctcccaatcccgtgggccacggctcccccacacatccttttttncttttttttttccccattcccgaacaccccgaagaaatctacgaacttcttaattcctgccctcacaacccttagttccctcccgggggtttcttcttttgccttaaaccattaacaaggaaattcgggaattttaaattgtgaaacccatatccgaaaccaaaaaaaataccgtttttctccctggtgaccctactttttttcttaatttaaccaacaaaaaaaaaattcccgcttttcaaaaacacctttttctttcaccctaaaacccaatttctttttaacttaaaaccaaactccttgatctaaattcccaataaacaaaaactttttcttacaagaaaacccctctccaaaaatttttttaaaacc

SEQ ID NO: 184641 - DNA, 580 bp, Arabidopsis thaliana
ccaaaatctatgacgtcgcatcgccccctacctaaacttggatcctctagagcggccgcccccggggacgggggggttttaaaaaattttttttctctttccccccctcccccccccaaaaaaaaaattgcaattcttttccccccccgagggtcctttgttttaaggcggccccctccaaaaaaccatttttccctgccacactaaaaacctaaaaacccctttttttcttttctttgcggggggcggggaaaaacccctacccatccctacgaaaaaaatccctcccccaaccgtccccacgttgaaaccccccgcttttttccctccctttttgcgggcaaacatcggtgcgttccacttgtaatctcactcttccacccaaaaacccccgcccccttgtttactaaaaaaatctccccccgtcttttttttcctgtccttccaccccccaaaagagaatttccccttctccctcttccttctgggggtcctttcccgcctccctcggggaaagaccatacacccacccacccctccccaaaatcccgtgtgcccccgatgacctgcgcccctcccc

SEQ ID NO: 184642 - DNA, 514 bp, Arabidopsis thaliana
ttggatcctctagagcggccgcccccgggggggggggtttttgtttatttttttttttttttggaggggaaaaaacttttctattaaaaattgttaactttttacactcttaaaaaaaaaagtctcacgttaatgcaaaaccaaataggcggattattgtggaaaaaagaggatgacaggtttggggatgtgcgcgggaaacaaacaatatgtttttgggctttgttcaaaccaaaaggttttgtgagggggaccctaaaaaagactcttcaaaatcttaatatgtcaaagactttccaaaaaaaaatttttttaccggggcttcttcaccttgggggggcgaaccagggggggaaaccccccgaaaaggggggagaaaaaaaggaaggtgcccccgggggggtgacccctttttggggttttcagggatgagggttgacaccgtccgggggggatttgtttccgaccttcacccccccgggatttggaaaaaacccccgctcccccctttttt

SEQ ID NO: 184643 - DNA, 163 bp, Arabidopsis thaliana
  unsure (1)..(163): unsure at all n locations
ctggtacgcctgcaggtaccggtcccnaattcccnngtcgggccacgcgtcccaataaaaaaaggcatattcctcaggttggcatcatatggaaatgttctgaaggaactattccatgaggaggacaaaggaagatgatgttttgaaaacaagttcaattaaa

SEQ ID NO: 184644 - DNA, 283 bp, Arabidopsis thaliana
actttccttttgaactgtccctcagccgccattccgcgcccgcgtccccctcataacggagaataaaaaatacaaacaccgccctatccaccgcgctatccaccgcctctaaaatggggtctcttctctcgtaaacagtccaccctactttactctgtgtctacaacgtgtctgtgtcaccccttttggccgctaacatatactctctgctcctaagcttcctttcgactaccgaccacggaggtttattgacatgccttatctctttgaactcgcgcacttg

SEQ ID NO: 184645 - DNA, 408 bp, Arabidopsis thaliana
ctgtccctcgtctcccattccgcgccactcatcttcttcttactaaatttatttctttatttggaatcaaattattcaatcatcgaaaattaaatcttccccaagaatcttttattgaaggctcaaacaatccttcataaaacctctctatccatacaaaaaccatttccttgtttaagcgaaatcttctttttgcaaaaaacccttccaagtttcgtgtaaaactcttttttctttgaagaaaaactttaggccgtcttggtcccacccttttggttctttcactcgtagatctttttaattttttccaatttaaacccctctttaaccctttttggccatctccccctttaacaaatttccccaacccaaacccttttccaaaggcttctttgtttcttttttaaa

SEQ ID NO: 184646 - DNA, 398 bp, Arabidopsis thaliana
tacctccttcagatgctcaatcccgccttttggaattctttctattatttttaaccctcccggggttactgtgataaaccaaacctttctaccacccccatttgtttcataattttcataaccctcaaaaacatcttattggtgaaaacattaaagggagaacccggagacctaaaattgtttttcttctttcgtgctttcttacttccacatgaaattttgattccgaaatatcccaaattttcatttctttttttgtccttttttaaccactttgcctatttccaaaatttttttctaattccgaacccaaaacctttctttaaaaacttggtttttttaaatttcttgggcgaaaatttcccttttaaaacaaaaaaaaaaggggcgccccttta

SEQ ID NO: 184647 - DNA, 557 bp, Arabidopsis thaliana
  unsure (1)..(557): unsure at all n locations
gagcccagcgagggagggaggggggggggggggctgntggtaacctctccaaaactttgacgtcgcacgacgccgtcgtaagcttgagtcctctagagcgggccgccctttgggggttgggtgtttttgtataaaanatacatttatatatctctccattaatctgaacagagcataaaatccctcttttttctctttagagcttttcattgggaataaagataccgatagggcgaaaagaaccactgggtagatgggcgaaacttctctaaaatctattttttagggggggcggttttttgccccggaagaanagggaaaaaaaatggagacattgggatggagggaccaagaaaaattctctcctctctttaggccgctgcgggttgagagagtaaccgtggtgaaaaaaccctaggcccaggtggggctctgggccgcgcttccaccatttggcgcaatgggaactctccaaggggtggagggccgagctggaatgggaatgtgccccctatggggggaaaacaacgggcgcgcgaggggtggcgaaagaagcc

SEQ ID NO: 184648 - DNA, 184 bp, Arabidopsis thaliana
ttagtttttccttctagagagtccacatccaaggaattggaggaagaatattgtccgcaagggatgggcaatcgtcctatcgagatcggggtgattaattcttggggtgggggaaactctgaggagatccattactacggctcccgggggggaataatggtgcccctatgggtatataattccg

SEQ ID NO: 184649 - DNA, 209 bp, Arabidopsis thaliana
  unsure (1)..(209): unsure at all n locations
gaaagctgggtgcccctccaggtaccggtcccgnattcccccgggtggggccacggcgtgcccaataaaaattntaacaacccacccttcaacaacaacaaacattattccatgtgggcgttttcgataagcgccaatagggctctccacttaagcgtttctggttagnagaaagaaataatggggggagtgtttcccacccttcttac

SEQ ID NO: 184650 - DNA, 393 bp, Arabidopsis thaliana
ctccaagtacccgtcccaattcccggtcgaccaccctcaacactaaaacactaacctaagaccacaaaattggttctttacttttggttctatccccatccacagtaattacaatctcattcatccttattctaccgttggcccatcctctactaaaccaaactcgcatcccaccatcattttaaaaacctactcattacctaaactcttccctggatacaatactctaccaaccaaacctctttacctatacaattactctcccccttattcgaaattcaaaacccctcccctatactaacaaaaaacctacttgaataaaaacttaagtctaccctcccattctcctattaaaattcaaaaactttggaaacaacacccaattctccctta

SEQ ID NO: 184651 - DNA, 258 bp, Arabidopsis thaliana
  unsure (1)..(258): unsure at all n locations
gccttcaaaaaattaccccctctattgaccccatcctcgtttccttttttcaacttccctaaaccagcttggcgtaccacctcttatatcccttccctccccggggtcacccaattctaatattttcctgggggaattccccccaattttttaaacaaaaacccccaggtttctttcttctactaatcctaaagcggccttttcttccaataacaattttncacagaattcaatgggcgtaaacaagagccccccccc

SEQ ID NO: 184652 - DNA, 251 bp, Arabidopsis thaliana
  unsure (1)..(251): unsure at all n locations
tatcattcttagaaactgtccctcgtccgccgattccgtgggccagctcttttttccaaataccacatggtgggatacaaggacccttntaccccctttctcgatacttgacattcttccacatcttcttctggaaggaaacacttttctgggttccggaaaatttgaacaaatgctatgaaactattattctaatttgaacttattctaatcatttatactcctcgactctcggaaacaaaattttccat

SEQ ID NO: 184653 - DNA, 194 bp, Arabidopsis thaliana
  unsure (1)..(194): unsure at all n locations
cccaactttcacttttagaaactgtccctcattccttcccattccggtcagcaccgtccccaaacaaaaaaattctttaaaacttgtctgttacttgaaaattatcacttggtatctcttttangtttttctcatctgttatttctaacatttactatgcgcaagcccaggcacttcnaatggtaaaaaaatct

SEQ ID NO: 184654 - DNA, 627 bp, Arabidopsis thaliana
  unsure (1)..(627): unsure at all n locations
cgcgtcggcggagggagagaggaagggnggggcctcttggggacctccccaaaactatgacgtcccacccacgccctacgtaagcttggatcctctaaagcggccgccctttgggttttggttttttcttcaaaattcaaaattcatcccgagaagatgtgaatttggcaaaagggggaaaagtggattggggtctctaatttgtctcccaaaactttggtggataaggtaataaaattctgcgaacaaaaaaaaaggggagggggttccctcacccggtttgattgggggggggggaaacaaaaactgagcggcgtttccaaacaacaaaaaaattttgaccctaaaggggggattatggagttttgctttccttgcctctaccgaatcttgctttctctccgctaaactaagagtgccgggcgggagaaccttccctggttttcccttttttttgagcggggaccatgtcgtgggtggaacggaaacccccccgccctttaaaccacgtccctatatccggtacccgggaaaaaccaagttgcctcctgtcacctttggtagaagtcgaacagtgcgggcacaccagccgacaatggtgcgccttgcctgacttgttttgcggcg

SEQ ID NO: 184655 - DNA, 525 bp, Arabidopsis thaliana
  unsure (1)..(525): unsure at all n locations
ccaaaaaccttccaaaatcaagggacctcccgaggggtttgggaaagggttaaattttgggcggaaagataccccttcccttacaccttttcttttaagtattttttcaaaaggagggggggagcacccccttttggtggggggnaaaaaaaaaaaagagttcaaaggggggttcttaaccaaccccaccccggccggggggaagtggggaaattaacaaaattccgggcgtgggaaaaaaaaaacaggggggacccggaccccaaaagggggtttgaaaaaaacctttttaaaaattagtcgccccggaactttttacaaaaagtccttgctccctttttttcttttattccacacttatggctttttatcccttttcaatcccaattaaagaaccgggttttttcctccctttgggacatatttgggcccttggaggccttttttgttggtagggcccctttaagggcctctttttttttttgaaagggtttattgtccgctctctccaaattttttaggggg

SEQ ID NO: 184656 - DNA, 493 bp, Arabidopsis thaliana
ggaggggggcgtcgaaacacaaaaacatcccgctcgcttctttcggctccgctcctctaccctttcttccgcttctctctcccgcatcatttctgtctctcctcccctttccgctcgcgcctctctcgcgctccgctttttgtctttctctccgtccctcccgctccctgcgcttcttctctcgttttttttttggggggggggggtgctccccctcctcgcgttgcggtacctatcaaaaatatatcctcttcgccgctcttcgctttcgattgcgacgtcctcgcttccggttccgttacctatcgctgctcgcacgcgcgtcctgtcagactcctcgcttcacttgctgtgtcctgcaggtcttctctcgttgtcttctcttctctgtcgcttcccttttctgtctatatctccccacttccttctaccgcttgcttctcccggctttcctgtgttccgcccgcactgcctccgacttagctcctcctct

SEQ ID NO: 184657 - DNA, 438 bp, Arabidopsis thaliana
  unsure (1)..(438): unsure at all n locations
cggcccccccttcgggggtttgtgggttttttttaaacaaaaattaaaatcaacctgggtggttcaaggtttgcacacttttttacctaacttccacatgnggacccagagcttcttaaccgggaaagagtttctttctctttttttttttacaaaaaccccccacccgtctttttttttctcttgtgggcgaggggggtnccccccnggtggggattttcatttaaaaaaaaaaaatcccttgtttagaggggcctttacggattcccccccctcctcccccctctctttttcttcctaacagcgggaatccctcccccgtgtgcgggtagagcgttttcgacaaagtgacatcctcctgcgcggggtgggctataagccaaacccctcctttcttcttttccctgcgcgctttccgggcgagttccccccgccctc

SEQ ID NO: 184658 - DNA, 369 bp, Arabidopsis thaliana
  unsure (1)..(369): unsure at all n locations
tgcgcaccccccccccctcttttgaaaacctttccccccccgcagcccccccccatttcccgaggggcggggcgaaaaacaaaattncccacccnnnnctccacttttttaaaaactccccttaattaaaattttttcccttctccgaatcttttcaccagtttgggggcctccttttcctcagaaaaaaaaaaatctttttctaaaaacgggaggggcnaaccctttnggggcttcaaaaaaaaaatatctctttttctaacccnccttttcccccccctggagatttcaccaccccgcctctccctttttaccgcctaaaacaaaacttgttttttcccccccaacccctctccctcccggagggac

SEQ ID NO: 184659 - DNA, 520 bp, Arabidopsis thaliana
  unsure (1)..(520): unsure at all n locations
tttaaggccccccccttaaaaccccggggcgtcttaacctttttcctttaaggaccccccctttttttttttcgccctcccttgcctttggataaattaaaaaaaacccctttccctaagcagagccttttttgggaaggtttctaaaaaaaacccttttttcccnccttaaaaagatggacaggctcttcccaaaaaaaaaacctttccctttgccgcggaacaccttaaataaagttttagctcttcttaaccccgtgcctttaaagttttccaaacccaaaccccacatatttttgtctacccctctttcntttttttgggataaaaggatcctctcccctttcttccctatataggtttccctcctttggggctccttttcctacccttccccccccggggagagaagggctcccacaggccacacccccgtcctctcccttatctctttctccccgaataaaaattagcgttgttcccccccacaggccttttattttctctctaaaaaattccc

SEQ ID NO: 184660 - DNA, 429 bp, Arabidopsis thaliana
  unsure (1)..(429): unsure at all n locations
taaaaaaaaaaaatttatttactccccctggaaataaaacgtggtgatggacgaggaaaaaccgaccatttttttggcccgagcccttctatcatgaaagaggggggaacaaagaaaaaaaacattttttttggacaaaactgagaccaaaaccatatactgggggggggggttttnaaaccngaaggaggtnnnaaaaaaaaaaaaaaatttttttccaccttcccaaagcttttcctctttttctaaaaggtgggtgtccgctagagaggctatttccttaaatatgttttagaaatggcgtggggaaagtaacccaggcctcttgaatctctatttgcgaaataagaagggcgatatccgctcccggggggctgccttcgtggtggaaggagggagcaagccctcacagcgtttttttttgggtga

SEQ ID NO: 184661 - DNA, 534 bp, Arabidopsis thaliana
  unsure (1)..(534): unsure at all n locations
tttaaaaaatttccccctctcatacccccccctatttccggggagcccgccttcaaattaaaaaaaaaaaaccccccccctcccccccccataaaatttttaaaaaagccccttcttctttaaaaccccctttaacttttcccctttaaatttaaaaaccccccaaaattccaaagggtttgtttccctttttaaaccaaaaaaaaagttgacccttttaaacctgcttaaaataaaaaagtttctcccccccattggtctcccaaagtcacttacctantttcttcctttttttaaaaatttcttcctccatataaaacccttcccccatatttttcacaatcaatttatttttcccccagaggtttcttttttcttttcgcccccccctttcaaaacattgtaaatactttcccccccaaaaacaccccccaatcttttctccccaccacttggccacaaaaacccccttgatctccccaccttacacaaaaaatctccccaaaccttcctctctaaacacccccaaaaacc

SEQ ID NO: 184662 - DNA, 416 bp, Arabidopsis thaliana
  unsure (1)..(416): unsure at all n locations
cgcgctggaaaaattagaaaaaggggngggggggctttgtggggnacacccctccaaaatcttatgacgtnctatccaccccctccctaagcttggatcctctatagcgggcgccctttggggtttgtttttttaaacaaaaaaataantctttatttccctgccccctttttaaaacaaaggaaacaccaccccattttgtttacctatccaaaaattaaaaccccgcaaagaaagaaacccccaaactcctccccactaccaatcctattattttgatggggggggcgaattctattacctttgggggggggggccgccacaataaaacgaaggcccctctaaaaacaatccccctttaccggaaactttgggtgttcgctccaaaactcttgatagaaatttggcctcaacct

SEQ ID NO: 184663 - DNA, 447 bp, Arabidopsis thaliana
  unsure (1)..(447): unsure at all n locations
cccctgcagggacccgggccccaattccccggaggggccgggcgtgcaataaaaataaacngcccctttttttttttcttttaacaaatgaaaactctagcgatccccacccaagggctccctagacacccctccttaaaaaacctctttccgggggggggaacaaacctcgggggccaaaataaaaaaaaaccgcctgaacctcccctaggggctttcccccccaaaaaaaaagaaaccaccaagaaccaccccgccgcaccctcccccaaaaggggggaggcccccctttaggggtttgcccccttcaaaataaccaacctaccgtgtttctttacaacgcggcccatagaggccaattacacaaaagcgcgggccccccccctgccccggaatatattagccaaaacgtatccgccgccgcggggggcggccgaaaccaaaaaa

SEQ ID NO: 184664 - DNA, 538 bp, Arabidopsis thaliana
  unsure (1)..(538): unsure at all n locations
aaaatttccaaaattttttttaatanccatgggggggggggggggtccttattgtcgcggggagatattgcgaaagaaatcggcggggggaggaaacctggggttttttccgtcttttccgggggggggggagaggcctttcccttgggggcgctnttaaaaaaaaaaatcttcttccctggggggggggtaagccgcccccgggggaaaaacggggggggggcggggggagatcgcccgccgaaaaaatggaatttngtcccccccgtagaggggggctcttaaggggaggggactcctcaaaacacggttcgcggggggggggggggttcctaattttcccggggggggaggcaatgtgtctttctaaattaggggggggggggggttgggggggggattttttttttgggggggaaagggatggggggggggggggaatccgttgggggggggggggggggggctccctgtggcgccaggggggggagaaaacgggcgcgggggggggggggggggggaaaaaagcccggggggg

SEQ ID NO: 184665 - DNA, 695 bp, Arabidopsis thaliana
  unsure (1)..(695): unsure at all n locations
cagacagcgcgcggaacaccgcggaagacggaacacggggaacagcgcgcgaacacgcggacgcggcaccgcgacggacacgacgcgacagcggcgcgcgcagagcccaggcagagaagaggaacggcgcgccaagagggagcgcgcaagcaccgacgagcacgccagccgagccgcgcggcgcgccacgcgccgcaccgccaccgacgcaggcgcaggaaacgacaaggcgaaaaagaagcgccctcctcccctcccggacacgcggcggggggggggggaaacaacccccgcgccccacaagaaaagaccccgcgcaggcagacacaggcgcaggggaaaagaaaggggggacaaaaccccccaccacacccaagaaacccgccggggaacccccccccacaagaaaagggggggggccgcccccccccccggggaggggggtnccagggggcgggctnngggggaaaaaaaaacaccacaaaccccacaaaaaaaacccccccccccggggggaacacaccaaaaaagaaaaaaaggggggggaaaaaaaaaagggggggggaagaaaaaaaaccaccccgcgggggggcggggcgcgccccacaaaaaaaaaaacgcgcgggggggcggaaaaaaaaaaaaaaaaacaggacaagcgcccccccggcgggggggggggaaacaaacaccgc

SEQ ID NO: 184666 - DNA, 409 bp, Arabidopsis thaliana
  unsure (1)..(409): unsure at all n locations
cccttcctaaactaattaaacccataaaatccctttctttttctcaacccttaattcttaaacccttgaagttctttgggaatttaaatttaattcaaaaaacccctctccacttaccttccttaaaaaacctttttttttcccctttttttcaggcagtgggtttnnaaaattttaaaaccaaaaaaaaaaaaatttcccccttttccttttaaaaagttggaaacccanaactctttttctaaaaacctctttcaaactaaaacctcccctaagtctttcttgatatttgcctttcacacaaaaattttacccctctctccccctgaaaaaaaaaaaaatttttccttttttaaatccaaccctcccacatttaacccacaagtcttttttaaaaaaaataaaaaaa

SEQ ID NO: 184667 - DNA, 392 bp, Arabidopsis thaliana
  unsure (1)..(392): unsure at all n locations
ggggggggggtttataaaaaaaaactcttttttttnaaaaaacacanccaaaaaaaaaagtccggggtcccgcaacctaaccttgggcaaggcacctttttgaaccttttataattggccagaaaatttaattttttttttatcagggagcgggccttttttttggggggctttttttaaaaaaaaatttttgtgaagggggctttttttaaagaaaaccctctttttttctcttttctcccggagagaaaactttctttaaggaagagtcaacgttttcttttttaaaaggaggggaaattttctctaagtcctttcctccttcggccgcttgttgggtggttaaaacccctcttcttttataaacccttttatttttttctaacccctgg

SEQ ID NO: 184668 - DNA, 527 bp, Arabidopsis thaliana
  unsure (1)..(527): unsure at all n locations
aaaaaccaaaaaaacctataaatttctttccccaaagccctttttttttttaattaaaattannataaaaaattgggtttccccattgttttcccttttatttacccctctttttttgccttgtttgtacgcccctnntttttccgcgatttaattaattaccccccccccgcgtttgggtgaaccttanggggccccccccctcttttttccctttaaaatctcttccagaattttttctccttctttcttctcccacttgaaaatcccttcccgtctcccaaaacaccattcttgtaacatttccagaaacccttttctcttaaggttttttcccttaaaagaaccctttcttttcctttttcaaaggggcaccctctcttttctttgaaaccccttttcccctggtgtgaacctcttttttntttttccccccccctcccaaaaaaccccccaaaaaaaaagtttcttcctcttttcccccctgccagggacccagaccccgtaaatattttttttccaaaacc

SEQ ID NO: 184669 - DNA, 603 bp, Arabidopsis thaliana
  unsure (1)..(603): unsure at all n locations
cagagcgcgaatttcaagtaagagagagcacatggtgcgcggcctcaggagggtcacacgcgtgtacgtagtgtccccgggggctggcgcgaccttgcggaccgccactcttgttctattctgcaaaaaaccgcgaagacacagatgtcgtagtaacacctgcccaagcaaaatagcggcagcactctgacgggtgggacactatggcgatgtaattactcacacacggccccagtgatagagaagacacgcgagccgacgtgagcccaagagggctacgaacactcgccccacgcgagacgacgagcggggagcgacaaagacgacacgacaactatggggatgcggatacacaaacaaggcgactactggcaatagcgcggcggacgcacccccatcgaggagaggcaccaccaagcagggagcgggacatgcgatcgcgacgcgggggcgatctatatcaccccgacggcgcgctccggaacatttntagactcggcgtgcaagagcctaaatgatatgggtggcgcgaccctctctatagcggtatttgtgacccgacccaccacgcaaaagggtacatggcgacccacccaccgctca

SEQ ID NO: 184670 - DNA, 437 bp, Arabidopsis thaliana
aagatgcgcggtttcccccggggtggggggtcaatcactcggcaggggcgcggcatggggtgcttgccccgccaccggttggcctctgctgtgcactgagtcgttttcccttttaatttggccaacctcggtctccgtttcgtcgggcgcgcagctttttccggggggatttgcaagtggattagttgcgtcgaaaaatttgtcctagctttttttgcttctggttgtctcctcgcccacttggctcctctgagcggtcggttgagtgtttcccccaattccatcggccggggtcgtttcgcgtaagtcccgcaggtcccgccagtggcggcgagtctcagttgttccgtattcccgtcgcgtcacgtcaccgtttgtgccccactatcccttgcgtgctaccggtgagggacggcgtgtttcctaccacctcatcc

SEQ ID NO: 184671 - DNA, 461 bp, Arabidopsis thaliana
cccacaaacccatagccggcggagggggggaaataaattaccaaccccgcttgggggagacccggccacaaccattaaattgtcctttttccggggggggcggaaataaaacgactacgccagcctgccatgccgttttcagacagatataccacacacggttaacgttgtctagccatttacctacccgtctcctcagtacaacgggttcaggacttttttacgggggtagaaactcgatgacacatcagaaaaaacatcaccaaacattagccaatgtaccccgttgcccctcgtcacgtcgaggggccagaattatggattctgactgatttccctttagtcgtattttctttataattaagtgtgttactcagtttttatatcgcgatgctgaggtaatgtagtgcgctttgctaattggcagtccgttgcatgtctctttattcagcatatcaccc

SEQ ID NO: 184672 - DNA, 400 bp, Arabidopsis thaliana
cggaaacaaaagaaaagagcttgatgggggctcaacaccgagtcacgaaaggggaacagcaggaccgccagaaggtaccaggtacggattcacccgggtcgggccacgccggcaaagaggagacggagcgcccagaggcccacccgtgggaaaacgagacaagcgggcacacaccggggcataaaaacggagaacaaaataaggagtcacgaggagaccccaggagcaggccacacgcagtagaccgaagaggggagttttttaagcgacggagagagggcgagagaggcagcacgccggggagaaagacaagaggggaaaagctaggcgaggcggacccccaagaggggggagggaaaaggaagggagcacagcacgagaagggagaaggaaagatggc

SEQ ID NO: 184673 - DNA, 484 bp, Arabidopsis thaliana
gaatgcattctccgcgtcagaccaacacaaaccggggttttttttttcacaccccgcacgcgtttcacccccgacactaacaccccccacgtaccacaaatctacatcatccttttaccaccggggttaggggcccgcacaaaaaaccctaaccatacgtccttcaccacaatataatcctcttctcacctatccccttctccttttaacacaattcctctcgtgccatagatcgttatccattttactcattctccccaccgcattactacctcctccccaccatactctcccttacaccaatcgggggtgctcacccatttccactcgctgtacatcctctcaatcaaatacatctcaatacgaatactatattaaccacagcacaccttcgcctctagaccatcaccaaatctcacatatgcacgcactagacccatgttaccaactacccgacttagcttgtctgtactaaaatcaccac

SEQ ID NO: 184674 - DNA, 544 bp, Arabidopsis thaliana
gggtttcgctcggacggcggccgcggggacgcggttttttgtttcccaccctccgccgttccgcggcgccgcgggcgctctggagatggtcgtttttgcggcggtttgcccccggggggggttccgaaaaaaaacccgcgcgggtgggcctggtgcgcccgtgccccgggtcccgtccccggatgctgccctctcttgtctcgtccgttcttattcgcctgttgtcggttgcccctcgtctcttctcctctgccttgcttatgtcccagcttttctcaggggggggtggggcataagctcggcttctgcggccccaaaaaaatggcgggctaagcatagtctcgtgttgtgcgaagtgggagtggggcgcatggcggcattacttgagttgtcgagtgtatctatcctcctccagtctctggcgcggtctcgtcttccttttcctcgcctcctttctcgtctttcggggctgtactgttgcgttagttgtgtttctgctgtccgccgctcctctctgtggccgcacctatttctcattcgccac

SEQ ID NO: 184675 - DNA, 548 bp, Arabidopsis thaliana
caccccgggggggggagaggccccgcacacaaaaaaacaccaacccagacaccaaacagaacccgcatcaccaccagagaacaaggaccaccaaacaacccgaccaccacaaaaggcggcacgaccacagcagcaactgtacacgaccctaggaccccaaaacgacggcgacccacaccccaaccaagcacagcagaacaaccgagaggtttttttagagggggggggagaaacaaacaaaactcgcctcccacacaaaaaaaaaacaccccccagacgacacaaaacaacggaacaggcaccccgcgcgcctgggactccgcagcaatccaacaagcacgacagcccccctgctacaaaaaaacaaacacacactagaaccgacaaccataaccgcatcaaagcaacgacagcgaacaacaaaacacacacacagtgaaccacacagagaaatcaacccaacgaggcgccagcacgcacaacccacccgcacacacacaaacccgctaacaacacgcacaactagaacacccaacgacaaaaccagc

SEQ ID NO: 184676 - DNA, 305 bp, Arabidopsis thaliana
gatggcacaacccggcgagagaccgggggcccctcttcccccggaccggcaccactcccgcactctgcgggcccaccaggagagcacaagaacagagacccgcgacacaaccgggccaagcagcggggggcagaaggagtggaatgaggcagggggccctatatgagcacgcacaaagcggcccgcacccccacggagaccgagaaccaccgcccggcaacacgacggggaatattagcacacgagaagggacaaacaaccgggagagaaacgtagccgcacgcaggcaacaagacgaacgccca

SEQ ID NO: 184677 - DNA, 645 bp, Arabidopsis thaliana
aagaagccaagcccagccagggcagggcgccagcgaacggaacggagagggaagaattggtgggggcacagggacaaaatttgaagggagagaaacccaaagcgaccagggacgcaagcccgagggatatcgcaggaggaagaacggggcagatggcgaccccgcaaacacaagaagaaccaggggggaggaaaagatgagacatacggcgcgaaagagacgggcggagagccgcaggagaacagggggacagacacgcgacgaggcaaggagggggcggcgccgcaggaaaacgagcaccaggaggaaaggactcctattccagaaacaggggagggaggaccacacgacagcgaacaaagaacagagaaagacacacaagaagacacgccaaaaaaaagagcagaggaacacgagggaaggagagaaagcgacgaggggggcgcggaaaatgcagcggcggcaagcaggaactaaacgggggcgacgggagcagctactagacacgccccgccgcgggaccgcacaggtacaggcggcgccgcccaacacagcgggggggaaagcggacaaacacacatattgagaaagaagccaccaccagccacgacgagggagggaggggagcccacacgccaaagaaca

SEQ ID NO: 184678 - DNA, 541 bp, Arabidopsis thaliana
  unsure (1)..(541): unsure at all n locations
cagacaaacaaaaaaacattgcgtgcccatcaatctattctctacgccccctattgaccactccaccatttttctcgtcctccactctacaatcctcactctatatcacggatctttccttctttttgcgtattcccccacgtaatcgacctcaccccctctttctcgtataaaacctagacggaccctatttatttaacaaccggaggttttattctccatcctcctacattcgcttagagagacaaaaagcacanctacctctctattactcctatctacataccacgactattcccccacatatacctttacaaaattctttcctttactccataagctatcatttcaataactgttattagatactatatcattactcttttttaattaacgcatattctctataatataatgctacagatttataaatcaaataacaattctgacttttgcacgacaatctattcttcgtctacccaccttactaccgttatcatatgatatacatatctaactattatatcagtcatcctccttc

SEQ ID NO: 184679 - DNA, 508 bp, Arabidopsis thaliana
agggaaacacgggagacgccacgaggagccgcgggccgcgatacaccggaggcggcggaacgcgccgccagaggcactcacgggcgaagaagaaagacccgggaagaacggcaggcgcagcggggggcaacccccgacccacggcggcgccccacgcgagggcagagacgggcggccgccactcgggaaagacccaaacacacgacgccggagaggggttttgcccccggacaacaccacgccaaggaaaaaacaggaccgaagccacccgggacagaaggaagaaggccccgccccaacagaagggtgccaaagcgaggagcagcgccccagaccgggcggtgcaccactaggggcccgtaggtattcaaccggggggcgccggcacaaaaacgacgagcccgagcgaaagagaaataacgcgcccgccacgcaccggggggtgaccccccacacaacgaaaaagagaacgcccccccaaagagggggaggcagcaccgcacccgac

SEQ ID NO: 184680 - DNA, 626 bp, Arabidopsis thaliana
  unsure (1)..(626): unsure at all n locations
gcaccgaacacaagcacagccccaccgnggngggggggaaataatttataccacccccccccctttgcgcgacgnaaaacaagggcccgcacgaaaacccggagcaccaaccgggcccctctccccagagggggccgaggcccgaccaaaaaaaaccacgcagcccaccccacacgacatacccacctacacaccagccacgtaaccccccaccacacccacacccacctacgaccatacaaccccgaacccactaaccacaccacccaccccccacaaccccaccctataccgaacatcccctccaccggggggcccacgaaacaccacccccgacgccaaaaaaaaaaccacacccacagcacaaaaacacgataacgacactccacccaagcaccacgcaaacacaacaacgacaccccacacaaaaaagcacctcgcgacaacaccacacaaccacacaacacacaccacacccacacgccccaaaccacccagacacacatccaccagcaccccccaacacacacagcatcatcccacacaacccactcgacaccccacatacaccccctccaacgctccaccgcaagccaaagtaccaaacaagactcacacccaacaca

SEQ ID NO: 184681 - DNA, 158 bp, Arabidopsis thaliana
aaaaaaaaagggctcctgcaaaaaatcaacaaaaaattatccgcaaggctatggtgcaacagatgatgtcgaattatgataatctcagtctgcccatcgcaactggtgctatatccgatctctttgccaattatcctcaactccctcctataatcccc

SEQ ID NO: 184682 - DNA, 456 bp, Arabidopsis thaliana
  unsure (1)..(456): unsure at all n locations
tacgtaagcttggatcctctagagcggttcccccngggggagggggctgtttaaaaaatttttttttcttttttttctttttttttttttttttttttttttttttcccaggaaccaacccgttttttttttccccaagcggggaaaaaaaacctttagtgggtttttttttttttcccgtaaaaaatttctatacgggggaggaatccttttggggggggagttttccacaaaaaagtaaccccacctaccttggccttttgaaaaaaaaacaaaccccctggcgggtttttctttttaaacttaaaaaatttttggctttgtggccctaattcctttttttttcccccccccctgaagacttcccctttccgattcacctaaaacaaaaaccttgcgtccctcttagaactggaaaaaccctttgccccccttcgttttttttttttaccccac

SEQ ID NO: 184683 - DNA, 209 bp, Arabidopsis thaliana
acgacgacgcccaggtgaaagaggagcactgcagcaagagagaggggcggcgcgagaagcaaaccaggaacggccacaacggggagatagggaaccgaacgccgaggaggagcgagatttttttgcggcgacagaccaacgagagggggagagcagcacaccaggccggcgaacgagagagcagcagagcgacaagagcaaagaaagag

SEQ ID NO: 184684 - DNA, 598 bp, Arabidopsis thaliana
  unsure (1)..(598): unsure at all n locations
cccccccacatctcttngcggcccccccccccccccccctctaactttggttccctttacanaccctccccccccggggttttagggcccccacaaataaaaactctccctctcctccctttttttctccggtcccccttcaccacttatcccctttttcctttttcccccccttcancaaaaatttctctttctcccccctcttcctttccccccccccctttcacaccaaagctcttttttcatccctttctttttccccggttgctgggacccaccaaacaaaagggttcttaaatataacaatttcctcccccctttccccccgccgccgcaaccccccccctcctttcgcaatctcctccccaccctcttctcctctccccctcccacaaccccccccttctctttcctccctttcttctgcccttttcccctccccttccncttttctcccgaaccgtcctccccccactcctctccccttctctccccgcgcccacccccccccgtactcttccctcccctcccctcttcaccaacaacctccccccctcccctatttctttctcttctcccccaccgacatcctctcttc

SEQ ID NO: 184685 - DNA, 447 bp, Arabidopsis thaliana
tatagggaacctggggcgcctgccggtaccgggccggaattcccggggcggccacgcctccgctcttctcctaatctgtacgggtgttatttcgaaagggtaaaaaccaaaagcgacgcaaaggggaaaatcggaaaaagtggtttatttatggcccccgctagtagatacgccggaaccggagactttttttttacggggggggggaaaagaaatcattgtcgttccgaaataaaatccccgttgacccgaagaaaaacagcgcaagtttcaacacttcccttcaataaaaaaagacttttccggaggaggaaaaaccctaaaaaagccaccccccgatctggcaacgggagaaaaaaaaaccaaccccacccacggggttttggcgcttaacggttaccacccaccccaaaagcgatgtggaaaaatacacccactccggggggg

SEQ ID NO: 184686 - DNA, 530 bp, Arabidopsis thaliana
  unsure (1)..(530): unsure at all n locations
cagagcgggggggaaagcgccgcaacaanagggaggccgcagagggggnggacgagaaggccggcggcgagcgccccaacgagaaaacaccggacaagccacgcccgccgaggaccgacaaaaaacgcgcgacagagcggagagccccctcctcccaaaggggggggcgcggcaaacccggcggcgagacggccgggagccgccgcgaggcgggagacggagcgcccccacgccgacgaccgggcggaggacggagcgcgaggaaccagccgccgcagcaaacacgcaccccgccccaggaggggcgggaccgcccagccggacacaaaggccctcggcagccaccggacagaccacacaaagccgagcaaagggcagagagacccgagccagggcaggggacagcaccccacacagcacgcgcacgacagccacacgaaagcagacacagcacgcgaagggagccagcagacacgcagcaccgacagaaccaaccggcgcccaccaacaacacccccagcaccgcggcg

SEQ ID NO: 184687 - DNA, 502 bp, Arabidopsis thaliana
  unsure (1)..(502): unsure at all n locations
gggggggggaaccgaaaacaanaggagcgggccccgagagagggcagacgagggagaagagcgcccgccagaggcgcgagggcacgcaaaacacaggagggacgaacggagaagaggaaagagagcgcacgggcaggggaggaaagaactcctcccccccgcgcggggggacgagcacacgagcggacggagcgacaacaagcagcccggacgggggagagagacggccgggcggcacaggcgccggggaagaggacgaagagacgacgcccggcaacgccagggaacgcccgacgcccagggcagaccggcgcagaagcgccgcgacggaaggcggcgacgggaccgagcgagcggcgcggagggcaggaccgagacggacaggagccaggagcaacgggaggaacaacagagacggaccgccggaggccagcaggacagcgcacgcggagagacccgacggggaagagcgcgcgagggcccggcgcacagagaagcacac

SEQ ID NO: 184688 - DNA, 419 bp, Arabidopsis thaliana
gggaaaaaaaagagccccgccaaacgagacgccgcgaagacgctacgaacggacgacacaacgcacgtgacacgcgccaccgggagagggaaacgcaagggcgaggcacagccgcaaagatccctcttttttcggggggggcccccaaaagaacaatcacgagaaaaaaaaaatcgcggggcagtccgcccagccgcccgcgaaccaaccccgcacacaccaacgcctcaaccgcgacaaagaaacgacaaaccccagcacacccccacagccactcctccaacagcaccagaccgcaagtagcaccaacccaaggaagaccaaaaaaaacaagcgcactaagaaaccaacgaaacaaacaaaagcaagaccgcacccgacgcgcgccaccgcgacccgcccgagagcacagaagacgc

SEQ ID NO: 184689 - DNA, 399 bp, Arabidopsis thaliana
ggacaaggccgctctagctggttcttaacggcgccttttttttttttttattataaaatgacgcggggtttgcggaaataaaaatctggattcttccgatttgcgtcctgaacgcccgtggggggaaagagtttttttactcggggtaggagagtaggcgcgggtataagtacccttcgctcgcttattccctggtttatccacggcggtgtgatcccccctactccgcctttccacccacttattctggtccctctcgcatctttacttctcaaaccttcccccagctcttcctcccccgtctcgcctcgatgctagacctcgagtaatccgaatacgcatcgcgcctgcatttttattgaatggtacgagcgggttcaactggacatattcgagccc

SEQ ID NO: 184690 - DNA, 432 bp, Arabidopsis thaliana
gggggaaaacccccccaacaaacaagagaggaggagaagggagagaagggaaacagaacaagaacagggaagacaaaagagacagccggggcgaaccacgaccagcccccgacgagacggccgcaaagacaaccagatccctcttaatagaggggggcaaccacgacgacgccgcagacgcacgaaagcgacccagacacgcgccagcgaaggaaccagaacacaacgaaaaaaaaacacgagaagagcgcggagaagcgccaaccgaccaacaagacgccacaccgcggcacgagcaaccctacacccccccgccacgaaagcgcccgcgccccggacccccaccagccgcaccggagccgaaacaaaatgacagaacgagcagcaagaaacagtacaaccacggcagggagcggacagcagacagccaag

SEQ ID NO: 184691 - DNA, 712 bp, Arabidopsis thaliana
  unsure (1)..(712): unsure at all n locations
cccccaatttatnaaaacnaaaccaaaccgcagaatcaccactcaaaatattactaatttatctccatgggggaaagggcggggtaaaaaaaatatctactttaaaccttacctaccatttttaacccttactctactaacatttcacctcctctcattctacctatcatcttacactctattcatatctaactctttcatataattagtctaaaaaactacaacaacaaaacaaattatctactttatctaaggagggtgagggcatccatccaacattttaatcccaacaaaaaaaaatatccccattactctcaaatcacaccttatctaactaccacataaaacccacatacatatacaaatacattcctaatactattactatcagtgataattactaccccttaacaatctacccctccacaaacaaattatatatcacatcataagataacacataaaaaccctagcttctaccacccacataattataattatactcacataaataaatcctattttcactctcattctttacatttttatttttattataaatattctagttcatatagatatttttattctacataacctcttacttacattactaatcttaatactccatacatatcacctatactttatcatctaccttattctaatctatatataagtcatatctataaaataatttttactttcattc

SEQ ID NO: 184692 - DNA, 549 bp, Arabidopsis thaliana
  unsure (1)..(549): unsure at all n locations
aaccccacgaaccagacaattacatttttgcaaaggggcggaacccccaaataaaaaaagagcacgagtgaggacagagagccaagaccccgacatcatctgcggtacagcagctctactcctcctcctaacacattcgtacataagttacaatgatatcgagacagaagagatttttctttataaaggtggccacaaacacaaccanacacacacacacacacaacccacaccaaccaccattgatctataatagaataataccgactacccacccaccgctaccaagcgccacccctctctgctgttaaatgaactcacagtgccttcctattctacccgattctatatgtcttactagtgtattactccttccctatccatactcagaactaccccagaaacacgcctatctcttactatatttctacgacgtctcctcacttctatctccagcccactacgatgtcactcctcaacgacacaaactaatattccacaagccaccccacagccctcccccaaatcatctactcagctatacatcgc

SEQ ID NO: 184693 - DNA, 441 bp, Arabidopsis thaliana
aaaaaaaaaaagggcgctcctgttgtggcccccccccccttaaaggggggaacaaccaggcgaacgtgcttgaagcctggacttttttgaacggggggggcaccgtgcctattcttatttttggaggccagctagtggcatcttacaagaaatacataacaagtgaaggtatttgttgtaacacgttgtcgcactggagcgactcagtagcgaagactgccgtctagtctgaagcccgagagagggttttttttgtttcttcgtgggggggccacacaccatcacagctcacacaaagtcgaaaaaccaactccaattatgcgttagcactgtacggaaagtcctacttattgagtgctatgcgctcgttggtccccgccgcgcgctgtatgcaacatagctctgtccgtggaagcgcctccagcgcgtcttcccgtaagt

SEQ ID NO: 184694 - DNA, 531 bp, Arabidopsis thaliana
ccgcgtacgtaagcttggatcctttaaagcggggcggccacccgctttttatttattttaatgcgaaagtgacgggaaaacggacaaccacaaaagcggggggaaacggaaaccaattcaccgtcacctcgaagccaaagcaaaaaacgctgcaaaagcagaaacaaaaaacaacgccaggcttcctccttcccttaggggggggggcccacccacacacgctggcgctcgaagcgaaaaaaccgccccaaatccgtgcccacaccccgcaacccagacgacctaaccacccgcccacggggaccgccccagagaaccgacccgggggagcgtccgaagccataaccccaccagcctcgagaacaaagacggtcgcccacgcgcgaggtgggcaagaacgcaggaccgccccgtgagagaaacatggaatagtaagaccaagcagcgcgcacacgcgaccaacgatgacaccaaaccgcagggcggcttcagcacctagtaaacgcacgagaacagcaaggagagagagag

SEQ ID NO: 184695 - DNA, 444 bp, Arabidopsis thaliana
gggccagacggccccaagagcaggcgacgcaagccaccgccgcccgggggccgcaacgacgcacacgagagacaaaacgcaggcgcaaaagaagagagttttttagaaacgaggggcggcccggcagcaccgcggcgagcaaaaaaaaacccggacacacaccgaccaccaaacacgaccgcagacaggcgcacgcgccgggggcgcgacgacagaaaacggcggccccgatagcccaaccgcccaagacccgcgtcgccccaagtagccggggcaagaacacgccgaaaaccaaacggaacgcgaagacgaacggcaacgacgccgccaacacgcacacgccgcgagccgagcaggagacccgccaacaacgacacgcagaccacaagcagcgacgcaagcgcacacccccgacccaagagaacgccgccccaaaaaccgccg

SEQ ID NO: 184696 - DNA, 675 bp, Arabidopsis thaliana
  unsure (1)..(675): unsure at all n locations
tacaagagctttgacgacgcatgcacgcctaccgaagctgggatccactagagcggccgtcctacgcgtcctggttaaacccgacccgatcacaacgacacaaagcgaaaacatgaccacacaagacgaaccgacacaacacggcatacccaccacaagaaacaccagcgacagaagacgaaagaaccctccaccacccccgcaaacaaccacgcaccctcattcaagagggggaacacaaacccncccaaggacaacggccgacccctcacggcacacacaaaacaccaaccgcgacaaaacccaaccagaccacaagcacgaaaataaatcacacccaacaaggccagccaaacccaccccccacaatcaagaccacgcccaaaggaaacccccaacaccaaatacccacacacaacgaaaccggccaaccccacaccaccccccaaaagaaacacgaaaaagcaacccccaaccaccctaaaatcgcacaccccacaaacacgacgcagcctaagcacacacaatcacaccgcgccccacgaccacccccacgaacgaaaacaccaccaaccgaaaccagccacccccggaacaccccacaaagcacaaagacacccccaccaccccaccacaacaacacccaccgaagaaagagccccaccacaccaacca

SEQ ID NO: 184697 - DNA, 535 bp, Arabidopsis thaliana
  unsure (1)..(535): unsure at all n locations
cgccggcaggtaccgggcacggaatacccgggtcgacccacgcgtccgagaccgggcccagggagaacagggacagccacagaggagctgcaagaaagaggaccaggcagaccaccgcgcgggaatcgcgaaaaaacgaggcggcacgagccgatcacgacagcaacaagcgcaggccccccccaccccagacggcacaccaggatctttttttcttataagggcggagagaagacagggacacaaaagacgggccaaaagacagcgcagcaggaggcaaccaaacaagcccggaacggggcagcacaagcagacacgctagcacacaacaacggggagacccgagcccgaacacacgcaccgcacgccagccccagagaaacgcgcacgaacanacgcacgggacaagagcacccaacgaagacggacaacccgcaaccgggcggcgaccaagcgggacagccaagaggaaaacaccgaacgaagaccacgaggcgagaggaaccgcaaaagaaacgccagacacagcaaacac

SEQ ID NO: 184698 - DNA, 148 bp, Arabidopsis thaliana
acgagcaggcacgcgtgcaggagcctgggacccaatagagcggacgtccacgcgggcgcggtcgcacgaaacaaccctcacccactagaagaacgaactgcacgagggaaggccgaccaccacctagcacgcgcagacacggggcgac

SEQ ID NO: 184699 - DNA, 147 bp, Arabidopsis thaliana
ccccacccacctccagcacgcatcaactgaccgcgatcgcgcttcggcggcggtcccacgcgtcggtgaggtccgccaatccgccagctttctacgcgcacaccaactactctatggtccatcctactatccctagttgtcgagcct

SEQ ID NO: 184700 - DNA, 337 bp, Arabidopsis thaliana
ccccgcaggaaccgggcccgaaaaaccgggttttcccacgcgtgcggaaggggaaaaaacaacgcgaacaaaacgggagaatccttctaccgctagccaaacggccttataaaaaggttttacttgaacggacccccggttaaagggaccaagcgggtattataagaaaccctaaaagtgaggcaaccccgggcgtttttttttttcgggggggtggggcgacaaacggcaaactctcgtgataccgagatttgggaaccaccttttacgcttccctccgggtgggccccgtaaaatttcccggcaaccccacacactcctaattcggtatcctgcg

SEQ ID NO: 184701 - DNA, 375 bp, Arabidopsis thaliana
agcactaaacaagaactatgacgaagcatgcacgccgtgcagtaagcctaggactccactagtagctgggtcgtccctattctgtgatttgtgttctattattaccgacactaagttagggcagccgcatcccttcatcatggaccgcatctgcctctatctgatcactctcgggagtgctgattcacatccactctactctcgactatgagtgccatcatagcggcaacaccgcgcaaacctggtcatatatttttagggggggggaacgcacaccttcgcacgtactccgcactacctgcacacttctatccttacttaaatttccacattttagctcctccccacagacttgtgttatccatgaagtgaatt

SEQ ID NO: 184702 - DNA, 243 bp, Arabidopsis thaliana
tctgtggaacgcgtctggagatgcatgagcgtaatagagctcatcgacagacacctcgcatactgttatttcgtgcgcgcggcgcgcgtgtcagttagtggacaaggtgggcatgtgcggtccggggtgctgcgaagactactgtagtggcggtaattattatcatggtgtcggtggtagcacgtagtgtggaaaccggatatacatgcagggggtgttgtctctttctatcttgtaaccggg

SEQ ID NO: 184703 - DNA, 556 bp, Arabidopsis thaliana
ttgggggcctgggggaaaaaaaaaaatctttagacaaaaacgaaactaagggagaacacgccccctgcggcccggccggttacccgttcgcccagctgtcggcggtaataaaccagtgaaaacccggaagatctacccctgagaggaacataatcaccccagacgcaagaaaaccaccctgaaccacagacaaagcaacacctacagcaccacgagaaagccaaccacggtttttttttagaggggggtaacaacaaaccggacccaacgtacccagcaacgccattctctaacacactcgtacctctcgcactacaacatccactcccacagaaaatactgacaacccgctctcgcaacaatcgtcacaatcaaaataatataggtaacatgattcctctccacaaagtctttttaaaacagagtttaaatcacgggtacaacccaacctatcccacgacatgcttacacagtcgcgacaacgtaagtgacagaagacacaaagtccacacagcaaacagcgcacaaaacagggctgtaaccgtcacaaacaaag

SEQ ID NO: 184704 - DNA, 108 bp, Arabidopsis thaliana
cactcattctcaatttatcatacccctcatttcactctcacattccttctctagactatacctatcacatacctccctccaccttctataaactccatcaccaacctc

SEQ ID NO: 184705 - DNA, 461 bp, Arabidopsis thaliana
  unsure (1)..(461): unsure at all n locations
ccgtcgtagctggatcattgagcggcgctcatatccgtgcgtttgtcgtgtgcctactgtccgaccggtgaaacaccgtgtgcttgcagttcaggtcttatgtgcaagactggtgactgacagtcatcactcttgcagtgtgctcacttgcagaagtcattgtctctcatcgctggatgctgcttgctcccccgccactagctgctcgcttgtcgtcttcactgaatctcttgtctcttgaacctccactgaccttggcgatgttcgcatgctgcgcaaggacagatatgcacctagatggctatgctgtctacaccatactttcagtctagacaactgcactcacctttgcaaagactaagcgatattggaccagctacacataagactagctgactgtcttaggttgnctatnacgctatagatacttactcacatctgacacaccagtgcaacactac

SEQ ID NO: 184706 - DNA, 418 bp, Arabidopsis thaliana
  unsure (1)..(418): unsure at all n locations
gaccgggccggaattaccggtgtcgcccacgccgccgagcaacggaaagagagaacaaagaccacaacgaggacgcgcggagcagaggaaggaacagcacccagggcacgcacagcacaccgcccagccaaccgcccgngnagagaaaccacagaacggcacagacagcgacagcgaaacaccgaagccccacagcacattttttttttagcggggggggggacgaggaccgccgagcggccaccaagaaccaaacaacgaggagaaagaaccggccagcccaaacgacgcaagcgacgcggagcaggggacgccaaaagacaaagcgcaaaggcacccacacgaccaggccccccaagacccagacaacacccccccacacagagcgggcacggagaacgacaacaccccatacaaa

SEQ ID NO: 184707 - DNA, 548 bp, Arabidopsis thaliana
cctactatttcctctctctcttttctttatcacttctacacccctcttcacacacacccacatcacatcctctcccttcatctaaccttctcacttttctcctcttttacatactattccctcatcttccctctacattatcccccaattggggcatctactccacttaatacaacacccattccccccttccccctattattaattcctacccatttaactatcactctccttattttattcttcaacctactttacatactctcatatctatttctcttcatttattttttatactctatatataatttttattcttatctccactattatctcttctttataccccattttctcctattctttctttttttcataaatgggatctcatctctcccatacttaactaaatacgcccccaccaatatacataataatcttttttttatcctttttcttttctatctttcactttactactaatatctataattttcttcttccctcttccaattttattatatctctaaccttctcctaattacacc

SEQ ID NO: 184708 - DNA, 381 bp, Arabidopsis thaliana
gggaacccgccccctgccggcccggcccgaatcccgggttcacccacgctccggaggttaaaaccccttgcgcaaaggagaattcttcacaggtgccaaacgcttatataatcagattcactcacacaattacaacaagaaaacaacgtccttttaaaaacctcaatcctctcttcaccggttttttttccacggggtgcatcacaaaaagcaaacactcaacaccaattacacccatcttcccgaacccacgataatccactcaaatttcccccctagtccccttaatcacgcatccgtccaaatacccatatcctactatgttttccgaacaaatcagtaaccctcctcttatttaagacaatggccgatcaaacccta

SEQ ID NO: 184709 - DNA, 411 bp, Arabidopsis thaliana
agatcagggtatgagacgaagggtgcagtgacgcgttcgtgtaagctttgtctggacgtcattaaagtgctgcgttcccgggagcggcgaggagcgtagtagacggccgtggagagggaggatattatgttaaagttaaatgatcccaatattcctctccttcaacgttgctttgttggtttgtgtatatcttgcgtgttatttctcaggtttatagttggtagtattatatgattctgttatttgggtagttattgggtcttggtcggactatgggtgtccttgccttcagacactgtacattgtgaatgatagtacagttgatctatgcactacttgttgtttagctacgccacgcggcggcgcactcccgctaactacgtccccgtccgtatagtacgtaacggagtt

SEQ ID NO: 184710 - DNA, 348 bp, Arabidopsis thaliana
  unsure (1)..(348): unsure at all n locations
ccgcatccacaaagagcccgtactcccgtctgcttttcttttcacanccacactagatcctactcacccaaccctctatctaaccacaggcttcgctacttagtccataacctaccccatagtggatcctcggcggtacaatccctcggcctccgagaacggacacttcgcccctttttttctgggggggcccccaaccccccaccccggtccaccactcccttcaccaggctcgccaaccatccactcccaaacccccccccccccccccaagttgacagacacccttctgcgtcataccacctaccgcctcgtgttcgccctccttacttgtgagctaccgacaca

SEQ ID NO: 184711 - DNA, 535 bp, Arabidopsis thaliana
agctctatacgactcactttagggaaagctgggacgccttggcaggaccgggcccgaatttccgggtcgacccaagcgttccgttcttccttagggggtccaacccattttccatttttaacccttaaaattaattttcaaagccagccggcctcaattatgggcaaccttattcttttccaggcaataactggtcctactccggtctttaaccgaataactctccaccttctgaatttcggaggctacctaatcgttctcgttcacaagctccggtaaaaatgcgagctttgagtccgaagactttgccctgtacggcgacgctaagctcgtcgacggcggatcttcgattcagctgactgactcagtgagtcacggtggtgggcgagtcatctataagaaacccattgagtccatgaacaatataaaattcgagtatttcaccggattctctactttcttctctttctcgatttctcctagtcgtggtgggagactcggatttgtagtgtttcctgttaatgaaacgtttgat

SEQ ID NO: 184712 - DNA, 404 bp, Arabidopsis thaliana
  unsure (1)..(404): unsure at all n locations
aacaacatctaccaaattatcaatccactattatacccaaacacaacatataacatattcatcattccccatttaccccacactaaatattacaacattacaccaatattttatattctcataactattataacaaacacacctacattactcatcccattctatccccccaaaatctcattcactaaataaatcctccattcccccactcttaccccctcatatggcttctccctttttacaaacactatttttcctccctttattaatcaaactaccaatataactatccataactcaccacttaaattccccccacccaatcactcactcactcactcaaaccctcatccaaancctacaaataaccaaccacctaaaccattacactacctcaactcctc

SEQ ID NO: 184713 - DNA, 513 bp, Arabidopsis thaliana
gggaagctggccccctgcggacccggtccggaattcccggttcgacccacccgtccgggcagggttcgggaaaaaagaaagatcccaagggtgggtaataaacggaaaaaagtccaaaagtgccaagaccttcgagcaaaaaaagaaattaccgcatcgggatcattattggcctggagaaaaaaatgggattctcccgtttttttgggtggagggcaaccgaaagacgatatccctgtgtggcttaaacccaccctcagcaagtatcagattcgctgctctttgtgggaccgtggaaaaaacccaaaagggctatgggttaaccacaataccggggttaagcgggatatttataaaaaagggacgggaagcgggaatacaacaaaattccagccgggcgacgtggtttgtgttataatgcaaatcgatgaatgggtctagcttggtaaaaagaaggaggatatatatgagagtatattggtaagagcgcacccggggaccgagaggccaatc

SEQ ID NO: 184714 - DNA, 418 bp, Arabidopsis thaliana
gggagctggcacgccttgcaggtaccgggccggtattaccgggttcgacccacgcgttcggcgttgaatatcgctctgttccggctatccatggccatgctcgaaccatacttcttggtactgtaacctggtgttcttctccactttcacactgtttcgtttggccagacgcttttcgtgtttggagaatggcattgcggaatgttttttaagggggtttatctcaaagcgaagttggccgaaggcttccttgtttaagtggaaaaggcagacaaggcgacagaagggggcccggctggaacaatgggcctggagattgcgactaaggatagggaaatccataaatgttttgggattttattacccccgtggggttgtgtaaggggagaaagttcggaaaaaccggacttccggagat

SEQ ID NO: 184715 - DNA, 408 bp, Arabidopsis thaliana
  unsure (1)..(408): unsure at all n locations
aaacaaaancanggaaagcacaccgagggcccgccccaccgaacaaaagaacacgaacaccaccccccacaggagacaaccagaccagaacccgaaacccacacagacaacaacccccccaggacgcgaaacagacgcaggccccgcgactctttttaaaagggaagtaggggcaacccccccanccaaaccccccccaccaagcaacgcaccccccacacacaacggcgccggcacccaccggacgacaaccaccgccacgcgcccacgaaccccacaccccacccgccccacaccaaccacaccacccacccaacccacccaccacgcaacacacccccaacaaggcgcggcacggcccggccacgccaacacccgcaacgagcccagagcgcgcacgccagagac

SEQ ID NO: 184716 - DNA, 514 bp, Arabidopsis thaliana columbia
tccccccctctcctccctcctttcccctcattttctcctttcttttttttccctttcccccccctccttttccccttttctccccttttctcctcttctcttttcccctttttctctcgcgttttccctcccaaccattcccctcttccccctctttttctttctttttctctctctcttccccccctcttctctcttctttttcttctcttctccctctctccttgctttttttttttccttcttcctcctctccctccccttctcttcctctcttcttttttcccgtggggtttccccccctccctccccttccaaaaaaattctttcccttcctcttctccctcccttttccctcctctctcctcttcttttttccctctcccccttctccctttcccccccttcccgcccctccccctttttttttcctcctttccccctccctcccctctcctcttctctctctccttctccccccccctctctcctccttccccccccctttctcctc

SEQ ID NO: 184717 - DNA, 577 bp, Arabidopsis thaliana
gaagcatggaacccactaaaggggctgccctcctgtttgggttctcaatcacatttactaccaaaaaaaagagacagcctaataactctgtcgggttgaatccccctggcaaaccaaccaccacctaacaccacacccaagggacggccaatcctattggaaccccccggagcagagccaggcaccttttttctggcgtgggatacaaagaaccacaggggatgagaaatgccctagcgccaggctccaaggaacccaccaaccgcagaataccgggaaacaggccacggacggaaaagcagggggcgcgcgagcaacaagaccagggccctcgaacgcagcccgcacgcccgggccaagagcacaaccggacaacgcaaaacggggcgcgagcaagaacgaccaaccctgaggaggccgcacaaaacaaccggacgcgacctccaaaactatcccacacggaccaaccggaaagacacacgcaggcccaaacaccacaggcctggcgccgggcggctaaaccaccccccacaatgggaaaacaacgggccgaccccacatcctcacccgccagaaa

SEQ ID NO: 184718 - DNA, 475 bp, Arabidopsis thaliana
ccgcagggaccgggcccgaatacccgggtcgacccacgcgtccgagagaaaggcccaggggggacagtgaccggcacctggagctacccgagagaatcaaggagcacacgaagcggcacaacccaaacccggtgcagcgccgaggggaaggggaaaaccacctaagagaccccaaagcccaccagaacgcttttctggggggggcaagcgcaaagcgccaaaaggggaccccaaaacggcagaaccagccaagaaccgggagggccaagaagaacgcggcagagacgcgccaaaaaccccaacccccgcacaaagaaacaacagaagaaccaacacaggccgcgaccaacacagcgggaaagaaaagaagagcccccccaaccgaagacgcggcaaagcagccggggggccccaaaacgcgacccaaccgagcaccaaaaagagagaagacccgcccccggcgcgccggcccagg

SEQ ID NO: 184719 - DNA, 451 bp, Arabidopsis thaliana
gtcatacgaatactatctctgctcgcgcgccgttatatgattctattaaactaccatcttcgtgacatcgtaatccgataggtatcgcttccgaatggttttataattcttggggggggggtgtctgtcgcaaccgccttcttataaataaataaaacttactcaacgcctaaaaatacgatagattaacacgcatgtatcaccgatcctacctctaatgttaacttcgctgattttcttgtctatgatcagtatcattctaatgatagccagcaaggtgtgtccacgatgcgcgacacccctatcaccgataagtagtcattaaacgaccatatatagtaatagtgctcaacctaacatgagacatacacctgcgccattatcttctataatagtctcttgcacgcccagatcgctgcctcagaaccagagcacttcgttattgacactc

SEQ ID NO: 184720 - DNA, 515 bp, Arabidopsis thaliana
  unsure (1)..(515): unsure at all n locations
ccccgcggaaccgggcccgaaacccgggtgaccccccgggcgcggggacaaaaaccaaccacgtaacaaaaggacaagacaaaaaatccccctcgagaggctccgcccccacaacgggcgacacgccaggggagaagcccacagaggacgccacacgggcccacagcccgggacttttttttttgcggggggggggcgnaggcagaaggccaaggggacaaagcccaagacaggagcgcccaacagtaaggaccgagggcgccccggggaaggcaagaaaccggagaaaaaccccgccgagcagagcgcaccggcagcagaggacgcccccagaagggacagagagcacccccagaagccgcccaagcagaggagctacgcgcggcccacacccacgacacaaacccggagacagccggaagaacaccaccgctagcccactggggaacgaaaggagagcgcgaaagcccaaaagagcaagggagacggaaccgaaaaacccgcccggaggaccg

SEQ ID NO: 184721 - DNA, 323 bp, Arabidopsis thaliana
ggggaagctagggcccgcctgcgaggtacccggtccgcgaatatcccgggttccacccacgccgtccggtcgagcacatatttctccctttgggggccaacacaaccgacagataggagagaaacgatggcgtacgaactcccttatggacctggggaataaacagccagggcacccctgcgcttgtctttctgggttacaagaagataaataccaccccaccctctttttttctcacccggaacacacgggaaacaagttgctcctcatcgaaaatgagaccgctccactcggaagcagccgtaagagcaacccacccagcc

SEQ ID NO: 184722 - DNA, 174 bp, Arabidopsis thaliana
ttcaccaccatcaccccccacatattctcgaaacgtttcaactacattactcttttctctcacctatatcgcaccgcccgatcacttaataccgttctttttcccacctacactgacccatattacatctatttccctcacttatatttccttccccgggggggaaaacctccc

SEQ ID NO: 184723 - DNA, 299 bp, Arabidopsis thaliana
ccacccccgtccctgtcctcaccatacacttttcattctatattatactattatctcattatattctcctcaatattaccccacactatttatcactatacttatatttactctacttctcatctcccacacctcatcaactgaataaatactcccactcttaacaatatctacatcccacatcctctatcatctgctctccccttacttccttcttcctctccacaaccttcacattaccctctctctctctctaccactcagtgggatattaattacctacactcaatataaacccc

SEQ ID NO: 184724 - DNA, 414 bp, Arabidopsis thaliana
cacaaattaaattaaatacatcttacccataatagagtcgatgcactcaatattaaatcgcagatatcactcaccactcactacagaagcgccagctgcctgcacgcatcgcctatttaatgtcccccacggttgtcagtccgttgtaactagacttactgttatatcgaaagtatatgtatgatttgaatatgatctgtaacttcgagacagcagtcctttgagtagtttctatacttgttaatgtttttgttatcttgattaacggaacatgcgacctgtcaccgcgcagtatctgtacaatgaatgatatattgactgctaaattcgctccgaccgtgctgacgcgttatattacatactaatatacaagaagtcatctcccgctagatataatacaccacccacagacat

SEQ ID NO: 184725 - DNA, 111 bp, Arabidopsis thaliana
cacctaccgtatagcgttatctggggggcacgcgaggagactagagtcgaggacggacgccagcgcgcaagctccgatcgtgcatatgccacatgcgcaactcaatacgtt

SEQ ID NO: 184726 - DNA, 408 bp, Arabidopsis thaliana
ttttaaaacccgcgcagcagaagcggggacctttttcccacaccgccccgggagaacccgggactgttcacatcaggaataatagcggagaagcccaagacgggcaaaacggcgcccaaaaacaattttctatgggatgtgggccaaccccaaacccagaaccacgcgaaccatacccaagattcggtggggccgggcgctggacgcgcgcgcccccgacgaggggtgacgcccgtgggcggacagagcgcgcgacaccaagcggcataccgttcagggtaagttaaaaaaaacacgttgataaaatcgactccagcgacttggccaccatgaagacgataatgccgagcacagagagacaccccacaaagagaaaagagacgaaagcacggagagacactacggcgc

SEQ ID NO: 184727 - DNA, 235 bp, Arabidopsis thaliana
tgcacttaagatcttgcgtgcatgcacgcgtcgtagctggatcttagagcggcgcctcgcgtcgcttgaaagaaaaagagattgtcaatgactgggtgagtgcaaattgcacgctctgagctggagccggaatattgactctccaacattgaacgtaccaaggtgtagagattctgtaacatattacccatacatcaggctaagatgtacatttatgctgtagagccggtagtat

SEQ ID NO: 184728 - DNA, 415 bp, Arabidopsis thaliana
  unsure (1)..(415): unsure at all n locations
gcccgcaggaaccggcccggaaaacccgggtctacccacgcggccgcggacgcaagggcgaaaacaaggagcccgcacacccggaaaaaaccacgggagggggggcgcaagcgggacaccaacagcaacaagagcncgcgaaggagcacaaccaccagccaccaaagagccagcaagccacagcgagcattttttcacagggggagagcaagaagagaacccaaccaaagccaagacaaggaaagcagccagcaccgcaggacaagagaaccaaccaaccgagagcgaggggaaacgcggaggggcaaggaaagaagaaagacgaggccgaagcccagggccgaccacgccccgggcccaggacggaaacaaccaagagccccgcgggagggcggccccgccacgcaacacggcc

SEQ ID NO: 184729 - DNA, 224 bp, Arabidopsis thaliana
tatcacatcatcctaacttcactcgtacatcacatacgccatcatcacctctcccattaatccatctccctccactcctcttcagtcctatccattttattactccctcttcctctccttctttcgttattctctattcttttatcttccaggggggctttaacacaccatactattatcactccctcctctcccctccaatatatacataaacactcacctat

SEQ ID NO: 184730 - DNA, 368 bp, Arabidopsis thaliana
  unsure (1)..(368): unsure at all n locations
cccccctctttcgcgctcgttccgcagtttcgtttttccctcatcctacccaacttcttttttctctttttttccgcgatttcttcccatttatttcttgcccctcttttgtttttctcggggggaaaggcgccctccaaaaaaaactctcttcccgctcgtcttcntatgtgtctttgtctcccgtcgatgatttctacccatcgccacacatgttgcttatctattccgcgccaccttccgaacgtattattctttaccttctatttcccccacacgttcacacactccgtctctctctccccttttcctcctctcttggggggggtggggattttctcttatgggtctttttcaaaaaaaaaaaa

SEQ ID NO: 184731 - DNA, 526 bp, Arabidopsis thaliana
gcctgcaggaccgggcccggattcccgggttgaccccgcgttcggagagtcaaactgaccgtggatattcctggtccgcgagtgaccaacacgcaaatcaattcgccccccaacacagcaggtgagattgcgacgcaccctcaaggggcatgcaaactttaaggctagggcgagaaacaacaagcacaattttttttttgggcgtggggcccccacaagaggagccccacgggaaaaacacgccctcttctataacaggggcccaccccacaatggagagcccgccgcgcaccctcgatctaatcacgcgccacatagggcaaaagggcggcccccggggcgaaaaaaacacatggggctcgcaccctccacacgagctcaggaggaccaagcctccaggaggtcaacgttcaagggggcgtgggagacgccacacccctcgcggcgctcaaagggcagcgcgacataagactccgcttacgaaacaaacccccccactacgggtgcgccgctagcacaatgcgct

SEQ ID NO: 184732 - DNA, 379 bp, Arabidopsis thaliana
taaaattcacatctccacctctaaaatctaatattaaagcagtactcatcgttattcctatcacattcatggggggttctaaaccatttctcccacacaaaactattgtctcgttctttctcctcttcacttgaccctatactctattatccaactcaatataactttacttactcttatccaccatcacccaacagtatctctattcatcactctcctttactgaattttacccccacacacctcacctaatttctatcacaaactcaccaaaactcaatatattttcacccaatcctcataacaaaattaatattatatctggggggggacacaatctctcactttatcttaacctgctctcctccttttaaaaaaa

SEQ ID NO: 184733 - DNA, 529 bp, Arabidopsis thaliana
  unsure (1)..(529): unsure at all n locations
tttttctttttccccccctttttctccctctttttctctcccccttttttctctgggatgtcccccccaacacatttcctttccccctctttctcctttcttttctctcttcccctcccctttcttctcctcttttttccttccctcccctacttactttctcctttttctcccctttctttctattccttccacctccctccccctccctccctccctttctcttgggtggtgtccntctctccgcgtcgccccctataaaaaaatcctcttcctcttcacctgctctccctcctccttctccccctccccctctcttccttcctctcctcctccccctctccctctacttccctctctcaatctactctttcaccttcctcttcccactcccccccctctcccacttccgctcctaccttaccttccacccttttcctctcccttttcttcctctctttcgctccactttcatcttctcattctactcttctctatcccatactaatatatttttatccctttccac

SEQ ID NO: 184734 - DNA, 324 bp, Arabidopsis thaliana
gtataggtgccttaacttagcatgcctcgactgatcttacgcgctcgtcgacctcgtgtttgatgcttaaggggggtgcaactgttgctttcgatgtacgttgaaaaccatgtcagaagttgccacccaacagaaaagttactaagtgcctcttcattacaaactgttactatggaaaaaaagaaaaactggctgttagtcggaggtgagcaattgtactatggtacaatttgtggactctgtttcatgtaccctgggtggttgtttaatcaatgtaaatggcccggtttgatttctgagtactttaagatggcaactttttgt

SEQ ID NO: 184735 - DNA, 599 bp, Arabidopsis thaliana
cacccccccccctcttctcctatcattcatttatcttcgtcaacttctcctcccactctacataacacatacctcattcactctaaccacccacatttacattccaatatatctcttttcccctctccttcctatataattatcatcaaatcacttacatacttttaccccaaccttttccaattaactcctacactatcccccctgggttcattcttattcaaaaacattcttccatcacttcttacccacactttatatccctctctttaattatttcattcttcttttgcttctcattccctctttatccatatcatctttccctctattaacctttctccttatttaactatacctattcctcctcttactcattattttaataattctcctcctctcccccccactcatctttattctatactaaggggattcacctattatccacttcacacaatccccactccctcctcaaaaaaaaaaactccctcttttaatctcctcatatattatatcttctcctatttccctagcaacattcctccctctccactacatatttaatttatcttcctccctaccacaccccccccccc

SEQ ID NO: 184736 - DNA, 551 bp, Arabidopsis thaliana
  unsure (1)..(551): unsure at all n locations
aggtgcactatagagagcttgacgtgcatgccgcgtacgtagcttggatctatgagcggccgcctttttttttgtttcatgtagcatatctttgtcaaacccaactgacgtagtcctgtacaattcacatagaaaattaaacatcagtagataacaagatgatgattagaagctgcncatagcatatagcatgagcangatatatataagtggagaaacagttgggtctctgctagctacttccattagaagaagagttcttatagattgtgaagaggttacgagtcgctcagcaccgagcactttttgagaagtacccgagaaccgactgagtgacgcggacggaatctacnctgcatagacatgacgaccatntctcattgctcgagctaactagactactcnntgagcttctgtccatatcgaaggtgtgtcctagcatgtcttgctagggcatatccttaaggaacaatagctcgcgctatgtagtcatgcgatctttcggtctcagtgtcctcgcgtttaagagcctagcatgaactatgaatcag

SEQ ID NO: 184737 - DNA, 405 bp, Arabidopsis thaliana
ccatgccgcgtacgaagcctgcaccatagagcggctgccagggcggttttttaaaacacttccccaaaaaaagcaaaactataaccacgagaagtaagctaaaacaaatgaaggaaatgttactcgagccataaaattccaaaaacccactctaagggggggcccgagaggaaaccaaagacaagaggccagctccccttaggggcttgaaatgcaattcgcaggggcaacagacccgaaaccacccaggaaaacagagcaccaacaaatgggcgggccaaatagaaaacacaacgctaaacacgcacccaaacaatgaaaaccggaaaacccttaaaaacaaagggcggccccaaaaaaagcacttcccacagcagttaacaaatctccggcactccaagagga

SEQ ID NO: 184738 - DNA, 481 bp, Arabidopsis thaliana
  unsure (1)..(481): unsure at all n locations
gcccgcaggaaccggcccggaattaccgggtcgacccacgcgtccggaaaaggagagagacgacaaaacnccgtggaggaacgaattggagaagaagaacaacgcccaggaagaaaacgaacgccaccaaacggcgacaagacccaagaacagcacaaacaccgcaccgcggcccggcagcggaaacctttttttttcccgggggtggcaaccancagcacgtgcggagaccacacccacgcgcaagcggaagacccccatgctggaaacaagtcccagtcccactagggagcgcaagcaccaaaaaccgcgttgaaggatgcagggccccacctgctgggatggacgaaccaggcccccagagcacccacggcaaaccgcactcccacaaacaaggaaccgccggcgcagaggggcccgagcactcagagcgcggggcgcgggatgagatggacagaccgcccgagcccccctcgaggct

SEQ ID NO: 184739 - DNA, 527 bp, Arabidopsis thaliana
gtatttttgcgaatgagattttcatctcttaggcccgacttggaccaaacccccaaacccgggacctgaacacggtaactccattctgcacggccgaacaaggaagcagtttttcctttggggtggagcaacaagcaggaccaaagctcattagccatagaacagagcattcgcgaggcaagtataaacctgcttccgatgaaggttgggatagacgaccgttctcacgtcccagaatcatttaaatactgaacgccaaatctgtacttagctaagcaacaacatggaacaaaatgttaagctagattaggtactcacaccaccgaaaactgcgtaagtatatattctaatgctaacaaacatagatttagcaaaccaagcaactgttcgaaatgagaccatcgccacaaataattaggcgcatcaaaccatcatgactccacgatctctttgagttactccagacaaacacacaaaaggggtgctcagatccagagcaggactgcaaaaagcgacacccatacaaa

SEQ ID NO: 184740 - DNA, 416 bp, Arabidopsis thaliana
cctttacttctctaacacactcaatctactccccataacctactatctaccactaccacttatatcctcacacacacaccaactaaccctacatcccaccatttttcatacccttctccaccctttccttctccccctctccaccttttactctccatccctcctcccctcttttctcttctctatcatcaaatactaccctatctctttcttatcccctcctcacacctcttcatattatattttttactcactatggggacctcaattttacccattttcatatacccattctatttacttaaaaataacaatttgtcttttatttaattcttcttccactctctttcctttcatccattatcttatattatctacatcaccattccccaattttatattacactatccaaatt

SEQ ID NO: 184741 - DNA, 162 bp, Arabidopsis thaliana
attaaatcccaactacaaaatataccactttcttacattaattcacctacttaaacatacaacctaatattattaatcaaaccccactccaaccatctcccacttatcttcaaacctaccccctacataccctcaacaatcatggtaaatatcaattatcac

SEQ ID NO: 184742 - DNA, 419 bp, Arabidopsis thaliana
  unsure (1)..(419): unsure at all n locations
ccccctggggaaccgagcccgaatcccctttcgaacccgccgacgcgccagaaaggaaccacacacgcagtgcccgaaccaaattggccggaaaaccccaaaaaacggccaacaccaacgtctactaacaaagaaaacaccccccccgatccccatccacttcgctagaacccacaaccgaccacctttttttttttaggggggggggaccacaaccacaccaccaaacaccaagacacaggcaccccctgaccacacccccccgaaacacaaccaagacaaaccaatacaccgacccgaagccgcaacacccaccaagcgacgaaagaaccccacgcacaccggcaccaaagccaagcgaaaccacccgnaccacaagacacacccgagcaccaataagccgccccccacgaaaaaca

SEQ ID NO: 184743 - DNA, 627 bp, Arabidopsis thaliana
  unsure (1)..(627): unsure at all n locations
cacccccccactcaccatcatcctctctctcattatcttattttactatcacatatatcctcattcctgatccagattagtttntatcgttatcatatattatatatctcacttcatcccctaatccttctcgccataatcccatcctctctcttttatcatatactactatcactctcccacacctctacctactcacccacaataccttcatttatcctccctacctcctccacctccctatacccctccatattctcaccattactattcctccaactttattatatacaactaatagatacagggggggactataataattacctcctcacacatttctatttcacttattattcaccattttcattctttctatatactcaacttcccaacatatatttacttccttaattttctacactactatcttaacttatttttatttctttacctttcatcccttttcacctctaaatatccaacctccgacttatctttancctccttcatatacatcttttccaccttttctaaattttcccccccaaatttactctattcgctttatttactaattcttatattttaactaaccacgtgggggggtctcttacaatcatcatc

SEQ ID NO: 184744 - DNA, 489 bp, Arabidopsis thaliana
gaaaaaaaaaaataaattctctgattgaactgaagggaacttaagagaaaacacccagccccgcaaaaaccggaccggaaacacagtttctacccagggggaagggaccacaaacaaaacgcgagaaagcccaggggagcatcagaacgcacaccgcaaggcgagaccacccccaacaaagaggagaacagaaggagaccccaccgggacgaaaaacaccacagcaaggccgaccgagacgcgactttttttttttgggaggggggagaacccccaacgctagggaacacccactgataaaagcctcgcctgcgagccacaaggcgcacaccaccccggcaagcatcaacgagaacccgagcaacagcaccgccccatcaaccgcaaggccggcactgaaccgagtggcagcagaaccacccgcgccactacgactggagcgagaagcgaattgggacaagaccggcctcggaacccagccccaccaca

SEQ ID NO: 184745 - DNA, 373 bp, Arabidopsis thaliana
ataacttatattctccatcctctattattattacctctatctttataccttatatatcttacatatacttactctcatacatatcttattctctcacctctcttaattctccccacccattactctttttccctccttattaatctaacactccctcacacaccctttcctccactcccttactcccgggtcccaaacataattccatacaaacaatttctatctcaatacacttcatttttcctcttcatattctaataaccctctctataaatttcacatacactcaaattataatcccctccctctcactcctcactatttcctcacattatccaacacacctaccacaacttttcatccatctcctccc

SEQ ID NO: 184746 - DNA, 425 bp, Arabidopsis thaliana
gaccttaaagctgcgtcatgccctctactggatcttaacggcgctttttttttatcaattgtgtgaaacttagtacacttctctacacaggccatttttttacggaattgataatctctctgtatatggattctagtctatgagtttcaaactacgccaccagctttcatgatgcatcaaggacaaacactgcctggatactagtgtcaacaggatgcttggagaactatcacttgtgatgaccacgctcaaatacaatggattggtactgagcacaacgtagtactgacaccctactcatttagagcaacctgcaagctgatgcaagtctgactcagcctgtacaactcaacacgcacttgagtgcattgatggaactagctgtcaattatatgatctcttgcgacctgcacggatcgacgtct

SEQ ID NO: 184747 - DNA, 345 bp, Arabidopsis thaliana
cgccgcctccgccgccccggtttcgctccgtgtggcggtgcttttgttgtcgcctttctcccccgggttttgtttgtggcgtctgtttccccgtcgtgttcgctgtttgttttttttccgcttttttttgtgggggggggtggtgcgtaaaacattgggttggcgcgcggtctcgtatcgtctgtggtccttcgcttcgtccgcgctcgtccgcgccggttctgttgtcggcgtgggggcctgttccctgtgtgttgttggcggtctggttgcttctgttgcggtgttgggtcgcgctctagcgtgtcgctctcgcccttctttctctactccgggggggggggg

SEQ ID NO: 184748 - DNA, 429 bp, Arabidopsis thaliana
  unsure (1)..(429): unsure at all n locations
agcgggcccctgcaggccgggccgaattccgggtcgcccacgcgttcgagcaaatcggaaagttccgcgatggcgtattacgacttttttcacaaccaacactttccttaaggccgggataccggcttggccttcttcatacgccggaatggttacccaagcttatccaccggtaccaatccaaagccttttttccttggagagggacatctaatgggaatcaccggcaccccctccgaaaagaaacttattgaggaggagaaacctgagcctctttttcccggccccattggcttcgcgataaaggaggaatggacatatccaaggaaagtntcttttatacaagggccgaaccttaatccccgaggcgtcctggcactttgaacctaatggccaaaaagctctttagacggatgggaattgaaaacc

SEQ ID NO: 184749 - DNA, 483 bp, Arabidopsis thaliana
cgccacgccgcgtcgtagctcgatctctaagcggctgctcttttttgttcaagaagacatcgacaaaccggcagacataagaagaactgatccaggccgctgttccaccggactgaactgactgtgacaacacatgcaaaattgcatgcatttatggggaactacccatgctctcagcgaacaaaattggcagagaaaatactacctcactggaacagcagacagtgaccactcccccctctcgataaattcactccgtggtcaaaaggacaacccgcacaaagaggaaacacccaacacctcaaccgcaacgtggagcaaaaaccagcctacattcaaaggacatggtcacctcgcccctctgtcagcagaaaacaccaaagggcagaaccgcctggttcccccaatacggaacggccggagaaaccagaaagtccatccagccccaagacaactggggcgcatccataaacagactgccga

SEQ ID NO: 184750 - DNA, 107 bp, Arabidopsis thaliana
ctctgatccgtgtacggtttccgcccatcaggtatgcacacgagttgtcgttgtgttcccaacaccgcccgcgggcgtttaatgttttccgatatgtttccgcccga

SEQ ID NO: 184751 - DNA, 531 bp, Arabidopsis thaliana
tcccccacataattctcctctttttttatatctcacccttttttacatcggggggaatattccccataaaatttactcaacccccgcataattattttactcataatctaatctacccacaccctatcacatatctcttctcccacaccccatacataatccatatacaccgccatattgttttttgcctcctcctcaataaatcataactatgatatatactttcggggggtggtgcttcttccctttccggaccctccccaaataaaaaatatccacaatccacttagtgcacgcgacctttaaaaccactaattctccaaccttcatcttcacccttcacgcaagcctccccatcccgattcatcctaattctaatgtcctgctcgcatattccccttccaattacatgatatgctcctcaatattcctatcctctcttctctcacaatttcacttaacaaccgagttatatcatcattcttacacttctaccaccattctccctatcccgctctttcactaaccacc

SEQ ID NO: 184752 - DNA, 530 bp, Arabidopsis thaliana
  unsure (1)..(530): unsure at all n locations
gtacgtaagcttggatcctctagagcggtcgaccttttttttttttttttaaatataagctatagtaagggaaactaatatgtcgagtgaaccaatagaccttcaatgcagttatagtgtccttcgatgcagcacaatacaaacaacgaccatgccttaagtaggaaactaggaaatcaaaaaacacgttgatctaatgagaaacgatgatgtacatgtgacgacaatgcagcacacacagtatatgagggaacactaacagaatgaggatangctatatcacaaaaatcgttgttacacaaggctagtatagcaactgatcgtgatcctgacttcaacgcttacttgattccaagctctntattatacagcactcggtgtatccttggaactcatatttgagacggctagattgaactctctttggttttgagcagcacctgacctctctngcactttactatagcccactaaccagcagctcagcagtacgtactgctgatttgacagtgacccgtgtcgttaacttt

SEQ ID NO: 184753 - DNA, 512 bp, Arabidopsis thaliana
accccgccactacgttcccccccttcttctcactccgatcccttatcgctcctccctcccccttctccaacactccacataattaccttcttaccactacctttttccttattccccccccccccccccttccgggggtacttttctcccaaaaaaaatccacctctcctctccttccccttttttttttttctctcttttcatctatctaaagagatttcccatctccacttcccccactaactttcctcccctcacctctattattactattccccctcctcgcatactaaaatctcttctcaaccccaaacatccgccggcctccacttcttctttccttcatcatcgcacgggggcgcccacacaaccaccctatctataatccccgtccccctctcactaaaaaaaaaacctgttttcccatctacttcccccgtccctgactacattagcaaaacacagacccacacactactacaatacctcacacgtcacctcaactcaatccc

SEQ ID NO: 184754 - DNA, 533 bp, Arabidopsis thaliana
tccatttcccccctcgctttaatttttcgtttgtgtcccctcttttccccggtttggtatttcccaatttttctttgggggtaatcccgtatcaacatacccggtccggcatacgtttgatatgtagttatatttttgtcaccacgcccgtacaggtttattatactctccgactctccgtgcctatttatttattcattcgcttgtatagatcggcgtcaccgccactatcttccatgtggttcgtatatatcttctggggggggtgggagctattctcctcggctgcccttcttataaaaaaaaaaaacattgtgttttgtgctcgtatctcagtaatttctctttacatcaccattctgtaccagatacttcttcattttcactacttccgtcgtctatctacatatttcactatcatctaaaccttccttctgccccgctatattttattcatcattggtgttgccgcctagactatatctttctccttctcctccctttatattcacattatttcgcctcttaattga

SEQ ID NO: 184755 - DNA, 422 bp, Arabidopsis thaliana
cttgacgccatgccctctactgatcttagagcgcgccttctgtcttttttggagatgattgtggatgcttatatcgaggctttggtgggaatacatctagtgacaagctttggttataccacagaaacaacacattatcttaactgttgccataatgatcacattgcgagctcacatgttgggatttgccaactgcaacaaccggacatctttactttcctcggggtgcacttctgattttgagaccatattaagatgtagtcatctgcctgatgagtttttagttgctgtggattcgtgatctcttgtaactgctcatctttagcattcgatctgcccactctcatgtcggagaatctcacatgtgtgtacgctacttgatcagtctaatcacagactcatgttgaaatctacctcatata

SEQ ID NO: 184756 - DNA, 122 bp, Arabidopsis thaliana
ccgccgccgctcgcccctggactatgacgtccgggctaagtgcggacgctcccgccgacctgcagtatgtgacagcatgatgatcgttgagcagacaccgcgcgtgccctaactctctacat

SEQ ID NO: 184757 - DNA, 516 bp, Arabidopsis thaliana
atacgactcactttagggaaggctggtacgcctgcgggacccggcccgaattcccgggtccgcccaagccttccgaaaaaccaaaaaaatttgtgggaaaatcctggtttttaattccttttggttaaaaaaggtggcctttttaatggtgggtttcctgggggcaagcttctaattaccccatttccgtccaattaatgatcttaggccaccttttgaaattggggttggtgaaattttcctgaataaaattatgggttaagggttttaatgaccattttcctgtaaagtaccgatttttttctcccggggattttggggaggaacaggatacaaagcctgggtttggtcctgttaatggcgttggtttttgggttctgatcaaggaagacgatgatggggagtcctggaccaatgagtgggttgatactgacactagggcaatgtgcaactgctgctgcttccattggtgttatggtttcttctaacaacttttccattacactgctttctgct

SEQ ID NO: 184758 - DNA, 523 bp, Arabidopsis thaliana
tcattacaataaactaagggaaggttgtgccccttccaggaactggacacgaattacacagggtcgaaccatagccttcggtctatccttcgggaagggggaagaaggttcacaataggtttaacgggccttgttccttttcttggaaggcaagttaaaatttttcttggcggaaaatgaaacaattataattaaaattgttttgaaaatggtataaagatgttttttttaccaagggaattaccttgtgtttttttgatggtgaaaaaaaaactttgaaattattaaaaaattctttaaagcttggggaaagacaattcaaaacttttattcttccgcaaagaagaagccttccttttttcttaaatgggttggccggggcatattggaagcctttttaaaaaagatggacttagtggggcggttattaatggccttaaaaagtttctggaaggaggaaccattccaaattttttaaccataaaaacggttggcaacatatttataaaaaaatatagaattt

SEQ ID NO: 184759 - DNA, 601 bp, Arabidopsis thaliana
ggggcgggcgcggatacttttttgcgcccccccgattccggcccccgccccccccccccgccttcggcgggcgcgcaaccacgacatttcacccgggggttggggtgccccaaaaaaaaccccacgggcgggacccggccgccgcgtcgcgggcttgttgcggcgggggggcaccccgccgcccgcaccggcgggtcgcgtcccaccggcctggcctgcagtcgtgcgccgtgcggcgcccccgcggtgggtcgcggtgtgggtgccgccggcccttttttttcggggttgtgttggcacacccgcccccccgcccccccgccccaaacaaacgcgggccggcgcgccggagagcaggggcgccgcgcgcgcgggcccggacacgcagcctgcggtgagaggcgcgccgccggcggccggggggcccccgcccccgggcgccccgacgggcgcccggggtgggccccccgggccccacgcgccgagtgtctgcgccggtgcccgctgccccgcttcgccacttgccgcccgcgcgcggccgcggcgtgccgtcctgccgcgctgtgtggttctgtcgcggatgccccggtcggagcgcgcg

SEQ ID NO: 184760 - DNA, 462 bp, Arabidopsis thaliana
  unsure (1)..(462): unsure at all n locations
cgccaggacccggcccgaaatcccggggcctcccaagccgtccggaaccgcggacatgacaaacaacccgggaaacgtacacactttgaggttggctggaaaagagggcccggccctggctggaggaccaccatggncctcaaaaccgcagagcaaccacctctcaccggctctcgaagcagggaaacttctcccttgaggcggggcaacccccgggggccccgaagatagcgacaggaacgcggcgcaacaccaggngccgcccccccgagccccaaggcacgagacaagctggcgcacccaggaccgccagaaaccgggaaaggacccacgggaggggccgcaacagcaacccaaaccccggaaccctggaactcggagggaacacacccgccaccgtactccgagaaccgcacatcgggaaacgggggagagccggcccacctcgcccccttctcccac

SEQ ID NO: 184761 - DNA, 356 bp, Arabidopsis thaliana
cagcagagaccgccagaagagcagaccgaggcgacaaaacgaccgacgagaagaacgagccccgcggagagcgagcgggcgtctttttttagagaggggggtcaagcgccgacgaagagcggcaggggaagacgggaacacaacacacgacagagaagaagacgcgggacagagaacgcgcccaacgagcgggcagaaagacgggacgagaacaaagaaaacagcgaaagaccgcaccgaaaaacagacggagcaagcagagagaaacgcagaagcggagagacgaagaagccaccatacacggaaaacaaacagaaacagaagaacaaacgcccacacaaagagacaacaaccga

SEQ ID NO: 184762 - DNA, 487 bp, Arabidopsis thaliana
  unsure (1)..(487): unsure at all n locations
agcnagggaccacaagagcggcctgcccggggggaaaaaccccnnaacccnangcgcccaaacacgcaggagcgagaggcaccaacacagcaccgcgcagacggagcacaggccacccaacacccgaacggaaacagcgcacaccagccaaaaagaaagagaaacagggcgcacaagaaaacacctccaaaagagatggagagacacccggggaggacgcaaaaaaggaaccccccgcaagggggggggcggggcagccaccccaccgcaggggagaaacaggcacacccaaaccngccggggccagcgcgccagcacaaagaagccgcgggcccccggaggaccgccgcgccaaaaccacaaggccggacccgcccccaagaccggaagcacgggacacaacaaacagagaccagggcgcgacacccggccaaacaccgggaaccccgagcaccgcggcaccagagcaaagccgagcaaaacacgg

SEQ ID NO: 184763 - DNA, 646 bp, Arabidopsis thaliana columbia
  unsure (1)..(646): unsure at all n locations
cccccctcccccccccgnnnnnncnccctcccccccccgcccccccaattccgttttaaccccggcggccccttcgcggggcggcccccccccccccccnntcnccccccccccccgacncccctcccccccccgggtttacgccccttcccccacccacaccannccccccncccccccccccctcccctcctttctccccccnnncccccccccccccccccctctcccccctgcccctccccccccccccccccgcccccccccccctctccccccccccccttccccccccccccccctcccccttccccccccctctttttcttgcgngttgttttgccccccccccccccccgccccccccaacccaccaaaacacccccccccccctccccccccctcctccccccctcctttcctccccctccccccccccccacccccccccccccccttcccccccccccttccctccccccccttccccccccccccccccccccccccccctccccccttccccccccttcccccccctccccacccccctccctccccccccccccccccccccccccccccctccccccctccccttcccctcctcccccccccccccccccctccccccccctcccccccc

SEQ ID NO: 184764 - DNA, 731 bp, Arabidopsis thaliana columbia
  unsure (1)..(731): unsure at all n locations
cccaaccgacccccccaccacccccccccccccaccccccccccccccaatttcccattttaaacagccccccccccatttaccccccagccccccccccccccccctccaccccacacacaaaaacacnaccatatttccaccccgggcgcaaaaaacctcacaaaaaacaaaaatccatgccnggccccaccacccccccaaaccaaccacacacgcaacaaacccaaacccccacaccccacacacacaccagaacacacaccgcccacacccacccgcacgagaccaccccccccccacacccacacccaaccaccaccagggacggcgaccacgcgacacccactctttctttccggggttgatgggcccacccccaacacccccgcccccgcccgcaaaaaaaaaaaaccccgccccccaggcagaccacccccccccaccacacccacacccacaacaccccacccccccccccacacccccccccccacaaaccacccacaaaccccccccacccacaccccacccacacacgcaccaaacacccacaccccccacacccccctaagccccccaccaccaccccccagacaccccccccccacacaccccccacccaggcaccccccaacccacccacaccaccccaagaccacccacccccccncccccaccatacacaaccacaccacacccaaacccaaacatcacaacgaccccccccg

SEQ ID NO: 184765 - DNA, 500 bp, Arabidopsis thaliana
ttctcccaaaaaaaaccccttctcttttcttcatcttccccccctttctttccctcctcttttcccctcctttttctttcccttcattctcctttcaattacttccctttcccctccattcttccccccgccttatcctccacccccgcccttttttttttggagttgttgtgccccccaccccctcctccctcttaaaaaaaaatactcaccctctccgcctcctttcccgcccccctcctccatctatcttccatttctctccccttctcattcatctcccgtctcgttacttctcccacttttgcgttatatccctatcctcgcccctctattgcctcccctgtccctttgcacttttctccaatattctcttccacgcgccttttttaatatcttcgccatcgccccccccgttatccccttctaaattccccgttcccccattatgtattcgcctcctcccctcctttctctcgccctttcttattttatttctt

SEQ ID NO: 184766 - DNA, 450 bp, Arabidopsis thaliana
cgcgaccgactcgaccgccccagagcccgccgccacaacgcccgcgccgcccgagtccacagcgcccgccgagcgaattttttctctggggtttgttttggcaagccccgcgagcgtcgccggccgcccgaaaaaaaaaaccgcccgtcccgcggcacgacgcgccgccgccggcccgacgaggcaccgcgagccggggcccgcggagcgacagcccccgccgtcccgtcccctcgagcccagcgggccgtcgggcgcccgggcggcccccgcgggctatggccgccgccgagccgggcggcggggacttggtctcacggcggcgccccgccccgtagagtgcggccaccgccggcgccgccccgaagccgcccgcagtcgatcgccctcgccgacatagaaggaccccgcgcccccgccgaggccccgcgcgcgcgaatgagagagaca

SEQ ID NO: 184767 - DNA, 465 bp, Arabidopsis thaliana
  unsure (1)..(465): unsure at all n locations
ccccccccanagaaagggagccagaagacgcactctcccccggggggggggccggaaaacaaaaacccgccccggggcccgcgccccccccgacccgcaaggcccccccgccgcgccggggacggcgaacagggccggccggcgcccacgcccccaaacagggaccggaggaggccgccgcccgccgtttttttacggatgtgggacacagcacccggcccgcccgaaaaaaaaagcgcgcgcgagagggcacaagcgggacggccagggaagggcacgacggcccccccgccggaggcgaggaggcgcgccgacgagggccccgccgggagacggaccggcccccaggccgcgggcggccggacagcccgggacacgcccccggccccgaagggaccagcccccacccccccagccggcgccccccccgcagcggagcggcgggcccagccgcgggacccgggc

SEQ ID NO: 184768 - DNA, 554 bp, Arabidopsis thaliana
cacgcgtacgtaagcttgggatcctctagagcggccggccttggggggttttttttgtttaaccctctaatggtagaggtctttgggggatgaacggcaacaatagcctgtagggttggcattggaaaaaccccaagattggattgtttatatcgcctggagagaggtaacgacgcggatccccaccacccggcacccacagggtttctctttgggggtggggggaagaccccaggaaaaggaggcgcgggaaaaaaaaaaggacaaaaagggaccgccacccgcgcccccgcaaggaagtgggtttagccacgcgaggtgggggtttatgccttatcttgtcaaccgcggaagaaggggggggggctcaggtgacaatgtcaggagtgaaaaatacgagtcgtgcccccacgtatgtggggccacagggaagcggcgcgcgttttctggaagctctgagtacaaacggggggtcaccttacacaggagtcatccgcgccattaattccatcgtatgagtaaactaagacttgtgaattagctaccgcgtgggg

SEQ ID NO: 184769 - DNA, 636 bp, Arabidopsis thaliana
ccccccccaagcagcgacgcccgccggggcgagagaattttagcgcccgagggggggagggccccaaaacaaccaacaccgggcgggcccccgggccccccgaccacgcgcgcgggcgagcgggcgcacggccgccgaccagcccggcgggcgcagccgcacgcagacgcgcgcagcgacgcacacacgcgcccgcgcgggagccgcggggagcgggccggacggcggccttttttttaagggaatgctggggcgccagcggcggccccgagggcgcggccgcaaaaaaacagggccgaggcgcgcgcgggggacgccgagggggtccggcgggacgctagcgccaggagagaacgcgacgagggggaggcggcgacaaccacgcgggcccgcggccggggcacacccgaccagcgacgccccccacgcggagccccaggcacgccgaccccagaagccagccgggggcgccgccggcagccccgccgccagcgcggcgccgcgccccgcgagcggcccagcgaggaaaccgcaccgcgccacccgccgcaaccaggcaccggcgcgccccccggcatggcggagcacgaggcgcagcggacccggacacgaggcagccccaagcggcgccccggg

SEQ ID NO: 184770 - DNA, 494 bp, Arabidopsis thaliana
gggaggcaacccccccgcggcccggccggaatcccgggtcgcccaggcgccccccacgaaggggacccagagggcgacaccgggaagcgcgcaccgcaaagaccaaggcaccaacaccaggccgaacaacgcggaggcaccagaaacgggaaaagccgacagagagcacccaccgacaacaggaaccacgcgtttttttcaagaggggaaagcgaaacgcccaggccgccacggggcccgccggagaacgccagaacccccgagcgggcaaaagcggaacaagacgacgccaagcacgaaacaccgggaccccaagggaccaacgtcacccccaaggaagcgccaaaccagagaggccagcggaccccacccccccacggcaaagaggccacgcgtgcaaaagaaaaaacacaccggccgacaaacacgcgcacgcacaaacaccacagggaccacaaccgaccgcagcggaacaaaacggggggggcgcccca

SEQ ID NO: 184771 - DNA, 492 bp, Arabidopsis thaliana
  unsure (1)..(492): unsure at all n locations
cagagcggtttgcccggggggggtatttccgggagaaagccnaaacccaccagaaccggccaggacggaagcaccccaggaccaacggaacgaaagcacaagggcaggaggccggcccacacaccaccaaggggggggcgaaggaaaaacaggccnccaaaggaacctttttttggggggggggaaagggcacggaccaggggagaagggaaacccaacccggcggagggggggaggccagccaaaagggcccggcnccccggaggccaaggaggaccccacccgcgggcgcccgaggacccccaacagcccgaagccccgggcgggggggagcaaaccccacgcaagggcggcaagacgcgcccgggcggaaccaaggggaagggaaaccgcgacggggcgggaggggccacccggacggcgacacaaagccggggggccggccacaggaagggaaagggcacccagagaagcacagggggccgggggggg

SEQ ID NO: 184772 - DNA, 594 bp, Arabidopsis thaliana
  unsure (1)..(594): unsure at all n locations
gggacgccgggcgaggggggagagggaaagaaagaaaaaaaaccttcnttgttgacacgacaacactttaggggaggccgagccgccngcaggaaccggcccggaaaacccgggtcgacccacgcggccggcgcaaacaggaaacgaagaagcccgcgccgagagggccacccccacccgaaaaggggggagcaaaacaccccggcgagagacgcaaaccggaaaccgccacaacggaacaccaaaaaccaaggcggccacagggaggccgcgcgaccccttttttggagagaacggacaaagagccagcaggggaggagccgggcggcccccgaaaaagcgcccacagggaggcacataccccgcgagaggggcggaagaaccacgaaggaccgagagggagcgagaggggagaaaccaatgacgccgcggccacggcgacgacgccacgcggcgcaaacaaacacccccgaggcggagcgagcagcaaagacggaacggacaagcaaggcaccgcgcacccacacagaaggcagcgcacaaggaacggagcaacgcgacccgaaagcgaccggccccgcaaagacaccgaaa

SEQ ID NO: 184773 - DNA, 520 bp, Arabidopsis thaliana
  unsure (1)..(520): unsure at all n locations
gggcccccgaggggctccccgggggggcgagccccgngccggcgcccgccgcccccggcgcggggggggggctttcccgccgggccggggggcccgcgcccgcggcgaccgggcgggcgncgcccccgcggcggcggcccccggcgcgggcgggcgggggggggcgggcccccggccgccaaaaccctctagggggggggcaaagacacgcggccccgccccaacacaccggaagagaggaaggggggggggggagccggaagcacagaacggggcccgaaaggcgggcggcacccgaccacccgccggcgccacgcgcccgcgggggcgagcccgacgagcacgggagaccagcgcgcgccccgccaacccgaggcgaaacgggacggaagccgcagaacgcggggccgagagagcgccgcaggaacagccgaagcaggcgaagcacagaagagacgaccaacaagaaagcggagggaaagccgcgaccgggccggcggggggggggcgaggccgaaaa

SEQ ID NO: 184774 - DNA, 515 bp, Arabidopsis thaliana
  unsure (1)..(515): unsure at all n locations
accgagcgcacaaagaagcaacggaagcgcgcgaaacacgaccgacccggccgccaaaaccaaattttactgcgaatgaacccgccggccgacccggacgcccccgaaagagaaagccgaatttcccccgggggggggcgaagaagcccanaaccacaaaaaagagcgggaggcgcgcggaggaagcccagagaacaccacagccaaagcgnagcacaacagggaaagaccgcacgcgagggcgggagacccagacagagcccgcaacccacagcagaaccgcgaaagaccccgcggaagacaccgccgcgcggaagcggaaaggacgccgcttttttttcacgcggggtgggaaccaacccaaacgaccgacaaagagacgacgagacagaagagcgcccacagcagaaggcggggtacaaggcgcgagccccgtagccaccgagacaaaccgcaccaggagcgccacgaacaggaaagacacccgacagagaaaagactacccagagaaccaa

SEQ ID NO: 184775 - DNA, 487 bp, Arabidopsis thaliana
  unsure (1)..(487): unsure at all n locations
gcgccgaagcgggaccccaagcggctccnggggggagaaccccaaaagaaaacgcccgaggagggacaaaacccccgggggggggaccaccccaaaaaaccacgggaaagaagcaccggaaaaagaagagggaaaacacgcggcaaaaaaaaaaaaaaacaacaatttttanaaggaagaggggaggagcacccggaaaaaacccccaaaaacaaacacaaagggggaggagggggggacccgaaaaaaaaaaacgggggagcacccaaaagaaaaacaccggggggagaaacccgcccacaccccgcgccagaaacccacgaaagagcggcgacaacacggggacgagaccccgcacgcaggggggaccacgcgaccaaggacacaccaaagagccgggggaggagcggaggcacaaggaccaacggacaccaaaaagccgcgagaagggaggcagcggccaacgccacgggacgagaaagaaagg

SEQ ID NO: 184776 - DNA, 469 bp, Arabidopsis thaliana
  unsure (1)..(469): unsure at all n locations
acccccccgcggcccggccggaaaccgggtctccccgcgccggaaccaaccgcccccgccggnaagaaaaaaaagggggagcacgaaaaaaaccaaaaccgcaacaaaagaagcgggccggaaagaaaagccccacgccagaagcccggggcgagcccgggggcgaccgggttttttttttgggggggcggcgcnaaccaaaggagaaccgccccaaaaaggcgcgaaaaccgcgcagcgaagcggaacggggagcggggaagaaggggagagagacagccggccgggcccacgggaggggcgggcgccacacagagggcaccaaccgcccgcggggccccgacggcaccacgcgcaccgggcaagggcggggccgcagcccgcacggggcagggcggcgacaacacgccggggacgaccgggaagaggacgcacccaaccccgcgccaaccacgcgaagggaggcggg

SEQ ID NO: 184777 - DNA, 584 bp, Arabidopsis thaliana
  unsure (1)..(584): unsure at all n locations
gcgccgcaagcagggagccaccagagcaggcctcccacccggggaagaaaaacccacccaagaaagaccccgccacgcccaaaaaaggggaagaaagcaagccggncgcggcaaacgcagggagcggccgccccaggcagacccaaagcccaacaaaccacacaaggccggaaggcaacngggggcgggggagaaccgaacggaacaacacggagcaaacacagagatcttttattagggggggggagaacccaacacccccaaggacggagcccaccacgcaaaacacaaagagggagcggaaggcacgaacaacgccgcccaacgcgcgaaagccgcgaacaagagaaacaaccgaccaggacacgaaaggaacacgcccccgcgaaaagggaaaggaacccaaagaccccaagagcacacaggaccgaaaacccacgaggaacgagagcaagacacccccagaaaggccacagacgagagagaaggacggcacccagggaacaccacagacccaaaaaaacgccacagcaaaacaagacagcgaacacagcagacgcacggaaggaaaacggacaaaacaa

SEQ ID NO: 184778 - DNA, 488 bp, Arabidopsis thaliana
  unsure (1)..(488): unsure at all n locations
ccccccccangacaggacgcgcaaacaaaaaattaccccaggggggggggggggcagaaccaaacaggcgccccgcgccccccagaccgcggcgagcgcccgaggaccgccggcaaccaaggcagcgggggcccgcccgatccggcgaggacgccggcccgcaccaccacggggcgggagaggagccagggcgcccttctttttaagggggtggcgaaaggccggacgccgcggcagagaaaaaaagagagcgcggagggggggcgggccggaggaggagcccggcggcgccgcgagccagcggccagcgcgcggagagcgggaagcgccaaccgggcggcccgcggcgagcagggggggcagcacaggccccccagaagacgggggcccagcgggggccgaccgccccagcagacgcggcaggaccggcgcgcggaagccgcggaaggacggccgaaagccgcaacgcgggggagggacgagcgccg

SEQ ID NO: 184779 - DNA, 410 bp, Arabidopsis thaliana
  unsure (1)..(410): unsure at all n locations
gcccccccggcaggcccggcccggaaanccggggtttcccccggcgtccgaaagaaaccggggccaccnaggaaaacaaccccacgggggcgcagcgaacccaccaccaaaagggagcagagcacgcccccgaaggccggaccaagcgacgccgaagcaagcactaaggacgcgacaacggaggaacaccaggagaacggggccgcgtttttttttaggagcgtgaagcncgcangggcgggcgaagccaacgaacaaggcccgaggaaaggaaacccacaagagaatccccagaggagagaaaccccgagggaccgcaaaacccgggaaaaggaccggccgcaagaagagaaagaccccgcccgcgaggggaccggagaagcgggggaccccccagagggcacgacacg

SEQ ID NO: 184780 - DNA, 477 bp, Arabidopsis thaliana
  unsure (1)..(477): unsure at all n locations
ccgccgcagacgggaccccagacggcttccccggggaagaacccaacaaaaaacccggccgagggggggccaatcacaggggggagagaggccaaaaacacaaagcccgccgacccgggggcccgggagagggaacacagacaaacaaagggcgccccaagacattttttctggggggggaaaagaacacaancagcaaaaacccggcaaccaaacgaaaagaggcccggggagggaacaacacaacagggaagcaggcgcccaaaaaaagacgcacccagacgggggccgggcccaaccccccccacgaccaaaggaaccccacccaaaccggaagcacaaccagggaaccccccccccgccaaaaaacgggcccgcgagaaaccccagaaacggggccccaagggggagggaaaaacacccgggaccggcggacccggggacggaggggcccaaacacaaaagaggccaagccac

SEQ ID NO: 184781 - DNA, 486 bp, Arabidopsis thaliana
  unsure (1)..(486): unsure at all n locations
acccgcggggacccacgccgccgacggcccacaagagggccacagcccggagcaacgagccctaaaagaccgcaacggcccgagcgagaaaccccccacgcgcccagggcaaaacaccccgcgaccggagaaaagcaacacccgacaaacgagaacagcgcaaagccaggggacggagaccttctttttaagagggggggggaagacgccccgccncgacgaaaggccgcgggcgcgcggccgcccccaacggcaagcgcaaagccgcccgaaagaagcgcgcgaccgaagccacgacggcacccggacacccaccccaagggaaaaaaccgcccccgcaacaccgaagaaaccgccgccccaccagacccgaagcaggccccgaccccccgcccccgaacggacagaaacaaggaccgcagacggagcacaacgcaacggaaagcccgccgaccgaacacccaagagaagcgccccggcgaagaa

SEQ ID NO: 184782 - DNA, 439 bp, Arabidopsis thaliana
  unsure (1)..(439): unsure at all n locations
gggggggcgaaaaatacttcacttgggtctcttttctctctcttctcttgggaccattccggtcgatccatatataaaagggttgatttaggtggtgttcaatgggggcacagccagtactcccttttttctcaccaccttcacccctttttggggggggtgggcaaaaaaccttgccctaccacataaaaaaaacaccccccaccctttcttctnaattaaaaccccccaaagggggcttcccttcgccactaaaaaaaaccctctttttattttgggtggagagagcgtcctaacaaaaaaaacaaacctttccaccccccaaattggaaactttgccaccggggggggggcgccctaattctccggctttttgccccaaaacgaggagcacgcccctccccaaatctttcgctccgtaaagggaccccccccccct

SEQ ID NO: 184783 - DNA, 510 bp, Arabidopsis thaliana
  unsure (1)..(510): unsure at all n locations
ttttctcttccccccccccccgcccacgggggggggaggattttttttttttcttcccattttccgcncgcccgcgcccactttggcgccacactacgcaattttctaacggggggtaggagtcccccacaaaaacctatccttctcacacaaattctgctgttatctttcgcgttcttcgcccccgtttcgttgtccgtcttcgccctatgtgatcgctctcttttcggggctatttctgccgccctattgcgcgcgggggcagcgaaatattttttttttgggttgttttgtgcaccccaaacgtggccgtagctcgtaataaaaaaatcccccggggtctttttggaccgcggttcccgcctcttatgctgatgatgcgcgttgttagggatacgccgtattattttgcttcgccgtatgtcctatgtttcatatgttccgcgggtgtatgatctcccggttcgcgggacgcttgttaggaccgtgaatttccgggcgccatgtttt

SEQ ID NO: 184784 - DNA, 312 bp, Arabidopsis thaliana
acgcaacgcaaagaccaccaaaaacgggcgcggagggaaggacttttttaccggggtgggggacacacagagcggagggacgaacaacgacgcgcgggagaaagacggggcgaacaaaggagggaaccaacaacaacgaccaggcgcaacaaacaacaccaacaaacaaaacagaaaggcgcaaacccgaccccgaacgaaggcgccaaacaaagcaaaaaaggaagagacagcccagcagaaaaacacccgcgcggcgccaagcccgacgagacccgagccaaaggaaaccaacacgcggaaacccccaga

SEQ ID NO: 184785 - DNA, 476 bp, Arabidopsis thaliana
  unsure (1)..(476): unsure at all n locations
cacgcgcgcgtacgcttggatgcaccagagcgggtggccgccctcttttttttctttttatgtgaaaggccgcgttggtgcgggactatttagaaacgccaagcaaacccatagggacaacagggacgaaacgaggtttggctaaaaagtggacaagcaatgaacataaaaaaagcaaagccgacgaaaccactttttttttgaggggggagacacaacggccangggcggaaaaaaagggaccaaaaacggcgcaggggcgacaggccagccctggccaagaggtgagacgagccggtctgtattggtgtatcccccacaggccagagggaggggacttggcggtatacaaatacacgtggacatattagaagctctggagaccaggtcgtcagagggagaaggaggcgggggagaagagcagttaaacgccggggggacaagcggtgccccgggtgtgaaaagatcgaaaccgg

SEQ ID NO: 184786 - DNA, 564 bp, Arabidopsis thaliana
  unsure (1)..(564): unsure at all n locations
aaaaaaaaaggagaaaaaaaaaaaaaattttctttatgttactagacacanncttgggagagcagaaccgcccgcaggaaccgccccggaatacccggtcttccacgcggccgctctcctggnaagcccgaaaaagactcgcacgcgaacgcacacgacgcncatagaatctgctagacctggtacttattttacactctgtctagcgaaccctaagagcggaaggctctgttaacagacctacccgaaccgaacacctctttttcttcgaggggcgaaaaacgccacgcctccagaccccggtgcgccgccaaccaacaaccgcggcaacacaccccaaagaacacccgccaaccatcccgacagccacggcaaccccaccccccacgaaccaacgcagcgccacccgccgagacacccgacacccccccccttcaacaatacgacatcgcccctccccagggtcgcgcaaaaaaacaaccggacgtgtgaagacccgaacgcaaccaaaccggatgctatccgaagacatgcgcccgaacgccacatccgcagaacccccaa

SEQ ID NO: 184787 - DNA, 619 bp, Arabidopsis thaliana
gaaaatttttttcttgcggcaaaagaccgcgtcggttgcggacttcgcggataacgtatgagtattttcccccggggggtggtggtacccttgatttacacacagagggagacggagcggcattggcgggccagcattttcgccggggttcgtacggcgtcttgcatgtccgacgcatagtctgttttcccatgattgacccggttccgtattagtttctgcgttttgcgcgcgaaattctcaggcgcggcggtatacgaacggggagtgtttttttggaggggtgtttaggagccaagcgttgtgacgagtcttatcgtggatagtacaaagccttgtagtaggagcggcgatcttttcccgcgcgccaaggtgaacgagatgatggtaggtataggaaagataaaagtatacccagagtacataatcattccgttatatcgataatgacgaaggctgcgcccgcttgttgtgtcgtcccatgtagtgtagaaatagagtagacatattatttatcccccccccacgatgttattcatcgccatacctcccggcattgctccctattagatacggcggagcgctatagtgattggccgtgttcgtcgggtggtgcgac

SEQ ID NO: 184788 - DNA, 512 bp, Arabidopsis thaliana
gaaccccaaaaaacggtttgccccggggagttatttcttttttcgcagcagggacaaaaccaacggggggaatttgggaagccctgggtatcgcccatgtaaggcctgtccacgcgcaggacctgttgtcaaattgttccgcggagcataaggtaaagaaagaggggggagcgagcaattttctcttttggagtgggggaccccccccccccaaacacaaccacgggggccccccggacacggggcggcgcgcggggggcccccaaccgccgggaaaacgggggccagcagggacagagagcaacggccaccggggaacaaccgcacggcaaggcccgcgggggcagaccaaaccccagaccgcccacgcaccaaaagcgagacggcggccccgcgacccgggagcagagaacaaaaacggcggccaggcacccacgcaggcaacgagacgaaagcacgagcaccaaacgcggggcggcgacaccaggaaaacgcaaagggaaagagggagc

SEQ ID NO: 184789 - DNA, 532 bp, Arabidopsis thaliana
  unsure (1)..(532): unsure at all n locations
ccccccccccccccaccccgcccgggggatttttttgaatcgtgaaaaaattttccgggcgcagcccgcccggccttcgcccccaccaatcgcgggttttacgtntgggttaaggtctccaaaaaaaacccgngcccccncctcccacaaaacgcctataactcaagcaaaggaccgcggggctcggtgtccctactcccccgttcgatttgtcgctatccccacacgtcgcccagcgaaagcgaacggccgccactttttttggggttgtgggccagggcgcggggggggcgggaaaaaaaaattgcagtatgggcttgcgggggccgggggtacgggtgtatggctacatatccgacaggtgccccgctcaggtgagaaccgaatgcgaaaggccatgtccagcgaaggttggccccgtgcgtgggcttatcggggggtaaccccgccggtggtgccaccgcatccccgcggtgcccggtcctcgcgtgcggagtgaggccgttcggcagggcccgcgtcgaggtagggg

SEQ ID NO: 184790 - DNA, 652 bp, Arabidopsis thaliana
acccagccggacgacagtggcgacaacgaaccggccgacggggacggaccgacccccacaaatttttctcgaaaaccacccccggcagccaccccgagccgagccaactctcgcgggcgggggaagagccccgcaccaaaaaggccaggcggcgggcgagccagcgaaagcccggagaagcgacggactaacaaccccaccccagagcgagcgccggcaaccgccaaaccgaccaacacgcgcaaaccacaaccaacaccacgagcgcccgcgggagcggacggcaccggcgttctttttttcgaagggggggtgagcccgccacgacgcggggaggagcgggccggcgggagaagaagcgcgccagaggaagaccccgagacgatcgccccagccggaacagcgaacgagcgacgcaagcggcggaacagacagacgcacacagaaagaccagccccacgaacggacacgcccgccacgacggcggcaagaggaaggcccccgaatcgaaagaaacgaacggcagacagacaacgccgcgcgccccagagtagaatccgccgccacccacccgcggaaccccagagcagacgcgagccgagagaagagaagcaagccccaacggaagcccgccataggaaaaatcaaacaa

SEQ ID NO: 184791 - DNA, 506 bp, Arabidopsis thaliana
  unsure (1)..(506): unsure at all n locations
accccagaaagggctccccggggggggggggaccacaaaagaacccaccccgcaaagagggggaggccccacaccagaaagcgggcggaaccacaaaaaacgcgagacgaagaacaaacaggggaggacgaacgggggacaggcgggccgcaaagaaacgaccacagcaaaagcnntttaaagaaagaagagccgcaaaaaaccgccgaaaccnccccaaaaaaacaccacccaacacggggggggcggggggcacgcaccacaaaacaggcacaccaccaaaaagaagacacaacacacaaaagagagagcaggaccgcgaccacgagacgaaagcgcaggaaaaaagaagaaacgagagagacagaacggaaaaaaaagccaccaaccgacgggagaaacaggcccaacggagggcaccagagaggagccggagcaagaggagaaaagacggaggacacgaagacgaggaagaccccgcaggggcgacgggagacgccacccgc

SEQ ID NO: 184792 - DNA, 332 bp, Arabidopsis thaliana
  unsure (1)..(332): unsure at all n locations
cccccccanangacacccaaaaaacgattaacccggggggaaggccgaaaaacaaaacaggcgccgccgggcgcgaagacgggaaagcacggggggggcgccgcgagaacagggcgcgcggcgggagggcagcaggcggaaggacggaggcaaagcgagaaaagggaaggggggagcacatttttttagagtgggacaaggggcgcagggcggcggcaaaaagcgcggccgggggaggaggaaccgggaggcgcccaagcggagcgaaggggggacagccacgagcgccgaaggccacccggacagccgcaggagcgccgggcgagcaagag

SEQ ID NO: 184793 - DNA, 511 bp, Arabidopsis thaliana
  unsure (1)..(511): unsure at all n locations
ccccccccccttcgcggcgcgggggggcgacgggagagagaaccaacaaatcccttaacaatttttctcctcggcgggcgcccccccgccgttgaagggccccgcgaacgcaancgcgactgtngccggggggggggaggagggctcnnccacaaaaaaaaaccccgncggcccggcggcaggcccagcagagcgcccaggggcccgcgcgcggcgccgcgaagcggccgccagagcggggtgacccaaccgacgcgccaatacgaaacacctgccgcagaccgccggcggctcaccgccggcgccgagaacccacggcgccgcgtttttttttggggtatgtttggccgacagcgaagaggggtgaggacccgcgagaaagaaaggcacgccagaacagccgcggacacggggcggcgccgcgacacccgacgagacgagcgagccgcggccccctaagccggcagggcgcccacacaaagatcatggcccgcaggagccggaagaccgc

SEQ ID NO: 184794 - DNA, 495 bp, Arabidopsis thaliana
  unsure (1)..(495): unsure at all n locations
gcccccaaaggggcgtgcccccggggcaaaaaaccccnncaaccaaaaaaaacccaacggcaagggggaaaactgggccaggaaaaaccaaggaccccccggaaaaccgggacaaacccggaaaccaaaagaggggggaaaagaaagaaacgagaagagcccagcacaccaccaaacctnncttatcgcagggagacacacccaaagcaaccaggggaacagagacacgggccccaacgaaggggggcggacaaagaaggcgcannccccaagaaccaggaccaaggaagggaggacaccggggaaacaagaacgcgaccgggaagagacccaggcccacaggccccggcaaggagcgcaaaaccgaaggaaaaaccccgagacaagaaccacgccaaggacggaagaggagaacaagcagaggcaaggaacgcaaagggcacaaagagagagaaagagaaaaagacgcccacccacgcagagcgcacaagggcg

SEQ ID NO: 184795 - DNA, 387 bp, Arabidopsis thaliana
acggggagggggcgggggaaaaaaaaccctcttccccctcctgtgggcagacttcccggttaaccccccactatggcgcgttttttaaaaaaaatataaagccttcctttgcctctcttcagaacagcggggagggggtacgaacccatcttcactacaccccaacatttttttttgggggttgatgggccctccctcaccccgttctcccccaaaactcaataaacacccaccatactttcctaaacctcttctccttcccctcccctccgcgcctaaaacaacctccccccctgggggaggaaaagaagctccaccacactttccaacccccagtggcgcggggttcgagctacaggaacaccagtgcagcaaaaccagcccgtg

SEQ ID NO: 184796 - DNA, 517 bp, Arabidopsis thaliana
ccccccatttaggggaagctcctacccctccagtacccggcccaaattccccgtttcacccaccggtccgggcataaaaaaagaaaacccccaacaaacacacttttacaaatcagcttcttcccccaaaaatcagctttccccaaagacttttaaccccgtttagccccgggaaaccatgtcctaacccaacctatcacgtacctaaccttttccccccctcattttttagttgaagacggggcaccatccccaaagcttaaagaaaaaaaaaccaccctctcccccaataacctaattggcaacctccatttctccctcccgcgaaacccccttcaaccctaatcttatcccagaacccctctatttcccggtttaaataacccccctcctccccttcttcccaaaacctcacagggcctcctcccctcaacctttcgcccccccccccccccccccacttccttcttcttccctctcccaaaaaaataaagcgcggccccccctacccatcccc

SEQ ID NO: 184797 - DNA, 570 bp, Arabidopsis thaliana
  unsure (1)..(570): unsure at all n locations
cccccccccattacgcgcccggcccacgacagctactgtccccggggggggtggggcgggaacaaccaacaccgggggnagcgccggccgcccgggccgccggaccgcgccgccggggcggctcacgcgcggcaacgccggcgtgcgcgcgcgcgtcggcggacgccgggctgcgcccggcctcggcggacgacgccgggggagcgggggcgcggccgccgcgcggcgcttttttttcggggtgttgggaccgcgcgccccaccacacccgggcgggccaaaaacgtggcgggggggggggcggcgcgcggcgcccggcggccccgccgcctgcgccggagacgtgagagggcgcgcggcccccggagtgcccacaggttccgcccccggatgccgcccagccgcctcggtgggcgggccacggcgccccgatgcggcggtagcccagccgtacgcccgcgaccccgcacgcgcgtcggcgcacccgggcgggcccccgggaggaccgccagcccccgacaggcgctgcgcgctgcgcggcccgggcggcgagcccggcgtgggccgcgg

SEQ ID NO: 184798 - DNA, 596 bp, Arabidopsis thaliana
  unsure (1)..(596): unsure at all n locations
ccccccaatttcgcgggggaaccacaccgcccggtangaaagccaccagaacgagaccaattccccagggggggaaaagcccccnacaaacacaaaacaccgaccacggcgcgaaccacgaagaccaaagaaaacaagacgacgggagagcgcagccagaagcgagacaggagcagcacccagaagggaaccgggcgcgaacagcaagcagaagacaacgacgccaaaacggccgacggggtttttttttacgggcttgttgggacccacgcgcagcacgcgggaaggagcaagaaaaaacggcccccccagaagcaaccaacaccggaggcccccgccgagaacgcnacaagggagacgaacaaaccgccaaaaacaaaaaggcgcgcaacagaaaaaaaagcacggaaaacgcaaaaaaccacaacagccccgccagacaagaacccccaaggccaagggaagagaaagggagaacaaggaaaacaccggccagagagaaaaagaacgcccaccaccccaccaaacaccgagaacaagcccccagacagaagaaaagagacaagcacaccgcgaaagccacccgagagaaaaca

SEQ ID NO: 184799 - DNA, 557 bp, Arabidopsis thaliana
cacaacaacaggcaacagaaccccccacttttttgagcgaacaaaaaatttctcgccggaacaaacccgccccgcgaagaccccaaagcaaaaatttccccccggggggaaaaaacccaaaaaccaaaaacaggcgccccccccaggacaaccgaagaagaccacaaagaacagcgcaaccggcaaaccgacgccatgaacggaacccccgcaagcccacacaccagaacacacccagaacccgcagcacaaacacaccgcccccaaaacaaagacaccttttttttcagggggggggcgggcacgacacaaaacacgccgcacgcgacaaaaaaacgaccccccgaccaacaaaccgcaagaaccgaaccgacccaacaaagaggacagaagagcacgccaaaacccgaaaacagacgaccccacacacagaacagcaccccccgacagcgagaaagagcccaacaaaccccccttaagacaaacacccagtcccatcgagcccgaagagcaacaagacaaaggccccccaacaaaagggaaccaaccccaaccgc

SEQ ID NO: 184800 - DNA, 156 bp, Arabidopsis thaliana
acccgcgcgacgtcggcgaccaccacaaaagcggacgagagacccagaataggaacggacagtttaggacagaagaaaacgaccccaacccaaaaggaccgaggaaaccaaagacaaaagaaacagctacgaaggccgccaatacgaccaaacgga

SEQ ID NO: 184801 - DNA, 439 bp, Arabidopsis thaliana
tcgccaagccccggggaccggaagaggagagagggcccacgaaggaacgggcggcgcgccccgaaaagcagtaaggagagggcaaaaacacacaagaaagaagcattgctccgcggggggggagaccaccaccaccgagaagggacaccaaaccagacccgcgcccgaggggggggagggggccaaagagagaccgagggggggggaaggaaaagaaccaaaaccgcggccacggagagacacccacccacaaccaagaccccaccgcgaggaacacacaccgcgcacgaagacggaacgggaagcagggaacagccaaaaagaaggccgggcgagaacgggccaggaggaagacgcgaaagcgaagaacaaaaaagagcgggacgaccagaggcgcgacacgccacggaggcaaggaaggcaagcggaaaagcaagag

SEQ ID NO: 184802 - DNA, 484 bp, Arabidopsis thaliana
  unsure (1)..(484): unsure at all n locations
cgcaccgaaaaaccggtttcgccggggcgaaaaaccccccccccgacaggcaccaggcaccgaaaacgccagggcgcccccaaaccaagccgaaggaaaaaagcaacaaccagggcggccgaaaaaggaaaaaacaccaaccaccagagagcggagggaaccgagcggcgcaacaaaaatctctctttagcgggggcacccaacgaacaaagggacgaaaagccacacagaggaccaccacgcggggcaccccaaacccaaacaaagccaagaacgaggggggggggccgaccaaggagncaccccaccgcgccgcgagggcacgagaaaaacacgagacgggggggcacgcagaggcgccaacaggaagacgagccgaaaaaacagacacgaccgaagacggaagagcgaaacgcgaaggaacgcgaacgagaacgcaaaccaaaccgggcacgcacgaaaggaaaccgaggacgggacaaac

SEQ ID NO: 184803 - DNA, 605 bp, Arabidopsis thaliana
  unsure (1)..(605): unsure at all n locations
caggcggcggccgccgacggcgcggggggcgcggcggggcgcgcggcgggttgggggttcgggacaaattttgtgcggggggaaccgacgcggcggggggcgagcgggcgggccgaaacaattcgccaggggggggggagacccccaaaaaaaaaaacacgagnngcanccgggccgaggagggccgagacggcgggccggcagggaggggaggggggcggggggggcggcggagggaggggagagcgcgaaacgcggggggggagaggggctttttttaagggtggtgggaagcgcgggcgaaagacggggcggagggaaaaaaaggggcccccggagggaacagcagggggggcgcgccgcgagagcggcgcggggagcggggaggggcgagaagacgagccgccgaccaaacaagagcggaaaaggcgcgagggggggggcggggcgggaaggggggcgctcgcagggggcggggggcgagcgaggacgagcgcggcgcacagagcgagcaccgccgagccggccgagagagccaacagaaagacggcgaggcgagaagggagccgccgggcggaggggcggcccgaaggagagcggtggaa

SEQ ID NO: 184804 - DNA, 487 bp, Arabidopsis thaliana
ggcccggataccggggctgtccacggcgtccgttacccgcctggccgatcttttcattctccgaccacccatgagcaaaggcccaggatttttaaccgatatcggcaggaaagccaaggatctgttgacaaaagattccaattccgaccaaaagttaagaatctccactaccagtgccttcgttggggcctttacgccaacggccctgaagaaaggaggagttcatgcccgttgttgttgcccccccaatacaagtccaagatggctttggctggatgttaaaaaccgccccctggtgcctaggggtttggacaacagggccacctccccgagatgctcccatcaaccaaaggcattgccccctttcaaagccccccttttaattccgccaagctcgagggggcaacctttccaccaccccccaacagatccccgtgctgcaccttttagaccaaaccccctacttggcataagacctcctctggtt

SEQ ID NO: 184805 - DNA, 452 bp, Arabidopsis thaliana
  unsure (1)..(452): unsure at all n locations
gccgccgaagcacggcacccccagagcgggctccccgggggggaaaacccncaaaaacaacccccgcccgaagagggggggaggtttgaccacacgaaggggagaccagcaccacagaaaacaaacgaggggcggggaacaaccagaagagacacgggcagccgagacaccgggcgaaccgcaaagaccaaagaaaaaaaacaaccttccaggaaagccggacccacaccaacaccgcccccgaggaaggaaagacacacccgacgcagcggggggcgggcgcgggggcaccggacagccgcaaccacgacacaccaaaccaggggacaccgacacacccgccaggggaaagcgacaccaacaccacagggaaacagacacggaaacaaagcagaccgagccaggacggcaaggacgggcccgaccggcacaaggacgccacacaccacaca

SEQ ID NO: 184806 - DNA, 646 bp, Arabidopsis thaliana
cgccgccccgccgcgaaaacccacccccaggcaggaccgcaactactcttttgaaacccccccccccccatttcgaccacgaagaacccccccccccccgccacaaaccggaacccgcaaacggaaaaatttccaacccggggggccgggggggcccgcaaaaacaaacccccgcaggcgaaccccccggcgcgccccgagcggaccgcaccgacgcccacgagggcacgcgcccgccccacgacgcagccggggacagcagcacaacgcggggacccggaccgcagcgacccagcgcgaccacgagcccaacgaacccgacgccggggcgcgcgcgacccctttcttcaagagggtgcggaacgacacaaaccgcacggaccggccgcaccccacaacgaacgagccacccaccaggcgacccaggcggccggccacgagccccaccgccaccgagggccgaccccacccaccggccgccacacaccccgcagaacgcggaaggaagcgcaaccccgcgcgccccgcacccgccgacgcacaccggcgagcgagccacacagccgcacgcagaggcacccggcgaccacgcgcccgaacaccgagcggcccacgcggacgaggcgcgcccagacacgccccaccc

SEQ ID NO: 184807 - DNA, 508 bp, Arabidopsis thaliana
  unsure (1)..(508): unsure at all n locations
ggatcccgggcgagagagaaaaaaaactcaaaagacaatctaaaggcgtgagacgcgcacaccgccacgcgcccccttcctccacaaaccaacgcgccggcgccggcggcacgggcactaaccgcacacagcccttcccgcgcccgatccccccacatcactgactaccggacgccaaaaccgggnccccccacggacctccccaccccccggccgggaccctccaaaagcggcccgaaggcggggacctgccaaggccgagagatcccaaggaccacggcggcggcaccgggaccgaaccgggcccaaggccccacgggcccccgctcggcgggcgcccgcagagaacgagggcaaacccgggggcccgccccgccacgaccccgcgcccaaacccgggggcgcaccggacaagcgccaagaacccacctcaaccccagaacgcgaacggaatggccaaccgagaccccacacccccacaaaacaggggcaccaggaccgccgaccc

SEQ ID NO: 184808 - DNA, 407 bp, Arabidopsis thaliana
caagaaattttgtgaggcggtatgaaacgccgccgcagagggaggaccacgaaggaaaaccattcgccgagggggggtgagatccccgccacacacacacgagccggggacgcagagcagccagagggaaagcccgggagacggccgcaacggcaaaaccggcagcaatgccgggtcgcccgcatccgcgagacgcatgacccatcgcgatgcgcgggcggagaagggcggggggcgaaggagtgggcgggggtttttttacaaggggggtttgacccaagcacgaggaccgagggtcggcggcaaaaaaccgacgcccaagagcaaagccgcaagacggagacgccaccgcatagagcacgaacagagacgaggaagagccaaagaacggtacatcgccacaacca

SEQ ID NO: 184809 - DNA, 381 bp, Arabidopsis thaliana
ccggacacgcctgcgggacccggcccggaatcccggggcctcccacgcggtccgtgaagcccagaacccagaccaagaggttttcctccggccacaaaaaatggaccttcgccgaaaacacctggagatggagactttgccactcaccatcaaagagtcccactcactgggcttgcgctgcttgtgtttcagatctcggagaccttaccgaagacctccttggaggggaagtctgacccatggaacgtaaagccagatccagacaaagggatccaccgcccagcaagatgtcttgccggaagcactgaacaggagacttggctgattcacatccgaggggcccacttcattggcctgcgctgcgggaggatccaaacttcg

SEQ ID NO: 184810 - DNA, 194 bp, Arabidopsis thaliana
cgttttatatcccgatcgcttcagatcctcccgaacacaatacatttcccccgggggttgagagccatacacaaaaagagtccggtcgcgctactcaaccaactatcacgcgagaacgggccgactagcagacaccaccaaatgcaatagcacatcatgtcccgaaagctagacacatgccctatgcacaccat

SEQ ID NO: 184811 - DNA, 444 bp, Arabidopsis thaliana
  unsure (1)..(444): unsure at all n locations
ttaacaaccccccccgaattcgaacacggaggacgcgcccccgcccccagcgcggggacagcaacggccgaatttttcaccccgggggccgaggggcggccaaacaaaaaaacccggacgggcccccgcgcgccccgatgcctcgcatgcaagcccacggcgagaaccgaacccgcacactgcctgcgtggtgaggaaaaaccacagccccccgtgcgatggcaccccgcgcccgcacaccagtgcagcaggcggaggggacctaggcgccccttttttttttgggattgtatgggcccngagccccgtctccggcgcaccccgaaaaaaaaaagaccagcgccatggtcgcggcggacgccggccgcccgcccgaagccccgcgggataggaccgcgagggaagggcgcagcccccggcgcggtgccagagaccgccctccgc

SEQ ID NO: 184812 - DNA, 242 bp, Arabidopsis thaliana
  unsure (1)..(242): unsure at all n locations
ccccgcccgcccccttcgtcgccgatctcgtttccccattgtcctngcgggggggtaggttcgcgcaacaaaacccntctccntctctctcccattactaccccgacgtacctttccctcttatctttcccaccctattccgtgtctccgtctatccccctcttcattccctcatctcgtatccacctcatctttctcgcccccgcagttacgctcgccactcccacacacattcttttttt

SEQ ID NO: 184813 - DNA, 572 bp, Arabidopsis thaliana
  unsure (1)..(572): unsure at all n locations
gcggaaagccgccgcccccccctaacaccccccaccccaaagcccggattttccaaccnggggggaggggccccccccaaaaaaacccacgcccgcgcgcgcccccgggtcccccgcgcccgaacccccaccgccggccgccccgcatccgggccccgcgcacccccaagccggacccccgcccaagccccgagcggcgccccccgcgcccgccaccggcgccgcgcgcccgtctttttttctgggggtgtgtgtcccaccagcccgcggaggagggacgggccaaaagaaacggacacccactgccggggaggaggacccccacgccagaccacgcgaaccgacgcgccggacgcccaggcaccgcagagaccccgccgcggaccccgacccggagacccgaacgaccccaacaccccgcgagaaggaccncccgagacgcaggagccccaggcggccgccgcgcccccccgcccgaaaaacaggcgtgccccgcggccgccggcggcccgcacacaccgggcccccgccccgcacaagccgggccccgcccccccaccagccccccccga

SEQ ID NO: 184814 - DNA, 436 bp, Arabidopsis thaliana
aaggccgacaaaacagaaaggcgccaattttacagagacccgggcaccccacaggaggaacctgggcaagaggaaaaacgggccagctacggaggaaaagagaggcgagggaaacgaaggcgagaggccgcaaattttttttgaggggggaggcgaacgaccagggagggaaagagggcacacggcgccgccaggggggcccggcaacacccagaagggaagcaaagaaacagagcgagaggcccaccccacgaaagccaaaggacgggcacccgccaacaagcaaagaaaacacggaccgcccgcaacaagaaggacgcgcagaaaacagaaaaacaagaggcccaggacccgcggacacggaacaacacaacaagacagggaaacaggacacaggcaaacgaggggaagcaccaccagaagagaacaaaagcag

SEQ ID NO: 184815 - DNA, 538 bp, Arabidopsis thaliana
  unsure (1)..(538): unsure at all n locations
ggccgggagcctcaagagcggcctgccccgggcggccagacccccaaaaaaagaaacagggggaaagagcgggggganacttcgcagcaacgcgggcggggacaccgcagacaaaccgggggagaacacaacctctaaacgcgacaaaaggaaancggggccgagcggggacccaaaccaaaaaaacacaagagggggccctanaagagaagatggagagccgagaaccaccccgccgacgggcgccccgccaccacaaccgacgaaacgcggggcgaagggcggaaaggggcccagaacagcccggcgggcccccaaaccaagaggggcgcgagcaaaaaccccggaggggagaccaaaaccaccacgcgggggggaaccccaacccccagccgaggcccccaaccgccggcccgcggggcgacaccgacagagggcgggcgcaaacaccgcccccacggaagggaagcggcagggggggcgcccaccccggggggggacacccaacagggggggccggcccgcagccagagggcca

SEQ ID NO: 184816 - DNA, 537 bp, Arabidopsis thaliana
  unsure (1)..(537): unsure at all n locations
tttcgtgtagggaacgccgcgcggccgcagcccgcccgcgaacgggggcgcaaattcacccgaggggggggaaaaaccccgcacaacaacaaaacgcgaacccccagcagagcaagagaaagcccagcagcggggcgcagagcagaaccggacaagacgcggacccacgagccccaaagcagaccgacacgaagccgggcggagcgacgcggcgcggacggggggggagcttttttttacggggtggacaccgaaggggccgaaggagcgggagaaggggggcccaggagcgggaaggaaacgggcggcaagaaggccggggggcgagggcagggcgcgaagagaaagcgcggggacgcagaaagcccgcaacgcagaaacgcaagcagcgcgcgaagaggagccnccctgccggggccacccagcggcgggagagacggcccgccagaaagggagaaccggacaggccgacagaggccaaaaagaagggcgacgggggaaaaaagcccgccccgcggagggcgccgccagcaacag

SEQ ID NO: 184817 - DNA, 427 bp, Arabidopsis thaliana
  unsure (1)..(427): unsure at all n locations
cccccaaacgaacagcaacacgaaaacaccacagatttaacacccgcaccgaagaagccacacagacacacccagcgaacgcacccacaaacaagcaagaaagacaaaaaccacaacacaganaaccccacgcaacgcacagagccgcgaccacacccccagcacacagaaagcagaaacaccgccccaaagaagcgacacacacgaaccgaaaccgaaacgaagcgtctttttttaccaagcgcggcaacccggcncacccaaccaacacaacacgacccaagccaccgcaaacaaagcaaacgcgccaccccgaccagcacacgcgcgccacccacagcaacgcaagcacaaaaacaaacggcggggaggacagaacaacgaaaagagaacgccaccaccgaacaccgcaacacacaacgcgacc

SEQ ID NO: 184818 - DNA, 622 bp, Arabidopsis thaliana
gcccaccccccgacgcccaacaacagcgaaccccacccacgaacgaaccgacccccgaaaacactctcctgtttttcaacccaccccccccgacgcccccagaacaaaaccgtatttccccgcgcggggtgcaaaaccccgcccacacaaaaacccagggcgcgcggcgagaccaacaacacccccacaacaaccccgacgggcgacccccacctatgcgaagccccacgcacccccagcccaaaccgcccccaaacgcccagcgacgccgcacccacgccggaagcgcccgcgcccccgcctttttttctcagggggtgtgcgcccgaccacacccaaacgcccccatcgaaaaaaaaacccccgcaacggccaaccaaaaccgcgagccggacccgcaagaatacccgccgagacccggcacatacgacccccgcagcgaacaactcccacagcgcgagaagccgacacccccccatgaaatccccccaccccgaacacgcgcgacacgacgaccccccccccacaacacaacaccccctccccccacaagcccccacaacaacccgcacaccagaggaagacacagacccccacatgcccccacacgcgaggcacaaca

SEQ ID NO: 184819 - DNA, 480 bp, Arabidopsis thaliana
ggcccgcggtcccacccccgcgcgggccccaactattttaaaacgcgcccatgcgggaaaacaaccccccatacggacgcaaagaaaaatttcccagggggaggcgagacaaaaaacaggctccccggccccagcacggaaggaccgggagcgcgccccgacacgcggggagcgaaaaggacaagaaagcgagctgaggcaagcggagaacagacgggagcagagcacacatttttttgggtgttggaaccgcactccggcgcgcgcaaaaaaaaacccgccgcgggaacccccgcagcaccgcccaaaaaccacaaacgaccgcagccccgatagcgcagaccaaccccggaacaccgccagggccagggcaggccccagccccagcgggcgaccggaccggcacgcggcccaccacgagaagaacacggaccccggcacaacggagaaacgcaaagatcggagaagagcacaagagga

SEQ ID NO: 184820 - DNA, 357 bp, Arabidopsis thaliana
  unsure (1)..(357): unsure at all n locations
gaacccccaaccgcccccgcgcggagaggcgcgggcccggaatcttttttccccccccccccatttccccccgggaccccccccccgaaggagagcgccaacacgaaccaaaattcaaagaggggggaaaggccccccaaaaacaacgannngcccccgcagaagaaaaaccccccaggacacagagcacgggaaggcccccccaggacagagacccgccggaccgaaacgaggcacagcccgaaccccggagagagcgccaccgcagagcacacgccacaggacattttcttaggaatgttggcacgcggagcccgacgagaaagcccgaccaaaaaaagggccccccaaggggag

SEQ ID NO: 184821 - DNA, 211 bp, Arabidopsis thaliana
gcccgaggggtgttggtacccacgtccccacacgccgtgcgcgggcgcggcgcgggccgaagtaacgccagagaacgaagccaacagacgggcccaacccttttccagtacccgtggtaacacgcgtttcatttacgatgacgaggcgcgcagcgcatgcacccgccgccgccgagaacaagcggaggcacttttttttatacgagggttt

SEQ ID NO: 184822 - DNA, 506 bp, Arabidopsis thaliana
aacccgcccgcaggaaccggcccggaatacccggatttacccaggcggtccaaaacccaaaaaggagcgcccgcagaacacaggcgcgaaatagccagggaaacaccaccaaggccccaggaaaggagggacgacagcgaccgcccccccagagacggaagcacccccgcggagaacgggaaccgaaccgacggtttttttttttaggggggggcaaacaaaacagaacaacagccgccactcaaccgagggtacatcactggatacggaagtgctcccaccatcagcgaaagacacagcagaaacggatacggagcgtgatattgtattccccgttccacacaagacatatctcaacccgacccaaataggaaaatttatcgtcacgctcacgcaagacagaggatcgaaaaagaaaccagacgcgtacagaaaaaagaactgcagaactacaatcggtgcccaagaagcgccgcgcaaggcagcgaactcgcgacgtgatgaac

SEQ ID NO: 184823 - DNA, 669 bp, Arabidopsis thaliana
  unsure (1)..(669): unsure at all n locations
cccgccgggcgacgaagaagccacagacccgccgcgcgcgtccgacggggcgccgaaacgacacttgccccgcggcgaacccccccccacccccaaggcgcccagacccaaaacccgatatctccccggacgggggggggaaagaacccccccaccagaaaaaacgggagcagcgccgcgagcccgaggaagcgccccgggcgccagcccgcacggccggccccccccagagcggggccccggcatccgcccacgccagacgcacgcccaaaggcccgccgaagagcacggcggggcggacacgagagcagcggccgcattttttttttcggggggtggcgacccgaacgccgcgcggngcaagacgaggcgaacaaaagaggcagcaaagcgcgcaaaagagaggcccagcgacaggccacgacgagggaccccagcgaaggacccggcgaaccgcgaaacgccgcacgcgagggcagaggccccgaagtagacgagcagccgaagaacccgcccaggcagggaccaccccntcaccaggaggcggggtaagggcgcgcaggacgaacagccccccgagcaaaaaaagccatcccgctcccccccggcagaccgccagggagcaaccggcacgcggaggggggggacccgacgccccccggaaggccc

SEQ ID NO: 184824 - DNA, 483 bp, Arabidopsis thaliana
  unsure (1)..(483): unsure at all n locations
ctttcttccctcgtgcccctgttttcgcattgttcttgggttctccccgggtcgtcggctggggggtctttgtggcccgctttgtccccgccgcccgctccggcgcgtctttgggcggcgcccactttttttttcgggctgttgtggnccccccccccnccccccccgccccataacaacaaactttccgcttctctgtttctctccctatccccttcttccggtgtgcctcccgcgtgtgctgtgtagtctgcgtgcgcgtccgtcttggttccttgtgttttctctcctggctttgttcctctcgtgtttctgtttttggctaccctctctcgcccgccgtgttcgcgtcctccacgcctttctgtccatcgcccccggtcggcggtcctggtttccccgtgctttcccccctcgttgcctgtcctcaccccgtcttttttgcttcttcgttcctcgttgttctctgccctcgttccccgc

SEQ ID NO: 184825 - DNA, 617 bp, Arabidopsis thaliana
  unsure (1)..(617): unsure at all n locations
cgaaaccaaacaagcgcccagccgggcgggcgagaacagcgaacgaaaccgcgccgcgacnccgagccggacggggacgaaaattacgcgaaaagagacccggccgacccgaagcccccggaccgaccgcgaatttccagcggggggaaaacccccccaaaaaagaacgggacccngaggaaccgagcagacacggggcaccagcgcgcgaagcgggcgcccccgaaagcgggggcgcgggacgccgccagcagacccgcgccgaaccccgccaaacacgggcgcgcgcggggcgaaggagcgggagctttttttttggggggggtggacccgaaagggagggaacgggcgggcgcgaaaaaagcccggcggaaggcgggggacgaaccggcagccaggccgacaggagggcgcggaagagcgcgggaggagaagaccgggggactgcgaccccccgaagcgcacaaagacgagagcccgcgcaggaaagccccacgcgcccgagcgccgggagggccaggcgacgcccccgccgacaggacagcggccccggcccccgcgagccgcgaacgagagaccgcgtccgcgaagccagagcgcggccgccagggaggccc

SEQ ID NO: 184826 - DNA, 402 bp, Arabidopsis thaliana
  unsure (1)..(402): unsure at all n locations
caagacccgccgagaggaagagggccggggaccgcccagaacgaacaacaggacggagcaccggcacgaacgcagcggcgcgaaagcgaagcgacgacctttttttaaaggggggggaaccgaccagaaacgggaagaaggcacagaaaaagaaagacgaagaggagggcaaagggacgggggcgcgcacacacagggaacggacgaacccgcaaacagagagccacaagcgagaaacgaagcccgcagaggcgaagagagcgaacaaacgccgaaggagagaaacaagcnggagcgacgataagagagaagcgccaaacgagacggcgccggaggaagaaaaccggccccatcaaccgcagaaacgcgcaagagaggaagcggaacaaaaggaaaggaagc

SEQ ID NO: 184827 - DNA, 516 bp, Arabidopsis thaliana
  unsure (1)..(516): unsure at all n locations
acgggggccacccccccgggcggggggggggctgcggccgggggggcgggcgcggggcgcgaccaagcggaagggagccagacaggacacaaggcgggcggaaaaggacagcggggggacgcacaacgaacacaagggcgggcaaagagggnttttatggggaggcggagcggaaagagccggccgcgggaggggggcaaccaacggagagcaggaacgcgggggggggggaggaggaggcacagcggagaagcagcgggacgacgacgagaccgaccacgcgcgaggagaaggccgggcggcgcccaggcggggagagcgcggcagggcgacaggcggaaggccgcccgggggaccaaggaggacggcagaccggcggcggcgaggacgaaaagacggaggggggcacggggccgcgaggaggcggaggcagccgagaggaaagagagcggacccggcagcgacggaagcgcaaaccgccagggcgcggcaaagggcgggcgcgaggacagacgg

SEQ ID NO: 184828 - DNA, 502 bp, Arabidopsis thaliana
  unsure (1)..(502): unsure at all n locations
aaacttttttttttttaaatttaaaccaataaccctaaccaaaaataataacatcttgcctttttttctccaaaaaaaaaaaaaaaaaccttaaattttcccaaacaataattcaccgatcancccaaataccattttttccgggatagttgaaaccctccacctaaaatccttcttccaaaaaagccacctaattttcttctttttcttttaaatcccccaacaattaatcccacaccccccttttcaaaacaaagcaacacgccgcctcttttctcattacaaacataatatttcaaacacgccccccgccttccctttctttttcctttaaaaaaacaaattgaccatgcctcctttcttcatcaaaagaaaccaaaaacctttctccttcttccaaaaacacgccaaagtctctactaaatcctcgccacccgccctctctttcttttttcccaacaacccctcctcccttaggttactacacataccccccccatac

SEQ ID NO: 184829 - DNA, 580 bp, Arabidopsis thaliana
  unsure (1)..(580): unsure at all n locations
aaaacaacaattcgacaccatcccccaatacaatttttctcccctctcttattccccgcccattttcataatcccccgaaacaaaaccccatttttctccctcggggtttcaattccctctcacaaaaatcccatccccttctcctccctcattctcccgatccttccactttcatcccccccttttctttacccctcgttccccattacatccccttcacttttccccccattaactccccacccctattccaccgcccccgcccttttttttttcggagtttttnccaccccccataattaccctcaccaaaaaaactatctctcactccttaactttccccccccctctcccacataatccatgttttacccgttaaatccactcccatacatttatcttcccctatccttaattctctatcatccccaatttattttccccccctccacatttctttacatataatattttcccccccctattttatcctccccctcccccctccattccccttctccatccccattcatataacaattcccctcccaccttatccccccctagcttgtctctatc

SEQ ID NO: 184830 - DNA, 629 bp, Arabidopsis thaliana
ctccctcccggggggcgggaatagaattcttccttccccaacccaccttcccgcttttcacccctccgtcagttttccccattccataacaccaagctttttacggagggggttaaagtcccccctacatacactaacccttgccaccatgtatttcccctcttaacgttccctacgttctatccactcctatatcgtgttcccggtcttctccccattccactcctctttcccattatccccactatataaccctcgccactgttttcgcacgcgccggcccgaacaaacccttcctttttaaggcgttgttgtgcaccacaaaaattcagctatcgtgcgtaaagaaaaaataatcccgccattctatacaccacacacgagtatacgacatgtatttcattacttctccgccatagcatgtatccccctcagtgtcaacattcactattacctttaaattcccaagcccgccctatgttatgcccgccatatcgaggtttcttctcgattcttatttactccccctcctattaatgttcctctccgtcccacctctctacccccatattacttccccttcgcacttattaatgcgccttcccgccgttatcccccccctcatcttc

SEQ ID NO: 184831 - DNA, 494 bp, Arabidopsis thaliana
aaaaaatcccccccccccccaaaaaaacattaaaatcggaactaaccctcccccccacctatttggcgtttttccctttcactattttaaaaaacttcttcaaaccacactttcttattaaatcccattattaaccaccccaccctttttttttttcggctgtttgtgaaacccccccctctcctctcccctttaacccatcaaatttcctccctaacaaccccatttattttttctctcccaaaaaaaatttctctatacactccacccccctcaaattcccctttttaccccctactattttcttctactccataatttctttcacctacacaaaatcaccctcctaatcactcctaccctacccttttacccacctctccctccctccttccaatcaccacccaactacctcccccacctaaaccccactcatcacccacatttccttcacacaccactcaaccattttctccttattcttaatacccaac

SEQ ID NO: 184832 - DNA, 640 bp, Arabidopsis thaliana
ggaaaacaaaaaatgtacaaaccatccccgccaacattttcgcaccccggcgagcaacccccggcgcctcgccgaaaagcgccccgaaccggaacacttttcccccggggggaaagacacccaaaacaacaaaacgacgagccggggaccggcggcagccccagcagcacccccccggcgccaaaccacgccgcagaccccgccccgaaaccaggaagcccggccacacccccacaaaacaaaccgcaaggcgcggcatcaccggaccgaaattcccccgagcccgagaaacaaacggcgccttttttttaaacgggggggttcacaaccccccgacaccgcgcgagacgcaccaaaagcgcacacccgggcaaggcaaaccgcgcggacaaaacccgcggccacgcccgcgcagatagccagagaacaccccgcaagagcaaacaccccgcgcgaacacacatacccgggaagccacgagcggccgcgacggccgccgcaaacagaaaggacgccgacgcccgacgacgagagggagacagaaacaaagcgcccccccagagaagcgacacaccgcgacgccgcccccgatacccccagcaacgaaccccggaccgaacaaaagagcccaaccgcccga

SEQ ID NO: 184833 - DNA, 482 bp, Arabidopsis thaliana
tcccgctatacccgcccgtcgtcctttcccccccgtttttcctttccccttcttcccccctttccttatattacccctttcccccgcctcttttccccccccctttacatttccccccgccttttttttttttggggttgtttttgccaccccacacagccccgaggcgccgccgaaccaccacgccccccacaaaaaataacggagacattccgccgacccccatcccctcgaaagaatcctactctttcccgtttctctccttttccgccatcgttttcctactgtccttttctccatttttccctgctatcctcccattttttattctcccttgtcattcttccctttctattccttgtttttttccccccccctatatattttctttccgcttccctctcctcctttctcccattttccatcccccgtccgcttctatcattcccttctcctcttttgcctcccctttcatcactttt

SEQ ID NO: 184834 - DNA, 496 bp, Arabidopsis thaliana
  unsure (1)..(496): unsure at all n locations
cgcccccccccnaccagaacgcgtttctccgatgggggtgggggcccncccacacaaaaacccgnncccccttctaccctcttacccccgttccttccctctgctttccccccttttctttttcctttcttccccctttcctctcccctcctctttccccgccttttcccgcccgcctttccnacccacgcccttttttttggggtgttgtggacccacccacccgcttccccccataaaaattccccctgtcttttgctgtctttccccgtctcttttcggctgcttccttctctttcccttttcgttttatcccttacttcgcgagcccccttctccttctccctctcccccgtttttttttgtccctttcgcctacggtttttttcgcgttctccgcgctctgttttattcatcccacgcccctcctttcccctttcctccccagcgcacttcgatccgtcccctccgttgtcgcctcgtcttcttgtttttt

SEQ ID NO: 184835 - DNA, 569 bp, Arabidopsis thaliana
  unsure (1)..(569): unsure at all n locations
ccccccccctcgggaggggaacgcccccccccataccccgccccaattacccgtttacccccgggggggggggcgcggaaaaacacaaaataaattcctcaaaccctttcctcccccccacggtttagatttccttcccccattttctccgccctcccccaaccaaagcgaaaaaggtccccccccctcttaaccgaaagccttttcttcaccaccctcccctttttttttgcggacgttgggcaanttctcttttccaacccctccaaatacacatcccccttcttaacgcncgccacccatccaccccccccccccccatttcaaccttccaaccgcggcgccccccccccttttctccccacgtcaccccacccactatttcaccaaaaccaaaaaaaccacacggccggccccctctctgcgatggatcccaacttccctccccgcggccccccccccgccaccatccttctttttccccccacgcccccccccctcctattcctcctccccgcccccttcctctcaagccattcactccacttccaatccgccgctttcctccc

SEQ ID NO: 184836 - DNA, 499 bp, Arabidopsis thaliana
  unsure (1)..(499): unsure at all n locations
attccgtccctccccccccnccttttccccccggggggggtggagtttttttttttttttcccccctttttccccncacccccgccccttaccnccccaatttacgcggtttttccttttgggggttgggggtccccccaaaacaaannaccccccccccctccccagccaccgcttttccccgctctccgttcgtcgtgccttgcgcgcctgttcggtgtccgggtcttcccgcgtctccggttgcgctgcccggtccgccgcggtttttccccgccgccttttcgacccgcgcgcgtcttttttttgggggtgggttggcacccaccccacccgtcttccccccaaacaaaacaaacctctttgtttttcccctttcttttttcctccgctcttttcctccttttattctttccttcttccccctttctatctttctcgcctcttcttccatctttccctctctcccctcttttcccttccttccccgctttctttt

SEQ ID NO: 184837 - DNA, 460 bp, Arabidopsis thaliana
  unsure (1)..(460): unsure at all n locations
cctcctcccccccccaaacccggggaagaaaaagttaattttccaaaattttttctncccccccccttcccgccccccnccaccctttcccgggggtaaatccaaaaaaaaccccncccnccccccccccccccccccccccccccaaccccccccncccttcccctctcccctccgtcccctcgcgttccgccttcccgccccttacccccccctttttttaggaggtttgccccaaaaaggggccaaaaaaaaaaacccctcncccccccccccccccccccattctctcaatcactcatcccaaaaacataccccaatcaaaactccctatccattaacctcttgccctataataccccacccatatcaattaattacaattccacataaaaaacaccccacatccaaattacacaaaaacctcccatatcaaaccaaccagaattccccagtaatt

SEQ ID NO: 184838 - DNA, 604 bp, Arabidopsis thaliana
  unsure (1)..(604): unsure at all n locations
tttccttccccccccccccccctcctccgggcgggggggtggagggggtttttttttttccntccctttcttcccccncncnccgcccccttccnnnccccnnacccacaccattctccggggggggaagagtctccctaacaaacatcccctccccctccccttccacctatcccccctatcgtcccgccgtcagccccccctttccctttaccctcatccccccttcctcacccacctctttcccgcgatctcgcagccccctattcgccccccgccctttttttttcggttgtttggcacacccacccgcggcctccgctcaaaaaaaaacccccccccgaccccccacccctaccgcggcccctttcccacgtctttcgctcgctctccccctctctcgtcccccgcttctatcgtccccccctttcctcttccacccatccacccgccatgtgtttcctccccattccgaccacaatgggcctccgcccaccaccccccccctatttcttctctccccctcccgccgccgatcccactcgccatccccgtgcgctgtttgtaaaccagcccccgcttttcccccccgcgattcctcttt

SEQ ID NO: 184839 - DNA, 468 bp, Arabidopsis thaliana
ccccgccaaaaaaaaaacaccacggcacacagcccacagaacccccaccaaacagagcccacccaactgtcgccccaccgatcctcgaacgcagcacacccggccaagccacacccacaaccccggacccaccgcacaatacaccccgcgccgcgcgaacacagaccagagcccgcgacaaaaaacctctttttttaaggggggtggggaaccgcggccaaggggagcaggacgggtcgacggaaaaaaaaacgcccccgcacgcgaagaacgcgcgaccaggcaccgcaagcaaagccacccacagcccctgacacacaacacaccccaacacaaaccaccaaacccctatccccaacgacgccaacaaaccccgcaaagaaagacgcgccggggcgaggcgacagacaagaacgaagaggaacacggcgccgccaaaagaagaacacacccccatccacccccaca

SEQ ID NO: 184840 - DNA, 515 bp, Arabidopsis thaliana
  unsure (1)..(515): unsure at all n locations
acgccaacggaagcacgcgaccccagagcgggctgcccgccngcacgcacccagagagacacgaaccccggagagcaccacagccgcacgcaacccccacagagggagaaagacacacanacggacacagacncccaacaggaaagcaccccagaaacaaaggggccccagccacaaacaaaagaaccaggcgtttttttccgcgggggccccggaaccgaaggaacccaccccacagaaaagccaaccagaaaacagcccccgcacccaaacgacagagcaacgaggcgcaagaagaacaccagagccgacccgaacgcaccaagaaaaaccaaccacggagagcgaggcccccagcaaaaaaaggaacccgaagacagacaaagcggagcaaggccaccgccagagagcaaaccccaagagggccacgaccgggaaccagcaacaacgaaaccaaagcaaaacaggagggggagaacagccggaccaaagcccaaacccgcagcagaaaagca

SEQ ID NO: 184841 - DNA, 449 bp, Arabidopsis thaliana
  unsure (1)..(449): unsure at all n locations
ccggccggaatcccgggttgacccacgcgtccagaaacgcacaccacacanagacttgaaacttccctcagacgcaagtaccagacacagctgtgtatctctctctatcatctagggcctcagcctatcaggacctatgaagctctgacaagaagcgagaagctccgagcagctgggaactgtttttttccccnggtgcacgcgaacagaaagggccgacccgctcctgataagcacaagctacaaaccataacgaggccctgcaatgcttatactggaaaaaggatcctcgagggagaaccggagatgcccattaaaagcccttgtcgcttccatctgctataccccatggcagcaggcaaaggttttgatacggaacgaaaagtcttggaaaatcccaagggggaaagaacccgagtcccgacgaccctggcaaatgtagcacctcg

SEQ ID NO: 184842 - DNA, 168 bp, Arabidopsis thaliana
  unsure (1)..(168): unsure at all n locations
acgactcacatattaggagaaagctatgtacgccgtgcaggtacctggtcacgcgaattccaccgggtctgaccccactgcngtcctgtcctacagcagttcagaccacagcagtccagaaaatatcggaaagtatcgtcatcaactatgcataaaaataacaattac

SEQ ID NO: 184843 - DNA, 509 bp, Arabidopsis thaliana
  unsure (1)..(509): unsure at all n locations
ggtatgcacgcgtgcgtgagctgggatcctatagagcggtcgacctatctgttcgtttaaccactcaaaaaaatatactctggtctgctccaatgggcgtcgntactcaattccgccaccgggacccgggtgttttttctgccgatggggggttcggtctagtgctccttaagctgctcccggagaaaaaagaaaagacgtttttttttggggggggggggccaacaccatgccctcccctntaaaaaaactgggccgagggggggtgccgggggcaggatcggcaagacttggacggatgcggggcttccgcacgggggtcgatgcggtgagagacgtgccccgggcccccccgggacgtcattggggaggcggtacgattaagtgtgagatgagggcgggacagggcctggtggggggacgaaggggtggggggcggggcagctcgaggtagtgcccaagggggggaacggggcgaggtaagtcggtcggtgcggggctccaatggg

SEQ ID NO: 184844 - DNA, 372 bp, Arabidopsis thaliana
  unsure (1)..(372): unsure at all n locations
gtcgacctattctgttcgtccacgcgtncggatttncgatcattgctatgtcgnncggatttattnnaaaaggccgnccggatataaatagtagttaccacatttaatttagtccgtcctgatctactttcccgtccgaagaacagacgtaggagagcgtttttttcaggggggggacgaagcaaaaggcggcggccattgcaaaccgtgactcgaagcgttaggaaggaggaaagacgcggctgtatgtctcgattctatcgtactccgatagagtcgatagacaacgctagcaatagagactatccgggagaataccggcgggtggtggtccataagtggataggtggtgcaaagcaaatgaggggcatg

SEQ ID NO: 184845 - DNA, 515 bp, Arabidopsis thaliana
ggatgctcttagctgtaactctacacaatctatggcgaaggctggcacgcctgcagtgagccgggaccctatagaggggtcgacctatctgctgttcgttctctgccgaccggactctcattctgccttaagactggatgatcggaattaggaaatcttatcgctgtcaaaagaaaccgactattctataatataacacgcaacccttcaccaatggcccacgacgctgcacgccccgatgactcatgctacgagggggggcccgcttgaacctacttctttagagaaaagaaacgactagaccccgtacaccaccgccacggggagataaccctttatagagactcccctctcaatgatgttggaaaactgctaaatcgcacacaggaacgctttgtttatatagtcggacaatcattctgcgggtcatgaaacacaaagtcgatagggtacaccttttttaccttcggcggtacacgagggtcagtcgctatatgagacgcgagaaacccggt

SEQ ID NO: 184846 - DNA, 534 bp, Arabidopsis thaliana
  unsure (1)..(534): unsure at all n locations
gggggggggcgcgccctttnattaagnnnnaagaaatttacggtttgaagccgggggggcggggcgcaccacaaaaaaaacctcncccccctttccccggcccgccttcngcccctcttcaggttctccgcccccggggccggcgatgctcgcctttttctccatcggtttgggggggccggccgcccggtgcgggtcgcccttcgggggccccgcccctttttttttgggattgtttgggcctccccgtctcggcgctctccaaaaaaatacatgcccgggtgcgcggggctgctggtcgggcgcccccccgcctgcggcttgtgccgcggcgcggcatccgccgcggtgtggtcgtcgggcccgccgggcccctcgggggtccgcgcgcgcccggcgcggcggttcccctcggccgggtctcggccgtcgcgggcgccgaggcgcccgccgccggtgccggcgggggccggccgcgccgagcttgcccctgccgggctccttgaggccccggttcgctcgcgcgatcggggc

SEQ ID NO: 184847 - DNA, 312 bp, Arabidopsis thaliana
ggggagcggacgccgcaggaccggccggaaacagggcgccacgcggcgccaccgccgacaccgtcggccaagcggcacacggagtagcaagctcgcgtgcagagacaccgacttcgcacacaacgcacccgcacagggcgacacgagcagcccgagcacatcacgagacgcgccgcacaccactcccgccggacaaacaagacacgaccacacgacgcagaacacagaagagccgcggccaaggcgtggagaggcacacgacaacgacggtagctggatagcagaacatgactgacgccatgaagacaagcc

SEQ ID NO: 184848 - DNA, 506 bp, Arabidopsis thaliana
  unsure (1)..(506): unsure at all n locations
tttttttgggttttctttgggcccacaggggaacccccccttggggttttttttcaaaaccagggtgaaccctctgncctttttttttttgcgcaaagggaacaagaggaaaccgggccgcggaaatacccttttgtagaggttccttccccccaaccctttttttttgggggggggggggaaacaacacccccgccctccgcttctataaaaaaaccttcccccccagaggttgaggtccggtgccttcgcctcaccccccctccctgccacacgtgaacgggagagcaatgatccgcgcggccggcgtccacacgtccaccggcaccacggggcctcccctggtgggacccacacgcggggcgtgccgagacacacatgaggtcgtgcatccgcgggaggtctggggtctagggcacgcggcgcactctgcgggttgcggtgcgcggccctatagattgaccagctacgcgcggaggctgtgggcggtcaggtcttcctgctcg

SEQ ID NO: 184849 - DNA, 502 bp, Arabidopsis thaliana
ggatgctttaggtgtactctactcacatctatgacgaagctatgcacgcctgcgtgagctgggatcctatagagcggtcgacctttctttttttttttttttaaaggaaacctatactatttcttttacacaactgccgagcccaaaaccacttatctgattctggcattcaaacactgcctatattaatgacatctagatccatgacgacaaagcaactctatactaggattctttttgctcttatcgggcggcgacgctgctgccatgtcaccttaacaaactgagagctttcgtgttaatggccccctccatcaaacaaaaaggctgattacaaccacacaaaggagaatcatttgtttagctcaaacaggccaagaaaatgctttaggaactttggaacatccgttccgggtttattagaggcaaagccagcctttttttttccatttttgagcccgagtttttttactacaagaaatcctttcgcaactgtgggggc

SEQ ID NO: 184850 - DNA, 492 bp, Arabidopsis thaliana
aagctggcacgcctgcgtgaagctgggcacccactagcagcgtcgacccactgtctgttcgatttttttctaccagacccaggtatcgagaagcttctctcgaatatgttctctgacgccggcggaggcgcaaatcagccagcgctagaacttagctcttgcaaccaaccggaatttggttacaacacaaaccttgcagtagacaaagtttttttcgcaggggggcacgttcttaacctacccccaaaaaaaaaaaccctcttccctggtgaaaaagacacgaagcaaacccccctagcacacgaaagaaaacttgaaaccgcgaacgggaccggggccaggagccctttgccgtggcccccaaagcgtgaagaccagagcggcgccccctactcactaggagcaacgaccggtagggcgtccggtgctgaaaacaggggaccgaggctcgtccagagtggtacggacactaggggtgaggggcgacggaaa

SEQ ID NO: 184851 - DNA, 386 bp, Arabidopsis thaliana
gctgcgccgcctgcgtgagcctggtgcaccctataccgcggtcgaccctctgtctgttcggctactcaaaggatgttcataccgagctgattcaacataaacgagcttggatgataaaacgtggtattgtcaaagggaagctctctgtagactcagccgagcaacgcctcgcggggttatgtcctcttatgcccgaagaagctttttttctggggggggggccaacccactcctctcctcgttcacaaaattgcgccccgtgctgcggccaccttctagccccggccctccgttccaggccttccgcctccggccctgtgcctggcctcttcccactgccccggtcccatcccggggtccacttgtggcgcgcctctttccgggcg

SEQ ID NO: 184852 - DNA, 176 bp, Arabidopsis thaliana
  unsure (1)..(176): unsure at all n locations
gatgcattaggtgcactctacaaaatctatgacgtgcttcgccgcctgcgtaagcttggatccatanagcggtcgccttgcgttcggcccgcgttcgaaagtctaacagagggaataacacataccatgggtaaaacttaccgacgcttcacttatgggacctcccacaattccct

SEQ ID NO: 184853 - DNA, 489 bp, Arabidopsis thaliana
  unsure (1)..(489): unsure at all n locations
gcctgcaggtactggtccggtttaccagggtcgacccacgcgttcgaccaaacgtacaaaaaaaaagtgtttactttttgggtgnntattnggaggagnaaaggtatacttaaggttttaagttgttnggatgttttaagtaagtagttggtgtttagaataactgcgtatgtttagacaaagaaggagcttttttttagggggggggtccaaatacctagccgccccaataagaaaacccgtggccccgttaacggacacccggacatttccagtatcactggtactgcctagcgggttatacccttatgtgacataggctcagggtaatcaactagacaatcgcgtgagctcccagaagtatttagctcttatcggttcgaacaaggtgcttaggtcatgacgctcgaatacgggctacgacacgagctctggaggtcggctaaatgttgtgtggagcaattgttaatgagggggtgtggtcaccgg

SEQ ID NO: 184854 - DNA, 370 bp, Arabidopsis thaliana
  unsure (1)..(370): unsure at all n locations
ctgcaggtaccggtccggaattcccgtgtccagccggtggtgagacagcccgggttcttagacctggaggagtattgtcccccccccaaatttatattatgacggggccttcagtggtaggccgctcgtagaagatcacgcgcgaaaggcccagctccgggcgccgccggcggcacaggccgaggaaacggcctttttttttttcgggatgatgggccnccgcccaagcaagactccaaacacaaaaaaaccgcgcggacaggcgcgacggacgcggcgtacacccccacactagcaaccgctgcatacgagaaactgctcggccattcgcgccacgacccgcccgacctacccgcgccgcgtcccctcg

SEQ ID NO: 184855 - DNA, 419 bp, Arabidopsis thaliana
tgcatcttaggctgtcactactacaagaatcatatgagcgagctgtgcacgcctgcgtgagctgggatcctatagagcggtcgacccacgcgttcgggcgtaggaaactgagtctctgctaaaaaaggtggagcacgatcaaccatcatcactgcttagtgcgctaattacatgcaggaatgctctgggatgaactgaccttttaagccaacctgaccctgatgttagggtttcaaatgtctttcgcttggggggagattgaaggaggactgccccataaaccacttacagcgttgatctaatgaaggagatcttcatgctgacaatacaacctttcgtgaaaatagataatgccttctctggaagttataagaaagcctattccgctcttgatattgttgcaaaggcaaaagggtgtt

SEQ ID NO: 184856 - DNA, 263 bp, Arabidopsis thaliana
gaccccaaaaaaaaaaaacggcgcgtcgggccggacgtggcaacgaccgccgcctcctaccaccggcaagcgacccacaggaccccccgacctcgcccgacacggcaggcggctcacgccggcgcccccgccgcagccccgtgacaaccaccaggtcggcgtcggcagatcactaccgagacgcggccgacaataccgccacagccaggcccgcccagccccagccccggatgcgcccccgcgggcaccggcaggcgccagag

SEQ ID NO: 184857 - DNA, 431 bp, Arabidopsis thaliana
gcacgcctgacagtgaaccttggatcctatagagcggtcgacctttctttttttttttacaaatgtgaaatcgcatcatcttatcgagaaaaggaaattaagcagtaaatagcaaaacgcaattcatgagtggaaggataagattaatcagatgagagagactaagcttgtgtgactgaaacagcttctttgaccttagtggatccagggagcttcaccgttgcaggcttctcaacttaaggaacaacgaaagcagacactggggaatgcgctgcacagaccagttggaagccctgaaattaaacttccgtgaacttggcggctgctccaagaaaagcctatggagagtgccccaagtaagaagctcctgggccttaacacgcggaagcttttgggtctttccgaccctcacctgggcaatgacccggggg

SEQ ID NO: 184858 - DNA, 330 bp, Arabidopsis thaliana
ccgcgccgggaagtatcgcggcggtcacgccctttttttatggggtgttgggcacaacactcacagggtccgatcgaaaaaaaaaatatccgtagtcttcggcacatgtatcgcagtccctcaccgccaactgtctacatggcaaccacagatccgtccgcaaacggcgcaacggaagccgcgatatcaagaaggaacctgcagtacgtccgcggagaactctcactggcagagtagacaacaaatagagatcacgacgcgtcaaggcacctaaatctcacatggaaagaaagcgccgacagaccccagagtacgcccctagcacgctgc

SEQ ID NO: 184859 - DNA, 419 bp, Arabidopsis thaliana
ccctgcaggtaccggtcccggattcccggtcaaaccacgggtgcggtctattaataaaacaaattttaaaaaaaacgaagagagtcctcgttcaacattgacgcctacgaaaaaggcgtacttggtgtgcggtttattttgcttcggcgcacgggcccctaagcccgcaatcacggattggggaacgggggcaggcatttttttttttgggctgttggggcagccacaagggggggcgggatgaaaaaaaaaatcgtccgccgggcttcgacgcgacctgtcagcgcttcgtcggtcggagttgcatggatggacggcaggatagtctgtcgcgctgcgccgcaaaggtagtttcgacaacaaagggaaccagggcgtgcgacgggcgaggcgaggatatgaggtggggggtacggata

SEQ ID NO: 184860 - DNA, 505 bp, Arabidopsis thaliana
  unsure (1)..(505): unsure at all n locations
ggaagctagcccgcctgcaggataccgggcacggaattcaggggtcgacccacgcgtgcgagccaacctcancnacgnanncgnaacgcatttgttattttagaaatggataacatgattgtcatggttctcttagaagaaaaatacaccattgcttcagcagactctagttagtcctatttggttgcaaccaaaacaagacgtttttctttgggctagttgggctgccctgagggctagctcttgttggaaaattgttcgctttgtacgaaggattgcgtctttgccggtcacggcgggcccgacacgagtgccgaacgctgggtgtcggtgtgcccggacactgacatggcgcccaactggggagcactggcggggctgtacccgagctggcagaacaggcggcggaagagcaaggtaggggaacgaagggagaaaaaactgacattgtggagcgccccgggtgtgtcaaggttctgcacgctgcacgagagcttgacaacgg

SEQ ID NO: 184861 - DNA, 123 bp, Arabidopsis thaliana
attattatattagagtgcgtgcggacggcgatcgggcaggcaaatgcgcacgacatttttgatgacaatgagtttgagagacaagtgtaaggtagatgtggttggtgacttacggagttagct

SEQ ID NO: 184862 - DNA, 408 bp, Arabidopsis thaliana
aggtgtcactactacaaacatctatgagcgaagctgtgcacgcctgcgtaagccttggatcctatacagcggtcgacctatgcgttcgtttaagtgaatgataaccggcattaagaacataccatactgatatttcgctagggagatggtctcctatggtcactcacattacattagcgtatggggctgtgactttatatcaaatgaggttgattgatgagctacactgcacgcatgatatctaggggtggtgacaagatcatgagctatgtgctcagagggatcctgagcacaagaatctatatcttgcttctctggatttatcttcgaaccaggagaagggtgtgttcggatctcaaatggctctggcagaggagtgacatgggttggtgtagcactagcttctac

SEQ ID NO: 184863 - DNA, 319 bp, Arabidopsis thaliana
aacaaaaattttttttacgaaatgaagaaaccccgccgaacctgacgagagagaaaaaccgcgaaacagggagtaaataatggatcatcacgacatacgaggattcacagcgagaaaaccaccaccgttttttttagggggtggcgcccccccccgcgccacacacaaaaaaaataccacgcgagagcgaaacgagagcgcaccaccagccccaattcaacgccacgacgcaacaacccctacccactaatccctctggaaatcaccgcctcccgccagctctcaggaaagctaccaccgaggaatccacagcaggaaa

SEQ ID NO: 184864 - DNA, 425 bp, Arabidopsis thaliana
tccggctcaaattaccgagcgaactcgttcttttctgattatgaagaaccttcattcccttttttctttcgtggatgatatgggggcgaatcggtcgtccggccggagcggcgcgcctttttttttgggatgttggaaccagaaggcgttatttgtgtgaaaaaaaaagcggggctgttgcgccgcctagcgcgcgcccgggcgggcacgtcgtgagggcggctatgccggccgtcgcgactctcgcgacggacgttgccagcgagcgctgcacaacgcgggcggacgcgggaagggcgggcgcactctgcacgggagcgcgcgcgaagtacgctccgccggggcgcgcgcgtgcgggcctacgcgagccggctcgagggccctggagaactccccagcggccggcgaccgccgccggttgctgg

SEQ ID NO: 184865 - DNA, 248 bp, Arabidopsis thaliana
  unsure (1)..(248): unsure at all n locations
tacgcctgcggtactggtccggaatcccgggtcgaccacgcgtncggggaccttaaaaaaaaaatttaaatctcttatactacatcaaaggcctttttttctacaaaaaggtagaaaggtggctgggagcaagttggtagaccgtgcgtgaggggggcaacaagacgcggcaggacggggggagagaggggaggggtttttttcggggggggggatccagctccgatggggggttgtgtccaaaaaaa

SEQ ID NO: 184866 - DNA, 556 bp, Arabidopsis thaliana
  unsure (1)..(556): unsure at all n locations
gggaaagcacgtacgcctgcaggtacccggnccggaaattccccggttcgaccccacgcgggaaggcccaaaacaaaaaaaannccaccccccccccgacggcacgcccagcagagcgcaaagacacacgaaacccgcgcgaccagaagaccgcggaaaggcagaaccaacggagaagcgcggcccccacccccacggaacccgccggagaaacacgacgaaacaaaaacttttttttagagggagccggcgcacacccccccaganccgagccccacacaaaaaacaagccggcacccacgcgccgcacggccccgcccggccccgcaccgacaccaggcacgagcccgcgcccaaccacccgccgcacacccgaccggaacccccgagacccagagaggcagcacgcagacacgccgcgcgggagcccccaaccgagagacgggcgcatggacaccaagccggcccggccgcccagcacagaccccccacaacgcagcgcaacaagccagggccggcgccgccaacgcccccgcgcggcgcgcgccgccgcacc

SEQ ID NO: 184867 - DNA, 587 bp, Arabidopsis thaliana
  unsure (1)..(587): unsure at all n locations
gactcacctagggaagctgtaccctgcaggactgtccgcaatccccggtcgaccacgcgtccggagaccagaatgagctgtctcacatggttccatgtgtgaaaggncaanngnnannaangctgttnaggcgtgncctacattagtgttatagtctcgaaatgttgtgaaagaactaacacatatgctaccattagacatatcatgnagtgggtgggtaagaaaattgccaggtagccggccataaaacacaacatacgcgattaacgttggggtcgagaagaatttacagtggccaacattgacgaagccgcctaattggtcttagcttttagctacaaaacaagagggaggagctgtttgtaggagagctccttagtttcataaaaaaaacagaacagtttttgttgagaccgtattttttttggtcaattgtatagagagaaaaaaaaaaagttatttctttgcaaagcaatgtcaatcgtttcgcgtgtagcctctttagaatgcgttactgttttggcgtcacgttggggtaaaaccgtgccttaactggtgggccacattaaagtgggactggacaactg

SEQ ID NO: 184868 - DNA, 347 bp, Arabidopsis thaliana
tttatagattttgtagtacaaaaaacgcgtattaaatcggcctccctcctactaacactagaggccattaagtgaccaagaggggtatgccgcgacgcagcggcaaaaccgcgcttctctttgggtgtgggcgcaccacacccgcgcacaaaaaaaagcccccggccaccagacgccagccccccgccatagggagacggggggggggaccgccccgggctggcccccgcaaggcgacaagacgactcgcaagacgcggagacaccgcagggacgccccccgtaaggagaggacacaggcgaaggaaccacgtggaaagggagtggatgcgcgcgacaacccacaag

SEQ ID NO: 184869 - DNA, 310 bp, Arabidopsis thaliana
  unsure (1)..(310): unsure at all n locations
tagggaaagcaaccacgcctgcaggnaccggnccggaatacagttttgancgagggggtagacccataaatataaaaaaaccaacccaaataaaacataaattcgagccgcacccgaacatacgtcctagccctacttgagacgcaaacgcaccactgaaccaattatttcattacatcatatttttccacctactgacggcacgcaacttctatttacgggggggggaaacaaatcacccacatacaattccaacaactatctttacccccgctggtcgtgcttgttataccatgattaattgattagt

SEQ ID NO: 184870 - DNA, 599 bp, Arabidopsis thaliana
  unsure (1)..(599): unsure at all n locations
cccccccccctaaggggggagggctcctccccccttccaattacccccttccccaaatttatcctttttcaccccgggggtagaggctttttaaaaaaaaaaaaaacaacactcccnccattattaaacccacaccattactttccccccgaaatttggcgggaaccctaaaactcctttttcccctcccctccctcaaggggttttgagagtaaaaaaattttctttacacccccctttctttttttcacaaaaggaaaacattattttttcgggttatgttgggcccccccccccttgccctttcttaaaccntatttcaaccnccccccntccctccctcctctcctcccccccccctttccttcttctctccctctccctcctccatccctccccccattccccccccttatttccccacccccccttcaccaaccccccccctcctctccccccctcccccacccccctcccgcccccctccccccccctccccccctcccccccccccccccctcccctctcccacctaccgccccttagcactcctccttaccccctctcgccccccattccaccgccccatctctctccaa

SEQ ID NO: 184871 - DNA, 337 bp, Arabidopsis thaliana
  unsure (1)..(337): unsure at all n locations
ccgcctgcaggatagccggtccggtatagcaggggtcgacccacgcgttcgaccacgcgtncgnacgagagtcacgagagatcgagagaagtctttgattctcttctctcatcaaatcaaaatatcatctcagagactccgattgtgtgtgggggtgctggacttgcgacgggagcggggggcgggcgcggggctttctcgttttggggggggggccgcccgacccatgccccctccctttaaaacccccttcgatgtggtgtcggtggcgcggcgccggcccggcgccctcgtgcccggtgtggtgagctcgtctgtgcggggtcgaggggccccg

SEQ ID NO: 184872 - DNA, 428 bp, Arabidopsis thaliana
ggaattttacagaatcatttttaattcgaattacatccggatcaacaccttagggttttcggatggaccgccgagatttgcatctcaaaacggtgtagcgggccatcctggtgggcggacggcgtcccgggcgggctttttttttggggaggtggggccgccgcccccgcccccccccaaaaaaatctccgtgggcgcccccgccacccgcgcaggtgaatttcggggttgctatggccgccgagatccccctgatagcgcgggccgcgatgggacgcacagacagccgctaagaggccctcggaccctcccgcgcaccttcgacagtgcgcgccagacgggctcggttaggaggctcatggccaacgggcgagtgcgcccggagatagagcacgaccgcgcgttggagggggcggttgcgggcaaac

SEQ ID NO: 184873 - DNA, 190 bp, Arabidopsis thaliana
cttaggaagtggctatgtcacccctacaagatactattgcttcctatatagcgaggttcccacctcttattttttgttgtatcgagagaacccttaaaaatcgcatccatctaaagccggtaaaacggaaaatcgatgcttccatatactccgcgagggtgcattacctatggagttcgcctagcgatac

SEQ ID NO: 184874 - DNA, 351 bp, Arabidopsis thaliana
  unsure (1)..(351): unsure at all n locations
ccgcacacccccccccccccncccccccccccgggggggaaggttagggggtggctttcnnnaaccaccccccccccccactcnnnngngnggggaacgcnccncccncnaagaagnaggaagagagaaaaaaaaactttttaaaagagggggagaagggcccagacaaaaaacaagcgcaagcgagcacgcaccgcgcgacaacaaccagagccacggaaccgacggaagccccaaacagagggaacgcaagaaaaaagagaaaacaaaaaggaagggaacgaacgaggggcaacacacaacccgagaagcagacgcgcaaacgagagagcgaaacgcaccacttttttt

SEQ ID NO: 184875 - DNA, 520 bp, Arabidopsis thaliana
taggctgtcactatgagaagagctatgacgtggcttgcacgcctgcgtaagcttggatcctatagaggggtcgacccttgctttctatgtaacctatttggatacgcacagaaaggggaaattgttctgaaagcctaaaatgactgttactttacaaagcaccagagtttgttgatcaaatgcgaaaaatcaaatttaaaggtttgtttttcaaagaacaaccaccttcttaaaacgagaaggataatgctgaaagaccgtggatactatttttttcttatgaattttaataatcctgaaccctaacttgaactacgtttgggagggcttttactaggattaaccttttttccaggggggtttttttgcaaagccaagccaccaccggatgacgtattttctcggtaaagcgggttcaatggccgaaaaactttttcggatggttttatattaccgtggagttcctcaacggtaaaatggatccatcttaataattcttgcggttgttgaaccggtttta

SEQ ID NO: 184876 - DNA, 400 bp, Arabidopsis thaliana
aacacaatgattgattaatcacttataaggcctaaactcacttttcctagttttgccctttttttacctcatcaacagagaaagagatacatccatggggggtcttaaaagatcaacaatctctttccctcctaagggatgctggcggtataaggtttaaaccatccaaaaaaaaacaaaactaaaaaaatgggggaaacaacgaccccaaaggacaaagtcaacccaaaaaacaacctaaagctttttggtgagaaaaggttttaacaaaggccaaaccaatttgggtggaaaaagacaacccttaaaccctataaaaaccggggggggggggacccccccacaggaaattaagagggggtcgttattctaaggcggggggaggcacgctaaccgcaca

SEQ ID NO: 184877 - DNA, 592 bp, Arabidopsis thaliana
atgccactgagaagttcttatctgcgcaatcttagccaaaaccttcaagcaaggcatgaactctagttgacaaacacaatacctctcttttaatccgtacaaccacaatatatatgctattcctatattaatacattacttactctccacgtctaacactcatagtatatatacagagaatcaaatacaacctacatgaaatcgcctgaatagatactccataactagaactgttttccaatcattacaccgcagttcacctctctaatcatctataggcactactcatgccatccccactctactggctcggttactcgccacccgagtatgacatcgcttgcagtcttcaaccaaataatagctatgatataatagtaaattcagctatcaaaacggtctactcccaatcaccttccatgacgcaacatatactcaagagttggagagaatctggtctctgtcccattcactccgctcaccgagcacgacatataccgaggacgtcaatctcctaagttgagacccatgcagcgcttaggtactgctgcacgaaaacacagaggactgagcagcaaaaactgccgagacg

SEQ ID NO: 184878 - DNA, 583 bp, Arabidopsis thaliana
ggaaagccgcctcccccctccaggtacccctccccgaattccccggttcaacccaggcgggccggtctttttttggtatattaaaagggatttttccatccaaaatttccacactcgcccccggggcacccccccccccccccccagccgcccccccccgttgcctgggtctccgccccccgcacggccgacccgcccgacccgagccggcacccccacttttctcccgggacgataggacccccccccccctccgcccccccccaaaaaaaaaccgcgccgcggcgtcgggcctgctcatgtcgccagccccgccccccgctccacccgccgacgccgccccagccacccccgtcctccgccccgccgaccgacgcccgccacatgcgccggcgccgacgcgccaagcggcgcgcggccgccccgcacgccatcgagagccgcgcccacgacccccactccgcccggccgccgcgtaccagaggccccacgcgccgcggcgcccgcggcgccgcgcgcggcccccgcgggaaggccgcccccgccacgcgacgccgcacgcacgcgggaagaaccggcgcga

SEQ ID NO: 184879 - DNA, 122 bp, Arabidopsis thaliana
cctctccggtctaagcatggataaacgatgatattacacctcattttcataatccccaaacttcttatgattaccatgggcggagagtgaagcccactcgcgtactgcgcgtcactgagata

SEQ ID NO: 184880 - DNA, 278 bp, Arabidopsis thaliana
ctgcaggtaccggtccggattcccggttcgaccaagcggacggccacacaaccaaaaaaaaagaagccgcacagggggggaaaccagacccagacacgggacgacaccaagaagacgcaaacaaggcaagagaaggacaacagagcacccagaacaaaaccgacggccgacaagccccagcggaccccccactatttttttttaagggtggtgggccaacacaacaaccggtgttcagctaacaaaaaaaaattgactcagcctgcagccaacataaa

SEQ ID NO: 184881 - DNA, 486 bp, Arabidopsis thaliana
tttggcggcgcctggaccccttccgaagcctggattcttttaaaggggccgcccttttttttttttttttaccaatttgttgtttggttttttaaagggaaaaaattactccttgacgggaagggttacgttaaggccctttggaaattaacaagagccactttagggcctaccccacaaaattggggtttccaaaaaattggaagggaacctttgccaactaaaaaggtttaaaaaggtttcctttgccttcaattatggaccggaggagttaggctgctttaacacagccaatgcctgggggaagggggcattcacaattgacttaaccttggaatctaatggacctttacacaagtctaaggtggtcctagaccaacctggttttggatttgaccaatggaggagttggctccccactctattaagtattcgttcggaacacaacctgattcccggaacctggaaatatgggatctaatattc

SEQ ID NO: 184882 - DNA, 453 bp, Arabidopsis thaliana
tcactacttgggaagtggcgctgggaccggcgattcggcgacaccgtcgagtaagctgcatattgaaactaggcatgtgacagatgcatggctcgggaggcgctcaagcccgtactcacagagggtcgtggatatttcataagacagttgcacagctgaggacttatacactgactgtcagagatgtgaggatttgtgaattcagatgcatgtggatgaacaggaaaggagatcagcattaaggactaggagtgagggaaatatgactgaggtgtcgcatctgtatcttgaaacggagtaccacgctatgactgtgaagagagtggttgtcatttaagcttggtgtgaagagaatcagagcagaagttttgacatgaagagaagttgaatgtcaaggctgataagaaggtagacacgtgagtctagaaatttggaggagaatgtgataatgta

SEQ ID NO: 184883 - DNA, 596 bp, Arabidopsis thaliana
  unsure (1)..(596): unsure at all n locations
cccccccccccgcccccccccccccccaaagtgaggggtaggtttgggggcccccccccccccccttgggngggggggaacccgggcgccgnnaagaagaaaaaacnnaaaaacacaattttaaggaaggggggggaaggccccccaaaaaaaaaaggcgcgcagcggcgggcgggaagaaacggcaaagcagaaaaaacacaaaccagaaccccagaaagaagaagaaagaaacgcaaggcggccaaaaaggaaaagcacagcaaacaagaaaaattttttcagggtgtggacgcacccgaggggagcaagaaaaaaaccggccagcagaacgcccgaacaaagccccgcccgcccccgacgaacaggagcgagggaaacaacggaaaacaggccccaaacgagcgaaacgacagagaccggaaataaagaaggaagggagcaaagaacgacgcggaaagagagccgcacgggagagaccagcgacccaaaagagacagaccgagcaggcccagcgagcaaaacaaagcgaccgaagagagaggaaagcacgagagcgggagccgggggaaacgagacaccagggcgcagggaca

SEQ ID NO: 184884 - DNA, 506 bp, Arabidopsis thaliana
  unsure (1)..(506): unsure at all n locations
aaaaaaaacgccgccgggcgggcgctgcggtagttatagtttggtgcgcataacgggctgaagcatcgaagagcgggcgttttatatggtttgtttttttatccgttatttgagcactaaatccaggcgcagcgcaggggaagatagagaaagacagcgctttttttttagcggggggtgggcgcgacgtattttatgtagatagtccgcagaaaaaaattattggtggtagtattaagcacattctagagatgaatgatacttcgccactcactgttgacggcaagggaaatctcgcgataggatttctctnaggaaagagcggacataaaatgcatatgtgatatcagggcggggggatattttataggatagtgcacgataagtagtgagaacggaacggtcggtaggcagcatctctcaaagtaaaggaagcggctgaggtagccaagcaatgagctctatcggaggcctcccgatcgaggcgaagatccggggatcgttta

SEQ ID NO: 184885 - DNA, 524 bp, Arabidopsis thaliana
tagaagaagtctatgacgtaggtatgcacgcgtgcgtgagctgggatcctatagagcggccgacctatgcgtgcgcaacaaacaaacacatatatacaaatacacatacacttatcagacaaaacagcctatacctgagtcctaatggagcgggctatagttctacggtggataggggggacaagaaacaagaaggagtgtgatttttgttacaaggaccctgttgaggactatggtcgtgaagaaattatctatgctctcacgccatacgattgtggacgcctctctgtctatagcgtatactgctaaggtagcgcacggcgctgtgtctctgttactcatagttgttcgaggcattccttgagacggaagagacgtgtgctgtcttgatcgtccatggaaaatggccgtatgacgatgagtaccggtgtacacgccccctccgttacttttgatcataagcttaggataagagtgccggccacaacctgttggctaaagatcaaaaagaatggtttactagg

SEQ ID NO: 184886 - DNA, 448 bp, Arabidopsis thaliana
tccagctgacatctgactcaatcttggagagcttgccgcctgcggtaccggactgcttacaggtcgccagcgtcgggtaagcactattggtggcgcaacgaagcttcatagctgagtatgctaccactagaattaatacggacgatcccgcaacccgtgacatgattgctgacaacgtcatttccaccgtggctcttaggttgctctatctctggaaagcgtaactgatacactgtaccgggacaagagacatgacatgcaatacatgaactgttgacttaaggagcaatctgaccaaagtacttcttggaaatgcatcctatttactcttatgtattaggtcgtcgtacgatcctgtagaggataccagcactgctgggaagtacatacatgctgcgacacactatactcttgatgccatctgtaagagatattcactgaattccct

SEQ ID NO: 184887 - DNA, 295 bp, Arabidopsis thaliana
gaatctgccgaactcaagttatcgtatatcctgctaggatatctatcttcaccccctacgccctagacggagggcagcttccaattaatattcatgcctatataccagcagcaggttaattccctcgggatcggggagcgaccttacgtttacgcccgtaactgtgttgactctgctgtagagtcacccgtgccgagtctcgaccgctccggcattgaccatccagtacaagtttcgatagccacgatgattacatcgccggacagtgattccccgcaaagacctatggcacccc

SEQ ID NO: 184888 - DNA, 517 bp, Arabidopsis thaliana
ggtgacactaatagaagattatgacgtggatggcacgcggttcgtaggctgggttcttttagaaggggccgcccttgttttttttttgttttttttttttttttttatattttttttttgaattgtttattttttttttttttgtttttttaaaaagggggggggggggggattaccccaacttttttataaaaaatttgttaaaaaggcaggggtttaaacttaagaatggcctgaaaaagcgttttttttaacaaaaaaaaaatcttttatttagattaaaaaatgggatgttattggataaaatgtggggttttacttgggagggttattttgcggaaaaaaaaaaaaattaggtacacttttgtgttgagggatttaaaagggcctttttttaaaggaggggggacccctggttggacaaaagggaaaaagatttgtaagggggaaatcaaaaaccttttgccccgggaaaattaagggcctgggaatttgcgacgattcttcgaaacaaatt

SEQ ID NO: 184889 - DNA, 406 bp, Arabidopsis thaliana
ggaaagaaaaaaaacagtttgaaaaggggggggccccccacgaaaacgcgccgcccccggggacagcggggagggtaggggagggtcgggaggggggggcggaaaaaaggacgcgcgagcccgccgcaggaggcgggagcccggggcaggaattttttacggggggggcgcgcccgcgcaggagcgtcgaaaaacgctcggggcagagcgacgcgcaggcacccgcgtcgaccccgcgggcgacatgccgcccgccgggaggacgggaaagcgaaggggggcgacgggcgggcgggaccaaaggcgggggcgagagacaaagacagggggccgggggacacgcgacacgctggcgcgccaccccgggagccgcccaaggggtagtcgacacagaaccccgacacac

SEQ ID NO: 184890 - DNA, 547 bp, Arabidopsis thaliana
  unsure (1)..(547): unsure at all n locations
agagggggaagagaaggcaggaaggagaggggggagcgagacaaagaaaaacagggccaggagagaagggaagggcgnagggagacagaagaggaaagaaagaagaaaaaaaagaaaagggaagcaggaggagggaggggaaagggggaggagagcaggagacgaagagacgagagagcgacctttttttacgaaggggggggggaaaacgaagaagactaagaaggaaacgacggcgagagaaagaagatgcgaacgagggtggaggaaggaggcggagcaggaaggaggagaggagaccgaagcaggaggaagagagagagggagaagggagagaccgggcaggaagacggcgggagatggcgaaggacgaagaagagaagaggaggaacgagcggaaagagagcgacgcggagagacgcgagtagggaggagaagacagaaaaggaaaaagaaacggacgagaaggacgaaagaagacacgccgggggagaaggaaggagggggggaagaagacgaagagagacgaaccagacgaggaagaacg

SEQ ID NO: 184891 - DNA, 289 bp, Arabidopsis thaliana
taaaatttttgcacttccattgccccccgtccgaaagccttggtaccctcctagagggggccgcccttttttttttttctcttttctaataaaacatcttctctctgaactcccacactttttatttcttacattaaaagactacaccactcaactctaacccccctagatcacccattcatcgcaactacaacttaacaacactacccccaccgaaatgacaattgcttataaaaaccagctcacgtcattatttcatttgaggtgaccccttaccagcttcccattg

SEQ ID NO: 184892 - DNA, 514 bp, Arabidopsis thaliana
  unsure (1)..(514): unsure at all n locations
ccgccccccnccgccccgggggggaaaatttgttgggaccccccccccccctcgggggggaaccncccccnannaggggnnnnaaagaacttttaggggggggggggccccgaaaaaaaaacagagggggggggacggggaggagcggcgggggcccggagcagggaggacggcggcaccggggacaaaggaggggaaaggggcaaagaacggagagagggcgacgcaaggagggggtttttaaggaggtgcgcaggggccacagggacgcgaaaaaaaaagggggggggggcggcgcgaggggaggagcacaacagacaggcgcgggcagggccaacccccggccagcggggggcagcgggcagacaaggacggcggacgcggcccggggcgcgcgagggagggcgcgacagagccgcaggaggggccgcgcaaaaagcgcccagagggagcgcgcgagcgggacccgagcgcgcccgacggggcggcgcggacgcgacgacgcggccaacaa

SEQ ID NO: 184893 - DNA, 489 bp, Arabidopsis thaliana
  unsure (1)..(489): unsure at all n locations
gggggagggacgggcccccccaaggaaaaggaaaaaagaaaaanaggtttaaaaaaagggggaaaggccccgcaaaaaaaaaaagaggagaaggacaggcaagagggcacgaggacgagagccagaaggagagaggagcgaaagggaggagagaagagaaaggagagggacggaggaaacaagcggcacggagacagggaagagacgcggaaaaagcagggcaggacgtttttaaaagggagtggggaagaggaaaccacagaggagggaccaaacaaacgagagcggggcgaggcgaggagagaaaagaggcgggcgaagaaagagaagaggggagaaggaaaacggcgaaaaaggaaaaggcgggcacggcccaagggagggcggaccaagacgccgcgggagaacgcgaggcgcgaaaggagccaggagggaggcgacagggggagagcagaaggcaaaagaggggcgccgcgaggacaggagaga

SEQ ID NO: 184894 - DNA, 376 bp, Arabidopsis thaliana
  unsure (1)..(376): unsure at all n locations
gagctatgcacgcgtgcgtgacctgggatgctatagagcggtcgacctacgcgtgcgccacgcgttctgcaaaaacaagaatgggtagatccaacgagcacgatcaagcgtctctacgcgagccagttaatgagcgggatcgaaccatacggtgctgacgcctgatcagcaacgatccagattcgggtcaagagacgtctgactgattttctgtaggcggagaactccgatgacgcgacccaagtgtaccactagctaggagaccatgcggatcattcggcgaccatactcggaacaagtgctgtttataggggctcaggttgacagttgatgcanacaacacaagggtaagacgctgggtgactatgaacctgca

SEQ ID NO: 184895 - DNA, 444 bp, Arabidopsis thaliana
  unsure (1)..(444): unsure at all n locations
ggggagctcctccctccaggtaccgtcccaatttccggttaacaaggtccgggcagnaacaaattcctttcttccgaaaattactttagaggcattttcccgtcttggtgggcgcgtagtggggttcaagtacggaccgcccgccttttccaccgcataggccatcaccccaggctttttttcggggggggggcgccccttttccggccgcgaaaaaacccccgcccccccgcccctccagctcttcacggcaatgcggtagcacacgcacgattctcctcgatttcttcataccacgctcaaataaccgccgtgagagacacgagtgcaatcgacacccccttcgcgccaacggcacggcggggcgctggccctacttcccagcggggatggcgagtaactcccgaaatccccagccagtcatcgaccaaacaggcgactaac

SEQ ID NO: 184896 - DNA, 676 bp, Arabidopsis thaliana
  unsure (1)..(676): unsure at all n locations
ccccccccccccccccccccccnnccaacccccnnngaagaaatattgcccagctaacaaaccccactcaactgagggggaaggttcctccccccttcaatttacccttccaaaaatttcccnttttaaaacccaacgggtccaggtccttttccttcccaaaaaaaaaaaaaacccacccccttnaaaacccttcttttaaacccttttttttttttttcacaaaattccccacctaaaaaaaatccttttcaaccgctctttccctttttcttccccgcaacctccccacaaaacagcaccctccactcctcttctttcctcgggcagaatgcgcacaccccccaccgcccgcctcctacatcaaatcactcaaacccccccccacctctccccccgcctcctttctctcccccccctctccttaccttctcctcaccccgacgcccctaacccccccccgcctaccctcatcccaccaccccacccatccaccaaccacaccttcaaacacactctccctccacctaccccacccccctaccacctccacttccaaccccaataccgaccgccctatagcaacacaaccaccacacgctcacccctcccccgcccctcattaccccatatactaccatctaagtgtctctccctctcatccccactactctcg

SEQ ID NO: 184897 - DNA, 130 bp, Arabidopsis thaliana
tttatactcccaatcataaaaacaaccctcagcaggaagcgccagatacgcgcggtcctaggtagcttcgagatcgttatataaacaggacgctgagaactaatattaagtatgtcgatacggcggacgg

SEQ ID NO: 184898 - DNA, 494 bp, Arabidopsis thaliana
gacggtcgcaatgcacgcgttccgtaagctgggatcctttagagcggtcgccctatgtttttgtttttttcttttttttttttttttttaaacattgacttttgaagaacaaaattggtttttggtgggtaataggctaacaatatatatatttttggggttggagtttgagtttgctgtttcacacaagattgatataaattattggtctttttaagtggctttttacacccattgggtagccggttttttaggatatggagaatctggttttctttattagccagatgggcccaggcttatggttttgactgtgcttgtcaatctccgtcaaccttttttgttgggggagctgctagagatagcttctgatcaagcttcttggggaacgtttgcacattgttgtggggtttcaccagattgtttttcttttttgaatgaccttgatgcataatctggagtgggaagatacataccgggccccaccgatgtgt

SEQ ID NO: 184899 - DNA, 568 bp, Arabidopsis thaliana
  unsure (1)..(568): unsure at all n locations
cccccccncccccccnccccccgccnccaaaaaaattctctttttcacccccccccatggggggagggccccccccttcaaaaaaagnaaaaaaatttcnggtttaaaccagggggaaggccncncaaaaaaaaccaccaaaaaacacccgggcaacggccaggccccccccccaccacccccccaacgcccgcccacacccgcggcacaaaccggacacagacgccccccccgcccccaaccaaccgaaaggccacaaattttttttcggttgtttggaacaccccattcgaccccctctaaaaaaaaacttctccccttccctctcccttttgtcctattcccttcctcttcctcttctcttatcaccacactccccccctgcccttccgtatctcccgctccccccttctcgaccttctttttctccccctctcgttagccactaccctcttacttccaatagtttgattgttgatctctttctatcttgcattctttctgtgatagtccctcctctaatctctctcccattttctcccccctcctcccttacttcgtctccaac

SEQ ID NO: 184900 - DNA, 446 bp, Arabidopsis thaliana
  unsure (1)..(446): unsure at all n locations
cccccgcccccccccccccccccnccccnccccccccccgcggaatgttaggggtacgtctggggagacanccccccccccccnggtttgcgcggggggcgaacccccccccccccccanngaaananagaagaaaacaaagcaggatttaaccaacaaggggggagagaggccccaccacaaaaaaaacgcgcccgccagcgccagaccccggcaccgcgcgcaacgcccccgcccgcccagaccccccccccgcccccgcccccccaccgcccccggccgcgaagacgaagggaacgcgacaccaggcgaagccacagcccccacccccagacccgcaacaccaacgacgagacaccacaagcgacttttttcaccacgggctgtctgaccccccgacccgacccaccccccaccgcccccaaaaaacaccggagcgcagaacc

SEQ ID NO: 184901 - DNA, 453 bp, Arabidopsis thaliana
ctcccatccagctgtacacccaatggctagagaccgaataccggctatgatatctcgtggcccagtcacatgtactcacacctcactctgtgcggcgtcgccaccacgcgtgccaggccccgctgaggaggaacccgccttaggcagaggtaatgtagtgccgaccgacctggacaatggggcagtcactggattgacagtgttgggtttatgtctagcgtcgggcttgggagcaacaccgtgccattggcactgggagtgaccactgccgtggtagacgactcacacgggaaggagcgtgcaagtgaggatcgccgtcggtgtctcgtgcgcagaactggcactcgggctttgccggtatcgcggctgggtacgatgatcgtagatactgttagggtccggtcgctggggttgtcacgtggcgacaaggaataaatgagaggcgatgtcgtg

SEQ ID NO: 184902 - DNA, 503 bp, Arabidopsis thaliana
  unsure (1)..(503): unsure at all n locations
ccccccccccatttaccgcgcttcccaaaattcccctgtttaccccccggggggcgggctcctttcccccaaataaatttttttttttctctccaaccctcttttttttttctacacgaccacaaaaaacccccccccacagcctccaccccccccacaaaactcttattttttttttttcgttttttcaaaacaccccggcgcgggggttatcttaacagcgcccccacaaccccttctttttctcgggaaagttggggccccccccccccacccaaccacaaaacaacaaacccccccgcccccccctctccccangcccccccccccacccctcccgctgccggcgcccagacaacggcccgcgcgcgcccacgcaccgcgcgcagaaccgggccatgccgcgagccggccccccgctgcgcgccaccgggcgacccgacgcggcgccggccgccgccccccgctaacgcccccgcgcggcaggggccggccgggggccc

SEQ ID NO: 184903 - DNA, 450 bp, Arabidopsis thaliana
  unsure (1)..(450): unsure at all n locations
atcccacccccccccccccccccnnnngggatggaattcccaggttataccacnnattggggggagggcctcccctcaagaaccttccnaaatacatttttaacaggggggaggcccacaaaaaaacacaaaagaaagagacgcggataaacagctaacatacaccaggacgaaaagaatggaaacaagaaaaaaattacggtaaaagcaaaaatcacaaaccggagcacgaataagacagacaaattttttaaaggtgagggcgataaaagcctatgagacgaaaaaaaaaaaagaaccgacccatctgcacaccccccccactcgatcccaagcgagacagacgctcgccataggaaagcagataggaaaaaagaccctagcaaaacccgcaagaagacaagggagagaacaaagtaggagagaggaacgagaacaaaaatacaagga

SEQ ID NO: 184904 - DNA, 656 bp, Arabidopsis thaliana columbia
  unsure (1)..(656): unsure at all n locations
ccccccccccccccaccccccccccccccccccccccccccccccccccccgcccccatttcccccacgccccgccccccccccacaccagtggcccccgcncccccacccccncccccccccccccacaaaanaagagagaagaaaaccctatttgcccccccgggggtaaagccgnncccaacaacaccccnccccgcccccccccccccccccaccccccaccccccccccccccccccccccgcccccccgcccccccccccccccccccccccccccccccccgcccccgcccgcacccccccccccgcgccccccccgcccccccgccctttttcccccgcgctgttgggccccccccccccccccacccccctccgccaccaaaaaaaaaaaaccccggccccgccccgctccccggccgccccgcccaccctcccccgcccccaacccgccccccacacagcctcgcccccgcccccccacccccgccccccgccctcacgcccgccccccccccgcccccccccccccccccccaccccccccccgcccccccacccccccccccccccccccccgccccccacccccccccccccccgcccccccccaccccccccccccccgcccccccccacccccgccccccc

SEQ ID NO: 184905 - DNA, 548 bp, Arabidopsis thaliana
  unsure (1)..(548): unsure at all n locations
cccccccctccctccgcccccatccgccgccgcgggggcgtgatcttttaccccccccccccccttttcccccccccaccaccccgcccccccgccaccccgcagcacgaggaccgaagcttacgagggggcgggggaaatggtagaaaaaaaaaaagagcccgccggcgcgccgcccggcgacccacacacaagaaccagacccccccccagccacccgccgcactcccacgcaccggcgncgccgcgcaacaagcacgagcatactcactctcacccatgccttctctccatattgtcccatccgtcttccctacctttttttttcaccggttgttggtttcactcccatcacctggcctccatccttctgacgaaaaaaatactctcttttttggctccttctctcacatttcttcgtcccctttctcttccagccgtgcctatcttctccattctgtttctccatgtgtccttgctctgtactcttgatttcgcacctccagccctgacacatgcttgtctgtatactctccttccccccctat

SEQ ID NO: 184906 - DNA, 572 bp, Arabidopsis thaliana
  unsure (1)..(572): unsure at all n locations
ccctccgcccccgccccggggcgggggggaatcatttttcccccccccccatctcggggcccgcccccccccccttacggggggggcggganaactttggggggggggtaaggtgtttatatataaaaccccccgcccgcgcggcgttttcgtggaccttcgtctctctctcctccccccccgcggcgttcccccccccgtgtgggcttgcggtccgctggtcgtcctcgtgccgtcggtcgctgttgggcgcccggccgcgcctcttttttttgggttgttcgggcaccccccccccgggccgccctcctaaacaacatctatccgcattgtgtcggtgtgcggcgttgtcgcgctctcgtttgctcgtgctggtcgtgtgttcgcgccgtctcgtttctgtctgcgtgcgcccgtcggtccctccatccctgtgccttcttttcgttgtccctgctgtgcttcggtgcggttccccgtttggcgttctttgcctcggtctcctcgtgcttgtctggcgtgggtcccccgggcctggctcctcgtcgcggccccggtcccgctcgcccggc

SEQ ID NO: 184907 - DNA, 732 bp, Arabidopsis thaliana columbia
  unsure (1)..(732): unsure at all n locations
cccccccaccccccccaccccncccccccgccccgccccgccgcccccaattccttctcccacccccccccccccccttccncgcacgcccaccccccccccccccccccgagccgagacggggggagaatttttagccgccggggggttaggggcttntaaacaccaaaaaaccncgcnccccccccccccgcccccgcgccccacatcgcgcgcctctcggcgccccccctgcccccccgcacctccccccgccgccaccctccccgccgctgccgccccgcccgcccaccccctccccgtcactcccacgccccgccccccccccgcccccccgcctcgcccgcccccgccccgccacccccgcgccgcccgcaccgcttttcttcttccgggggttgttggggcccacccaccccncgccccctcctcctccccaaacacacaaacacctcgcttccntcnctcccccccgcctccacgctcccgcccgcctcccccccccccccccccccccccccccccacccccccctccgccccccccgccccccgcacccaccccccccccccccccccccccccccgagcccggccccctccacccccccccgcccaccccccccgctccccccccccccgtccccccccctccgcccctccccccccccaccccccccactccccccccccgccccccccccccccccccactcccgcccgcccccccccc

SEQ ID NO: 184908 - DNA, 201 bp, Arabidopsis thaliana
aggggagcacgtacgcctgcaggtaccggtccggaattccggtttacccacgggtcaggcccactcaaaaaatagcagagcgggaggcgtgaacttagaggtcgacacgcacacaccaccgataaacccacccatagacgtcttgtcactacccctctcccccgattatgtcaaatgtgaactggccctggcccgcaagag

SEQ ID NO: 184909 - DNA, 572 bp, Arabidopsis thaliana
  unsure (1)..(572): unsure at all n locations
ctcctcctgcccctccgccccncccccgcccgcgcgggcgggggctgattatcttttacccgcccccccccttcncccgccgccccccccccccgtttnaccggcggnggggggggatttttgcgctcnggggttgtgctttgtcaaaaattaaagagcgcgcgggccgctcacgccctccctcccggtcctggcgcgtcctcgctgtctgtcgcctccttctttcgcttcctcgcttctgtgctctccgccgtctcttgtggtccgtccgctcccgtctcgcccgtctgtcccgcgtctctcgcccctcttttttcccctgggttgttgggccgcgtgccctccctcccctccccgcctctataaacacactggcgtctgcgctgcttgtgctcgtccctctggtgtgtcccccgaccccctctgcgcgcgtcgcgggcctcgcttctgcgccttgtccctgtgtgccacgccgttgctctcgtgcgtcctcctcctccgcgcccgtccctttgcactgccgctcttcgtctgtcgctgtctcccccctcgtttctcgcgcctgcgtgttg

SEQ ID NO: 184910 - DNA, 425 bp, Arabidopsis thaliana
aattctctcacttctctggaacactccaattacacacccaaccatcacatcattgtcccgcgggagtgtatgattactttgttctactatgtgccacgacattatcaacccaaaatcaatgtagatatcaaggcaaaaagaatatttttttaaacggggggtggggactaccttacatcacccttttcacatctataaaaacacaccctacatacacgctcggacacaaaaaatgtagagagcagtgaaatagatagagaagtagtaaaataatgatttgtgtatataataattatattgtattgattaggacataccaatacgtcgacaatgtccatactaatcccagaagcttcgaaagtcacgagcatatacgaatatagcaacttaaactggtcgcgctaatcattctaattttcaaattc

SEQ ID NO: 184911 - DNA, 652 bp, Arabidopsis thaliana columbia
  unsure (1)..(652): unsure at all n locations
cccccccccccccccccccnnaattttttcccccccccccccctccttagaacccccccccccccctttgaaaacaaccccccccccccccccaacnanaagaaaaaaaaatttttccnnncggcgttttcgtttctcaacaacnaaaaanancnnnccccccccccnccccccctccccctcctctccccccccccccctctcctccccccccccccccccccccccccctccctccccctccccccccccccccccttccctctccctcccnctcccccccccccccctccccccctttttctttttcacgtttgttttccgccccccccccccccccccccccctcccacccccactcaaccctcccccccccccctcctcctctcttcttccccccccccctccctccccccccccctccccctctcttccccctccctctccctctcctccccttctccccctcccccccccccccccccccccccccccccntcccccccctccccccccccctccccccctttccctcccccccctccctcttcctcccccccctcccttcccttcctcccccccccccccctccccccctctccctctccctattcctcccccttctcccctccttccctcccctccccccccc

SEQ ID NO: 184912 - DNA, 491 bp, Arabidopsis thaliana
  unsure (1)..(491): unsure at all n locations
acgcctgcaggtaccggtccggaattnccaggttctaccaagggggaaggccagactaaagaaaagtgtaaccctgaagagagaaagggttgttgtgaaggacaaagggcgggccaatacagtattgactaaaagagtgggaacgcggtcactaggtggttatgtgaataggaataagtaattgtgagtacaggggggttttttataggaggggggaaaaaatgagtcgactactattaagatgaaaatatcagtgcaaagagtaggacgaaagatgagatagagtgaggggagagtatggtgagggaaattagaaaaaggatgaggtgataggacagcagaacagaggcacattaattatgtagcgggaattggaaagaacggaggagaggaggtgttattggtgtttgcctcgtggatgatgatatggggagatattgtaagacatgataataaaacgaataggggataattcacgaacgcgtgtaatc

SEQ ID NO: 184913 - DNA, 463 bp, Arabidopsis thaliana
  unsure (1)..(463): unsure at all n locations
acgactcacttttaggggagctgcgtacgcctgcaggtacaggtcncggattcccgggtcgacccacgcgtgcggccacgcgtacgtataaactttaaacgacgaagcggaggcaaatgaggagccgaagatagccatgtgattttaactacgtatttattagtgagtcatagttctcatcatgcattaccatcagtgaaacagtgcatcgacacacaccctttcctattagggggggggggcgagcacctctcccacatttactgttaaaaacacagagtgccagacacaatttcgccgtgaatgatcggagatgtgaaatgaaagggataaaagattatatataactggtggcttgtatggcaagagagtgctagggctgcagcatagaaagatacagaaagcaaaatgctgaagatatcaacgctttaatcttctgttcccatgttccattttaaaaatc

SEQ ID NO: 184914 - DNA, 473 bp, Arabidopsis thaliana
  unsure (1)..(473): unsure at all n locations
tcgcctgcagtacccgtccgnnatcccgggtcgacccacgcgtccgaataaatatcccaaaatttagtggcggcgagagggaaaccaaaattcgcgagagagaagtatgtcgaagacgctggtgcaaccggttgggctgaagaggtttgctatttttttcttctcgttcgttctgcttttcgcgcctttttttttttttggggggggggggtttcttccgcccgtgtttactaaaaattcttcttgtgtcgttggctgaggtggtttctcgttctgtttttgtggtgtggatttttattattttttttgtctgcttcccggcgagccgccgggctgctttgttttttctatgtctcgtaggtcgctcttatgccaacctcatttctctgatgaactgcttcgttcattgccgtctgtctctttcctcttttttttgcttctttttttttgtgttcttttgtccttttttttgg

SEQ ID NO: 184915 - DNA, 461 bp, Arabidopsis thaliana
acgcctgcagtaccggtccggatcccggtcgaccacgcgtccgggacgcgtggatttattgagaatttcgtctattctttcatcgggcataaaaaccagtgaatattgagatggagagagattttggcgacgggaatacatatctaggagctacgagatatgcgcgagcgatgacataaggtttttttaaggggggggggccaatatcactcattcaccaacataaaaaccaacaaaccctcatcacaaataaatacccacataaaatattatttaataaatataattttatatatatcaataaaccaaaccccaccaaaacttcacaataatatttctcccgactgtaacagcacacacaagggttgaagacggcctgcctagtatattataattgaacgagcgagtgcgaacgccaagttaggcagggagcagggtgacgtgttgggagagagatacgg

SEQ ID NO: 184916 - DNA, 782 bp, Arabidopsis thaliana columbia
  unsure (1)..(782): unsure at all n locations
cccccccccaccccccccccntcccccccnncccccccccnccccccccgggcagggagaaaatagattccgtgcccccccccccccccctttccccccnncccnccccccccccccccccatanacccnnccgagaagacaaananactttttaacccaggcggggggaaagcccccnaacaaaacaaaaaccncgcccccgccgcccccccccgcgccccccccaccccccccccgcacccgcaccacctccccccccccccacccccccgccgcccacccccccccccccgcaacgccccgccccaacccccgaccccgcgccccgccccacgcaccccccgccccgcccgcccccacccacccgccgcccaccctcccccccccgggggggggcgcccacaccaccaccaccccccacccgccccgcccccaaaacaaaaaacccccgcgcccgccccgccgccccgccccgcccccccgccccccgcctcacccaccgcgccgcccccccgccccacgcgcccccgcccgcgcccgaaccgccccgccaggctcacaccgcacccaccccccgccccgacactccccgcgcccaccacggcgccacccaccgcgccgaccgcccacgcaccacagccgctgccccccccctcacccccccgccaccccggcccacgcgcgaccccccgccccgccctcgaccgcaccgccccggcccgaccccgccacacccacccgcccccccacccctcccgcgccgccccccaccccccccccc

SEQ ID NO: 184917 - DNA, 438 bp, Arabidopsis thaliana
  unsure (1)..(438): unsure at all n locations
acgactcactaagggggagctcgtacgcctgcaggtacctgtcccggantccccgttcgacccacgcgtccgnggacgcgtgggtttaaagatagggatgagctgaagaagtgtgagagtttgatagttattaatagataatgaaagtgagaattaatatggtttcaatatgtctgcttgcttttgggaatagtttcgatagctggagggagagctttttttaacggggggtgccgccaactttatacgctattactaaaataatgcgccccgtagctcaaacatgcaaattattaagtagggtggtggagtggggatgagtataagtgattttatattaggtgttaatgtatggtggaggccgataataacatattttatgttaattgatgtttaaaaatatacagtctggattgagtgtttgattcgtgagcgtgt

SEQ ID NO: 184918 - DNA, 617 bp, Arabidopsis thaliana
ctgatgccccccccccccccaccaccccggggaaagaataatatttataacgcccccccacctcgtgccgcccgacccccccccacctcccaaacaagaaaaagagaggaatttttacattgggggttatagtttaggcaaaaaaaatgaggggggcgcggggccgccgcgcgtgccggcactatgtatcgtatcttagtcctccaccctcatagatcccctctgcgattacctgagtcgcgtcattccatcctcacgtgctgtctatccgtgcaacttctcacccccgaacataccttttttaacaaggggggtgaccccgccaccacaccgcccctcgccctaaaaaaaacacccctccttcattacctctcgcaactctcgcctcattcacccacgtgcatcaccgtcccctcctcccccactgctcgctccgaactactacaccaccgcgccccgcaccgcctactaattctcctgcggcacgaacgtctcagtccacgacccttttagtgcaccccccttgaccccatcgctcgttcatattattaagtcattcttttgctgattactgctcccactactgtgcgtctcccgtccttgtacctccttctccc

SEQ ID NO: 184919 - DNA, 412 bp, Arabidopsis thaliana
  unsure (1)..(412): unsure at all n locations
tgtacgcctngcagtaccctgtccgaattcccgggtcgacccacgcgtccgccacgcgtccggacttctgggggagatatatgctagaggagctggtgttgaaagaaattataccaaggcacttgaatggtttacacttgcctgcaaaagaaggtctgtattagactatgtgtttgtagtcggtaagagaaaaactttttttttgggggggggggtatcatacaccactctctttctttaaaaaaactgcttttctattacaaaccacaaaaaaaactttaacttactattatattaaaaaatttacactctctaattttaaatttattactatttatttttatcccatcatgtcgcatgtcgttgtttttttcgttgttccatatatcacccgacaatttttgtcatgtat

SEQ ID NO: 184920 - DNA, 569 bp, Arabidopsis thaliana
  unsure (1)..(569): unsure at all n locations
ccccccccnccccccccncggggggggtatttattgtgaccacccccccccttttnnnnnnnacccccccccccccgggaagggggagagggggacttttcaccaggggtgtgaggcgaaaaaaaaaaaccgcgcgcccggcgggcggcgcgcgccccgggaccggccgcgacacacccggagggacgacgggcccgcccgggacccccgggcgcggccgccagccggcccgccccggcgcggcgccgaccgcgcggcgcgcgccgccgcttttctcctcggtgttgggtcccgctgcctctcctctcgtgtttgtctaaacatttggttttgtttctgcgtgttgttcgtctcttcgcttgttccctccgcttccctccgggtcgcggcttcttgccgctccgcgtgttatcgtgttactacgcctccctcgcctcctcgccccccctgtccgggccttcccggcgttgcgtgccccccacacgtcagcgcccctttcgctcccccccttgctctattctgttgtcggctttccttcctgtctcgccgttcgcgtcccccttgtcatg

SEQ ID NO: 184921 - DNA, 560 bp, Arabidopsis thaliana
  unsure (1)..(560): unsure at all n locations
ccccccacaccaccccccccnnccccncccccccccccgcggggggggagaagtaagaagaaaaacaccccccccccccttgncnnnnncnnnaacccnnncccccccnccccnagacgagcagaagagaagagaagatttttgaganggggggcggaaggagccgnaaaaaaaacaaaaannggcgggcggccggcgcggcccgcagccaccacgcagcaagacacgaacacacacagcccgacccacaacncccaggccgccaagngcccgcgcaacgcgcacccagccgacaaccgagccaacaccgacccccccccggcccccagccaccgacacgacggccgacgcgccttttcccaaaggacgttggggccaacggcaacgcgccagccgccgcgacgagaaaaaaacggggcgggacgcggagagcaccgaccggccggcccccccacacaaccacgacgacacaacggacaccaccaccgcccacgcaccgcgcgcgcaccacaggaccaacaaggcccaacgcacgcaagcacgcacacccaccgcgcgcc

SEQ ID NO: 184922 - DNA, 550 bp, Arabidopsis thaliana columbia
  unsure (1)..(550): unsure at all n locations
cccccccccccccccccccccccccccccccggggattgggatggggtggcgcccccnccccttccncccnnnccccncccccccctnnnnnnnnnnnnnnnnnntttttcnggagggtgggcggnaaaaaaaaacccccccccccggcgcgcggcggggggcggcgccccgcgccgcccccccgggcccgccgccgccgcccgccgccccgccgcccgcgccggggcgcccgggcgccggggcgccccggggccgcgccctttttttggggtgttcggccccccctcggggggccccccaaaaaaaaacgcgcccggcgggggggccgtggtgccgtcttctcccgcgcggggcgcccccggccgcgcggtctcgtcgtctgcgtcgcgcgcggccgctccggcgccgccggctcccgcgcgcccctcgcgcctcccccccgcgcgccgccggggggggggcgccgcccgccggggggcggcccgcgcgggcggggtcccgcgccgccctggccccgcgcgccggccggccggcgggcctcccgccccc

SEQ ID NO: 184923 - DNA, 309 bp, Arabidopsis thaliana
  unsure (1)..(309): unsure at all n locations
acgcctgcaggtaccggnccnnaaaaaagttttcaaccccgcggtaagcgctaaactaacataagagaaaacaacccacaacatacaataactatactctatcatcaccacacggaataatcgccgatatgttaatagccacgggatcacatgagtgatacgggaaattggaagcgacaccccatacacgcacgggtttttttaaagggggggaaccacaatcaccagattatcacacaaacacgccaccaacacacgcaaaagaaacgaaaaaacgatccactaatggttaatcaggtacgaacagaa

SEQ ID NO: 184924 - DNA, 514 bp, Arabidopsis thaliana
  unsure (1)..(514): unsure at all n locations
cctccacaccccccccccccccccccccccccacggggggggggaggattgngtttttacacccnnnccccccccattttcccncncnccaaccccccccccccttttcccacgnngaggagggaggaaaaatttttacgacgggcgttgtgggggtgttaataatacataacncccccaccgcncggcggcgcggccatctcgcagcaccaccgacccccccgcccgcccaccctcccccccccacccccgcccccctcctcactccgacacaccacacactgctacccattggttgcccgtcacccacccccacgcactcttttttttcgggttgttgggccccgcccacccccgcccgccccccaaaaaaaatcacccgtcgcgggccgcgtgagagcgcccgctctcaacatcccagcggcaccgcgggcacggtccacccacctcgcccgtccccgcccagggcccccgtgccctcgccatccgccttccccgttccgtgctcccagca

SEQ ID NO: 184925 - DNA, 555 bp, Arabidopsis thaliana columbia
  unsure (1)..(555): unsure at all n locations
ccccccccccccccccccccccccccccccccccccatctctgcccccccccccttcccccncccccccccccccccccnacaccccacccaaatttggncccgggggcagcgcccccacaaaacccccccccccccccccccccccccccccccccccnccccccccccccccccccccccccccccccccccccccccccccccccccccccccccccccccccccccccccccccccccccccccccccccccctctttttttcgcgctgttgccacaccccccccccgcccccccccaaaaaacaacccccccccccccctccccccccccccccccccccccccccccccccccccccccccccccccccccccccccccctcccccccccccccccccccccccctccctccccccctccccccccccccccccccccccccctccaccccccccccccccccccccccccatcctccccccccccccccccctcctccctcccccccccccccccccccccccccccccccccacccccccccccccc

SEQ ID NO: 184926 - DNA, 488 bp, Arabidopsis thaliana
  unsure (1)..(488): unsure at all n locations
tcgcctgcagtaccgtccggaatcccgggtcgaccacgcgtaaggggcgcntanncaaatacactcaggagcagggaaatttttttagtctaactaagcatgttaaataataaaaggaacatatgggtaaatacacctgaacttttgcttgttatttataatgggttaaataaaagagaaaagaaaagttcttcttaagggggtggaaggcaacaagtacacacggaagcttttctagacacgcacgcaacgggcagtagagttgacgaaaaaaggagaagagaagagaaatattataaatattaaaaaaataatatatacgaaagcgcttaaagagaactgatgtaaaaactacggacacggatgacaggattaaccatactatcctttacagaaaccatggataaaatataaaaacgcggtacactaacgacggcacgtaacaaccacacattctcgttataacacaccataaacgctataaacgg

SEQ ID NO: 184927 - DNA, 667 bp, Arabidopsis thaliana columbia
  unsure (1)..(667): unsure at all n locations
cccccccccccncccccccccccccccccccccccccgcccccccggggggggagacctagtatttgacaaccccnnccggnncccccttncncnncnnccnnaacccnccccccccacccnnggcnanngnggncggngngnagaggaggctttttctccccgcgggggggaaggccccgngaaaaaaaaaaaaacccccccgnccccgcgcccccccccccccgcccggcgccccccacccacacccgccccccccccccccgcccccccccccccccgcccaccccccccccccccccccccccgcgcccccccccccgccccacccgccgcccccccccgcctttttctcccggttgtcgggccccccccccccccacccccccccaaaaaaaaaacccccccccccggccccccgcgcccgcccccccgccgacccccccccccgcccccgcccacgccgcaccccccggccggcccgcccgcgcggccccccccccccacccccctcccccccccccccccgccccccccccccccccgccccccccccgcccccccccccccccccgcccccccccgccccccgtccgcccaacccgaccccgccgcccgccgcccccccccccagcccgccccaccccgcgccccccccgccccccccc

SEQ ID NO: 184928 - DNA, 497 bp, Arabidopsis thaliana
ccgcgtacgtaagcttggatcctatagagggtttcgccttgggggaaaaacaaaaaaaaagacaggggggaccggaagagagagaagaacgagaacaacagagaaaggaggacggaaccgcacgatgcacaacgaaggtccgaaagagtgataaacgaaaaacctgaccggacgcccgctgacagcgaaccaacaagaatttttaaaaagttgttgggaacaaaacacaagaggagtgacgaggacaaaacagatgggaaagaaagcggagacgacgggagccagacaccccagcgtagaacacggcacacgccgcgacccgcaacagaccacacccgaggacgaccactaaagcgaaagaggcacgacgatacaaccagcaccacaacgaacacggcaaaccaactgcaaagcaaacaagctgaaaaggaggagggtaattgaggggagcaccacccacacgccgaccgcatgcatgaaccgcacaaatacccgga

SEQ ID NO: 184929 - DNA, 681 bp, Arabidopsis thaliana columbia
  unsure (1)..(681): unsure at all n locations
cccccccccccccccctcccccccccccccccccccccccccccgcggcggaaataatctttccccccccccccccccccttcccccccccccccccccccgccccccccccgccgcggcagggcagaaaacgacgtcttttnaaaacccggggggcaaggcgtntaaaaaaaaaaaaccccccccccccccccccccgcccccccccccaccccccccccccgcccccccaccccccccccccccccccccccccccccccccgccccccccccccccccccccccccccccccccccccccccccccccccccccccccccccccccccccccccctttttccccgggggggtgggcccccccccccccctccccccccccaaaaaaaaaaccccccgcaaggccccccgcccgcccccccgacccccccccccccccgcccaccccccaccccccccccccccacacctcgccgccaccccccccccccccccccccccccccccgccccccctcctccccgcccgccacccaccccacctctccccccgcccccatcaccccccttccccatcctcccccacccgcccccccccccccccccccacccccccccccccnccatacctctccccaccgctaccccccgccccaccccccaccccccccccctcccccc

SEQ ID NO: 184930 - DNA, 682 bp, Arabidopsis thaliana columbia
  unsure (1)..(682): unsure at all n locations
cccccccccccccccccccccccccccccccccccccgccgcgaattgctttgcccccccccccccccccccttcccccccccccccccccccccccccccccccgcccnaanancagaagagaaactttccccagcccggggttaaaggcccnacacaaacaaaaccncccccccgcccccccccccccccccccccccccccccccccccccccccccccccccccgcaccccccccccacccccccccccgccccccccccccccccccccccccccccccccccccccccccccccccccccccccccacccccctctttctcccggactgggtggggccccccccccccccactccccccccccacaaaaaaaacacaccccctacccccgcccccccacccccccccccccccctccccaccccccccccccccccccccccccccccccccctccctctcttccccccccacccccccccccctcctccccccccccccccccccccccccccccaacccccccccccctccccccttcgcctcctccactcccccccccccccccctccccccccccccttcctccctcccccccccccccccccctccttcccctccccctccccccccatcctcccccccccccctcccttcccctccccccccctcccccc

SEQ ID NO: 184931 - DNA, 469 bp, Arabidopsis thaliana
ctactacgcctgcagtaccggtccggaattccgttttaacaagggtgaaagcccaaaaaagaaaaggaatagagaagtgagaagtgaagtttaattagtaaacgaggtgagtatagaaaggagaaagtattagaagtggtagattgaagtatatagttctaattacaatgaattagaagaaaagtttttttaaaggggggaacgctgttagaagcaatcataaataaataaagcatgggatataagagaaggaagaaattgagaagaaaggaagagaagaagagaaatatataatgattagatatggaataaagaagagggcagaatatgcagaggaagtgaaaatattgtggaaataagacgaaggaaatggtgaaacattagatagaagaaaaattaaaaaattgggtggaggagtcgtggagttagaatggtgaaataattatacagataggggatgatatataag

SEQ ID NO: 184932 - DNA, 614 bp, Arabidopsis thaliana
  unsure (1)..(614): unsure at all n locations
cccccccccccgccgccccgagggaggcggggggggggaaaatttgagggggaatgcccccccactttggggagggggaaacgcccctcccggtcccgggcccgaatccccggtttccccccccgggggtgggcgttggaaaaaaaaaaccttcttttccccccgggggtggcgcccaactcccccgcggggacatcttgggagttctgcccccgcccccttcttccttacgcaaaaccgagctcgcccccttttttcccgcgacacccccctccccctttttttttttggcttgtctggcaccacccccacaggcctcctcataaaaaaaaacccccccctccgggtnaaccacggacactccccccccctattgcccggggcgtgccccccccccctctctcccgttaccgctcttcttcccgagcgcgtcccgccttanaaacactccgtgtgcttcgcctctcaccccccctacgttgtgtgctgggtggtggttggcacagacccgtctggtggtgtggtgcctggcgccccccgaccccccctcccgntccccgcccgcgcctttcctcccncctctcatcgctcctgtccccgcctcgctccccccc

SEQ ID NO: 184933 - DNA, 453 bp, Arabidopsis thaliana
  unsure (1)..(453): unsure at all n locations
cctgcaggtaccggtccggaaattccngntctaccacgcgggcgaagggctaacccaaacaagaaacccaagaatagaaaacggaagtgcccgacggcaggtcgcaccaagcacacgggaggggagagagaagcgaaccacgacgagcaggagcaagaagcagcaccgccgcgccacgagccggtagcgaggagttttttattcaagggatgtggaaaaggaacaaaaaaaaagacccaaagaaagagccaacccgcgagggacagcggagagaccgcgccgaagagaggaacgcgcagacggggcagacgaaggccccgaacacaaccagacgaccggcgcacggacaccgcgagcaggaggcagaggaaagagaagaaaggcgccgaccacggaaaagcaggaaaggaggaaagaggaagaagggaggagaggaggggggggcgggacgga

SEQ ID NO: 184934 - DNA, 563 bp, Arabidopsis thaliana
  unsure (1)..(563): unsure at all n locations
aattgtagggatacacccctcactattgggaaagctgacccgcctgccaggtaccggtccgnaattcccgggtcttcccacgcggggcggggggagggtgctctatatgtgttctcgtttctgcgccgattcctaggctgttgggcgcttgcctcttctcttttggattaccatacctctcactcgcatcagattttcagggtgctttttctatccaaagggactgcaagaaagttcatttctatggtcgggaagtaggaaccaaaaatttcttgaaaaccaaaaaaaaaaactttcaatgggnaccataatcctaaaggccgccccccaattcccaacgcacacccaaaaaacttaaggtggagaagatcaagggcgccttaaaaaaacacaaagggggtcgcgtttagatcctaacttaagaaggggaatagctccctcttggggggagaaaaaaagtctaaaaaatctccacattagggccccgaaaaccctcccccccttcttcttaaaacacccgtggttggggggaaaaggaaaaaaactcccgcggcggcataaaa

SEQ ID NO: 184935 - DNA, 555 bp, Arabidopsis thaliana
  unsure (1)..(555): unsure at all n locations
aaaaaaaanaaggggggagagggagagggagggaagagagtttaattaagtatagaaagaaaagaaagagtaagaattgaaataagagagatgttaagagagagtttaggatagggggaagaagagcgatacgagatagggtaatcaagaggggggggcggaccgacatttttaaggaaggttanctacattttaagggttgttggaaaaaaagaatataagagaaatatataagagataaaaaagctaaagagaaataaaatggaagagaagaaaaaagaatctataaagagttaaggaggaagtaataagaaggatgagattatatgataattataaaagaagatatatgatgaataaagtaaaaatatagagaggatgagagggtataaaagaaataattaatatatagttcgagggtggaaaagggaagatagtaaaagaatagagatgtaagtgataaaagaggatggtgtggggggaggcgaganaaaagttagagtgatgagatagtgatgataggataatgtgaaaatatagaagtaaaggggtaga

SEQ ID NO: 184936 - DNA, 559 bp, Arabidopsis thaliana
  unsure (1)..(559): unsure at all n locations
gtcgcatgcacgcgctacgtagcttggatcctctagagcggccgcccttttttttttttttttttttttattagttatctacaaaaacccaaaaaggaacaagacaagaaaggggncccaggccggggcaacaccctagtttggcatccctcacgagagaaccaaatgggtggggcgctcaatgttaaaaaaaaaggttgttccctataaaagcntttggtttttttttaagggggggggcgcagcttactcacatttgatgcttttaaaaatgaaattttcaagtgggtgctttatcgaagaccccttcttttggaacgttatctttgttcttacaaattatacgtctaaaatcgtttgtcaatctgttccttgaaaaattttggttcgcctcgcccaaataaacgaggtctaacctgcaagaaggtgccggatatcgagaagtatggtgtgccaggcgattgcggtgccgcggcgagggtgaacgcgggcatgttataggtgcgggttgtatatgtgtgcgcacatattgttcccgctatgccgctacgattctcct

SEQ ID NO: 184937 - DNA, 477 bp, Arabidopsis thaliana
gaaattttcaacggggggggaaaagacccaagaaaaaaaaaagggaggagcacggagacgaaaagagaaccgagagagcaaccaccgcgcccgcacgcaccacgagagaagaaaagaaacggaaaagacccggaacccacgagaccgagaacccgagacaggcacgccgaacgggagtacacacgaacatttcctcttttagaaggggggggaaggaccacaggaaacagcgcaagaacacacacgaacaaggaagcgaacaggcgaagaggagaagcgccgggaaggccgcatacgaacaaacaggccgcaccgcagggggcacgacagaccgggaacgaggcgcgcaaaacgggacacgccaaacgcggaagagcgacgaagacgagcaggggagaagaaaagagagggagcgagaaggagggggacaacaaggagaaagaaagagagaagaaaggcgagaggaagagaggcaca

SEQ ID NO: 184938 - DNA, 547 bp, Arabidopsis thaliana
  unsure (1)..(547): unsure at all n locations
acgactcaaataggggagctgaccgcctgcaggtaccggtccggattcccgggttgaccacgcgtgcgcattgttgctgagttttagggtgtgagggagnnaaananannnttgagccaaaggcgatggcgaaaacaaaaagaggaaatccaggtgaaacgcccccaagttacacaatggttcagacccgcccagacaagcgagatttttaacgggctttcctcattttgggatagatnggccccaaccccacgagaaactgagaaaaaaaacatagggggcgagggacatagtggctgaataccttctcttactctcttaggaagcagtccgtagacctcagattttcaactattaacggattcaacaattgaaaccagcctttgcgaggagagttgatagtttttagcaacaccttgagtttcgattaatatatttatctatatcttattttagtgangaggagggggagcaactaccgctccacctacacactctgagccgcatcaccgccgactcggttcgcccactaaacagacaggacaac

SEQ ID NO: 184939 - DNA, 495 bp, Arabidopsis thaliana
  unsure (1)..(495): unsure at all n locations
ggcgagaccccccccccncnccggagttgtaattatgttntactnccccccnnaattttnngggggaaaacanggggggggagggaggggaggagatgagaaggagttttggggggggggggggaaggcccggggggagggggagtggtgagaagggtggaggagaggggaatngagtatatttggtatgtgggagaggaggtggttgaagaaaaagtctgaaatattgagatagaaggagttagtaaagagtagatggtgttgagatttgttgaaaagaataagtagaataagcgatgattttttttggtgggagggggggggggagatgaagggtcttataatgggagggatataatagatggtattatatagtaagttgatatgtaggtagagtagatgagaatatatttagattatattgtttaagaaggagatagggggttagaagtgagggtagataatagtagctggtggagagtggatatgagagga

SEQ ID NO: 184940 - DNA, 395 bp, Arabidopsis thaliana
gtcgcagcacgcgtacgtagcttggatcctctagagcggttgccctttttggggaaaaaccccaaccacccaaacgcaacaacccacgaagcgagacacggatcttcagaaaagaaggatagaagacaaagcctcagaaccacggaccaaaccggcagacacacgaaagaaaagcacagccatctggagacacagggcgccgaaacatattacaccgaaggttgctatttaataaaagggggggaagcgaccaagaaaaaacacactgccaaagactcgcccaatacctccaagcgatagaggctcacccatacggtcggaaatggatagccgaacccacagacaaggcgcggcagcgtaacactgagaaacagaaagcgacgacgaaacaacaa

SEQ ID NO: 184941 - DNA, 437 bp, Arabidopsis thaliana
  unsure (1)..(437): unsure at all n locations
cctgcaggtaccggtccggaattnccnnatttacccacggggggggaaggcccaaaaaccacaacgcgccaggaaaaagagagagccagcaccgcgccacgcgcaccgaaccgacacagcacaaaatgaattcagacaaccacctgcccataacagacacctgaatagacagaacgcgccggccagcaccagatacccgaagaactcctcctataagaagggggggggacccaaacacgacgcagaccacaaaaaaaaaagcaacaatccaggggaggacgccaacggaacaacggcgcaacgagctccaccacgacaccgactatccaagaccaccccacaccaacaagtggatatcccacggcaacgctccgacagcgacgcgccgcgcgcacgagcagaagagacaaaaggcaatatcagcgaaagaaagagaa

SEQ ID NO: 184942 - DNA, 321 bp, Arabidopsis thaliana
  unsure (1)..(321): unsure at all n locations
aggagagggagaggagaaaaaggaaagaagttttttgggggggggggggggaaagccagggaagggaaagagggagagggaggggggaaaggagaggggggaanttgagagancgagaggaatggaagaggaanacagaaagatgaacacgagagaggcacggaagaggcgagacagagaggagggtgattacgatggtgtaaggntatacgaagagcggcaaatgggggaggcggacgagggttttttttataaaggggggggggtgagaggaccgaccggagagcgcggggtcgactaggcgaagggacgcggggtcac

SEQ ID NO: 184943 - DNA, 509 bp, Arabidopsis thaliana
  unsure (1)..(509): unsure at all n locations
cgtacgtaagcttggatnctctagagaggacgtccttggggggggtaaagccccncccacccaccaccccacaagcgaagccacggactttaaaccacccccaagagaaagggccagagacaaaaaacccaggacccccgcaacgaaagcaggacccgccccccgcagaaccccagagaaccctaccaacacgtttatatttcagaggggggggagcaaccccacccacgaccaacgcggaggataacaagagcgccagccgccaagcagggcaaaacgcacagaaagccccacgcaccgaacgacagcaaaccacaccggcaacagacagccggcgcacaaaagaccaacccccaacaaaacgacatccccccagatcaccaccacacaccagaacagagaaccagaagaacagggccaacaaagcgacagccccgcccgcaaaacccacacaagaagaggacataccaaagaatacgaataccccccaaagcaccccgaccaagccc

SEQ ID NO: 184944 - DNA, 543 bp, Arabidopsis thaliana
  unsure (1)..(543): unsure at all n locations
actatggggagctgaccgcctgcaggtaccggtccggattcccgggtttcccacgcgtgcgagaacccntgaacaaactcctagtctaactactgtgaagcttttatgctaaaacctgcgagaagcgccctcacaagaaaggggaagaaactttcccaagccgggagcagcgcacgaagccatctgcccaccacgacgaacatttttgaaggggttccttcccttttggggtgttggggccccccacccccgacactactccccgttagaaagagctctgaccaggcgcgtacactactacccgcacttccctgctttagcagcttgcagccggcgaactatacgggaacgactactaaggacactgtatagaattctaactagatccgatgccgatcgaggaagaaatatattaagtagagagaatgagaaaggcacgtttgaatgaagagtagtaaaagcagtggttatgtgtgggcagggaagaaacagcaatgaacacaaacactcatgccatttgcacagatgagatcctctcgtctg

SEQ ID NO: 184945 - DNA, 558 bp, Arabidopsis thaliana
acggggcaaagccgcgtacgtaaggttggatactctagagcggtctcccttgggggggggaagaccccacacacggagaaaaacgagaggcagacaaggagaatttaaccccccaggaggaggaaccgcccggcgaaacggggacgcaaacctcagcagcagaaggaacacaaccgcgaccagacacaacgaagcccgagggaccgaaactggcaaggggtttataattcaaccgggggggcccacccgacataagacggaggagaacaacgcgaggcagagccacatgaggcgaagagccgcaggaaagcaggagccgccgcaaccagcgagccgcaaaaaagcgacagaaggacgcgaaaagcgcacgtaacggaaaatacaagaaggggcgcaaccaagaagcgggaaagccaccgagaaaagagcggcaaagccccaacaccaccagagcaaaagccgtatcgcgggaagagcgggagacaacgacggcagcgcaaaggacgcgtagaagcaggcggcaaccctacaataaacgcacaaaccgaaacagccaga

SEQ ID NO: 184946 - DNA, 472 bp, Arabidopsis thaliana
  unsure (1)..(472): unsure at all n locations
tgaccgcctgcaggtaccggtccggaatcccgggttgaccaggcggcgaaacctgnacactaaaaaagaaaaacgagaggggcaactctccgcaccacggggccgagccgaagaaaaaagcgaacggcacctaaagccaaacggcaacggacccccaggaagaacacacgacaaactttggcaaatccctacttttaggggggggcccccccgccaacaaagatacgccatgaggcaccccggtgagacaaccaagccggccgccagcagcgcctcacagaccgtaccaataacagccacgcaaatcaacagcaaacccacaacccccaagagtaagagaccgcacggagaaggccaatacatacagaaagggaaaaggaaaaaaagagaaaaaaggaggcaaccacgtccccataggcgagaggaccagagaaaaagacagacacgcaggaagacccaaaagccacgccaa

SEQ ID NO: 184947 - DNA, 504 bp, Arabidopsis thaliana
cgatgtctagaagaggtgaaagagaggggaatgttttaagggaggggggggagggcgtcggtacaaacaaactcacacgggtcaaagcgggcacccctcgaagaagcacaaggatgcaaggtccacgaacaacggggagcatgagtgatggacgacttacggtaggagagcggacaactaccgagaaccaagggcgcgtattggaaaaggtgtttttttagcgaggcggggggccacacgcgtccgaagagacaggtccaacaacaggaggccaagcccggtggcaagagaagacgtcgagcagagaaacgaggacgcaccggagccgaaagagccgcacagcaagcatgaactcggataagagagacccaaaaggccaggcaagaggggatgagagctggcatatgaatctgaaggtagatctgaagcggacgccggcagcgccagccgcacgcgacggcgtaggcagcataggcacaaagcgccaataaaccgcatacgagg

SEQ ID NO: 184948 - DNA, 513 bp, Arabidopsis thaliana
  unsure (1)..(513): unsure at all n locations
ccccccccccccgccgtaaaaacggggggggngggatagtattttaagtggacggccctcaaataggggatnaacacccccgcgggagcggnccaaagccactttccccaggggggaagcccacaaacaaaaggaancacaccaaacggcgagcaccccccaacagacaagaaaggaaaaacgagcgagcaaagagaagaagagagagacaccgggacgccgggggagaggagttgagatttttttttttttggggggtggacggccaccaagattttttttttaaaattatttctgcctagtgtattgtaaagatctaccagtattatgtgtatttagtgttaaatttgttttttttcctacgaatcgttagctgtctaccggaagttttataatttttttattgatgtgttggcttttgttttttgttgtttntgttttttttttgtgggaaggaagagccataatctatttatttttatttaattatacgtcgtaagagaagtgcgataa

SEQ ID NO: 184949 - DNA, 432 bp, Arabidopsis thaliana
  unsure (1)..(432): unsure at all n locations
gggaagtgaccgccgcgggacgancaaaaaaaatttttaaagggggaagccgaaaaccgcccacccgaaagagggaggaacccaaccccaacatcgcgagcggggagaggtacggctcaacaggaattatttcaatggtaggaacggacagccgagcatggcagttttttttaagggggtggaaaaaaacagagaagcacgaataagaaattagatggggggggatggagatagcgttagagttaagacctagggaacaggggagaaacacacggattttagtgaaggaaccgatggaaagacagagggtaggaagaatagacgccggttataggacataaatatgtagaagttaagagtaggaggggccagggctgacgtaaagctatcttaacgcggagtcttatagacacaaaagaaagactaaaggag

SEQ ID NO: 184950 - DNA, 569 bp, Arabidopsis thaliana
  unsure (1)..(569): unsure at all n locations
ccacccaccaccccacccccccccacaggaacacaaggaaccccgccncccccccccgtatagaataaaagggggnnaacanacccccccccnaaattnttncggggggaaaaaaccccggcccccccgcccaaagcggagaccgacaaacaacacgcacaacaatttttttcaacacggggggggggggaaagaaaccccccacgccccagagaacgcaacccggggaagcagccgcacaccgaacgaacagaagagaccagaaacaaagaaagcagcgaaacgcaaaagccacaaggacaacgcacccgagccagtgaaggcacgcagacccgccgcacgaacaaagcgagcggacacgacaaacacaaacagaacacagagaaaaaccagagcacgagccagcaacaagacgaccaagacaaacgagcaccacggacacaggaacgccacgacaacgtctttttttttttacgcgccccaaagaagggccggcggaacaacgacaaccgaaagcacaaaacagcaagacacgccacaagcgagagaccaacacccgacagagcgcc

SEQ ID NO: 184951 - DNA, 507 bp, Arabidopsis thaliana
gtcgcatgccccgcgtacgtagcttggatcctctagagcggccgtcctttttttttttttatccatctcaaagattcctaataaatttgtgcggcggcgcatatggacactcgctaacagggcgcgcccgtattggcccccgcacggtctttgcttgtgacgatgcaccggctccgcctggtcggatgctcccgccttctgcaccgttttttttaaagcgggggggggcgccccccgcgcacccatgctccccccgataacatcctcagcctatctgctttttctctcccgcggccccattatccgtgttatctcttcgcgctcaccgtccgctcgaccctttacccttgctccctttcacgccgcatccctctccctcccctgtccgccgctctttccgctagtcctttttccatacttacgcgctgtccctgatgttttactcacgcctccttcggcccctgctcctttcgtttcccctcggatgcaccaattcgcccccctttc

SEQ ID NO: 184952 - DNA, 566 bp, Arabidopsis thaliana
agtggcagcacgcgtacgtaagcttggatactatagagcggtttaactttttttggtaaaaccccgggcgggagccgggcgagtgacacacgagagtaatcctctccaccggcgcgaataggtccggattgtgtacctctgtgtagctaaccacgcgtactttatacacaagcagtcgctaatacggccgtccaacccccggacccagatagtaccggatcacttgttattaccacaaggggtggagactgtgcgtcatcagccactaacatagttgcgcattcgcgatactggcgtgtggcatccttagtatgcttcaccgtgcgatttatctagcaagcgcgtcaagcagcgactgactaaaatgactgccgcagccgccgcttctaacgtaacgacgggctacattgaccacccgatccatcctcacgtgagatcggaaattggtgatggtggcagatctctagggcccatgtctcgatatccacccgtcaacagaagaagtgccccacaagtctcaaacagccccggaaatcgaacgtaatacgcgcagatgcccccagctt

SEQ ID NO: 184953 - DNA, 475 bp, Arabidopsis thaliana
  unsure (1)..(475): unsure at all n locations
cgtacgtaagcttggatcctctagagcgggctgctccttttttttgtaaagcccncnaacacgcagaagcacgagatcaggcagcagaaatgtcaacaaagcagcaacaccagaaaccgaccaacgcaactaccaaacgtaagaatagataaatagctgcagacaagcgcaaagaccagaaaccgcacgggaatttagaaacgcttctatttgacgggggggggagaaccaccaaagacagagacacaacggagaagaacagggccaacaacataggacgacacagataaagaacggagtggaaaccaagtgagtgaaagacagcaaaaaagacgatcgaagacagaaaagacaagagaaaggaggcagcaggaggacgaagcgaacgcaagaccagaaggaaaaataagagacgtccatacaagaagaacccatgtagaacgtgcgcgcaaaacacaaccaacgcaggggaacc

SEQ ID NO: 184954 - DNA, 470 bp, Arabidopsis thaliana
ggggggggagggagaagaggggaaagttttaaaaggaggggggaagcccaagaacaaaaaaacacgccgataagagcaccccgcgagatgcggcgccggaccgccgaacaccacgcgctagaccccaactgcccccagagcgggggagcacagcagcacgggacacgtcccaatccacggctagggcgtcttttttttggggggggagaggcaccgttgtgttgttcaggcctcatcttccggtacctattttttgcgttctctgtcgctgtccctattataatttcaggtttctaatatactcttcttatgccctctcgagttatttgcatcttgcccggtccatcgttccttctgagttgtgcattttcctccgcccctattatttaccctgtttgttagtcttttatcgtttttttcttcttattctcttggagcgcgttcccttttttgtcacttttctcacttgt

SEQ ID NO: 184955 - DNA, 467 bp, Arabidopsis thaliana
agagaggagagaacaggcggcgcagcgggacgcaacaagcagcgacgaaagaacgaccacccgcccgcgcaaaagctttagaggggggtctcctcatttttacggggggggggaaaaagcgagaagaagcgggcaagaaaacggacgaaaaaaaaaccgggaggcaaaggacggggaagcgggaccgcgaggcatggagagtgaggacggcaggggcgcgcgcccgaaccaagaaaacgaagacgccgagaaaccggagacagacaaaacgcaagcaaaagcacggcgagggcgagaggcagagggggaaacaagaaggcacggatagcacgacaggcacaggaagggagaaagagaaaaagagataagacggagaaccgacaggaggagggagggcgcggcgaccgcagggcacgcagaacacaccgtgacacagaggcaacgagcgtaagagaaagagaagcaac

SEQ ID NO: 184956 - DNA, 544 bp, Arabidopsis thaliana
  unsure (1)..(544): unsure at all n locations
ggggggggaggggagggaaggggagattttgggaggggggggtttaaaaccnnggggggaggggaaggggggagagggggaaggaggagagggggagttnagggagaagggagaagggtgtgtgattagtgggttagtgggtgagagatggttgtatgtgagggaagaggagggagtgattagggggggggtggggaaggaggggagggtgtgggggggggtttttttttttgagggggggttagggaggaggaggaagggtggggaagggaagggagaggggtggtggggtggatggaggaggtgtgtatggatgtagagtgagtgagatgaggggtgagagggagaaggagggataagagaaggtgatgtgtggtaggagatatggggggtattggagaagtagtgagaggattgagagaggagatgagagttgaagttgtggagtgagtaaagtggggtgtggaaggaggatgttagggggggaaaagtgattaagagagtgggagagtagggtgtgaaatgaggggtaggatagtttaag

SEQ ID NO: 184957 - DNA, 493 bp, Arabidopsis thaliana
aggggggaacccgggggggggggggcggacggaggagagcgaggttttgacgggggcgggggccacggagagcaggggacgcgcgccggagaaggagggagaagagacaacaggcggagggacggcgaaaacaggaagagaaaagagcagcagacgccaacacgagcggggaggacggagggggcgcgaaaggaggagaggacggggttttttgggcggggaggggggaagcgagaaggaacgcggcagcatgaggaagagactgaggggaggacagaagagcgggaataaagagagagaccagggggctgcaacggagagagaggataaacggaacgcgcagagacggaagaccacaaggggggaggcgaggaagagaagggcgcggaggaagagaatagaatgcgacaaggaggacgggaggaaaagagagaaagggagagaagagagaagaagagagaggggaggcgcgaccgagaaggggggggacgaa

SEQ ID NO: 184958 - DNA, 536 bp, Arabidopsis thaliana
  unsure (1)..(536): unsure at all n locations
gcctgcaggtaccggtccggattcccgggttgaccacgcgtgcgaaacccgtncgaggacgcgtgggaagaaaaaatataaaattctcatacaagaactgaagaacgagcaaataaaaataaaaatagagtttttaactcatacacatccataattatatcacccacccacaacagcacttttttaaagagttcctaaatttttggggggggtgaacccccaagaaaagcatctgtttataaaacaacaattccacaaaatgatatgattttctttgattaatttataaaccagaaaacgtataggtaataaaccggtccattataaaataacactccaaataacgctgtacgactgtaagacgagagaaaaggaatatatattaggccattacgaatcaatagtaataaatataaatagaaatttttagattgagaataagagggngcaccataaccatactaattacaaagatatgcgttacatattaaataacagaacttaactagacaatcaaaaaatgtagaataacccat

SEQ ID NO: 184959 - DNA, 546 bp, Arabidopsis thaliana
  unsure (1)..(546): unsure at all n locations
tatggggagctgacngcctgcaggtaccggtccggaatcccgggtttcccaggggggggaaaagcccaaataaacaaccaggaagggggaggggagggacttagccccaaccaaccagacggaccaaagagaaagtgcaagaaagaggcgagggaccagaaggacgacgaggaccgaggaggaacgcaggttacgggaattcctanattttaggggggggaaacaccaacacacgaacttatcagaagagaacggcgcggacaagacaagatctgccgcaaaatacactaagaggccggcaagagaaagcggaacggcagagcgcaaaacggagaggaacccgcagccgctccacacagactcgcgacggccgagggagggaaagataggaaatacgcagagccgaaggaacaaacgaaaaatgagaaaagaagaagccggaactgggagagagaaggcaacgaagagatacgctaaggcgatcgcgggcaagagagtaaagtaagataataaaggagacgcacgagaacggggaactgcgcagcc

SEQ ID NO: 184960 - DNA, 502 bp, Arabidopsis thaliana
  unsure (1)..(502): unsure at all n locations
cagaagggggggaagaaaagaagaatttaaaaggggggaaaagcagaggaagaaggcggcagagggacaccgaacaggntaaggagcagcgacagccagacgctgggcgaggcacgagaggaaaccacaagaaccggaggaggccgcagcgccgagagcccgaggccaacaaataaaagcgtttttttttaagagggggagaaaagacccagagggcccagcgaggaaacagaagcgaaccaaaaggccacaagcatggggagcaggaaggacgaggggaggacagggaagaggctgacggaaccccaacgacggcgcagatgacccaagacaccaaaaagaaggagagcgcagggaggggctaggacgtgcagcctagacgaactaagggcagagagcctcagagagaacgcggaggcaagagctcacacacaggaagagcgcccataaaatcccagagcgcgaaagaagcccgcagacgcccaccgctcgaccaaggcgc

SEQ ID NO: 184961 - DNA, 506 bp, Arabidopsis thaliana
  unsure (1)..(506): unsure at all n locations
gaaaaagagagaaaaaaaagagttttaggaggaggggggggggaaggcgcaaaaaggaanaaaaccaaggaaaacagagaggagaaagaaagagaaacgaaacaagaaagaggggagagataggaggaaagggaaaaaagagacacggagggggaggagcaacagaagaagaagaaatagggaagaaagaaagaaaagacagcagaaggacaccttatggaaaagagaatttttttttaaaagagggggggtgagaaaagaaccacaaaaaagttttataagagaatatatatgtattaatgtgttntttataggttagtagagagagtaagtttcatttaaagatcacgataagcatatgtatattaaatagcagcttgaataaggctattataatgtagttatgaggtgtcttatgaattatagaagataagaggaagttcataaataattggagcattaatcgataataattataaagtcataaaagagtatatattcaacat

SEQ ID NO: 184962 - DNA, 479 bp, Arabidopsis thaliana
  unsure (1)..(479): unsure at all n locations
gtagcttggatcctctagagcggctgtccttttttgggtaaaccccnaacaccacaccctccttcgcgctgtgcggggaggtttgcggcccctcacacacaggttccgcccaaagaccccagggctccctccagcaggacgggtgggcctggggcgaaccagacagcgagccacaaagattgggcgcccttcttatttgaggggggggggagcacccgccggcccgccccgacggacaaacgagccccacgcgcccgaggtaagatcccgctatatgcgaacggacgaaacacaagaaaaccggacaccccgcgacgaccacctgcagaccccgaaaccaaacgaaagaggaggcccccagggggcacacccaggtctcggcgccacaggcaaacgagcacgacgcaccgtaaccacatcccgacagcaaagtgtccaaaaacggaatgccgccccagcagtccctaacatagcgaagt

SEQ ID NO: 184963 - DNA, 417 bp, Arabidopsis thaliana
  unsure (1)..(417): unsure at all n locations
gtcgcatgacccgcgtacgtagctgggatcctctagagcggcctcccctggttgtttttttccctgnnnaaaaaaannaanacaaggagaaaggcgggggagtttggggaaataatagagtgtaaactcgacgcaaaatcccgcgagaagcccagtaagtggaccctattcgcccgggttgagatagactcagaagcccccgttttcagagaattttataattacaggggggcgccaacacaccaccaagcggcgcgtcgaaggcacatgagaccacggtgcttgacccataggttatagccgcccgccaagacccatcctcgcccgcccctgacttctcacaaacaaaccggcagcatccctcgtatagaattccgaagcagttactcctaacctatgactcgtcacgcaacgacc

SEQ ID NO: 184964 - DNA, 434 bp, Arabidopsis thaliana
  unsure (1)..(434): unsure at all n locations
cctgcaggtaccggtccgngattcccgggtctacccacgcgtggcgggtgacttaatccgacaatgtgcttaccgaattcatgccctgaattcatatcttaatgcggataatcaggtttcagatggtgtgcgaagttctgctgggcggaccgttcgggtattatatgatgcccccccggcagactgttttccggctttccctaattttggggggggggggccgcaccgccattttcgccgtccaagaaactccccgcgtgggttggttcggtgttagtgtttctatttctctactattggtcctttcttttttacgtgtaaatctaggttcattgtatttaatcgtccctacgcgcccgacgatgtgttgcacaaagtatgtattgtgagaatccgccaaagggtggtctataattttttttttacctgctttg

SEQ ID NO: 184965 - DNA, 520 bp, Arabidopsis thaliana
  unsure (1)..(520): unsure at all n locations
gtcgcatgacccgcgtacgtagcttggatcctctagagcggccgtccttttgtggtttttatccttnaaacaacaaaaacacacaccacaagcaacaaagaagtttataacggaaacacctggaaaaaaccccaaaaacagtacgcacacggcgtgtaaaggcaggggagcaggaaccaaaggacgactataagaataccgaggacttttttcgaggaaattccctttcttctaggggtggggggcgcgagacgggacaaaggctgagaagaagacagcacgggcgagggaggaatagacaagagagataaggaggagtgaaaagacagagttagaacgaaaagcgccagaaagtcgtagcacggaaagagagagaacagatcccaatcaaatactctaaaatgacaacccaaaaaggaccgaatagaggaggacggataccgagaaatacaatcggcgatgagctaggagcatatcgcaaaataagcagatgaatgggggcgcgcccgagcgacccata

SEQ ID NO: 184966 - DNA, 412 bp, Arabidopsis thaliana
gccgcaggacggccgaaagaaagattaacgggggaaaaaccgaaagcccacagaaaaaacacagaaggctaaaccaccgccgaccaaacgcccgggaaagaggaaaaccgcgacagcagagcaagcagcagaggagagacgaacaaccgccaaacgaacgactgagaagaactttgtagttatagagggggggaaacaggacacaaaggaagacgaaaagaagaagacacaagacacaaaggggagacagaaagcacgccacaagacgggaggaagaaaggcaacgcgagcggaggacaacaaccgaagccaagccagacgccacaaaacaggagcggcgggaggagaaagtagaagcaccgacagggacgaggagaagaaagaagaaaaaagaaacggagaaaagagggag

SEQ ID NO: 184967 - DNA, 470 bp, Arabidopsis thaliana
  unsure (1)..(470): unsure at all n locations
gtagcttggatcctctagagcggcctgccctttttttttttttttctattnaaacaaaaannnancaacnaaagagccgagnggnacattggagatataccgcgtagtgcagatcctcaaatacaagaagggaagtttttatagcaagcggatggttgcacatgcgctatactgagagagaaagggggatttatagggaaattgatgatttttgggggggggggcggccccgcggaaaaaagtgggaggacctggtgggtaatcacgcatattactatggtattaaaaagtgtgcatatgtacgttagtgactgcgacgctcgtccaccggaaaaggtacgtgaaattagcccccgcaccactaattcaaagggttcgagatatccgatcgtttacacccataccggtttatgaagttgagtgaatccgaatttttaaactcgtagccctatgagaccaaaaatcatagc

SEQ ID NO: 184968 - DNA, 144 bp, Arabidopsis thaliana
  unsure (1)..(144): unsure at all n locations
cctgnggtaccggtccggaattccgggtttancacgcggggaaaactattgaacaaactctgggcactgagagtcgatagaaaccggtcgccggccgtacgaaactggaagaaatgatacgaaacaacgcaaaagtcgtatcat

SEQ ID NO: 184969 - DNA, 482 bp, Arabidopsis thaliana
  unsure (1)..(482): unsure at all n locations
gtagcttggatcctctnagagcggcgtcccttgttttttttttttttttttttttgggaaaataatttcaaggaaggaattaaggttccggtaaaggggtaaccttaaggtttgccctttgaaagaaacacattttaaggtttttttttcccaattttggatttctccccccggaagaattttttttggacattttttttttttgggggggggggggacccccacaaacggcgctgactacgcgttcacaagcgcactccccccgcattggcgcggtccgctcgtatgtatacgtatttgtccctctctcaatctctgatgagattccccactccactcctatgctactttcccccctcaatccgttcgagtccatcctgtcccgtctgccccagctatctagttcaccccatcttgctatccctagactcccattacgtctgccggtatcgctctcggtcacgccccagccgaacacatca

SEQ ID NO: 184970 - DNA, 503 bp, Arabidopsis thaliana
  unsure (1)..(503): unsure at all n locations
gactcactatggggagctgacagcctgcaggtaccggtccggattcccgggtttaccacgcgggcgctcttccttacactcctttttttattaattnccattgatctctnttccctgcctcgattcatgcgcgcctaaagagaacacagacgcaagatggaaaaggactaacgaaagcgtaaggtagagacagcccgacaacatggagatattgcaagaagttcctaattttaggggggggggagaaacaacaccaagacacccgcagaaaaaagaaaaataaagcacaaatacgccgctcgagtgagaatgagcgaaaatctccacagtcaactaccacctcacgtatcaacgacctacactacgtaaatacacttcacacacgccaatccaacgcacaccagcgaacaaggaagaatgaaaagagatatatgaatactcggcgatgtcagcacgcaattacgagtaatgtatgtgtaaatagtatacggttcacaggtgga

SEQ ID NO: 184971 - DNA, 417 bp, Arabidopsis thaliana
ggagggggaggaagaggggtttaaaggggggagaggccccacaaaaaagggggggggagggaaggaagaattagggctgaaaagagcggacgaggaggaaaagaggacgcacccggacgacagagaaagcgaggcggaaggcgcaggccacgaggcagaagagttttttttgggggggtggggccccccgtgccctgggcggaccggcaacgcggccacccccgacggctgacgcgcacagagggcggcggcaggggataaacgcccccgcccgcagtaattggacagtagcgaggccaccataaagaggtccgccccgtgctacggcgtaataaagctgaaggttggatcgcacctccgaaatcaagaggcttagcggggtgcccgtgtagtgtctctacccgtcgtgccccaacc

SEQ ID NO: 184972 - DNA, 490 bp, Arabidopsis thaliana
  unsure (1)..(490): unsure at all n locations
gcccgcaggaaccggnncgaaacacaccactttcgcggggagaaaaacccccaaacccaacccccggggaggaagggagaaagnttcggaacacgaccgacgcagacggagaaacaagaaacgagcgagcccaggacaacacagacgcgagagacaccagccccccccccaagacaactttcggaaggatttgctccttttgggaagttggagacaaacaaaagaaaagaaccagaagacaaacaagacgacagcggcggcaggaggaaaaccagacggaccacccaaaagcagcgcagcggaaaacactaaaaagcaaccactagcccccaagccgaacaactacgaccacgtacgccagagcgcgcagaacccgaaagagtatccgcgcacaagcagaaagacgaaaaagaagaggaagaaagatagaagacgaggccagcccgcaagcagaccggacaaggaaggcgaatgacagcgaaaacaccca

SEQ ID NO: 184973 - DNA, 373 bp, Arabidopsis thaliana
gtaggcacccccatttgggaacagccaaaggagaaaaaaaaattaggggggaacgacacgaagggacacaggcgcgccctcaacgaagggggcccaacaaagccaaacgacacgcgaaggagccagggccgaccgaccccctcaaacgtttttaaggggggaagcgcaagaccagaaagacaccccccccaccgaggaggcccccaagaaggaggcaacggaaacccagcaacaggacgaaacagcacacacaaaaaagaacaccaaacaaaaaaccagaacgagggcacagcgaccccacgccgaacaagcccagacccagaaacaaaaacaaaaaagccaacccagaggacgagagaccgaagacccgaga

SEQ ID NO: 184974 - DNA, 469 bp, Arabidopsis thaliana
cctgcaggtacaggtccggaattcccgggtttacccacgcgggggaggcccataaaaaacacacccacgaaaaaagaagacgaacagcaaccggacgaacgagacgaaagaaaaagaacgccagcaacgggaagaaagaaaccaagacaccacagcccgcacaagaagttaagcagttttctctttttaggggggggaaaagaaaaaaaggttgaacgagttacgataatatttatgaagacataattactatatgtacatattaggtaaggatgtctgtacagtgattgttacatttgtagtatttttttaatcttaatctgtcaactatcgtaaaagaaactataaaccataggcaggagaagtgagtaaattattaatagaaaggaaggaaaacgggggaaggaagcaggaaaattgatcttatttgggcttgttgggtagatttatagagtgcgaaataaatgta

SEQ ID NO: 184975 - DNA, 516 bp, Arabidopsis thaliana
  unsure (1)..(516): unsure at all n locations
cctgcaggtaccggtccgngattcccgggtcgtacccacgcgtgcgcaaatccgtangngaaaaaagaagaattaagaaaaggagaaaggataaccgtccccaaccggaccccgtaccactccggatttatccaaatcttacctattccatcatcccgcaatctccactaacgccccacaggcaatcctttttcacgcacattcgcttattttagggggggggaccgcgacacacagaccccccatgcagagtaaaacatgcgtcacggctatcgtgttaagaattaaatatagtcacaagcggcgcaataggtaagttccgagttagcgaaactgattacatactaatagaatcaacgagtaactatagtacagactccaggcgggtataaaagaaaatgaaaaatcacagccgtctaccggtagtgataaagaaagattaccctggtcaaaatagaaggaggagacggagcgacgcgcgtgcctaatagctcgttacattcggcgccccgtata

SEQ ID NO: 184976 - DNA, 516 bp, Arabidopsis thaliana
  unsure (1)..(516): unsure at all n locations
ggggggaggaagaagaaaaaggagaaagtttttaagggggggggggaaaaaaagccnagagggggagagaggggaagagagggaggaaggagagggggagaatttgagagttttattagagaggggggtgtaatgggtatgtggtgatcggggaggtacgatggaggtaaagaagaagggagggagcggggggagaggagaggaaggattgtgggtccaggggaaagaggagtaaagagagaaaaattttttttttggggggggggggaaaggggaggaaagggtgggggaggaaagggaaggagggatgaggaagttcatgatgagggatgtgtagaagaacgaaagatgtgggtgggtgagaagaaagagagggaagagggtatcgatggcgcgaaattgagtaacgtgtgattaggtggaagattttgagtagtaagagtgactgtaggtcgtcattggagtaagattgataacggtgaggtatgagatgggaggaggggtggggaggagttg

SEQ ID NO: 184977 - DNA, 480 bp, Arabidopsis thaliana
  unsure (1)..(480): unsure at all n locations
cgtacgtaagcttggatcctatagagcggnctccctgtgggggggaaaacccacacacacaacgacgagaaaccacgaagaacacacatttcaccacgagtggcgcaccaacaccggccaaagagaggccgcagacagcagcaggggcgcgcggagccaaacgacaagggcacgagccgcgacgcgtcgcacccgttttttttgaaaggggggggagagccgcggaacaggaccgggaggagacaaacggcgatgagagacgacggcaccaaaagcacgctcatgccaaacagaaagagaaagaagaccgaaatacgcaccaaaaccaatcccaaacccagcgcgagaactagccacactcagatcacaccctatgcgcaaagccgcaacggaaggagcgcaggcgccggaacccgaagacagccacgccgggggcggcaaaacgaaaagaaggacgaaaaacacggacgcgcccaaagc

SEQ ID NO: 184978 - DNA, 493 bp, Arabidopsis thaliana
  unsure (1)..(493): unsure at all n locations
cgtcgtaagcttggacctctagagcggctgncctgggggggaaaccccncnagnggccgccggggggggggagggggggtttagggcggggggggggcaggccccggaaaggggggggggggggccgagcaaaaggggggtaggnnngggggggcggggggcgagggggtttggggggggtccgtcatttaagggggggggaagagcagcagaagggcagaggagggggcagggtgcgctacaaaaggggcgcccggggggcgggacgggcgaggccaggcgggggcgaggggcggaacggggccaagcaatgagcgagagacggagaagaggggcgggccggagaacgggcgggagcagcgcagagaagcggcgaggcgcgggcgggcgcggaggagcggcgaggaagggcgagaagagggagaaacggggaggcgggggggggaggcgacagcgaggggatcgcagccacgaggccacggaagatcgcagc

SEQ ID NO: 184979 - DNA, 433 bp, Arabidopsis thaliana
  unsure (1)..(433): unsure at all n locations
cctgcaggaccggtccggaatncnngatttccaaggaaggcgagcgccaccccccaccatatccaaaaatccaaaaccccaccccccgtcacacagcgtttcaagaactattatatgcacatagatacaaaaaaaaccccccccatcgacatataaaatccagccgcaggatttttttaggaggggggccaaaccgccatgaacaccaaatagaaaattccttcaaccgttcaaccaagcctcgcatgcactaccgagacacacagctaaaatctcagaaaaacagaacgaacctccaatgtgaggatgtgagaacgtgaggctggatcagcgatgatgtcaataatttatatatgagagtttaagggcgcagtgcagacgcgccgcaaacagaaccaggagtgtgggtgaaaaaaaaagcctcaccaaggtc

SEQ ID NO: 184980 - DNA, 488 bp, Arabidopsis thaliana
  unsure (1)..(488): unsure at all n locations
tcccaataccggccccccccaccccagtagatgagggaaccccccccattaagggnaaacaacagtgaatggaaaattttaaagaatttaaggagggggaaggcaaagaaaaaagggagccggattgaagaggtttaaagacacattaaaagtgtagagcagaacagagggcggatacaggtcggatgcgagaagatggcaagtaagaggaagaggaaaacgaggctttttcatgggggggggagagggcacggaggagtagaatagtttagagatccgcaatgaagagacgaatggcaacaagaccgatctagatgagggtaatgtaatgtaatgattcacggacatagattacgatccactacaagtatttgcgaccaattgcatactttgggcatgaaatgcaaaaatgaaagtccaatacaataacataaggaaatacgatgaagtaaggtactcatcgaatcctttagggccatttatcaata

SEQ ID NO: 184981 - DNA, 488 bp, Arabidopsis thaliana
  unsure (1)..(488): unsure at all n locations
ccctcatatggggagctgacagcctgcaggtaccggtccggattcccgggtttaccacgcgggggaagcctctattttaatcnatcagagagaactaaggcttggtgaggagaccgcggccctcacctgcaaaaaaaaataatccgtatacgaagagaaagacagctttgcacagtcaacccactaaagaataggaacaggtctacttaaggggggggggacacaagagcaacgactatccgtaaaaagactccggtacggctgggtacgtacgtgcgcgctcaggcatagcagaccacctgtagcagtagcgtgtgagtattagattatacgaaagcaagtcaactctaggtgccgcacggtatagatttaaaataaacacggcataaaaaaggaaggtaaagatatatactgaatgagtagagggaggggagaaggagagaatctcgtcgagctcaggcgtaggttaataagaacactcatctgaa

SEQ ID NO: 184982 - DNA, 501 bp, Arabidopsis thaliana
  unsure (1)..(501): unsure at all n locations
cctgcggtaccggaccggaatncnnggcttcccagcgggggaaaaccctataaaaaantcacccctcatacactcgaatatcttcacatgccttgctctcttgtcttcacatgaagtagcaggaatagtcgatgcaatgaaacgcttaatgccagccgccccaacccgactctaccgagtttctatttatagggggtgtagaacacaaagcgtatgtttgacacagaatagaaagacctcgtcattaatgcttaaagtaccaaatatctagacttcaaaagtcgcatatttctacgtatataacatgtgaacgattgatattcgttctcaaatttgcatcaggaagctgtagaagataatattgatattatggagtacatagtggtttatgttattatacgctgattcacagctaggaggngtgggctctttacatcattactatcaattcgggtgctttctatcttcattgaaacgcgacataaactcttatgcccaccc

SEQ ID NO: 184983 - DNA, 480 bp, Arabidopsis thaliana
  unsure (1)..(480): unsure at all n locations
tttaaagggggggtgaaaaccccaaggagagaaaggggaaaaggggggagggggggaggtgaggagagaaagggagggaggagaggagaaagggaaagaaggaggaggaagaaagaaggggaaggaagaggataggagaggggagagaggaggaggttttgcggggattttttatttggaagggggggagaaagaaagaaaaaagaaggagaaaagaggaagagagtgggcgaangggttaggaagagaataagaagtaggggagagagtagaagggggatagaggagaagaagagaaaaaagaagagaaagagaaaaggagaagggaaaagagggaaagacgaggagggaagaggcgaacggaccgcccaaagatcggggggacagaggcgaaggggagcacacgaggggagcaacacggccgagaacgggcagcgaaggaaccggagaaggcggaacggagccacaggaggcgacaga

SEQ ID NO: 184984 - DNA, 478 bp, Arabidopsis thaliana
  unsure (1)..(478): unsure at all n locations
gactcatatggggagctgaacgcctgcacggtaccggtccggattcccgggtctacnacgcgtgcgtaaacacgatcgccgaccatttacgagtcgtcagtggtgggatttgaggccacaagttcctcggtcgctggaaatattgtacaattactcactcattaaagggaatttatgtgcagccaaaagattaccataccgaaagagttctcatatacaggggggggaccactaagcagcaaacaaggaaataaaagtgacattgatcggaacggaagatcgataaataggcaatgacgatagggtcaagtcgcctcgaccttggcgctgagccagacagaaataagtcgcgaacttgcaagtttggcggcgttagaagtggtattaaaaagtctcctacaaaaagaaaatataaaaataaaaaagttatgaaaggaggaagggagacaagcaaaccggtagacgttggagttaagaa

SEQ ID NO: 184985 - DNA, 437 bp, Arabidopsis thaliana
  unsure (1)..(437): unsure at all n locations
gtcgcaagccccgcgtacgtagcttggatcctctagagcggccgtgcctttgtgttttttatcctnaaanaaacaaacaaannnaaaacagaaacaagaaactctctcgcctacacaaccagggaaaatggaccaataaaagtaagagaggaaagagtaaaaacgaaatataagggagaataggaggtctaaacgcacacaaagaagaactttcaaggcatttttttattttaaggggggggcgacaaacacacaagagacaccacacaatgaagatacacacagacacatgaagagtgaattcagatgccagaagagcacgagacaagaaaggactaacgcttaggtccaatatgagacgtggcaatcgctagaatacacaataagacaaaagcgaagccagtcaatatttgacaatggacaacgaaaggcaatgg

SEQ ID NO: 184986 - DNA, 519 bp, Arabidopsis thaliana
  unsure (1)..(519): unsure at all n locations
gccgcaggacggccgaaaacggaaatccagggggggaagcacanaaaaacaaagcgaaggggggaagttagaaaacgcggggacaccccggaagaagaaggagatttcaaaaccaacagccagagaaaaaaggcaccgaaagaggttttaagagactttgttcattttagggggtgggcccccgaaagaaaaagcgccgggaaagaaaaaaaccccccaacaggaaagagaagagacagaacacagaaagggtaggcaaaagcaaaaaacaaccaaaccgagaacaaaaaaacagaagcagaaaaaagaggcggaacaaaaagggacggacgagggagaaggaaagagaaaacaaacgggccgaagaaagggaagaggagacggaagaagaaatcgaaaacgaagagagcagaaagggaggaaggcacgaaaacaacaaaagacaagagagagagaacaaaaaagacacaagaccgaaaacgaagcaccgcaaaagaacgaagaaaacgacgacacaaa

SEQ ID NO: 184987 - DNA, 518 bp, Arabidopsis thaliana
  unsure (1)..(518): unsure at all n locations
cgactcactatggggagctggccgcctgcggtaccggtccggaatcccgggtctgacccacgcgtgcggtggcgtttgcgtggacattggtggctctgtgttgcggntctcacacttcgcatattcttcattccttgcgaattcacattgctcatggagggattcgggatttgccccacaacccttaccccaaagggggagtattcctacagaccttctccttttcgcggtgtgggccccccacccccttccacaccttaccaaacaaccccccccccgtagtccccgtctcccacgccccccgctatcccccccggccgcccctcctgcgcagcccctccccccccctaccccccacgccagtcagtccgtcccccgcgtgtccaggttatatggttattcccttcacgccttacaccctagcacgtagtgtaaatcatgacgccgtaccgcagggtgaggattccgccccgctcgcctcccccttctcctccctgccacgtcggcgccctccaagc

SEQ ID NO: 184988 - DNA, 473 bp, Arabidopsis thaliana
cgtacgtagcttggatcctctagagcgttcgccctttttttttttttcttagattcaaatatgtttttcattgccaaaaagaaaaaaaaacatatgtttcacaatattcaggatttacaccaagaaacaaattttgaggagcttacacattagaaaccaagctaaaagcacaggactttttttcgatttctttttaaaggcgggggcagcccccacaaaaaaaacctacaaacgaaacacccaccacacaccccgacccacaacaccacaccatcccaaaccccaaaacagaacaaaccgaaccacccacccgagccctcaccgcgcacagaaggcgcggcgcacaaaaaaattttatttaaattaaaacgggttgatcccgttccaataaaaaatacttaatttacttctcccctccctcccctcccttcccttttccccacccctataatatatttctccctttcttatta

SEQ ID NO: 184989 - DNA, 436 bp, Arabidopsis thaliana
actcactatttgggaagctggaccgcctgcaggaaccgaaaacgcaggataaaagattaaaacaggggggaggagccgtacaaaacccgggagggggcgcggcatcggcgaacccaggcacaacacacacgccgaacaacgaggcagaggagaagcaagtaacgcaccgagtcgatgcaacaacaggcgcaaaggacgataccgcggggaagcccgacacgaagtttaaaaagccgcggggggaaggagagaccgaaagcggagtacgcggacccgacaggatccatgaccgacctggtggcaaacgatgtacgcgcgaaatgcgcacgcgagaccgactcacgtgtactcggggacatagcgtccgcagaccaaaggcgcggcaggtgcagggcacggggcgacaacacaacacagaacaccgagtgatcccaac

SEQ ID NO: 184990 - DNA, 511 bp, Arabidopsis thaliana
  unsure (1)..(511): unsure at all n locations
aaaaccccaaagaccaaccaagggcaaacgacgaaagcagggaggcagagacgcgcgagggccgggggancagaagaccgcacagacgcagacgagggccgatcgccccggagagagaacggaaaagcaaaggcccagatgcaacgaccgcgcgaggagacgaggggattccggcaggttgtttttttaagagggggacggcgcaggcagccgggacccgcagggaagaggaggaacagacagcaagagagagaggggaaggagaggccgggggaggaggatgtataaagaccgcccngacgacacaaccagagataaaagagcaacagccagcgcgagacgagccgaggaagggcgaaaagggccggaacaaggaggagaggggggaaaataaaaagaaggagaacaagtgacaacaaggggggggggggccagaggggaaaacaccaagctgaccggctcggcagcaagcgggcgcggggagaggccgagagagaaaagcacgcaccac

SEQ ID NO: 184991 - DNA, 539 bp, Arabidopsis thaliana
  unsure (1)..(539): unsure at all n locations
cgactcatatgggaagctgactgcctgcaggtaccggtccggaatnccgggtttcccacggntgcaaaaaccaaaaaataagcnnnngtgagcagagagaatcgacatcttgtcgttggaagatatgaagagaataacggctccgcagctgccccggcgaacatgagacgaagtgaagacgacgatatatacaaaaacaacttagaaattccctcccattagagggggggagagaaaacagaaagatgaaattatagaagataatactcatcaatacacaaacgatataacaaagcagtgagggacattgagctcaagaaagaccggcactttcagttttccgtgaatgattgagagtgtcaaagagatagcatatttcaagatccagtatgtcgatagataacaagataactaaaataactattgtagttgtaattactcgatgagattattatccgagtttggtagattgtatggacttgagtgcgcgtggacaagttgcggaatagcgtaataaactgtggaaagaaatgaaacaa

SEQ ID NO: 184992 - DNA, 500 bp, Arabidopsis thaliana
caccaccccaagagcacttccaggggcggaaaaacccacacaccagcgggacaacaaaaggagggaagaagaacggaacagagggaggaacccccacaacaccaaagccaacgaggaggaggaacgcaaaacccccgacacgaccagcagaagcgggaggagttcaagagctttttttttaaggggggggggggggacccaccaagaaaagggaagccacacgccgggaccccagagagcggaggcagcacacaaccacgcgacaaccaacccgggcgagccgcgggagaagcaaccaaacagaagcagaagcgccaaagaaacgaaacacaggcggaggacgacgagagggggcgagaaaagagagggaaggaggaaaacagagaaggggggagggcgagagcaaaacaccaaacacaaggagcagaaccagagcccggaacacaccccgaccccaaaacccacccccagaaacaaggagagaagacaaggcaaacgga

SEQ ID NO: 184993 - DNA, 582 bp, Arabidopsis thaliana
atccgactcactatagggaagctggaccgcctgcaggtaccggaccgaaataaagaactttcatcacggagacgacaacccccacccacaccaacacgcgcagagagaggaagacaaagagggggcgagaacgcacgaggagaagcgggaggaaaacgcggcgagccgaagcggaagagacagaccacaagacgcgcacaccacgaggcagagagaacggtgagggaggttcttgttagggacgaggggaagcagaaacaacaacagagaaagcgggaaggaaagctagtcccacaactagcgagccgacccacccggaaagacagagcaacaaacacccggcgatgcaataccggacgacaggcaagacacgcggggccacaaaagcacgaacacccgcgccacgccaaaccaacgccagcgcgggaaccggcccagacgcgcgagcgcgtgcgccccagcgccggaacccggacacacagccacagcggaaacaaagagagcgtgccaaaccggcgaagagcagacggggaaagaggggaccacgccccggagcaatacaccaaagatcgaagaaagcac

SEQ ID NO: 184994 - DNA, 415 bp, Arabidopsis thaliana
aaaaaaagggagaccaaggaagagggacacaacaagaacaacgaggcaaggagagcccgaaaaaggcagaccccgagaatatggacggcgaacacggccagcgagccccgcagaggcaagaacgaccctcggactctcgtcctatgggggtgggggagccccccgagaaaaaagggggaaagaaaaccccccgcacggggaggaggaggggaaaaccaaacacgcgaagacccagaggggacgacggggccgcgcgggagccccgaagcaaggaccgcggcgcaggggagggggagcgaaaaaaagagaagagaaagaaaaaaaggagaagcgggaaagcaaaacaagaagacgagcgaggaaccgcacacgcccgccgaagccagcgcaaaaaacccaccccaaggaaagaaga

SEQ ID NO: 184995 - DNA, 587 bp, Arabidopsis thaliana
aagctgatctgcctgcaggtaccggtccgggattcccgggtcttcccacgcgtggtgggcactgtcctctcttttcgatccattatttagacgagcttttattattttccaatgaacacatatttcttctacgttcgccttcactaaccttatcatcttgctcccctattatcaagtcctattctttcttcctcttgatcacacaattcccgccccattttttcatctagtcgaggggcacacactctactaccatttttacttacttaactcaattctcacatcaaagtaataccaatatacaatataaccactatttccctcttcacattactatcttttatttttctcttcttaatagttcatatcggtataatcatgcttcgcttccgatatatttcgctcatacataacctccgtatttctacagcacatccttagtaagttacccctaactcgctcaatttcataaacaactattttaaatatttccactgccaactaacgcacttttcgcattcgtccactgaaatatctctatttccatactcttttatctacttcaacttgcacacgcttcattctct

SEQ ID NO: 184996 - DNA, 443 bp, Arabidopsis thaliana
cgcgtacgggagcttggaccagagagcggttgccgggggcttaaaccatagaaagggtataggcgcagagggggggcgagttaaggaaggcagaggaacaacaccgtcaaagagcccgaggcaacccattgaagagcacgagcaccacgaggaggaaccacgggcggaagccgaggtttgggagtccctcaataggggggggggggacgccgaggcgaaagaggggagcgagagcaccagccggcggggcgaggaaggggaaccaacgcgcaagatccagccccaccgacgcagagacgtagggaagcgaaagagcgcccggcgaaagacaggatcagtggaaaggggtggtgtgtgaaaaaaaaaggcgtaatgaaataaaaaacggtggagggggaagaggaaaaaaaaaaaaaagacacgcacgcggacgcgcggagacc

SEQ ID NO: 184997 - DNA, 522 bp, Arabidopsis thaliana
  unsure (1)..(522): unsure at all n locations
cctgcaggtaccggtcncggattcccgggtcgtcccacgcntgcacccacgcgtacgaacttatatatatatagtatctaaagcttntagtatactatttntatataagattgtggttatgaattaaagaatggaatttaatagtgaagtatatagattaatagaaaaatatataaaaataaatataaatttgaaaaaaagntttctttgggggggggcaagcccaaacaccaaaccacaaacacaaaaaaccacgacgcaaccacaggagacggaacgacagacctcgtataacaactaaaccccaaaaaccacaacgaacaaaaacaccaaaaaccttttattatcagttaactaaatatctatcccgtcaccttacccctctcactcatctacacgacttctgagtttggatcacattacttaaatatactacctgagctaagagaataattactctaccgattaaccctctgaataacaccctaccctactccccgccccaacatacaaaccttacac

SEQ ID NO: 184998 - DNA, 464 bp, Arabidopsis thaliana
ggggagctgaggcctgcaggaccggccgaataaaaaacttacaaaagggagtaaacaacaactatctaactagatccatctcaaatataaaacatccacaaaataacctccctcccctcgcctacactcatccgtcacaacaccgatcctcctatccgtaacacgtaaaaaagcaattttttcacactaacaccacgaacctcaaattgcacataatacaattctattcccccctaatccactatttaactaatctctatcatttctacagacagtcatatctatacaattaacctccaattacgtcccctccctaatataaccaccgaataactatctaagatgaaaccacatataatcaactcacatctacatcacctaccttctcatcaacaataaattcctctcacacctcgtcaatcctacactccgctactacacctacccacttcttagcgtaccac

SEQ ID NO: 184999 - DNA, 214 bp, Arabidopsis thaliana
  unsure (1)..(214): unsure at all n locations
tggaccgcctgcaggtacccggtccggattcccgggtctgtcccacgcntagggagaatccaanctaccagcactactacaacaaaaccgggcgagacgctctatgagcaggaaatccagccctaactacaaacagtggacgaaccgcaggactgtccagcgaccttcgcaacccgctaatgaaacaagcaccgcaaagtagcataatcgcacc

SEQ ID NO: 185000 - DNA, 413 bp, Arabidopsis thaliana
cacgcgtcgtaagcttggatcctctagagcggtcgccctgggttttttatcctttctattttttcttcgttgtacatacagccataatcaaagcatcaaataagagtaactctatgagggggggttattcgctcgtggtgataagtccttatcaagcgtgttttattagcttatggcgagggtgaggtcggggcgtttttattgaaaggggaggacgggaggcgccgtaaggaaaaagtgggatccataattggtaacccgtattgtgatttgagtattgttaactttattagacactgaatagctaagatcggtttagtggttgagagaggtatctcgaggtacggatgtgtatggaagaagcacaaatgtgtcaaaacaggaggcctattatctattaaaaaaaattattt

SEQ ID NO: 185001 - DNA, 582 bp, Arabidopsis thaliana
  unsure (1)..(582): unsure at all n locations
cacgccggcgtggagcnnnggacccaaagagagcgattcgngcggggggggaaaaccccgcaaaaaaaaaggggcccccgccgagcgggggcaaaattttaggcggcgagaacggagaggtcgccccgcacaaacaagactcggcgccacggctcaatagacacgacaaaccaacacacatgacaccgcccgcggagaacccaagggagttttgagcacttttcctgactaaaggaggtgggaggccaaggacccccccaagaaaacaggggccgcaaaacaagacgccgccgaacgcaggtggggcagaggcgaagcggcccacagagagcgcagcccgagacgaggggcagaggaaggcgacgggagccggaggagccagcggcgaacatcgggaggagagcgacgaagaccggcgaggggaggtgaaaaaagagagagaaattccagtaaacacgaaaggcggggcgggggaggacgaaaacaacaagaataaagagagagggagggggccgcaccctgcgggagaggcggacgcgctatacaaccgccccagaggtcatggatgcatgcccagcctgt

SEQ ID NO: 185002 - DNA, 594 bp, Arabidopsis thaliana
  unsure (1)..(594): unsure at all n locations
cacgcgacgaggcngggaccagagagcggtcgacaagggccgngaaacacccaaaggagagaaggaaaaagcggcgagacaagagagagcgaaggagcagcgagcgagaaaagaccggcaacgccgaggaagcgcaacgaggcagcgcacgccaggagagaggagaagacacgggaacggagcaagaanaacggcgcgaaggaggacgacgagaggcaccaacgactttttttttaggcgggggaagagaagcgaacgaggaaacccaacaagggcaaagcgacaagcagcggaacgggacgcagagcaaaggacgagaaacgcagcgacaaaagaacagacggaccggcagaaggacggcgaaagcgcgagagagcaaagaacagggacaggggacggaggggagagaagcgaacgcgaagaggaagggcgggaggacgaaagaaaagaggaagaagaacgaaaaaaagaggcggaggcgcgcggggagcgaaaaacaccaacgacgagggtggggggacagggagcgggcgggccagcaagagcacaataccccacccccgagagaaaaagagaggagcacaagaagggagg

SEQ ID NO: 185003 - DNA, 454 bp, Arabidopsis thaliana
ttttaagttgggggggggttggttgttggttgagtggagtagtggatgtggaggagtggggtggggtagatttttttgaggatagaaagtgatcaagatgatagctataaatgagggtggcagaaataaataaatatatagaatagagaaatttttttatagtggggaagggaaataaaaaagaaagtaagaggggagtagttagaaccggatagggtgttaaagatacccgcgtcttcgcggcaaacccctgttaccggtggtgcggcggggggccccgccccggccgctcactgcttagaccccaccgccttacaccctgcggttgggttttggattagaattgtcaagaatccgacctgattgactgggatacttgaagagtgagcgatgattagcgacgcgcgcctacgcacttactacgccaaagagcgtgccaattaacatcgccgcg

SEQ ID NO: 185004 - DNA, 175 bp, Arabidopsis thaliana
  unsure (1)..(175): unsure at all n locations
ccccggggacgccacccgcgagngagtgcagagcggcaaaaacccaaaaccgngacgcaccggccccgaagaaacgaacgcccagcccacacgccgcggacagcaccacagggcaaaccgcggccaggaacaccgcaccacagcaggcgagcccccgaaagcaccgagaacgaca

SEQ ID NO: 185005 - DNA, 521 bp, Arabidopsis thaliana
  unsure (1)..(521): unsure at all n locations
cgcgtacgtgagcttggatcctctagagcggttgcccggggtcntaaaacccacagccgtacaacaaagccaagagaagcagagcaaaaaaccgaaacaaggaggaggaaagcgccacccaagcgagacgcgagaccgaatgaagcagaaaccaatcccacaataaagcgccaggaagacgcaaaggtcggggcatttctccttaagaggggacaaagaaaaaccgacaaaagtaaagaccaccaagaacaggacaggcgcgcgaagagaggacaacacaaagggagaaaaccacgcgacaaggcgcaaaaaagaacagcggaaccaggcggccgcgcgccagaatagagaagaaaagaggggcgggggggaggagaaaaaaaaataggagaaacggaacaaaacaaggaagggccgggaagacaaaaacaaagaagaaagcaagagcgggaagagcgggcgacagagagcgaagccggatagccacagccaaaaaaccaagagaagcgcagccgggccag

SEQ ID NO: 185006 - DNA, 200 bp, Arabidopsis thaliana
cctgcaggggccggaaccaaaaaaaaagggttttttgacagaagggagagacctaaggacaccagaccaccacacgtaacgtgcggtgtcttatacttaccaaagtaataaaacgaagttagtgggattgattattaaagtagaatatcgtgaaacggtaaacatgagaatcctcttatactagtggggtgtgcatacgt

SEQ ID NO: 185007 - DNA, 398 bp, Arabidopsis thaliana
  unsure (1)..(398): unsure at all n locations
cctgcaggtaccggaccgaaaaacacgacattttaaaaggaggaggaagccaaaaaacaaaccaccagcacaaactaagagagagaagcgaagccgaaaaggcaaaaaaacaaccacaaagaaacaaagaagaagaaaagaaaaggaagaagagaaacgaaaagcaggacaacccaagagacgaagggtcacnccaaaaattttttttgtgggagaagggagagacggaggaagaagcaagcaaaaggcacagcaagaaagccgaggaagccgcccaaagggcgcgcgagagcaagagaaagaagaaaaaaaaggaagactcacaataagaacacgccgcggaaaagagccaaagccgccgacgaaaagcatcaaaccacagacaaaaggagcgacga

SEQ ID NO: 185008 - DNA, 188 bp, Arabidopsis thaliana
gggagccgccccacggtgcacgagaacacccacgctcatgaccacccgcagcccagtccccgggcgaggagaatacgactgcaccgccccaacgggccgcgaaggaagaagagcggagcgcagcagcgatgtcgcccggaccggcggcagtcggtgccgggagggggagtgtaggataggaataatat

SEQ ID NO: 185009 - DNA, 514 bp, Arabidopsis thaliana
  unsure (1)..(514): unsure at all n locations
cctgcaggtacaggtcgggattcccgggtcgtacccacgcgggcgcccacgcgtnncgaaggagaatagggannattgtcggttgtttgtatcctatttcccaggttgcgagaggaccggtttgagcggngacgggntnnnnngngggnngggggttgggnggtaggtggggggtgggggacggacggatttnnngnnnttnntttatttttgnggggggggagggcgggggcagtgaggcgtggtgggggtggtgcctgggtcggttgttgtgcggtgtgggttgcgcgcgttgtgggcggcgtttgagtgcttcgtgtgtcgtgggcgcggggtaagggagggggagttttttttggggacccccccctcgggggccggcggtgggggggggggccctcgggggngcggcgtgatgcggcggttctgggctcccgggtgtgcgttgggtgcgttgcgggttgtgggagcgggtgtgcgcttgaggtcgtgtgtggctcggtggggtagggcg

SEQ ID NO: 185010 - DNA, 327 bp, Arabidopsis thaliana
  unsure (1)..(327): unsure at all n locations
gggagctggaccgcctgcaggtaccggtccggaataacagaaactataaaaaacntaggaaaaaactttagcctatactaacaaatcgtcacctccacacgatctagtacacattaacacatgcggataagtgcagacgtccattgaacctaattgctagctaccctacgatgtagacgatcgagatataatagcgattaagcaggaccggagacaagcgtttcgcccggggggggggaggcgcacgctatccgaagacgaccggacatgtgagattgattccgaagcattttgctcaatcgctgtctgacagtacctggatagaag

SEQ ID NO: 185011 - DNA, 492 bp, Arabidopsis thaliana
  unsure (1)..(492): unsure at all n locations
gacgtcgcacgcacgcgtaccgtagcttgnatcctctangagcgccgccctttttttttttttttgttttttttttttttanaaantaananacaaagaanngnagttaaaaggaataaaaagctaaacatactcaattacacaaccagggcgtatgagtagcatgaacatatggttttctctactccagatgctgtccacaaatttttttcttgagaatcgcacagaacccgcattttttctccatattatataccccttaacacgcttcagcgattcaaaacatcctaagcccctcttattagtgctattcgttttccgatgcccgacttagttgtttgctcattctaaactcgatgtctttgaaaaataatgttttgtatattaaatatatgtaggcccaatggaaaaaaaaataacatctatcctactcgtcctcccccacaccgtcccctatcccccaccacatttctttttttcccctttttcttc

SEQ ID NO: 185012 - DNA, 374 bp, Arabidopsis thaliana
cccaaaggccgcgcgagggcgcgaagcgagaccgaggccgaagacgaaaaccccaccccagcaacgcaacgccgagggcgagaaaccaaaccacaaaccacacgacgggggccgaggggccacccgaatttttcttaaggcgaacaagcgcccccacaaaaaagcgaggcgcaagccccacgagaagcgcgaagaaacacaaagagacaccccgacaagcggcaaaggcagaagacaaaccagccccaacaccagacggagcagaaggggaaggaggaaaaaaaatgggaagcaaaaaagaagaggacgcgcagggaaacaaaaagcacgaaagagagcggaggcggcccgcagcgaagcgaagcccccccgga

SEQ ID NO: 185013 - DNA, 526 bp, Arabidopsis thaliana
  unsure (1)..(526): unsure at all n locations
acccgggaggggccccaccccagaaaaccattccgcagcggggaaaaaccccagaaaaaccaaagaccccggcacaagaagcacggaaccagaaccgcacacgcgcaacacccagcgccccaaccaaagaccacgccccagcgcaagcggaacccccaagacaaccaggcaagcagccgcgagagcgccccgcagggcgccaccaggtcttctcttttcagagggcgcgcagacagagcccagcgagaagaggggagcggcgagacgacacgacccccaggagccaaagcagccgaccggccaagaaagaacaagaccaccgcagacagacccgaaggccgagacgccgaaccgaagccggcggccgccgaccggcggncgcgggggggcggccaggaggggagcgagaaaaagaggggggaaacagaaaagcagaggggggggagcgcgggagcgaaacaccaaaaaacaggcggcgcccccgccgagcgcccgcccggcccccgggcccccaaacaccccccaa

SEQ ID NO: 185014 - DNA, 552 bp, Arabidopsis thaliana
cgcgtacgtaggctcggatcctctagagcggttgtccggggtttcaaactcccaacctacacgcgaccgccgatcaggcggagcaggatcacgacgcgcgaagcgcggaagcctgcaggcccaacatattaccacccccgattttagggaacactgaaccgacagaaataccccacagaggacacacaacgattttcccgcgttttctatattaagcgcacaaacagagcgcaccgaacaaaaaaaggcgaggacgcacaggaccaagcacgggagggcggcagcgggagaagacaacaacgcacaccaaacgaaggccagcagcggacgcggaacccgacaacacacaggacaaaaaacacatgcggcagcgccgaggaagcggcgggagggttgaaaataaaacatatgatgaagagagtataagaaggggggtgagcggcggagcggaagacacacaagaaccatgctatggcagacgcacgcgggtcctggaaagcataacccgtaactcccccccagaaaaaaatcgatatgccacggtcatagttg

SEQ ID NO: 185015 - DNA, 522 bp, Arabidopsis thaliana
  unsure (1)..(522): unsure at all n locations
cgcctgcaggtaccggtccgngattcccgggtctgtcacacacgagtgggctggggctctatctattattatactaacattcaccacaaatattcttcaacccatacaaatcacctaatcaccacatcaaatataaacacacatctattaacaccaaatctaatacaccttcacctttttacacaaacaacacagaacaaaacatttttttctcaaagagggggggtggcagagaaaccagcgagccatcacgcgcaggacaagccgccgcaagaacgtctcaaactctgagcacgcaagtgtcgcagatacattcctataatcgcccaccagcacntcgcgagaacccccccaaaacgaagcgtgaggagcaccgtagcagaatagccggacgccatttcaacactcctggtaatacgttggtcctatgggtgtgcgatgagaggccgggacataggcgaggggaagcgggtcaaacctctgagcggcccactctcccaagacccgacccgccctcccagg

SEQ ID NO: 185016 - DNA, 416 bp, Arabidopsis thaliana
  unsure (1)..(416): unsure at all n locations
ctggcangcctgcaggtaccggnccgnnntnnnnnnnttttatnnnnggagaagaagcccaacaaacacaaaacccaccaccacgccgcggagcagctgacagcaacggcaaaacggaaagcaccgcggatatcaggcacaaaagacacccaacggcccaacacactacccgtgagggcacagacctgaaggtttcgccctccattttctttagacgaggggggggagaggagcagacgaccagccagccagaacgaaacagaacgcgagcgcgagaaaacggagcacaccgaggagccacgacaagacccacgccacaaggggcagcacacaaccgaccgaggcggcgcggcacggcggggtacaacagagagacacaaacaaaaaagccgaacgaacggagagcangacgcgac

SEQ ID NO: 185017 - DNA, 517 bp, Arabidopsis thaliana
  unsure (1)..(517): unsure at all n locations
acgtcgcacgcnacgcgtacgtagcttggatcctctagagccgccgcccttttttttttttccttataattaaccaataactacatgcatatatctcattcaaatatttcacgacaactctacatgtatagtatgacgtctgctggatatacttattctctttatcaacattattataaaaacggagacanactttaaaccactttttttttctaggtaacacaacacatccccgcaaaaaattcttccccaccacatattaaaccacctaaaacactaatataaaattcactacacaccccaacaacccacaaaagcaactaatctatatacctatcctacatactaacatccagaaaaaatcctttcttccaccatattttttatattaataataaaaagaaaatatgcgtcgaataacataaaaaaaatcaatcaactcacacttccctcccccccccacttcccttccctttttccccctccccattatacaatgaatccccgtccacgccta

SEQ ID NO: 185018 - DNA, 449 bp, Arabidopsis thaliana
cgcgggggccgccgcaaggcgacatagggggcgggaaaaccgaaaaacaaagaccggaggggcggggaagctcaaaccacaagggaaggccccggacaacaggacgccgccgggcagaagagagcggcccagcagccaggcaccaagacgcggcggttagcgatttctttataggggggggggcaggccccccgagagagggggcagaaacagcccccaggagggaggccgccacgcaacacacagagcgccccggcccaacccacgccgcgacaggcccaggggggacccgcagcacaggcaggccgccaagcgacgggggggagaaaaaggagaggaaaacggaaaaaagggggcgcgccgagcaacaaaaaacacagcgggcgcacacccggccccgcgaacaaagcccagacccccccaaacaacgaaggaacccgaacgaagga

SEQ ID NO: 185019 - DNA, 499 bp, Arabidopsis thaliana
  unsure (1)..(499): unsure at all n locations
gggagctgacacgcctgcaggtaccggtccgaaatataaaaatttttaaaaangggaagtgccctcaactattaaaaaagcaatgtcggatgtcgcaatttcatcaagaatagtgtcatctcccaacacaagaagagcctgatgtgcatatgaatttatctgggaactgtaaggagaagaggtaggaggaaggaagggcattgtgtttgcgggggggggggggcccgtgtcaggtgaaggtgtcgcgagaagaggcactacgcagagataagcgggaggcagtatgataaggaggatcgctggcgtgacgtgtactgtgtcgaaggggatgaaggggtctaatgagtagaacggcggtgtaagagatgttgtagtagtgtgagtaattaatatgtttatggttaggcattgtgctcgtatcggtcggtgagaagtagtggaggcgggcacatcataggtggggcggggtatgttatgaggcgcgggaggcagctcaata

SEQ ID NO: 185020 - DNA, 488 bp, Arabidopsis thaliana
  unsure (1)..(488): unsure at all n locations
acgtcgcatcgcacgcgtacgtagcttgnatcctctagagcgctcccctttttttttttttcttttttttttttttttgancaannaannaaaaaaagggggaaatattaatggggatttttattagtattaaataacatgaacaagtgtgtgaaaattgaggtgatgaacttatacaattaataaaccacaccttgncagtttntgnntgagggggaaaccaacgcccaacaacagactagctgcccccacacctccctctccacccaacagccaaagctatttttctctgctcaccactcagtcagcccaccgagctctcgccatgagcccccacgtaccactgaccctctacccatgtctttaaaaaaattttttattaaataaattaatattttgcccatatctacacaaattcaatatttgctcaccccccccccctcatccatctcctttctccccccattaccattttcccttacataata

SEQ ID NO: 185021 - DNA, 603 bp, Arabidopsis thaliana
  unsure (1)..(603): unsure at all n locations
acgtcgtacgtggagctcggcatcctcctagaggcgtatagcccgggggccttcaaatccctccacctttattttttttcgtccgtttttgtgcgattctttttttccctataagccatctatccagccatagcttgcttcgtccatcttgtttcctttctccgcgttataatgctgatactccgttacccctcaattttttctcaccattagtaaccccccgcgacgcacccacgggccatttttcttttccgccgccccccctcgtcgacccacccccctattaccaaatagctctatagtcatcatattcccctgatatgctgtantacgttagacgtgttgacattcagactaccccccgcccatatccatctccaaaccaattgcagctaaatcctctgtccttgttccccttattcttctagatccccactaagaaataaatattgtttttggttacattatgttgttttttttcttttatagtatggggtgtcggtccctagagcataacacaaaatcgaacgtccgggaccttccccgcacccctctcgactcctcttgcaccattatcacccccccagtcatactcatatatac

SEQ ID NO: 185022 - DNA, 394 bp, Arabidopsis thaliana
  unsure (1)..(394): unsure at all n locations
cctgcangtacccgtccagnattcccgggtctacccacgcgtgcgcccaacagcataattatatataacaatanaccatgagtaccaaatcacatactactatacatcacacgttaacctaaccaaatacanacaatcacactacaaaaaactaaccaaacacccataaacgcacaactcttcccacgtccgatactactctaaaaatactttttccagcaacccaagacaaacacacgcaccgcggacacaacccaaaccgcaaccccaaccaatgacatcacacactcatcactcaaaaaacacaccgattatctaacactatttcaaccccgccactccactacactcgctacccaccataccctacacctaatcctaccccccatactaa

SEQ ID NO: 185023 - DNA, 465 bp, Arabidopsis thaliana
  unsure (1)..(465): unsure at all n locations
acgcgtacgtagcttgnatcctctagagctgtcgccctttttttttttttttttttttttttttttnnagaaggaagnngagaaaannaaaaagaagctaatttatgatcctaacaaatggccaaccctaacaccactttgcgaaacacttaggtctacccggtaaaggagacgtgcaacattaagagacttttttcttacgggatgacgaaaacatcagggacaatccagattactggtctgcttataggcgaggggccacttaatcacatatcaagactccacagaattctttctaaattatgtttgtaaaacatactccttcaacaagcttgaatgtgtaaaaaaattctatttaaaaatattatgtattcggcattttaaaaacaaatccatcttcaatctcccgcccctcccgtatctttcccttatacctcccaaaatacaatatttccattctttctt

SEQ ID NO: 185024 - DNA, 526 bp, Arabidopsis thaliana
ctttgacgtcgcatgccacgcgtacgtagctgggatcctctagagcggccgccctttttttgttttttttttttttttttttttttttttttttttttttttattcatttgagatcagtacatagttttgggtttaacgacgtaaacaataaaatagacagaaactttctgaccgggcatgttaattaaaaaaccgaaaaacggttccaaaaattttttttcggcggggggaccaaaaaaaggatttggaatttcggaaaataaaaacataataaaaaaggtgagaaaaaaggaagaagtgctaatttaattaaaatcctcagggttgctataaaggtgagagacgtcttgaggactttgacgccgcccggttttttttgcgtctggtgacgtttctgtttaccgtccgaacaaatatttctccgcaacataacttattccaattttttctgaaaaaacgggggccccgactttttgaaactttttaaaactttaaatgatcactataaaaatggaaccctttttt

SEQ ID NO: 185025 - DNA, 510 bp, Arabidopsis thaliana
ttgaacgcgcatgccccccttccgtagcctggattcctttaaaggggccgccctttttggttttttttttttttttttttaacaaaccaaaacccgtttggggtttggatctcacactcataagctgataaacatggtggattaaaaaattaaaccattcaaccaacccaacccaaccaattgatcaggcaaaagaaaggaaaaaaaaagaagtctgctgcctataataaaactctacgcagcaccattgtttgatcatcagtagagaacccaaacttgcaccttccttctttgaaccagtgcgaaaaataaacaaaaggtagccgcacacaaacacacagaacaggaaattccggcgtcaggggaaaaatatcaggtggttcgttaatgacattgtcttcttcacttaatcatctggaccaagcagtggaacactgcaatcgaaagcgtattttcgagcaagggctatgggtgcgttacgttcgggttctgactcaaagtttattatga

SEQ ID NO: 185026 - DNA, 488 bp, Arabidopsis thaliana
gtcgcatgcacgccgtacgtagcttggatcctctagagcggccgcccttttttgggtttttttttttttttttttttttttttttttttttttttattcttttgtgtgatttttgttttttgagctttggtcacggacaagcggagcgtatcgaaataaaaaaaaaaaacagttaaaatgaaacggaataaaaaaaaaaaaaaaaagcgtttatacctggggggcgcgcaaaattaagcagaacctcaaaaaagaaaaaaaagaccgtttaaaaacggtaggcgaaaaaaagcgctgttacagccaaaaaaagcaaaaggaggtgggccagaaacaacatcacaaaaaaaaaccgaatggtaacatcgctaatctacaggagcgagaaagttcgagtgcaattaaatcaaaccgaagagagaccaataggtccggggacaaaaaatcgccagacgaaaccgaataaatccctgggtgttgaaatccaa

SEQ ID NO: 185027 - DNA, 939 bp, Arabidopsis thaliana
  unsure (1)..(939): unsure at all n locations
agactgctatgacgtaccatgcacgcgtaccgtagcttggatcctctatagcggccgcccttttttttttttttttttttttttttttttttttttttttttttgtttttttttgtttttttgttttaccttttttttttgttttttcttttaaatttttcacatcccaaaaaaaacaaaccccccgggttgaaggggctttttgggagcaccgtccatactcccaacccggcgaagccctccaccccctggaaccaaggcgcaaattgcaaaaggacccaagggcctggggcttctcatgacccccaccttcaggcgaacaaggacctgtggacccgccgctgaagctccgaccaaggagggggggggccccctaaacaaaccccgccgggggggggaacgacatcctccggggctgggggacgggacaccccaccaccccctcctgtgaataccgaggagccctagaggcggggtagacacaaaccgtgggaccaacggagctggggaccgcagcgcccgtcggcgagggagtgaaggacctggaagggcaaaggtggccccagaaagaccacctcgcacacaggggaagcccggaggcctgggcgcggcaggacccgccgcaagaggaaagcccccacgggggcctccgccgaagaccttagtaaaacaccatatgcaagcagcgggacccaaagataagggggcgtggccacgccgacgcgcgcgaccggttagaccgggccggcccgggacgggcgatggcggagtgccgccgagaaagaggngccggcgggaagtggagtgcgcgggacgtgcctgcgagccgcatagtcgagaaggcgaccgggtaggaccgcaagaagacgcgacgcgcgcggggcgaggacgggcgcgacagaggacgcggcggcgggcgataggggcgagagaggcagg

SEQ ID NO: 185028 - DNA, 580 bp, Arabidopsis thaliana
ctctagagcagccgcccttttccttttttttttttttttttttttttttttttttttcttccaatccaaagtaaaaacagcttgagcaggggcaaggactcccgaaagcacaccaccccgggacagctgtgacaaaaaaaggggcaaccccaacttttcctgccagagaacggaaaaagttaccgaagctcctacaacccgccaaacaccggggcaccagcgaaagcaaaacaaaggggggggctttcaccccccccacaaaatgccacacccccccccaccaacaaaaaaggccgataggggggacaaaagagggcccccccatcacaacgccgcccggacccggagaaaacacacgtagcgcgcccagagacgagaaacaccccgcaccttcggcaccacaactctataaaggcccccaccggccgacgaacccccccacagcgtaccgccgagggaaaaccgccgcccgacccccagcgccccccaccaccacaccacccaagacatcgacctgcaaacaaacacccaaaccaaagaacagccccccacaacacgacaaacaacgggggaaccggca

SEQ ID NO: 185029 - DNA, 455 bp, Arabidopsis thaliana
  unsure (1)..(455): unsure at all n locations
gtcgcatgcacgcctaccgtagcttggatcctctagagcngccgccctttttttttggttttttctattctgattgagaactctnnaagcagaactttggaataataaaacataataacgccaaaaaaacaccttgnnnctttttgaagggggggtccctatagtanacccttcccacccaattaaaaacccccaacttttcttctttatttttttaagcgtttttaaaaatgagtttttaacccgggggaaataccacccccttttaaaaaaaaaaccccccttctttttaatcaaaaataaaaagccccaattaaaaaccgggttttacccctttttatgggctttttttttttttccaaaccttggggaanncnnnnnnnggaaaaaacccggtatgccccttttgtggcacacctttttgcccccccttcttggggaaaaccctccccccc

SEQ ID NO: 185030 - DNA, 104 bp, Arabidopsis thaliana
tcactactattggaaagctgaccctgcaggtaccggccggattccggcgacaccgtggctagatcccaagcagtatatctctcgctgatcataaacagacttat

SEQ ID NO: 185031 - DNA, 516 bp, Arabidopsis thaliana
gtcgcatgcacgccgtacgtagcttggatcctctagagcggccgccctttttttgtgttttttttttttttttttttttttttttttttttttttttttttttttttttttgttttaattttttttttgtttttttttttttgggggggttttttgggggggggaaaaaaaaaaacacgttgggaaatcctcccaaagttttttttttaggggggggaaaaaggtggataaaaaccccggtattaaggaaaaaatgctttggggggtttttccggtttttttagcaccggggggttggggaagccgccctttggggaaaaaggcttttgtaaaaggacccggcaattagaaaaaggggggggaaaaccatttcccccccccccgggggggggggtaggggggggtgcgccccccaaagtgggtgaggaggccccccgcccacccctttttggggggctccccaccaaaaaatttggggctggaaaaggggcgccggggacaaaccgcgcttccctt

SEQ ID NO: 185032 - DNA, 532 bp, Arabidopsis thaliana
gcttggatcctctagagcggccgtccttttttggggtttttgaaaagaaaaaatcgtttctttttacgtggggaatattgggctgcacattgcaggaacaaaaaaacaacgtggtcggactggggggaggaggggggagggggggggtgtatgagagtttggtggggggagggataggcgggtggtggggaggagcggggtttttttgggaggggggggtaggcgcggacgcggtgggtgggtggggggaggggtgcgctgaggacgtggcgtgctcgcgcgtggagggtggtcggggggaggggcggacgacagcgctagatgcgcggggcttgggagctgagaaagggaactcacgcccccgagtggcgacggcgccggaggtacgatgcagcgggccggcggccggcgggggctaggggcgtgcgatggaggtggggggcggcaacgcggcagtgggatgagacgagggtggaggaccaggccaggatctgagaatgtgcagcagggtgggcgaggcgacgggtacgga

SEQ ID NO: 185033 - DNA, 406 bp, Arabidopsis thaliana
  unsure (1)..(406): unsure at all n locations
tttaggacttagagacttgacgtgctgccgcgtcgtagctgatcttaagcggcgccttttttgttttttgaatctaagcctctttattaattaacggttggttggaatttacatggactgtttaaaaataaaattttccccaaattggtttttggccgtgtccccaaaattcccaacccccccngggggggggtttccccatttttttttttggggggggaaatttacccccctcccctctggggggggggtttttcccccaaaaaagggcgcccccaaaaaaaaaccccccccttgtgggggaaaaccccccccgggggtttggaaccccccccgcccccaccataaaaggaggcgccccccctcccctgggggggtaattttttttcccccccccccccccaaa

SEQ ID NO: 185034 - DNA, 548 bp, Arabidopsis thaliana
actatgagactatgacgcgctgccgcgtcgtaagcttgatctctagagcggccgccttttttcttctttcttttttttttctcttttgtcccttttccaaacccgtttttctcaatagatgggagaaaggaactgggttccaatttgagttaacaaaaaaggcctgctttgaaactctcctcaaataatattttgcaaggggtttctttctatattacaggttgcatcttggttattactttccgagttaagaatctgcctgaggtttgcctccaaaagcattttttataaaattgatttctcgaacggtgggcgctgattgatttttgcgtttgggctaggtattcgattggggggtgttctgagtaaaccgcgaaggtctgacattgtgccattgggggtgttttggggcgaatgggaatccaccctggcggggtgtgtcgttgtaccttgggggccggcggttgggggacctagcgtggattcggaaagcgtgggcgcggggggcgggcgggcttctggggaaggagatgcctgcgaaaaggtgt

SEQ ID NO: 185035 - DNA, 679 bp, Arabidopsis thaliana
ctgaggaccggccgaattccgggtcgaccacgcgtcggtactaaacgtctgtgatcttacctcttctcacagaggaactctccacctccaagccagtcagatcctaccttaaattcgtcttaccaccaacattgcttcaccatcgaatgtgatcccatcttcgctctcgaatctggcaggcctgtatcattcaacacccctctggacaatattcacagtctgatagatacgctgagggggaagatgatggctgcctgtacttattgagtgtgctgtgtaaagaacgaaaaaggtctacattgtggggtagatgcacacttgatctctccagacgtagcttgaaccacatcgacttatgaatgtctcatgctctatacataagctggttgtacagacgttcaaaaatgataacaagatttgaaaatttgggaagggttgacgtgaaaggattacaaaaaaagggtgtggaacataaatagtggggcagggacgaagtcatgcgggtgtacctgccggactccagattcttcatgtggactgattcaaccgaactgtatatatatgcaacacactactcttctcccagactcggctatggaccgttaatctctgcggtggactctttctaatggactgtgctggaaatgtcactgtaaaaccatcgggggtaggtgagtct

SEQ ID NO: 185036 - DNA, 748 bp, Arabidopsis thaliana
tgagagcatgacgtccatgccgcgtacgtaagctggatctctagacggcgcctttttttttttttttttttttcaaaaactgattatatgcggcaccattaaatgtgaacaaacagaggaatccacacttttacaacctactacataatacctacacgagcagacaacattttcatattcgggaaattatgtggtaaccttaccggttacagagagagctgacaacaacttcttactttttatttttgacagagctttaaaacctatccatgggaaaaaggatcggcgaaaaaaaagagacctagtgagaagatctgatctgtcataagtggaccgcgttctgaaatcccaacaggggtagctcatagagctgaatggaagaggataatgctccgagccataccgaatcctttctgggatccaggacacgaaagccggctacaagtgaagcgatccgaccttccgagaacttcctggatgctacgaccgggggaccggatccgacgtcctgagggcagtttctatgggcgaaaactgggatatgcatgtgtccgggaatggaccgtcatccacaatcaccgagtaaggaacgggggcagaggacataatatgggggcctgcttcacgaacgcgcatgtagatccacccggaaggtgttgccgggttttcaggaagacatcccccgccgaatggggccgtgcggaacgggggagggtggctggggggccgtcgcggggggtcgggcgtg

SEQ ID NO: 185037 - DNA, 416 bp, Arabidopsis thaliana
  unsure (1)..(416): unsure at all n locations
agggagagagagagcaggaagaggccgggagagagaaggagacaaggggagcgcgacgcagcgaagaacgcagcccgagaggcacgacgcacagaaaagagctccctaaaacagggagagagcgagacaagagccaccggagagaagcgagagcgcaccggccaagcacgggacggagcggagcgacgccgagcggcgagcacgaggcgaaaggcgcacgcaacgagcaggccagcacacgcgcagaagagacgcaaagcgagagaacagagcgaacaaaaggacgcagcgagcacgaggagagaaagagcaaaagggcggagcgacgagcgagaagagaggagagacaaacagagcggagagagaggccgagacagcgaaacccgcaacagacgagaagacgcngaaggagcgag

SEQ ID NO: 185038 - DNA, 841 bp, Arabidopsis thaliana
  unsure (1)..(841): unsure at all n locations
gatcgacccaacatcgaccccaggaacacattttaaccaaaaacttggcaaagcacagacagaaggaacccagagcaaacaggacgcccccaaacaaaagccaaaaacaaacgagcaaggcaccaaaaaaaacgcaagacaaccccccacaaaaacaaaaaagcacctcctcaaccaaagaggggcggtcccaaaaacaccagaacgacacacgagacaccgcacacacgccgcaccaccaaccgaacgacgcccgggaacccaccacgagaggagaaagccggcgcgaggggcgcggaccggagcccggcgcacccaggaggcgagagccggccgagggagcgaggtcggccaggcaagcgggagcggacgaaggcggggggagccggcgcggcgggaggaggcagcaggcggcggcgagagcgcgcgaggaggcgagcgagacaggcaggccagcgagcgacgagccgcgggagacgggcgagggcgaagacaagaggccagagagcgggaagccgcgagcgagaagaaccgcagagccgccgcgaggaggaagaggcggcgagagaggaagagaggcgcgtagagaagaggagagcagaaacagcgggccggcggcgaaagggcagaagagagagagggaagggagggcggaggcagaggagagnagggagaaggaagagacggggaagagaagcgagagcccaagcagcggagaggaggacgaggagccgagggaagcgagagcggagcgacagccgagccgcgagcgagaggcaagagacaggggaggaaagaggacgaaggagagcagacacgaagcaggaaggagagagagagg

SEQ ID NO: 185039 - DNA, 853 bp, Arabidopsis thaliana
  unsure (1)..(853): unsure at all n locations
agggaaagctggccgcctgcggaccggcacgaatcctgggcgcccacgcgtccgccaacggacgaactcatagatgttccggtcaaccacaccaagaacagaaagaaaggggtttcagaccagcaccagagtgagagagacagctgaacagcgcgcagaagaaagagaagcttttcttgaggcggagcacccagaggctccgatgcctttgaagatcatagactgatgtagcagactaagaggggcggctctcagcagcgcgacgatctggtgagctgcgactgaccacgagtccgagcccggactaccgacatttagagagcaacgccatcggcgagctcaagtacatgcctggtgcgaggtgccataccgggtataaaggcgctgatctgtaccaggagctcatggcgcacacgcagagacgccaagctgggctccgcttattcctgaccatgcgcccgcgatgacgtcacaactcttgggcagggccgagaaaagggcggtacntgcaagggaacanaagacgggccgggaggaatgtgtgcgacgaggacgttagggtgagaggcacaaaggcggggcagccagccggcacgggcctggccgagcccccagactcgtcagatgagcgttagcgccagaccggggggggggagaccaaagaagcagaacgaggagggcggcggagaaagagaggaggggcgctggccagggagaaggagcgcgagggggagcgtagggcgggagagaggacccgacggcgcaggggagggcgcagaagggcagcggagaagagggccaggaggaggggcgcgcgggcgcgagagggaggcccgaagggggggaggggggg

SEQ ID NO: 185040 - DNA, 809 bp, Arabidopsis thaliana
  unsure (1)..(809): unsure at all n locations
cgccggcaggagccgggcacggaatacacggctcgaccgacgcgttcagacaggccgaaggaaaaaaccacacagcaagcaagccgcgagagcagagcacgaaacagccagcacagagagcgaagacaagacaagacggcacgacagagcgcagacacagcagcgcagcaagggcgccgagaaacaaagggccccgtcaccaaggggggaggagacagccggggcggccacaaaggaaagacacaaccaccccggaaagaagagaaaggacggagcggcaacaggaaacaggccccaggacacggagacggcgcgggcaccggcggacggcggcaacgggaaggaagccaggagaagcggcggcgaggacggggggagaaaggggacgaggcgcgagaacggggcgggcggcgacggagggagggcggcggaggagggcgggcggggacacggagcgaggagaggggggacggcagggacgggggcggcgcagcgagggaaggagagggagacgtcgagggcagggcgggcagcgggagagggagagcagaggaagagagggaggagggcggggggaggcgaagggagcgagggaagagggggacaggggaggggggaggacgcggagagcacggacgcgggagcaaagaaggcgcggagagacggcagcgcgggaggganaagacgagagggagggaggcggcgcgggaacgaaggacgagcggagcagacaagcaggacaggaaacgacgcagagggccgcatgacgcgaggacggagcgagaaggccggagaggaagagcggagag

SEQ ID NO: 185041 - DNA, 461 bp, Arabidopsis thaliana
  unsure (1)..(461): unsure at all n locations
cacgccngcaggaaccgggacggaatacccctgcncgagcgacgcgtacgcagatanggaaacaaagaaaagaacagacaggggacnagaggagggacagagacngggagggggacccaccaaagggggaccaatctgctctaacggaaaagaccctggcggtcaccaaacaccaggcgaaagaaagggactttttttttttatgggggggggcaagcgacaaatcgaggcccacagagatgaccactccccaactcatacggatcgaaggcaaaccaacttcaacatgaaggagagggggtaaccaacgggaggacaggggggggaggacnggtaaaaggggggaggaacatgcgaggggggcggaaaacggtgcgggtggtggggaatgggaatcgtgggggtgatgggtgggagggagagggggcgaggcaagagaggggaaggggacactccggagg

SEQ ID NO: 185042 - DNA, 152 bp, Arabidopsis thaliana
cggatacccgggagccgggaacaccccgtgggtcggacaccacggcggtcccggaatggagcaggagggcgttccaaaacgccgtggcgaaggacgtacttgccgagaaaacgattagagccctaaacagattctgagcaggagctaacgac

SEQ ID NO: 185043 - DNA, 485 bp, Arabidopsis thaliana
  unsure (1)..(485): unsure at all n locations
cgcctgtcagggtaccaggtcacgggaattanccggtgttgacccatcgcgtttcgaacccaatattttatgaaagtgatcaaggcaccgtgtgtaggttacagggggcacaaagacgaaaggtcacgtaagccagtgggtttgtatatacccagtacaagtattggtagtgctgaggaggaattaaagtggtgtgggagaacggaagggtgcggggtagaaggaggacatttttttttttgggggggaggggcgagcgaaagcagcggcggatgcgaggctcagataaggagcgcgtgtggcggacctcgcggctcagcgcatgggcgattgggcggccgcgcggggatggggagggacgaagacgaccgggtgggtagggcggacggcgggtaacgaacgcggtcgaggggcactaggcgagacgggaaagatagcactgtgtggcagtagcgatagaaggataacgagagatgagaaagctt

SEQ ID NO: 185044 - DNA, 519 bp, Arabidopsis thaliana
agactactaggacgacaatgccgcgtacgtaagcttggatcctctttagcggcggctttagcctttttttttaactccgcccgcgtggtgtctctatcacacgcactcactcatgatcacccaaggaggagggcctcttgtgaatcaagaaaagagttgcctaggtgacggcacacactccaagccgggcaggcttgttctctcaggaggagacgagcttcaggggcgaaacgatataggaaggaaccccccgacatagatagcataaggtccttgagtctgccggcccagccacccggcggatgtcagctggcgctgagcggcgcgggcgcccgccgagcagacccccggaaacgtcgtgggctcggcctgtcggcctcacgtgttaagtcagaaaagggagggaccgcgagctgcgaggctagacaaaggcgaagctcgccaccctgctagtggtcagcgacctttttagtcctggggcatcgcgaggagggagccaacgcagctaccccaccgcga

SEQ ID NO: 185045 - DNA, 533 bp, Arabidopsis thaliana
  unsure (1)..(533): unsure at all n locations
aaacgcctcaacaaccgaccgcacgcaccgcacgcccccccctctttcgccgagtaacacaatgggaaagcgtttaaagggggaaaacccgaaaccatccatattcgtagccacagcctgcagtacacgatcgaggccaccaggggggggtccctgtggtcggattctccgcttacctatgacccggatcgagacaacggcagcacccggcaggtgggatacaaaatgcgatgtgataatgcaggaccgcaagaaatgtataaggggngcgccgcaagagcaccgggacggaaattccggagtcagaactcaatacgacgatcagatatccctccgctaacccgcccgtgatgactacgctgatacgccacgaccccaccacaccgtaaatgaaggaaacaaccaaaggaccgcataaagcaatagaccaccacaccctacccaccagaacaatcgttatacaagtcgcgcagtagcagggtggttcacggggagaggcgagagtgaacggacatagcaatgccgacccaccc

SEQ ID NO: 185046 - DNA, 888 bp, Arabidopsis thaliana
gcacgcgtacgaagcgaggacctccctacgggcggctgaagctcgaataagcaaaaagagagaggggaccaaaaaaacgagagacaacacaaagacaacacacagcgggaaaacaaggggggagagaaggacgagcaaaacaaaaaagaagagctttttaaagggggggggaaacgcaaacaagggcggaaagagcaagggcccgcggggaaagagccagcggagacagccccgggcaagaaacacgccggagaccgaccaagcagagcaaagggaaccaacgggacagaggccaacaaagaccaaagaggcgagcccagagagaagagagaaagcgacacaaaagaaaagggcagaagaaccaacaagaagaacagcacccagagagcacaaaggagacgagggaggaagagaagagagccaaggaaagagaaaggacaagggggcgccggcggaacgcgaagaaggagaggaaaggaaccgggggagcaaagaaggaaaggaaaagcagcacagagacagagaaggccacaccgccgagacaaaggcgccggacgaaagagaaacaacagcgagacgcagggaacacaaaccgcgcgcccaccagccagaggagacagaagagaggaagaagagaaagagaaaacgaaagcaaaagagagccaccaggaaggaagcagaggaggacccgacccaacagaacaagaacaggacggcaccccgcaacacaccgacccccgggacaaagagcgagcggaagaggacaagaaaaaggcacgaggggggagagagaaaaggaaccggaggaggcacagacagagcaagggggggacgggacacggaaaacaccgcgaaagagaagagagcgagaaaacagcaagccaacgc

SEQ ID NO: 185047 - DNA, 234 bp, Arabidopsis thaliana
tgcacgcgtacgtaagcttggatcctctatatcggccaggcttttaaccttttttttaataaaaatgacctcaaagaatttttctctatctacatcattgcgagagcctacacgcagcgcgccaccacgaatgtgtaagagcattggcccacgacatgatagcgaaacaacgtaaccaggaaaaaattttttttttttggagggtggtggccctcgagagttcggagtttgttc

SEQ ID NO: 185048 - DNA, 642 bp, Arabidopsis thaliana
  unsure (1)..(642): unsure at all n locations
cagagcacgcgccaaccgacgaaagaattttcgagacccacagaggaacgcgcccaccgagcgccgcgcagcgcgaggcccgcgcgcgcggacgcgcagacacagcacgagcggcagcgcgggggaaggagagacacgggcaagacacgacgacaacaaaacgaaaagcaagagcaaagcaaacagaggcaggaacgcggcagaaagagcggacacggaagaacagacaggaagggagaccccgcttcgaaaacaaggagaggaaacacaccgcgaagacggcggcgcggcagagaaaccgcaccgagaaccagccacagcgaagagcggacccgagcgacaagaagagagagggggcgggaaccgaggagaacaagagagagaggcaagacgacaagggcaccgaagccgacgaagtgacaagcgagagaagagcgaaaagcaacacaacgagaaggacgagcagccacgccgagcacagcgggagagcgaacggagaaggacgagagagagcgaaggaagcaacgcgcgaggaagcacgcgaggggagngcggcgagactgcgaacgggccgggccgcggagcgcgaggaccagacacacacaaagagccacaaaaacaaaaagatcagcgacaacacca

SEQ ID NO: 185049 - DNA, 236 bp, Arabidopsis thaliana
gggaaacaagacccgaagacaattgctaaggacgaaagccaaacgacgcgagccggaaagcgagaggagcctcccggagctgggcgaccatgggggaaccgcagacgagtaaaagaactagttctgaaactactcatgcaaaaaaattataccgtgcacgggtcggcgtgggataggtttaatgaatagggaggcggtgagagggtgaagcgaagaacacacacaaagccgaagag

SEQ ID NO: 185050 - DNA, 472 bp, Arabidopsis thaliana
agcttggatcctctagagcggccgccctggggggtggtgttttttttttttttttttgggggagttcttaaataaagttagtttgtctttaaaatagggtaaaacacagactgcaactagacgttacatcagagtatggaccaatgcaacaacagtctataaagcatttttgaatcataaaaaaagaagaagcaaaacattgcagatcattatcactcagattacattgtcatagatcaaatcctgataacctaaatcgagtcagattctttcaaagggaatgataaagctacagaacctgaggcgattcaaactctgttgggatctttctcttgcttgtaatggcaagagccaacatgtcctcactgggagttgcttatgtcattggccactgttataattatttgatgatcaggctcaagatttgcatcttcattcttatttaaaggaagattctgggctgtttgaggag

SEQ ID NO: 185051 - DNA, 601 bp, Arabidopsis thaliana
  unsure (1)..(601): unsure at all n locations
gaacatgcacgcgtacgggagcagaggatcctctaggagtggcccggccggggggagtgtcccaaatatagatgaaatagaggaggagggagggggggggaggcccatttcggagaggaaccatgaagaggtgggtcgaaagggcacgcgggtagaccagcgcgcggcataggcgccgtgacggccgcggcgggagcgcgcggccggcggatggggcaggggggcgccattttttttttggtggggggggggggctgaacggcaagaaggaaagcggctgataaggaggtcgctatgatgaccgggggcgtcgaggtnatgaacgacgagtatttgtggggacggtggaggagtgtggacgcgcaagggaccgagaagttgcgcggagggggcgagggacgtgcgggcagagttggtgaaggggaaaagggtctgagaggaggcgagagcgccgcggtcggggatacgcgcagacctgagagacgaagtgatacctagcggcggataaaagtggagggtcgagccacacgagccgaccttcacatatcccaagacgccggcgcccgggcacgaacgccgcgggagcaccgccgcgggccgc

SEQ ID NO: 185052 - DNA, 517 bp, Arabidopsis thaliana
gggggaactagagcgataatttaggggaagccggtacgatgaaggaaccggacctggaaaacagggtcgacccaggcggccgagcggctgatcctctccttaaatgcatgccaagtaccaaaacgagcaccattggatcttactaatgagtactagtccagtccaagtctatggggagcacgtaaagcggggagcatctgagaagagaccacagagagagaatgacggctatatacgcgtagggaggcagcacagtaacgcataaagatttgaaaagaaaatgaaagacaacccaccccgatatagcctcacaccacatagacgaacaaaacgagaaagaaccgaacccacacagagtcaaatgagccccccaatcatacattatcgcgcgtagcttagtcacactgctcagggcatcctgccctcggaaaaaacgcaacaatgaaaagaaacaccgcacctcgacaaaggcgcgtctcagtcgaagaggcgcggactgacgcgcacaatatgcatg

SEQ ID NO: 185053 - DNA, 151 bp, Arabidopsis thaliana
ggcccacgcgggcacccacgcgagcgaccaaccgacagcgccgcgcgcgcggccacgcgagaagcgaccagcgacgcgacaacggcaccgcgacagaccgacagcagagcagggcacaagacgagcgagacggaaccggccgccgcggggt

SEQ ID NO: 185054 - DNA, 481 bp, Arabidopsis thaliana
ggggggaggcctccagtcacaaatcggatactttaggggaagacggtgcgcctggagggagccgggcgggattggcgtgtggacccacgggtgcgaggcccaatgaggagatatggggagaaaggaaacttgagtgggtgtgatggggtgcgatggtggggtgatggatcggggggaggggggatgtgggtgggggggggggggggtgtggggatggggggtgagatgggggaggtgggtgggggggtgagtttttttgagagagggcaagtggtgcgtgagagtatttggcaattaggtagatggcttggggaggcgaggggagagtggtgaggtcagaagtaggatgggtggaagggtggtgaggttgtgatagtgtggtggagatgtgtggtgtttgtttgtattctgaggaaatgttatgaacttatgatatgatatacagataaaagtctgaggtgagtatgtagagtaggaaggg

SEQ ID NO: 185055 - DNA, 538 bp, Arabidopsis thaliana
  unsure (1)..(538): unsure at all n locations
gcacgcgtacgtaagctgggatcctgtgagagctggccggccgttggttatatatcctttgtgtaagaatgagagcgctggttgggtgtaggagtattggcgtgggtgtagcttggagagcacaggtgaggncacatggcggtgtgagattgacgagcggaactgttggaggatggtagaggatggaaggcggggggagcgtgaggggggtgagaaggagggggggggggttctcctatggggattaagagggaagagggaggggggtggtggggcggcgaggccaagaggggaggggaggggggggggaaggagtcgagggcggggggggggggaggggggatgggaggtaggaggtaaggaggggggcgggaggggaggaggggggacgagagcggggggcggggagagggggtgcgcggggcagaggggggagggggggcgggggtgggcaggtgtagggagggagtggtgtgaggggagggaggggagggccctgcaggtagacgtgggggcggggggaggggggagggagagg

SEQ ID NO: 185056 - DNA, 344 bp, Arabidopsis thaliana
gcacgcgtacgtaagcttggatcctgtagagctgccggccttgtgtaaatcttttatatggaaagatgactgggtgctcatgtgagaaaataaacagactggaaatgggtgggagggcagtgcagatgaagagaatgttgaggggcctgggtggaggtgcgaggataggggggtgggaggggaggagcgagctttttttaggaggattgtagtggagaacgggtaggtggaggcagtaaggaagccaggagggggggggggaatggaaagctggagcgtagcgaaggcgcaatggtaaagatgaggcaagtgtcagtcaaatagaaataaacacgatcctcaac

SEQ ID NO: 185057 - DNA, 521 bp, Arabidopsis thaliana
gcacgcctgcaggtaccgggccggaattcccctgtcgacccacgcgaacccccccgcgaccacagacgcgtgcggcacattggccaccatggggcgcccgctgcgcggcagcatggaccgccagccgggaggagctacaccggggcgcgcaagcgccgcgacccccgcacggggcgcacgccgcgggcgggccctctttctttcagcccggtaccacgagcgccagtcggccggcgcggcaccccgccccgccccccgcgcccgcccgcgacccccgccccgcctcccagcgcacggaggcgccgcccgcccgcaccgccccccaccccgccgcccacacccccccccgtgtcgcacacgccgccccacgcaccccccaaccccgccgacccatcgcccctccacccgctcgccacacgccgttctcacccccacaccccaccccaccggcagccctccgcctcgccaccacgtgtccgcggaccgtcgcgcaccccccgctcgcgcccgcacccactcca

SEQ ID NO: 185058 - DNA, 503 bp, Arabidopsis thaliana
tcactactaggaagcgtccctgcggtccggccgatccgttcacccgctccatgaaaaaggatcaaaagtgtactgtccgtacagatgcttcttactagataaggtaacaccagtatctgtgtatgcgaggcaaatgaaaaggatgatgtgattgtattgaatgataaatgtaggatcctctgattatcccaaagcaccagtctgtctgtgtagggttaactgactacgcgcagacgcataccggcgtgttaccgcttccgcacgatgctgctttaagcctctacctgctgacactataaagataggctaactcattccagaagagtactagtactcaattctcccagatctgtctgtgctataagacaactggactcttgatttggttgaacactcggagtattcttctcaattaaatgtaatgttggtgatctccgcttactgcaacatggtattgaacagctttcaaaaaaaaaaaaaaaaaaaaaaaggcgcccttaaga

SEQ ID NO: 185059 - DNA, 774 bp, Arabidopsis thaliana
cacgcgtacggaagcttggatgctggaaagctgacgagctttggtaaaacctgtgggggagaaagagagagggaaggggggagagaaaagggggagaagagggggaaggggaggagaagggggagagggagagaggagaagaggggggcaggggaggataggagatggaagagagggggaggggggttttttttagaagagtgaagaagacgaaagaagaaggaccagggagaaaaggagaggaagaggagacgagagggaagggaggaggagaaggaagagagcgagaggcggcgaaaaggatacaaaagaaaagaagagtgtagaagactaaaaagtgaggtaagaagagaatgaagggaggagtaagaagtgaaaaggataaaagacgtggaatgaagcaagaaactagaaaggagaaaaagagggaagaatagaggagggagcgcaaagtgaagcggatacaatatagaggatgaaagaagaaagacagagggagtaagaggaagagaggagggaaagctaagagaagaaagtaatagaaggaccaagacagacagggataaagagagaatagagaagagagtatagagataagcgcgacgagaaagaaaagagaagaaataaaaaaagagaaaagacgaaagaagagttgagcgaaaaatgaaaaaagaagagaaaagcaaaaaacagaggtgaagagaagagtagggatatatagacgcggtaggagactagtatataagatggtgggaaattagtaaacgagacaag

SEQ ID NO: 185060 - DNA, 451 bp, Arabidopsis thaliana
cacgcgtgcagtaagctgggatgctgtagatctgtcggcgctttttttaaccctttgttgggggacattggagggtagggataagtgtgtagggggggggtgagggaaggaaagagagagtggcgaagaggtgtggtagcgggatatggagagaggttatgggagagagtaggtgtgagatagtgagagggtggagggttgggaggatcctttgttagagaatataacggagatatggagaaagtgggggtgtagataaaaacgaggaagagagaaagggatatgaagtgagtcatagacaattattatctatattgatcttacaggtatacaacctagtataaacgtaaaaggatatgaagagatataaataccgctcctaattcgccgaatataagtgataaaatatgaggaatcgcagcatacgattgtagataaaacaggacagagt

SEQ ID NO: 185061 - DNA, 494 bp, Arabidopsis thaliana
gcacgcgtacagtaagcttggatcctctagagctgccggccttggttaaatcctttttttttaattgttattgtgtcggataaaaaactaatcaaaatgagaatgctagagattgtagcgacgaatcagagtggaatattttgactttaatctgggtggcaaatagcgggagggcgtgtaggggaaagagggattttttttttagggtgtgcgcagggccggcaggggagaggaggtggcaatcgcggcacgtagagtatgggtggcgagagccgggagtgaggggaggaccgggagcttaacgaggaggtggggaggagctagatggagaggagagaaggcggagaggatgagaaaggaggagggtgagagggcgagcgggacggagaagggggcgtgaacagagtggggaggggaagaagccgagagtaagagatggtgtgcgggaggggggcaggcggaggcgaggtaggaggcaggaggggatgaggagg

SEQ ID NO: 185062 - DNA, 391 bp, Arabidopsis thaliana
cacgcgtacgtaagcttggatcctctagagctttcgccctgtggttaaaatcttttttttttttttaggatcaaagaccttgtattgaatttggaatggggagtgagagcagagatcggaggggaacatcgcatgtatctggattggtgggtgcggcgcttgttttggagaaagggggcagcagggagaactcttctctgtggtttagggaaggggggggccttggcaagccgggggagtggccacggcgtgagaaacagagccgtatctagaagaaggaggaggaaacggggagaggcgaacgaggggagatgaatagctgagaggtgggatgacgggagtaagcgtgggtaggagagacgagttggggtgaggagtgcgggagggagag

SEQ ID NO: 185063 - DNA, 871 bp, Arabidopsis thaliana
acgcctgcaggtaccggtccggaattccccgtccgacccacgcgaaagcacgtcatcttgaattgggacttccaacgccgacaccggggaactgcgatggtggccccgggcggtaatgcggaggagcgggatgatggggctgtgctgtggcctgtggcaagggcggccatgcacgaggcgccggcggagagccctccatagggggtgatcgcggggcggggggactggacgtgatgaggggtgaccctagctggcgagccagagcgaggaggagggtgcgcaggggaggggggggggggggcctggctgagacggatggaggggagggggggccggagagtgcggggcgggagtgcgagacgggagagaggaagacggccggacgcacgggtcggagcgagacgagcggcaagagagaggggcgagagagcggcaggagaggggaggggggggcgagggagagacccactagcgacgcgaggtgaggagcgcggggcggaaagcgcgaggggcgaggaaacagggagaggacaggcaaccacgagaggaaagagtcacgaacgaggaaggtggagaactcccgcgagggggcgcccacgaagacggcagcaggacgaacagcagcaaggacaagaaggggggacggccagacaaagcagaggagagaagagggagcgacagaacagacgcgggaggggcaagcgagagcaagaagcagacaaagagcgagcaaaaagacaacacacgcaggggagagagcgagcacagcgaggaccaaaggactggaaccggcgggcaacgaggagagacgagggcagaggacaaaaccacagcgagcccgagcgtgacgagaacgcagagcacgagcgga

SEQ ID NO: 185064 - DNA, 638 bp, Arabidopsis thaliana
cctatagacctctatgagcggacatggccgcgtgacgggagctgggatgcctggtagagtgtgcggcctttttttttcttttggtggcggagaagttggacgtagagatactaataagggcaaatgtgaggaatattaaataagatggtgtcaggcaggaagaattagggacgaattattcgtagggagtatttgcgtgagtaggagaagagggtgcaggggtggcgtttttaatcgcgatggcactgaattggtgtcacaacctgatttacaagaagagagtggaagtagttccggtctttctaaaatcgtacagtgagcgtagattgggaagcaaatgctggcgtggagtgcgatagattatgaacccgtagttgatggagagtggtttacgaacgctcaaggcacgttattggaatatgagcagcagggatagtatgaatacgcatcgatacttcatactaggagctcgagaacttctgaattgttagttgcttgtatatgttgaaaagatttatcggtgagggggaccgaaatctatattaacaatgtaaaatatgttctttatatgaatggtagtgtagtgtctcatatgctaactcgcatgccgatcctcggtgctagtagaatgtcgtttg

SEQ ID NO: 185065 - DNA, 1012 bp, Arabidopsis thaliana
ggggggggtggcctcccgatatctatacggactgcattatagggagagctgggacggctgcaggggaccggggcgggaattgccgtgtggagcccacgcgtgcgggagacggggacagatagtgggagggtggtggggtgtagatgtgggatgaggagggatggaggtgaggagaagtaagtgaagaataaaatataacatagaagaatgtagtagtgggatggataataagttgtatgagacagaatagataattctttaggtagaggtatggagatacaagcagatataaatgtagaagataggagatgacgtcggattggttaaagagaagaaaaggtagatatagaataggggagatctgaaaaagttgagaacagagtggtgatatagagagtagtggagatgagccaatagataattgtagactgaaataaattaattaaagtaagtgagaaagacttttatagggatgatggagaagaaagctaagaggtgtatagagggttagagatgaataacaaagtaaacgtttaaacattaggagatcagtggagtacattaatgggtagatgatgatactagagaggtaggaccgtgaatagtgtacatgattataaaattatggaagattaatggagtgggtagtaagtaaatagcgcgagagagtagtaaaattttagtcatcttgcagaggaatgagagtagataagtagtcggagtgggaaagaaataagtgtaattagggatggatgaatgtgggcagtgtagactgtctatcgagtcgcgaaagaacaagtaggtggtaaatgatagttgaggaagtagtatgataaatagactacaatagtcgatgcagggaggcctgattgatatatgagagataatggtgcgagtaacctaaaatagagtagagattattgaatggtacgcatatgtgtaaggagttaactataaacgaataagaaaacaaaagcagtgaaagagtagactataatagtacatattatat

SEQ ID NO: 185066 - DNA, 413 bp, Arabidopsis thaliana
  unsure (1)..(413): unsure at all n locations
ctatagaagacttatgaggtcgactgcacgccgacgtaagcttggatcctctagagccctcgccctgttgtgaaactcctaattagaagcancatcgctagtggattggaggagaaactgagacattgggagcgcgcaatgcagggagaaatgcattgggggcgggtgcggggagaactaaagcgcgcaaagcgagacggatgcagaggggcgagggagacactgactctcttcgggatatagagcgagagcaggaagagccggagaagggacaagaggggggagcagggagggaagcggagtgagaccgaggcgaaggggaggagacacagggcggggagagaaaaggaaggggggagaaggcggcagcgcacgtaagagggcgagagggaagacagaggaggagagaagag

SEQ ID NO: 185067 - DNA, 470 bp, Arabidopsis thaliana
  unsure (1)..(470): unsure at all n locations
cacgcgtacagaagcttggatcctgtagagcgtacggggggtgggaaagcttgggggggggatgcggggagccgggagaggaagaccagggaggagggggggcaggagggnggggggagacgcgagaaggagaagcgcaggaaggagcacaacaaggaaaaagcgggagggcgggggggaaaggcgggaggacctctccaaaaccgacagcaacgacgcggccgacgagagcgaggccggaaggggcgggcggcggggggagggggggcgacgacggacgcagagggcaccacgcacggggacgggggccgagcgagggaggacgcgcacagcaggagggagaggcggagagcggcggcaggctgccgcgcgcgcggcaagcggcgagagagacagcggaggcgaggccgcgacgcacgcggcncggacgcgcccgcggcggcgccggcgcgggccacgcggcacagaag

SEQ ID NO: 185068 - DNA, 322 bp, Arabidopsis thaliana
  unsure (1)..(322): unsure at all n locations
gggagaagaacgcacgcctgcaggaaccaggtcccgaatacccgttacgacccacgcggtacgccaatatcaaacaactgaaatgaatgactgtctaacaaatatcatagcggtggaactgtggcagatattcgtaccgggggnccagagtgagcaagccgtaacgattacgaccccaccctctaagaacagcagggtgaaacgttctgcgaccgtcgtatttttatttatcccagtgagaggtccgcggccacgccataatatgcgcacgagtacatcaagcagaaagactagaacgaaagttcaccatcacaaaagtgcg

SEQ ID NO: 185069 - DNA, 109 bp, Arabidopsis thaliana
  unsure (1)..(109): unsure at all n locations
cgcctgcaggtaccngggcacggaataccacgtgtcgacccacagggaacgcgaaaanctaaggcaccatccgggggacacgcggctagcggcgtgctaccggaactgg

SEQ ID NO: 185070 - DNA, 970 bp, Arabidopsis thaliana
  unsure (1)..(970): unsure at all n locations
cacgcgtacgtaagcttggatcctctagagcgtgccgcgcgtgggaaaacctacttntaggaaaaaactctgactgtcgtgtgggaggataatacatgcacttagcaaagagcgagaacacatagggcaaacgaatagagcggagatactagcggacacaaaggaacagcagaacacaaccaagcgaggcattctatcaaaggggggaggagagccagggaggggcccaaagagaaagaagcccgaccaaggggaagaggagagcgaggagagaggcaagaagaaacaagcagagaaggagagaggaaggggagacaagggacggagaaagagagagagcgcgacgagggaaagaggaggagccaggaggagaagagagagggaggaggacgtagggatacagagagacaaggaggggaggcagggagagaggcaggagggtgcagaggggaggcggaggaggcagagtaggtagggaagagcgtagggaggagagggggcaaagggcaagagagagagggtgagaggaagcggggaagtagagggagacgaggcagagggaggcagcgagagagaggggagaggaagaacgagcagagaagagagcagcgcagagagagaagaggaagaggaggccggagcaggcgagaggagaggcaagccggcaggagagggagcgggaggaggagagaggagcgacgnagaaagaggngnagaagaagaagagaagaagagagagaggaagagaaggaaggagacgagagcgggagagccagagaggggcagaggagagagggagaggagagagagagggcgagagagagggcggaggcaagaggaagggaggagaaagaaagaggaggagaggaggggaagagagaagcacagagcaggagagagggagcagggagacggagcagcagcagaggagaggnggtgagagggaggaggagacgaggnagagagagga

SEQ ID NO: 185071 - DNA, 541 bp, Arabidopsis thaliana
  unsure (1)..(541): unsure at all n locations
cacgcgtacgtaagcttggatcctctagagcgctcgcccggggcgaaagactcgacaacaaaaacctcaaaccagggaccagcaacacaaaaaccaagacgggaaggcgactaacacagaggcggatgaggcggcagacagcgaggggacgaagggcggcagcgcgagcagaaaaaaggaagagggccgggcggattcttcaccaaggggaggcccgaaaagggagcaaggaggaggggatatgagagccccaggggcaacagggggggcggaggcagcagggaggcaggagggaggagggggaggggagggaggaggagaagagcaccagggggcgcacaaggagaagcaacaagcagacaggagcgggcgggcgagcgaaaccgaccaaganagggaaagaccaaaggagacagcctgaacgagaagaggcgagggaacacggcagacagagaaggagagggaggagcagaggagagggacaacgaaagaggaggccggaagaggaaacacacgcagaagaaagtaaagcacaaaagcg

SEQ ID NO: 185072 - DNA, 162 bp, Arabidopsis thaliana
ctgcaggtacccggtccggaatacccggctcgacccacgcgggcagagcgagcgaacacacgacgataacatcaacagcgctaatgcatcgcgcataggaagatgccgaccacaaacaacaggaggataaacgactgaggccctctgcgcacaataggaacg

SEQ ID NO: 185073 - DNA, 524 bp, Arabidopsis thaliana
  unsure (1)..(524): unsure at all n locations
tatgacgtcagcatgcacgcgtacgtagcttggatcctctagagcttgccggcctttgttttccttttttattccatatctttttacattctctcatcatttctaattccattagtttcatattacatatacatttcttttttctggagaaaacaataggaaacaattttttcttttccaccaaaaaccaaaaaaagtgcccatttctcctaccatgggaggaaaaaaaccccccaccaaccgcccccccaaaaaccttcattcccccccttagaaactttcaacgggtgggaaaagtgaaaatctcggggtttttcaaaaaaaaattttttaacggtgacttctgtccccgggggggataaggctgtttttggacaatataaaaaaaaccttggcaaggggttgggtggccccattccccccccccaatactggggttttaaagcttggaattgaagcggcccaacggcccattataagagcgaaactgtgccttcaantacccgaggtcttatgttttgggg

SEQ ID NO: 185074 - DNA, 293 bp, Arabidopsis thaliana
agggccgagccggatggccgtgagaccgacgcgagccccaagcggggacgagggaggggggggggagaggctgggggagcgggggggcgggggcggcggggcgaggaggcagggagagccgcagagacaaccgcaccgggcgcgaacagcggagggccgggcaggcgcgtttaccgaagggagcaccagaacgcaggacaggaaacagagaagagaacggacagaagagagcccacccccggggggaccgacgcgacaaaggcggaacaacaagcacacaacagaagccaaca

SEQ ID NO: 185075 - DNA, 458 bp, Arabidopsis thaliana
gcacgcgaacgtaagctgggatcctctagagcgttcgaccttgggggtttccttttttaaacaccgaggatgaaggctgagacccacgggtgcatactggcgacatcacggaggacggataaataagctagcactccgaggacggataataaataggagtacaccacactgaccgccaactagacatgaagacgtttttttaaggccagggggagaaacgggcagtgtagaggagagaggagagggagactcaagagatgtgtaggaactagtctagcctcgaaccccctccctccacaacgcacgccgcctctgaacagcccggaggggacgtgccgtcgcggaaccggcaacaccgaggccacagaatctgagacactttgcatcgctgcctccgcgacggtgggtaagatgaataaggacatggatatacacgagaactaaacgagaccggggaa

SEQ ID NO: 185076 - DNA, 449 bp, Arabidopsis thaliana
cacgcctgcaggtatccggacctagaattccatggttttgtccgcagggcgtgcggaccaacatctattgtcaaagtgcggctcactagagatgtcgctagattggggcagaacagctgggctgtcggtacgccagctcgtgagtttgggtgctttcgttgggtttgtagtcttgcaggtggtcctgacatggctcctacagtgcttctcgacgattagggttggtcgccggagaggttttttttgtggggaggggaggggaactctgtcggctccacgctggttaagttggaggcgccgcggctcgatcgagatgtcaagtcctgattgcgtccggttggctgtgtgtatgggtgcgggtacggagcctcgcgaaatggaggacagctaaagtacgatgtagtccattctcgaggcagaacctatgtcttacaccgaacttccacgga

SEQ ID NO: 185077 - DNA, 267 bp, Arabidopsis thaliana
tgggtaatgaagatttttagtcgggggggattcttttatatttattatatatggggtatgaagactagaggcgagtaaataaaatagtacatcggatagactcaagaaaaagcgatgcaaggtaatgtaagaaagggagacgatgaaggatatgataggaacagaggcacttaatacttttttttaagagaggtgagggtgttagtgttgtgcgcagagaggtgcaagagagataaacgcacggagtaaagtggtgttagattttat

SEQ ID NO: 185078 - DNA, 294 bp, Arabidopsis thaliana
tggggtggtttcggtttgcgggagcgggagtagagaaatggtgatatcttagtattaatatgggcattagcgtggctctcggaattctattatagggggggggttttttaggagctgggtgtgaggttctaacgtacctgttttttggtgtgctgttggggagagtttgagtaattgattgtgtaaactggtcgaggtgctgctcgtagatttgtggttagttgctgggtttgttggtagtattcttaatgtggggcgtcgataccttagttatgaactaatagtcggcgagtg

SEQ ID NO: 185079 - DNA, 467 bp, Arabidopsis thaliana
cacgcgtacgtaagcttggatcctctagagcgtgccgcccttttttttttctttttttatgaacttgttgctgtgtagatggtatgatggcgctcctacgacacgtcgtgcgtgtcgtgatcggtacttatcgacggaaattaagcaaaggggtaagagcgggacgtcttcgaaggcgctgcgtgtgctgattctttttctttgggagaggagagccgaagacagtacgctgtgtcttacatatcccctcatgggggttgggttcgatgtactctctctctgttgtgctgacttgacggcttgaggggcactttaatgtcaagcatcccccgactcagggctggtgaggatacgggggggtgaaccctgtgtccactcaaacttacaatccaggaacgatttgttgatagcaacagcgtggtcgtacacacagtatcgcaaggctcttcggtccaacgtgtgttttc

SEQ ID NO: 185080 - DNA, 516 bp, Arabidopsis thaliana
cgcgtacgtgagcttggatcctctagagcgtttcgagctttgggggggttcttttttaaaaaaaaagaagtgtttatgagatatcgccaagaggacaacagtgtagatctgatatgtaagggtatcaaatactaaaagaaagctggaccatatatataatggacaatatagctaacagctgccattaatacatttttttttttgagggaggatgggactgggacgtttctaaaaaggtatgcagagtcgctttgataacggagaattcttaagaaacaagtaatggtgggtgctcgagaggattaactgggtatgtatttatgaagatgggggtcacgtatgattgattagtcggggtacactggactttaagctgattgttacgagaattatacttcttggagtaagctctaagagacgaatggtcacttctatgaggtaagaagcgagagatggttgttatgaaaatgtcgtgctagtggagttagacaagacatagcgtggggtggggaggtt

SEQ ID NO: 185081 - DNA, 310 bp, Arabidopsis thaliana
ggggactccgggattggttagtatgttgaaggtgaccctcaatgacgaggatgataatgctgggaggaaagaaaggaaaaatggttggaatattcggttgttttaaagggggtgcgggtttttttggaaaaaattgacataaccattttatgctttaatagagtgtctgggttttccataatttttgtgaacataaataatccttcaagagtggatgtgctcttgtgcgattggtgattagactttgttgaggttgagggtcaaatgtcgtagggagaagtgagtcagggtaaagtcctgattaatttct

SEQ ID NO: 185082 - DNA, 411 bp, Arabidopsis thaliana
gcacgcatacgtaagctaggatcctgtagagttttcagccttggggggattcattttacacaaacatgttggcagtaggtgtatatttgtcatagaagcgtatgtgcaggcatgaatggctggggtggctgtcacatagccgaggtcaggtacaagcattctatcataggcgtggggaactttatctagttaggaggttttttttgttgtggctttgtccgacggtcaaagtgtgtggtcgtaataggtgctttgattcggagtatgtgtgtttgatggaagtattatgatctgtgatatgttagggtaataaatatcatttgtgtctgctggagagattgtaagattagagtttatcgtggtctgggcgggtgttcaggcacttcgtttggcgagggggttggtgtcgta

SEQ ID NO: 185083 - DNA, 516 bp, Arabidopsis thaliana
gactgcctgaggggagaacgtacgcctgcaggtaccggtccgctattaccgtttctgcccacgcgggcgcccttgttcaatctcgagtcaaatctctatagaggacttatcgagcactacgtagcggccggcgtaagccgagacgacaacgccgtctcgagttccttgccagtgaagtaggctcaattgttgggcccgcaagcccacacggccgtttttttctctgcggggttcccccacccgctaagctcaccatgtgcaggacccgcacggaccacatgagtcattcacacgaggcccactcacgactttcgaggccccgcgcacccgtctcgctcacacagtcggtcaccgccattcccggctatggccaggcggcaatgccccatcaggggacgtaaggggaacggctcgcttcgccagccaatactcatggcacaagttcgggtagagggggagggtagggtgtgaagtcgctccttcaggcgcagaccagaacatagcatcgaaagcctg

SEQ ID NO: 185084 - DNA, 405 bp, Arabidopsis thaliana
cacgtcgtaccgtaagccttaggatcccttctagagcaggtccgcccctttgggtgtttttttttttatcttcaactttcgtgtgtagttcgatcaaacaatgtttcttacacttttattgggttgcaaagtctcaagaccattagtttgttacacctttatgtccacacacctatacacaatgcagagagtagatcgtaacgggtctagttcgtatagatgtggccggttttttcatggctgcggtggggttttttcgaggtagcacaagagaagaagtgtttgcgaaggtatgaaggttgggagatattcgcgctctcatattcgtgtaagcgccgtttgaccgcgaaacacttagctcgaaaagaggtagctctcttgggcgttaggacccatgacacgggg

SEQ ID NO: 185085 - DNA, 177 bp, Arabidopsis thaliana
aaggaggagatggatgggagtggttgaaggtatttgagatagggggtatattcggtacatataaaatctgagagatggatgtgtgttagggataggtgattggtatagggagagaatgaggatggattaataaggtagtgtgtagctgatgggaggggttagaggagaggatacgta

SEQ ID NO: 185086 - DNA, 323 bp, Arabidopsis thaliana
aagcgaggtaccacagtcgagcgccgcggcggtagtgagaatcctcgagacaggtggctaggaccggatttttttaggaggcaaggatagagaatggaggggagttcaccaaggccggtggctcagaccgtatgccgggggccggttgtgaatattcggacgtcagccggtgacctatgtatggctaggaaggtatgttgaggtcgtccatgttgggtgtgggttggggggaaatgaagtcgtagggtcgcggagctgaacgctcctacatgtggtctgagctggggtctagatgacgcatcgagtgatgagggaattgtagt

SEQ ID NO: 185087 - DNA, 325 bp, Arabidopsis thaliana
gttatgaaattttcgagtacgaggggggttaacctatgggttcagcagagtgttacgcgaggtgttgaaaggtgagtggagcgaaattataaggtataaactcagaccaacgatgctgtgagatgagcagggtgtgtgttgtggctcgtgtaggtacgacagtcacaacactaagagcgccggtagaacatgagaggcacgaattttttttttttgtaggaggagagggtatcgacgaacgccgcacttggcattcttagttgatagttagtgttgatagctatcgtgtaagagctattggagcatgatgtgtaaaaaagtggag

SEQ ID NO: 185088 - DNA, 324 bp, Arabidopsis thaliana
aaaacgcaggggtgggtaagctgggatactcgagagggtttgggctggggtgagtttacgtttcactcctcgaatgaggtgtgagaacagattgagaaaatattatgttggagagttggaaatgtgaatgtgtgacagagcggttaagtgacaccgagtcatgtgtcaatccgcactgtgcgacaatatatagagttagagattgttttttgtatatggcgatagatggggttgtagacgtgagtagataggcgacctaaacttgtgtggcagtgtgacgagagattcgtattccgagtcaggagtaaataagttttgtatggg

SEQ ID NO: 185089 - DNA, 339 bp, Arabidopsis thaliana
  unsure (1)..(339): unsure at all n locations
gaaaaccggntacgcctagcaagtacccggaccggtaataccctcgtgtctaccgagcacggtggcgcaagattaaaaacatacaacccacagggccacaacccatcgtccactcgccatcagcattcatcacgaccccaacaaaggttagaattcctccccactaactaccatcaagagtacctcaaaatacatataaaagttacgattcgggtccaaacataggaaatccttgtacaccgtataaaactatacaattttatttttctaacaaaacagaagtgctcaaaataacacccccaaagaaagaacactattccctatcactaaaaaaccaac

SEQ ID NO: 185090 - DNA, 481 bp, Arabidopsis thaliana
ccgtggcaggtaccagggcgcgggaattccgcggagtcgacccacggcgtgcagaccacgctggccagagcaatccataactagtgtaagattgagcgataggggaccaacagaagagtcactcgagcaggtgacgcggatgcgtggcatacttgtgccttgtatccatcgacggcatatgattcgaatagagtctacggatgattttttcataggtgggcgtgacagattgagcgtagacgccgagcacagggtgcgagtgaggcgtcagcggccacggacaggctaaccgtcacgcggacacacggctacacaggcacgtgcgcatggcagactggcgcatatgaaggggagaggatcagtttgtcgacgagtacgacgaatgaagagtgccacaggcgttcgcgcgagtacgtgaactaggcgagtcactccgatgggtacaaggatgagaagacggaagaacgaaagatgagtggaa

SEQ ID NO: 185091 - DNA, 469 bp, Arabidopsis thaliana
  unsure (1)..(469): unsure at all n locations
gcacgcgtacgtaagcttggatcctatagagcggtcgtgcttggggggtgttttatgtttggaccaaagcgtaacagtttgtaaaattagttagtggtaattggagtaatggcattataagacttgttcgtaagactcgtgtgtaggatataggttctgtacttggatttgaacagacggtactcgcgggacggttggagtttttttttttaggtgaggtagaaccgtagttagaggaaattagcattgatatgtagggagataggttgttactctttttacgagaagtcagataggtgcgagattttgngtgaaggacgcgtatgaagatgacacgttgtgaagcggcagaatactgttatacggactagtggcgagtcgtgatatgtagatagaagttcctgtggagtgagaatagctgtaagtgcagttagagcagagggaatcgagggtatgaaagaaatagatg

SEQ ID NO: 185092 - DNA, 463 bp, Arabidopsis thaliana
ggggaaagcaacgtgacgccctcgtcacagtgaccgcggccgcgagtattccggtgtcgacccacagggcgcggcgccacacgctgcgcagcgagactcgtgcgtcactactctgggcggcgcgagcgcgagtggccatattgttctcccagacacctataagattgagcgggtgcatgtctggattccatggggggagagcagtagaaacaatttgaatgagaccagacccatggggggaggcgtaccatacgatctttattcacacggagcgagggaggctgtctagtactagagcatgtttcacctatacaagagaagattagaagaatagggaatctctgctaaggtaagtgaggaagggaagagtagggctttacctggggtcggaggcttgtttgaatgtcggaacattgtggtgagcctatacccattcatgcgtgcagagacaggggcgcgtgga

SEQ ID NO: 185093 - DNA, 542 bp, Arabidopsis thaliana
cacgcgcacgtaagctggagatcctaaaaagcggacgccctaggggtgaccccacgcaaaacgaacaacgcccgccaaagcaagacgaaaacaaacgaaccaccccaaacaagaggggcgagggcgccagccgagtacagacgagcaagaaagaacccacggaaggaaaaagggcgcccacagagaaaaccacggagccgggacttttttcacggggagaagacgacaagaaaagacacacatcaggaacagaccggagccactcaggacgcggagcgaacgaggccaccagcgacacgcttagacctacgccagagacggacgtcggacacgaagcgaaacagccgagacgacagaggcagaaagaaaaaagcaaagcgcacagcacggacaagaaaaagccaagacgactgagaagaaggacacccacacgaccatccaagacaacagaagacaacaaagagaaaggaacgagtcaacacaccaccggggacaacaaagacaggagcgacaaaaccgacgacaaataaaagccggaggac

SEQ ID NO: 185094 - DNA, 426 bp, Arabidopsis thaliana
gggcggggcgttgcgcagtggagttgggggtcacgggaaccggttttagtcttagagggggtgttgttctcaggacgatgtacgtcgctatgtaatatagaatattttgatttatacttgtagggtggaggcgagggaatgcatagagagagtgattccttgcttattttggagtggcgtcgagacatgtaaaaactcaaaaaaaagaggtgtgacgagcactattcgggagtgcacggtgctaggtatggtcagcgcgccgcgagggctaggcgaacggttgatgaagcctaccgtcttgtgacgcgcgcgacgcttaagtactttacgtatatgggtgtcggtcatgaagcacgtgagttggcagaggtttactatatgctggttgactaatattggggaagtgtagttattgaagagatgatt

SEQ ID NO: 185095 - DNA, 413 bp, Arabidopsis thaliana
aaattttatgacgtggaacgcacacgtacgtaaggcttgaatcctaatagagcggccgaccttggggtgtatttatttttctcggagaaagtaaggaaatgaggagtgataaagtgtgggtgaatgtatactacacatgctaagtgtagagtctagtatgaggtgaagtcgtagtgaggtttatataaggagctcaacggagcgtatctaaaacgacaagactccgacttttttcctcgatgttggagtggactaagagtctctctgggggtctatattaagtagatgatgactacgatgctgtattgattaatagtacagcgatcgatacacgactgatacactatggtttgttgagtgttcgggtggtagatgttcgaggagttattcgcaggttagcagtattaagatat

SEQ ID NO: 185096 - DNA, 286 bp, Arabidopsis thaliana
acgactaacttgagggaaagaacctacgcctgcaggtaccggaccggaatttctggttcgacccaggcggggcggcgtcgttagagagtatcgctggtaggaaggttttattaactgtggattaccaagtcacctgtccggatcacaaagacctaagaagttggtaacgttgtgacgtgctgaatttaaaagtaggtgcagtatcgaagagataaaaggattattttttagacgaagggtaggacagactataaagcgggagaaaatcgtctgaagtcagatagac

SEQ ID NO: 185097 - DNA, 771 bp, Arabidopsis thaliana
  unsure (1)..(771): unsure at all n locations
acagaagaaaaggggaggagaaggggagagatggggcgcccgcggcgtgcgcgcganngactgaaaacggagaagtttaaaagggggaaaaaacggncgacgccnggaaggaaacnagggacacgggaagaaggcagttgagcgggagccagcgcggaaacacccgcaggagnaggagaaaagagagggcgagaggaggcgagaggagggcgaggagaaggaggagaaggaaaacaggagaggaagagagagaggagaggggcgaagnagaggggacaggaaagaagagaagaggaagaggagcgcgaagaggcacgaaggaggagggcgaggggagagacaggaagggaggagcagaagaggaggaggaaggggaaagagaaaattttttaagagagcgggagaggaagggaggaggaagagagagagagcaggagaaggagaagacgagcaagcgggagagaggggagagggaaggaggaaaaggcagaggagagaggagagagagaggagagaaagaagaagagagagaagaggagagagagaagagaagaagatgaaagaaagaaagaaagagagcgcgagaggacgaaggaagaaagagaagaagaagaagataaagagagagaaggagggcacagcgagagacggagagcagaaaggaagagagagcgcaggaacaagagaagagacacgcaaagagaggagaagagagagaaagagaaaggagcggagcgagggagagaggcaggaagcgagagagagaagaag

SEQ ID NO: 185098 - DNA, 467 bp, Arabidopsis thaliana
ctgcacgcgtcgtaagcttggatcctctagagctgcgccttttttttcctttttttacttttcattacttgggattctttacacagatatgggatatggaaatgttgctattcgtacaaaatagttaactaagctaagaaacccatttttggggggcctaaagaaagggttacagatttctatcttatattttctcagtcattgggatctatacctttctctgcttcttttaactgatcttcataatcggccaacaagtaatcacaaatctccagtaactgatctgccaaaggtggtattcctgggttacgcccatcgttgtaaagatgagcattgtactttatctgccagacatcgggtctaacctgttctcggtttctgtactctatcttccgtaccttatcttggattgtcaagagatccgtcggggttttccacgaattcaagattatctgggagcttccttc

SEQ ID NO: 185099 - DNA, 300 bp, Arabidopsis thaliana
gcacgcggacgtaagcgagagagcacaggagcttccgcgccggggcgaaaccccagaagaggagagaaagtgaagggagaagagaagaagagaagaagagaaggaggggaagaaaagggcagaccaagagagacacaacggctaagggcgaccgagcccaagcgaggaggtacagcgcggccgaggaatgacgtattggagacccacgagcgagtaacgcttttttttttaggaggaggccaaggcggggagaaaggaaagaacgggatgacacacgccttaacgaatacaggtacacgc

SEQ ID NO: 185100 - DNA, 438 bp, Arabidopsis thaliana
gccgcgtacgtaagctggggacctctagagttttcgcccttttgtaaatccttttgtttagaatatgatggacgaggcgacctctaggccagccaacggaaagagttagaatagagaggggggcgcgggcgagtgttggcacgagggcgtcgggcggcgacgccgcggcggacaagggcgaccgacgcacagagggcgcgtttttttttgaggaataaggcgggcaaggaacgggggaggcaggacagaaggggggaccacaagggcgcgcccgaagcgacgtcgcgaatttgtagacaaagacgcgcggtagcgagggatacccagattatgagctggcggacgaaaggagaagcgaaggcagtagacacgagaagacccaacaccacgcatagaaactgaatacactagaatatccaagaaccacgcccggcagaa

SEQ ID NO: 185101 - DNA, 571 bp, Arabidopsis thaliana
  unsure (1)..(571): unsure at all n locations
atacgattgacggagcacagtggggacagtaaaacaacggttgtttcgagtactacccgacaaagtanagggggaaaacagnacagcctgcaggtacccgggccggagataccttttcgacccacgcgaacgcctcaggactgaataaagaaaataagtcgaacgtattgagggggagtaaacagagaggtgtcaatggaaagagagtcactagaggagtgttagagacgaggagtgagtaagcggcagggggcggtgtcgtgagggaggtttttttttgaacgcgtaaagaacatgagtgggagagtattagctgaaatgtggtgcaagaatggctgttagcggggcagagaatgaagaaggaagcgggtagggagcgtaaaacggatgacccagcctgaatttgtgaagtgcaattaatagaaacgatgatgagatcatgtagagtatgctactagttcgcggatgggtgccgagacttaaaacaccacgagtgatggggaatgtaagcgagaactcagggtcgaagatgaacggtgaagctaggatggggagtaagtggaatacatcg

SEQ ID NO: 185102 - DNA, 408 bp, Arabidopsis thaliana
cgcctgcaggtaccgggccggaattcctttcgaccccgggttggccttgtatgggggtgtaggtgcctgtggggtggagagggtgataggatgtggtgctgtcggggtgtgggggatgggacatagtacgcgggtagcgggaggtgcgcgcaggtggggcggtgtggcgcgggggttttttttttgggggtggacgcctaaggtaggtgggctgtgtgggcaaggcccttgtgtgccgattgtggattacgtgcgtggtgtgtgtggctgtgttgtgtgggtggttgatggtagttcgttttttatgaagagatgtgcagtgtgggattagaacgagtttgttgttgcgcgtgatgcctatccgacagagtgtcatgggatgcaggtaaggagtttgctatgtgttta

SEQ ID NO: 185103 - DNA, 314 bp, Arabidopsis thaliana
  unsure (1)..(314): unsure at all n locations
ctaagaccggccgattctttgcaccagggaaacccgaaaggaagaaggaaggggggggggaggggggggaggaggggaagagagaaagaaaggggaaagggggggggagggggnggagagaggggaagggggaggggattttttttgggggagagagcaacagggagggcgggagagaaacgatacgggtgggccgagaaggcaacgagatgaaatgcttatatgaaggttgggcagttaccctctcaaatatgacgaggagtacaaaaattacaacggaagagattcatgagaaggatagaggcatcgattat

SEQ ID NO: 185104 - DNA, 523 bp, Arabidopsis thaliana
gcacgcgtacgtaagctgggatcctctagagctgccgccgttggggaaaaccctgtttgagaagaagagagggcccaagagagaccctgtagggatatgggcccaaacgagacgtgaaggaccacgacaaggagatgtgagcacagcgcgggagggagagcgacggccgcaagagaggaggaagcgcgggccttttctgttttggggagggggagaagacggggagggggaagacccggggaggagcagccacgaggggcgcggggggcagagcggacaggcagggaggggggagggcagggggagaggcggccgggggagagcgagggaggcatgaaaccgggagagcggggaacaggagagggaggagaaagcggggggaggccgaggagcgggggagaggggtggagcggaagggaagggcgggagcgaggcgggcgaagagaagggaggccggggggaagagcacgggagagggggaagaagaggggggcgggcaggcggaagagacaggggcacggga

SEQ ID NO: 185105 - DNA, 510 bp, Arabidopsis thaliana
tgccgcgtacgtaagctgggatcctctagagttgccgcccttttgaaatccttttataaagagaaaggaagagagatgaagaagagcagggaaaagaggggagggaaggaggggagaaagaaatggataataacaggcaaaagagtagtaagggatagtgcagacgaggaaggagaggaagacgaccagaggggcgcggggacaaattattttttttacgaggagggtgggaacggtagaaaaagaagaagggaaatgcggggagaaagacggaacgagcgagagacccggagggggtataacaatggtgctagggagtaggaaggagcataagaggagcactggaaagttaacggaaggaaagagaaaatagacagaagatgtcttatcgccaagagaggagaaccgcaccgagggagtgatgagaggatggggatggagtgacacggtggaggacggacgaggacgagacaggcgatgagacagagacaagaggagagaaagggggac

SEQ ID NO: 185106 - DNA, 407 bp, Arabidopsis thaliana
  unsure (1)..(407): unsure at all n locations
ctacgtaagcttggatcctctagagcttccggccgngggcgaaaccgnggggaagaagaaagggggaggagagagggagggaggaggaaaaaggcacaggcaagnaggagaagcggccacgcgggagagcacagggaggccccgagccggagagacgacagagccacaagagaagggcgcgggcggccttttttatggcgggggggggaaggagagcggggcggggagacggagggaggcagggagcccagagggcgcgggggggcagaccacgcggcccgcggcggggagaggcggggagtggacgggagaagccgaggacggaaaagaggacagaggacagagacgggagcaggagagcgacggcgagcgacacggcctgcccgcccctggtgtagcgagttacc

SEQ ID NO: 185107 - DNA, 359 bp, Arabidopsis thaliana
tttttttttgggggggtggagaagagaaagaaagaaggaagaaggggagaggggtgagaagaaaagagaagggggagagaaagaaaaggaagaaaaaagaggaaaaagaaagggtgttaaagaggagaagtgaaagtggggaggagtagtgtataattagttagagaagatgtggatagaggataggagataatgagatgtgggaaagggaaggtagtggatatataaaagagtgtatggagatagagggggagagggaagggtgggaggtgaagattattgaggttatgaataagtagggtggagatataaattgtatttaagagagagaaagagtataaatgataagaagtgaaaag

SEQ ID NO: 185108 - DNA, 534 bp, Arabidopsis thaliana
  unsure (1)..(534): unsure at all n locations
gtcgcatgacacgcgtacgtagcttggatcctctagagcggccgccctttttttggtttttttttttttttttttttttttttattaaagcttgtctatnattcaagaaaaaaaaaaagcgtgcttatccttcaagaaggaatttcaatgtttttggcctgaggccaaactctaaatttcaagaaggctgcgggggaacctcttaagatgttttttcccaccgggggaaaactgaagaggttctcccctcttttaaaaaactgataaggttatgagtggttctactccactacttaaacacaggggggggtgatggtcaaagggagccacaaacccttggagggccatgagtggtgcaactacatttgaaagccccggttgttgccgattttaaggaatttcatccttgggcctgaccaggaccttcaaagaggttggaactgggtttggtttttttaagcaaaaaacccgaaactactttttttttatttaaacagggttggcgggtggaaggctgtggagcttgagctcgcg

SEQ ID NO: 185109 - DNA, 520 bp, Arabidopsis thaliana
  unsure (1)..(520): unsure at all n locations
cccgccgaaccggnccggaaccccggagcgtccacgcngcnaagaagccgcaaaaaaaaaaaaaacacagaagaggggacccaaaagcgcaaaaacacgacgaacccagaggagaggaagagaggacaagctaccaagggcacaaaagcaccaacacaaacccccgaaggagaaaaacacacacgggaaaaatgtctaacagggggggggaaaaagaccacgccccacccgggagaaaaaaaaagccccccccccgcaaacgggggaggaaaaaacacacaaagagcacggggaccgccagagagaaagaagacgaagcagggagagcaacggacgcaaaccaacaccaaaaacagcccacccccacacagacggaaagcggcccgacgccgaaaagaaacaaagaaaaaggaggaagaacaccaccaaacgagcgccccagagcccaaccagaccaagcgacacaaggaacgccccccaacccacaagaccaacagacgagagaaaaaccaaaaaaaaa

SEQ ID NO: 185110 - DNA, 583 bp, Arabidopsis thaliana
  unsure (1)..(583): unsure at all n locations
gcgtacgtaagcttggatcctctagagcggccttttccttgtgtttggatagatccttaaaaagangnacatttnttttagatatttaagagtgaatttggggttggaatttatatatattatttattgacggtggcgtggggcattattgtagtgttttagtgagagaggatgaaaataaggatagtatatttttggtggagggggaggtggtgaggaagattttgtagttttgggggggggggcaaancgcgcagaggtggtatttggggacaataagaccaccctggatcgaggaggggggacggggaccgaagtaagataaccggggtgcgggatggggtcggagggagggagaaggaagaaagggggcagcgtcggtgagggaggtatgtcgggaaggagacgcgcgatgggtgggtggggctggggatgggacgtgggagcggagacggggaggcgggtcgaagggagtgggtgtggtgcgcgtgggggggagagtaactagagagagagcgagggtgtggtgtatgttttgggaggggtgagagagtgtgcgtgggaggtgagagtggggcgaggc

SEQ ID NO: 185111 - DNA, 465 bp, Arabidopsis thaliana
atcccccacctttcgggttgctggtccccctgaagtcccgggccgcattcccagagcgcccccacgacccaagtgatcacacagttattccaacatatgctaaagtggcgagtcctcggtcttagttgcaacagaaatcacagctccaccgccccgcagagaacgattatattatcccgcccggtcgttccattctagttgatcagaagcagtattctcggtgatttggcagctttcacgcgttggatgcgttgcatgtgatctcccagagtattagggggaggaatataatagttaataaagcgagatttgttaccctgagaagcacctgactctctccgtatgtcgaatgagcagcgctatacgagggtccagtgagtacacactgaacgccgaaggcgcgccgcgaaagtataccacgatcacagcacctgctgagcctcacatatcgcatcacggcgcccc

SEQ ID NO: 185112 - DNA, 371 bp, Arabidopsis thaliana
agccagagcccggagatccctcagcatcaccccctccgagtccagataagctcactagcgatatcctctcccctcacctagaaacagtatttgcgaggagctagacaggaagaagacgctgacaataattatggcaccttcctgtccatgcgacgcaacagggccaacgcacatatagtagatcccctgcgctgtcaataaaatcatacagagagcacgagagaaaaagtatatctcgcagcgtcgctcgtctgcaccacactgcgcggagtcaagctagctcagagcacagacgacgtcgaagcgctgcagtatttatgtcatcggcgtaagtcgcatgccgagtgtcagaggccacttgtgacgccccg

SEQ ID NO: 185113 - DNA, 171 bp, Arabidopsis thaliana
ggagagagcgctgcgcgacctagctgccgagggagcacacgagcgagcccatgccatgcggagatgtacaccagtaagcgtgcgcgagaataatcaccctaaggacagacgcagcgagcgcaaatagtgcttgagttgagcggcatccgcagcggcgcggcagtgtcgatg

SEQ ID NO: 185114 - DNA, 126 bp, Arabidopsis thaliana
gttccccccgcggtgcacggaccgaccccactggtatctactcactataatgggtttcaatgaacggagatccccctcttccgcatatagctctcgtcctttgcccaacattatctcttcatccgc

SEQ ID NO: 185115 - DNA, 167 bp, Arabidopsis thaliana
ccgcatcaccgcaggcccccccgcggagacttcttttggcatccccttaggagtaatcttattatgtgagcggcggccacgtcgacgactttagtttctagcccctcgcccggcactccgcgtacacctccagtcgttgtcatagagttattatgtttgtgttcgct

SEQ ID NO: 185116 - DNA, 436 bp, Arabidopsis thaliana
gggagatatatttttcgggtgaagcccctgcccactcccagtctagttatcctggaccctggagctcacgcgtagtagcaccccctcccgtcccgaatgtcgtatccccgatttcgtcacgcaccgcgtgaacgatctgtgctgaacttaccttcatagccgcctgcgtcgtctcattttgtctcaacgtatattcatctcaggtaagaagcctcaaggcctggtcacacccctgccccaccgtcttcaaagatattgtagcggaacaagacgatgaccgcgaccaaaggtgatgaaacacattttctgtcgttatacgtaccgaagggatgaaacgcggggcgacgcgcgaaggcagaagtcgaagagatcggcactatctcgcttcccgttccaatatgatgtcgtgttgttccaggtctggccgggcggctcc

SEQ ID NO: 185117 - DNA, 348 bp, Arabidopsis thaliana
gagagaattttttgcggggccctctactcggcgggcctagtattagggccagcgccgctaccgctctgtcgaagtactccggctaggaagcagctggcagccgatcctcgctccacatcggtataatcctggccgtatgggacaccgtcagagttgtagacgcgacgatcggctgcgccgtcctggaggtgatctatattaagccgcctttccgatacgtatcctgtgacctctttatgagcgatatgtggccctgcacggggcagcacccgcagatgtgcataaaggtgctcaacttgtcaacgtacaaccactcacccgccctagccgagagtccgccattgcaga

SEQ ID NO: 185118 - DNA, 611 bp, Arabidopsis thaliana
cgcgccgacagcgggccccggcgggcgggcgtcggcaatcgccagttccccagccgcatccattattggggtaaggccggatcccccccggagtgccctcgacccgcgagttcccggattctcccccgctcgaccgtcagagaatcaattaacctgtccgctctcgtaagcgtaaaaagctgactcacctacacatacctagttaaccaactaacatagctatctcctctacgctagagattcaactctgtcatcacccatcctccctatcactaggagtacacgagaagcgctgttgtcttagtggcacggtgctgtcgtccagcgcttccgagcttctcttacggtcacctccgctgtcccgagcgaaagctgctaggagtgccctgattgtcagtcacacggtcactagagaagctccgggactcgcgctccaagctcttctattccctgtggaggcaactcccgtagtctagggagtggtgagagcccgcaggacgcggacggacacagcgacgcacagaactagattctaagcaagcttgctctgagcgctaactttatatatcttatctgaatcatggcgtcggtggtgcattttaagattataa

SEQ ID NO: 185119 - DNA, 146 bp, Arabidopsis thaliana
  unsure (1)..(146): unsure at all n locations
ccaggctcttatccgactcacttatagggagagagctggnccccctgcaggtccctggtcctggaattccgcggatctacccagccggtcccagtgtgagaaagtatagctttcgacagcagtggatactatctcgcagtagctag

SEQ ID NO: 185120 - DNA, 503 bp, Arabidopsis thaliana
actcgactcaattatggaaagctctgcacgcctgcagtgtaccgggcacgctataccacgggtcgacccacgcgttcggtctttgctaagagtcctaagaggacatcaacaaaaatccttagtgttcgtcctccgtggagtcacagtcatagcccgagtacaattcttatatggaacggaggcaaacttcctgctctatgtaccatccctgtgaagaacttgttattagcctgggagaaaggccaatcagtgatgataaggcataggctgccagaacgatccctaccaaaagtgttattatacgagcgtgtcggatgaaaaatgaaaggatacttttagtatgtctgcaaactattcaatgaaatgtcctttgacgagccaaagggggttttaaaataactccagtcttaggtctgatcctcagaggccttacgctggggccctggaatatcgtgctcctctggaaaacccaggggaggggccccctaaaaaaaagggcaaaa

SEQ ID NO: 185121 - DNA, 501 bp, Arabidopsis thaliana
gggagagaaggggaaggagaacaagcttttgcccgcgggggaaagcaaagagtaggtaggcccgaaacaaggcacagcatctacctcacaattcgcatatctccaaccggtatagcctagatatttagtgatatgtcgaatgttgcctcctagaactaaaaggcataacaactaaaaagacaaacaatttttttgaacggcggaggtaaaaggatttggataaaaacaatcaggaaaatgtaaggtaatagttaattccccctcagaagaataagtgcattggacaaagactcatatttcattggggccatggtgcgtgcatacagatattattaaggaaggtggtataattagaagaacgacaaattaaatataaattccacagattaatccacaaagaacgccgtcactgtgcggctctgcatacggattattactctacatgtatatatctaaataatatagcggccgctagcacgaccacagaaggggagaaggaat

SEQ ID NO: 185122 - DNA, 532 bp, Arabidopsis thaliana
actctcacaaacatttatgacgaagctacgcacgcctgcgtgtaccggtaccctatacaccggtctacccacgcggtacagagacacgcgtgagctctggttgcttttccatttccttgtttattgtctctctgaccttggattttcggatacaaaaaacagatatcgcctcattctaaagctggtttccggatattctaagagtctttgtatcccccccgaactaatttttttttcgggaggtcaagcccaaggcctcaaaccctttcttatagggcgcctaaagctgataattttacatcggtccccccccctttttagattaccaaattcaccccaattccggagggggggccccctcctatacttgaaaaaaaccatccttaccccctcaaacctctcattttgggtttgcttgcaaccagattctgcgttcccccgaaactagattgacttatttcctttaagggaaataagaactcttttttcaaaatctcctcctaagcctctctctcaaaacgaaaaacaaagg

SEQ ID NO: 185123 - DNA, 479 bp, Arabidopsis thaliana
gccgcgtacgtaagcttggatcctctagagcgtgccgcccttttttttttttttttttttttttttttttttttttttttttttttttcacctattaaggggttgaaataaaatttttggactgaaagcttcatttgttaaaaaaacatttaaatgtggctaaagtaattaaccgcctttggagggatttgttttgtttttttaaccctgaggccgggtaaatatttaccacctcggggcccaattcaagtttttctttttcggaaatatatttatggggtggaagtgtattttttttgtttgtaaaaaatttgtgctcctggtttgtctttttgattctgtaagctttttgcgggtagttatggtttttacaccggggggtgggtgctggaaataatgtgtgaggagcgctgggttaaccccgtaatccccttgggaaaaaagtttgttatccaactatattgagataaaagtgttag

SEQ ID NO: 185124 - DNA, 578 bp, Arabidopsis thaliana
  unsure (1)..(578): unsure at all n locations
agcggagataacanaccaaaaaaaaaaaaanaaaaaagaattgtctatctacaccccacacaattaggaggagcacgccgcctgcaggaaccgggacggaatagaggggttgacccacgcgtgcggtcctacgagcgtaatgtatgcgaaggcagatgccacacagccagtctcggaaataagaaacaacgtccagggaatacgagcccggccgcattgaataggaacaagaggtaaaaaagccccacacgcctgattagaacaggcagcatttttttttttgggggggtgggaggcaaggcccgaagcaaacgggaaaaaccaaggctccccatgcgtcaaaagcaggccctaacaacttggcagctccggcctcccccccctagcgcaaaggtgacgggcaacccgaatattttttatcttcttaccatcgaaattccaaggtgtgtccttgttttctctctccctacccttcttttatgccagccccaaatccttatttatgtgtaccgccaacacaaaaaaatgtacagccagtatatggatatagggacgccaatatcaatgccgcctaacaa

SEQ ID NO: 185125 - DNA, 517 bp, Arabidopsis thaliana
cagctctactctgactcacattatggaaagctagcgtcacgcctgcagtgtaccggtccggaattcacgggtcgaccacgcgttcggttcttcaggtgacccgtatactattgatagtgactctgctcttgcttttaaaaactgaagatactgctgaccttatgagctgagcgacatggagaggattataaggacaaaaagcccaactctccataatagaaagacaagtcttactttttcattttcgtgaagaaaggcattccttaatcagataattgatgttacacattgttgctttggttctcgcgcaaaagaaaaaccatatttgatactaagactcatggtggtttggttttcaggaactagaaaccttttgtttgaaaaacccaattccttggcttttttcctcataacattatgtggtgaggatcttaacccgccctgctttgacctttaaaaaaaaaaaatggggcagacggtttagagaacccaagttacttaagtttcccaaccaaaa

SEQ ID NO: 185126 - DNA, 528 bp, Arabidopsis thaliana
tctacaaaactatgaggaagcacgcacgcctgcaggtacctgggcacccaatacaggggttgacccacgcgttcgctttcttgtacaaccattatcatctcctcgatacattaaatataatcctcacaagtgctcgggacctccagaattctttttcaccagtcccaacatgggtgagcgatcatcttccctggaaggctccacacctctgtgcaggcgttcccttttttttgcggggggtgatcccaaccctcagaacctggggtatttttatttttctccggaggggccctttttctataaccctcaccaaaactttacaacccccagttacctaccttaatctcttgggaaagaaaaaaaaaccttgaatacctggacctcgaatcctacattccagacacctaaattttcgctttgtggggcctgggggagctacccacaaggggggagaaaatcgtgtgatttccctcaaccccaaaaaacactcgtgtggaaaaaccggagtaaaacccttgccagagttct

SEQ ID NO: 185127 - DNA, 255 bp, Arabidopsis thaliana
  unsure (1)..(255): unsure at all n locations
aaaaaagcatgatttnttggttttttagaaagagggggacgagagacccccgcagaagcgagtgtggcgggtgagcgagaagaagagaaagaggataccaacgaggtacggtttatgtgtagcgcggtgatacggaacaaacgccggcggagaataaccgaaagaaacgattagagccggcgaggagggaggacccacgagaaagaagagaataaagagaagaaaagaattttttttttggggggggggaggaaa

SEQ ID NO: 185128 - DNA, 327 bp, Arabidopsis thaliana
tcccagctctatcgactccttagggaagctgtcgctgcgtaccgccgatcccggcgacagcgtcgccaccgccgttttttcttgcccgggggattaaaaggggccttttttccgggcccaaaatctttttaaaaaaacgggctcccggacccccttttttccttccggggagggggtttttcccccccccccccctcttttttttttggggggggtccaagatttttgcgcccctaaaaagagggggggttggggaccgctccccctcccccccccgcgggggggggggaaaaatttttttttttttttttggaaaaaaattggggg

SEQ ID NO: 185129 - DNA, 538 bp, Arabidopsis thaliana
cgcggataccgggagggattgaggggtttttgaatgggggatgaagcaacgaaagatggtttatgggagggagagagagaggaaataaaaattctattcgttttggaaggggatgtgggcgagctgttatggcgtgggttaatgaaggacaataattaataggaatgtgttggagagtgactagacgccagggagggagattttttttttcggggggggcgcagagggggcagagaggagaggtggataaatataatgtgaatgaagagggtgtaatagagaggtctagaggtggatcgaggacgtgaaattagggttagggaatgggcttaaataggccgggtgacccgtggtgagtatatactaattgttcactatgatatggcttgtcttgggcataaatggagggctgggctggggtagtatgtcgttcctgcccaacagtttttagagttgataatgacgcagtgatgttgttgctttgtcttaagcaagaattattaagtgaaagtgttaatgggatatggaaatgccgctg

SEQ ID NO: 185130 - DNA, 484 bp, Arabidopsis thaliana
cgtaagcttggatcctctagagcggtcgccctttgtttttttctctaacaagtaagtgagccgcgtcgctttgtaggatagagaggcccaaaaacactcgagaaagaaggtgtacaacgcaggcaactcgattcctccgctgacctggccgaaccgaaaaaagcgcgttcctccacgggaaaaaacgcaacaagggattttttttcttggagggggcagataggcccaacccgggggctttcggcaaaacaccccaccacgaggaattcagtcgctccgctccagcaccaaggatatgggcaaaacaccaaagggccgggcgggcgggcgctggcgcggagaagagggaaaccatacagagggccctgcggaagtattcagaggccgtgcgcccgccccgactggccccggggaagaaaacccgtgagattgggaagatctgcgtctgccggtgggggaggggggagctgcgcggaccggggtg

SEQ ID NO: 185131 - DNA, 539 bp, Arabidopsis thaliana
ggagagcatacgcacgcgtgcaggaaccgggacccaatataggggtcgacccacgcgttcggtttcacaaaaagagggtttgtttagaagcaaggcgaaaaaattccaaaatgtcttaccaagggacctttcctcacaaaaactttgttggcgcccactcacaaaaaacaaacaggggacagacttctccacaaaaaaaaagcgcgcaaggtgtggaaatttttttttcggggggagaaaattttaagagttgggtggaactccccaaaaaacgcatttacagggggattttacaccctttccgtagaaacccaccctacaccacaaaaaccataggggcccggcccagagaatcccacacaggaagattaatcacccttcctctgcaactgcgagagccgtcacccccccaagaacccctcttccccgcccttttagtatttagaacaccccagtagagcaaaaaacaattttatccccccccccctgttggcgggtggcgaaaacataaatcaattcgacgagtaaaccgcccttat

SEQ ID NO: 185132 - DNA, 502 bp, Arabidopsis thaliana
ctcgacacacatttatggagagctgcgtcacgcctgcaggtaccgggcacggaattcacgggtcgacccacgcgttcgtgacactgtccacgggacaataatgtctatggtgccactgtcatccctaaagcaccggccgttggagcctccagatacgcaccatggcgcgcaagatgtggatcattaactgcccttgacgtaagagcgaacggggttcattgttctttttttgcttgctagcacgttcagagagataccatgaggtgaagaatctataagcagtatggagaaaattccgaactagcagggagatggctcctcttagctcgggccttcaaggggacccaccaaataacacccattgggttttctttaggtggggaataaaaacaaggtggggttgaaaacattttgcagaaagggagttcttgtagctccttggtgacgggaacaccgccgttaaataggaaaattagagaagatcattatccttgttatttgg

SEQ ID NO: 185133 - DNA, 497 bp, Arabidopsis thaliana
ctatagagatctatgacgtcactgccgcgtcgtaagcttggatcctctagagcggcgccttggttttttttttttttttggatgtgtgtgttatgggttggtgtgaggtgactgttatctattttgggggacttggggggaggttgcgaacaggaaaaaagggggggggggagaaaagcgggggggggctctttaatttttttgcccagggggggggccaaaatttgaaagggggggcaggaaaatgaaacagagacgagggggccctatgaggaaaaaaacccccggtcccaaggggcggccgggggaggaagggcgagggcgggtgcgaagggggactccgccccggggggggggaacaaaaaacccggagaataagaagagcgtagactgttcggcaaggaggggagggggagagtgatctcaaagagggggcaaggtgcgcgtgagaagaggggaattgttccgggtctcgtacggcagcccacaagggaggg

SEQ ID NO: 185134 - DNA, 469 bp, Arabidopsis thaliana
aagctacgcacgcctgcaggtgccgggcacggaatacaggggtcgaccctacgcgtccgtgcacgcgtacgaatcaagcaactggatccagactatgacagtgctttcttgccttatccactatcagccaggatacacaaactggcgttttaaggcccttgaacaggtgtcgcagaagtccccgcccggaaagaatacagaatatgtttttttcaggggacgattatacacgaccgttgctaggccagtgaatgcctgagctcatcttcatgagctattggtaaaaaggggggttgttcaacagtggtggcgcctgatggcaactatgcagagccaacctttgagggacccgccatgaacacccaataagggcttagggtccagtgtgattgaggagcgcctgaacgagcttgcgaccgctccgtacaaaaacaaggccccttggggggagaaaccaggccccccgatg

SEQ ID NO: 185135 - DNA, 477 bp, Arabidopsis thaliana
gaagctacgcacgcctgcagtgagccgggatgctatacaggggtcgacctatcgcgttcgtttactgaaagcacacgatatgcattttaatcaagcaaggtttggctgtctgcgttatacacagactaatcgattccgccaacagagcggactggaggggataaaccgctataaaactatgcctgttactggaagagtaactagtgtgtctttgttcttatctgggcttgctgctctgatggaaaaggatttctgcgctaaggtagcatgtggctgaaaatctatagtatgaggcgatgtgtcctagtcgacaatgggttctcacgactacgagagcttaaccgttccaagaatgatgctctggctgagaaaagacccagacgcaatcatcaaatggaatttattcaatacagcctttcatatcttcaacccgccgcttgaggaccccaagggccctgaacgccggacctttactag

SEQ ID NO: 185136 - DNA, 528 bp, Arabidopsis thaliana
ccaggtctactctacaaaattatgggaagctactgcacgcctgcgtgaaccgggcaccctatacacgggtcgacctatctgcgttcgtttcttcttaccgtagatttcatctaactctccaataaggccacctgcgttcatggccataaataggcttagaaacgattataccgcctttacgtggttggtgatccacaaagagattacctttctgggaggaaatccatctcccctttgatgaggagtgggaacaacctgtagtcaggccactaggggagacctttatattaaattccttggaggaatggtcctctgggttcgattggagtctccccttacttgtttttgacccctgagagaattcctacccggctatgtgctatgggtacggagggaagttccacctttccctgagtgggtggatttaaggggggcacctctcatggggaacccccttataaaccttaagggagtctcccattaaagaaagaccatcccggggtttaaaaaagcacaaagggaaacccg

SEQ ID NO: 185137 - DNA, 309 bp, Arabidopsis thaliana
tccctctactgtcttacgccctgtgttaacatccctattttctcccctaattcttaacttctatcaaattcacatttattcaactttaattctctaataatagggtatcatcccgatttaatttcccaaaagaatcccccttcactatctttaacttcttaatcttacaaccctcttattctcgcctttctaaattcaaatttttttaataaaattcctgccctccacctaccattctaacttctcttttctcccctacaccttcctccttttccaatttaccttttacaaaactatttcccccccccc

SEQ ID NO: 185138 - DNA, 624 bp, Arabidopsis thaliana columbia
  unsure (1)..(624): unsure at all n locations
cccccttactcctttacctcccccccctcttttcccgccctcctcncccccccttcctcnccccttctttcttttcccccgggttagggttttaacaacccccctcccccctccccccncctcccccnccttccccctttcccctctcttccctcttttttctcctcctcccttcccccccccccccctccttttcccctctcccccccccccctttctctttccggtgttgtcacccccccccacgcccccctaaaaaaaaaccccccctcctctcctcctccttttccttctcctttccccccccttnctcctttttctctctcccctccctctctccttcctcccccctcccctcccctcctcctcccccccttctctccccctccccctttttttttttccttccccttttttcttctttcctttttctcccccccccttcttcttcttctttcttctttttcttcttcctttctttttctttcttccccccctttccctccctctctcctcccctcttttctccttcccttcctccctctttcctttctcttccccctccttcccccccctctcctccctccctccccccccccccccccccctcctccctccctctcc

SEQ ID NO: 185139 - DNA, 416 bp, Arabidopsis thaliana
ttaagacatccgaacatcatatatacacttcctggtttgccgttagcactttccccacgcaaacgcacaaagaactcatttttttcaagcgcggtgggcacaacccaaccacgaggccccaaaaaaaaaccccccgcattattatatcgcggcagtacccgtcccaccagacatacccttggtattagagattccgtactcatacacaccccaagaatcacggcgtggtatcacccagccatccaagacatctacatagcctatgctagagcgaccgcttaatcacatccttgcgatccgcttctttaaagccctttcttttcccccccaacagcgccttccgctcttcactcacaagttcgttcccctttgcccccacttacatctcccgcccacccaaacttatgtatcaataa

SEQ ID NO: 185140 - DNA, 354 bp, Arabidopsis thaliana
ttttttaagttcctcaacccttttttattaatatccccctcctttaaaaaattaacttttcccaaacaaaaaaaaccaaccaaaacttacctctaattttctttttcccaattaaaacacctccctaccaaaactctcgaaacttccaaaaaccccttttaatcaatcccttacctcactttttctctttttctttttaaaaattcacccttattctttaaaaccttaaacccctttttctaacaccgtttttttccccccatacaaattcccccacaacaactccccccccgaaaacttttttacttcaacaaaaacacttcctttccccctctttcttatttcttctctcta

SEQ ID NO: 185141 - DNA, 356 bp, Arabidopsis thaliana
tctaacccaatcttttttcccaactttaaaaaccacctttttttcttttaaaacctataatacacctctccctttctctaatgctcaaaataaacatttttaatttaaataaacccttaaaaaaccttcttccatccaccaattttaaatcacctttttttctttaacacaacatccccacttttccttttaaaattccccctcaaccctcctttaaatatttaataaaaaaaaaaaaaatttcccccccgggaactatccttttcttttcctttaaaacccactcccaacctttttttaacctcttcttaaaccccctttttaaaaattttttaaaaacacctccctcatttttt

SEQ ID NO: 185142 - DNA, 576 bp, Arabidopsis thaliana
  unsure (1)..(576): unsure at all n locations
acctcccctttttttttttttaaccctaanatatttnttatctattatacccaccctttccatacctnaccttttaatttttaaataattcaaaaacatctttcaccaaccaaacaaaagccattttaaaacataaaaataaagattttcccatttggtgacctttctctcaccttttcccaaaaaataaaatnnttcctccctccttttncccttnccacttccaataaaatttantcccttctttccccccccccacctccattaacctaaaaaacccccttcctaatttttttaaaaaaaactcctccacccccccttcnttaaaattccccttttttctcaatcccaccaanaaaccccctcccacaaaccatacctcttccccctctttttctccttttttcctccccttcccacacctctcccctttttatcaaaaatttcccnccacacctaaccaccaccatttttttcacccccccaaaatcttacccccttttcctttttttttcccccttattctcctcccccacccccctttcaccttccccccccataaattcattttctttt

SEQ ID NO: 185143 - DNA, 222 bp, Arabidopsis thaliana
  unsure (1)..(222): unsure at all n locations
ccaaaaatatttcacccacaaattgggattttctccttttttttccctccccctctctttacccccccttaaaaaaccccttttacaaccttttaaaaaatttcccaagccaaaaattctcccctttncagcctccccactcatctcttcaatccctactatgcccccacccctttttttcttttaaaaaaaaacccccccaacctctttttttttttcaaa

SEQ ID NO: 185144 - DNA, 501 bp, Arabidopsis thaliana
  unsure (1)..(501): unsure at all n locations
ggggtntaaaaaaaannnnttttttccccccacttttaatttcncatcccctcctcccatttaccttnnaaaacaaaaaaattattcctctggcgcgggggggtttnttttccactttttttttacacctttttttttttggggggaggcttaccccggggggtttacacactattccgggggggggtttttttttccctcttaaaccgccccccccatattaggtcttcccgccggcccccccgaaaaccggggcggtttttctcgccttttcccacttttcgcggggtgggggtttccctcaatacccttcccgaattgttttttttccaacaaaaacacgccgcgaattggtctctgcctttcctcaccccccctttaaccgtttttttttgaccctggcccccccgtttttctctcaaccatgttttttcgtgcaccccaagacccccgggcgtcctcccccacacacgcggccgtttccgtcttttcctttttgac

SEQ ID NO: 185145 - DNA, 575 bp, Arabidopsis thaliana
ttccagaagcccccaatacgcgccgcagcaaacacaaccaaccacccattaccccgggggaaggggacaaaacaaaacaggagacacccgccaacccaaccccgaaacgaagccaaccggcgcgcaaccgccagcaaagcgaccaagaaccagccacaagcaaccgagaagagagcgacacaagacgacgacgcaccccacaacctcttttccaccagcgagggggcgcgaccaacccacgacagcaacgcacaaaaacagacaacacacccacgcaccgccgaacaaagacgggacgagaaccaacaacaaccaaacacacagaagaaagaacgaacccagccaccggggcgcaaaaaaagcgaacaaaccaaaaaccacaccaccacccaccgaacaaaacacaccacacacacgcagcgcagcgccgaccgcgaccgcaagagggcagcacacaagacacacaccaggagggcggccaaacgcaaacccgcagaaaaaacgcaagaacaaagcaacaagggggtcgaccaaggaaagcagagcgacccagcacacggggccccgcagcaggg

SEQ ID NO: 185146 - DNA, 360 bp, Arabidopsis thaliana
ccgcgagagagaggaagcgcgacgccactcgagcgagcaacaaggcgccgcgacgaacgaccacgcagcgacggtacgcgaccgaggaaacaagcgccaccagcgcgcgcgcaggcgacacaccacacacgagttttatttgcggagggggggaggagacacagcccacgcagaccacaacagagaaaaaaagaaggccagcccggaggcagaaccgcccaccgcgcagaagacgcgcgacgataagcaaagataaccggaaagacggacacacgccgacaaggcggggacacagcgagcccgcacgaacgaagcgccgaagcaagcatccccaccaccacgcccacaccacgacgcaat

SEQ ID NO: 185147 - DNA, 527 bp, Arabidopsis thaliana columbia
  unsure (1)..(527): unsure at all n locations
ccccccccctcctcccccccccgtttttctcccccccccctcccccccccccccccctcttccccccccccccctcccctctctcccccccccccccccccccccccttctttttccccttgtctcccccccccccccgccctccccaaaaaaaaacaccccccccccccccccccctccccccccccttccccccccccccccccccccccctcctttcctcccccccccnccccccctcccctcccccctcccttctcctccccccccccccccccctcctccctccctcttctcccctcccccncccccctcctcccccccccctcctccctcccccccccctcccccccccctctcccccccccccccccccccccctcccccccccccccccccctctcccctcccccccctccccccccccccccctccccccccccccccctcccctcctcccccccccccccccccccccccgcccctcccccctttctcccccccccctcctccccccctcccccccc

SEQ ID NO: 185148 - DNA, 662 bp, Arabidopsis thaliana
  unsure (1)..(662): unsure at all n locations
agcggccccgggatttgcggcgctacaccccgcgggccagcgccgccgccggccggagccgaatttcnccacgggggggaggggggcacaaaaaaaccacccccccacaacccaccaaacaatgaaggggagggacgccggggcgaggggcccggcagcggacggcgccggggcgagcggcgacgcgccgccgggacgcggcgcgagaaacttttcttccggcggggggggggacacccacaccccccgccgcaaaaaaaaaacggcccgcccgcgggcgccgggcgccggggggagcgccaccacacacggcacggcgatcgatcgggaagccccagcggagcgaggcggcaggaggggcgggccgggcgcgcgcaccggacccccacaggaggcgacgcgagacgcggcgggcgccggcagggcaacatagcgggaggagtgacgggggcgcccgcgagcaccgcgccagggcggagggaaggacgcgagacaggaggaggatcgccgagcagcggccccgcgcgggcgcggccgccacggacgacccgcgcatagcgagcgacgccgcacacgagacggacggagggcgaggcgcgcgagagacgacggtggtcagcatggggggggggggcggcgggagggggcgagcgggggggcga

SEQ ID NO: 185149 - DNA, 124 bp, Arabidopsis thaliana
atataatatggatacgtcgccgcgcacgagagaatggtccctttgggcgcccagaccaggagtggcatagacgatccgtacattgagtatggcgggttttgtccgtagagtacggcccaggtgt

SEQ ID NO: 185150 - DNA, 444 bp, Arabidopsis thaliana
  unsure (1)..(444): unsure at all n locations
gcctgcaggtaccggnccggaattcacgggtctacccacgcgtgggaaaacccgttcggtgaaagacaattgagatgagcgagggaagaagaagatagtgatgaggacatctacgaaggatggcatgagaaagcgtttttttggcgggaaagaaggggaataggtggccaccaactctgattattaacaagaattagtagtttacgaggaggagcccccaacgaacggtggggagaaggagaaacgtttttctgaagaggaagagctcggggaaggagcgtgtttttgagatgagaaggagagagagaggcaaagacggggtggatgcgatgccaaggagggagtagtagaggagggagaaggggagggtagggggaggtgggaggcaggggggccgggaggagggggggatggggaaagagcgaggaaggcgagggtggggag

SEQ ID NO: 185151 - DNA, 540 bp, Arabidopsis thaliana
  unsure (1)..(540): unsure at all n locations
cctgcaggtaccggnccggaattnaggggttttttcaggcggggggaaaggcatnggatgaaaagaattagccggtcataggggtgtagtggggggagttataatggtgatgagtagtaagataagattgtaaagttttgattgtaaatgtattgagtaatgggggttggattggtgtgaagagggaagtggaagagggtttttttttttttggggggttgaggagaagagagaggttgtggggattatgggaaggggggaagaggggggttggaggtgaggggagagttgggaagggagagtggagggagtgtaggtgggaggagagtgagtagatagtaggggaagtggttagtgtataggagttgagtagagttaggtatagaggtaggggggtgatagtgagatggtgttaagtagtggagtgagaatgtggggcgtgtagtggtgaagagttgggtgaggagagagaggttgagtgagttaaggagttgaggtgaggagggggaaagtgggtcatggtttgggggggggaggagt

SEQ ID NO: 185152 - DNA, 235 bp, Arabidopsis thaliana
ctgcggaaccgggccggaattcccggggcgtttcacgcgggggatagtatccttttgttcttccagatttgcttgcagtgggagggtcagagccgtggccttgtttccagatccggacgtaaaatggtttagcgttgttaattaacgatggttggcgggatgagcgtgttcgtgggtgtggagatgtgggagtaaggcggagcgggggagcatttttttttactagagggggggg

SEQ ID NO: 185153 - DNA, 538 bp, Arabidopsis thaliana
gcacgcgtacgtaagcttggatcctctagagtttccggcctttttttaacccttttttttaatgaacaaaacggtagcgtattaaacagtctgaagaatttatttatatatgttttacaacaaaatggtaaaaatatgtgaatctaaaatgaacctagaagtatgaagagaacacatgaggttacgccggggtcagtaaagctatatcttttttttgacgggcggtgaaaacttagaaacgtgtggagattggtgtataaatgaatagccttcgactaggcggaaagattgtaagaactccgcgagcaaaagtgttggtgtgtgacattggggagacagattccatggagggtcagctgtgtgttgggggagaaattggtggtggtgtaatggagagtatgggcccgaagagtgttcttgtgctgtttgtggttggtggttggaacccgcgttcatgtgggtggtatggggaacagtgggacgcggtggcgtggggttgtcaggggaagccggtgagtaatggacacggcgctgtggg

SEQ ID NO: 185154 - DNA, 534 bp, Arabidopsis thaliana
  unsure (1)..(534): unsure at all n locations
gacccctangtggagggtggacgcctgcggtaccggtccggaattcccgggtcgtttcacgcgtgcgattatatctttttgccctaccaaattttcttcgaacgtgagctgagatcccttgcttcttgcagatcgatgttgagatctgtgtggtctgtaagactgggtctcaagcgaacctggggcgctggagatgtgcaagaggtcgacgtgggaaatgtgtctttcgagggggggctgggaaaagctgggcacggtggatggagggatgccatatccccggcccgtggacaagccgcggtgcgcggcggtggctggtgaggcgtggggtgcttgggcgggggtggcgtggggagccttaccgcggggaccgtcgtgtcctcgggggtgtggcgcgggggcgcggcggcgtttcccgtctttagtccaggcggcggctgcccgcggagccgggtctcccgtattcgttcgctctgccggtcccgcgcctcgggctgagcgggggagcgcgcggccgggtggcggtctctctag

SEQ ID NO: 185155 - DNA, 529 bp, Arabidopsis thaliana
  unsure (1)..(529): unsure at all n locations
cactgcaggatactggtcatggaattagaagggattttttcaacagggtgggtgtagtatgccttaagagtataaaagattaggtgtatgtttaaagtgtgatgaatgtgacgtgatagttatcgaatgatgtgccgcgcgttagttaggatatgagatatgaagggagactggagatttgctttacaagcaggatgtagtgattactgaggtataagtagagctttggtggctgagaaaaataggagggttttttctttttgacgctttttaagggcgagaaaggatgtgttatgtgagtgttattatgttattttgtttctatgtataagacattttgtggtatatgttttctttctagcatggtgttgtgtcaatttatgctnctacgacgtagtgtggtgaggattgtgttagagggaggtgtgtcctagtaattagatagttgtatttatgtggtgagtagatcagagctgtattttgtagtttttatatgttgggttgtgtaatatacggtgatgtgttatgt

SEQ ID NO: 185156 - DNA, 557 bp, Arabidopsis thaliana
cctgcaggtaccggtccggaattcccgggtcttccacgcggggggagagactataggaaaaaaagaaatgggaataaagagcaagagagagggaaagggacaaactaggaggcaaggagaatctcttaagagaagaaatgagtgtaatatttttagtaagaagaaggtatggacagagctcccctcgaaggatgttagagagggaatttcctatttttggggggtggagcaaacccaagaggtgggaggggaaagaatcgataggtgacttcttattggggcgatgccccctaagagggaaatgcagtgtactgagtgtgaggaagaggacaaaccgggaaggtgaaagaggagagtgggaggtggaaactgtggtatggggtgggaggctgttggggaatgaatgatgatgggaagaagtgggtgtaggagagaagagaactgggggggggagggggggtgtgggggtttggaaggcgaggaaggggagggtgggaagatggggggacagggaggaggtgggtggggacggaggggtgggaaggggggctgagaat

SEQ ID NO: 185157 - DNA, 357 bp, Arabidopsis thaliana
taaagaggacggcccgatgggcgccgcgacacaccgccggaggtgctaatgagacgggggtcacgatttttagttatgttctcgtgttgcacgatagtggcgcctcgaaatacctttcgctaacagaaagaaaacaatcagagtttgttgtcacaatacttatatccctactgtggagcagggtcccgacaagtaattcttgtagtccgcccatgtaccgcaagagcctgtaatcccgtcccggtacaagcagtgagtagtttaacgaggccacttgcataagtccggcgtcgcgagatgtgcggtccgccaggctcaactatatatatttcataccgccccgcggcgcgggatgaa

SEQ ID NO: 185158 - DNA, 129 bp, Arabidopsis thaliana
ctgcaggaaccggaccggaatcccgggccgttccacgcggcgcgaaaacccactaaaaagcctacaccacccgccaccgagcgagcgccacgacgacgtcgccccacagccaccacagcgaacgcacca

SEQ ID NO: 185159 - DNA, 433 bp, Arabidopsis thaliana
acgcgtacgtaagcttggatcctctagagcttccgcccttttttttaatccttttttttttttaaaaccatatacctttatcacatataagtttgtaatcaagatgatagttcgatttatctccttaaattgaggaaacctgattaattctcgctgagataaaaaccaacagtctccatcccatataataatgtccgcagggcgcccttcactacttcttcacggattaaacccaagccctctcaccttcctctttttcgattacccttatgggggaggtacctccaaaagcttcttggagccgtgtatgttaacagagcaagccccttgaacggcggcgactttgggtaaaaaaaaagaaaaatgaactgctcttaagggttgcggtcaagggaccaaattgggattccttttaggcggcgtgaagaaaccg

SEQ ID NO: 185160 - DNA, 448 bp, Arabidopsis thaliana
  unsure (1)..(448): unsure at all n locations
gcacgcgaacgtaagctcggatgctgtagattttgncgagcttttttatttcttttggagaaagggaatttatggaccgatactaatattgtactattcaacattggggaattgtggaggattgaatggtatgtgaatgagagtatgggaaagaatagggggatctgtatggagtggaaggtgaaccgcatggtttgactgataagtttttttttttttacaggggtgtattgcaggcttggagagagtaatgatgatatggaggtgaggtgaggctgctgataggttgtgcagggatggggtggagaggaggtaggtagttgagggaaaagtgatgttggaaagtggggagtgacttagggagcaggcgttaagtgtatattaaaattgtgagtaggcgggtgagatgagtgaggtcgggcagggtttaagtggtgagagtgtgagg

SEQ ID NO: 185161 - DNA, 454 bp, Arabidopsis thaliana
  unsure (1)..(454): unsure at all n locations
gcacgcgtacgaagctgggatcctntagagttggcggcttttttaattcctttaaagaaagtaaatctattgaccagactattattatatatacacaagggtacgttataagcatttatggaatgtaattagatgtgaaccacaaagagacttttgacatgaaagtggatgctgccttgagataggtttttttttagagggggaggggagtgacgggaagaagaatgtgagattggccgtctaatgttggggggaggcgtgggcaatttgaatgaagaaaagggagggggggggaggacagggggcgtatggaactttaggacctgtggggggaaggagtgggggaacaaacttgtgtggggtgggagatggacaggtgatagatgaaatggggggagggaagtgctgggtatggggaaagcgagaaatatgatggaggagaaggggcggggga

SEQ ID NO: 185162 - DNA, 412 bp, Arabidopsis thaliana
ctactcacactgattcgaccggtctagaactgagggtgatgatgagggagtaagacaagagtaatatgatgtacagcaatccctatattgttacaagcgagtgagtgcagtgttcacgttcaacactacaggagaggaatctatgattgcacacacggcgtcaccacacagcgccacctgaccgaataattctgcgctgtcactatcgtggtgaacaacatcgcttgtggatagagtaggggtgggtcccgacccgccttggagattagagtgcggtcatactttcagattcccacccagacggggcgcagcgcgcgcgtaagggcgcacgccggcgcgggaagggtcatgtagttgggtccccggcgcgagtagcctttagccaactatcgtaagtgtaccccctccaccg

SEQ ID NO: 185163 - DNA, 464 bp, Arabidopsis thaliana
  unsure (1)..(464): unsure at all n locations
ccccgtacctatcccccgctgttgatttttatgtttttaatagtaacaatataatcatggaatgataaaatagagccggtgaggggttataaagtatgtattaaagtgagtttgattgatatacgccgctgtgattggagtgagagcgtgtgtcgtggagagattggagctccacaccgtcgtccgctgtagcgtttaggtaatcagtcggaggcgaaagttgtggaggtaggcacgtgagtatgcggcttgaagctggattaagctaggaaagcatagaggattctgcagccctatcaaggttggataagatccatcgatgtacattataacatagatcggtagagatttttattatgttctggcagatccattgangtgtgtccatcacgaggttcggtgcgtttatatgctgctagagataatgggcccagcgccatggttcgagtatataagcggatgag

SEQ ID NO: 185164 - DNA, 185 bp, Arabidopsis thaliana
gcgagcacctcatgacggagaagactatatgatgagtacatcccatgacgtgcgacactgattcccgatgaggtctcatgatagagaagaggccgcccatacaatgttaggctgtgtcgacggaggaggtgttttcccaggcctcgtctatagcgaccgcggagagatataaatccactcagatg

SEQ ID NO: 185165 - DNA, 512 bp, Arabidopsis thaliana
  unsure (1)..(512): unsure at all n locations
gcacgcgtacgtaagcttggatcctctagagttgncgccctttttttattctttttatattaccgtgatacatattccgaaggaaaaaaaaacaagataatacatattgcggattttttctgtacatattgaaacctggagttacaaactgtgtgttttttgtgtcatcaggccagacgatggcaaccggaaaaatatttttttttatcggggggaggaggggagatgaagtaagggactatagcgccgatgtgggcgcccaagtggcaactggaatgggtgtggcgcttgagaatttaggattttgaactaatgtgctcagatgggtgtagaggaagcgtgaggaggggtccatggaggaggaagtgggagagagcgtacggaggaaggtagagatggcggggaaaaggatggaaggagaagggagagatgagaacggtgatttgtaacacgataggagaaagggtggtatcgggtggaggggtaactaggaggaacagagagagttagaa

SEQ ID NO: 185166 - DNA, 184 bp, Arabidopsis thaliana
  unsure (1)..(184): unsure at all n locations
ctgaggaagagaattttaggagaggaacccgccgcggcntcgagggaaagttcggggggctgtaggagatagatgtagaacacaaagaatacaccgaggatgagagcaaggtagcggaacgcagccgcacagaaggaaaagcgcacagagagagcagcagcgcggcagataataaaaagcggag

SEQ ID NO: 185167 - DNA, 357 bp, Arabidopsis thaliana
  unsure (1)..(357): unsure at all n locations
tgatcctcagcgctacacgactcactataggaagctgtacgcctgcagtaccgtcccgatnccgggtcgaccaccgtccggcccgnagggccagctttctnaccgnacttctttgaaaagcttttgtcttagggggcctttactaatgggcttaacccgggaccccctttgggggctgtgggttggacttaaaaaggggggtttttggccctttcccaaatctcaaatgggaaaaaaagtgttcccctttaaaaaagccaacaggggggggaaaaaaaaaaaaattttttttttcccggggggaggcccaaaaagggggggggaatttattatttttttaaaaaaaaaccccccccc

SEQ ID NO: 185168 - DNA, 163 bp, Arabidopsis thaliana
ggtgataaaaaggcaaagagacaggtatatgacgtgagctcgcgccagaaagcaaacgaaggaagagaagttagcgcggtggaccccgccggtgggataataactcgcgggtgcatgagaggagggggagacgaaatggagtagaacgtgagtgggggaggct

SEQ ID NO: 185169 - DNA, 458 bp, Arabidopsis thaliana
  unsure (1)..(458): unsure at all n locations
aaccggnccggaattcccgggtcgtcccacagggggcgcactctttctaataacaacaaccccccccagaaggggaaaatcaaaaccacaaacacactcgacgcccaaaagacgacaagcggaagggttttgcaccgacacacgaggggcagggcacggagaggaagacgacggacggaaaccaaaactctcctcataacagggggggggagcaagaaaacgcgagaccacttttttacaaaaaaacccccccggagggtggacgcgggtggaaacaacaccatcgtataaaaagagagggggcgcagagagggcccgccaggggggcgcccggcgcggcgggatcgacaggacagcgaggggcgggacggggggccggagaggggcgggggagcgagagtgaggcggccgctgaggaggcgggagacgcgcgggcggagaaacacgcacagagcgcg

SEQ ID NO: 185170 - DNA, 238 bp, Arabidopsis thaliana
cgtcgcccacacaatctcaccctgctgggtcggtgaaagactccatgacacagtatgtatcacattttgcagcgtgttgaagggttgtaccgacgagtaacacacttcagcgtacgaaccatatatgaccatacacagtgtgtggtgcgcgagatgatcgatcatgtgtaggccacatctctattccacccgcacacttggaaaaatcacccggtctcgtccgcgctcattccgcgtt

SEQ ID NO: 185171 - DNA, 282 bp, Arabidopsis thaliana
aagaggtgggaggtttttttttaaagagaacccccccgcggtttgggtcggcgcgcccccccccggtaaaaaggtgccccgcgagaacgcgggcgaggccggggagatccacagcaaggccgtgcggggccaccgcaagccccaagagggccgccggcagtgccgccgccgctaggccgaggcggcggagcggagccgaggcgccggggctggcaaagccccggaggggcggacccccagaagacgcgggcacgtggcgcgagcgccgccgcaggcgggaaa

SEQ ID NO: 185172 - DNA, 480 bp, Arabidopsis thaliana
  unsure (1)..(480): unsure at all n locations
gacgcgtacgtaagcttggatcctctagagctttcgcgcgtggtataaacctatatttaggttattacagggtacgagaggggaggcaggacgattgggtgttgcccagactgagggagatgcgagcggaaggttgtttagggataggcgaacgcggtgagggctgtgggggccgacaacgacgacgaacgcccatttcctcatttggggggtcaccagaaggcggaggggagagacagggagagaaggagggtcccggngccggcggagagcaagagagggagcgggtgccgcgggggggggagggggagggggagagaggtgagggaggggcgtagagggccgagaaggtactggcacgatggaggagacgtgggcacaggccgcgccgcgacgcggaaagaaggcaggaagaggctatgccacgcacagagacgagtacatataatgtgacacgccgcgacggcggggtggagatcg

SEQ ID NO: 185173 - DNA, 410 bp, Arabidopsis thaliana
ccgcgtcagaagcttggatcctctagagctgtacgggggggggaaaactttttataaaaccgaaatacatctcccgaaggggaaaaataacatgaggtgacatggtgctgtcgtttgtttcgcctaggacactgagatgctttttactctacgaaccgagggtgagttgttgtcgttggggtggtgggagggggggggcggcgagagagcgaggtttgggtcgtttttggggggggggggggggcgacgcgcgcgggggggggtttttttttgtgtgagggcgccccctgagcaagtggtgggggtgggtgggagcccggcgcggtagagagtgaggggggcgggacgcgggagattgatggggtcggagcgggggtggcgcggggtcgggcatgcggtgggtgggtccg

SEQ ID NO: 185174 - DNA, 364 bp, Arabidopsis thaliana
  unsure (1)..(364): unsure at all n locations
cccccaagggggagaancacaaaaacccaaagagccgctcgaaacgacgaagaacagcacaccgggtcttggaagaaccaacgcccaacagagggccgaacacgaggacagggcccaacccaacaaacccctacattcgggagttgggcaccaaaaaaacaggcgcgcccttttttaacaaaaccccccccaggtggggggcgggggggccccccccccccaaaaaacaccaccgcccccaagccgaccacgggggccggcgcgggaaacaaaaatacgccgggcagagccacatccccgacggccaggagacgcagaccacgacccagaggggcccacgccagcgagcccaagcctcccgccc

SEQ ID NO: 185175 - DNA, 483 bp, Arabidopsis thaliana
  unsure (1)..(483): unsure at all n locations
gcacgcgncgtagnttggatatntagagttgacgggtttttaaaactttttgtggggggcggaggggcccgtgggggcgggatccgcgggaatggtttggcgcgggggtaggtggtcgtgcggccgtttgtgggtcgagttggggggggcggcgggcggggggggtggggggacgacccacgggtttttttttttggggggggggggggcggggcgggggtggggggcgggggcttggtggccttgcggggtgggggcgcgtggtgcgtgtgtggcggtgcgggtgggggggccggggtggggggggggcgtgggggggggggtttttgtttggagtcggagtgggtggtggccccgggcgtggttggctccccctccggaaggggcgcgcggcgccgcgggacgccgctggtaaggcatcttgtggggagaggagtggggggacgaagggagggaaggggagggtgtgttgaggggtggggg

SEQ ID NO: 185176 - DNA, 110 bp, Arabidopsis thaliana
gagtcactatagtcgaaagccggcgctcgctgtcggtccatactacgcgatcatttgattctgggtacagctgccccgtacagcaaggttacgttgagctatttcctgta

SEQ ID NO: 185177 - DNA, 215 bp, Arabidopsis thaliana
actaactatagtggaaagctggtactcctgcaggtaccggtccagaattcctcgcgtcaacctccgcagtctcaatgattccgtgacagtgagacctcaaagatgaggaaggacactagaagacctgagcccaagaggcacgagcaatggatggttcggggagcttttgccaagaagaatggtaacccgcagagaagcgcgtaatagcggggaag

SEQ ID NO: 185178 - DNA, 591 bp, Arabidopsis thaliana
  unsure (1)..(591): unsure at all n locations
cgggaggaggagggaggcagagagagaaggcagaagaggagaggcaattgaggggaatcttggggggagcttattatagggagaagaaccgggggcgaagcaggaagctgagaccaggaaagagccaggagacggaccccagtcaggaacgagccagcagtggagaggaacggagagggaggagagtgagtaggacggcgaggggaaagaaaagaagacggaagcaagaggaagggagaaagaagagtcgaagagggaggaggagagaggaggagggaagtaaacggggagggaggctattttataatatttagagggagaggagagggagaagagtagaaagaagacgagggggagagggtgaagaccccccccccccccccggcgtgacagaagagtgaagtataggagaagaaagaggagaagagaagagagagaggggaaggngagcagaggagggagagagatggaggaagagaagagagcgagcaaagaggcaggacggagagagaggagggcagagagaggaggaaaggagagaagaagaagaggagcacaagaagcaccaggatagacgacgtgcacggagag

SEQ ID NO: 185179 - DNA, 234 bp, Arabidopsis thaliana
agggacggagatggtgaaggagtagagaaagagaggagagcggagaatcattgggggggcttgctagtaggggagatttataggggtgaaacttgtagatcgagatgtagatattattatgatggaggaggaggcccttgagtagagaagagaagcaggttttgagagtagtgtgttagttagaagatttagatggagagtttagatagcgagaagatagttttttcttaggag

SEQ ID NO: 185180 - DNA, 499 bp, Arabidopsis thaliana
tgcgtggtgaggcgagaagggaaggtggctgagcgcggggtgctttcttgtgggccggcttgatttgattccctagccgccaaacacttagttaggcaggggtcgacctacccttcagagtcaataggagtaagccgagcgcaatgcggtggagagagtggagagacccggcaagtgcaagtgaaatatggagatgcagaaagactgagtggagggtgagtagatgcagagacagaccgcggaaacgaaagtcgctaaggttttctgcaaaagcatcgagagaacaagcactataatgatgatgttcaacgctgagtggccgcgacgtcaacgtaatcccgcccgcgttaatatgtccagtcgactacaagataggcctcgcactacgtgtgttcagtcaacttaagaagagtaaatgaggatacacgctggtccaagcgcataatcaataggccggatattgcgcgagcgtaaagccaggaacgcgagacttcgctcg

SEQ ID NO: 185181 - DNA, 567 bp, Arabidopsis thaliana
gggcgcttcggggggagaatttggggggaaaaaaccgagccagcgaagaaaagggcggcaggtgacaaaaaatagaaattgcgacggccagagaacgggtggggggggctgggagagcgaagaggacgcgcgaggaggaggaaccagcgcagagaagaatacgagagccaggacaggcgagatacgcacgtagcgggccgtcgacaggaagagagcatgggagggtgtagagggagcgtcgcgatgggagcgcgcgggacgcgacgcggcggcagacggcgaatgatccccccggagaagcgaccacgacgcggaagaaccacggtcccgtacccggcacggggaagtagcagagaaagtaggaagataagaagtgacaaggagcgctagcgtagccaaaagacggagagaggacggacgaaaacgggaccgacgaggtcagcgcgtaacgaaacgcaaaggggaagctgtaaagccgaggatagcgagaagtgtgggggggagacggagagggtagaaggcagaggcaaagggacgcgagaagaggcgcagataaacaccgagaag

SEQ ID NO: 185182 - DNA, 424 bp, Arabidopsis thaliana
gaccgccggcagccacattacgcgggatcgagcaagtccgaagtcctactaggtaaatgagcgctggcgtcgaaataacgactgagcccagtactcccgggaagcttgagagcggggactccgccagaggatgacggtgcagattaaccgagttgggatagtggagattatttgagcgttcgacggcacgatcgctctatattctcttttcattggtggcacgacagttaataggtaacgggctcaaacgtaagtgacacgcgcatatgcatctcatgccccctgagagtctcatacataaaatgactttcgatgaggagcacgtacaggccatcataggttgcacgtaggcacgtcgctctccacgttgacccggcgcgaacgtgcgtggaactgagctgacacgctccggtagtaagcaaga

SEQ ID NO: 185183 - DNA, 630 bp, Arabidopsis thaliana
ggagttccttatatgtagatcttagtggggggattttttgtgggtcttctggatttaaatttttggcttgatagcagctgtcattgtgtggggccatactgcgtgtatcttttttgttatggtcgcttctgagttcgctatttgcgaacattgatatgttcattctatacttattatatgagttcgtgtgtattttctactgtctttagttcttttgtagtcgttctgtcttagtcgttctctatttttatttgttcgagattaatgactagttattttttttatgtttatgtatgattgtgtgaattagtttttgagagtgattatgtttttttgcttactcgtattttatgtatcgttgtagtattttcatatactttcttagtcattatactggtacttagatttcgttctttgtcttagtttttctgctatgtagctacctattactatgcgttttcttttattttttcgtttttatttattttgtcttctgttgttgttttttttgttttttcagatgtgttcttgtttatattctgcgtttagtttgttgttatgagtgttttttgttttattgttttctttcttgtttatcctgttttttgtttattattattattaagttat

SEQ ID NO: 185184 - DNA, 446 bp, Arabidopsis thaliana
gccgcgtacgaagcttggacctctagagcgtgcgcctttggaaatcttttggaagaacaagcaggagttgctaggatgaacaccaggaagatgatgtgaagacagagaaggatagtggccattgtttgactgaagagacagaaaccgaggcgcaggagagcggggcaaaaggggcaaaatttttttgttggggggggggaagaagcgcggaggaagcggagagggaggaagaaccgtagaggcgtggaaacgcgggacaggtgggatgaagtgggggaggaaaggaaagcggcgagagggggggggcgagccaaaggcgagaaaggggagggggggagggaggacggagggcagaagggcggaaagggagaggcgagaggggaaagacggggaggaaaggagaagcgaggagagggggcgagcgagcgaggggaggggcggggggg

SEQ ID NO: 185185 - DNA, 126 bp, Arabidopsis thaliana
aaggaacggcgaacggcgcggatcttttcttgaggcccccactgtagaatcttctcatggactctcaccatgccacgctaaccatgaggccttcggctgcccctcagagcaggcccgctcctttca

SEQ ID NO: 185186 - DNA, 346 bp, Arabidopsis thaliana
ggggcctccttagaatattatggatgaacttgccgcggcgtaagctggactttggagggccgccttgtttttttttttggagcagagggtgttcaggattctgggtaattctgcgatgtgctattttggtgggttgggtagatgagacctcttcagaagcgggaaaagaggagagattgagtgcttcggaacggggactctgttgttgtggtagagacaagtctgtgcggtctgacgtttatagttgcttagggctgatgtgctagaaccagagggttatgtattctctatgagtagtttttctccaaggaggagaggtgtggagagaggggggctggatccagtg

SEQ ID NO: 185187 - DNA, 559 bp, Arabidopsis thaliana
ctatgaagaatttggcgagcctgcccccgcctaagcatggatcctctagaagcgggccgcccttagttttattttttcgggaggagaagtggatagcgcacggcactgagggaactggcaacagcggaagcgagatgttcacggagatcccgcagagacatcaccacagatccataacaacgagggagagagaaagatgaagatcacagaaatcgcacagtccgttaacagagttaaagagttagatgagtccagagcagctactgtataaaataggagttaagctttgcaagagacaaatggatgaggggctgtggagagaacaacacgcagaggaagagaacgaaaagtctaggtaagaagactggcgtttttcgcagatgaaggtgcgtgctgttcaacagactacgaagtacgcagaaagaagtattgtcagagaagggcagaagaagagagaataacgagaagggtggcgacctggcatatgagagaggacgcaaggacatagagaatcatggcgggcgtggcgggagagcaagaagatgagatccatcacagg

SEQ ID NO: 185188 - DNA, 687 bp, Arabidopsis thaliana
  unsure (1)..(687): unsure at all n locations
agaaaagacagagagacgaaggagnagagggagagggagcgggggacaataaggggaggaccttactataaggaagaatttagggggggaaaacttgaggagcagtacgaagagaattattttgctagaagagggagaccccgcgaagaagaagagaagaggtgtattagagaggagaggaagtggagagatacacaggcagaggctgagaagcgagcgagagggagataaatggtaggagagaagagagaagagatgacgaggaaggaggcagcgggcgatgagagagcagaggaggagaagaaggagagagacagaagaagcagaagaagagcaaggaatagagagaattgaatgagagcagagtagaagatagaagcgcgtaggagaggagagagggagagagtaagcgagcagggggtagagggacggagacagaggagagagggcagtgaggagaggggagggagaggaggaagagaagatgagagagagagaggaaagagagaaagaaagaagatagggagaaacagaagagaaagaaggagagatgtgagaggaagaagaccgaggagtggntgcagtatgggaggatagatgagaagagagaaaagattaaagaggaagagaaacaagcacagcagaaagaggaggatgaagagcgccggtggtgagggagaagaaaag

SEQ ID NO: 185189 - DNA, 491 bp, Arabidopsis thaliana
tcccttgttatgacccctcctatgaccgccttctcgatcctactccgcgtatttcgtttactcccctatgtctctctgtcttctaccattgtcctttttctccgcctccgctctctccttcgaatctctcattcgatcccggtcgtcttttattttttttttttattacttcgtcacggttcgcatactgcagacatatgtgtaataaattctcccctccccccctccctcctacctatggtatgttattttttctcctgtcttccgtcccctctgcagcgcccgctcccgcatcccccatcctttctcctctctccttcgcccctctgatattttctttgcttcctcctccccctcgctatgtcatctctcctcctgtcttcttcttactctctctcattcgtcttcagctccccctcctcaccatctcccgtcacgctcctcctaccttccgcttccccgattcgtactcccgtttgcttttttcgttt

SEQ ID NO: 185190 - DNA, 412 bp, Arabidopsis thaliana
aggaccgagcccggaggaaaaccaagacacaggggggagacgagcacgagcgaaagagggagacagcgcgacagaagcagagcagagagagcattataattacgataaagagggcgcaggcatgagcaggagagatgtcgagagagcgaccaaagataaatagtgtgtggaggtagcacagaagaaggcggataaaagatggagacggggcggcaggatcagcacgagatcagagtagaaggcggggctacattaagaacagaaagaaaacagacggaggcgcgacaataaacaagcactagaaagaacagacgagaacgaatagagaggcttgatagacctttaatggccacgagatacgtagagcgcaacctatgagatcaaaagctctacgtacgacgcagcgaccagc

SEQ ID NO: 185191 - DNA, 657 bp, Arabidopsis thaliana
  unsure (1)..(657): unsure at all n locations
cgcggagggaaagatatgaggggaggaaaaaccccagaccacaggggaggaagcgaggagaaaaccgggaaaagaggcagaagcgcaagtagagaagagccagcacccgcgcaagcacgataaccgagtagacaaccgcgcaggcgcgatggcgagcggacacgagggcgagatgggaagacgagcaggcggaacaggagtgagggaaggagcagacaagacagagacgaagcacgagacgaagaggagcagaagagcaacggccgcaggaacgaaaggcgcaggcacaccgaacacgcgcaccaccaggccgcaaaagagcgcgcgcgacgaagacagagcatcaaggaaacgggagaacagacaacgaggaaaaagagagagacaagagcacgcgggaacagcagagagaacacagacagggagacagacggcaggcgcgaagaggagggcgagcccagcggagacggaccggggaaaagaggagaccgcaaggcgcaccaaagaaacacgaggccggganaaagagccagcgggcacgggagagaaagacgggcccgaagcgcgacaagcaccctagccgccgcgccacaccaggcacatgccaaaccagaagcccgagcggaggagagacgagacgagagaggagaacgaccg

SEQ ID NO: 185192 - DNA, 557 bp, Arabidopsis thaliana
ggggtttgccttggaggcccaagaaaccaagcgaaagcgggcggggcgcggacggcggctcgagcacactaaagagcgggcggcgcggaaccgcactgcgcgcataccgcagggaggcacggtgtcacacgccagtaggaagacacacaaacagactacgggcagggcgccacggtcggagggacagtgtagttcgctacgcatagccgagaagcacgagcgcagccgcgcggcgcccgggtacaccactcccagagaacggcgcgcccgaaagccaccgcaccgcgcaggacgaggtgggagaggcgacaaagtccgggacgcccggcgaaaggagaggcggggcaacaggacgcgttagaggcgggccaaggagtggaagcaggcgtatggacaaggtgtaagggagcactcgaacgccgggggggagggaacgataaaacggcacaatcgcggagagggagagacgtagatcgccggtaggtaggggctttatgcaataagcaccgaagagatgtaatgtgcagacgggcgaggacgcgcggggccgagaccgg

SEQ ID NO: 185193 - DNA, 488 bp, Arabidopsis thaliana
accgcccgacgcggggtaaagtgacaaatggcaccgggcattggggggctctaataaaggaatcttgggggggagctggacgcatatgcagtatgggacatcagagaggaaagaggtgctggcgatcgacggagatacgacatacgtctcttgaagtccttgcatacagggcgactaagaggccgacaccgcgatgaacgtttacttggcgcagggagacagatgacgagcgggacggagtagcgacgaatcgagcagtatcggctcgacgctcactcgcgcacgccacccgcgcaacccggatacgagtggactgtgcagacctctgtcgcgtggagtgcactcttggtcgaagtcgcgagcggtgccgcgcacggcgatgcggttagaaacccacgcgcaattcgtagtactgcgtcggggccggctgagcggagcgcgcgtaagacttgcctgggatgatgacgatagcacgtaccgtggacgac

SEQ ID NO: 185194 - DNA, 466 bp, Arabidopsis thaliana
  unsure (1)..(466): unsure at all n locations
caaaaaannnccgcccccaccggggggcaccacacgggggagggggagaggaagggaagacggaggcagggttttttcaggaagagccgagagagagggccaacgcgcggagcgccgaccacaaccacagcacccgccgaccttttcgtggcttttaggggggggggcggacacagaaaggagagacccgtttttttaaaaaaaaccccccccagagggaggggggagcggaaccccccccggaaagaaaggaggcgcccgaagagacgcaccgacgagaaggccccgcgcgcccacacacacgacgagacgacagagaccaccagcaacacagacagcccgcgagcagagccgacgagagaagaagcgccgaggaggaccggagcgccagacgccccggacccacgacaccggaaaagacacggcgcgacagacacgggccgcaccacagggcgagaagcgacgg

SEQ ID NO: 185195 - DNA, 482 bp, Arabidopsis thaliana
gcacgcgtacgtaagcttggatcctgtagagtgtccgccctttggttaatctttttggtttgttattatagaagtcttctcggcggacacgggacctcccgtgcgtgcagcggagctggccagctatgagaggcacctttctcaacttacacatcgtattgcggctgcgtgcgcggccggcgcgaccgcgagaacaaaatcttctactttatgggggggggcccgccaggggagggggggggcaggaaaaggcacccccacaggaggatgtgccgaggcccgcctggttgctaggtcgacggcgcgcggactgcagcgggggccggatgctaacgtcgaggtggaggcggcgtcgggcatagggcgacgtaggtggaggtgggaggaggggagcatggagcggcgcgcaggccgcgccccgagggccacgtgagcggggaagggaagtcggggtacggatttgtggcgcgcagcacgccccc

SEQ ID NO: 185196 - DNA, 311 bp, Arabidopsis thaliana
  unsure (1)..(311): unsure at all n locations
cgcctgcaggtaccggnccggaattcccttttcgacccacgcgtaaccctaaaacgccctgactagtgaagaatccgatcgaatcgacggctctgtcagagattgaacccaggtgctcactttcgggtcccgaaagatatggctggctggggaacagtacgagccttattgtcccatggcgggggcaaacggaggattttttttttttgatagggggggggtcaccgccgaactccatggctaggtgagggagtaggaagcccccgcggtgtgggagacctccttaggttcgggtcgagttgagggtgcag

SEQ ID NO: 185197 - DNA, 216 bp, Arabidopsis thaliana
gatactcgatcgcgggatacacaggcgtcggagccgatgcagtgccgaaataatgcgcagtgataagtgacacgctgtagtacgatgcaagtaaattagtcgcacatgtactcgatgggcgcgcgagggagaggggtgcatctaagaaggttgtaagagggagttgaatataggcgcgccggagagggaatgggtgggaggagagggggctaagct

SEQ ID NO: 185198 - DNA, 232 bp, Arabidopsis thaliana
gaattccgggggtaagatccagggaacgcccaatcatgaccgttcgcaggtggacattctggtatgagataagtactctaaaagatctgtgactcacgcaagagagtaaaatgagggaggcagtaaaagatctctaataacagataaaaaaaagcacctacaaatataactcgtgaaacatcgaaagaagcctgtgcgcatacagaaagcattagtagcggattggagagtg

SEQ ID NO: 185199 - DNA, 454 bp, Arabidopsis thaliana
  unsure (1)..(454): unsure at all n locations
tcctaagggtcgagccggacacggagaggccgggactttcaggaatctcagggcacttctttgggggaaaatatccgagacgccaactaggtgtccaagaattgagaagatccagtgtctagaccttcgcttagcgagcgtggtaaggagaaatagcctgcgagacgtgttccataggccggctaggaaagttgcgtccgcgagacgcgcgacgtggaccgaacgagcataccccgtactccgccgcacagagtggacagagcaaatactcatactacagcgaccaggggcggcgctctctctttattttntttagcggcagacggcgaggaagagaagtagagaagggcagatttggcaggaggatgaggcccccccctctcccccgccatgagaggagagagaatgaatgaagcaggatgcacaagacacgcagcagcgacgatacacgcag

SEQ ID NO: 185200 - DNA, 602 bp, Arabidopsis thaliana
tcggagataagagatggaaggttgttttctggcggcccctcagaggaaatcatttagagggagaagcctggcgacgcccggcgtgttacacggcccagacattcctagggtgggagcatgggtcgaccggcatgggtaggcattttagtcagcgctgctgctgtgtattatgtctctgatgtcagtccccgtgcgattgcagtcttgagctggagtgtactacccgcctgacggcgtcggagtatatgcagggccttgccttgcacgcgatcatgtccgcacaacttgctaaatatctgattagaaagctctctcatgagctcgagattgaccgcgtgcatcgtaagtgccagagcgtcgacatgagccaaggagtaacgcgagtagactgtgggtctagttatttacctccttagtcgtacggagtcaggcgctttcacgtgctgccatccaccctggttatatataattgcgtcaaacccggaactcagggtaattcagatgatcacttatgaggagcaacgacggctccgcgtgagtgtaggtcatcgctcttctatggccacatggcggtattagcgtacacctaagagctgtatgtg

SEQ ID NO: 185201 - DNA, 382 bp, Arabidopsis thaliana
ggagtgggatgtggtgcaaaggaggagggtgggagccgcgggggggagagattattgcataggctcgtgacctagagtactatatggttggagagtctggcactctcgtgcgtgctactcggcccgagaattaccggagcatccactccactgcttcccgcaatctattctcgttacatggatgctctttaagtatagagttaatgttatgtaatatcattctagctctacattgagagagcatgggatgaggagagctatcgaggactcctatgtaccatgataataatattgagttacagatagttcctacacatctatatcaaaggagatgcagggcgtcaaagtgaatgacttggtatcggcgctagtgcataggatc

SEQ ID NO: 185202 - DNA, 402 bp, Arabidopsis thaliana
  unsure (1)..(402): unsure at all n locations
agaagaagaagacgattgagcccgaaggaagagacgagggggggcgcggggggaaataattggagggaccttcctatggggggagaatttagagagggagaaaacagacggagcgagttagataggagaaataatatggatagagagagaggatgcacccagcagggcaagggagagatgcagacatataacaaaaggagaggaaggaggaaatagagacatcagaagaaacagaaagagcagcaagaacgtgcgagcgaatagagaatggagcacggnacccagagtagcagaaggagaggagaaagaagagagaggaggagcgcagcagtggaacagcgcgagacagagagacgaagagagcagagtaagagcgagaggtagcagacaacgagccgagga

SEQ ID NO: 185203 - DNA, 364 bp, Arabidopsis thaliana
agtttaaggctgaatttcgggacgggttagctgggttccgagtcttggagtttgtattatccagagccacgcttgtttagtctatgtgtgatggttctcagatattaatccgatgtttagggttgtatagtgattctgtcaatttctctccgctgagtgacagtggtatgtgagaagctaccgtggagacgatgtagtatctattacggagggaggcggctttgttttttgtatttttggtggtcgtcgatttcatgttcttggtggcgagagtcgtgcgtaggagtacgtcccctccccctcttcttgcaggatttgatattattttaattatttatgttatactttctcatgcgcatcgttc

SEQ ID NO: 185204 - DNA, 340 bp, Arabidopsis thaliana
agctacagatacagctaagatatagatcaagaagcgacggtagttaaatgcacttcgaagccgaacactgtgcgcattgagagtgtactcacgtacagagaggacgtccactataatatgtataatagagggagcgcatacactaggaatccgagtccgtatgagtgcgaaggagtgcatagagcttagtgagcgataagagagaccaatcttgccataagaaacgaatactgattatgaaagatacttccgacggacgaagaatggaagtgcggatgtaacgagcgacgggtttgtttacgtgtttagtagaagcctttagcacacttatagtctgata

SEQ ID NO: 185205 - DNA, 245 bp, Arabidopsis thaliana
  unsure (1)..(245): unsure at all n locations
gttgtaaggctggggcaacggacaaacgggagggggccacatcctggggggactngcgggagggcattttagggggggagaccctcggacccaccagggctcacgagggcacaggatccgttacagtcggtcgccaacataagccaggagacggcgcacgaatgttgaaggcgaggaaactggcgaacgatgagaatgataggaaacgcaagagtactctggacgagaagcgggcgaaataccaa

SEQ ID NO: 185206 - DNA, 386 bp, Arabidopsis thaliana
gggtttttacgtttcgagaaacgtcaaaagaggggagcgtaatctggggggctcctaagagggattttgggggggaacctctgtcgcggacggagcaatacacgccataaaaagctatgagtacgtggagatggccacgctgaagtagtgtgaaggtgtgtgcgagtgtacataattaatagggtatgtattgcgtaagtaaacattagtgaataatactatcaagtcgcatttagaaaattatgaacgtgtaaaggtagtaaattgtttaagagcttaattcgacgtaacattatgttctatatggttagagggttgggcggggcgtatggcgagactagttaagttttaaagatatgtggctattattaacacggacgaatgtt

SEQ ID NO: 185207 - DNA, 164 bp, Arabidopsis thaliana
ccaggaggacgttcgggatagagaagcagtagcaaggaggaagtaagggacttatatttatcagtcaagcgcaatgagggactacgtgcactatccagctgttgaaccccgctgagccataaaccccgcggagggtgatccgtcggaagtcaacacagaggagc

SEQ ID NO: 185208 - DNA, 517 bp, Arabidopsis thaliana
  unsure (1)..(517): unsure at all n locations
agaagagctatgttgttgcatgcacgcgcacgcaagctnggancctctagagcggttgnccnggngannaaaccccgaaagcaaagggaaggcacccccgagggagggagcggaacacagaggggggcgaggccgaaaaaagcggagggagcgacacccgaccgcggcggcgcggggcccagcgcagagaccccgaacgcggcgaccagccccgcgtttttttgaggggggagggaaagaagcgccggggggaggggggacaagcccgacagcgccaaacgggaggaagccccccgccacagacgcccaaaaaaaacgcgggggccccagagaaacgagaccgatcccggaccgagcgaacccacccgcgccgcccccacgggggagaacccaacgacgccggagagggaccgagaagaacccgccagacggggaggagcgggagggaggaaacgcgagcccagagaagcgtccgcccggacggagaaaggcgaggacgccaccgcagcgaagcggg

SEQ ID NO: 185209 - DNA, 405 bp, Arabidopsis thaliana
gatacgccagctctattctgactcactactgggaaagctgcgcacgcctgcaggtagccgggacggaattcccgggttgacccacgcgtccagggcctcggccgatattaagatttttaaggaggtggggggggaacaaagagtagaaaaaagaggacaaacaatctgacgcgtttcacgaataagaaaatcctgcccgttccccaacattttttttatatttatcacccccaaaccatcccttattctttccggggctaaccattaccgataaacccgtagccgcgtcgcccggccaccacgaatcggatgaataagtagttaccggcgcaatctcataacgtgcccctatagtgtaataatacccacctgacataatatttactccccgcatatttatcatca

SEQ ID NO: 185210 - DNA, 378 bp, Arabidopsis thaliana
aaacaccgagcgcgaggggtggggaggccgcagacagagaggaccgcgaaggcggcagagagaaggccggggagcagggcgggccttttctgtagaggtgccgagcaagagaaaaacaacaacacacctatacgccagtcggccaaccgcggcagggcagcagtacccacggagaagaacgcaagagcgcgaagaaggacgggtagatgacccgctccgaagcaaagcagcagcgcccccacagctcgtaggttagaagcgacaacaagagagagagggagtatggcgggcacctatacggctaaagcaagacgaggagagaagtgacccaacacgagaaatatcagaccaggagagcagataagagcgaaaccgaag

SEQ ID NO: 185211 - DNA, 478 bp, Arabidopsis thaliana
  unsure (1)..(478): unsure at all n locations
ccggggggccgaacccccaccaaaaaagaaaaaaaccgggggggggggggaaaaaaagagaagagaacaaagaaaccgcagagggccgcgggggcgcgcgggaggaaanccccccccgaagccggccagaaaaggaagggagggccgcccgacccagctttgtcttttgcggttggcagggagcgaggagcccaatggccgacgcgaagagccccgagtggagagagcggggcagaggcaaccgcaacacctagcctgacccctgagtctgatatggcgggcccgagggcgggataatgggttcccgcgtggaaggctcgtgagcccggccgctctgtatgtggtgttatgcggggatgccgatttagcgggtacggcctcggcgaaccggcggcgggtgcggcggtggagggagttggtggcgtgaggataggtgtagtggagtgaggagggtcggggtggggggtgcgagtggaat

SEQ ID NO: 185212 - DNA, 586 bp, Arabidopsis thaliana
agcccccgattgtcccacaaaaaaagagaagaatagtagcgccaggctgtattatgactcactactggtgaaagctgcgccgcctgcaggaaccgggccggaatacccgggttgacccacgcgtccgtatcataaacgcaaaatcgcaagagagaccttgtgcgacatcatttttaagatgaagagacaccccccaccgattgccaattgggctccccattggctaaacctgccccccaccccccatttcggatacccaacacccccgccgaccaagccctttttttgttcggaagggaggacctccctatgacccaatggggacatgcaaaggagaagttaacgcaggaaccccgcgcaacaccccccacatcaccttccacccccagaaactataaatccctgcaccctaaaccttttttttctttcccccattttatcgtcgccgcccccccgctcgcaattagaccctccccactcccactttatgcggtcgcccatccgagttgcacgatcaccacccccgtctagttgttataccccatacctaaaaatacatccgccaaagcgaatttctaccgccacc

SEQ ID NO: 185213 - DNA, 201 bp, Arabidopsis thaliana
  unsure (1)..(201): unsure at all n locations
gggggacgccacgcgaacggaagnnngggaacctggaggagcggttcgaccgggaggggaaaaaccctaggaaaagaaggaagaggaggcaaacagagggcgagagggagaaggagccaggggcccaacagaacaccaaaaaagccggggcggaagggcggcaaacaccggtccaggaatgaatggagagagcgccgaacg

SEQ ID NO: 185214 - DNA, 304 bp, Arabidopsis thaliana
  unsure (1)..(304): unsure at all n locations
agagggaggagagaacccccacacaaaaaaaaaaaaaaaaaagaaaacgtcattgttgcaggcaacaaaacttaggagagggaacgaacgcnngcaggnacnnggaacggaagancagaggaagaaccagcgggaaaagagcgcgggaaaaacaagaaaaaaaaggagagggggaggggaagaggagaaagaaaaggaggaaaagaaagaaaggagggagaggagganggcgggacgaaaaaaaaaaagaaaaaacaaagaacacgaacagagaggaagacagagagaagaaacgcgcaaagca

SEQ ID NO: 185215 - DNA, 477 bp, Arabidopsis thaliana
  unsure (1)..(477): unsure at all n locations
gcaagctcaggagccgcgagagcgggtgccctatatgggagagccccaaaagaaagaaaggggagggcagcagggaagcgaacgagagggcacccgccccgaacgcaagaagagccggcagaaaccacaccaccggccgcaagcacaacaacagccacaacagccaacacgccaagacacgccagcaaaagaccctttttgtacaaacggcgccacaccggcgaaacggccacgcgccacgagcgagaccacccccgggaaacgcggagcccgcgacgaacggcccaccgcgggcgcggcaaaaaaaacccaaagggcgccaaaagaaaccataacgcaaaacgcccacacaaccagacacaccccgcagcgccccccgaccgaanagggactagccccccaagcgccgcaagaggcgcacaagcacgcccccacgccaaacgcggaaaacggcgcgcgaaacggaaggagccagcc

SEQ ID NO: 185216 - DNA, 445 bp, Arabidopsis thaliana
  unsure (1)..(445): unsure at all n locations
cgggcaccaagaagcgacaaangaanaaaaaaaagaaaagaccaagtgttttccacaccacctccggggggggacacaccgggggacngggnaggaaaaccgggttgaccaagcggacgaacacgggaagggaaaaggaaaagagaaagggggggggaggaaagaaagagagaagggaaagaacccacgacgcgggggagaaagaacccaaaaaagaaaaccccaaaggcaccagaggaaaggaaaaaaacgccccgagcccacgtttttttcaagggggagaaacgaagaaagaaaagcccaaagagaggcgaacacaccccacgaaagagcgaggaacccggaagaaacgacccacgaaacaccgacccggacgcggaaaaaaaaaaaaccagagagccggagcacaagaagagacaaagcgcaccgcgcaaggaccacgggc

SEQ ID NO: 185217 - DNA, 522 bp, Arabidopsis thaliana
  unsure (1)..(522): unsure at all n locations
aaaaagntttttttttgggtgtacaaccacccaagcacggaaccagagaanggtttnnngggggnaaaaacccannaaanaaaaaaagaaccccaaaggggaaaaaggaaaacaaagaccaaagagcagaaagccgaggagacccacacagcagccaagacaggggagacaccaacacggacaccccgggcccgagaaaaaagcggtctttttttcaagggggggccagggaaagagaggcgccggagagaaacagacgccaccaaccgcgacgacacacgacgacaccacccacaaccggcagaagaaaggcgaaggacgaaagggaacggaacgcagccacgcccgaagcaaacgaacgcgcgaccgcacccacaagaagaaaaacgccgccgccgaggcagaggcgggacagcggaccggacgcagccgggagaaaaaggagcataaagagaaaaccaggccaggaagagcgaacagacgacaccagagaaaacgaggacgacaacgaggcgaaagcgc

SEQ ID NO: 185218 - DNA, 483 bp, Arabidopsis thaliana
  unsure (1)..(483): unsure at all n locations
cgcgnacgnaagctgggatcctgtagagcgtgtcgccttttttttaattctttttaaaaggatggcgcataccataatgaatatgacaactctataaaactttctgttgtaagaagggaaagaagagaaggacacgtcgtaggagcgtcccctcctttctccgttggaccaggaaccctagtagataccacccaggttgttttttgggcgggtgcagggaaaagacacggggggaggtgataataaaaaccggccccacgggtcggccgtcgagacacacccccgcatatgccggaaaacggtggcgtgaatgccgagtaacttgccgaacgcgtgccgcactgcaagggatcccacggacggggccaccggaccgtggtgtaagttcgatcgnggctcccatgaggggaaacggagggggcgaggcaaacgggaaagctagggtggaaagagtgattagggcaatcgcaagaggggacgttc

SEQ ID NO: 185219 - DNA, 476 bp, Arabidopsis thaliana
ccggtgtgcgacccaccgcggcgcagcccgccccgaagaaccagaagagcaaaagaaggaccggcccgagcgagaaaaacaggaagaacacaacccggcgcaggcgggccagaggaacgccgggagagaaggcagccaagccgacacacgccaccgcacgcacaacaaaaaacaacacgcggcggccccacaccagaattttttttttccacagggccgagaacccaagagacccggggaggccgcgacgagaacagcccggaacgccgacctcgcgcccagaaagacccggggcacactgcatgcccgccccgcaggtctcagccgccgcggcggcctggcgcgcagcacgaggggagccaggcgcggatagcgcgacgccagggcgccccaccgcgttagcgtgccacggcgggcgacccgcgaagaggccgagggccggcaacggccttgccccgaaagcgagaccaccggag

SEQ ID NO: 185220 - DNA, 368 bp, Arabidopsis thaliana
  unsure (1)..(368): unsure at all n locations
gggtttttttttggtggcaacaaaccacacaaccgngggaacngagaaggggttgggnagggggggaaaaaacccaaaaaanaggaagagagaggaacagccaaggagaggaaaggaagaccgaacgaaggcacgaaacacggaaaagaccgagggaagagggccacaagcaaacgggccagaaaggaggaggcgaagaccgcaaacccaggaagacccacagaaggcaagcaagagggagacacacacctatttttgttttgggcggggtgggaaaaaaagaaaccgccggcggacgaggggaagagacggaggcccgagccgcgcaccgaacagccaaccgaggcgcgcaccacaccaaaacccac

SEQ ID NO: 185221 - DNA, 506 bp, Arabidopsis thaliana
  unsure (1)..(506): unsure at all n locations
gggggtttgaaccagggaggggaaaaaaaacccccgaagagcagaanaaaaaaagaaagaagagcgcgaggagggcggggaggggaagagaaaacaagaaagagaagaagagaagcaggaaacgcgaagcccggagaggcggggcggggagggccgcggagagacgaaaaaacgaaagacaagaaagggccgcgcgaacaggggaaagagaaaagaagagcccgcggagacccaacgacaatttttttttttggggagggggaggaacaaaaccaaggggcgggagagagggcgaaagaggggaaaagaaacgaaagaggaaagaacgcagagaaaacccaccagagagagccgcaaaaacgagcggagcagagaacggaggagagaggagcacggaggccaggaagaaaaagagaagaccaccggaggaaaagaaagaggaagcccgaaggacaaaacgaagaccaaggagacgcgaaagcgaaacaagcgacagagagacgaag

SEQ ID NO: 185222 - DNA, 400 bp, Arabidopsis thaliana
aagcaaggaaccagagagcggattgacctgagggggaagcccaggaaggaggaagaaggaaacacgacgcaggaaccgaacagcaacccgcgcaaagacacgaggacgcaggaatgagcccaaaagaccaggcggaagagagggagcaccgccaacagcgaacaccccggaggcccgcagaagacggagccgcaggaccatttttctccgaggcgggggggaagagccgcagggggacagggaaccacccgaccagatgcgcgcgaacacggacccgcggcggcacgccgagccccgcggaaaagaaagcgcagagagcgggaagacagatcgggaacgcgacgcaggacccaatccgaacgcgcgccccggcgccccgccggcaggcagaaaaagccag

SEQ ID NO: 185223 - DNA, 544 bp, Arabidopsis thaliana
  unsure (1)..(544): unsure at all n locations
agaagagntttttttttgtgtgaacacccccccagccaggaancngnagaggggtttgacaggggggaaaaaacccaaagaaaagngaaaggggaacacggngaagggggaaacanaacaagcaccaccgacgagcacgagaaaacccgagagaggcgcaaacacccaggccgaaacaaaagagaaaccgcgaacacaagaagccccggacccgcaagggacaacacacggtttcttttttcccggggggggaaagaagccgcgcggagagaagagaccaaccaccacgaccccccaagacgcaccggcgccaccaccaccaaccccccaaaaaaaaaccaaagcgcggcagagaaaaacgaatcgcgggccgcgcccaagccaacgccgccccggaccgcaccgaccagaagagatagacgccgaacagcgcaaggcgcgaggggagagaccccaccagggcggaaaacagaaggggggaggagcaaaacacgaacgcggaagaggcagagcgccgcacccaaaaaagggggagacgggccgg

SEQ ID NO: 185224 - DNA, 390 bp, Arabidopsis thaliana
  unsure (1)..(390): unsure at all n locations
ctaaagaaaaatttttttttgggaaccacaaaacaaaagcaaggannagaagagnggttgacaaaaaggagaaaaacccgaagagagaaaaaaagaacgcacaaaggggcaaaagaaaaaacccgacaccaccaggaacgaaaaacgcagaaaacaggcggaaaccacgaacagaagacatggagcggaccgcagacaacgaagaacaccggagcccggcaggcagaagacccgacttttttctatccacgcgggcggcgcgagaagaacggccgggaggcgaagaagaagaaccaaccacccagagaacgcgagccaccggccaagggccacccgcgccagaccgcaccgagaaaaagagcggaaagaacggcgagagagagaagagga

SEQ ID NO: 185225 - DNA, 435 bp, Arabidopsis thaliana
cgagcccgcgcaaaacccgccgaggagacggggagaatagaaaacgcccagcagaaagaagaggggaaaatctattttttaggtgggccacacacccccaacgcaacacgaaaaagggaaacccccgagagttacacccaacggacggccaagaaacccaccacgcgcgaaagaacaagaaaaaagacaaggggaggggcggggggggaaacgaaaaaagagaaaaagaacaagagcgagacacccacgcaggcgggggggcggagggggccgcgcagacaacaacaacgaaaccccaagaaggcccaaccagcagaggatgaaggaacgtgcaccccccgagcgcaaagccatattttttaaacgacgggggatcgcagaaacccacagaaggcggcaaaagacaggatccggacaaaagaccgaacgaaaaag

SEQ ID NO: 185226 - DNA, 537 bp, Arabidopsis thaliana
  unsure (1)..(537): unsure at all n locations
aattttttttttgtgggtgcccccacccacccccaaccaaagganacagggggagaggtttgggaggggggagaaaccccacaagaggaaagggggaaacccgaggcgggaccgaggagcgccacgcccagggcgaaggcgcgagaagaccaaacgagcagcgcgaagcaagggggaccctcccggtaacccgagcggccgggagaggccgcgggaatctttttttccggcgggggggaacaaagggccggcggcgggaggggaaacagagccggggacgccgcaagcgcggggcggcagcagcgccacgaaccccccgaaacgagagggggagaggcgcgggcgagcgcggtgcggggcccgcgcccaagcgagcgccgccgccgccacccccccggaagggaaaaagccggcagagagcgcagggggcacgagagggacggagccggacggacgggggagggcggagggcgccggaggcgagccgcgaagggacgggcgccgcgccgcgacggaaaggcgaaagacaggcgcggc

SEQ ID NO: 185227 - DNA, 474 bp, Arabidopsis thaliana
acgcctgcgggccggccggaatcccgggtgacccacgcgtcaaaccctttgtgaaatagatatataacgaaacgggagattacaattaaaccactcccgaaccagggtcctaatggatgggccgagtgaaacacttgctcgcaccgaggagcgggtttgggttacgcgcgcgaccaatcttttatttcagggggacagaaagcccaagcgcgattggggaaagcaccccccccagaccgctgggtgggcttccgccccagagtcggacgggcgggcagaatggaaggggcgggcagggggggttggagaggacaaggcgaattacaccagccaaccccacaccgatatcaggcaccccgcctaccgcagtgttccggtccagatacgcaatccacctgcggtccgcacggggcgtggagaaggcggcccgaggactaaaggggaatagaagaaacgggccggaagcggacgcat

SEQ ID NO: 185228 - DNA, 360 bp, Arabidopsis thaliana
  unsure (1)..(360): unsure at all n locations
gccgcaggaccggccggacgcccggttcgacacgcgtcaaccctttganaaagaaaaggagcagacgggaaggttaattctttgagcccaaacacaggtgtgcgctaacagccaattgacatcccatacactcggcagttgacttatgaacgagaccgacattctctttagggggcgaaaaccccaccacaagaaccccagcacacgcccccccgaggcaacggccaacccgcccggactcatcctgtccgattacgagaggacgcccccgcgcgaagtccccctccctcgctaaaaacgacggcccgacctctttgggacgacacgccaccccaatgacctaccccagcgggtccccgt

SEQ ID NO: 185229 - DNA, 398 bp, Arabidopsis thaliana
  unsure (1)..(398): unsure at all n locations
aaaaagagaaggggggggggggggaaaaaaaaagaaaaagagaaacaaangaagggaccggagacgctaaccaaacgacaaccccaaacccccaggaggggagaaaagcaccccaaccattttttttcgggggggggaccaaaacccagaccccatttccacaacaccccccacaaaagggtgacgcggcaaccccccaccatcacataaccacccccgaaggaacaacaagcaccaaaggctaagaacaaacaaccccccaatacggaccccgcacggccaagccgatatcatcccccccaccaccccaataccgggcgcggcgacgcacaccccgacccagccccgacaggcgaaagagagaccgatccaacgaataaagccgccgatcggagtaa

SEQ ID NO: 185230 - DNA, 631 bp, Arabidopsis thaliana
  unsure (1)..(631): unsure at all n locations
ttttttttgggggggacccacagccaaaagcaaggaaaaggnagagngggttggaggggggngagaaacccccaanaaagaaaagagggggagcgggagggggggagggaaggggcacgagggcgggggcgggcgaaggagagaagagagggagggagggggcgagaaagacgcaggcgcggggaggagggggggaggacgaaacgggggaaggggccggggggggggaagggaaggagagggattttttttttaggagggggggggcgggcagagcgcggggagcggcggcggaggggggaaagggaggggccgcaacggaggggaaggagagggggcgggggcgagcgcgccacagagacccaagcggagacagagagcggcgaagcgaggcggagaaaggcggaacggtgagagggggacaccgacgggcagcgggagggnaggccaggagagggagaggcgcgcgacgccgagagggagagaggagacctggcgaacggggcgaggaggggcagcgaggggagggggaagcaagacgaggacggaggagagaggagatgagacgcgaagaggaatgagaaagcgcggagggcccgagagagagagcgagacccggcggcgagcgaga

SEQ ID NO: 185231 - DNA, 604 bp, Arabidopsis thaliana
aggaagaggttttttttttttggaaccaccccaccccaaaaccaggagaacgagaggagagtttaaaaaggaggagaaaaacccggaaacaacaagacgaacggaacaaacagacaagggcggagaaaacggaggacaagacagccggcaggaagaaggggcgaagacaaagcggagagacggacgcaaaagcacacacccaagaggcaagggcgcagacgcacgagcacagaagtaccccggaacgcccggaaggaagccggctttttttttcagcgggggagagaaagaggaccgccaggagcgaagggggaacagagggccacaaagcgcgaggaggaaccgagcaccccgcggagaaacgcgcgcaaaaaagaggcaggaaggagcaagagagcgacgcggaagccgggaccgaacgaaagacggcccacagccgacgaagaagaaggagaacaaaccaaccagcaggcggaggggggcgcggcgaggacgggaccggaggggcgaaggcaagggcggggcaaacagagacgcgaacccggagcgagacaacgcaacgggacagaaaaggggagaaacgagagacggagctagacgcgag

SEQ ID NO: 185232 - DNA, 295 bp, Arabidopsis thaliana
gggggaagaagcccttggggagaggagagcgcgagggccagggggggggcacatcggcgggcgggggattgccgagacgagccaggtgtcgttgccacacaggggcgcgttgcagtggaggggccccgtacacggttgtccccggtttcgggcggaggataccagcgtgggcgattttttttttcgcggggggcggcgccggcggcggtggtgggaccttgcgcggggtgcgcgccttcaggtaggggggagggctggccagtcccgcccattatttgggcggaaagggcggcat

SEQ ID NO: 185233 - DNA, 151 bp, Arabidopsis thaliana
gcacgcgtacgtaggctaggatcctctaaagctttcgcccttgagggtatgctttttaatgcaagaaaattagatttaagctgaagttatttttaggcgggccagattataccagtatgaagatatgccagccaaagaggatcacacgcct

SEQ ID NO: 185234 - DNA, 552 bp, Arabidopsis thaliana
ttctgagtaaccttaggggaagacacgcacgcctgcaggtgccgggcacggaatacccgggtcgacccacgcgtccggccgatgttaccaaataaaagcaatacttgtcatacgcaatcagacaacaacaaacgttacaccaatagtgacacctactactcgatgcactgagaagcacatagcgacgctgtccagttgaacatgacccagatcagctaagctttttgtaagagggccactacaatcagccactctcctgcgatgacatctaatgtatgccgctgctgacaaagtacccacgcattaatactcttgtcgttagcctctcttacgtaccagaccacccacccaccctctattaagtagctaacgggacccaaaattattattctacgctggcaccaattcgagagagacacagcaacttacaaaccctgagacgtcgcgccttgactgaagccgaccaccactttcatcactgagttaaaatcaaagaagacctagtatgtggaaacagatctctcaacggtaacttcaaatggaacgagacca

SEQ ID NO: 185235 - DNA, 262 bp, Arabidopsis thaliana
actcctgcaggtaccggtcctgaatttccttttcgacgccgggggaaaccctttctgtgagatagacattttcgcctatacggatgtatatttctctctcccttgttatcatactgtcagagaatgggatgaggttggaggtttacacctatcatgtattataacccttacagtagaatggctttctcctatcaattgtcttttttttttgaggggattgggaaggaggctctagacgtgagtgtttttttgtgtaagcacc

SEQ ID NO: 185236 - DNA, 202 bp, Arabidopsis thaliana
gggcttggttcccgtccctgcgcacacgttgcgtttcacaaactcaagaagggcggggaataaactttttaaggagcgaggtgttagatgaagattgcttatatggggtcagcgttataaaggggacgggattgaatatatttaaggagatgattatatatttcttttttaatgcaatattgagtgcggggagagatggaga

SEQ ID NO: 185237 - DNA, 353 bp, Arabidopsis thaliana
ggaaaactttttttgagtagagagaaaagagggattacgatgagtgaaggggattacgtataaaagatgggtgttttagtaaagaggaattagaggttggggtaatgaaggaaaacaagagatttttcttttgggggttgcccgcaaagtgcgcgttctttttttttcagttccccgatttttggccgaagagtcccagaagtagctgggattgccttgtgtaaagtggtctaaccgataggggacggaagattaggtgttacagtgtcccacgaagacataaaagtcgattaacgagctgataggcagaggagagcagatagagtaagctagaaagaagaacataagacacc

SEQ ID NO: 185238 - DNA, 279 bp, Arabidopsis thaliana
tggggggaaacccttttttgttgtttaattggggggggggtgttctgtgggggttgatagctgcttccgggactccgcacggtgtggcctctttttgctctagcgccgtcgtgatgcgtggttttttttgggggggctcgggcgtgggacgtttttttttatagtccctcggtgtcgtgggggtacgtggtattgctgctgggtggtgtcgggtgcgcccgcgtgtgtggcgctgacgcgtgcggggtgcgcctggcttttagctgttctttgccgccc

SEQ ID NO: 185239 - DNA, 515 bp, Arabidopsis thaliana
  unsure (1)..(515): unsure at all n locations
atttgatttttaagggttttttggggggaaaactttatatgtaattgggataattaaaaaataaaagaattaagagaatttggaagaaggaaaaaaatatattataaaaagaatggataggagtataagattataatttgagaggataatattgtagttattattttttttttgaagaggtggagtataataatatatataatgttttttataggttgaagtgtatagatatgtgattaattatttattaagataaaattattaagggtggatgggaagatagttaagttatntaaagtgagagaagtaaaattatttttaaataattggattgttttaatatgttgatgtttatgtgtntgtatatggtaattatatgtttatataggtattaaagtgattatgtggataaattttttatgtattgtagttaaaaggggggtgatatggatgtttattgatttgttagtaatagttagatatgtggttaggtaatatagaaagaatttgatagt

SEQ ID NO: 185240 - DNA, 463 bp, Arabidopsis thaliana
tttttaggtagtgtttggaaacagagaagcccttaatttggtgatagaagataagaaaggaagatatcaagagtggagggattcgttcactgtgcaaacaatacaataagctcctactctattaaatgcgagagaggacgaaatttttttttagaggggggtgcagaaacagacaaagactattttctttttaaaacccacccatggcttgtgaagagagggaaacacccagaagtaaaaaaacgcccgagggcagaaggaacgaattggagagagagcgacgaggacggggatagggaacgaaacgaaaagaaggttgagcatacgagagtattcaagcgatggagctagaagagggcgtggagaaaagaggaaatcggaaaggaggcagacgaagcgaggtgatagagaggtataagacgatgaccagagaaatagtcaaggaagagcgatgggagtaggt

SEQ ID NO: 185241 - DNA, 341 bp, Arabidopsis thaliana
agaacaagcggtacgtaggaaaaaagcggacagggttacaggacgtagcgagacaacggccgggcgcccggacggaacactctttttaaggggaaaaaacagcagactatttttcaaaggcccccccgaggatcgggacaacagacgggcaagaagcaaggaccagacaagggaaaaaagcaaaaaggaccacacccacgaagaacgaccgagccaagaaaagcacccgacctgcgcgcgacagtgagaacaagcacgcgcgcaagaggaaaaaagagcgccccgcgagaacgaacagcgccaaccccgagagcgcgtaccacgacgccgggtggagtgat

SEQ ID NO: 185242 - DNA, 600 bp, Arabidopsis thaliana
  unsure (1)..(600): unsure at all n locations
gggggggggtggggggtggggngtggtagggtggtttggagagggagaggaaaaaaccttggtgtgagtagaatggaggagtgatttaaagagagagtagtgagtatgtttgtggagagtatgaaggtagagagtgatgagtatgtattatgggagagttttatggtgtttatagtgtttgagagttaagtgtgatgatgatagtgtaaatagattaggtgaggaatattattttttattaagtagggggtggaggatataggttttttatgatgtgttgttttgatgaggtagtgggtagagttgtatgtagttatatgataggaaggggatgaaaggaaatatgtaagtgagaggagttaggttgtttttatttatgttaggttggatgtgatgatgttatagttattagtggttgtgattaagttataatgggtgtggttagagagatggagattatnttggtgaatttggagttggggttagtagagagataatttttgttagagtttatttagaatgtattatgtttatgttgtgggtttaaagttagagtgttaggtttgtatagtagtgtggaggtaatgatgtagaattgga

SEQ ID NO: 185243 - DNA, 569 bp, Arabidopsis thaliana
  unsure (1)..(569): unsure at all n locations
cttacgttatgctttaagagggagggggggtatattccttggactaccggccggggtctgnggggggataccncgcctgtaggtaccggtccggaatttctggttttatccacggggggaggacccttatagagaaaaacataacaatgggaggtttgagaagactagagaagaacatctgtacaggatcgatgagttctaggcatcattctacagaaggcatgggaaagcgctggccactgtcattcattcggaagatgaagaccatcttgaataaaattggggcgattttttttttagggtggtgtgaatatctggtgtttaccactctaacgcacgcgtttctttaatatagagctacgtttaactcgattgcgattatgctggccatcatcttactgctggtgcactctaattcatgtgatacctttcctagatttgtttcttcttacctactcctcactgttgactccacccaatatccgttatctatttgtgctggtatgggtcgtgcttctgaggggttgggtcgttcattgtcttcaactctctgtttatttgtagacgtt

SEQ ID NO: 185244 - DNA, 464 bp, Arabidopsis thaliana
gggggaaaactttgtgggggtggagggggggatggtagaggggttagggatgttgtggttataaggagttttgttgtgttaaagttatgttggtgagtatgagtaatagttaagatgataaatttttttttttagggggtgaagagagaaagaggaatgatgtttttttttgtagggtgtggaggggtttgtttgtagaggtgtggaaataggtttgttgtttattgttatgtgtgtttgtttgtttggtgtggtgttggttgttatgttaagtgattgttagaatagtgagtaattatgttgagtataaaaaatttaatttgtatgttgttgtatgtggtatgtggtggttttatttttttttgttttggttttttgtttgtggtgtaagtttagtgagattaggattaaggattaatagtagtggattgggtagagtttgagatgttttatgttttattttt

SEQ ID NO: 185245 - DNA, 503 bp, Arabidopsis thaliana
  unsure (1)..(503): unsure at all n locations
gggggggggttaaaccttttttgtgtggtggtctggngatgttttgtgtgtctgtgtggtgttgtttggggttgggtgtgcctcttattcggtgttgtcgctgtggggtgtggggtcttgtgggtggtttgtggttgtggagtttcgccggttgcgcggtgctaccgcgcgtgagctgcgcgggtttttttttttttctgcgtgttttgtgngacgcgcgcccgcctgtgtgttctcgcggtggatgagctcccctgagcgcttgggggcgggggcgcgtccgcgggccggggggtcggctgcgcggcggtcttgtctctgcgggggtgatggggccgggcgcgtacgtgggggcgcgcctccggcggggagtgcggcgccgcgcgcgtggctcgcgcggcgcgtgctccggggtgtggggggggggggtcggcgtcggggggggggcgtcggtgtggtgtggcactgttcttctgtcccgttcgtgttggtcggggcggggc

SEQ ID NO: 185246 - DNA, 418 bp, Arabidopsis thaliana
  unsure (1)..(418): unsure at all n locations
accccaaagcgtttccccngggggggggcccaaaaaaaaaccccgncccaaggcgcaggagcacaccaacgcagggaggcggggccagggcggcggggacgccagcaagcaacccgcaccccagcgcgcaacaaccaccgcccaaaagcttttttttgggtgttggccactctttctttttctttcaaaaaatttgtcttctttttttcgcgtattttctttatgctccttcatccctcttttttctcttgtctccttctgtccactactttctccttcccctatctttttatatccccttcccacattccttggtcctttccgctgctgtttgttgtcttcctattttttatttccctgcattttttgttcgcgtttcatcccttttttcttccagtttatgatcgccttttctttc

SEQ ID NO: 185247 - DNA, 519 bp, Arabidopsis thaliana
  unsure (1)..(519): unsure at all n locations
ccgaggggggggggggccggncaaaaaaaaanaaacaccaccccacanaagggggccgataaccaagcgcgggcaccacacaacgcaccaccaagcggagggggncgcggcactcgtacaagcgaggcgcaagcgcgagggcgagagggacagaggggggcaaaccacgccccaccaacaactttcctcncttggaggggggggggaccacacancgccacgaaaacaaccaaaaaaaaaacaaacacccaccacggaggcgggccgcagggcggccaacacccgcgggaaacggcaacccgcggcggacggacacccccgacgcacggacgccccaccaccgatgccccgacccggcgacagcgatggcggcggcccccgcgcccccagcaccagacagccaagggccggagcggcgggcagcacgcgcgcacgaacaaaccatccgcagggccgaggcgagagagcgcggctgcaacaccgcgagaggagaacgaggcaaggaggagagggcgaaaa

SEQ ID NO: 185248 - DNA, 473 bp, Arabidopsis thaliana
  unsure (1)..(473): unsure at all n locations
gancctctagagcggctgccctttgggttttggttctttaagttaaaaacacgttacatagatagaaacttaacattaaattttcctaagaacaaagatttgcattacaaaaaagaaaaaaaaaaacaagaaaccggagaaaggaaaagtttgatattttcaagagtttacacactatcctggtttgccgganaggcaaccaaagcaaaccttatgggaaatattaagctccttagctctctcgggtgcacgctcttgaaggggtcaaatcctctgagctaacccacacacaaacttctgggcacggtggcccttaaccccgaaattctttttagttttttcaagtctcaaccggccaaacaaaaattccaaggatgttagggaaattattccggctgggaaaccctttaggccgttgggcccaggtgggaaaaatggttcagaaaagatttgggtcttgaccccttctgtat

SEQ ID NO: 185249 - DNA, 452 bp, Arabidopsis thaliana
  unsure (1)..(452): unsure at all n locations
gcgtacgtaagcttggatcctctagagcggtcgnccttttgtttttgtctttttttttacaaacaaattggatagattcttattgagcagtttttgatacacgcagagcgacataaacagggaatgtgaacctttaggattgcccagccgattctttaataaaaatgggatattgaaaaaaaccacctctcctcattgggttgtttgggaaccccccaggggcatcctaaaaaaaaaaaccccctccctttggggggtcagggggggcccaccttttttttcgccctttgaagtatgcccatggctgcgcgtgtccgcttacgattactcttcccctgctctttattcgtgcgcgcctcacacccgttacatcgatccatcacctcatacacagtatcgatcgccgcgatgcatgactatcggactcctattcgaggggggcagttaaggag

SEQ ID NO: 185250 - DNA, 551 bp, Arabidopsis thaliana
  unsure (1)..(551): unsure at all n locations
gcctgcaggtacaggtccggantcccgggtcgacccacgcgtgcgatttcttcttcttcttcagaattcagatcagatctccggcgataatctttgagatctgaaatttcttacaatcaggagagaaagatgtgcggattaaaggtagatacagtatataagaaaagtaggattataaagtgcgtatacccagatttttttttaaaggggggggggggacgaccaccacgagtgggatttcctgtgttagttatgttattattcctaactatttctagttgaacataaattctcttatccaagtaatatacaataagaacaatcattggagattgacttagcataagagataaatgttataattgacgtatcaaagtctgttgtaggtatgtaatgtatctgttattatgaccatatagttatatgcttatataatttaatgtatcagttatgcttatgaattttattatagattcgtattcccgactaaattaatattattaaataaatataagaaatcatattcatgcgcgttgaacccgaatggtcgt

SEQ ID NO: 185251 - DNA, 440 bp, Arabidopsis thaliana
  unsure (1)..(440): unsure at all n locations
gcgtacgtagcttggacctctagagcgtcgcccttttttttttttctttttaaaaaannaaaaaaaaaaagggagagaagagaaaaaaaaaaatgtaaggggggggtagaagaaggggnaatttttattgtaaaggagggaagatacgtgggtagtagatagaaagaaaaaaaaaaatanttanattggnagtggggnnaaaccggggaggnnnnnaaaaaaaaaatagccccgancggaacgagctattaccccccaccacttcccgtaagacaactcccgacgcacgtaacggcaagacgaccccgtcccccgtcatattggatcccccgcggcccggagacaacttacgagtgcccgcaacgcgttgatctacgcaacattgatcgatagccgcatccttcacccacgccgcgtaacatggcctagtgtgagagggg

SEQ ID NO: 185252 - DNA, 468 bp, Arabidopsis thaliana
  unsure (1)..(468): unsure at all n locations
gcgacgtagcttggatcctctagagcggtcccctttggtttgggcctcttttaaattttttaaaaaaaacggggganggggaaaaaaggagaggagcaacggaaaaaaggaccaacaacgccagaaaaagacgcgcacgaagcgtgtcttccgacattcatctcgtcataaccccttccctcctgggtgtttgggcaccccccggtgggctccagaaaaaaaaaacccccccgtctggggggagcagggtgtccccccttactatcgccctagggcaatcgactatccgcgttatcacacagtcgtgtccgtcgcctttaattttgattccgtccgctcccgattcggggaagctttcgcccggtccgtaatcccccacactgctcttgatccgcgggccggtcgggagggcccgttcaatcgcgctcccgtcgccctcgcttcgcccgtatcgtttcgccgacgcgt

SEQ ID NO: 185253 - DNA, 453 bp, Arabidopsis thaliana
aaaacacaaacacgcggcgaaacgccccgaccccccacgccacaccacccggaccccccgcaaagccgccctcgccaatctcattttcccaacccgcgggcgagcaacacacacgccctcccgtatccacccaaaatttttttcggggaagtgggcccaatcatcagcgcgccccccaaaaaaaaaaagcccccccccacccctgcaaacccgcgaacccgcgcccctccgcccacaccccccccccctcttcccaccccgaccgccacccccaatcaaatacccagcgcccccccccccccacaccacacaccctccccccgcctcggctcataccccacgccccatcaaacccctagcgcccaccgcagccacacgcccccccaaacagtccgcactagcccctccccacaacagccggccccccactgccgactcacaccccgcaacgtt

SEQ ID NO: 185254 - DNA, 491 bp, Arabidopsis thaliana
cccctcaaaccaaaaaacataagaaccttttttgatttatttcaccaaattgggacccccgccctcatcccaaaaaaacccaaagaaacaaaatccttcttcccacaaaaaattaaattggttccaaaaaccttctaaattaaaaactttttttttggggaagtggccaacccctcaatttaaggggcttttaaaaaaaagaacccttggccactgcacctttcccatccccatagcgtctccaaaattaaagccacctgacccaaaaaccggcggggtttaaaaaaacaaaagcgatccccccccaacccccccccgaaaaaagcggtctacctccccctaaacaacccgcacacccaccccgcaacaaacgtttttctccttccaacaatcccttccagaggggcgggccgtttccgtccaaccccccttcccacaccctcgcccctctccccacccccaaccgcccctttcctcctcccccacaccgg

SEQ ID NO: 185255 - DNA, 505 bp, Arabidopsis thaliana
gccctttttgttttgggcccaaaaaaacaaaaaatatcccatcccatcccaaaacgtgctccgcctcaaacgaacaccacccaaccaacaatacccaaactagcgctcagtttaaaatcccgcggggagtacacgacccgttgagacagcacgccccgtaaacaccggccagaaatctttttttttgggcggtggggccaaaatcatcgcggctcagatcaacaaaaaaaaaatcctccacatggccaacattagaccaccttaatctccccaccaattgtgtcatcgccctttcggcgcttattcacaataactgtttccatttgccgatctcatttattatctcctcccacgcaccgatataatcaataagtgccggccatccccgatatacggcaacgccaattctatcattggcccgtaacgttccctacaagcgccataatatcgcgctaaatgtatgcgcgcaaacgcattccgcatttaggatccacgatgagaggtg

SEQ ID NO: 185256 - DNA, 478 bp, Arabidopsis thaliana
  unsure (1)..(478): unsure at all n locations
cgtacgtaagcttggatcctctagagcggttgncctttggtttttgttttcactataaaaaacacaacttttattctccaactataaatgtggtacaactcttatctactctgcgtatttctgataaatcttaaaaatacaaacaagtctcccaccaaaccctaacggggggaacttatacaaaagaaagtttttattttgtcgcaggcacaaccccttgggtgaaaaaagagaaaaatttcaccattctccagggagtccccgggccccattcaccggttcatctctcagggccctaaagaatccccctacacaaaaaccttttttgtataagaaattttgcgagccttttttaaaaggggccaaagtcaacccggattcacgggctcccctttttaagggggggaaaaaaccttacggcggattgctccaacacctccaaaaattgtttcacccaaaaaccccccttgattttccc

SEQ ID NO: 185257 - DNA, 376 bp, Arabidopsis thaliana
  unsure (1)..(376): unsure at all n locations
agaacagcacaccccccccccccccnnccccnnccnnngggggaagggaataaggttgaactataaaaagaccttttacgtcgcaacccgcgtacctaaggttggatcctctagagcggtcgccctttggggttgggctttttttttttaaaaaaagggcaaaaaaacacttcatataagaaggaaaggaccctgctcccaaaaacaatgggggcccaaaaaaggaacgccaccctaaaaccaagtcctctggaaaaaagggccccctttaactaaaaaaccaattttttcccgggatgaagggagccccatctttcctatgtgtgggcccccgggcaaaaaaaaaaaaatcgggcacccccgcccgggggggggg

SEQ ID NO: 185258 - DNA, 440 bp, Arabidopsis thaliana
  unsure (1)..(440): unsure at all n locations
gtacgtaagcttggatcctctagagcggtccccttttgtttttgttttntgttnaaaagagcttcttttctttattagaaatcacttaaccaatcttacagatctgtttaatcagttttacacagggtaacacaacctgttactgaccaattcctaatctacccaattcacaccacagggacaggtttttttccctgggtggggcactcccccaagaacccctaatagcttatagcttaaatccttgggattcacaaaggtgtgggagataagacgggtacctaacctaaagggttaccttccctttttttggggacccacacaggccccattaacctttttcctaattctaagaactcttcaaattttctttccagggtggggctcttttctgggagggcttggtaccccgggctggaacccccaccacccaagggggt

SEQ ID NO: 185259 - DNA, 425 bp, Arabidopsis thaliana
  unsure (1)..(425): unsure at all n locations
gaagagcgacgcgcgcggacgcggagcccggcgnggggggggggggactttttttttacaaccccccccttttgcgccgagaacaaaccccccagaaacagaangaaaggcgacancccaattcccccnggcgcggagagggcaccaaaaccaaaacagcacgcgagggcggcggcgcaccgaggcccaccgcgcgcgccaagccaacgccgaggggcgccgcgcggacggcagacacgcccggccaaacggacacgcgcccgcggccaacggggcgccgagcggccccgccgcngccgcggagaggcttttttcttccgcgggggtggggcaccacagcggcccggcaccggcggacccaaaaaaaaaacggcgcggggagagccgacacccaccgagcgacggacacaccccgccgcaccgcc

SEQ ID NO: 185260 - DNA, 350 bp, Arabidopsis thaliana
agaagagagagagccggggggaagcggcggaggacccaggcccgaacggcgaccagagaggggggccgagccacccggcgagggatttttctatgggggggggggaactttggtcttggttatgcgtggacgcccactccttagcttggatggtaaggtagggcaattgctcctagagctcggttttgtaggggcggtgctaattttatcgccgcggagatcattccgtgctttgaatattctattggatctctgtggagaatggtttgctatctgttgcgcttgggagaattgcaacatctattcactgttatttactcttaatgcttacatggcgctggttgggattg

SEQ ID NO: 185261 - DNA, 356 bp, Arabidopsis thaliana
aaaaaaaaccccccaaggggcgttttttttttgagaacccacacaaaaatttcgttttatccccccgatacctcttttttcataatcggggccgaggtaaatacccgccggtttaccgctatccctaccccgcgaacgcgccagaaattttcctagtttttcgggggggggttgggaatccatccccccccaccctcccccccgcagctataataatcacccccaccgcaatataccctatttaccgcgcaattcccatagtacgccgcctttttcgcgcgtggttgtatgtcccacacgtcatgtccccgagctatcagactatatccatggttagaccctttcatcacgccgtt

SEQ ID NO: 185262 - DNA, 517 bp, Arabidopsis thaliana
  unsure (1)..(517): unsure at all n locations
gcctgcngaaccgggccccatagaggggttgacctacgcgtgcggaacctttaaaatttggactaacctcttctcacctgaagttgaattctcctcgtatctctgaacaacttgctgcgcaatctgcactagcggcttatagacagggcgattcttttcagtaacctttaaaataaaaaagcgctagcagctgtttttttttcgaaaaaagangggaaagtggcgcaccaaagaataggggatgaacagggggcgacggaatcaaactctacgctctgcgaggcggtggagactattatcaccactgaatgctttgattgaaacgaaatgctacattgaagcagcccaaagtaacacaagaagacaataacaatactacccagaccataaatatcccgaccgggatgtaggatggaacttgaaaccatgggtcaatgagggacacagacagagatatagaaagtgggcctagggaagtgaattgagagagactgagcaatagttgatagatcacaaa

SEQ ID NO: 185263 - DNA, 455 bp, Arabidopsis thaliana
  unsure (1)..(455): unsure at all n locations
acaccacaaagccccaccacgccccnccgccccagaacacagcgggacggggaangaggagcacgccaagccgaaagacaccgaagagggcgaggcagaccaaaagagccgaacagacgaggaagaggggtcagcaaaaggggggggggggacgggaaacaaaaagaagaagaggaaaaggaggccaggaccccgagaacaacggggggaggacggggggagaggaaaaaacaaacgcacacgcaacacgaagagcggagggggagggcgagaggaaaggaaccgaggagaaaaagagaagccagcaagaagaacgacagaggagaggaacggaggagaaagagacagagggggaagagaaaaggaaaacaaggaaggcgacgcccgggcgggaaagagacgagacgccgcaaaaaaaaagaaaacacgagaagagggagacaacaagagggaag

SEQ ID NO: 185264 - DNA, 479 bp, Arabidopsis thaliana
  unsure (1)..(479): unsure at all n locations
cgcctgcnaggtaccggtccggattcccgggtttacccacgcgtccgggagcatttgcttcaccctcatcaggtgtgatgcctgattccaccaatcctactatgagtgtgaatgcccaaggncatgaaatccaaatttgttggtcggacacctcgcccttttttcttttccttttagagcctttttcaccctccctccatggggggtgggggccaccacacggataccccccaaaaaatatccctatccggggttcttttccccccctttttctcttctattcaccctacccatcaaattccccccttccttctccccgtttccccttctccccctcctccctcttccccccttgtcttcccgccgatctctgccccgtcttcccgtccttcctctttcccccgttatccacccctcgttttccgttccctttttgccccgttccccttacatcttacctttcctctctccttcccccc

SEQ ID NO: 185265 - DNA, 516 bp, Arabidopsis thaliana
  unsure (1)..(516): unsure at all n locations
cgcctgcaggtaccggtcncggattcccgggttgacccacgcgtgcgaggacnnaaaanaaaaaanaccaactaanaaccgcccttcacctcaatgacccccacaaacaaaataccattataactaccccacatcttttacttactacatccccatatattaaataactatttaaagacaatgccccacaacatttcctcctttggggggggggcnaaaaaacccgaaaaccccacaataaaaaaaaaatacctcatccatccgtataatatacacacgctctaacacacttttagatacggacaatacggagcgatgttatagggatcttactccactatatccaggtcatcccacgatcgcatacgcgagccggttattttcacgacgagcgtcttggcgcgatatacgcggactatcggtacattcggcagttgtacgggatggtattattctgttgacttaataaacaacggtaggagcgtagcgtcattaagagaatcataggagttatta

SEQ ID NO: 185266 - DNA, 453 bp, Arabidopsis thaliana
  unsure (1)..(453): unsure at all n locations
tgcacgcctgcaggntaccggtccggattcccgggttgacccacgcgtgcggagagtttaccaactaacaccatggctgctcgtctaagacgccaaacaaatcgaacttctactgcttccgctattgctagtccttcttaaggatggccagcgattacatcaggcccattccaatgcatctatcacaagcccaattccctccttgggggggggggcaaaacaaccaatatacccccaaaaaaaaaaatcccccttcaatcctgtgatttcacatcccttttttctctttcttttccccttaccctccatatttcgcccattctgcttccccgattcacctttcgtcgctcccactcctgcctcacccccctgttttatcgccacgtacctcctatgcactgattgccccgtcttaccctacgttcaccccgcttattgacgcgacgatgtatt

SEQ ID NO: 185267 - DNA, 460 bp, Arabidopsis thaliana
  unsure (1)..(460): unsure at all n locations
cgcctgcaggnaccggnccggaatncccggtttgaacgacgggggaagaccccccaaaacaaaaancaccccnaaacacggggacacctagcaccacgaccgaaggccagcccacgcaagaaaccaacccccaccctcttcaagcaacaagccccaaaaaaacgaaaactgagagcccagaaaacacagcaaagaacatcacctaaatagggggggagggaaaaaccaaaacaacccaaacccaaaaaaaaaaaaccccccaggcgggagcccccacggataaccacaaacagatacgccagccaacccgaaaactccccgaaccgcacccccataccccctacaacgcgcggcacgacccccgagcacgaaaaagacacagccagcgcaaacccaaatttacacgacgaacccacaaaaacacccaacaaacacaacgacaacacaccaacccccaaac

SEQ ID NO: 185268 - DNA, 518 bp, Arabidopsis thaliana
  unsure (1)..(518): unsure at all n locations
accccnaaagcgggntctccanacagggggacaccccacaaaaannacccccacccacccgcgcaaagagccacaaaaaaagaaaccacacggacaacaaccgccggggcaaaaggcggcgaaaaaaaaggagaaaggcacaaccaccacgagaacgaaagaagaggacagcaaaaaaaagcgggctttttccaacaggggggggggggccacacccccaaccaagtggggagggagaaggggccccccgaaaaaaacagagacagggaagagagggagcaaaaacacccccaccgcaacggcgcgaacagggaggcccaggcaagaacagaaaaaagaaaacccaaacacaacaaaacacacaacagcaagcaaaagaccaaccgcagacggagacaaaacccccctagaacaagaaaggagaacggaaaaaagagagacaaagcgaccaaagaccacagaacggacaggaacaccggggacgaagatagagacagacaaacacgcgggaccccccc

SEQ ID NO: 185269 - DNA, 467 bp, Arabidopsis thaliana
ctgcacgcctgcaggtaccggtccggattccgggtcgacacgcgtcgacaagttattttcgttaatttcattttcgtatctctctctctcgcgacaaaccctaggtgcataattctcccacattcttttcttctccttccgcatattttagactcgtttattcaaaaaacccgtcgataatttcctgattggggggggtggaaaaccaataccccccatctcccataatactttccctccaacgttttcgcctaccattcacctttctttcccccatagcgccctattccccgcgcactcacccgattaacgatcattaacgccccgctatacgccccgttttttacctcgttactatattacatatgtgccgcagattacatcattcccaacatattaccgaatccttaattccaatcaaaatttcatacgttacataccaacccttcatagccgtttccatcccc

SEQ ID NO: 185270 - DNA, 491 bp, Arabidopsis thaliana
  unsure (1)..(491): unsure at all n locations
cctgcaggtaccggnccgggattcccgggttgacccacgcgtggcgagagcagagaaaaatagaaancnnaagaagnancaaacnttatgaagacaaacgacccaagcccgcccaaaaaagaggcagacgaccctacataacatcaatcgacccacgctaaaagagagccagagtgaaaagaagctcctcaaaaatttctatttgggaatgttagggaaccacacccagagacacccccaaaaacaaaaaaccaccaaacggcgggggaatcgcacgaccgagaacacatacagaacaggcgagcgcgacaaagagcgcgaaaagcgaccccgaaccgcataataccccgaccacgcacggggacggtaggaaaccgaggacgtcgcgccgataatgccgagggaacaaagaggcggggcatattcgcgggagggatatcagaaggtagaggggccggttcgcggagacgtcgtggcagaccagacaggac

SEQ ID NO: 185271 - DNA, 450 bp, Arabidopsis thaliana
tgcacgcctgcaggtaccgtccggattcccgggttgacccacgcgtccgatcaagtaactctgaacactctatgataaaagaaaaatcattcacctcgataccagaaagaagaaaagtcatctgctttctgggaaatttgttcatacaacagtcccacattcttaaacttcgaattgttcctgtttccccccgattatttttttttagggggggtgggccaacaccaccctattcccccccttaccacaatattcctcttccctccctctcttttccccacccatttctgctttccatctcccctcaccaccccttatcgccccccctccccccccctttccccctcctcctcgccctcgcctacccccccgtttgtttcccccccctctcatttccctttttccccctcgtcccttcttcgcccctttaccccctccatctttccatcc

SEQ ID NO: 185272 - DNA, 501 bp, Arabidopsis thaliana
  unsure (1)..(501): unsure at all n locations
gcctgcaggtaccggtnccggattcccgggttgacccacgcgtgcggggccttannaaaaaaatctttcaccttaaagagcacctttttcagacagaaatttagcaatcgccatataaagtatattcgaccacactaacaatacatacaacattttaccataatatagaattcaagtataacacaatatccaccctttattccttgcgggtgttgggcgaaacaaaaaaaccgtattctccacaaaaaagatatctcattaacggtcccttgtattccccaccccgattttaacaatcaatccgcccgtcgacaaaaaataactcagcattaaccacccaattttacagtacttacgccacatcaataccgcccgcgtttatttcgcggcgtctaataaaccaaattaacggctgttaacttgattcacccgtttttaaagaagtaaatttttagaaaccatattacaaagagtaccgtagcttatcttatttacgatttc

SEQ ID NO: 185273 - DNA, 481 bp, Arabidopsis thaliana
  unsure (1)..(481): unsure at all n locations
tgcacgcctgcggtaccggccggattcccgggtcacccacgcgtcggtcttctatctagaaccccttatcttggagtaatagagagtttgaaaacaccagaaatcatggcgacaggaccagttgctcatcctcacccaggtagagcggattccttcctccttaatacctcaaacccaccgaanttctctcttttggattgtttgggaacaccccggggcgccccttacaaaaaaaatcccttccctccctcctttcccccgcccctccccccttttcgttccaccttcgttccctatttcgcctcatctccgcgccctatccccttcttcttccctcccctccctctcctttcatttccccgctcgtcattcccctttcttcaccgcttcccttgcttccccccgtttgccccgttcttatttcccttccctcgttcctcccctttcgtgctttccctcgattcctcttcacccccttttc

SEQ ID NO: 185274 - DNA, 451 bp, Arabidopsis thaliana
  unsure (1)..(451): unsure at all n locations
ccaaaaacaccctncccctcccccccccctcttttcgctctttttctcccgcgccgccttctcgcgcgccggcggttgtggttgcggccgcgccccggccggcgcgcgcgcggccggtggtgtcgcggcccccctcccgcccggatttttttttcggntttgtatgggccctaacntcttgggggctnaaggcaaaaaaaaaatgtggccgccgggcgcctccgtgggtgcgcggttggctgcgctcgcgcgctcgtctcccgcggccctcgctccctgcggcacggcgcgtcttgttgccgcgctctccccgcccctcgcgcgctcgccgcggcttcgtctccgtcggcgcctgcggcccgcgcgggcccgcgcccctggcccccccgctctcttcgcccgcgcgcgtccgtctcggtggccgtgtcccgttctccttctgccgccgctc

SEQ ID NO: 185275 - DNA, 495 bp, Arabidopsis thaliana
  unsure (1)..(495): unsure at all n locations
aaaaatggacaaaaaccaaaacaccctctcacaaaaacccaaagtaaagaggtttaacttaaatatggttccctttctttaaaaatccttgttttttcctttnctcttactaaaaattaattttaaccccaaagnccggnaaaccttttacaaaagtttttttgtttaaattcccccaatcctttattgtggcaaaccaaaaaaaaaattnttcccatttccttccccttccctttaccccccccttttttttccccctcccccattttttccaataagcttaattgcctttttcctttaaattgccaccaacaaaaaccaaaacttaaattcttaaaacccattatttttttattcctcacccccaaaccgcaaatttcccatcccaaccccaacttcacccttttaaaaaacaaccccccataattcctctaaaaacaaacacccccaaatcctcttccatttcccccttcaaacattaccatttaaaaaaaa

SEQ ID NO: 185276 - DNA, 353 bp, Arabidopsis thaliana
ccttttttacccaaataaaattgaaggtgtttgaggattaccttttatccacatgagggagagaaaggatgattacgcaggaaacgatggagtcatatccacagcaccggacttagattatcagaaattcaaacccaccgggcgaggaggagagaaaagattggggtttaaaaaaatatatcgggggggggggtggggccaacccctataaaagtgggggagcccggaaaacaaagaaacccgccaccaacgtttttcgttaaaggggggggcggaattaagaggcgcgggccgaaatgatgggggcaaagggttggggggcctgggggcgagagggcgcggagggggcgcgc

SEQ ID NO: 185277 - DNA, 493 bp, Arabidopsis thaliana
  unsure (1)..(493): unsure at all n locations
tccatcacgctacctagcttggacctctagagcggctccctttttggggtaaggcgcnccaaaaaaaacnncnnccccccccccccattatgcgaaaacctcgcgcccacaccggccaccacaaagcaaagcatcccaccgcgccgccgccccaacgccatcagcgcacccaaccgccggggaaagagttttattttgggttgtggtgacacacaaagggggccaagaaaaaaaaaacgcccccaggggaggcaagggacagcacagacccacgttacaccagcgctaaaccacccccacggcgtccaggccgatccgccaccaaaacgacagataaagaaaaccactcacccccaccaccccacagacaaccgacagcagatccagctacacactgccgcaccgacacaaatccaaagacctacaatcaaacgcacgcaccggaaaggccggcgcatccaggggcacacaacccagacccaaccaaacactc

SEQ ID NO: 185278 - DNA, 490 bp, Arabidopsis thaliana
  unsure (1)..(490): unsure at all n locations
gcctgcaggtacccngtccgcattcccgggtcttttnanggggggaggaaacccnnatcaaaaanaaannnacaaanacgagagaaggttttttcacactcatctcctttatctccctcctaaaaacccgacatacataccttcattttatcatttttattaaggctctgcccctcacacgttgcccccaccgacacaaccgacaagattgctcggttgggggtgtggcaccaaacccctcctcccattttataaaaaaaacctcctctctcaggcgtgtctactacattctccaccccttttatttccctcttccctagtcatatatctatcttaccactcagcaaatatattccctaactgcaaatgtacctatctatatgttttttccccccccccccgcgatatacacataaacaaaacgacgccccaccccattattctattacataaaacattttatatctacatttaatatttatatcataat

SEQ ID NO: 185279 - DNA, 164 bp, Arabidopsis thaliana
cgcacaaacaaaaccccccctttacgcagtgcgtgaccgcaccctacgcactgattaggcacctgcgaacccgggaccgccagtgtgcatacgtacgcgcccgttgcggtcacgggccacagggggagtgtactgcgccgcccccccaaccgcgaagagttttt

SEQ ID NO: 185280 - DNA, 359 bp, Arabidopsis thaliana
  unsure (1)..(359): unsure at all n locations
gtcgcatgacccgcgtacgtagcttggatcctctagagcggccgtgcttcttttttgttaggggccccnnaaaaaaaaaacaacacaanccaaccggggcaggggcgttatacatataatgttcacgcacgcggtctcggaacgtcaggtatgatatatatcgctgtgctcgtcccacgacctacgcgagtggacggtgtgttactgcacgcccgacgctggacgaaagaagtttttttttttgggggctagttgggaaagagaaaaggaatggggtaaaaaataaaaaaaaaaacggcccccccgcctacatatgtgttgtatagctnctagcccggacgatataaacgagcgagcgt

SEQ ID NO: 185281 - DNA, 496 bp, Arabidopsis thaliana
  unsure (1)..(496): unsure at all n locations
gttttaaaaaaaatatatatanggggggttttttttttttttaggatgangaagaaaaangaggaggagaagagaggagagaaggaaggagggggggaaggagccaagaagaggcagcaggaacgcgggcggcaaaaaaacggacgagtttatttagagggaaagtttggggccctccaaagggggcgggnaaaaaaaaaaaaaacgccccccggccggccggtccacggtccaggccccgcggggacacgggaggacaaaagcgcgcgccgcaccgggggggcggagcccgggaggcaaaggaggggaaggccgggggcgcgcggagggaggggccggggaagaggcggggaagggagcaggggagtgcagggggagagcaaggacggaacatgcgcaggagggagagcgaggcgcgcgcgcggagagaccgcggcgcacggggcgggggacggaggcgcaacgcccccaccccgcaggagcagcagcgggcggc

SEQ ID NO: 185282 - DNA, 372 bp, Arabidopsis thaliana
  unsure (1)..(372): unsure at all n locations
gcacgcctgcaggtaccggtccgagattcccggttcgacccaccgctacaggcttttttaaaaaaaccatacccttnttgactctaaagaatcaactgccaatggcaaaaccagccccaacacatgtcacgtcggctcgtttagcccccaccgcactcgcgtaagagcgcgcgcctggccggacggcgcagagggacgcttcctcatttggggggggggacacgcacccgcaggaagaatgtggcaaaaacatccccccgcacggcaaggtacgcggtgggacgcccgccccccgccccaagttcgatccctcagcgcacacatccagccgcccaggccccggcaccacggcacgagcagcgcacaaccccg

SEQ ID NO: 185283 - DNA, 510 bp, Arabidopsis thaliana
gcgtacgtagcttggatcctctagagcgggttccttcggcgagggggcgcgcaaaaaaaaaaaacaaaggagaccggacaacgccgcaccgccatacacaacaaggccactcgcgcaacccagaaatgacacaggcacgcacaggccggcgaaaagacgatgatcgctagacccccccgacaagttttttttttaggggggggggaaagatagttaagaaattaaaggaagaaaaaagaagagcgcgcagacacaacgtggtaaaacacaccacgacaccgacacgaaacgaccaccccccagcaacaccacccgacaagcagacgagtgcaccgaacaacacacccaaaataacgtcataattaacatagacgagcgaccaccgactaaaaacggcgccaactcaaaagaacacacaaaacgagtaacgcgagggccgaaggacacacctacgcccgaagcacgaacgagcgccaggcgaacctataccttagaaaaagagcgccgaga

SEQ ID NO: 185284 - DNA, 431 bp, Arabidopsis thaliana
cgcgtacgtaagcttggatcctatagagcggccttccttttgggggggaggcccccacacaagaaacgacagccggtttggtagtagtctccgtctctagctatttcaacaacgggcgcgggagatcgagatcaatgtagtttgcgatacgcgaaagacgaagcggatagaagtaagggcaggcgggagagatacccgcgaacagaatttttttaagagagggggggggccacgaaaatattatatggattattaaaagaagtttagggcgcaatcaacccatgatccgagagtcgggtagtctgctccagaatgggatagatgagtatgagccatacgagtatatgcgtagaattcctactacactgatagagcctcatatgttggtaatcttaatagttagcatgaggagaactccaggtcatagctca

SEQ ID NO: 185285 - DNA, 558 bp, Arabidopsis thaliana
  unsure (1)..(558): unsure at all n locations
gtccagccgcgtacgtagcttggatcctctagagcgcctgcctttttggtttagagccgaaaaaaaaaaaaacaccaaaccgagggggtggcgtggcgggcccaggttggggtgcgcgccgcagcgcacgctcagtaaactagagcacagtggacgagaggaacggaggtcgttcaatcaatatgcaggagcggcgcgcagattttgtgaaagagggggtggctctatcaatgtggggtagaaataaaaaaaaaantgccgcggacacacgcggtcgagcgagtgttgctcggacgcgggagggggcgccgccgatgtcgagcctaacacccccctcccgcagaaatctgaggcaaccctcaaccccagtcgtggatgttgtagcggcgagaggcggcattcgagcccgtgtagcaggggtcggtctccgacggctagggccgtgagtatgggagttcgagaggagatagggaggtgctggaagcgctggtcatactgaggcgcgagcggcacgcgcgctgcgacatggcgaggggcgcgcggagccaccacggaagg

SEQ ID NO: 185286 - DNA, 580 bp, Arabidopsis thaliana
  unsure (1)..(580): unsure at all n locations
aaaggagaggggggggtttaaaggggagggggggaagagacccggagaggaaggagagngcggggagaggaagagagggagagagtgggcagggtggaaggtggtagggattgagtgggcattgtgagtgagtagaggtatgtggtttagtacgggtaggagaaagtgaaaataggaaaagatattaaagtggctgacgagaaaagaggaacttttttttaaaaaggggtgttgaaagagaaatagatagagaaaatgagtgagaaggaaggaaaggcgagaggcgtagtggtattgatgtttgaagcgtaagattaagaagaaagatgaagaagtgaataatggagagttttgggagtagatagtngggtatgggtggggatgggttgaggtatgtatagtagttgtatggttaggatggatgggggaggtgagtgatggataaggtggagtgagaattgttgattacaaggtgcgtgttaagagtattagaaaataagaaaagaggagagagggttaacagggagaggtgattagagaacaatgagatttgcatgagtgatatatatgtatggagagg

SEQ ID NO: 185287 - DNA, 311 bp, Arabidopsis thaliana
atggggggggtttggggggggagcccggaaaacacgtcggcggccaaaaccatcccgatataccgccgcattatatgtcgggcaaaaccaacgaaacttctcccaaaaaaaactttgaggggtagaaaaaaatagagaactcgtggccctatcagaagaacgcacaacgccccatcatgctaccgcaatatagaacaggccttaagattttcgataggaataacctgaaacgagcgtagcacctcacaacaacgaaccacgcgacctagtaaacagtcggtattcgcccgagtaggctgatcccgacccac

SEQ ID NO: 185288 - DNA, 477 bp, Arabidopsis thaliana
  unsure (1)..(477): unsure at all n locations
ctttttttgttttttctatctcaaaaccaaaaanacacaattcctttncttctccacctaattatatatttggtccttaacaaataccaccaaaactctttcccttgttaaattttttccattttttccctcaaaccttccacctcctgaaaaaaccttcctttattatataatgtaaataacacatttcctttccttaagattnaggagatgcaaatcaaaaaattttgggggaaaatccataaaaaaaattcttcttaattaaacccccttacacaccaccccaagtatttttttccttaaaacccccctttgtcccttttttttataaaacccctttcctttattttaaacaaccaaaaaaaaacacacaatctaaatcctcattattttcccaaattttttaaaaacccttcttcttatgggccccaaaaaaattctcaccctctaccctttctagaccccaaaaaaaaaact

SEQ ID NO: 185289 - DNA, 436 bp, Arabidopsis thaliana
  unsure (1)..(436): unsure at all n locations
ggggggcnccccccccggggggggggagggggaccactcccggtgtgtttttttcaccaagccctttccaggggggagaacccccccttgggtttttggtacccaaaaccgttcgggaccgcaaagggggtgtctctattttttaaggggggggggggtctaaanaaaaagagtgggggggtttttaaaaaacaaaaaaaccccccccccttctttttttgggtttgttttgccccgcccccccccctttagcgctgggtgtggcccctcccccgcggggtttggtctacgaaaacaacctctgtttttttttatttgttataaggggggggaaacccggcccgcggggggcccgttggggggncttgagaacgccctacctctatacggggcgggtttcgccgaggggagaaatataaccccgcttctcgcgggc

SEQ ID NO: 185290 - DNA, 453 bp, Arabidopsis thaliana
taactcttttatttccatatataatagctacatggtattggatgaaactatactcaaccatgtttaaatgttgcagtggctgttgggttttacatacctacatctttcggtccattataagaggctcaggggatttggatggggatgagggtatcttatggggggggtggttaaaaaaaaataaaccaaggggaaggggtttgtttttcccgcccctcttcgcaaggtaagacctgcaagggatcccttatgttacaaagcatcccgggattttcgcttatggaaattcttttttccaggaacgggggaccttcattgaaaagcaatcccacaaaattccgcattcccaagggggatcaagtgtctggggaggctgggcccgtgaacacatccggttttcgtgaccgaaggggaaaaacccctaaggtccgcccttttaagatgggggttttt

SEQ ID NO: 185291 - DNA, 438 bp, Arabidopsis thaliana
catgagacttattaggggaaagaatttataacccacacctaggggggatggaatccaatcccttatattgccctcctgtttggggggtattgtttcccctgggtgttggctttccccccttttggtgttttaaacaccaagaaatagggggccgtaaccctttaaactaacccttcaccaccaccccaatcctcgatgagagggggccctttcaaactctctccccatgggggggtttccaaccctcaacacccctacctaagctttcctcccttattgcgttcctccggacctaaacccaacaaagtggggtttttcccccggaaccccccccctttttccacttttctccccctccctccaaagggggaccccccccccccatatcccgggtcactgaccgtccttgagaggccccccctcccgcggggtgccccc

SEQ ID NO: 185292 - DNA, 401 bp, Arabidopsis thaliana
  unsure (1)..(401): unsure at all n locations
taagctttaatcctctagagcggcctccctttttttgttttggagggtaaaagttataacttttcaccaaaggggtaattaagcattttaactaccctaaaatcaaaacccaggtagtataactaaaaggaaatttagacaaagggagagagaccgggttttaattttcagaagggtttaggggggatttggtcgaaaggtttttttttggggagttggggcacaaaaatggggggggnaaaaaaaaaaaaaaacccccaccctggcggtcgggtccggcgcgcccctggcgggacgacccgcctgcgacgcgcgccgcgcagagcggcgcgccgcccacgctgggccgccccgaggaaaccgccgggcgccgcgcggccgcggcgcagcccgtgatgatc

SEQ ID NO: 185293 - DNA, 471 bp, Arabidopsis thaliana
cccccacgtggctttctgtgtcctagctgccctccacttgtcctccgggtcgggtcggctacgggcgcgggtatgttggcttctcgaggcactgtcggtcaccgccgccgcgcgaccttttttttttggggtggggcgcgccacctccgccagtccgctctcatgtaaatgtggtccgcggctgccgttcgcgcatgcgcgtgcagcagcgtgtgggtctggagatcgcggcgtgatgggccgcgcctcttgctagagtactgctgcggtgtgcatgagactgctctgccgaagccgctcaacgagttgcacttagctcgcgcgtgtgtcgttgcatgccgcccgcccacgtccgccgcccgcatgaattgttctgccgggtctacgtgtagctctaggggtggcccgtcaccgctcgtggccgggcctgccgccgccgcgctcgcgccccccccgtgattactgccggcc

SEQ ID NO: 185294 - DNA, 494 bp, Arabidopsis thaliana
cgttttcctttttttgtttaggccggcaaaaaaaaaaccccaaccgcgcccgtactcctcttctcctcttctctcgctccccactcattttcctaccctttttttttctttctcccgctacgctcctcgctccatctccttttttactgaccccccccccttcaccaaaacgttttttaaaaggttgttttcaacccccacacataatcacctcataaaaaattctccccgccccccttcgcccactttttttttttattctccttctctccattctccatttcttctcccacctaccttgcctcctattcttctctctctctcttctcggttatctttctcttacccatactctcctgcgcagtctccttttctttcctttacctccttcgctccctccttccatcttctcgccactgctttataccaatccccatcacctttctcacgttttcctctcttctttcccttccttcctcgtagccctccttctc

SEQ ID NO: 185295 - DNA, 533 bp, Arabidopsis thaliana
  unsure (1)..(533): unsure at all n locations
ccccccccccccccccctctcctcctactacatctttcgcctccgacacttctcaactcttcctccgantccttattaatctcgctcccccccaccttctctccctcccccattacctctcatccacgtccccccaccttcccacacccgtctttttttttagcgcgattgttttttnacacacataaatggcggggtatttaaaaaaaaaaaaaagccccccccgccccccccactcctgttgtatcttcacccttgcacccaccgcccctccccaccatcacccccccccccgcctcccccactctcccccaccccccccccctctccccctcctctcctcctcgtccgcctctctctcctctctccctccnccgccttacctctcctctactctcacctcccccctcctatctcctcccttctccctctccgctacaccactcccccctcaccttccctcccctcactcccccccttctctctcacctgcctccctctcctcctccccccccttccccctccccccccct

SEQ ID NO: 185296 - DNA, 517 bp, Arabidopsis thaliana
  unsure (1)..(517): unsure at all n locations
ggccccccaaaaaaaaataccccccgggtggggggaaaaaaaaaaaaacaaaggggcgccttttatttaataaaaaaaanannnnnnaaaaaaaaaaataaaggcggggcgggtttttctttttttcttcttctcancnnacagcaaaaaaaaaaaaaaaaaaaaattttctatttggggggggggggaaaaanaaaacccaggggcgacacncaacaaaaaaaaaaacttcccccnctgnggggaggaaaaagaaaaagaccccccaacaaaagtggggcgtcttcatcccctcctcccctccgcactaacgggacgaggagtgtagtacagcccctcccgcaccatcccaacccgcctcagttcgataataaggcaaagctggccaagtagagaaggaacacgagaaagaagcaaggacacaggaaaacagcctgtaaaaggaaaataaaggaccgacacaaaggaacacgcggaaccgcacacacccagaagaaacgccagataaagaaacact

SEQ ID NO: 185297 - DNA, 512 bp, Arabidopsis thaliana
  unsure (1)..(512): unsure at all n locations
ttttttaagggggaaagagatttttacccccctcccacaaagggaaaaaggccgnncccccccaaattattataacaccccggggggttttttgaataaacacaaaaacaacttcgtttctcccttttaagtacnaaaacacctttttctactcttttttttttttttttttttttctcttcctaatataacaaacaaaaaaaaattttttttttttgattgtttgggacccccccacgccggacgttttttaaataaaatccttccctttcatattaattttccccaccataatctttttttgtagttgtattttctaattacatgtttacctcattacttgttattcttctactcgcctctccctatgtttgtatcaagtcacatttactatttttttatcttctccacacactttttctatattttctcttcattcgctatatttcttcttctatttgtatattattttcatttttttcttgtgttctttctttatttttttttatctc

SEQ ID NO: 185298 - DNA, 469 bp, Arabidopsis thaliana
  unsure (1)..(469): unsure at all n locations
cgatnatttagggaagacggncgcctgaggtacaggacggattaattttagaccaggggaaggcagaaataagagagaaggggagggagaatggtaggtatgaggcggaggaagagggggttgggtatttagtgtgaggtgttggaaggtggggttgggttttttgtatgttgaggagagagagggggagaggtttttttgacgggggagcaggaggacgagggtcttatggggtagaccgggcagaatgagggggaggagggaggagggaagggtggatggagggggaggaagggagggagaatgggggggggagggttgtttaggtgaatgtgtgtatgtggtattagaggagggtgtgagggatgaggtgggttgggggagaaagtctgatgaggggagtgtgagatggatggggaattgttaggggtgctggggggtttggggtggggggggggggagttggggt

SEQ ID NO: 185299 - DNA, 1050 bp, Arabidopsis thaliana
cacgcgtacgtaagctaggatcctctagagcggccaggcttaaatctttttttttaatgagaaaagacaacaacaacggggaagagcaacgaaaccgaaggatgccccaagaaaagaacagacagggaaaaaagaggaagaaaaaagaagaaagaagaggaggaagcaggagagtttaaaagagactgcctccttacaaagaggggggggacaccaacgacaaggaaaacaataagacacagagaaaaaagaaacacggagcgagagaagccgaaagataaggaagagaaagacgaggaggacgagaagagagacacgagagagagaaagagacagtacaaagagaagcaaaaaaataagaagaaaaaacgcacagacgaagaacaagaaaagaaaaggagacaaaagaaaaaaggcaaggcgggaggagacgcgggcaagcaggggaagcgaggaggcaagcaaggcaggagggccacagagagcgaaccggaggaaagagggaaccgaaaggagaacgacgacgacaacaaaaaaaaaacgacaagacagaaaaataaaaaagcggcgagccgagagagacaaaaggaagaagcgagaaggcacgaaccgaaaagccacaggaccgagcgagcagaggagggaagaagggggcaacggcggggaggacgaagcagaagccaaggagagccgccccgacgaccccggcgcccaaccaccaaaaggaagcgcccgaacaaagaccaaaaaaaacagaaaggacagagccgccacaacggaaacggcgacgccacaaaaagaagagataaagaagaacgacagagcggacaaaagaaagagacgagagggaagcataaacaaaagaacaaagaacacacacacagagaggaccacgcgatcaaacgaagacgaaaacgaaggcgagggaaacacgacacaacggaaaagcgataagaccaaacaccagaacagccacaggacgaagaaggaaggaaaggcacccaaacgcatacacacccggaccgcgacaaggaaagaaaacaaaagaaa

SEQ ID NO: 185300 - DNA, 682 bp, Arabidopsis thaliana
  unsure (1)..(682): unsure at all n locations
catagcacgcgtacgtaagctaggatcctctagagcggccagcctaacccttttttatataanacaaaccaaaaaacgccagctgtcaataacaaaagcaggaaacaccacaagaacggagacacaacacgaccaaaggcacgcagcgaagcggggaccaaagggcacgcgggggggaccctcccagaaacggggggggacagaagaagaaaaaaacccaaggaaacgaacccacaaagagggagaaacgcggaggcacgaacaggagggcaagggaagagaaacacacacaagacgaccaacaccgcaacgaaagcaaacccgcagacccaccagaagagagcaggagcacaaaaggaacccgcagaagcacgcaaacagaaaaagagaagcagccgggccacaacacacgaacgagcagaaaagaaaccagaagacacgaccccgccgcgagaaaaaaacccccacgacagagaaagagcacaccccccgcgaagagcagccgagccgggacaacccagagcagaaccccaaaccaacccacgacgaaggaaagaacgaacgccgacacgcgacagccagacaaaccgcaagcagaagacacaaacaaaagagaaaagcggaggagagggcgagacgaagaaaagaaaaacacgagnaacgaaacacaaagggaagagag

SEQ ID NO: 185301 - DNA, 498 bp, Arabidopsis thaliana
gcctgcggtccggtccggattcccgggtcgtccagcgtgcggaaggcgatacaaaaacagaagtctattctatccgatgtaaatgacaaaaaggattgttggtaatgggtgctggcggggggggtttttgttgtaactagtaatttaaattggcgcggcgcttcggcgcggcacgcgaggtccctttctttggggttgtcaaagaacgacggggtgtttcaattagtggggttcctttagatggattcaggtagttgtctttaatgtgtgtccaactaggactcagagtggtgtttagtatgtgttattggctggggtgtctccgtatataattgtagagtcagggatggggccgtgcgcttttggtttaatgtgggtgggggcggtgattgttagtttgtgagtagttgcccgggcggcgaggtgtttgatatattttagggtgggcggtgcgtttgtgagtggatgtgatgtggggcggactcccggcggcccccg

SEQ ID NO: 185302 - DNA, 633 bp, Arabidopsis thaliana
tttataacaacaccacctcattatgtctctccataggagatcgcggactccttgtaaaaccgaacgggaaggcacatattgtctcaccctaaaacaatattagcaacatacccagattttttttaaaaaggggggaacgaagcaaaagcaggtttttatcagaattacccaccgctacggtgagacatatggggtctctccgcatgtcgcgcgacgtgtcattagtagatgcgataatagagggagaatgtgttcggggccagcgagtcgcgccgctatatcctgtctcctatatagtgacgctattatataaaggtgtcttggagggacttggggcacggcttggttgtctgtctccgtccagctgggtcgattcccacacacaagattagagagatagagtgaacgtaccaccgtaatatatatcccccccaccattctacaacctaccccccgccagatattgcgcgtggcgtggatctagtggcacggcgttcaagcgcgagcggtgcgctcgaatgtttaacgaatcaatctgtagtgcgtttatccgaaacgtggtatccgggaggtgtgtcgcctttagccacagaggagggacgggtaacaataataactatatacacattacga

SEQ ID NO: 185303 - DNA, 747 bp, Arabidopsis thaliana
gggggggagagagagaggaggggagttagagaggggagaaaccagcagaacacgacgcaacgaaagacggcacgaaacaaacgcgaaaggaggacaacaggcggagaaaagcccggacgggggcccgcgcaagcgacgccgcgcgcggcgccggaacgcacaaacccctacaaaccggggggcaaacacaacacagacggagcgagcgagaacgccgaccccgcagcacggcgaacgccccacgcgcggcaaaacaagagggggcgagcaaggagggacggggaacgcagggaggagagagaagagggaaaggacacgcccagccacacgcgcaccaaagaacccatcacacaaaaggacggacgacaccaacggagacgacacaagaaagacggacaacagcaagaaaaagaacacaacaccagcgaacgaccgcggacaccgcgccgggccccgccgaagccgccccccagaaaaagaaggaacgccagccgaaagacaagccacaggacgcaaaccgaccgcgcccaccagacacgcacccccgcgcggcgcgcaggagcagacgcgggccgacacgccagagagtaggccggcccgcgggacacacaaccagaggcgaaagggcgggccgacgagacacgaagagcacgaacaaaaacaaaaggaagagagagacgagcgccgccacagcacgagacaacacccgcaagacgaggaaccacgaaacaaacgcgcacaaaacga

SEQ ID NO: 185304 - DNA, 651 bp, Arabidopsis thaliana
cacgaagcgaaccgccacccgcgagaacagaccgacttttacacggcgggaggggagagacagagccgagcgaacgcaagggagagccacacagcacgaagagagaaaagaaggaacagacaacggcgcgacgaagggagacggaaagagacggcggccgaggcaccaccagacaagaaagagcggacgacgagaggggaccgcgagccaccagcgacaccacgaaaaacagagcaggaaaaaagagcaccaggacgcaaccagcaacacaccaggagaggacaggaggaacgcgaacgaaaagagaacccagcgaccggagaggagacggagcgacagacgcgaccgcggccgccaagcaccaccaggcaaaccacggccgaaccccccccggaagaaaacacagacggaagacgagaaagaaacaccgccggccgccgcgcgcgcagggaacacgagggaagaaagaacggcccaccacgaaaacacaaccgcgaaacccaaaagaacaacatacagaagcaacgcagccagaggcagcgacaggccggaagaaagaagcggaggggacacgacgacccgcaacgcacaacgaagggcgcccggaggcagagcccaagacgacgcacccgagaggcaagaccacccaca

SEQ ID NO: 185305 - DNA, 682 bp, Arabidopsis thaliana
cgcggggggggggggaggaaggggagagagatctagagagagggaggaagaaccccacgaaaagaagagaggggaccgagaagagggcaggcggaaggcggggcgcgagaggaaccccccggcaaacgagaagcaagaggggaagacagaggggaggaggagagaaagcgcggcacagcggcgcgacaagaacccttacacgagggggggggaggcacggcgagagaagggcgcgagaaaaagagcccacaaggggaggggggcggaggggaggacgaaaaggggggacgaagaacgacagacgacgcagaaggccgaagggcacaggcgcaagagggagcgaagcaagcgaaggaccgacagaccaacaccaccccaaaacgccgggacgggcggcgcagggccgccgcgcacgcggcagcaagggcaggagagcggggggagcgaggaaggagaggcagaggggaggcacaaaaacagaacgcagcgcggaagagaagcacgccgcgcagagagagcccaaccccacccgaggacaaccgacggtcggcaccacaaggcggagagcgcagggcggcggcggagacagaacaaaagaagaagggacgaacagcccgaagacgacacaaaacccgagaaaacgagaaggcaaagagacacgcacaaccagaagggagagaga

SEQ ID NO: 185306 - DNA, 900 bp, Arabidopsis thaliana
agagaagaggacgacgccaccggagaggaacccccaaagagaggacgcacaagcagaggacccccccacaaaacgagacaggaaacagagaaggcgaagggagcaggcgcgagaaacaggaaaggaaccacccagaagagacaccccctcccccgggggggggggcgggaaaaaaaaaacgcgggaggacaaggcccacaacagggcgggaggagaaaagacaaaaagccagcagcaagaacagagaggccaacgaaacccagacgaaagagagcgacgacacggggagaacacggcgacgacagggcacacagcccgcgcggcgacgaggggagccggcagcagggggggaggagcaagcgagaaccgacgcagaggagagaagcgagagccggaccacaagccccacaaaagaagggccgagaagcgagcgcccgccccaggcgaaaccgcccgccacacacggccacccccccccaaaaaagacagacagaagccgaagcagccgaacccgccggccggcgcccacacgggcgaaaagcgaagaaacgccagcacggggaggcgagccccaggcgagcaaacacaagccgggcaccgggagcgccgcgggaggaaccaaagccaccaccacaagaagcggaaacgggaaagagcagacagagaagcacacaaagacaacgcgacaaagaacagaaagccgaaccgccagaaaacacgaaggcccacggaagagcaagcacgcacgcgcgggccgcgcccccgagcacccccacgactgacccccgaagacaacgcgcgggcgccccacaggcgccacgaggcacagacgcaaccgcggcccccaccgcgagcaagaaaaagagccggagccggagagcccaccccgcgccgccagga

SEQ ID NO: 185307 - DNA, 565 bp, Arabidopsis thaliana
  unsure (1)..(565): unsure at all n locations
gcctgcaggtaccggtccggattcccgggtcgtcccacgcgtgcgcaaaatctcccattaaatcgcaaagttaattttgcgattttttttctctganngtggatggcttgcctccttaagagcagccgaggcggagtatcatgaaggtaaagtacgtattatccaggaagagcgacccttcagctacccgcaccacaccaccttccctcacttcggggggtgggccccgccgcgcgaagacgcctcacccatcaacagtaacttctcttccccacccacgcagccgcttatcttatctatattaggcgccccccgccggaaataacaccgccttccggagacactggcacagcccgcgttcttttcgccgccctttcattattgtaactatatcgctcacccccacaacctacttatctccacccttcccgctagccctgatgcctaatatttctccccaccggccctcctccagagtaagttcctgccttttctgtttggttatcgtgctcattctaccagtacttactttaggttgaagactccctcatgccctctccccccc

SEQ ID NO: 185308 - DNA, 514 bp, Arabidopsis thaliana
  unsure (1)..(514): unsure at all n locations
cctgcaggtccggtccggattcccgggtcgtccacgcgggggctcgctcctatgctttatggagaggaaaaggagtgagtggtatttataggctagtatatatatgaaagaccagacagacaagtttgcgaagatggtgaatagttaaagtatgtataggaggggggcgactgccacggccgcagcagggttttctatttagggggtgacacccacagaaaccgttatcgtctaaaatagttcagtctgagaacaaataataactattgaatataatcgcatttaggtagctatttaaaaaatgttgtctacaagtgcgcacagaagtcgcttataaataaataagaaaaatagaggagatgctgcgattactatataccattttatgagcaataaataatttaaaaatctaagacggccgggggggagagnggtgtatatatattttataatgaattatagcgtgagaacaatgaagaatgagggcggacggggatccttttatctccccccc

SEQ ID NO: 185309 - DNA, 818 bp, Arabidopsis thaliana
catagcacgcgtacagtagctaggatcctctagagcggccgccctttcctttttttttttttttttttacaatccaaaccatatggggaaaaacctaaagcagacacacaagagacccaaaatacacagacaaagagaagaaggaaaaggaaaaagcaaaaggagaggaggaaggaaaatctcctcgacaggggggggagacaacgcaaggggggcttaaataaccgagcccggcaagaacagggggcaaacccgagacaggggcggagaaaaaccgcagaagacgagagcaacccatagagcaggcggaaaagccaagggggcaagggggaggaaaagcttagcggggaaacctagaagggtgaggcaggctgccttaaagaagaggggaaaaaacgaggggggagaacggaacgggggggacaaggcgccaaaaaaggaaacggggcgaacaaaaggccaaagcctgcggggaagaacagacccaacggggggggggcccgcagcgaagacgggggccaagcgggggcgggggggggggaaagaggggggggagaaaaaacacgggaaaggcaacgaaaagtgcgccgagggcaagggagccggggccgggggcgccgggaggaagggggggacccacaactgggacgggaaagcggggggaaaccatgcaaaagagggagccccggggaacaaggcgggcgaaggcaaccacggacggggaaaacggtcggagccggaacgggtgggggagcccgagccaacagccggcgccggagaccacccggcagtggggagggaaaaggaggggccgagga

SEQ ID NO: 185310 - DNA, 935 bp, Arabidopsis thaliana
  unsure (1)..(935): unsure at all n locations
agctaggatcctctagagcagccagcctttctttttttttttttttttttttttttttagaaanccaaaaaaanncnnnncaaaccccaaaacccaaccaaagttttcttccaaaagggtaaaaactcagaaacaaaccaaagaacccctagcctcggggatactttttttacttcaaagggggagggagaacccaaaacatgatcagaagaaacccaaccgcgcaaaagatggaagccgcacaaggcggggacgaaccaagagaaaggcacactaaaccgaccgggcgggagacaaaacccccgccggagagccgaaaaccaaggagcagaaaggaaccgggcgggaaccacaccgcgacggaagaagccaagccgcagaagagaacctaagcggaggagaagcaggacgacgagacaaaggaaggcacggaagaaacagcgagaccgacgagataaaacccaacaacagagaaaaaagacagcccgcacgaaaaacggacagacgagggggagaagaaggaggaaggagaaggcgggggagacgagaagaggggagggaagggagaagaccccaccataatagccccacggaagggacaaaaaagcacgaaggggagcgggccgccaccgaaaacaaacgcgccacacacaaagcaccgaacaacacaaatccgccacacgacgccaaaccccgacccggcaagaacgcggagaataacagaacgacgcacgagaagacgagagcccccgacccgagaaggaaaaggaaagcacaccacaaacggaacgcgcccacagaacagagaccataaacaaaaaaagtaggacacgagagccacaagggagacggaccgcacgagagacggaacagagggcagagaaaagaccgagaagagaagagaaaattggggacaaaaaaaaaaaaaaaaaaaa

SEQ ID NO: 185311 - DNA, 536 bp, Arabidopsis thaliana
ggtgagagggatttttagggggaaccttcttatggtaaagggtggttttcggtttcttagccccaaaacgcgaggggagcgttgaagcggatgaggagaacgagtacagttttttttgggtggaggcccattttttggattgtgagccccgttatggtctccatgtttttcctcaggaggggaatggaaaaaattatagaagagcaaatggaggttcatcacagatgtacaggtattagagtgtaagcgtgtaaacaaataaaaactacattacacacgattgtatcagtatattacaccccggacatagccggttatatatcccaccatttgcccagatgtctttacgcgttccgttctttgcggcagctggttatgtgtccgattcatttttcgggccggtgcttctttgctcggggtccgctgatattaattgtgtggagaagcaagggggagcatccttgcatcgggtggtgtgtggggggtggtagtggctttttggaggccccaggtttttgaggtgtttgtgcttccgt

SEQ ID NO: 185312 - DNA, 196 bp, Arabidopsis thaliana
  unsure (1)..(196): unsure at all n locations
cctgcaggtacaggtccgngattcccgggtcgtcccacgcgtgggacacacccgtncgcttcttcttctacgattagnagtgtgagtgactgtaggggaagatgtttgctttgtccgttcgatgaatgtcctggaagttattatatatgattatgaatataggatcggagcaagaccaaggccgacgaagaacagg

SEQ ID NO: 185313 - DNA, 512 bp, Arabidopsis thaliana
  unsure (1)..(512): unsure at all n locations
cctgcaggtaccggnccggaattaccgggactttcaacgggggggaaaaatccaaagacggaagagagagacagaggagaaaagaggtttaagagaaggactgggcagtcgcccggtagagggcgggggggggagtagggagaatgaagagagaaagtatgaggggggagagggcagaggagacagagcacaaaatttcctcggtttaagggaggtaaaaggacagcaggaacggagaagaagaaagggcaaagacgggaaaggagaaagagagaatagggactagccacaacaagaaggaagagcagaaggagatacaaaagcaaagtagcaacgagataacttaatgaaaatccgaatataagacaaggccgagaccacacggacggatgaagagcgcgccgacgccagaaagaaaagaggagaaagcagggcgcgcaggaaaaaaggggggggtaagtataaaattagagtaaagaccagggttggggactgagaagaggaagaaggaa

SEQ ID NO: 185314 - DNA, 689 bp, Arabidopsis thaliana
ggggagaaaacacaaaaaaaggggagagagagcgaaagagagcgcgttgagaccacaccacaagggacacgcccaccgaagggagacaacggggccgccggggaggcacacaaaaaccgcacgacccgccagagaggagcgacggggagacctcctcttaaacgggagcggggagcaccgaacgcaaaagccagcaacaaaaaaaaagacagccggagggagcgcggaaagagcgagacacacgccaggcaagaacacaaacgaaaaacaaaaaaacaacaggggagacgaggggggggagagaagaggcggagggaggacagaagggggagacgacgacaacaggacacggagagaaacccgcacaacgaagaaagagaagacggagcagacgcaacaggaaaggcgcagcgagggcgagggcgggagaagagaccccaccagaaagcgggacccgagacgcacagcgacggccccgcggacgcaaaagaccgcacccaggaccacacgcagccccaccccagaaagagcgcagacaaggcggcgagacaacacacgaggcgcagccccacgcgcgcaggagcgagaaaccaagccacaacaccccgcgacgagaacgaccagcacaagggacggaacacaaggaagcaagggagggcgaccagcagacccgaaagggcggcgaggca

SEQ ID NO: 185315 - DNA, 844 bp, Arabidopsis thaliana
tttccccttttttttttatttctcgttttgggaaaagaaaaaagaaaaagcagaagaaaggcaggacaaaggaaacaggaacaacagaaaagaacaaagaaaaacagaaccccaacgaagagaacgaaagacccctcgaaacaaaaggagaagcagacagcgcggcccgcaacagagaaacgcgcgcagagaaaacacaagaaagcgcccagacaagacacaggacacaacaacaacaagcagcagaaagcgaagggcgcaaagaaaacaaggaacaagaccaccaccagccgcacccgagaaaaaaggacaaacaaacggaaccacgcacaagcgcccaaccggaaggcccgacgcacaaggagaaaaagaccaaagaggaagcacgagcggacgccgcccagcgaccggaagcgccgggggcagaaaccacccccgcggaggaggcggatcggaggccagccggaccgccggccccccggcgccgcggggggcgagcgcggccgcccggcagcgacaaaccaggggccacacccccagcacggaaaggggcagcgcgaccacgaccgaagacgagagggggaggcgaccccgacgacagcgagagggaacgggcgcgggagaggggggcgcacaacggaacacaagagacgacgagaaagaccgacacaacagcgagaaccggaaggaggcaaagaagcgggaggcgcgcggacgcaaacccaccaaaagaaaaaggaaagaccgcacaggaacaagagaaacacaacacgaagcaagcccacaaggcacagacgcgacacgagacaagagacccgcgggagcgcggcaggcccacaaagag

SEQ ID NO: 185316 - DNA, 463 bp, Arabidopsis thaliana
  unsure (1)..(463): unsure at all n locations
cctgcaggtaccggtccgngattcccgggtcgatccacgcgtgcgcccacgcgtacatccacgcgttcgaacaaatttgaaactgtagcgttattggggaccattgcgagtctgcattggtgggggttcgcgtgcaagatgattaataatatttaaaagtatgatagataacagcgcccgagcgctgctcgcccgcgcggcagcacctgngtccattatagggggggagagagacgaccagaggagaagctaatttgtaaatattttatctgtatttattcaggatatgtctatatattttattgtcttgtgggatgcactccaacggatactcatcatcgttttgatttggtgtgttagtcgctaacgctgtagtgtgtgccactgcgtatgtatttatatactactatttagagtgcgacggacttcaatttaattacacatacttacgtgggctgtcgtt

SEQ ID NO: 185317 - DNA, 829 bp, Arabidopsis thaliana
cacgcgtacgtaagcttggatcctctatagcagccgcccttttttttttttttttttttaagattataagcgccaaaatttcattaaagattgatagatccccataataaaaacaccaaactcttaaaaacaacccacaaatatcaataacccatacaaaaaaatataaaacaaaaaaattctcactttttcgggtggtacaaacacaaactaacccttattaactatcattacactaaatataaagtaaacaaaaacatcatatatccgtgtcaacacaacgataatataatattaaacaaacgatatataaagcaacgagaaaaccaaacccacctacaacacagcgcgcaaatagaccgccccgacaaaccataaagaccacaacgaaatcaccaccgagaaaacaaaccccaaccaccagaaccaataccacaccctatcaataacgaaaaaacatacaccacatcttatacttttcagcccatatatacttcactatatcacccccaacatataatccacaactctcatccgattccagcaaccaacacacatatccaacccataaaatataaagaaaaaaataatcgataatcacgaaaagacggacccaaccaataacgaccacctaccaacacagaaggatggacacccagcagccaaaacacacacacccaccaaacacgcaacacacaatagtgccccgaaatcgagaaacgagcacgcaaacaaaaacagcgaaaaagaaaacacaaataataagaacaccgaacacacacaaagagaagggccccatcattcacaccacctaactcaccccgcagca

SEQ ID NO: 185318 - DNA, 545 bp, Arabidopsis thaliana
  unsure (1)..(545): unsure at all n locations
gcctgcnaggtaccggtccggattcccgggtcgttccacgcgggggacaaaacctagcagagaaaggaaaagccaaaaggatgacgaaagtttagaggaggagagacagttggccccccgaaatagggggcgaggaggataaaaaaaaaaaaaaaagatcgagaggggagccgcaacgcagaacaggcaccagcacgaggcatccatacctagaaacggggaacaaagacacgaggcctggaagcgaacgactcgaaccgcgcgaggagttcatgtaagggatcgagaacgacacgcgcgacgcgagacaaaataaataatataggaacaccaaggcccccggagcgacgacgaatgcgtagacagggaggagagagcccagcacacggacgtcgaacgaggaggtaagcggggggtgagagaaaatagcacgctcacccgtccacgaggaggatggaggacgatgattggagatgagggtggggcggcgggacgagagaggatgagaaaggagagatgacaaaacgcaacatcaccgcaccccc

SEQ ID NO: 185319 - DNA, 476 bp, Arabidopsis thaliana
  unsure (1)..(476): unsure at all n locations
gaaacccggccggcaaagaggaggcgggcaagggcggggaagagaagcggaaggggggacgggcgcgggagggacgggcgcggggggggagagaggaggaaaggagacagganggcccggccccgccgcccgacgagaaattttttttttaaggtggtgccaagcgggggcgcgccgcgccgcgcgaagtcggatacccaagatgggtgaagtcatggcgctccggatgcacgcagaaacaggggaacgggggtaaagtctgacgcactgcaaacgtcggggcgcccccccaatgtgagtcgatagatcatcatattctcgcccccctgcccctctgaccgccccccaccgggcaaggagattactgaccaacccccatggcccgagcgcaccgagagtggggaatagaggtgtagtgcagcgagcgcacaagaggtggggagtaatcgggcggactgcgcccgtccccccccccc

SEQ ID NO: 185320 - DNA, 432 bp, Arabidopsis thaliana
  unsure (1)..(432): unsure at all n locations
tttttataaccccccacctctttttttttttctcttttttaaaaaaaaattttgcccccaagagagggtgtgccccccccccggaaaaaccccccccacatttttctaaaaaaaaaaaagaacccccctcccttttttggggggggggggggttcccccccctctttggggagggcgcccctctccctatttctatccgcggcgcgcgaccccccttccaaaaataaaaaaaggtcgggtagaaaccccctcttttttttttatcctctcaaaagacatacattcatttttttataaggaaaaattcattattaagcatgccactatatattccacattaataatacatcccgctntaataagattaacatgagaaattaatgagcctatgaaatagaatagtaacaactattcgctccattgttcacttaa

SEQ ID NO: 185321 - DNA, 976 bp, Arabidopsis thaliana
  unsure (1)..(976): unsure at all n locations
ctatgacgtaccatgcacgcgtacagtagcttagatcctctagagcagccaggccttttttttttttttttgtttgaaaagagctacgacaaatgagcacacacacacatacatcaaatacacagatcacgagagatatcaaacacactgacacaccacgaaacagataccagcccagctggctaatctacacagcgcccttgacaaaaaacggggacgcacccacctcctatacctacactaataactcccacagctaaataacaaacacacactcacaatcacaaagaacaacgacacaatcacgggaccaggaacccaaagagaacgacctaggagacaaaggcaaccacgaccgcacaccgcgcccgtcccaccagacggacacacagaaaaccgcccggaacgcgcgatgcgtgccgcgccgcgccgcccacccgcaccacaaccgcgccatgacccagccgcgacagacagaccacccacaaaggcagcgaccgaagggccgcgcgccgccggcgagtcgggcaccacccanattgctccactcgacccgcccccggcatacgcccgccccccccgcgccgagacagccacaacacccagcacacaccgggcgctctttgccgaagccggcccactccccaagcggatgccgccgcgccgccggccatgcaccacccacgccggtagcgccacgccagaaagaaaagcaacaacacccacccacacagacaaaccgctccaaccacaccacaaccagacaacccaagccacacacacagcgcaccagagacccaccaccccacccttacagacgaaacccccacaactacgctacaactaggaaccaacacaccaccaccaaagcagcacaccacagacacaccactacaacacgacgaggacgacacctaaaagacgaaacggagcccacacaccaccgaccaccaccccctaagaacgatagatcggc

SEQ ID NO: 185322 - DNA, 556 bp, Arabidopsis thaliana
  unsure (1)..(556): unsure at all n locations
cctgcaggtaccggtccgngattcccgggtcgtcccacgcgtgcgaagagaccaaaatttcaaaccaaaaaaaaaaaaaaatgagaactttagaagaatcgaagatgggtgagccccggaaacgtgtagaggcgggtgttgtagaggtatttactgtagttagaaaagttaggaccgccccgagtcccggcggaagaaggattcctgnttgtgagggggggcacggcgcgcgcggaaacgcatacagataaataaaaggctctcaagaaaatcgatcgagagacgcgatatttgttagatccgaccagtgcacgcacaggaaaaatcggtggattaaagatgcgactgtgatccggaactagcgtccggtgtagggatactaaggttgtagctactccgacaccaagcgagcgacaggggcagcgggaggggtgctactaatgaagaggaaccagcgcggcagggtggttagaagaatgaagagggaaaatgaagagaagagagggtctgggagtaaaaaaaaagcacaacccgcgagcgtccagcaccccacccc

SEQ ID NO: 185323 - DNA, 840 bp, Arabidopsis thaliana
  unsure (1)..(840): unsure at all n locations
catgcacgcgtacagtagcttggatcctctagagcagccgccctttttttttttttttagtcttaatttatttgctttactaatgaaaaacgagaaaatacgtaataaagattgtagcagtgagtattattctcttattacagactccattattccttcctttgagcaacatctattttttggagnccggggtggcaaccacgaaacggtcctgatgttcttcatccccccattgtaagagcaacttactttccgtcccgtacgttcagactacgcggaaaattagttgttaactccttcccctgccccataccccccctttgcactcctttttttatttaagatctagccccacctttgcttcttttaccgccgttaaaattcccacttttctaattcttttttttcccccgtccttatttttcttccgcttttttctcttcccccccccatttctccgtctatcgcacctttcccctctcctctctccacccctttacagttatttcgcgagcctgtcccatttttcgccctctttttatctcttcctgttgcgatggtggccgcgtcgctatgttccacttacctttttgtcttcttccacttccgactctacaaatcccctcgctcgctttatcctcctctttacatctttcctttctcacccccacctcacccatttcttctcaccactaccatccgccttgtcaccgcttctttcccctctttttctctctttctcccatagttcccttttgtttgtatttctattccctatcccatgatttagtatatgtccctttctcttccccctcccccccccctatttctccccttttt

SEQ ID NO: 185324 - DNA, 379 bp, Arabidopsis thaliana
  unsure (1)..(379): unsure at all n locations
agtaattattataatttttttttttctgggttgttttctcnaacacgctnttcttgtttttatttaaaaaataatatccctccctcctttcttttctctctcttcttgtctcctctatcctttttatcttatttataattatttattctatttcatctcactcttgcttcttgtattttttttttatacttttgtttttgtctagntttctctctaatttcagcatatttctctcttccttttttttttatttttttttctgtctagtatatcagctctactttgttgtttctatataaaattgtattctcctccctaataatgatgtaagatttttccatcctcccgcacgaattattcttatagattattttttatt

SEQ ID NO: 185325 - DNA, 452 bp, Arabidopsis thaliana
  unsure (1)..(452): unsure at all n locations
gtacgtaagcttggatcctctagagcgggctccctttttttgttttgggttacagctaaatctcttttaacttcaataaccaaaagtgactgtgaaagtgtgaaacaagaaaagaggaaaataaaggcggagtagagccatcctaaacgtaattaaaccaaaccagactttgccacatatttagtcggggactaatataaggggggggggggtncatgacaaggggcgnaatctaaaataatgttaagagatgttcatagcttcagcatgatacctttcgagatctttggcaagatccggaacaaacttctccactgggttctttccacctgcgcccacgggttttattcccttgtgcccccaccattaccccgggcctttaccacgggaacccgggctngaccaggtgatcacaccacctttgggggttttgggtggggggggaggggggc

SEQ ID NO: 185326 - DNA, 328 bp, Arabidopsis thaliana
  unsure (1)..(328): unsure at all n locations
tgcaagatagataaagagtgtgaagatgaagttcgatgagcgcgcgtacagcgtatgaggaatagataacgataggcagccaagacaaaagagaagaaaacaaaattttttttttaagggggggtggcagnaanacaagtaagaggatgggggaagaaaaaaaaagtggtgagaggagggggagaaagagggctgggcgaggcacttagggtgagagagcgagcacgatgcagggaactagatatatagaataagatagaatctagagcaagccgactggtgtagaaaatattcacgttgggacgacaagacggggtatgtataggag

SEQ ID NO: 185327 - DNA, 446 bp, Arabidopsis thaliana
tagaacccgaccaatagaaagcacaacaacaacaccccgcacgcacctccccgccacaagaccatatacaccgcacaacaacggcaagggggcacaaaaaagaaaattttttttttaggcttgttaggaccccccaccgcggggaacccctataaaaaaaaaaaagccccgccgggggagagaagcgggaaccccgacccacgtaacccccacacgcaccgtcacacgcaccacatcccaaaagaccccagccacgcaacgcacaaccaatcaactgacaagaaccccgcaccaccaaccacaacaagacaagcaaaaacagaaggaagcaaaggaaaaaaaaacaaaagaaaaaacccccccccctctccctcgaatacgaaacgtcccacacacacaaaaataaaagaataacttcagccatccccccccccaacacaacaaca

SEQ ID NO: 185328 - DNA, 492 bp, Arabidopsis thaliana
aaatatcacaaaaatcaaaccacagtttaaacctccgcaacacaatcaacaaacactcagttcattcccccacacacgcatctctccccgaccgaacatacctagcccaaaacaggggaaaaaaaaaaagaattttttatttttaagggggggcagaacccacccaattaatcgtgcaaagaaagaggaggagcagaaaacaacgggccccacgccgccaacgtccatatatataatcgctcccggcccacctatgtggccacacacgcagctggactgcattcggccgtaccagagcaatatcttacaataagaacaactgaagtagatgatcgtggcttaaaacaccccccaagcgaactagagataataaataaagagacattagtggggccccacgccacacagcaccaacattaaacacccgatcgtcacgttaattaaaaaattcacaggtatccccgccttgcgttctctactcatatacatata

SEQ ID NO: 185329 - DNA, 374 bp, Arabidopsis thaliana
agatgaagagggagaagggattgtgggggaagtgagggaggtagaaagtgttggggattaaatagaaagtttatattagagggaggggaggttgtatgaaaagtttttttttaagggggggggaaaaaaggataatgtgaaatgttatattaaaaaaaggtaagaaagtggtagttatttgttgttttatttgtggtggaggaagattgggataaaagtaggaaaagtttttgttgatgtgggagaaggatttgggggttaaatatgtattatagataaaggagtaggagttttatggtgggatagggtatagatgagagtattggagcagggaaatagtaaatataataattttagttagccgcccccccccc

SEQ ID NO: 185330 - DNA, 444 bp, Arabidopsis thaliana
  unsure (1)..(444): unsure at all n locations
cgtacgnaagctaggaatacggagggaggattttacgagggagagcagagagagcccacaaacaacaacaatnagtagagagcctataaagagagaccattctgaccgctgattgggttaaattgtaggaaagagcaaaggtcggggcgcgcgcgaatgaaagagagattaagacgcagaccgacgcggggaagaaaaacaaaaaaaaagttggtattttagggggggggaacaaccaacacaaaaagagtgcgaaagaaggaattgcggcgaaggtgagagggagggagccgcgagtaagacgcgcgacgctaggccaggtagtagagagaacacgccagacatgagcgccgagatctccacgcacagtgatatcggagcaataggcagtcgctcacaacgaccacaacaacgatagaggacgtcaatagatagtgatagagg

SEQ ID NO: 185331 - DNA, 534 bp, Arabidopsis thaliana
  unsure (1)..(534): unsure at all n locations
cctgnggtaccggtccggaattattcccggttcgacgagggactagtccgcggacagaattttttttatagtagggtagcgcagttttaatcagcacagacaaccgcccccgaggatcggccatcaaaacgatgtcgtactacagatatagttcatcagtaatattcacgcagcgcggaactaacaaacgtgcttananttaggggggggcgagacacagacaacgagcttcagagaaaaaaatgaacccgcgtgttgaatacatacagacaggtgcgcaagtaagatgaagccataataatatataaacagcggagagaaggggactataatgacaaatgatattagagtcaatactagcaacagccggtgagtaatcactagtcctcagtttatagattttgttatatggtgagaagacacacgttccagcggttcgatcgaaattgcgctacagatagattgaggtacgtcgagcgtggcaatgattattatgtagtatattttgtccccacgcccgccccaccccccccc

SEQ ID NO: 185332 - DNA, 490 bp, Arabidopsis thaliana
  unsure (1)..(490): unsure at all n locations
cctgcggtaccgtccggattattcccggtcgagagctactagtcggcggcgccttttttttttntggncgagggctttgggagggggggagaaagcgccccgaaagagaaaagagaaagtgtaggaccagggatgattattaaaagtgagaagacgcacgaaccgacgagttccctccttggggggggaagaaccaaacccaaacgattcgaaggaaaagaaccggaagggaagagaatagccaaggaagacatgaagggagataagagagcgaagtggagggagtgagtagaggaggcgagggggaagagaaaaaaaaggattccaagccaagtggagcgacggagaacgcgcactataagaagatacgtaaggaaggaaggagtaaaaaacgcacggaaagaaagccgccgagtggttcggcagggagtgaggggccggggagattgagagtgttaaaatatagagagcgggccgcgctccccccccc

SEQ ID NO: 185333 - DNA, 564 bp, Arabidopsis thaliana
cgtacgtaagctcggaattcggctcgagatttttcaaagcaggggagaagcgtcaacctcgtacttcatatgcacacgaggctctccttatccgaccagggaggggaattaccggtgcgaggaggatgtgccgcgcgtcgcgcgcctgtcgaagaataaaataatacctgtaacgcgccaagaaagaagcaaagaaaagatttctccattaggggtgggtggagaacaccgaccggcagcaatcgaaatagaaagaaaggaaccgaagaaaagagagtaccgccaccaccgccatggccttaaacgagtatctcactctaatgatcgaagcccagagaaaggcaaaataccacaccgcgcactattctcgcctgtaacatcccgcggcggcagtcgacttgaagaaggaatagattctgaacaacagtgataattatgtgtatgacaaatatatgaaccgccgcaccctcccacccaaacatccggaaaaccacaatccaggcggagcgaaatgtatagaacgtgagacattccacgcacatgaccagatctgttatatctatc

SEQ ID NO: 185334 - DNA, 578 bp, Arabidopsis thaliana
ctcccccccaatttaaagggaaaaacccgccccggggtaggaagggagagaaggaaagatttttgggagaggggggagggggtaaaaaaaaataaataaagaggtaaggggagagtagagaggagggatggggctctctggtatgggcgcgtgtttttggaagtgacgttgtcaaagacgggaatagtttcgcacagtggactccggggtgtcaataaaatatgagtgaataaaagagtttttttttaacggcttgttgggccaccacaccgagtcgtatatttaatggaaaaaagtccccgtgaaagaagatcgccggctcgggtgagatagaaacaacttaatttcataatctcttggggaaagggtaggtcactaaaatgtaataatataggtgtaactataggacagaagagagtctattataagcaatcccgagcggtatgaattgatagatatttattgagagctattacaggtggaagaatcagtatctacctccagtgttcctgatgagaaagtatttagtgacgacgacggtcggaggtgggtgtgtattattttttgttatttattgc

SEQ ID NO: 185335 - DNA, 552 bp, Arabidopsis thaliana
  unsure (1)..(552): unsure at all n locations
cctgcaggtaccggtccggaattattcccggttcgacgaggggactagtcggcggacgaccttttttttttttacgacgggcgaaattttggggagggggggggcggggggccccaaaaaaaagggggaggggagtttgacaacgagaggtggcgttgatagcagagacgccgcacgcaagacgcgtgcggaggttcccgtccaatgaggggggggggaacacccacacaaaagactccaagaaaaaagagcacccggcagcggggggggggcagggcagccccacccttatcccgaggaacggggcaccgcacaagaacagagccggggaacccccgccataccaccatctagtagtaggtaaaagagcgaggagatcaccacagaccgatgccaccacgcggttgaaagataagaataatgaaaacagatcggccgtgaaagcacaatcgtaaaccagaagacacaccgcggcagagaccggacacgcgttggcgaggntaagagaaacaatgagaataaacgcgacgccgcccgccccgcccccccccc

SEQ ID NO: 185336 - DNA, 503 bp, Arabidopsis thaliana
  unsure (1)..(503): unsure at all n locations
attccngggtcgacgagcggactagacggcggccgccctttttttttttttttnnnaaggacnncttttnnttnnnnnnnnnntncctcccccctcaaatacactcaactcccacccacacaagcccccacccacccaccactagacaaaccacccaccccacacacaccagcagcctacctcaatcaggggggggggcacaccaccacccaccccacgacagagaaagaagggccccggccagggccggggccagcacgcaccaggaacaggcgggggaggaacagagcgccgcccgcgcgcgcccccccccccccccccacggcggaggagaaccagggccacgcgcgcgccggccgccccccacccccagacagcacagcaccagcgccacccgggacaggaacgaggagagccgcgaccaagacggggcgggaggggagacgccgccgccgcgaaagaagaagaaaaagagtggcccgcccccccccccgccccccccc

SEQ ID NO: 185337 - DNA, 505 bp, Arabidopsis thaliana
  unsure (1)..(505): unsure at all n locations
cggattcggctcgagccttnttctaggccagagacacacaaacggcgattacgcagacaccgaacagggccgccggcacaccggcggcagaggacggccccagcccaaaccggacgaacccgcaccgacaggacgcgaagagggccgcccgcgccgcgaggagggaaaaagaaagagaaagtnnttcctacacggggggggaggccacaagcgcgangaggaaaaggaaacagggaaaggagganaggggggcgcgcgccagagcccacggcagcgacgagcccggaaccgcggaccggacgaacgcccacaccagcgaccgcccgcccccacgcgccggaaccacgcgcccccgccaccgcgctgcgaggcacagggcggagagggaaggaacggcggagggagggggaagaggggcgcgccccgccccgcaccgcaccgccacgcccgggacggccgcaacgaggaagagcgagcacggcgccggacacccgacgccccccca

SEQ ID NO: 185338 - DNA, 465 bp, Arabidopsis thaliana
gaaaggaagaagagaggagagggttttagggagggggggggggtttttttatatattatgtgtggaagaagagatagatgtaaaggagaggagaggggagagagaaaagggaaattaaggggggaggtgataagaataggatatatagtaatagtagaaggggtgaaggagaaaagaaaggaaaatttgtttttttttgaggtggggggaaaagagaggggagtggaatatgtatgtaagataatgtataagttgtagaatagtggggtggggaattggggagattaggaggagaggagaggtgaggagagtggggtggtgtggtatgtggtttaaggtagagtagaaggaaatggagaagggggggagtgggaggtgagattggtgatggagtttagaaggggtgatggtgtgaggaagatgtgtgggttgttgagagggagttgagttggtgggggggggagg

SEQ ID NO: 185339 - DNA, 470 bp, Arabidopsis thaliana
  unsure (1)..(470): unsure at all n locations
aagctcggaancggacgaggtgtccnacggggagaagacacccccacaanaccaccgccaggagggcaagccgcaagaagggcgacgagacccccggaaaggggggagcccggcacacgacccacaccgaaaaggcacacgccgcccaagagaagagaacaaaaaaaatcttcaagggggggggnacccccccgaaagagggagggaagaaggggcccaagngngggggggggcggcgaacacagcgaaggaggaggacgccaccgacgcacaagcaagggacgccaccgcgcccgaacaagaaaaccaaaaagcgaaacccccaggcagcgcacaccgcgagcccgcacaccaccgacgacggaagaaggagaaagagaggaagggccaccccccgcgcagaccccacgacgcgcccccagccacgagaggggggcagcgaccaccgcggccgccccgaccacagacag

SEQ ID NO: 185340 - DNA, 526 bp, Arabidopsis thaliana
  unsure (1)..(526): unsure at all n locations
cgcacgtaagctcggaattcggctcgagcanctacaaaaggggggcgagtcctaatctaacaacanatgtgggtntaaggaaggcacaactctagaggagaagagagaagaaggagcgccaaaaaagagggaggcgacgaagctttcggagcaccggcgcacgcgaaaaaagacacggccaacacacggaccaaggaaattaaaaagatcnccttcnatttagggggggtggccaccacccacgaagcagaaagaacaaaaaaagaagacccacgcggcgggggagaagagagagccggccagagaggcaacgacacaaaaaaccgaaacaaagagcagaccaaaaaaacgaaaacaaaccaaccccacagaccacaaagaaaccaccacacacacgcgcaacaaagaagaaggccccgcaccacgcgagagcaaaagaaaagaaggaaagacgaacggaccagcccgccaccccacccgacaaccaacagaccaggaccaacgcgcgaggacgagaggaagcaaa

SEQ ID NO: 185341 - DNA, 388 bp, Arabidopsis thaliana
caaaaccaacagagggaaagaaaaaaagaagggaggagcacgagcggcgaaacggagacaaaacccccacacaaaaaaggcaaaacgcgcgcacacagcagaccggaggcaaaagagaggcgcacgaaacccaaccagaggacacaaaaaagaaaagaatttctttttttagggggggggcacgaacaaacaaaaacaggaaaaggagaaaaaagaaaaaagggaggcgagagacgcacacagagccccccgcaacgacacgaagcgaagaaccagacaaccacgagacagccgcgaaaccacgcacacacagaatacacgcagaaccaaaccgcacggacgagcacaccgcaaaaaagcacgggaccaggcgagcaaaagaaaagaa

SEQ ID NO: 185342 - DNA, 555 bp, Arabidopsis thaliana
gagggggaggggggttttagggaggggggtggtggccgaggggaggcagacgaagagagatgatcgggggagtggggggaggggtcgaagaggatgtgtagtggagaagatggatagtggggtggaataggcaagcggggactaagagaagagtgtgggcggggagggataggagaagaaaaaagaaagaggtttttttagagaggggtgggagaaaggagaccaagaggaagggagaggtggggaggggggaggagagggagcggagaggggggcggggagaggcaggcggggggcgaggtagttaggggaagagctgatgtagttagagggaggggtggttgagatggagatgtgatggaagtgcggagtgataccgttccggagactagagagagaaggtggagaggggaagggcaggtgtgtaagggatataaagtgagaacgcggtggaggcacggcccggcgaggctagagtgggaggagatatgagagagaggaaaggaggtgattagggggcaccaagggagaggcactgtcacgtgaggaggggaa

SEQ ID NO: 185343 - DNA, 484 bp, Arabidopsis thaliana
  unsure (1)..(484): unsure at all n locations
cctgcaggtaccggtccggaattaattcccggttcgacgaggggactagtcggnggccgcccttttccccacacaaaaaggggaaagttagagcgacgagaagagagagagcccagataataacatgcacgctacatagatcacggacatactaacgaggaaccaacactccgccgcaccgacccagacagagaagtggagcacgactttcttggnttttggggggggggggtcagcaacacaaaaaaaatgaacgaacacgcggcaaaaaacaaagccacgcccgcgaccaataaaagagcgatgacagattataccgaaagcacaaacaacacacaagaaaagaagagaatagagaatcagacagaaaagagaatgaaaagacaagaagcaacagatcgtcaaaccgcccgtgtgcagacattaggggccggtaatcatataaataattaagtatgaatccccccccccccccccccccccc

SEQ ID NO: 185344 - DNA, 562 bp, Arabidopsis thaliana
  unsure (1)..(562): unsure at all n locations
gcgtacgtaagctcggaatncggatcgagtaaatggctagggggggagaggccccaagaacaccaagagccgggggagaagngaagaaccttacgcgcagcacggcgagaaagcacacgagcaaaaaggggaagaacgttcaaagacccggcggaggaaggagaacgacaaccaaaagcaccgaaaaaaaaaaaaaaaaagtttttatttagggttgttgggagaacgccccaaaaaggagaagagaggagagaagagaaacagggaagaggagagagggggccggacgaaggcgcagcggcgaacggaaagcaacggcccccgggtgcagaaccgagaagacacgcggggaagaacgggaaaaagagaagatacggcgcgagcaggcgagacccgagcaccgcacgagagcgagagggaaggcagaagaaaggggcgagaaggagagggagcgagaagaggagagaaccagccaccccccaccggcagcacgagaggcgaccagcgccgcgcgacaagaataaagagtgacacagcaagcagccgagagccgcccgccaaa

SEQ ID NO: 185345 - DNA, 590 bp, Arabidopsis thaliana
  unsure (1)..(590): unsure at all n locations
cctgcaggtaccggtccggaattaattcccgggtcgacgagcggactagtcgccggncgaccttttttttttaaaaannagggaaaatttttaaaacacaggaggagacccgcccgagaatgataggcttcgtaaagttttaatgaacgatccgcgtattggggtgagagattgatactaaccagaagcaagctaaagaagagtcccttcnntttagggggggtggggcaacacaaaacccgagagcaatgagagtgagaatagtggtacttctgaggggtggagggcgaggcggagctacccaacttgagagcttagagatatgatcatgaatagtaccctatcgctgaagctccacatactgaacaattggagtaatattataatatatgttactcgttacttctagatacagtgaaagacgctccacgtgctaagattgtaggtccagagtgggaggtgggcaggacggagtgcgaggagcgcggagcccatcagcagtcgggaggtgattatactatgaagagccgggcggtgatacaagataataatataaatctggcactattgggtgcgtcccctcctccccc

SEQ ID NO: 185346 - DNA, 541 bp, Arabidopsis thaliana
  unsure (1)..(541): unsure at all n locations
cctgcaggtaccggtccggattcccgggtcgatccacgcggggggtattccgttgacgaatattaagcaagaagaagcctgtcagttttgatagagggagagggcggccccgccgcaaaacacatacacaggaggagcttgaacaagcaacgagacgacgtgagcaaaaacgccacacgacacgaaaaaatcatcagagaatcncctttccntttggggggggggacaacacccccacccaccagcaaaaaaaaaaaaaaaaccccccacaaatacgcggcacccaagagccacagaaaggcaaagaaatcaaaagaaaccgaccgcgaagaacccagccccaggcgaaagaaaagaaagagaaagaagcaagcacaaacagacggccaacagcgaacacaccagcagactaacaatggaggagagaagaacaacaagcgacaagcacagacaacaccgcacgcaggaacgggaagagagaacacgcaacagcaggaaaaaaacaaagataaaaagcgcagcggcccccccccccccgccc

SEQ ID NO: 185347 - DNA, 521 bp, Arabidopsis thaliana
cgcgtacgtagcttggatcctctagagcggccgtccttttttggggaaaagcaacaaaaaaaaacttaaaaacctaaagaagcgagctctttgccgcacaggccggcaggggccaggaaagaggaagcaaggcggcacgagccgccccaacgaacgaataaagggacacaacagacgaagaagaaaaagagagatttctcaattaggggggggggcacaaccccaccaacaaaaaaaacaagaaaaagtactcagaggaaagaggaaagaggggccaacgcaccacccaggcacgcaaccaaccgcgggcgaaccgacaaccaaacaagcacacacacaaacccctccaacccaacatgcaagacagacacacagccgccaccaccgcggaaaaagaggacggaaagacgaaaaacgcgaaaaaagaatagaaaaaagacagtaggaagccaaaacagcgaacaactccagatgggaccacagcacagccaaaaaagaaaaacccacacacacaaacacag

SEQ ID NO: 185348 - DNA, 526 bp, Arabidopsis thaliana
agcgagagacctctagagcgggcgtcctcgggggggtgaaaagccccacgcaccaaccaacagagagaccaacgaagggcgcaactaccacccaacgcccgccgcaacacacgcacagcgaggacagagcacacgccggggggccgaccgccgaaaaggggaaaaccaacgcgccgcaacgggaaaacaaaaaagttttttttaaagaggggggccgaaggccgcccaaaagagggcgaagggagagaggggacgagagaaaggcagggaagagcccagcgagcgagccctgaagccacgaaacccacacgggcgcgaacgacaaaggtacgcagcaaggcagcgcgcacacacaccggccaacgagacaccgcacccaaacgagaaaagagagaccgcgacgcacgaactaaagaggagaaaaaaaaagaagcagagacacctggcgcgccacaccacccacaggcgcgacccacgggagccggagaaacaacaggccagacaaccaccaacacacccacagcac

SEQ ID NO: 185349 - DNA, 402 bp, Arabidopsis thaliana
  unsure (1)..(402): unsure at all n locations
agcnngganccnccagagcggacgtcaaggggagaggaaggcnccaaacaaaaaaaaccacaaagagggggaaccccccagaacagcgcggagagaaccccaaaagagagcgaaaagcggatggaagcaggacaggaagcaaaagaggggagggaacggagaagaagaagagaagtattgttttttgggtgttgggaaacagcaccaaaaaaaaaagaagagaaaaggggccaagaagagggggggaggaaaaaaaacgaggagcgagaagacagagacgagagagacacggcacagccaggggagcaagagacgcacaggcaccaggaaagacaggagcgggaaagcgcgcagggccagacaggaagaacagccgaacagacacggggggagagaaggagc

SEQ ID NO: 185350 - DNA, 545 bp, Arabidopsis thaliana
  unsure (1)..(545): unsure at all n locations
gggggggggggggcggggagtctttgnggaggcgagtagaaggggcgtttcaagaaaaaaacgcggcgggccaccccccagaacggagccgtccacttatctaaaatatgagacaaacctaaagaccacgagaccgcacagcacctgacatgtataaaaagagctcacccgcagaggaaggcacaagaagcgaagagcaagaaatatatatatggaaaagggtttaancgccacaacgagggcgcggggcaaatagaaaggggccccccccgccactacctcgcgggcgtcccccccaccgctccgtcaggccccccccccctacgacagccgcccccccctctccgccccctcctcatcgcctcacagacccgattccggccgcgagacgttcccccctttccgtccagtccagaataatcagtagaaatcactacccacccccccccccccccccccccccgcccccaagcgccctctcacgctgagaataataagaagtcgtctccattcccgcgcgtctccccaatcattctcactcacct

SEQ ID NO: 185351 - DNA, 318 bp, Arabidopsis thaliana
  unsure (1)..(318): unsure at all n locations
cctacgtaagcttggatcctntagagcggctttcctttctgagagaggggccccccaaccaaaaaaaaaattaccataactgcaacgccctttaagcgagccgagcagttaaatattatcagtaatatactgttcaaccactgaactacccgcaccaaacgccatgttccatacccctatcaccaacaagaaaaacacagaacaaattactatttacagggggggtggcaacacaaaacttatactcaaacaaaaaataaaaataacccccagtaagggtgagtcccggcgaccgaacgcccctataacgtccaacca

SEQ ID NO: 185352 - DNA, 478 bp, Arabidopsis thaliana
  unsure (1)..(478): unsure at all n locations
cctgcagtaccggtccggattcccggtcgacccagcgtcgcgtgaagctgtttagccatgctatgggggttatatccaatntttccgctctcttcatagcacaacgcatagccatggttcatagttaggatcgctttgtttttctatatcacccccgcctctccataggaggatttttttttagggggggcacgccacacgacatcctatcttgtatattagtccaccgactctcctgtgtttatgccggctcgctcctttatgacatatttttatgctgtcgttctctctcgccccctctctttcttttttttttattttccttatgcttcggtaccgtcccccctccattatttatttctttctttaacttttggtattcacgccactccccgcctttccttcttctcgtgaatatgaggtcctgcgtccacgcgtatcatattatttaatggatacgccccttcccccccccccc

SEQ ID NO: 185353 - DNA, 495 bp, Arabidopsis thaliana
  unsure (1)..(495): unsure at all n locations
gcctgcaggaccggtccggaatcccgggttgtccacgcgggggagtcctnnaaaaaataataaatatgaggggccccgatttgaggagagagggcacggcgccccagaagcggagggccgagaggcccagaacacacgaacggcgcgcgaggccgcccccccaccccccaaacgactttcttttttgggggggggccacgcccacgcagcaggggcgcaagagaactaaccaacgcggcgcgagcagcagacgggcgccggctagccggagggaaagcgaggacacaggccacggaggcaaccccccggccccacaagaagtgtgaagcgtagcgcgcccgacggaaccgagaagcacgccacagagagaggaggacggagacggggagagcggggcggggcaccacccccgcccggcccgaggcgcaaggaacggattgaggcggccccgggaagaggtgggtttgtggagccgcgcgccgccccccccccccc

SEQ ID NO: 185354 - DNA, 441 bp, Arabidopsis thaliana
  unsure (1)..(441): unsure at all n locations
ccccnaagagaaaaaggaaaaaatttacggagaggaggcccnaaaaaaaaccaaaaaaaaaaaggaagttcacaggacaagaccaggcccggacaaaaaagcgaggagcgaagcagcggggacgaaaacgaccggcagaagaaagagaaaaaaaattttattggggggtgggacacccaggaaaaagaaagaagaaaaaagccccgggggggggagggggacggggcagagggggaggccgcaaacaacaaaacgagaggccaagggccgggagggccggggcacgcaggagagagagcgagacgaaggggacgcaagaggaggccacggggaacaagaggaaaagagaaagagaaagaaagagacgggcgccccggaacgcccgcggcaagcagaggggggcgggagacagaaggaaaaggagaaaggcacgacggcgcg

SEQ ID NO: 185355 - DNA, 563 bp, Arabidopsis thaliana
  unsure (1)..(563): unsure at all n locations
cctgcaggtaccggtccggaattcccgggtctttcacgcggggggaggaccnnanaaaaaattattataaaagggagggggggcgttttgagaagagggaggaaggcgccccgcagcgaacagcgcgcaagcgagaccgcaccagaagaggaaagaggagatgcaagtcccgacccccaccaaagactcgcagccttcccctccattggggggggggcacaccaccccgcagaacgggcctagctaaaaaaaagtacccccgcgaacgagcgccaggaaggagacacgagagtaacaacaacagcaaagattgagtgcagccgcgcccagcgccaaccccacccgcccccaacaaccaaacaaagtaaataggatcacgaaagatacacagcccacccccacaccaccccccacctcaagagacagcaacacactcacaaatcagcaagagacagcccatcaccactaccgccctgcgaccgaaggcgcgcagactgccggcagcgagggagaagtgaaaagattatatataaatgcccaccccgccgccccgcccccccccc

SEQ ID NO: 185356 - DNA, 599 bp, Arabidopsis thaliana
  unsure (1)..(599): unsure at all n locations
caagccnccatcctctanagctttttacctactttttaaatccttatctcaaaaaaaaaagtcaccctctaaaccaacctataatacccattcttttctttntttaccccaccctcttataaaaacactaattacatatctctataaaaaaacttactacttttacntantaccncaaaatatacaccatactttttttaacatancacaaataacaacacatattacccacacaacattaatatatataattaattattatattacatatatttacatacacccacctcattctttctccttctatttaaccaattcttccccctatatacctatttcccctactctcatatttattaactatattacatattcttcttaataatatcttcccttaccacaacttatactcattaccactcatcaatccttctattctacattcactaatcctaaaaacctaaaaaatattaataattatatacctaactatccccaaaccatatttacttccaaatataatatataattcaataatatttattttttatcttaaaacaatcccaatatatcaacttatactatattctcatactcca

SEQ ID NO: 185357 - DNA, 412 bp, Arabidopsis thaliana
ccgggccggaataaacgtttcgaccgaggcgctaaacccaaggagggcaaactcctgagagacccgaaagggaggacaacccgaggaaaacgagagagagccaccgcgaggagaggaaacaggagagggagaaagaagggaggaaagaagaggcgaagacgagaagcagagaagaaggagagagattttttttataggggggagagaaaggagtagagcagagcaaagcagaaggcgagggagcacacgaagaaagaggaatggagaagaacaagaggtgaagagagaaggaaaagaagaagtggagaagtggaggaagaaggaagaaaaaaatagaaaaaaagattaagagaagaaacaaggggtgccgcgcacgcgaacaagagagagaagaaagtacatcacagaggaa

SEQ ID NO: 185358 - DNA, 477 bp, Arabidopsis thaliana
  unsure (1)..(477): unsure at all n locations
gcacgcgatcgtaagcttggatcctctagagcgttcgcccttttttttatttttttgaaatggagtaaatttgattaaatatgaataatccaatgatacacgaacaataaaattcttttaagaagttttgcgctacaatctgactctagcacgtacgggcagagacagtctcagaacctgaagctcctcacggtttttttcggaggtgagatactaaaaccnataagaggggatactgtgaggtcccaggaagtctaaagctgagtcgtaatactggaatgcctgtagggagagagagactggagggtcaaattgcccggagaggcatatgcgctgtaggcgggtgcagttgcctgaaacggagtgtcatgggtcgccgggaatgggactgtatgtaagcttaacgctggagatgtggattatgtgattggttggggggggtgggggnggtggctgtgaccttgggggagaatacat

SEQ ID NO: 185359 - DNA, 445 bp, Arabidopsis thaliana
  unsure (1)..(445): unsure at all n locations
ccgcgcacgcaagctgggacctctagattttcgcccgtcggtaaaactttttattttcaaaaagaaaccatggtgtgatacaaaataatgcgcgcgctgcaatcactggaagtataaggaaccaacttgttttagagatgggaccacatgccaaggggcagaaaaattatgcgccatcgaacattgtcgtttggggggggggccgagacacaggaaaacgggacgaaagaggccacgcaagcaggagcggggggggcagaagacgaagcaggagacgcggggaaggggagggcggccccggagcggggggaggcggcgagacgcggctagggtgggaaaagcgacagacggagggggcgcacgcgccaggagagaggaacaaggcggaaaggaacgaaagacgaagagncggaaagagaggaaaagggggggggacagggcggac

SEQ ID NO: 185360 - DNA, 474 bp, Arabidopsis thaliana
  unsure (1)..(474): unsure at all n locations
ccgcccgcaggggccgggccgcaattacactttcgacccgcgcggacagccataaaaaaagcgcgcactgtccccgctgtcaacgagctaacaaccaatacgtacggcacggcggaaagtcgctcccacagttatggtacctgtggcgcccgggacgccaaaggcaagtaacgaacgacaacaaccaacttttttttctgagggggcgcacggccggcagagaagaaaaagcacagacagcccccacggcagacgcggcggaaggagaaccagacgcacaggagaaagatagtgagagcgaggaggagggggagaagaagggagaggagaaagggggggggagnggggaagggagggaggagcggagccggaaagacggcgccgggcggcggggggcacggggggtgcgagcggagggcgcagccaggcgcgaccggagcagggcgaggccagaggaagagggccgaggcgggg

SEQ ID NO: 185361 - DNA, 454 bp, Arabidopsis thaliana
  unsure (1)..(454): unsure at all n locations
cgccngcaggaaccgggccggaattcacggttcgaccgagggggacaacctnnggaatgaaaaaccgactccgcggaagggacgaaaaagacagcggagagacagcaaaccgcgagccacggagggaggagagtttgtggcgaggggaggccggggagggagagggacgggtggctcgcgaggcgcgcagaggtttttttttggagtgggggggagccagagagtaggagggtggaaaggggtgaaggagcgcggggtgggggaccgagggtagaggggtggtgatggtagggtagggagtgtgcggaggggcggggagagagggaggagttggagaggatggttggggagtgagctggggggggggaggacactgtgggggggagtgtaatgtttgtcagtagtgtgggtgtgtggacgtgtcaagggagctgtggggtgcgattgggggggc

SEQ ID NO: 185362 - DNA, 336 bp, Arabidopsis thaliana
cacgcgtacgtaagctcggaacccggagagcgttcgaccggaatggagacccgaagacaacaaccgaggcagcacaagcagaacatgaacgcgcccgcccagagcgagacgcaagacagaaagcccacaaccgccaaagagcccaagagcgcgaaaccaaaaaaggcagcgaagcggacccgagaaacagctttctgttaaaaggggcacaacaaacaacacaaccgcggcggccgccagactagacagcgcaacagcagagcgaacagtgccgaaccagcgcaaaaagcgcgccaacgcaggcagaaaaggatccacagaagagggcggggaaga

SEQ ID NO: 185363 - DNA, 220 bp, Arabidopsis thaliana
gcacgccgtgcaggaaacctgggcacggaattaacgcgtcggagcgacgagcacacccgacggaggccgcccaggcacaccatgagtggaaatgactgcgcacagaacagcatggccacccaaaccagagacaaacgagagcatatgaggagacgtcctaacagcgggcaaatcccacaaaggagacgaattactctcggacaagacgagcacaagccga

SEQ ID NO: 185364 - DNA, 176 bp, Arabidopsis thaliana
caatgggaccccgacgcaagtgcaggaccgggcctctacggaattaaggagctgatatgaacaataggcgggcagctttggacccgacgggtccccggacggggcgttggaagggggagtagggggggggggggaggcgagggggggggggggaagggagcggggggggggggggc

SEQ ID NO: 185365 - DNA, 359 bp, Arabidopsis thaliana
cctgcaggagccgggccggaatgaagaggttggacgaggagctcactcggcggcggccgccctggatttgtcttgttgttgcggaaacagattgtggaggtcgcgaaaagcacaacgacaagatgatgttcgttccaccggcagcaccaacttatcccgtgggggaggtggcacccgccttaaagatttgttttttcgaggggcggaaaacaaggagcggcgtaaagaaaagctgaaggcctttttccccttagacccccgcctaataaaaaccattctatttggtgggtcgccttattggaagccccctaacacacggaagcgaggcctcggtaattctcgtgccttaattaaaaaaa

SEQ ID NO: 185366 - DNA, 490 bp, Arabidopsis thaliana
gccgcgtacgtaagctcggaattcggctcgagtctagacctcgggctgaccccatcaatcataagcgatgagaggagctggacccgatagaatacaattttagtacgaatccatcaacgccaaacactggtcagccgacaccgacgaaccccgccggtgttggaggcagaggcggtggaaggaataaggtttttttgggagggagcgggaagcctcttaactcgtcagggcaaacgctgcccgaggaagaggggaaacgactgcatttatgctgagaacgggaatacccggcgcattaacttagtattgtcaattcactgtttgtgggatgcatctactggcgttggggcagacagagatagtttggtgatgaattttgaataatgatgagggcgtctcatgactgtatcagggaaggtatggcaatggttaattcgtcgggagtctggcgagtagtgacgcattaaattagtagacgaggcacacgctg

SEQ ID NO: 185367 - DNA, 478 bp, Arabidopsis thaliana
ctatagaagactatgaggtcgaacgcacgcgtacgtaagctcggaattcggctcgagttttaaatcttgctcaacacaaaatctcacgagacgccttattcgttcattcatgtgccatgtatcacgagggcactggcgtctcccagtggacacctgacactctgttatgagctacaatactctttacgactatagatcgtacagttcgagctcatcgctgtaaatttcaatagtcggtgtcaacaaacgagaggcccaccttgcgatattccccacgagacgcatatcggctgtcaaggtcgacaacgggacacaattatagacacgagccataacccaaaccctagcggatgaatccagtgagacgagagaaatgatcagatcctaagaccgccatatagtcaatgctcacctttacgtaacatttttaagagtcagtcagaagctagaccctaccgactgtgactaagaaaaaaga

SEQ ID NO: 185368 - DNA, 155 bp, Arabidopsis thaliana
gctgatacactgacacactcatgggagagctggcacgcctgcaggagccgggcacggaataacgagcctggtcgacgagctcactactcggcggccgccccttctttttttgttcttatgaggcggatgcacgaggtcagtaaataattccaggg

SEQ ID NO: 185369 - DNA, 489 bp, Arabidopsis thaliana
  unsure (1)..(489): unsure at all n locations
acgccngcaggaaccgggccggaagaacgggttcgacgggcgggaacaggccgcaacaggcgacccagaagngagngcgaggaaacgaaagaaagaggacagccaagaagcgacacacagcgaccgaagnaacccccccgaacgaacgggcaggcaaccccacagaagacaggaaggggaacgacagaaaaatttttttttccgggggggggaccccccccacagagcacgcgacgcaagaaaaccccccaaccccactagggacgcccccaccaaaaaaagacgccagtggcgggagcccgcgggagggcccgaaacccgacaaaccgccgcccaggcgagcagatgcaacaaacccagccgggccccgcaaggccaaagacgcagccgaaaacggggcgcctaaaagaaccgacgggaaccaagccagagccgcgcgggcgccgacgagaggggccgaagccaggcccgagccggcggaagaccccc

SEQ ID NO: 185370 - DNA, 470 bp, Arabidopsis thaliana
cgaagcgggaaccggagaggttcgacgggggagaagcccaaaaaaaagaaccggaaggacaagcagagccagagaaagagagagggacgcgggggaccaaaagggacaaaaggagccagcgcaagggaagagggagacaaacccgagagaacggagggaaaaaacaatttttttagggggggaaaagaaattcaacaaaattttgaacagaggactggtgtggagaaaatgattagaagagaaaaaatatataacgcgacaaaggagcaagaattattaaacggaatagaaggatactgtgagaagagacagtgtatgttatataaaatgaagatgtgctgatgggaagtgatattagtgagagagagaaagaggaagggctgtgggggagtggagagggggatatattattcgtgggttaggcgaggagatgtgtgagagtgagaaaaggcaatgaggtgttaatgagg

SEQ ID NO: 185371 - DNA, 457 bp, Arabidopsis thaliana
  unsure (1)..(457): unsure at all n locations
cggttgtcgcgtcgagaacgggaggggggtggagcgccagngcaaacgataaatttttttttttggccaaccgcggcaccgggaaggaaaaagagttggnnggggggagaaaacancgngggcggggggggaaggagggggggggggggcacaaaacgaggagcggcccccccaacggcgcgaggcaggggggcggcgccagaggccgagagggcacccggcgacaggaagacgggccaaggcagncgttttttagggggagcaagatccacaaagggggcggggaggaagagagacagcggagcggaagggaagggcgcacaaaaaaaaaggaggagcgcgacggacggaaagagaaggggaaaaaacgccaaaacaaaggggaccgcgaagacgcagccagcaccaggcgcggcgcccccagagagaagcgcccgccgaaagacagcggggcaga

SEQ ID NO: 185372 - DNA, 533 bp, Arabidopsis thaliana
  unsure (1)..(533): unsure at all n locations
caggaaccgggccggaattaagagcgctggtcgacgagctcaatactcagcggccgaccttttttttttattttaagagggtgagactctccattgatggatgtaaagaatacagcgatatataatacaggctgtcttaatacgaagaaaattgattctcaggtagcatcacactaacaagaagccacgatttacttgttcnacagaagacaagtcggaagacagaatatccgcagcttagaacgaccaaccaatgcatgttacgcgtttagagcgaacccgtaggtaaatgtactttgctaccttcaagaccccctaaaagaagggcatttctacaaaaggaaaatctttaacataaaaatgggaacctgaataaaccaaccatagcgggccacgacccaattcatatgatcgcaaaccaagtggcttcggttatggtattccggttcactttctatatggaaaacaggacgcctgcgtcaaaaggacttcttctaagggccatacctcaagcgttgaatggggaagcagcg

SEQ ID NO: 185373 - DNA, 320 bp, Arabidopsis thaliana
  unsure (1)..(320): unsure at all n locations
gtgtattctactcactanatggtatagctggcacgcctgcaggaaccgggccggaagaacgagcctgcacgacgagctcactacatcggagcacgccctgtcttagaaaaaccatctcaagatgaaaacatcatgatcatcattattacaagaggacagnaattattcttgctcgtgaaagtggaaatcggtgcaaaacttcaaagagtgaggcccgaacgaatatcctttcgatagaaagttttttcgttggccacctcgtagaaagacccaccatccaacaacgagctttttttgggcacttgaaagatattttctat

SEQ ID NO: 185374 - DNA, 529 bp, Arabidopsis thaliana
  unsure (1)..(529): unsure at all n locations
gagagagggaggcgaggagaaaaaggaggcggggtgggagcgccaggcgaaaacgaaaaaatatgtatgctggccgcccgcagaccggccggaagaanngcttgaaggggggaaaacccagcgggggagagaaaagaagaggagaaaaacacagaaaggaggacaaacccaacgaagccggggcggaggaggggggggcggaagcaacaagaacccagacagaacgggggggaggagaaggaattttttaaagggggggaaaaaacagcgcagaaaaacaaaaaagaaaggggacgcggggccgcggggaagcggagccacaaaaaaaaaaccaaaagaacaaccgggaaggaaaggcgnagagaccagcagacgagaggagagcgcggcgcacacaaacaaagaacggccagggcgcggcggaccccccccgaaagagacaaaagagaaggacagggaaaaaggggccgggagaagcgcacggggcgacagaacaagagggccaaggccggggcccacccaccaggac

SEQ ID NO: 185375 - DNA, 424 bp, Arabidopsis thaliana
acgacacagttagggaaagacgcacgcctgcaggtaccggtccggaattaattgctgggtcgacgagctcactcgtcggaggccgcccttaaacttttttttttttaaagctaatatatattttaggactttataaccagaaaacacgtaatagaccataacagttgcaaaaagctgatgaaggataaaagagaccccactccaaggggagagaattttttttaggagcctttctcccgggaaaaaagcataagtatccttaaggacccgaaccgctttcccgcccgacactccagggatttaatgtggtaaactcccccgcgctcgacccatcctctccgggagctggctctcttccgagggatttttaccttgcgagtgataaacaccccttgtagtcggccccgcaaacttcacggacctt

SEQ ID NO: 185376 - DNA, 564 bp, Arabidopsis thaliana
  unsure (1)..(564): unsure at all n locations
ccgcgnacgnaagcngggaangaggaaagagtccgaccgcgggggggagcaanagaacaaagagggaaacgaagcacgaggaggagaggacngaagggcagcagcggacacagcgagacacgacagaaggagggagcggaagcgggagaggagagagagaaangagcgcagacgagggggggaagcggcagggcacggcgcgggaaattttttttttaggggggggcgaagcaagggagacggcgagagaagaggacggccgcacgagtgggagagaacgagaggagagagagcagaagaggagggtggtggatatagagagaggaggctagggagaatagagcacaagagaaggaggggggcagggagggaagggcagcaggtaagcggggccgtgggagcaaggaagtgctgaggacggacgcgcgaagaatgagataggatgggtagacggggcgagagagtgagatatcagtagacgggagaaagtgcagaatgcccgtaagggggcgtggcgagagtgaggacagggagagaggcagaacatgtgggggggagggaggg

SEQ ID NO: 185377 - DNA, 280 bp, Arabidopsis thaliana
  unsure (1)..(280): unsure at all n locations
ccgcgtacgtaagctnggaatttggatagagtttcgccgagagtggagaccctcccactaaaatggaggttgtaatgatagatgggtactatgagttaagtatggcgcgtgtgcgggcgcgggcggggttggtagtcgttgcttcatggcgcgagaagtagcgaattgtgagcatcgaatagtggccacggtgtgtgacttaacgtgagtttttttttccacgcggtgtgaaggaaacttgatataacattatgtaatggtacctagatgaccggaagta

SEQ ID NO: 185378 - DNA, 468 bp, Arabidopsis thaliana
  unsure (1)..(468): unsure at all n locations
cacgcgnacgnaagctnggatcctctagagagttcgccctttgggtaaagcttttttatatatgatttttgcctaacctggaggaagcaactaagaaaccaggacacaccgngcgccaacaggaagccttttctttttgcaaactataggtcttgaatttgaaaaaaatcaccacacctttggtagtactttttttttagaggagaccgaactatacaaagtagctattaataagaaatgccatgctttgtcacagtggatacggttattggtggaacaccacttgcttattagaacattgaaagggaaaaggggttgggttctcttaattcccagataaaccagactacatgggccaaaaaatggtcgaaccattctccacggaccttgcaaacgtggggggtggaatacttttgctttaccggatcccgttagtatgatgatccgccctgcggacggcgaaagaac

SEQ ID NO: 185379 - DNA, 420 bp, Arabidopsis thaliana
gcctgcaggaaccgggccggaatacaggggctgacccacgcgttcagaaccacagtgggcacctaccatctgctctgtgtggtgagattcattcaataagaaagcagatcgacctggcagctcaaggaggtgattcatatgaggaagcgttggatgtttagacagatacgatcacgaaacgaacacgtgctttttattaccaggacacgggatcgctaagaggtagtctttgaatatataacgctccttaccccgggagatgacagttaaaagaacaaaaagaactaatgttatttagtaccaaatgcgggggaaccacatggcacctttacagtagctgataaatcaaaaactatggctttcgaacagggcgcttaactgcaccctcccctatagaagggccgggaaagaacctcttta

SEQ ID NO: 185380 - DNA, 444 bp, Arabidopsis thaliana
  unsure (1)..(444): unsure at all n locations
acatggaaggaggacgacgcaggaccggccggaaagcagggttgccgggcggcgaaacaaaanggnngaacanggggggacaggggaaccaagaacgcaccagagccaacccccccacggcgccgccggccaaaaacaagcgcgccgacgccgcaaancaccaaaccagagaagaggacagcccaaaaagccctttatgcgggggcggggacgggaaaccaccaccaccaaacaggagggcaccccaaacaccggcggggggagcgccccagccggggggaccaagagggggaacgccacaggggcggcgaccccgcccgcagagccaccaccacccaaaacaccggccgaacgcgaaacaaaaaacaaaaggaacggcccccggggacgggggaaaacacaggaacccccaaacaaaaacagccgggaccccccgggaggacc

SEQ ID NO: 185381 - DNA, 472 bp, Arabidopsis thaliana
  unsure (1)..(472): unsure at all n locations
caggaaccgggccggaatacacgggctcgccgaggcgnncgaaacccaaaaggacatganactggaaagacaagggcaaaaaaaagnggacgaaagaaacagacaagcaaagcggaggcagagagccaaaaccacggagaagcagcacaccccgccggaaagacagaaggacaggacaaactctttgttgtaggcggggcaggacaaagaaagcaccaaaagacaaagcccgggcaaaacccgaaagccagaagagccaccaacaagagaaatggcgaaggcaggggacccggccgcgggggagcacagcacaaaaaatgcccccccaccccgaaggacggaaagcccccacagcaacgaaagaaaaaaccaaagccagacgtaacaaagacagcccccggcccaaaaaaaaacacgcacaaagaaccgacaaacaaaaagagaaaacaccaacaaaccccgcgacaaaaaa

SEQ ID NO: 185382 - DNA, 471 bp, Arabidopsis thaliana
tactctgactcacatcattgtgtgagctggcacgcctgcaggagccgggcacggaatacccgggctgacccacgcgttcgagccctcgcaaggttattctgtgcctctaaaaaacataagcatagataggacagtttaccatcatgatcacgatgaggtcgagagagtgtgcatggaagacgatgaagaccaagcgtggcaagagctttcggtgcatgtaattctctttttaggcgtgggtaggtgttacgcagctctcgatttccacccgtctgaggtgtatacgatggcgaactctgaatcattgacgaagatcctcgtgctccgcttgataggcgcgatacaagcaaaggtttgcttgtggcaaaagctcctgcacggctgtctactatccacacttgtggtggagcttaagatgagagacttacactgtagtgtaacaaggatcatgcaatcgatttgccatcttgt

SEQ ID NO: 185383 - DNA, 546 bp, Arabidopsis thaliana
agcacgcacgcctgcaggtaccgggcacggaatacccggtttcgacccacgcgtccaagcactcgttatgccactgctgtgcctcttaaaaccataaacatcttacggaggagttaaaacagcattagagcaacgagtgaagacatgtcgccaagctctaatgtgggtgagattgattcaaggagagaaaccggtcggcgacagagacgaagacggggactgctaccttctttgttctgacagctgagagcacgggtggcatacaacaccttcaccgaagtatatagcagaactatgcgtcgtctcgccgagaaggcggaaacacatagtagtcatttgttttgcaagaaggccgctgagcacccgtttcgctaaggccgggccatcatacaaaaggtttttctgctgccgaaaagcaacatgaacggtgttccgttcaatccacacttcgggtagtaactgggggatcgaaagactctcaccctaaacggacaaagaggcaacggacttgaattggtacctgggtactccatgcttacgccggaa

SEQ ID NO: 185384 - DNA, 483 bp, Arabidopsis thaliana
ccccccgttccccccgggcctttccctttgggtgggggacattaatgggaaaaaaaaagatttttatttcccacggcgcccctcgacagtgtgtcccgcccctttccacccaaaaacacacggcccttccctcccggggttgttggggcccccacccacgggggggcccccaaaaaccaccacaacccccccacattttccggggccggccgcgccccccccccctctcctctcccacccccccgcttcgcgctacacgtcgataaaactgatctgttatacccccctcctaacggccgctcccggcccgcccccaccacccatcactcccgcccccccctgccgctgctcccaccctcgcgggcaccgccgcgcctcacacaacgcgcccggcccaaaaccctcccctgctcctccccaacatacccgtccacccccggcgctcaccagcccccgcgacgcctccccctccgcaagcccctt

SEQ ID NO: 185385 - DNA, 560 bp, Arabidopsis thaliana
  unsure (1)..(560): unsure at all n locations
cccccccgggccccgcccaaataaattttttttcaagggcagaggcggcaaaaaaaactttttttttttctttcccccctggcccccgaaaagccgggggaaggcccttttttttttcaccccccccacaaaaaacccgggtcctcttttgcccccccccccccccccaaaaacctaaaaaaaaaaaaattcttcttggtctgccgggacnccccccggaggggcggtcaaaaggagcgaaacccccctctttctccccgcttcctgntccccccccgtggggggggggggcgccctcttctgcccgcgccccctcccaaagggggccggggtccgcgaaccccccacgcccctttgggggtcttcctctctccgcgcgcccaccgcgcccgacccacgacctgttcttttgccacccgcaccccccacgcttttctctccgcccgcggcgcgggctcgcacccgcaaccgacaacggtgactcttccctctttagtgcgcaaaggcggggggcggcgccgagcctccccccccccactccccttccacacccgcggccg

SEQ ID NO: 185386 - DNA, 388 bp, Arabidopsis thaliana
  unsure (1)..(388): unsure at all n locations
aaaaccccgcccgcgccacccccgagcggaaggaagggacgccacgccacccaacacaagaaagaacagccacacccgaggacaggcgcagacgcaacacccaccgcaacaacagccactttttttggggggggggaaaaaaccgccccccncaaaaaacaaaaaactagtacctcagagctacggagggcccacaccccgagagacagagtgcgctaccgagcctccaggccgacatagcactcgcgccagcctacacgcttacaagatgcccgacgtacgcgaagcgccaaaacgaagaaacgaagcaggacgacgcgatggcaccgtcgccaggatgcgcgcgcaaatgagaagaaagagcagagagaaggagcgaacgagaccc

SEQ ID NO: 185387 - DNA, 252 bp, Arabidopsis thaliana
  unsure (1)..(252): unsure at all n locations
ccccccccgccgcgccgggggcggccaggaccgtggcagcagggccgccgccggcagagggagggcccccttacnaacacgcgccacccgacccccccccccccgcaccgagagcaccgcccgcccttttgttgtttggatgttgcgcggaacgcggagacaggcccgcccatggaaaaaaaaatgttcgttgcccggttgctgttcctcgcccttcccctctccactatcgttgtgtgtgctctctgcctc

SEQ ID NO: 185388 - DNA, 412 bp, Arabidopsis thaliana
ggggaagaacctacgcctgcaggtaccgtgaccggaattaatttcttggacgacgagctcactatctcggaggacggcctttttttacttttttttgggaaggacaacccccgggatcctgggcaaggaggtggtccttcgaaaaacaacccgcccaaaagagaggtgggggtcgcagcggtcaccctggaagatagaagacgggctttttttttttgggggggaggccaacactgacccatatataagcgaaagaagagaccacgcacaccaaaaaggacaaaaataggaattacaacactcgtccaagaaaccctcaccccaacgatctggcgccgtggactcgtctgtattaaggtttgatatgatactgccgatgaagtgttataacttacaaatcgtcacacataat

SEQ ID NO: 185389 - DNA, 503 bp, Arabidopsis thaliana
cgagggacgaaccgccccgccccaaaaggaacaccgggcggcggggcgattttttgaatggggggcgagagtgcgcgaagaaacaaacaacgccgaggcagcgcccggagcaccgggctacgtgagtcgaagtcgtcctgtgtagtgagtaccgtagactgcgagtagacggtctgtaggataggagataaaagcagtgaagcagcggcgcggcgccccgccggcactcggacccacgaagagcgggacgactttttcttggggggggtggagaaggaaggaggcacgccagccgtcaaaaaaaatcgcggggagttctccgcggacggtacccacagctccccccctgacacgctagaggcagagccgcactcgagccaaccgcccgacgcgacgtggggagtgtaagtcgagtcagagtccataccaggcgtcgcccgacactaacgctcgcgccgtccgcaccggcgcccgtgggtcgcgcgttgcatgccgtgccccta

SEQ ID NO: 185390 - DNA, 234 bp, Arabidopsis thaliana
tcttgggcccttagagggaatggcccctgcattcctacgaatggtgggcttacggtcacactcggagggcccggcaagttttggggcttggaactgcgggcgtacaaccttgtgggaaagataccgactggactggcggggttccctccaaggtcaatgggcattatatgcttcacgccatttgtacgcaacctggcgcccttctaagaacccgtttctgtaaggaagcccggg

SEQ ID NO: 185391 - DNA, 692 bp, Arabidopsis thaliana
  unsure (1)..(692): unsure at all n locations
aagcccccccccaacttcgaaaaaaaagaaaccgcccccccggccgggcgacacggggaacaccgcgccgcttgcganngggcgcggagaggggcgccaaaaaaaaaagaacgggggcggagggcgccagcccggcgacacgcacgccgagcaaangaggaagcccgccggcaacacagaccgacgccgcgcggcagcaggatgggaaggagacgcgggcaggaaaccgccggcacgcgccgcgcccgcgcggcagcccaggcacagacggcgccggcggagcttctttttttgcgggggggtggaaggagggnggggcagaccgggcagnggcgcgcacgaacaacaagcggcccgccggggcctgaagcggggagcgcggccggcggccgcacgcggggacggcacgcgggcggcacggccggaacagggaccccgggccgcaaaggcgcgcgacccacgcgccccgcgccaacgcccaacggggacgaggccgcgcgggcatcggcacacgcggcacgaggccacaccgcccgcgcccccggggccccgccgcgcgggaacgctgagcacgggcagacgacacagaaggagcgcaccgcggcgaccacggcgaccacgcggcgcgccagccaagcgcgcaccgcgcacccggagcgacagaggcggcgagagaagccgcacagggcccc

SEQ ID NO: 185392 - DNA, 492 bp, Arabidopsis thaliana
ttaggggaagaactacgcctgcagtaccggaccggattactgtttggccgagggttcatacccggcgggggcctttttttttttgttgagggaaagccggaaaagaagtggtgtgggcgactttctcagaggtacaaaaattacgcactcttattaattcaccctcccgaacataaacagtcacctatgcgactttttttttgggggggggcataggcatcgcagaggtactgaacaacacaaccggctaaccgggccgtagattaccgcccagacggccgggtcgtggcgggtggggaaattgcgacgcgccaacccgaagatttactttatacttctcggaacgccagacaagacttgtaaatctgctcaggggaagtacaaagcatacaaaagcctatctaggggtagaccaaaaaaaagccgctgactctatcaaggcaccactagggcgcgacccacgacatacaaaactgttgggcgccgggaaca

SEQ ID NO: 185393 - DNA, 402 bp, Arabidopsis thaliana
  unsure (1)..(402): unsure at all n locations
cccgcccccggcggaaggcaggaaactccgaaatttttagacggcgggggaagcgcccttctaaaaacacacagccttggtgtaacgcggtttagcgcacgcttgccgaactgactgcatatacacaaacatcagacagccacgaaggatttcctcgagcacaaagtccacacagattacttaattctccatcctgactaaacccgcaagaaaattttctctttttgggggggggggggaanagaaacacccccacccaaccccctgatcacaaaacatggctcaagcgcatcgggcggaaacgggtttgcctttcattcagagtgtggtaggtttcggtttgtgacccatcacttactcagccgattcactctatgagcaggtcgagccaagtgcgggata

SEQ ID NO: 185394 - DNA, 431 bp, Arabidopsis thaliana
caagagaaacccccgcggccaggggacaagacatttaagcggggaaaggggaaaaaaaaaagccgcagggaccggcccagacaggacggaaagagggccggagcgacccacccccaaaaagaaatcaacgccgggcccacccccgcagcgacagacgcccgcccgacttttttgaggggggacaaaaaaaggaaaggaaagagaaaaaaaagacaggaacacagaacaacgcacggccgagaagaaggcgaagaagagcaagaccacacccggcacgacggacaacgcagaccgaacaagggcaacgccacggagagcggcaccaacaccgcggacagaacgcaaaaccaaagcaaacgccacccggcaacgaacagcagaagaggcgaggaaccggaacgacaacaagcccctccacgcacggacaagac

SEQ ID NO: 185395 - DNA, 414 bp, Arabidopsis thaliana
ggaggagagaggaggggcaggaggggcccgcccagcgcggccgcggcgcgcgcaggcgcgcgcccaggaggcgacggcgcgacaccccaccaggccacggccatctttttttccgggggggggggcggccgccgccaccacccgcgcacgccgccccacgaaagaacgcgcggcgacccgccgcagggcgcggggagcacggcgcgccgcccccggcccccgccccgcccgcgcccgcacggacggagaaggggcggacccctcgcagagccaccgcgccacgacgagggcgagccggcaaccagccaccagaaggccggccccaacggcaccgccaaccgcgggaccgcgccccgcagcccgaacgccgccgcgcccgggcaccaaccggaggggggccaggacgaaccggcg

SEQ ID NO: 185396 - DNA, 435 bp, Arabidopsis thaliana
agaaccgacgcctgcaggtaccgggccggaaaaattggttgacgacgggctcattactcggaggacgcccttcattagaaatttcggcgagagcaacagtgagaaaaaactggaagaaacctccttacaacgggggaccacaacgcaacaccctggggggagcaccttttaaaaacccgcgaagaaagggaaacttttttttttgcgagggtgaacagggcctgggagccacactgcaagacaaaaaacaaacgcacaagactccaagggaggggaaaaaacccagatgggatggagcacagcattacaaagggccggcagccctcgtccccaggaggccagcacacgggaaacaaagaaaaaagagagaaaaaaaaaggcgttccgcacaggagaaacaacaacgaacaaaaaataaaacatcaagcacccgag

SEQ ID NO: 185397 - DNA, 429 bp, Arabidopsis thaliana
  unsure (1)..(429): unsure at all n locations
ccctccttcctccccccccacactattgtccctcccttgttttttaaaaataaggttgtctttaacagatttttttttgcccactcccaacgcanaaaccgcggacgcgtggagacgcgccccgcttccccccccccacctttttttttggcttgttggggcccacaccccggggccctcctaaaatcactgcaaacccctctccttccgtcttcgtctctcccccccggcatttcacagccatcatctctactcacaaaagttgtttgtaaaatttcccctctcccgttgcatatccctgtccaccaccctcaaaagcacaaaagatcgtgtgcacctgcttgcaacaactccgccggtgtccagagtccaccgcgcatctgtctctcatttaccgtacaacgcctacacccctctcccccctcacac

SEQ ID NO: 185398 - DNA, 494 bp, Arabidopsis thaliana
aggtgacacttatagaagatctatgacgtcgcatgcaccccttcctaagctcggaattcggctcgagcccattccggaaccaagtttgatggtttcccaaggttcagagggcctggcccttggcacaacctcattaagtttctttaccaagaaccggtttcaaggaacattccaacctttaaagaccaccaagaacctgagaatggcccaagggtttcggccgaacctaaaagccccattgagggggtaagaattcgccgcggtggtggcctaaaaaacctttcctgggcctcctgggggcctcaataacctctaaccaatcttggtttccaaaaaaaagggtcccttaaccgggttgccattcttttacggggtgaaaccgataatgtgagggggcagaccgaagtactcgctgaccagttaaagaacctggcaagtagagaaaatcctgagaaagtccttaaatgaaggcaggcattgaccaattttgcgca

SEQ ID NO: 185399 - DNA, 562 bp, Arabidopsis thaliana
gcccccttagggggggcggcgcaaaaattatttttctcttccgggggggagggggggccaaaaaaaaaacttttttttttttttttttgggggggggtgaaaggggaaaaaagaggggggggacccccttctttcaaagaaaaaaaaatggtggagcccagggggcgggccccattctcttacaattttctaaaaaagcgcaaccttttttttggggaaagtaggggttttttttttgggcgctctaataaacccacgcaaggtctctggtgcggcggggcgtggtgggtggcgccccctcgtggggggcgcgcccgccctcgtctggtgagggcctcccccctttgtcttgttggtggtccggcgggcgggcccgccaaatagtggtggacaaaaaagcggtgtgtttgtgggcagggccggggagaagaacgtccgccccccgtcctctcagcagcgaacacgcgactcgcagaccgagcggggggacagccgaacgtggcgccgccggtcgcccattatacggaaatccgtcggccgcgtcgctcccagtcggaccgat

SEQ ID NO: 185400 - DNA, 515 bp, Arabidopsis thaliana
ccccccctggcgcgggcgacgacgctttttcccggggggtcggcggcccaccaacccacccccccccgcccgcccccccccggggccccgggggtgggccggtgcttgttcgtgtgccttttcggcgcgcgggccccggcccggcctcgtccggccgtttggtctgcgcgctgccccccccttttttttggggggttgccccgcgcccccccccgggcgcccgcagaaacgcggccgccgggggcgcgcccgggctcgcggcttcgggggccgatggcccctcgctctcctgcgctgtgtggtggtgttgttgttctcgtccgcgcagctgtcatctttcgttttggcccgccgccgtccctcccccctcctcccctcccgcctcgtgtccgtatgtgcgttgttcttttcgtgggcacgcctctcccgcgggccggcgtcccctgtttgcctgggcggctcgccccctcttccggctttctccgcgctatgttcggtggcgggaacgcggcgcc

SEQ ID NO: 185401 - DNA, 449 bp, Arabidopsis thaliana
  unsure (1)..(449): unsure at all n locations
ctatccattagcgggtaaggcagaaacacctccctcaaggggtaaaatgaaaaaaaaagaaagggccgggtccaaaaatgcccaaattacccaggccgtttattaaaaggataaaggtttttttgggagtgggggnnnncaaccagatccctattgataaaaagaaccaagatttgagttcccaggagatttatgggcattgggaataccggggggggggggatgataaattcacccgtgatgaagcttaaggagcccgggaaaaaagtggggttaaaatggttggcttaaacccccgaaaaccccccctttttcttccactgggaaaataacgggtattgcgaaacgcggtgggcctcaagggatgggggggttacaacaaaaccgagtcccccatttcccgcgcaaccctgtgtaaaggcttctttcgaaaaaaaacgcaccccgca

SEQ ID NO: 185402 - DNA, 502 bp, Arabidopsis thaliana
  unsure (1)..(502): unsure at all n locations
ttttttttttttttntttttttttttgggagaagaaaggcgtttataccttctccccacccccagggggcgagaacaaatttatatttaaaggccctcgggggggggggggacccccaacccccacccccctatgatgggttccgcccaccaaatttttttcggggaagatggggnacacaaaaaaggggggtatcttaaaccacgaaggggggggggaggaaaaaaaaaataactccccccccccctcccccagaacggcggggaaaaaaaaaacccacccccaaattccccaaaggggggtaaaaagaaaagggggccgggggccaaacaaacaccacggtgggcgcaaaaagaactgctataaaaaaacccccccacccttaaaggcggggctccccatttacccccggacccccccaccccttggtgggggtgggaacgggggcaaacccacggggggggggggggaatgaccacggagccctggggggggggggggc

SEQ ID NO: 185403 - DNA, 449 bp, Arabidopsis thaliana
  unsure (1)..(449): unsure at all n locations
tttttttttttttttgggacattaaaccaaattctcatgggggcgtaaggagaactcaacttacaaggcttttttggtctatgcacctaaaaaaaaaagaggggtaacaaggagcacccggattctattttatgggacgcgggcatgtnntnntatggcaccccattaaaataaagaagggcgcccccctattatcggggggagggggcccccctaaagggggggggtgcgccccccaaaaaacgggggggccccacggggggtgcctgaaaaaaacggggaactatgggatgaggggggggggaaaaaaggggcaatccttagaaaaaatcttttcttaaaaaaaaaaaaaaaaccgggaaaaggttttttaaagggggctatgggggggggaaaaacaaaaaaaaaacccacatttcccagggttccaaaggggaagggcggaggga

SEQ ID NO: 185404 - DNA, 502 bp, Arabidopsis thaliana
  unsure (1)..(502): unsure at all n locations
gtcgggggggggggccaaaaacccctttttttttttttttttaagaaaaaaaatttccttaaaaaaaaaaatgaccgcccccgggtaatggacaaaggtgggcgtttgaggagtggggcgccgggaacaaagaaagaacacccccctaaacgcaccctcctttctttttgggggtcgaagggggggnttnacnggggggctcccccaaaaagcataaaacggccggggcctaaaaggtggggaggggggcaaccggcaccgggcgcgcgttgccggggatatccaaaggaaggctcccctcggggggttcaaccttggaaggggggtgcccgacgacaccccccccacaagggcggcccggggaccgcgggagagggggggcccccgggagaaaagacgcggggacgggggcgccccaccgcgggattggaccacgcccggcggggcgcctaagcccgagggaagacgcggagggccccgagcgcgcggtgcggctcagcgc

SEQ ID NO: 185405 - DNA, 323 bp, Arabidopsis thaliana
  unsure (1)..(323): unsure at all n locations
ttttttccttttctttccttaaagggaaaaaaataaaacctttttcaagcctctaaggaagcgaaaccccctctggccttntcgggggaaaggcggcaaacaagaactgggcccttggaaaaaatgctttgcttggaactcccaagctctggtgggcgggccttaaaacccggctcctgacaaatgggcccaccctccataggggggctccccccttttcaaattcttcaatttaaaaacttcccggcgccacagggggggaccggggggggacaaaaaaacacccccggggggagccacagtggagttattggccgggaaag

SEQ ID NO: 185406 - DNA, 468 bp, Arabidopsis thaliana
  unsure (1)..(468): unsure at all n locations
ttagggaaagcacgtacgcctgcaggtacccgggccggaattaattccctggtcnacgggctcagtactcggcgggcgcccttttttttttttttttgaaaagcgttgaaattaaattacttcacaacaacaaaaataaaaacaaaaacatccacggaaaaacaaatatagggatccattctaccacccaagtgctttcactgttctgactcaaaatatataaaagctgggggggagcctttcgcaatcgaggtggtcggacaaatgcttttggtcaagtaaaagcctggctgaagttctggcccagccactccatttgatttggccacagaggtttgagacttggtttgggatgaggaaactctctagcctagagggtcaggggtcgccttaaaatggggtttgaaggacctctttgggaaagggtctttccaggggattaacgaccctgttttcggtctttttttt

SEQ ID NO: 185407 - DNA, 634 bp, Arabidopsis thaliana
  unsure (1)..(634): unsure at all n locations
caaggcccgccgnccagaaagagccaggaacacgggagcgtgagaaagaccgggaggcaagaccccccaaaggaaaagccaagagggggggagggaaaaaaaacggcaacaaggaaaagcacaagaaagaaggggaacaggcgacagaaacaagcgaaaaaggcaaaggcaccccaccaagggaaaaccgggagaagagcaaggaagaggacccgggaccagaaacgaacaaagagaagaaaaggaaggaggacttttcttaaccaaaggggagggggaccaacnnccgacaggagaaggaacaaagagaaagaagaggcgaccgcggggacaaaggaacacgaagagcaggaagcaagaccagagaggagaagaagacagacccagagggaacccagaacgatgagagaagcgagaacgcaaggaaagncccccaagaaacgaggaaacaagaagggaaccaggacgcgcaaagaaaagaacgaaagacagaagaaacgcgggcaggaaagaagacagaagaaggagagacaaagagaaaagagaaacgccagccgagatgccagaagaagaacggggaccagaaaccaacacaggaaaacgacaagaaaaaaacaacaagagagaaaagaaa

SEQ ID NO: 185408 - DNA, 439 bp, Arabidopsis thaliana
  unsure (1)..(439): unsure at all n locations
aagattatgacgtcgaccgcacgcgtacgtaagctcggaattcggctcgagttgtaaagctggggagggtcgactaaaagaantaggcgtctttgggtgtgtccggaaatgccttggtactcccncttaactgtcagggcagtgttcaagatcggggtggtccgggtggcatcaagccccatccacgtgtcaaggactgtgggcctctcttctcttaagaaaaagcccatcttcctgcggagtgggcaagggctgtcctctcggnacctagcgatgagcctcgcccacgggggtatgggcccctgacagggagcacccttctttgccctgagggggcctttttgggaaaggaccagaagatccccagaggtacttaaaacggggggacagtttgcttgggaaattatatgcgttatacaccccattttggggccttggg

SEQ ID NO: 185409 - DNA, 642 bp, Arabidopsis thaliana
  unsure (1)..(642): unsure at all n locations
acccgcccccccgcggaccgcaccgcgccgcgcccggcagccacctttttcaacccccgggggtgaatgcttcccccacacaaaaaacgcaccgcccgccgccggcgccccgccgccgcccccgcccccgaagaccgcgcgcggcggagaggcaacgccaggtaactgtacgcgggtgcggcgccccccgccccctcttcccggatccccctccgcccgccacgcgccgccaccaacgcgcgccnacccgcattttttttttcgggggggtggggccccccgccgcgtaccgcgcgcgcgcgccacacaaaaccgcacccctgcacttcacccggccccgccgcgcggcccgcccccccgccccccacctcgccgcggtgtccccgcgccgtgggggacgtgactcctctccctgatgcggccccagccacgccggcgccgccggccgcgcggcactcactcgcccaccacgtccgcccgcccgccgccgccccggcgcagcgcccgccccgccccagccccggcacgccgtccgcacaccacccggggtcgcccgggcggccggccggcacgccagctcgccgcccgtgccccgccgtcagacgcccgacgcgcacgtccgcgccaccgaccctccccccc

SEQ ID NO: 185410 - DNA, 291 bp, Arabidopsis thaliana
gaggacgcatgcacgcgtacgtaagcccggaattccagctcgagccttaccttggattttttctgttcaccatggcttcccgtttcttccttttgtccccaatggattcacaggattcttaaagtcgcaaaacttcctttggttctcttccctttcgcaagaaactttctttccatgaagtcccatttcatcccccccctctccagacttttttttaaggggaagcctttggcgggatacccggaaaagtcgtgaccttaaagccccaccttcaaaggtcggccattaaaa

SEQ ID NO: 185411 - DNA, 261 bp, Arabidopsis thaliana
atccccactgcaccaatccgcacgcccacgatcgaattagactatagagagttattccgtgatcataactaccgcgcctagcaatccgctactctttattgtaatgcccccccgcgagttttttttttaagggaggggggacggtgcatagttcctactgacctggagaagaaacaaacctcactcgtgatgtcgtagtgccctgccctccctgtatcttctaactgcatctccgtcttctctctgcccgccgcactcttc

SEQ ID NO: 185412 - DNA, 644 bp, Arabidopsis thaliana
  unsure (1)..(644): unsure at all n locations
gcgcggagacacgggaaggggacaaaaanaaataggggaccgacgaggcacaaggagaaccgacccgaccgccccgcgcgcagcaaccgacgagcaacccaacacgcgccgcagcgaggcggcaagcgcccgacaagccggcaaggcggagagaggcagggaacaacagaagagggaaaagcggaggaccggagacgcgagcgcgcgacgaagacagcacgaggggggagacggggcggcttattctaacacgccggggagcagacaaccgcacaaaaaggaagaaagcgtcgtgccgcgcccaacaacacacccaagcaggcagagcgcaagagaacgcggcgcgggacaggaaggaacagagggccgccccgcccagcccgccccggacacccaacacggcgacggcaccacgcagatagaggaatcgccggaccgagacgaaacgcaagcacaacacaaaagcacccacaagaccaaccacgagagccaccggggagaggaccgcagaaagcacgagcgagcacgcaagagagaaaagcggcgaacggggcaaagagaaagaggacacggaacaacggacaaccgcccacagaaacgccactcagcaacggagcgccgcacacccgcacaccaggacacac

SEQ ID NO: 185413 - DNA, 324 bp, Arabidopsis thaliana
  unsure (1)..(324): unsure at all n locations
cccccccccttgggggggcccaaaaaaaaaaaccccccaaccccgaaaaaacccttatttttctactctgtagggagcagaccgccntccatcaggcttaaaagaaaaaagaaataggaactatcccgccctacgcactttttactaagatacaaatcctacaaaacnttgtgacgacacacatggagcgtcatttccatactcttgcccactggacgcactaaagcgcccgagacgcctacccgcttcccgctcgccgatagcccgcagcacactataaaacttgaactcgcataattactttcagttgaacctcacactgca

SEQ ID NO: 185414 - DNA, 614 bp, Arabidopsis thaliana
  unsure (1)..(614): unsure at all n locations
ccggtcaaaaaaaaaaaaaaaannnnnnnatttttggaaaggccccgcnaaattgaggggaaggaacgtgccccctccaggggccacggcccgaaataatatctttttnaaggggtaagggcggccaaaaaaaaccttttttttttttttttcctttaatacccctccgttttaaaaggaggggggggaggggggttataaaaaaataaaaaaaattggttttcccaaaagggggccaattctaaaacaaattttaaatggggccccaattttttggggaagttggcgtaacaccaacaggggggcctaaaaaatcattaaaggggcccaaggggtttaggttttttttgccccacaccgaggggtttttccaaaaaaactaaaagccttgagcaagagggggggggtcttggccccccggtccgggggggggagagaaaatcccccaaaaaaaagtggcccgcggctgtttacaaaaagacccgcgagaggggcaggggaacattctgttcgttcaacccccccccccgcggcgaaaaaagccccctcgcggaggggggcgacggggggagaaagcttgtgttcgcctctttttagaaaagagggcggggggg

SEQ ID NO: 185415 - DNA, 338 bp, Arabidopsis thaliana
tctagaagactatgacgtcgcacgcacgcgtacgtaagctcggaattcggctcgagcttgcatattaatcaagagtacaatgctaatcccgagagttgccgttgtttggttctcatcaactgctttttctatcaggactaagcctatttcggctctttctctcctgttttcctttttttttcccgatgtcaaattgattctccaattcaaggggggttttttcccgatcattccgcccaatgacgatggaatcgattaaagagaagagagttggaccacttgccacctactaatgtgactgtcccaaaacctatattcccccttacaatttgtggttt

SEQ ID NO: 185416 - DNA, 494 bp, Arabidopsis thaliana
  unsure (1)..(494): unsure at all n locations
acagggggggaagcgcgggaaaaaaaaacccggggcccgcaggcggagagnaccgacacaacacagaaacagaagggccagggcacaaagcagaaaaagagaagagcggcgggcgaagggggcgccagaagaagaaagaaagcaacaccacaacagattttttttaaggaggtgggaaaacacacgccggacggcgaggaaaaaaaaaacccccgcgcggcgggcgccggaaccgcaaacgaacgcacacgacgcacagaacacggaaacgccggaaacaccaccgaccggagcgcgcagagcagcgcgccggacacgggggagcaagacgagcgccgacacagacacagcacggccgcccgaccacgacaagaacacgccacagaggacagacgaaaagaaacagggcgagaggcggagcgaaggagaaacgagaacagtagaaaacagaacacaaagacgagagacaacgcgaacacgaacaaagaggcacg

SEQ ID NO: 185417 - DNA, 551 bp, Arabidopsis thaliana
  unsure (1)..(551): unsure at all n locations
tttttttttttttatacaattcttttccanccnaaaaattaaaccccttggcccaaattttattcctttnttttttttttaaattatcccccaataaaaccccttttttttcaataaaaaaacaaaaaaaacagccccttttttttcggggtgtggggggcccnccccccccccgnncaaatttaataagcagggaacggcgccccctggcggcgccaccccacttttttccctcccccggggggcgcgcgcttaaaggcgccgcggcgcgcaaaccggggggaaaggggggtgggttcctgcggaaaaaaacctcgttccgccgggaccgcacttcccccaccggcctctcgccgggccggcacccatcttcgcggggcgcgggcccgggggccgcgccttgggtggcgcccgcgccactcgcatgttgtggtgcgcgggccgcgcaccggtggggcgtcgttttcagggggaccgagcctcggcggcccgcgcccccggttattgtaactcancctcgcccgccggccggagccggtggcgcgcctctt

SEQ ID NO: 185418 - DNA, 412 bp, Arabidopsis thaliana
  unsure (1)..(412): unsure at all n locations
ccccccccaatttagngggggaggaacggcccccctccaggggcccggggccgcgaataaaattcctttgtcccccgggggtgaggggcgccggaagcacacctttttttttttttttttaattaagaacaagggggtgtgtctcacccatattcaacagagaataaaaggaatcatcaaggggccaggggttaaaggcccacccgcggaagaaaacgcattaaaacaaaataattttttggcgcccccccccttttattttgggaaagtagggggaaaaaaaggggggcgcgcctctcccaccaagagaaggaaagggcctcacccggcgccgcgggcagggcgcacacaaacaacctgcttttaattagggggcgccccaaaactagaaaggcccgggcgggcgccgcgc

SEQ ID NO: 185419 - DNA, 395 bp, Arabidopsis thaliana
  unsure (1)..(395): unsure at all n locations
acaaatgaatagccttccggaccataatgacaattggaatctttatacctttaactttttgtataggaggnnaactataanccggaccataaagacatggtaaaaggagcaagcttttttttttctttggataaaaatggttggtttccttttggcggataatggttggacagaaaaatgatttggaatatcttaagggacaaggcgggtctttgggggaaaaaaaacccaaaccgattttccggaaatatcaaaatccaaccatcctaaatggtggggctttctcttttggtcaccaaccttaggaaagttttccggaagaaaccaaaaggcttgattaaaggaatgcttgactgagccggttaaagaatcattgggggaaagaaacttgtttt

SEQ ID NO: 185420 - DNA, 223 bp, Arabidopsis thaliana
  unsure (1)..(223): unsure at all n locations
ggggagaaaaaaaataaagngcgcgcgatcgtgggtggatgggatattgtacggatatatagtcggtgcccagggtccgcgcagacgcttagaactcgctgtaagcatcgtaggcggatagcgtgatgatcgataagagggtgggtgtatagagcagacaccgcgacaacacgaacggatttttttttttgggggggggaagagaacgcgagcaagagaccgg

SEQ ID NO: 185421 - DNA, 420 bp, Arabidopsis thaliana
  unsure (1)..(420): unsure at all n locations
ccctttttttttttttttttttttaacaaacaataaagcctttacattctttatttcccaaacaatattagggcaccaatcccggattaaatattaaccctatacccattaaaatctttttttggcctgagggccttcacagcgcatgaagataaaaaaaaaccccaggancctctttttaacaaaacccaccaaaaaacaacttttctaaatcgaaaaaccggaactttttcaaacgggcggaggaccacgtagaaaaaacccacccccccttaaaaagctttccccaaaacgcgggacccttaaccccccgggggggccacccaacccaaattggacaccccttttttttttttttaaatccaaaaaccgggagaaacaccccaaaaaaaaaatccctaacccccccacaaaaaaaaa

SEQ ID NO: 185422 - DNA, 391 bp, Arabidopsis thaliana
  unsure (1)..(391): unsure at all n locations
aaaaaaaaaccggcccacgacgacgcccaacacggcgacgcgnggggacagggaaggagaggaagaaacgaagaccaggagaaggggacgcgcgnccggcaaacgaggacagcgaaacacgacgagagacgcgagaaccgaccagaccacnctttttttttaggaggtgggcacgcaaccaacagagagagggcgaacaaaaaaagaaagcggccaggacaacaaacaagggcgggtcgacagcgaggccgccacacggaggcgcaagacaggcaaaagggaagaaggaagaaaagaacaaccagagcaacgacgaggcaaccacaacaacagacaccaagagaaaaaaccagagaagcagagcagaccggagaggacggaagcacgaagg

SEQ ID NO: 185423 - DNA, 633 bp, Arabidopsis thaliana
  unsure (1)..(633): unsure at all n locations
tcccaaagaccccccgcccaaaaaaaataattttttccncgggggcaaagggcctcgaaaaaaaaaacctttttttttttttttttttcaccccaaaaaaaaaaatatttcattttattagctactgcccaaacaaacaaacaacaaaataattatgcccaaaacccccaaactttttccaccgcctaattgtctttcaaaaaataaaaaaacccacactctcttttttgggaggggtgggggacannnaacctcgggcgcgggtaaatatccagcaaaccccgcggccttgtgtttatcccggcacacgcccctccccccacgcccagccgcgagaagcaccanccgcggcgccccgcgttaacacccgcttccctccctctcttttataaagaaaagacgccaccccccgtgacccgccccgcctcctcaccataacaaaagagaaacaacccccccccgcgaccccataacaaggccccaccaggggcaacttcctaccactccctagcccccttccactctttcccctcacatcaaagaatatcccccacgcctccggtcgccgtctagacacctcctcattctctgccgtccatcaccctccgtgccgccccttcacactcccaccac

SEQ ID NO: 185424 - DNA, 478 bp, Arabidopsis thaliana
  unsure (1)..(478): unsure at all n locations
cctttttttttttttttttttttttnttttagaggtatatgggggggggcattagttcaaaaatttggaggcaccccccttattttataacaaaaaacccctacaattgtggtttgtttcaaaatcaccccaaagattcccacattttttttggggggggggggccccccgagaagggggtttttaaaaaaaaaaaggaggggggtgaagaaagggggggctgtttcccggggggaggtttcaaaggggcactttatttttctttcccagggggggggggagcctccccaggactaagaggccgagatccacacggaggggcccttccctttgctacacaaataaaagggcacaaatcggaatgggaaaacaaaaaaaaagggactggggagttttaaacatttgtgtgggcaaaaaaaaaaaaaactcttatccactccgagaagtgggcagggtaaaaaatcaaaacgggaaagga

SEQ ID NO: 185425 - DNA, 420 bp, Arabidopsis thaliana
aaaaacaacccccacaaaaagaaagaaaaaacttcaacgggcaaggccaaaaaaaaagaccgccacagccccaccgccaagaaaacagaaggcaaccgcgccagaccaaagaaaagggaggggagggaaggcgacgacaagacacaacaaagaccgcgtttttttggagtggagaacaagccggcacgccaaaaaaaaaacgggggggaccggagcacaggacgcacaaaaaagaaacaggaacaaccacggaaccagcgggagaggacaaggcagcgcggcaaggccagccgcgagaaaaaaagcaaaccaaacacgggggaagcagcacagagacaacaccacacaacaaccgcgcaccgcgcgcaccgaaaggagcaaaagagccgaaccaaacacagcccaaaaaaacaaagaaag

SEQ ID NO: 185426 - DNA, 467 bp, Arabidopsis thaliana
cgcgcccgcggcgcagacgggggaagaaggaaaaagaagaaagaaggaggaagggggaggagcgcgagcccggacgaggggcgcgcacgccaacgaagcgagcgcgcggcggccgcctttctattagggggggggggaccccacccaaaggcctcccaaaaaaaaaaaccccccagcccggaaaagacgccgagccccccgcgcgcgcccgccggccccagcgcccaggccggggggtgggcacaatgaaggccgccgcggggcgggagtaagcaagataccgcagaacgccccccccctaccgccccgccgccggacgtccgcgaggaccccgcggaccacgcgcgcgcgccggccagcgcagccccaacgcacacccaccacacccccaacgcgacaaacacaccgatcccaccacacagacagcaggacacggagccaggcacgagcagcacgggcgcgcacat

SEQ ID NO: 185427 - DNA, 328 bp, Arabidopsis thaliana
ttttaggggaagaaagccaacgcctggaggtaccgggccggaataattgccgggccgacgagctcactagtcgggggccggccttttttttttttcttggaaagcctggagactaaagtaacgagcccaagcccacacaagaaagacaagagcccgccccaaaaaaaaatgaggagggaccgccccgcaccccgcgcccgagggacgtgggaggagatttttttcggccgggcgcggaccatgaaagaaggcaggagttggaacgaccacggacagcgagacgaaccggcaacggagatgacgacgcgaccagcagaccctcaaggca

SEQ ID NO: 185428 - DNA, 334 bp, Arabidopsis thaliana
  unsure (1)..(334): unsure at all n locations
cccccattggagagggggaaacgggagcccctccgccgcggcgcggagggctgcatgaacctttttttccgccgcgggggggggggggtgggcaaaaaaaaaaccggccgccctccgccccgcgcgtcccgtgaacgtagtgcgttgcaatcgccgacgaggcaccccggcgcgcgcgccggctgtcgatttgcagggtgtgtgagcgcgaggcgggtagcgcgcgcgtgcggtggtcggccgcttgtgcgactgatgtcccgcgcccaccacgccgcttttttttttatgtggggggggggggtgagggcgncgcgcgcgacggccggcgtgt

SEQ ID NO: 185429 - DNA, 481 bp, Arabidopsis thaliana
cccctgcaggacccggcccggataaattcctgggtcgacgagctaactagtcgggggccgccctttttttttttttttcgtttcaacaaaaggcgaagttacaatcgaaagtcggattatcaacagcatcgcaagaacctgcaaatctaaaaagtgtagattcagccttataaacaaacaagacccacttttttttttaaggaggaagaaaacaaaaagctaaaatcttcattaaacttccccgggactcatcaatttaaaaatcccgacgtcaataacattcccaaatcctaaccttcctcaaattatacaaatgtgaatataactaaaccgcacaagaataaatgaaagctgagtaagacacgggaaaactagaaacaccgttggaaaaagaaggcacagatgccctaaaaactatgccaaccccaaaccctccaccaaatcgattccaaaaatgacctcaaaaaaaaaataccaaaac

SEQ ID NO: 185430 - DNA, 315 bp, Arabidopsis thaliana
cccgggcggccattccttgggcggcggaccccctcaggcaactaccacaggaataccaaaagacccccccacccccgtagagacgaggcacaccggatcggacgagcgcgcgctccacatcagccgaccggaagaacgccaggaggagccagcaccgacgaactaagtcacagagactaaggcactagaccgcaagccaacaacgagaggcggagcgccccacagtaacgacctcgacggctcgttggcacctcagtcgtgaactcagcgacgaccgagccgaggaatccgatccctcacggagaacgatagacc

SEQ ID NO: 185431 - DNA, 454 bp, Arabidopsis thaliana
ttttttttttttttcatgaaggggggggcggtgttttaaacccccttaaaccccaaacccccctaaagggaaaaaacgcgggcctgaaatttcctctcggttgaaaaacacccccccaaacccccaaattatttttgaggaagtttggacattccccgggcggccctcttaatgaggaaagagggggggccaattggcaccgggggccccccccaatagccggaatttgaaacgagggggcccccccctcccccggggtggaggaggggaaaacccccccggcccgggggggaacccttccaaattttcttacgcaccccagcccctttaaagtttccgaaggaaaaaatacagcggaggcccccacagcccccccggataagaaattcgggcccccaacccccaaaaaaaccccttccccgccgcttttgggcgaggagggttttccccacgc

SEQ ID NO: 185432 - DNA, 469 bp, Arabidopsis thaliana
cccccgcagggtaccggaccgagagtaaattatttggacgagcggggaggtcccactaacggcacacctgtcgtgggtgtgtggttgggccaatgagcaagcaccggtcgttacaggtgtgaggaaagggcaaggaaaccaacaggatggccaaaagagcatgggcgtccgaacgcccgcaccacccgaagaacgcacggaccagttttttttttttttgagggggagggacaaaaagagaaaaagaaccaagcgctataagaagcgcacctcctccggcaccgggagcacggggaggaggagtgcgtcgcgcatacctctcaacgaataggtgcagaaccgccccacgtagatgcggcggtgcgcgtggtggacggacagcgcgccgtggcgaatgataagcggcggcactaagccgtgcgggcggagcgccgcgcacaggcatgtgttgaatctgcagacggggagg

SEQ ID NO: 185433 - DNA, 324 bp, Arabidopsis thaliana
ccccctaacatattcgaaggggaaaaccaagctgtctatgacagcacgactctaaattatttttttgtttaggcgggggaagggccccgataaaaaaaacttctctattggtctttcaccttttctcccgaacccaaattctgtagaacgctctctctatccgacatatttataattgaatgcacaagggacgcgtctcacgaagacatatggaacgatacaggaaccccacctccctaccgttttttttgcggaagaaggggaatgtaagacacggcgaaggagttataaaaaaaaaaaaaatagtcgcgtacgtttattgtg

SEQ ID NO: 185434 - DNA, 337 bp, Arabidopsis thaliana
cgccccccgacctcacacctatctttttttattgggggggggggcggtgggctaaaaaataaatctccttgccgggccggccttcctcgccgcgcgtgtcgctcgtccctcttctttttttctattcctttctgactctcaccgcgtttatcttacggtgcgtgatgtaatgtcgctgttgttaggcgccgtcggcgcttccatcccctcactttacgctcattccagcaagtggccctgccccattttttttttaggggttgtgtgcccaatcctcagtgggctgtcgctcttcaaaaaaaaaaacagctccctgttcatcggcgcgcgctcctat

SEQ ID NO: 185435 - DNA, 251 bp, Arabidopsis thaliana
  unsure (1)..(251): unsure at all n locations
agcgaaaaaaaaaaagaaaanaaaaaannnntttttggggaaaaacccccccacttannggaaggacgnacccctgcgggaccgggccggaataattcccttntcaagggggtgaggtactcagaagccaccccttttttttttttttttataataaaagctttttaaatatttcacaccccataccaagggaattttacaaggaatgaaaatctggcttcaacatgttccaaagaggcgaccaaagaccg

SEQ ID NO: 185436 - DNA, 386 bp, Arabidopsis thaliana
  unsure (1)..(386): unsure at all n locations
ccctttttttttttttttttacccccaaaccgcagaaggctntatgagccaatcctccccccaccaaccacttaagaactttttaatattccctaaaaaaattcaaaaaaacccagagcaaaaaacattttttttggggggtgttggttccccctgggaaataaaagggagaaacctcctaccccccctttctctatttaactccacaaaaaaaactgcaaaaagcctcctccccaccatgtccaggcaccaaaaccaacagaacaaatttttccttcacccccaaacaacccacgaataacacctctgaaaaggaaaccccccctaaaaaaccttccaccaaaagaacaagaaggaccaccttcttgttttccgtcaataacagc

SEQ ID NO: 185437 - DNA, 375 bp, Arabidopsis thaliana
ccccgccgtaagctgggaattcggctggggggagggcccgccctttttttttttttttaaaaacacataagggggtacatttgttcctgagcgagtgttgaagtctcatagttccataccagaggcttgacacagaatttaagccatcggtgagagcccacaccggcgatatcctgtagtcaccataccagactcactagagcggttcttttcatggtaggggcgagcggaagagtgagttcggcatcagtctccacgttagacgagctcgtctgctcaccatacgacttgggaacccacaaccacttgcacaagggtggccttgtatattgcacgcgccaagcactatagtacggcacgattccagctgccatc

SEQ ID NO: 185438 - DNA, 296 bp, Arabidopsis thaliana
tggaggtaccgggccggaaataaaaccctgtgtcgacgagctcacctacccgacggacgacccttttttttttttttcatgaagaaaacggacccccaaggaaaacaaaaatcaacaatacaccgacgcccccacagcctgcacagaaacgggggggaacgccaaaaacaccaacacaaacgaggaaggaagtttttttttcgggggggaacacaaaccagaaccgctaccccagcttgaagaaacagggggcctccaccaccaacccagcccacggagataaacctcatcaaagg

SEQ ID NO: 185439 - DNA, 526 bp, Arabidopsis thaliana
gactcacttagggaagctggtcgcctgcagtaccggtccggaatccccggtcgacccacgcgtccgacttaccctaatttccgctttcgatattcaaaaagcccctaatttcgaaaaattcccattttcttcaaggttttttaaaaagagtatatgcaacagaatgtctttcttgattccctacccggagaagaagaatcgctttactatggcccaagttcagcccgagcaacgcttttttttttccggaggaaaataggttgagtttcatgcgagaaagctctgcacaagaccgctctaataccctgaggaaactttacttgtttgaaagaagagtgagatctactttggcttggtcgcttaacaacaaacctccatttggtgcctagggagaagcttctttggaggaattatttctcttccatttgagcatgaaagaatgatttgcagggggccaccacgttaaccactttttccgattattcaatggatttaccagcaggccaagcattgaaaccttggactt

SEQ ID NO: 185440 - DNA, 180 bp, Arabidopsis thaliana
aaaaaaaaccaggggtttttcgcaatgcccttttttcttttacatcttttagggtccctttggtctgaagggaattcaaaagagggtaagtcccaccctttttcgcaactttgttttttttgtgcggttcccaaccggtttttaacaattggtaaaattaccactcccccgatacctttt

SEQ ID NO: 185441 - DNA, 482 bp, Arabidopsis thaliana
gcacccctacgtaagcttggatcctctagagcggccggccttttttttttttttttggacagaaactaggggtcttggatattagatcctcccaaaaaattgaaacttaacttaatacagaaatgtatttcacccggttttttaaaaccaaataataaaaaatggttttatttccaagatttcaacctcttttttttttttaagggggttggcctcggtaccaaactttggcccttgaacaaaccctccaggattaccgcaaaatctcggaaacaccgtccctcttgtttccgattcacaaccaagcccaaagagcacttcggttacgcgaactttcctttttaggtgcgcggcaaattaaagagccaaaacctctttctttcctgaggctacccatattttggccgaatgggaaccccggacccaatccccttataaaagacaccgcgctagagggaacctggctaaccgaaaaaaaaaat

SEQ ID NO: 185442 - DNA, 432 bp, Arabidopsis thaliana
cactcctggaaagactcaggacaggaggcagagtttttacatacggtgggcaattcctaacgtatagagggggaccttcccagatatatacatgtgttcaaccacgacgaggaggttatgtataggtgaattagccatcaattcatgtggacgagaatagagtttaggtagatgaggtggagctgataaaagaaaattatttacagaaaacttttttttttttaaggggagggtgaaatacacattagataaatagacagatagacatggtggcggaatgggatggtggagagaaggagtaacagtaacacctcacaacaatgaagagtccccctctaccctctctcgctcaacaaaatataccaagggagtaagaatatggcccggcccccacagaggattcagcagcctgcgccatcccttagagcacac

SEQ ID NO: 185443 - DNA, 329 bp, Arabidopsis thaliana
ggcccccctcaggggggcccgcgccgcgggatttccccctttttcaccccgggggggggggggcggacaaaataaacatcctatccaaaggcagagaaagaaaccttttcgcctttatctcaagtgaaaagagaggcttcccctgtgaacggtggagggggcgacaagagagaggggggttgcggggggatctcgagacgggccgtggccggcgcccttccttatcgaccccacccttttttcttttgggactgttgtgggcacaaacaccccccccccaccctccccaaaacgggaaacgcggccgcgcggggggcccgctttaaagg

SEQ ID NO: 185444 - DNA, 512 bp, Arabidopsis thaliana
tacgtaagcttggatcctctaaagcgtccccctttggttttgttcttttaaaaaaaaacaacccaaactaaaaaggggcgttcttccctgaacttaataagcgatcaaaaggggacccggcctgggtcttatgggggagacacagaagggcctaccggggaggggacatttgcctatcaacacacaaattactcacttgttcggagagagggagaaaaaaaaaggggggcccagcaaaaaaaaaaccttcccctaccacgaaacccaaaaaaaatgccgagccttgtaatacacttctcttaacaccccaaaaaacaaaaggtcccgttgtttgaacacgcttttttgccggccaaaaatgttggcaagaaaaaagggtcccacgggtttgttttaacctttcaaagaaaaagtcccttttccttcgcaaaagggagaaaaaatttttcaattggcttatccacccccctttgtaacaaatgggtgctaaaaaaacattgcccaaggggccc

SEQ ID NO: 185445 - DNA, 324 bp, Arabidopsis thaliana
aataccccccgaaaatcttcccaaaaaaaaaaaatggccacaagggggggtttaactcaaaggggttcgtctcgccacagggcttgatatttgttgcaaaaaaaccctccaatattgggtttactgtggcacaccctttttgaaaaagaattatacccagcccgaaaagttcccttcattctttgaaaacgctttcctttaaaaacgccccccccacatccctttttatcagggcgcgggcggaaaaatttgtgtttaaattgtttcaaaaaacaccccttgttgcgttaaaagtgctcccacacagataaccccccccacccc

SEQ ID NO: 185446 - DNA, 447 bp, Arabidopsis thaliana
cgccccgcacgtaagctgggacctgtagggtgccgcctatggtttactttaaccaaaacaaatctatttctgggaggccggcatacatagaggccacgcgtgtaccacaccagcaaagcggcgtaaaaatagggcaaagacacaattgtccctgcgaccgtgaacggaaaacagagagattttttttttctaaggcgcggccggggcgtgcgaaccatgcgacacttaaagatggtcaccagagctcgaagaaggctacctcccgaatagaaaaggacataatgcccacagctgcaacgaacctgatgacactagatcccatccttaacggtccgctctcggggcaaaaacaatttggaccaagattgcaggacggccaacaatgctctcggaagcaccgaaagatggcaacccgtagggaatctgcgaagaaccacaaaatgggct

SEQ ID NO: 185447 - DNA, 558 bp, Arabidopsis thaliana
  unsure (1)..(558): unsure at all n locations
cccccaattaagagaaaaccgcccccccccacggacacagcaggggacagtttttcnccggagcgggggggcggaaaaaaaaaaaccccgccgccccccgggcgggaagaaaagcagagcgaccccgcgacggacccgccggcacgcgcgaagcgagaaaaagcagaaagagagcgaggcggggagcaacgccggcgcacaacacaacaaaggcgaccgaggaccttttttttggggggtgtgagagaccgcgggaggacggaggagagaaaaaaaagcgaagggacggggagaccgccgaagaccacacagcaggaaggaggggagggagaacgagacaaggacgagccaaggagagcgaggaggcggcggaagaaagttggacggaggcagagcgaaggcgcacggggatgcgcggccgacgcggcgaacacagaggaccggaagcaggccggcgccacgcacgccccccgacgaatagcacatcggcgcaccagaaaagagcacgggagcacatgcctccccgggagctcgaccaagggccaaccaggccccccc

SEQ ID NO: 185448 - DNA, 360 bp, Arabidopsis thaliana
acgatgacttagggggagcagctacgcctgcaggtaccgggccggaattaatggctgggtccacgagctcactagatcggagggcggcctccttttgtttttttgtgcacaaacaacaacaaggggccatttaataataccaggcgcgacagacaccttcggatactcccttaaggaaagggataataaaagccctctaacgcaagcacctcagcaacaggacccctttttttgttagagcggcttaccccgcactgttccattcctcatgcgtggactgacctctccatctcgcctcccgacagctgtgttcctccgcacgcccacctcagagacttccttcctcgcgccccgcctgct

SEQ ID NO: 185449 - DNA, 465 bp, Arabidopsis thaliana
aaaaaaaaaggcctctctagagacactcaaaacttggggggccgccccgccgaagctgggatccttaagggggaccttttttccccttggggacagtcggtggaaacatggatagacattaaaaaaggaccggcctaacaactaaagctagtctctccaaagaccgagatcttgcctgtcctaaccagactttcaacaaatgaagagctatttttctggccagggacaccctatgaactctcacgaaaatagctacatgcaaaacacacaactcaaagattttgccagaatgtccctcttttaaccccgccttatctctaacccggcagactatggctcgacaccgttgaccaagccctagaaggacgagacacacgcctgcgccaccttgcacaatctatggacctcgacgcctacacccggtactcggcccgcattcgccgacttcctcgcgggcggctcact

SEQ ID NO: 185450 - DNA, 187 bp, Arabidopsis thaliana
  unsure (1)..(187): unsure at all n locations
acgcgcgcgccccaccgcgcgttttttttttttgggggggtgtgggccagcngcacccgcncggtcgacgccgcgcgcggaagaaatcgtcgtaagtagtagtcttatcgtcacccgctctgtggtctgcagttactcgcttgctcgctcggtgcactncttctccgtccctcattgtcgtacgacc

SEQ ID NO: 185451 - DNA, 211 bp, Arabidopsis thaliana
ttcgcccggaggaccctgggcctggaattatgcggagtggtgccacacgggtgacgttacatgcgggcgtcacaacaaatatagcggcttgcttaacatatcgagtaacctacgagaacggacgagtttaccataatctaaatattcttcgtaacctagttatatttacggttgttgattaacttctggtaaacagaatatggcccacact

SEQ ID NO: 185452 - DNA, 472 bp, Arabidopsis thaliana
aggaggtggctagtgcacccgtccgtaagctggaatcctttaaaggggccgccctttttttttttttttgttaaaactatgccttttttaatggtttaaattcgtggggaagagtccatggggctttaatcgcctaaaaaaaaaacccctttttaaacagcattcctgcataatcaatttttcaactaattgttggaaagagggggtcccttaaggtgggcggggcctttttttgctaaggccaccatggttgaaactacctgaattttgatcctattgcaaaaaaattggggtaattttcaagccggatgcttaagtcgggggttggtttccaagtttatgtggttctaccgagaagaataccggctaacgagtctgtggaacattaccaaacacacggggtatcccatctgggaaaaggatctcctgaaatatacctttggttccacttgttttatggagccccctacgc

SEQ ID NO: 185453 - DNA, 491 bp, Arabidopsis thaliana
gggaaggctggcccgcctgcaggtcccggtccggatttccgggttggaccaaggcgtccgcccacgcgtcggttcgattggaaaagagaaaatacgtcgacttacgttaagtcttttttttttgaatatacccggaaaatttgggaatgggggagtttctatcgatgacgggtcaaccatgaataccttaaaattggtctgctttttttttcactaggtcagtggctaaacccttcttcccaaaataaacccaacgaatgttggagctggaatcctttttcaggactaaaaagttttaggggcttgggtctttgactcgaaccttgggatctggttaacgattaatgcttctctgtacaaaagtttaatgaagatgggttcaattgccagcacttgggcttttggtaggtgatggcgtgggcttccacctgtgaggaggccattaattagggacctggacaccaccccgtcctcagtaggttgatttcccg

SEQ ID NO: 185454 - DNA, 380 bp, Arabidopsis thaliana
ggcccggtgccggcggccgatcagcggggcagcggcgaactgtttgtgggaacggcccccgagattttgaagccgccgcagggcctccccgggcgggcgcgcgcggccggcgggccgttttgtggccccgggggggtaggagccggccacaaaaaaacctctcacccccgcgtctgctgtcccacccgccgcgcaaccgcccgcgcgcccgccgggcatggggtatatgtatagagtgcggcgcggatgtgagccgcgcgcgcccgcgacacgcggggacggaggcgcgactcgggccgctgcggcggcgcccgcacgccgccctctttttttgcgaggggtggggagcacaccggcaccagcgtggggcggccgcgtga

SEQ ID NO: 185455 - DNA, 370 bp, Arabidopsis thaliana
ctcccccctgccccctttaccctatcttattttttaatattcttctcgcgccgtcccccacaccccccctccctgattttctttctcatcgcttgtacctctcccccctctctctgctcctcactcttaacaacgcccccttttctccttggattgtttgggaccacacccccccgggcccctcataaatcagtaaaaccccctcggcatccaattgcgttgctcctgcctccccctcttttctcctttccacactttccatctcccttctttccttcatccttcctccactcacactctgtctcgctcctactcgcccgtcttcttcacccgagacgtacagctctcctttctctatcacacctagcaa

SEQ ID NO: 185456 - DNA, 464 bp, Arabidopsis thaliana
  unsure (1)..(464): unsure at all n locations
ggatccttttgagcgggcggcctttttttttttttttttggagaaccattggccactttgaattaaaccaggacccctttaaggtttaacccaccggagattggtccaaggtcttaagaaccatgggggaaatccattaccagggggccggacgggtttttcttattcaaacttcttttaaggtacccccaaccttttattatcctaaggaggtggttcccattatttcaaggtcccaatttaaaccagccaatggaaaaatccttcaccagattttcccgttttcagattaaccccaaagaaccaaccgcaaaacccacttggcagcaatggggattggagaaaccaccggtttttaggctcctccttcttccttctcctccggttctttgttccatggttaaatcctggccctcctntcttaaattccttccctccggccaccggggttccctcctggttaa

SEQ ID NO: 185457 - DNA, 491 bp, Arabidopsis thaliana
ttcatataattcaacctccaccctaccatcataaactaaaattattcgacgagatattgtcagatatacgcccttcgcatcatccccgccaatccgagttaaacagaagggaaagcgtggcggtcaacacgtatcgaggccggagtggacaggcgtttttttttttgcggggtggcgaagacaaacccgcttttatcacataaagcactccaacgtccgctattctgctcagattcatgacgaatgatacatcataattattactgtacacgtactcaccttacccgacatggaaaagtaagttaagtataaattagtagccacgacgcgtaagtgcagtcctgagccccgggcaccagccaaaaactacaagtaaatcttacaatagatatcctagttatttagtacacacaacggcaccctgccgacacatagagctacgagataaatgtacaccacataaacgactaaaggtaacagacgacagagag

SEQ ID NO: 185458 - DNA, 486 bp, Arabidopsis thaliana
accccgccgtaagctggaactttagagggtgcggccgggggtaagcctattaaggaagataccggcccgaatacaggggacctcgggcccggcggaaccagtagagtgagaatggtgcggcggaaagatagatgaggtacaaattggcgagctggcaagcaaacaaaccgtcagcgaggcgggttttttttttgggggggagggggacaagggaattgttggagacagcgccgcccgggctgagaggaagggaaactctgaccggagaggcgtggcgcacctgctagaaaggccaggcgaggcggcggcatcccgggtgcttctacctcggaaggcgaggagttgtgtcggaggacggaagcgcttgaaccgtgcctagagacaaatacatgggacggccgggatgattgcgactagaacctggtggaggggcccaaggagcctaagtgcggccacgtactggctgccactcggaccggacgatgc

SEQ ID NO: 185459 - DNA, 594 bp, Arabidopsis thaliana
  unsure (1)..(594): unsure at all n locations
aagaaaaccaaagcaccgagagccacagaggcgagaaagagccgacgattttcaacccggggggggagaggcggagaaaaacaaaagaaaagcaggcggggggccgccacgcgagccacacgaaagagagaagccagcggcgccccaccacaacacccccgcacgaaaacgagaagagatgagcgaagcagaggagcgcaggacgaacccgcgcagccgaaacaaagcagaggagccggcacgtcttttttttaacggggggggaaaagaagagagccccgcgccacgcgcaagaaaaaagaacaggacgacgaaggcgaccaggcgatcagccgcctccgccgcgcgacaagggtgaaaagacaagacacggagagcgaaagaacaaggaaaacacacgagcgacggcaccaacgcccgccaacacaggcaacgcgacggagagcccgcgcacaaaaccggagcaaccaggacaccggagcaaccgagacacaacgtagccaccgngggatccggagcgtcagagaaccagggcacggcgcaacgcgagggaagacagaggacgaaggaaaaagaggacacagcgcaccccgg

SEQ ID NO: 185460 - DNA, 401 bp, Arabidopsis thaliana
cccgcccccgaaaggcccgaagaggaaaaaaaaacacagggaggcaacgccgcccgacagcgggggccggcgcggaaagagggattcagcctttttttgggggggggaaacaacccaccccccaccgcaaaaaaaaccgcccagccacgcggaagcgcgaacggccaacacaaagcaaaaagccccccgacgcaaccaggtaaggaaaggatgcaagaggcaagaaccaaacgcgacgcggaccgcgagacccccgccagagagcaccagcaccacgacacgacgagccgggcggaacgccagaggacacaggcccgagacacaaccgcggccggaaagccagcagaagccaacgcaagcaaacgaaaaaaccgcaagacgcaacgagaaaggcaaacgga

SEQ ID NO: 185461 - DNA, 394 bp, Arabidopsis thaliana
tcgaaagttctgggggggcccggccccgcacccgagcccggaatttgggtcgcggtgaaaccaagaggccttttcttggggcaaacctctctcggaatggggggccgcgcaaaggggccctcctctcctggctgcgccgggcaagggcggttatttattctacgcgggcctcctaattattggtaaaccgaccgatccacctaccgtaaggcattttttttttaggggggattcgcataccgaagggtcctgttccaactcctacaagacttgtggtacttattatccatgaaccacgaatacctatccaactggagtaacagcatattttacccggtccgagacccacttgcacatattgtctgttatatcccataaactttttgtttaaaac

SEQ ID NO: 185462 - DNA, 508 bp, Arabidopsis thaliana
ttagggggagaacgtacgcctgcaggtaccggtccggaataatgtctgggccgacgagttcagtactcagggggcgcccaacgttaccggcgcgtagggaatgcatcacaaatccttagacggctcgacacagcggtcacagggggttatattctcgcggaggattgaaagagagggcagagcatgcacgcgacaatgtggaagacttttttttttaagagggtggccggaccaactagaaggggtacgaggtatgcgtgcggcgggggggtggtccaacacataccgtcgagacaggagcccataatgaagcagttaccgccgtacataggcgcgcaatgaagaaaagaaaccagtgcagagcttaccccccggaccacagacgtgagaaagacacatcgactaagactagctgccgggaagttggaacccatcttaacatataacatacggctgagcaaagcagtcatctgtttagttttgcagctttctggtgtatccacaatct

SEQ ID NO: 185463 - DNA, 465 bp, Arabidopsis thaliana
ctgccccgtacgaagctgggatccgtctattgctcaaacttttagtatatattctcacagtacccatgtcctgttatttagtccactgccttcaccgttacgtcaccttgttaacaaacttacaaatattgagcataatcctgacccaccctttataactcagaacctttcggatctaatggcatgtatactcacatagagaacttttctttttgatcagacccgtggcacaagaaattcacatacccccgactccaagtatatataactttcatctcactagcaggatatgtatctcttccgcacttctctatcgtgtacaacgtgcccagacacaatccactagacctctttctgacctccaaactaatctttcttcatcaccacgactatacttttggctaattagtatcatctagtcatgatatcctgacatattataaactattccaccgatcaaagcct

SEQ ID NO: 185464 - DNA, 147 bp, Arabidopsis thaliana
aggggaggaacgacgcctgcagggccgggcccggaatagattgttggaccgcgcgcaaagtagccggagggggcccctgactggggtatgagaccccaaaggcaagagaaccgatgagcacgcctcagcctcacacacgcggagagc

SEQ ID NO: 185465 - DNA, 450 bp, Arabidopsis thaliana
actttcataataaataaaaccctaaatagggataaacccccataattccaaacagagcccaaaagaaaaaaaaaaagggggggggcaaccgttctatctttattactaaccacaggaaagggggacttccataattttttgcgggcgagagggagggtttcccaaagaaccccaaaaaaaaaaaaaagaattcttaaaaagaggatttaggcaccaccacccccctcgcctaaccgggtctttttaacctgaaacccccccaaaagccaaatgttccctaaattttcttccccccggggggcgggaaaaaacacccatttttaaccccattctttggccccctcaaatggggggggaggaacatcctgttatgcccccaggtaccaaggtctcctcggcgggagcgcggcttgcaacaaaaaaaaaaagggaaatggctttcagcttccc

SEQ ID NO: 185466 - DNA, 402 bp, Arabidopsis thaliana
  unsure (1)..(402): unsure at all n locations
aaatttaaaagagaaaatccccccattcctttttttttctttttgagtctcccggaaattttggagggggggcttttccctccggggcacccaaaaaatcttaaattcccccccctttttttgcgctgtggggnncataaccgctctccaaacncaccacccacaaactggcccccggaccctccccaaaccaaagcctttcccgcctgggtccttacctcgccccgggacctgtaacggagattcttcccccccccccccccaaaaaaaagactcgctcacccccccctctttcccttcgcgggggggcgccccaccccccccctaggggggggcctcacagagggccccgcccctttccgctaaagatggcggcacccgcgccccccctggaccacccaa

SEQ ID NO: 185467 - DNA, 193 bp, Arabidopsis thaliana
ccgcgttcggtcatctgggctgtggtagttggaggcgccgcgttgcgtccagcccggagactttttgggggcacggttcctaggtcctttatgggttgggtgttcttctagcttgttcggttcttatcagtggttaggcgcagtcaaggatatagacgtaaggaaagggtagtggtccaggaagggaagaggg

SEQ ID NO: 185468 - DNA, 163 bp, Arabidopsis thaliana
cgcggggcctacaaaaaaaaactccacttgtcggtttccgtcccctctttattgctatctgctccttttttccttagcctgcttatggttctctcctgcctcgtcttaccgttccccttgttccgtatctcatcgctcctgctgttgcctgttttatctttga

SEQ ID NO: 185469 - DNA, 432 bp, Arabidopsis thaliana
atggaccccttccgtagcctggattcctttgagggggcggcccttggtttttttttttttttttaagccaaaaaacccacatgggccatttttttataaaacccagcaataaaggttaaaacccgacctcattgttccccacagcccttaacaaccatgaaaggaaactcagtaaacttttcccgaccaaccgaaatgattttacgaggggtatttaaaattgggaaatataggttctttaaattaattaatgatcaaatttctctttgcaatcctggtttatttaatactggcgtgggccataagaagttgtgtttggggattgttgggcctctgaagatagaaccttaatggtggctctcagcttaagtaaactccatgtcgaccattctttaaggggtgtacaaatgcaggaaagctcccctccggaac

SEQ ID NO: 185470 - DNA, 498 bp, Arabidopsis thaliana
gacgtcgcatgcacgccttcctaagcctggattctttagagcgggcggccctttttttttttttttttttttttttttgtttttttttttttttgggccaattccaaaaaattttgaaattttatttaggaggttttaatgggggacaatccattaccctggtaattattttttacaagaaaaaaccgagcctatggggggggggttaaattaagatggccttaaccaaattcccaaaaagggggaaggggttgtttttgaacgtaagggcctgaacaatttgaatttttgggacaattggtgagggaactatggggggcccgggcttttgcttttgtggggaactgtgagggaactgtggggattccggccatcgcgtttttgggaggggctaatttgtataattccccttatggttatttttttaagggggggtggaagagaaaagtggaaactgctggtttggcttaccttggcctggggctgggagagcttcat

SEQ ID NO: 185471 - DNA, 474 bp, Arabidopsis thaliana
ctgcacgcgtcacgtaagctgggatcctttagaggggccgcccttttttttttttttgtgagacatggaaatttgaaataaaggagggggcatcacaagcattttagggatctgaatgtgcaggatctatttgcatcaatagaaagagagtgtatcgtggagacgaagcgggctttgcacattgtgatgtattttatatgcaagtgacctcctacaaatagctttagaatgaagtattaaccgttgcatgctcgagtctgaatcatcatgttgaacccataaagacatgtgtagatggacccatgcaacatagtgaccagaatctgtactagtgctcttgtgggacaacatgaggtccaagaataaaattaagtgatgtgatttatcttgtgataaaaagtacctttctgtgggataagtggggaaaatttttcatttcgatttgcaaaccactctgattataaattgtcacat

SEQ ID NO: 185472 - DNA, 480 bp, Arabidopsis thaliana
gggaagctgtgcgcctgcgtgaccggtccggaatacgggactgtccacacgcccagtcctcgttggggccccctttgattaatgatttgaaaattcgggcgaaggttttaataggtcccaaaggcctgaagtgcctttgtcaaatgggaaaccatatgcaaactcccaacccctgccgggaaagaccatcgagattaaattgtttgggggcgcgcaaagtgaacacaaagcggaatcaaagggcgtgaatatggggggctcactatgtgtcaagctcataggggggcgttgaacctaaacccctcttgttttccaaacctccaaggagatgtaaattatatgaagggcccgccactgctaaaacaaattttatatttcgtttcgtaagcaagacaccgggggttaaggtacacactatttctcaagacgttggactcctttcctagattgcatgtctcaacacattattccctcaaatct

SEQ ID NO: 185473 - DNA, 400 bp, Arabidopsis thaliana
  unsure (1)..(400): unsure at all n locations
aaggcggccgcccttgttttttttttttttttttttttttttttttttttttcggttttttttcttgttttttttttggttttttttttcttnngggggggaaaaaaaacctttttttttttggggggggcccccaaaccaccccaaaaaaattccctaaatctaaaccgggggccccccccccaagggcccaaacccgggtgccctttaaattaaacccccctttggaaaggaccccccgggggtttcaacccctatccccccttaaataacctccccaccttgaattgggcggccccttttggatcctttaaaacataaaaccctccaaattacctttttcactgggtccccccccaagacccggtttcggtacccccccataaaccagggggggggg

SEQ ID NO: 185474 - DNA, 472 bp, Arabidopsis thaliana
ggccggtgcctgccccccgttccgtagcctggattcctttaaagcggccgcccttttttttttttttttttttttttttcttttttttttttacgtttcttctttggtctctattggttttttttttctttttcttgcggaaaaaaaaaatggtttttatgggggtgggcctaccaaacaaccccaaaaaaaaaccccaaacttattttcggggggcccccccccaaaggcccaaacccgggttacccttaaaaccaaccccccttgggaaaggaccccccggggggtcaaacccaatacccccttgaaaaaacctcccccccaggaattggccggccccttttggagccttaaaaaaatgaaaacccccccacatcattttttaaccagatccgccccaaggcccgggttgggggacccccaataaaaccggggggggaggccaaccccccctccccgggggaccccccca

SEQ ID NO: 185475 - DNA, 335 bp, Arabidopsis thaliana
  unsure (1)..(335): unsure at all n locations
gaaaaaaacaggacacagacccaacaacattttntctccaatactcccaacatttcacaccgcgccccacgcgagcgcagtttacaattcaaacaaacaanaccgcccacccactttttaagagaaacacaaccagcacacacaaacacgcaaccgcagaccccaccagacaccaagacacccaccaaccactttacaaacacccacaggggggccacacccgtcccctccgccgaaaaacaaaaacagccggacccttcccacaccaccctctcacagccgatgacccaatagtcacccatccagacccccacatctacaaaccttatccaccc

SEQ ID NO: 185476 - DNA, 258 bp, Arabidopsis thaliana
aggagctctccctcggccgccgattcccgtccccccgtcggcaaaataaatgattcaaagcttgtctgcttgtttcttataaacaacacgcttcaaaacctctctctcacccccagaacgcataatcccaacgcgggacggcaaatcagttaaaccagacgactaaacctaccccgtattctggacccaaactacatttcttcacctgtttataatcgtaagctccgggaactactcgctctcctttttacttcttcg

SEQ ID NO: 185477 - DNA, 368 bp, Arabidopsis thaliana
  unsure (1)..(368): unsure at all n locations
aaaggcaagagaggccacgcgccccaagacccgccccccccatcaccacaaccccccaacccagaacagcaccccgccacagcctaacgcccccccaccaggccactcacaccccgaggaagaaggcgaccagacaagaagaagcggccgaacaaccaacaaaaaaaacaccnccgcgcccccccctaccacacacgaagacacgccaccaccaagccgacgatagcgccaccccccggaacacacccgccccacaaggcccggcgacacccccaccccgcgagcacacacacgcccgacacatgaagaaagacgagaccaccccccaccaacgagacaacaagcaacaaacgaacgcccccgcaccc

SEQ ID NO: 185478 - DNA, 373 bp, Arabidopsis thaliana
gcttggatcctctagagcgggcggccttttgtttttgtttttataaactgaaacttttaggattgacccacttaagaagggagggctagaaatggggaggctaaaacaattaacatacataccgggggacacaaggaaaaaacagaacataatgggaaagggggaaacaaaccacttaaaacggtttaaccaaaggggggggcataaagggggggggggggggggaaaaccaacaacaaaccccttttatagggggggggcccccttcccttacacggagccagagaagacaaaaggggggggaaagtgtttaaaccaaccagaccttttaaaccaggatccaccccccgggggggggggtttttcggggaaa

SEQ ID NO: 185479 - DNA, 675 bp, Arabidopsis thaliana columbia
  unsure (1)..(675): unsure at all n locations
gcccccccaccccccctcccccccgcaactcccccactcccccccccacaccaccccccccccccaccgccaccaactccccctagcacaaccccccccccccccctttcgngggacccacaacaccacccccccccccccacccccaacccaaccccccccnaccccccccattttcccacccccccgcgacgaacaccccccccccacacccacacaaccaccccccccgccccccccccccccccccaccaacccgcacaccccccaccccccacccccacccgacccccacccaccaagcacccgcgcccccacccccccccccacccccccccgccccccccccacccccccgccacccccccccccaccccccccccccccccccaccccgccccccccacccttcttttttccccccccgcggggtgccccccccccccccccccccctccccccgccccccaaaaaaaaaaccccccgcccccgccccccccccccccccccccaccccccccaccaccccccaccaacccgccccccacccccccccctccccacccccacaacccgcgcccaccacccacccacccacccccaccccccctaccacccccccccccccacccctcccaccacccacctacacacccccccccccccccccccccc

SEQ ID NO: 185480 - DNA, 264 bp, Arabidopsis thaliana
  unsure (1)..(264): unsure at all n locations
gcttggatcctctagggcgggccggcctttttgttttgggtttataactatattttttattataaaaaaagagggggaaaccctctttaattctgggatcgggattagnaaacaatcttttctaccccccagaaaagacccacctttagggcccaaaatctgatgagggttctctttgagaatttgctactctgggggggggactaaaccaaacccattttttccataaaaaaaggccaccttttaaggctttttttttttttt

SEQ ID NO: 185481 - DNA, 156 bp, Arabidopsis thaliana
cctcgactttaatttaatttaaacatcaccgagttattttaagacacttttttttgacacaccctagttcagcttatatcgataccaaatttctatattagtaataaagaaaccttacaatcttaaacatacatttcttattccaaaaacctactt

SEQ ID NO: 185482 - DNA, 691 bp, Arabidopsis thaliana columbia
  unsure (1)..(691): unsure at all n locations
cccccccccccaccccccccgccccccccccacccccnccgggtcctcaccctccttcccctcccccccnccccccccactgcgtngncgcaccacccccccccccttttccaccaccacaccccganncccccccccccctcnccccnaaccccaccnncacctttccccccccttcgcgcgtcagggccgtgtccctcaaaaaaacaccccncttcccccccacaccctctcttcacctccccccccaccccccgcccctaccatccccccccccttatttccccttctccccccccctcctcccctctccccccccgcaccaccccccttccctcccatcccttttctcttcccaccccacccccaacaacacccccctccccccacacccacccctcgccctttctctcccctcccgcggcttctgttttcggtcccctcncacccccccctccccttcttcccccccacaacacctatttgaaacaccccccccccccctccgtccccgctctccctccccccacccccacccccccccctctcccctccccctcctctccactcccctccgttctttatcccatcccccccccacccccccctccatctttttacaattctcttccccccaccccccccacttcttcctcctgctctctcctccctctcccccaccccccccccc

SEQ ID NO: 185483 - DNA, 629 bp, Arabidopsis thaliana
  unsure (1)..(629): unsure at all n locations
aaaaaaaaaaaaaaaaaaccggcgaagctaaattaggggaacccanccccccnacnncttttgnaggggnnaaaacgccaccccgccacgcgaagggngggggaccccncccaggagcttgttccgccccggcgggggaaaaagggcgcccccacaacaacaaaaaagcacacaaccacgggggaggcgcaccacaaagaaacagcgaaaaggcccggacccacaaaagaaggaacaaaaaagaacgcggaaaaaaacaaaaaacgcgagacacaccaccacgaaaaagacccaagaanaaaanangcaaagccaccaagaacaaacgggccggcaaccagcaaagaacagacggaccgcttcttcttaaccgggggggaggggggggaggagaccacaaaaaagacaagagaacgcaacaaacaaagaaaaaaaaagaaaagaaccccagaagaacgacaaaagccggcgcgaggaacacaggagagacaaagaaaaaaaaagatagaagaagggcgcgacacaaggaagccggacgagcccaacgcaacgaacgaaggccaggaaaaggacgcaaacaaaaagaaagaagcgcgcgaggacacccccccagcgcaccgcacacacga

SEQ ID NO: 185484 - DNA, 507 bp, Arabidopsis thaliana
  unsure (1)..(507): unsure at all n locations
cccccccctttttgtggttttaggagctccntttttaatattaaaaaaaacccccccctcctaaaaccccgcgcggggcgggtaaaaaaccccacccaataaaacaccctctttaaaaattttttaaaaaggttccctctccctccacctcaaacccccccccccactaaaaggtctccacccctcttttccttaaaaaataaaaaacccctctcttttttttttaagggggcggggggggagggttttttttccttaaaccgcgcccgtttngggaaaaaaaccacaataaccccaccagttctttccccaaaaaagacaacaaaagggcgccccgccccccccggaaaaatttctcccaggcccgggttccccctctaaagggccccaccccccttttttctcctttaagggggggagcgccacatcttaaaaaggcttttgggccaaaatccccgcggccccacaggctcttcctcccttccggaacaaattttcctccccccc

SEQ ID NO: 185485 - DNA, 442 bp, Arabidopsis thaliana
  unsure (1)..(442): unsure at all n locations
gcctgcgggaccgggccggatncccgggtttattatgggaggagaccgtgtctgtgctgacgtggatgcttcccattggtttagaaggtcaatccaaactcaccacgacngtcggcgtttaatcgtttaggggaactgtggacaaatggtgatcaaaacgctggggttttgataaaagagctctttgttttttaacgggggggggggttcacccgggtaacaaagatcaagggagtccaagaagcggtcatgaaatcgatgtaatcgggattctacatggggcaacctgggtaatataaatgccaccatatggcttcggcaaaaacaagaaacccggctccaaggcgttccttgaatggggatttgtgggaatattaacgaggggggaagcttgggggattcaaaaaaaagcgtttgggaggaaagggggaacggctttaaa

SEQ ID NO: 185486 - DNA, 607 bp, Arabidopsis thaliana
  unsure (1)..(607): unsure at all n locations
cccccacgaaaagacacagaagacgaagaaaacagacagctttccaccccccaggggggggaaaggaccccacgcgaacaacacnaaaaaaaacnnaaannaacagaccccccacccggcgaaacaccccaacaagcaaacaccacaacagccaaaaaggacaagaaagagcgcaccagccaggacaccacacagccaaacaccacacccacacagaacgagcagagaccaccccaacccgcccacacaaacaccacgcccccttttttcacaaggagcagcagaggggcaaaaacaaacccagggccaaacacaggagacaaaaaaaaaacacgccgccccgcgaaaaacgtcaacagccgcgcccggcacagccagaggcgagaaggaacgagcggaacacaagccacacgaccacaacacacaaccagcacccanacacaacgccagccacacaaaccaacgaacaagaagacgacacccgacccgcacccacaaccgaacaacgacacacaagaccgaaagcacgaaccgaccaaaaggccacgacgcacacgacaaaacgcgaaagcaaagcagagagcgaagagagacaccacaggaaaag

SEQ ID NO: 185487 - DNA, 349 bp, Arabidopsis thaliana
  unsure (1)..(349): unsure at all n locations
acggacggcgcgaccgcgcccccggcaacgccgcaccacgccgagggcaagcccagaaaaactcccctgggacacccgggcgcgccccataaagaggagaaaaaagacgcgcccccccggagccagcaacagcccgcgaccagccnttttcacaccgcggcggcgcaagagcccaacaaaaacaacaccggagcgcggcaccgccccccaccaccgccccgcgccgcaccgcccaccaccagccgggaccaccggcccagcgaacgccggccacgcacgggcccgcgcgccgcccggcccccgcacaccccccgaggaacaccagcccccacacgacccgcgagaggcg

SEQ ID NO: 185488 - DNA, 190 bp, Arabidopsis thaliana
atcactatttgggagctcgtccctcggtccgtccggattccggtcaccccgcgtccggtgatggacgacacttcaggctggttctaactccatgacagttctgttcttcggcaagactttaggtggttcgacggtgaccaatcaccgagcggaaagggatgaaaacagttcttctacatttggggggggg

SEQ ID NO: 185489 - DNA, 365 bp, Arabidopsis thaliana
aatgccgatttagtttggactccatatttgtgttggtctcaattttttaaaagaactacccagtttccctacgcgtacgtttgtataccgcatccgctgtgccaccgttgccgcccaattttctccccgctcgacccaagcccgcgatctgtccttcctcattttgtcatttacctctgtgacggacgcgcgtcagaagcgtcctgagtaccatgaagttttagataaaacatttacatcagtatttcataacttatctattcgtcgatgatccagggacgcttttatcgctcgggcgcgtcctcgtatctcgtcgttgtagcttgatgtccagatgtattagtgtgtcccggacgtcagggcct

SEQ ID NO: 185490 - DNA, 484 bp, Arabidopsis thaliana
cccccggaggggaagggagacgcgcgacgccgccacctctccccccccgcggggccaaaggcccccgcgaaaccacaaaacgcacgggcccgagaccggcgcgcgccgcgggccccccgaggcgcaaaaacccaggagccacgcgccacccggccgacagaccccgacccggagagcccggcgcgccgcaccccagcgcccccccgcgcacaagcaggggcgaacgggcgcgcacgcaccgccgacaccgcccggccgcgccccctccccaaggagggcgggggcccgacaccgcaggcgagagcgcgacgagggagaaagacaacacgcacgccgggacgcccagagccgcccaccaccgggcacgcgcaacgcaggaacaagcgcgacgccaacggcccccgcccgaaccgcgcgcaaggagaaggcggcggaagcaggagagacagggagcgccccgcagcagcagaccgcgccaggccgc

SEQ ID NO: 185491 - DNA, 552 bp, Arabidopsis thaliana
  unsure (1)..(552): unsure at all n locations
ccccccccnnnttgnnggggggaaaaaccccncccccccngaaaaaaaangaaaagagaaagacgcaaattcccccccccagggggagaagggcccgnaanaaacaaaaaaanaanncanannaagcaccgngncacaccacaaccaaacgcacgagaccacacaaagaccccagaaaaaaaaacgacaaagcagacccgaacgcaaagcaagagcaaacagcgagcgcgacaaacgaaaaccccacaccaacgaaacaacgaacgcccgcacaaccccacacgccccctctcgtacggggacagacacgggccaccccccccccccgcccaccgaacaacaaacaaaaaaaaacacccacccccacacacccaaccagcacaagacccgaccaccaccccaaaaaaccaagagccaacagagcgaaacccaaaccaaaccgcaagcaccacgccagaagccacccacagccaacaacacgacacgacagaggcaccacagccccaaagaacacgacacgcccagagaagcacgcaccccacagccagcaac

SEQ ID NO: 185492 - DNA, 165 bp, Arabidopsis thaliana
  unsure (1)..(165): unsure at all n locations
cgcgcagcgcccccccgaaaaaanaaaagaactgttgggtgcaccccccaaaattagggggagctaccacgcctgcagggcctgggacccaatacaggggtcgacccaggcgtgcgggcttattggctcaaaagaacgaggggctcaatcccggggagaggggag

SEQ ID NO: 185493 - DNA, 432 bp, Arabidopsis thaliana
  unsure (1)..(432): unsure at all n locations
accgcaggccacaaaagcgccngcgccccgcccgcccccgaccaaggagaaatccgagggacacgagacggagccgacctctgggccgaacgccncccccggcggacacagagacccacaccccaacccccacaacactttacacccccaaggggggcccccgcccgcgccgcacaaagnaagaagccccgcgcngcagacgcgggnacgcggagaccacggcgagcacgcacccccccccacaaccgacacagaagcgacgcaccgcgagaccccanacacagagcgaccgcacagagcaccgacgtccgccacgccaccgcgaacgccgcgcggcagagagagcagcgagcagagaacgacgaccccacacaaggcggcacagcgacacaagagcagagaacaagagaacgaacgcccacacgggggggg

SEQ ID NO: 185494 - DNA, 481 bp, Arabidopsis thaliana
  unsure (1)..(481): unsure at all n locations
cccccccccattaannagaggagacgcccccccccccggccccccccccaaattcccccgtccaccccggggggaggggcggggnaaaaaaaaattttttttggggcgggggccgcggggaacccaaacgcgccccctcaaacccaaagggggcggggcggcgcacgccccccaacgcgcccttttttccctcacaaaaccgggggaagcgggccgccctcctcttttcaggggcagtagggccccncccccggcgggtggcaaacccagccaacgcccccccctcctccccgcccacgtcccctccccttttacagagagccccgcgtgctctcgcccctgtagtttcgcccccggcgagagtagcacccgccggcggggcccgctgtccccccagcggccccccgacacgccgcgcccgcccgcggtcccgcccacccgaagccccagcgccccccgccggggccgggcgggcggggcg

SEQ ID NO: 185495 - DNA, 758 bp, Arabidopsis thaliana
  unsure (1)..(758): unsure at all n locations
caccaacaaaaaaacacgcaagaaaaccccagggaaaaaaaaaacaaaacccacacccacgcacaaacctgnacaaaggnanaaccccccccccccccaaaatttttnnnnnggggnaaaaaaacccacccgncccgccccaaaaagcaaaccgnnaaaaacacaacaacaaacacacattttttcacacccacccagggggggggaaagaagaggcgcgccgcaataacaaacaaaaaaanaanatacaccacaccncacaatacgcgcacgagagcagcagacacggcccaacagacccggccgcagccaccccgcacacaacaaaacacaaaacagacacaagaaaaacacaccaaataaacacaccgcaacacaacgacaaaaagcggaccaacacaacacaccctcaaaaccacaacagccacgacaaaaaaaacaacacaacgcaaagccggccaacaacnaccaaaacaatcatttttcttcacagggaacagataaggggaaancccaaaccccagcagcggcggcccacccaaaaaaaaaaaaaaaaaaaacnccccccccaacaacaaaacacaccccacaggaacccaccccccccccgcagaaaaaaaacaaacacaccgacagacgcacacacagacagagaaccgaaacacgcaacgccgacagcaaaaaaaaaaagaacgacaacacgccacaaagcagaagcaaacaacaagacacacaaaaacacaagcacacgcaaagag

SEQ ID NO: 185496 - DNA, 570 bp, Arabidopsis thaliana
cccccccccacgacacgcggaacgcacgccccacaccgcggcaggacccttttacaccccgatggcgggcggggcacgctcggagagcttcaaaaaaacacccgcccgcgacggttgcagagcgccggcgaacacgccgcgccgcgcgcgcgcccgcagccccacggccccaccgcgcgccctgcgcgaaccccgcccaccgcccagcgccctacaggggcccgccgctcgcagccgcgcccgaccaggcgggagccgcccgccagcgagcacccgcccgcgccacgccccaggacaccgcgccccgctgtttcgttcgggagggagcgcgcggcgcgcccgcgcccgcgccgcggtcccgccgagccgcggcggcagaaagaccgaaggacggggcccccggagccgccggggcaagggaggcgaggcgagcaccaacgagagccgcgagcacgccagccccagcccggaggagagcagcgaggcacccggggcgtcaacgccgcggggcgaacagagcgccccgcccacccagcgcacacccggccccgccccggcagagcccccccc

SEQ ID NO: 185497 - DNA, 326 bp, Arabidopsis thaliana
  unsure (1)..(326): unsure at all n locations
ctcaactcccccttccttcccctcctccccccnnnnnnttccaaaaaanaaaaaaaaaaaacttttccggggcttacccaacccccctaaactataagggggaacacggtcccccctccaaaaaaacccggcccccaaatttccctttttccaccccccggcgtcacgcttgaattaaaactaaaaacttttgaaaaatcaaatgggcccaacttttcnccacaccatttcccaaccaaatttttaaattccccccccttcaacccccacccattaaagggaagcccttcaaaatttccttttttcccttaaaaaggggccccctt

SEQ ID NO: 185498 - DNA, 568 bp, Arabidopsis thaliana
  unsure (1)..(568): unsure at all n locations
tgggcccgcggcacaagagaggggattattgggaacacccccggaaatttttggagctggcctgcgcgcgtacggaaggctttgggtcccttctaagagcggcgcccccccttgggggttgggggggggaaaaaaagaaaaaaagggcctttttttttgggggtntaacatgcgtttgagggcgcccctaaataaccaaattttccaccccgggagaccccttttaataaaggagggagggagaagagacccctgtgggaggggctaagggccttttgaaggcttaaaaaacagggagccccctttnttttttttattaaaaggggggggcggggtttacacaatttatttctttattttcaaaacacaagaagattattgcccctttttgctttttcttaaaaaaaatccttttattggccccaaaagaaaaaacttcatttgcttgggaacactcaatgcaaaacggggacttgctgggttccatccccaggcacgccccccatttgtgggcgggttttcaatgaggggaattaaaccttttccccccaaaaacccaaggggggcc

SEQ ID NO: 185499 - DNA, 638 bp, Arabidopsis thaliana
  unsure (1)..(638): unsure at all n locations
cccccccccctatctgttaaggagagaaaacccgnananccccccgacaaactcctccattcccccttttttccccctcttcccccccccccccgcgggaacgccgggncaatatactaaaaaacttctttttccccctccctccccacctctccgaatctccctccccgtcgcaactccccccaccccccccttttcttctttttttcccccctcaaaaaaaaaaaaaacccttttcttttttcttttctaaaaacacaccttaatcccaccacaacccttttttttctttcccgggcccgcccgggccaaaacaaagtccccgccgtgccttttaaattcacctaaaaccccccccccggcttttttctatgatcccccccatctaccaccactgtttcaccacccaagaacgtgtccccccacaacccactgcttcccacctcccctctctctttttccctcgccctactttctacctcttctcacttctcccaccacctctctcgcactcctctcccgtgggcgatctacactcctcccactgcgtcaccccctctttttctagaaaaaaaatattttttctcttcttatccgccgccaaccaaataaaataatcaaccccccccacctttccc

SEQ ID NO: 185500 - DNA, 531 bp, Arabidopsis thaliana
  unsure (1)..(531): unsure at all n locations
gaccaggtatccccaccggggcggccggcgcgacccacccgacgcgagcaggagccgagagcagcatggaggaaccagccgagacagaaaacaggaagacccacccgacaagcggcacaacaccaccggccatgaagagctacacacgacccgagaggacacacacaaggaaccggccatcttttttgcggagggagcgggacccaaccgggcacaccaccgaagagaagaagcaaccagncgcagacgccaaggcgccgcggctggagcaggaccgggacccggaccaaaacaagaccccccaccagaaaaccaaggaaagagaacacaagggacgcgcgccgcaaaaacacaaacccacacgcgcccgcccacagaaacacaacaccgcacccgaacaccaacggaaccccaaaccacggacaaaagacgcaccggcacccaacacagagaaccccccaagaacacaagggagagcgccaccggaaccccacaagagacccgaagcaagcagccacgacccccccagca

SEQ ID NO: 185501 - DNA, 573 bp, Arabidopsis thaliana
  unsure (1)..(573): unsure at all n locations
aaaggcacgagccccgccgcagcgcgccgaccccccaaagggacacaaaccccccccaatttattgggaacaccccccccaatttgaggggnnaaaccaccccccccggaagggaagggccccccaaagggttccccccccggggggaaggcccggaacaaaaaaaaaaaaccaccccccgcgccccgcccccaccccgccgccccccgcgccccccccccccccccaaacaaaaaaaaaaacccgctcctctcgcttctttctaacccccggacagaacccccccacccgccagggcgaaagagaccgcacacctcttttcccggggacgaagggggacccccgttgccccccccccccccaaacgcaagaaacccccccccccccgcgggtgggcgcgcgcggcgaacaaccaccacccgcccaccccccccccaagaccccggaagggacccccccccgcccccagcacccaacaccgccgcccgcccggaaaaggccccccccccaccccccccgcgcagacccggcgccgcgcccccccgcgcgccgggcgagcaagaccccccccgg

SEQ ID NO: 185502 - DNA, 432 bp, Arabidopsis thaliana
gcaggcacgcgtgcgtaagctgggatcctttagaggggcgggcctaggtgtttgtatttttgttttataaaaaaaagttgtttttgttatgtgtttgaataggttaagggtatatgtaatgttggatgagaattacaaagggacgcgggaaaagaggttgaagtcaaagccaaaggttttttttgggaaaaaggggggggcaaacggagaaaaaggggagagggaaggagaaggagagcgaaaaaaatgtcgaaggagagggaatagaaaaagagggaaaaggagccggattggaagggggtattttgcaaggggttatatgtttgacggggcaaatgagaggggggagaagtaagatgggcctggtggaaaagggaagttgcaaggggagggcggtcggcagtaaggggaaaaaaatacgagggggaaaag

SEQ ID NO: 185503 - DNA, 182 bp, Arabidopsis thaliana
cacgcgtacgtaagctggcatgctctttagcgggcgcccttcttctctttttttttttgaactaatgagtgcggtgtataggttatacctgagcgagggctcggacatctgttctaaagaacttttggctgaacgcgacctcagatgggccacaagagaggtctggcctattcaaaaacatt

SEQ ID NO: 185504 - DNA, 477 bp, Arabidopsis thaliana
cccgggttatgcacgacgggggcgaacctgagggccggcttcaaatgtattgggggggagacgtctcataacagttgccaaaggatgccttcggtttccagtcatagaaattgtactcttggggggattctttctgacaatcataacctgggagcgcgacgaccgtacacgtttttttttgacgggggtggagggaacccccgaaaaaagaaaaaaggggctgggcaggtaaacagattctcgagaactatcgaggtacgttaagacagacagtgagcgtacttagataacgattggtttgctatagctcacatggatattgatgacgaccacagcaacactgatactggggtcgggagagcagtatagaacagatcgccaggctctctacatggtgcagtagctaaaaggttacctttcgcaacagatgcaaggggctcgaacggcgcctaacccaccagggaagagattagtcca

SEQ ID NO: 185505 - DNA, 495 bp, Arabidopsis thaliana
  unsure (1)..(495): unsure at all n locations
gcggacggaagcgaggatcctctagagcggccgccctaacccnnnnnnnnngngacgggaccaacaaagcggagagggaagccaaaaagcaagacgaaaaaaacaaaacaagcaggggcaaaccagagagccagggaccaaacgcaaacagaacggagcgccaccacccaaaaaaaaggggacagcaggtttttttaaagaaaaaagaggaagggggtccattgcgtagttaaaagctaaaacaacaaaggatcggagccaaagtgactgagggggaattagggcatctaaaaggggcgaagcagtaatgggaaccactcaaaagctggcggataagaggaagccttaaaaggacgcccaagaaatcaagggccgatggtgttgagcaaccctccaactgggattactgcagtgggaacaagaacaaaaaagctaaagttttttcaaggtagaactggttaacagctgcctaccagccgaagaaataaggatacc

SEQ ID NO: 185506 - DNA, 684 bp, Arabidopsis thaliana
  unsure (1)..(684): unsure at all n locations
cccccccggcccactgcagagcagagcgccagacgcagacgccacacggagacacgcagagcgcgccccgcgaggccgcccgacaaccttttccgacgccccgggggggcgcacccggcccaccccacaaacacaaaacgcgcggcccgacgcgcagacaccgacgacgacggacacacagacgagccccgacggccacggccgcgcaaccgccgcacgcccaccccccccacccacgggcacacgcgcgcgacaggacccgcacccaccgcccgcggcgcgcagagagagaagagccgcgccagcgcacacgcgacgccgcgcgcccccccccgccccgcggttttttgcagagacgaggggggagacggcaccgccggaagacacagacgcggccgcacccgcacccacaacacacccncacgcaccacccccacacgcccccgccgaatagccgccggcgaccggcgagcccgacacagaaccgcaccccccacgcccaccgcggcgcgccggcacgacaccccggccccgcgcgccgcacgcgaagcgcccgcgccacccacagggcgccggacagacacggcacgccgaagccaacccagccaccacccccgccccaccgcccgacaccagacccaccaacaaagcagccaccccagaccgccacgcccagcgcgcccc

SEQ ID NO: 185507 - DNA, 538 bp, Arabidopsis thaliana
  unsure (1)..(538): unsure at all n locations
atgcacgcgtacgtaagctaggatgctctttctagagggcgagcctaatcctctttctgctgcacaattgtctagcgccaggcaggagaagaaccatagttaggcactatctggagagagtgcagggtcgcgacccggcatagtcatgccgacacatctactgcactctctcagtccgttaacatacacctgtcctaaacggactaagctagaaggattcccttatcttctctaaggggtggaggaggnanagagaaaaaggacgnctggactgtaggcttaatcgacccacgaggatacgtacaggaccgggctagagtgctccgctccgtattttgtcgttatgttccgggtataaagcatgtatggacggaagcctcaacanaagtatgtgggacagggctttgcagggaaaagatattctgttcgaccggtctggaaagaaataacctatcccaagtcttggcgacgttatcgcgcccaatttgcctggacaaaatttcccatagggaagaattttgggcaaccacccggccat

SEQ ID NO: 185508 - DNA, 472 bp, Arabidopsis thaliana
gttgctccccctgccgggacccggtccgaaataactgggttgacccacgggtccgtaacacggggccgacttattttttgtttgggtgtagattgtgggatcccactgagagattaatagaaagatctaaaagctgtgaaccgaaaagttttgctcttacactaccatagcggagctttatcaaggggcggccggaccaaaaatggggtctctagggagcagtatattacgagtggacctcgatcttaaggagaatatctcatacaggaaacggggtcttaaatacatcgcatcattgtaaaaatggcttgtgccatttcgaagaataaagaaaaggagtcggagaagtccaaatcatctttaagacaaaggaatcgggtttacttggagaggcggaacctatgaggggtatctgtttaaaagaaaaactcatttggaagggaacgccttttcgaagagtggggctattggg

SEQ ID NO: 185509 - DNA, 191 bp, Arabidopsis thaliana
  unsure (1)..(191): unsure at all n locations
atgcacgcgaacggaagcaaggatccacttagagcggccgagctgagccagcaacaaaaaaaaagcaaaaaaggccaacggaaggagaccggaacaggacagcgccaaaaaagaggccaagacgcaacaagccggaacagaaaaaaagaaaagaagaccncagaaacaagcgaggaaccacaaccaaacga

SEQ ID NO: 185510 - DNA, 401 bp, Arabidopsis thaliana
cgcccccccccgctttcccgcccccaaacgcatcaacaactcaccccgtgccccacacgagggacccccatttccaaaacgccacgggggggagcaccgcaccaaaaaaaaaagacaacctggcccgcaccggacctacaccgcggtagacgccgcgctacggccccccccagacggctgggcgcgactcccccgggcacagagcccaggttggttgtccgcagacgagttgtaccgaaacccacccaaacccgagcgccgcccgccgcccaccctccccacgacccttgtttttcacgccggggggggagagccaagccccccgcccgacacccggccgaccccccagaacaaaaaccacccgccagcctcactcgccccgcgcacacgcccccgaccgg

SEQ ID NO: 185511 - DNA, 384 bp, Arabidopsis thaliana
acgcgtacgtaagctgggatcctcttgagcggcgcgcgctatcccttttttttagttgtaatgacaaccatggggaagatgggttcacaaaaaaggagcgagccaaaagcttccctattctggagcatcacatttcacccgaggcacacgctacacactgaaagaagagacaattttttttttaatgggagggtggaggcagcggggggaatcggaacaacgtgttgtatagggtctcagggggacccctacggggggataggccgttgggaggctttagggtattttaagggggtgagcatttccagactgatcttcctcctgcctgagcttgttctctggatgcgaggcttcctctatgtgcattgcctccatattctttgg

SEQ ID NO: 185512 - DNA, 287 bp, Arabidopsis thaliana
gccgccaggccgggcccggaatccagggtttcccaggcgcccggtccccggggagaaggaccatgaacatttagaagcaagggcggtggcaaggctcacattgcctgcaccatgcgtgaacacgctggaacatctctaaggcctgagattactggccttcagagccaggatagacgcggatgtggttatttgtttaggggggtagacgaagacacccaggcgcgggcacgcggagaaaagacgcaaacacagagggaccaagacagcaaaaacggaccacacaccaa

SEQ ID NO: 185513 - DNA, 476 bp, Arabidopsis thaliana
cccccccaagaccccgccccaaatccccgtttccccccggggccgggttttaaaacaaaaagggagggggggcccaaaaaaaaaaaagcccccttactttacaaaaagggcaccccccttggccatttttccccccccaaagggcccccaggtctcttttttaaagaaacaaaaacccccccccttttccttggaaaaaatattttgaagaaagacccgccctcttttcccttgtggggcgaaaacaccggacgcaaccccccttattgggttttccccagcctgcgttcttcaaaaaaaaacttcacagggctctctaaaaaatgggagggaaagggcttgaaaaaaaaaacaaacaaccccccaaaatcccccccccctttaaccaaacgaggagaaaaattcagagcccctttttcaccccccccttcaggtgaaccaaaccctcgccccctctaatcaaacccccggggggg

SEQ ID NO: 185514 - DNA, 545 bp, Arabidopsis thaliana
cccccgccccttcagacagaggccagcggagcgagagcacaccaagacacccagagcaacacagaactttaacaccgggggggggcaaccgcacacaaaaacaacaccccccacgccacgcggcgcgcgagccaccacagcaaccagcggcggccgcgagcccgccgccacacgccggcgaaagagacagccagaccgcaagccccccgcaccccccacgcccatacacaacgacgagcccagccgagcgcaagccgcgcgaccgcgcaccttttttgcaccgggcgggcgagagcagaggccgcagcgcgcgccaggcacagaaacccaccacccgcacgccagatacccacgagcaggccaacggggccagagagcgccgcaccgccgcccaggcacgaccacgcaagacaacgaggcgcacggacgcacggcaacgacccccgcacggagacagccccccgaccgcccctgggcgcgcggccgaccaagaagcgacggaagcgcgatacaagaccaccgcccgccgcccgacgcgcccgcag

SEQ ID NO: 185515 - DNA, 297 bp, Arabidopsis thaliana
  unsure (1)..(297): unsure at all n locations
agagaagcggagaccccaaggggaaaggcggcgagcaagagcaaggaagagccccgaaccaaccaaagagacaagaacgaacgcgcagcagcccaacagaaagcaggccacaaacaactaccacgcgccgccgggcgcccctccccaagccacaagaggggagggcncggaaacaaaacgaacgaacaggacgcgcagaaaaccaggcccccacgatgagaaagagcgcacccccccccacgaggaacgaacgcaagagcaccgcaaagacgccaaaggaacaaagaaaccaagcag

SEQ ID NO: 185516 - DNA, 376 bp, Arabidopsis thaliana
agccgcgccggaacgggagcttttggggggctaaaccaaacaaaaaaaagaaaaagaaagaaaagaaaagaagaagaaagagaggaaaaaaagagaaagggggcaaaggagagagaaaagaaaaaaaggcaaaaaaatttttttttttggtggactgaggacgtaattgagggtttcatggggatgctatataggctgcgagataaaatgtggcatgaggtgaaacaatcgatgttaaagtttgtaagggaagagaattttgttatagtgatattaacaataaaaagagtgagctaatagaagagaagaagaaaaaggaggtaagaaataaaggaagtagggagagaaaaaaaaataaaataaaagtagataaaat

SEQ ID NO: 185517 - DNA, 515 bp, Arabidopsis thaliana
aacagccccccccccccttttcccccaccacaccacaccgcccccccagcagagacaaaccgacgcaacccggagccaactttcaccaacgaagcgggggcgaggccacgccgcaaaaaaaacaaacaagtacccgcgaccgacgcgagcacaaaggagaccgcggaggcaccgccacccccagcacccaccccccagcacaccacccaacagccgccgcacccaccccaccgccaccaccaaagagaccgagcacacacgcaagccaaccacccaccacaccacgaccccctctttcaaaacgaaggggcggccgcgcacccccacaccgcgcccccccgccgaaacacccagacccgggccgcccaaaacccaaccccccgccccaccggccaaagaaaacgagcacccaccacagaacacaaacagcccccccccggcggcaacccccgcccacgagcgcagacgccaggaacgcacagcgggcgcacaggcccgaccaacagcgcaccccg

SEQ ID NO: 185518 - DNA, 457 bp, Arabidopsis thaliana
ccgccgcaggccggaagacagatttggagcgtcgtcgtcttacaggtccgcttgttggggtgttcgtatggcgattgtacgccctagtcaactctattgcagcttgcgagaactagcgatccactatagcagggagtagaaaccaaaatttttttttggggtgagagaagacaaacaaaagcttactataagagatctgtggtgtatgattctgctgcttagaatactgtgtttacgcgtacatccaaagcccttactctcactttcaggtgtggttgtatgtaatctccggtgtattgtcgatcgcttgccgttgctacatagtaacttcttaacactttagggtaggtgcctaccaaaacttaagggggctagataaagctgctcttaactcactggaagttgcgcagcctaccaccccaaaagacactcgacaagaatcctcgccccatcaaca

SEQ ID NO: 185519 - DNA, 482 bp, Arabidopsis thaliana
  unsure (1)..(482): unsure at all n locations
caggacccggcccggaataccggggtgtgccacaccggtccggtcgggcccaatggaaaaaaacgcgataggcgggcttcttctccaaaggcgaccggttagagaaaccaagcctaccgaccaaaaatggaatcttttctctgttaaaagcccaccgcctaaaaaaaagcgcggctatttccaagaaaattttttttgggggggggaacaaaaaacccgcggggacccacaaaggggggggcgggaaaccaaggacggagcccacgagcaaaggaggaagcccccggaggggccccgcgaaggaagagaacaccgcccacgcaaacggcccccaccaccccgcccccgcgggcaccccgcaccggcgngccaaacgaaaaacacccggcccgcgcggcacagacggaagcccaacacaagaagacagagcgcgcgcgggggagaaaaaagaggagaggcggccgggaaggagccgcccgggg

SEQ ID NO: 185520 - DNA, 278 bp, Arabidopsis thaliana
gggccccccccgggggttagggggggtttttttttttttttttaggggtattaaaaacccctatttcattaaaggggagaaaaacacccaattccaactttgttttttgaagagggagaacaaactttcaaactttcacaaagggtgatttatttcaataaggaaactttaattaaggttttttttaaaaagggaaaggaacatttaaccccggggttgctgggagaatttgttttttttggggaaaaaaaaatttaaagttagatttcccctcgggg

SEQ ID NO: 185521 - DNA, 673 bp, Arabidopsis thaliana
tctatttttctattctttacacccctatatcccctcctcaccccctcccttatcactcctaaccccacccccaccccccacccctttttccttcatcaatcttagacccccaaattctttttctcttcttttcttctctctatttcttttcttattcctttctctctctttccttgtggtcgtctctagtctctttccctcccaaaattaactactctccttcctttttcattcatcttcctactctttccctcttctcattctttcctccccttcctctcttcttatcatcttctcctcttctctactaatcctcctctctcactcatcctactcttccactatttcacatatatgcctcgcatcttatcttctcttatatctctctacaccctcccctaccaaccccacttccttctttctctttctcccccgcggggtggtcttcacatcccccctccacctctctattcctcttcttataaaacaaaataattccacattctccccttcttcatctcttctttctttcttccattcctctttcaacttcttactatctattttatataccctattattcattcttcttcttcccttgacctccaaccaatcgttcttattatattattctctcctctttcttctaattacactgctccatccttattcc

SEQ ID NO: 185522 - DNA, 647 bp, Arabidopsis thaliana
  unsure (1)..(647): unsure at all n locations
tcccccacactcccctttttttgccccacccaccggccggttccaaacaaaaaaaaaaaaannttcctccgggntactaaccccctccatttagagggaagaactcctgccccccttcagggtgcccccgtcccccaaatttcccccgttttccacccccccgcgggtgaagggagagattttttttaaaaaagaattttcctcttttttaaagagggggaaaagggggcccccttttaaaattttccccaatttttctttcccagggttttccaagggaaaaaaattctttaattaaaattttttccaaacccttttccccccccatttttttttcngggggaaaaaattttaaaagcgtcgttggggtttaaaaggccaccactcttttttccccccttattcattaaaacccccttgcggccgggggagaattaaaaaaaaacccccaaattttaaaatttaaaaaaaaaactttttataaaaaatttcccccaaaaaaactttgcctgggagtttttcccaattttttttaaccttttacgtgtcccttacgctctccccccaaagagggaaaatttttttttacccaaaccttttttttattttttttaaaaaaaccttctttccaacaatgtttttttttt

SEQ ID NO: 185523 - DNA, 262 bp, Arabidopsis thaliana
gttttaaaaaaaaattttttttcaaactatttgccttttataatttcccaccacttttaaacaagggtttaaatatttaaaacttttacccaaaaggggttccccccaaaatttttgttacccccaaatttcctacccctttttttaaaaattcctttatacccggggggggggaaaaaacaacttctggttgtttttaataaaaattcccccccgaaaataaccagacccaagttaggggaaaagactttccccatttttt

SEQ ID NO: 185524 - DNA, 452 bp, Arabidopsis thaliana
tgcacgcctacgtaagcttggtcctctttgcgggcggcttgttccttttttttttttttaagacatgagagccaattactcgacacttagagcgcaaattcatatcaacatttaagaaagctaatgcaaacaccaccttcacaaaacaaaagacaggagcccaaggattctcctttactatagggggagaccaagagaaaaataaaaacgggcatcaaaagaccccgacaggtttaaaagtatgagaggccgctaagttgtctgtagagcagcgtagtaaatggcgcctacaccccgctgggtgaaaagacataacgcctggcaaagagaagccaagcgggactaaaaagcaacccggtgtttcctccaagggaaccatactagctcccttaaggatatcgagagcctaatgtaaccggttgccgcattactgatagaccgcgggagtaatc

SEQ ID NO: 185525 - DNA, 494 bp, Arabidopsis thaliana
acgcctgcaggtaccgctgcggcattaccgggtttgcccacgcgtgcggaccggccgaactcccaagaactagctagagggggcggaagacacagagacactatgacctaatcttgtgacccacgactggcctagattcgtagcttagctctagttaacctataccttagtctgaaacccaacccacaacctctgtttttaggggggggggcgaccccgcacggaaacatccgaagtaaacggcgaagcggaaaccggaaagcgtgaaagggagaaagtgtacagagaagaggcccatggggcacatcggagaaaaggagcgagagtgccgataaaagccaaaaccctacataacttacggagagataagggtagcttgggcaaacccgtgggactaccaaagcctgttacatcgctggaggctaagggcacctcacgatgaatactcaggatagcaaagatagtactaggcacccacgcagaccctaactgct

SEQ ID NO: 185526 - DNA, 490 bp, Arabidopsis thaliana
  unsure (1)..(490): unsure at all n locations
gcacgcgtacgtaagctgtggatcctactagagcaggccagccccttttccttttcttttttaagaagataagaatagatctatgagcttgcatatctttactttacaactttaacaagttgtgtattgttccgagaaacaagatacatagtctgactaaccaaaacacctgtcacaagtcaaacgagggactcggaaggattctcttgtctntttgaaggagtgagcgcgctcatctgagacaaataacatgccagtaaataaatactatatcacctcacttctttgtcacgtgagaatgaacacaattcttgatatctagcttatgggagtccaaaatgccctcggatttgggacttagactttcttagacaatgaagtcaacccttaacccattaagaaattcagaacatggttaccttggattggtgcataggcccaatcccgcttccaagattctatcggttagccctggtcccttaccaaaaaa

SEQ ID NO: 185527 - DNA, 474 bp, Arabidopsis thaliana
ccaaaaacaaaacaaaaccccccccgcccccgcgcccgcttgaagcgccgcggagtcgcacacctcctgccccgccaccctctcggatccttccaacagcccctccatctactcgtcccaattatattgcaacacaacgttacacaggcaccgacgtttcctccttttgggttgttggtcaccccaccccacctcttggcgccctcaaaaaaaaaaagcgccgctggtgggtattccaccctacctctttctcgccctcataaggagtccgcttcatatcgcgtcctctcccgttccacgataactccaccaccactcacgcccctctgccccatcacacatcccgcttcctaccgtagtcatcgcgcccttcaactcgaatacttcccccgtgcgcccctctccatattgtcacactcccagtacgttcccacagtcaccaccaagttcttaacccccatccaacatcccaca

SEQ ID NO: 185528 - DNA, 353 bp, Arabidopsis thaliana
ttttggtttttttttttaacctaaacagggttttgttattcaatttaaaggaattaggggggggaaaccctaattccatcaaactggaaataaggaaaccaaccttttctaaaaatcttattttcccaagggggttgggtttaaaacctcctaaaatattcgagggcagacgtgaaaaaggaccatccttttaaataaaaaaaaaaaaaggcttctgggggctttctttttaaagtgggagaatggggaaaaatcattttcaagggggtgcctgggtaaaaaaaaaaaaaaccttttgggtcctccaaaaacttttttaagttttttttctcaaagagaactaaaaaaagagg

SEQ ID NO: 185529 - DNA, 676 bp, Arabidopsis thaliana
  unsure (1)..(676): unsure at all n locations
ccccccccccccaccttccctccgtccaccgcaccnnnnnnnaaaaaaaaacaaaaaaanaaaaaaaaaacctccnttgggcnaaccgaccccccccccacctaanagggaaaaagcaaccgccccccccctcccaagaccccgcgccccccaagattccccctttctccccccccggggcggcagggggtgaaaaaaaaaataaaaannccccctgtttncaaaccccttttcaaaaaaactcccacaaccccccctctgagggaagaggtttttccctccctccccaaagaaacactcttcaaattccccaacggagagagggtccttctttctctttgttcacccaccccccccacggcaaccccccccttttttttttgggcttgtctggcgccttcccaaaattgaaggcggggtttaaactcacttaactctaccccctgtttcttccccctccccaaaacaaaaacctcttctttaaaaaaaaagtatttccatccctcttattaaccccctttttcccctatttctctccaaaccttctttttctaaaacccgcttccttcttctttttaacttcatccgcaaacaccctccccccttttcccccttttttcacaagagggggggtaaaccccccccccccccttttttcctcccccccacaattcac

SEQ ID NO: 185530 - DNA, 494 bp, Arabidopsis thaliana
  unsure (1)..(494): unsure at all n locations
accccccccccccgaccacacacacaggcgacgccccccgcaagaggcatttccccccaccggggggagaagaggcgccgccccaaaacaaaaacaaacaccaccgcccgccgcggcggcaagaaagacgncaaccgagaagcacccacccagagacaccggagcccgagcgcacaacaagacgggcgcacgaccgccgagcaagcgccgcagcgccacgccaccccgcacccaggacgcagaggcacccgcaccagaggacacgggcgcagcgcgacgggcgagcaaacgacgcgactctctttttccaccgcgggccagcagggaccccacacacgaacgcccacccgcgccgcgcgcctccgaagaagaaaaacacgatcgcccagccgcgccgcgccgcacgcgcggccgagcacccgccgcacacccggcgacccgcagcgccagcgcgcggcagcgcccgcgcgcggacggcccagcgacgcgccgca

SEQ ID NO: 185531 - DNA, 609 bp, Arabidopsis thaliana columbia
gccccccccccccctcccccaccccccccccccccacccccccccccacccccccaccccaacagacactaatttgaaaaccaccccccccccaattaaggcgcagccacaccccacccccccactcccctccccccccccccacccccccttttcccccctcccggggcgacaggcgcgcccaccacaaaaaaacccccccccccccccccccccccccctcccccccccttcccccgccccccgcccccccccccccctccccccccccccccccccccccccccccccccccctctccccccatcccccccccaccccccccccccccctcccctcccttttctctcgcgttgtctcgcccccccccccccccccccccccacccaccaacccccccccccccccctcccccccccccccccccctccctctccccccccccccccccccccccccctcccccccccccccccccccctcccccccccccccccccccccccccccccccccccccccccctcccccccccccccccccccctccccccccccccccccaccttccccccctcctccccccccccccccccccccccccccccccc

SEQ ID NO: 185532 - DNA, 308 bp, Arabidopsis thaliana
  unsure (1)..(308): unsure at all n locations
ctttctgtttttattcnctattttgcnngaaaagaaggccctctccatttatttaccgggggtgagtgctaatttacacttaaggctcaaaacatccctaaagctgtccagtttttataaaaacacaccacgatggactggtgttatagtgttttttcttacatccaattagcagccccttcatgattcaatcgtgcctaaggccggggcttggaacctctaattaattaagggagggggaagaaaaggggatgggtgggcctgggaaagggacatctcacccaactttggctgggatcttggcaaaa

SEQ ID NO: 185533 - DNA, 547 bp, Arabidopsis thaliana
  unsure (1)..(547): unsure at all n locations
ccccccccggggggcgcggggccccggaattacccnggttttcacccccccgggggcccgggcccccccaaacacaaaaaacaattttttcaaaaaatttcccaattttcccattttttccggggcgcaaagaggggggatttttttatttggaattttttgggaggggggaaaatttcaatcttctcctaaaaacatataaagaaaacactcttaaattcctacaaaagttttttcttcccgggtgtatgggggaataaaacaaaaattaataaaccacgcgattcgctccgtgtttcttctctggaggggagggggggcggggcgaaaccaagaaaaattttccccctttcaaaaattttttccctatttgtgggggccccgccaaggtcccaaaacactttttaactctttctttcccctctccctttgttgggttcccttgaaaacctcccacaaagtggggaacggcctgaacaccgcacacatttttccctcttcccgcggtctttttaatggggtaaaaaaccccccaagacaccccccg

SEQ ID NO: 185534 - DNA, 469 bp, Arabidopsis thaliana
ccctttacagggcggccttttttcttttttttttttggcttgagaaaactaagaaaaaccccaaaagtcaaaggggggtacaggtggggcatggatccctaaaggagcgtaatgttaatgggtatccacaaacaaaggctggtaagttcaaaactacttttttttaagagagggcctccctccgactccaaaagtttttacctaaacaaaaaagatttagtgcttgaaagaccaatctccaggactaaagcaagcaacaagatgaacatggctcctgaaatgacttggcgctatagggacccaagggctaaggcagtacagaggaaggcacgcctggaaccagttggctgggggggacgcagcatccattcacgggtgcttatggggactaaagctttaaccctggcccatacagccaccccagatccttggagagtatgaggttagcgacaagatgtgcagccacgaa

SEQ ID NO: 185535 - DNA, 434 bp, Arabidopsis thaliana
gcggccgagctttttttttttttatgttgggaacggaactagctgctagatagggtagactataccatggcgatatcttatctttgaccagaaggcttggcccagaccttaggttgcgccagaccaccaaccttttttttaagaagggcgtaagcccgggtgaacggaaatcaaagatcaactgcttgttgttggatttccccgcctgcccaccgcgatatcaacaggtcggggagtaggacgttggagaattgggtcgaggaactcacgatagatagtgggaatcggtgggaaatgtaaagaaacctgaaatcttggtaaccgcttgcgcttttgggttctttaaggattaaaaattttttatttgcgagagtgggaatggatttattactgctagtgcgaagaggagaactctatcgttaaggagcattatc

SEQ ID NO: 185536 - DNA, 358 bp, Arabidopsis thaliana
gagcgcgggcggacccgagacaccgccgcgccacgcacgacgcaggcgcaccgggccccgccactccttctgcgaaccgcccccccccagattcgggggagagaagccacggcagccacgaacagccccgcggagcacgcccgaagtttcccgcccacgggggcccacacccgcggcgaaaaaaacgcggcggggcgcccggcgccaccagccccacacacgccacgcccccacggcgcgcccagccgcaggcccccgcacgagaacacgggaagggagcaggccgccaccccgccccgcgccgccgacgccggacagccgagcccgacaaccgcggtcgaagcaacgcacccaggca

SEQ ID NO: 185537 - DNA, 509 bp, Arabidopsis thaliana
agcgacacaccagcgggaccgctgccgcactccccgggttccccacgcggacttgcggggcccgaccacctcgaggagacgcggacacgaaatcatgtggaggatccccaagctgctaaaccctggtaccttattcctaagctgccgaacggcgccttcattattcttcacgcgctgagtgacggcctaagcgcgtttttttctgtctggttatcggcctaaccgctggccttcggggattagcacggaccgcttacctggtttccggctatgagtgcgaaactgactgagcaacttgtcatcagagaatgggtaaagcggcagggaagagggtgaaaagatgggaattcaagggaataatgcaaggagcacaaatggttggggtgacataagtattcagaaccgattgagaactggcggaccgcagagcgtttctagtgggcacatggatccccgctcggcctccaagggcttttagcacagccaaatcaacgggcatttgcctttat

SEQ ID NO: 185538 - DNA, 341 bp, Arabidopsis thaliana
ggggcccctgcccccgacaaagctcggacccctaaagggggcgcccttttctttttttttttaggggaaaaaaggggcccttaaggccaagcgataccacgtatctaaaacagtgtattaatgccagggttaggggcaaccccacagaccgaccacaggacttttctatatgtatactcacactttttgaccgactgagctttgcctgcagcggaaggaaagagaaaagcaatatttcgagagctgacgtctcatacaggttgaatggacctaaccggaaacctggcacttgtaaagtttgagacccagatacagctcattctgcgccctacaaaccgcaa

SEQ ID NO: 185539 - DNA, 427 bp, Arabidopsis thaliana
  unsure (1)..(427): unsure at all n locations
aaaaagggagaggcaaagacggggggagcgggagcaccgcgagggcggagaccgaggcagccgcaggccgggggcgggcggcggcacacagggacgccgggcggcgcgaagggggaggcccagcgtttttttcagataagggggggggggagcccacgccgaaggagcaaaggagaaaaaagcaccgagngcgcccacccggaggggcgcgcgcaaaagaggaggcccgaggggagcacgcgccagccacccccggcggggccgggagcaccaccagaaggacggacgccaaccgaacccagcaccgagcggcggaggcgccagccgcagggagcacggacagcggggaaaggaacccgagagccggcgccccccgcgaaccagcgcgcacgcccacacagcgcccgcccgagagagagagagaaga

SEQ ID NO: 185540 - DNA, 322 bp, Arabidopsis thaliana
  unsure (1)..(322): unsure at all n locations
gggggggcggcgccacattcttttctacccccgggagctgaaaggggcggggcaacacaaaaaaaaaanccccccccccggccggcggccgtcgttatcccgcccaggcacactacccctccgcactcccacaattccctaccatctagtacaagtaagtacgccgcgtccggcgagagcgacacagatgagtgagagcaccaccccgcacgtgtccgggcaacacagagaacaagcagtttccccttccctttttgggggtgtgggggaaacacccacccaacaccccggccgcgctcgctctaaacaaaaaaaaactcgt

SEQ ID NO: 185541 - DNA, 466 bp, Arabidopsis thaliana
ggcccggagcccaaccacccgaaccagagagacagacgggagcacgtgcaagccccacaagacaaggaggccgaggcccaccggacctcaaggaagctccaggcggccacggacgagaacggtggtggctcagagaggatcggacaccagggaacactttttttgggggggcgcgaggcaagaaacagaacgaaaccacgcctacaagacgcgagaccctgccgacccggaccccgctacaccaaagagaggagaggcagggagggcactggaggcacatcggaacccgccgggccaacaacccaagcgcctgcccacaacgcaaaccaccgaggacccaagccccgcaccgaaagcaggaagagcggacacacggcccgcgccgaagcgcgccaaggccgctaggaccccgcagcggcaaaaccgcccaccccaggcagacagggcggacagaaccggacagacc

SEQ ID NO: 185542 - DNA, 522 bp, Arabidopsis thaliana
  unsure (1)..(522): unsure at all n locations
aaaaaggggggggagaagaagcagccgagcccaccatttctccacccccccggcgcgggagagggcccccccccccaaaaacaaaaaaaacnaccccgccccccgacccgcgacgccccccacacacacgccacaacccggcgcccgcacgcaccaacccagccccgccacccgcccccgcgccaaaacgcggacancacacagccaccgcaacgcgcgcaccccgagaccgcgccgaccccggcagcgcgacacagccagagcccaaggagaaagacgttttttctcaaccggcggaagctgcgggaagacccgagcgaaccacgccgcgccagcccgacaaaaaaaaaaaacagcggcggcagacgacaccagcaaacgagggcgacgccacgccgccccccagccaacccgcccccgcagccccagccccccacgcagccggcgccaacccgggacaacgagcaggccaccgacgagagccgcgcacccaaagcaacgcgcccacggggaccacagccg

SEQ ID NO: 185543 - DNA, 556 bp, Arabidopsis thaliana
  unsure (1)..(556): unsure at all n locations
gcaccgggaaggaccgcccgggccaacggagcgggtcgagaacaccgagcaagccaaaggatcgggacggggacccccagagccagacagagagccaacatggacccgaagaaaaggaccaagggcgccgaaataccgtgcgatacaaccgagacaacggccccaaagagggggaaccttttttacggggggcgggcaagaacaaaaacacgggcccccagccggaaaccaaaggcacgtaaggaacactaaaagggnagacccagagagcgcaccagaaaaaccaaggagagggggggtggacaaagccaaacacgggagaacgcccaccaacccggcgagagcccggaacaaaggaagggcaaggcctgccaaacaacacaaagaaaaggaaccccccgtggccccccgcgcgacgctaccaagaaggggaaaaagagaagcccgacaccaaaccaagaccaagggggcaaggaagctaaacaccgatcccccgttaaaaaggcgccgcacctaaacaacaaagcaaacaggatcaccccccgaaccgctgaga

SEQ ID NO: 185544 - DNA, 431 bp, Arabidopsis thaliana
tgcacgcccgtaactggcttgcttcttataggcggccgatctttttttttttgtagtggtgggaacagataaagctagcgctcgatataggtaggatacttcatccatacaatagatgcaggagcaaagatgagcctaccgagatggttacaaaccatcaggaagagttttttagctgactagggcgtggcaggagtctaaggggataggaaacatcaatggaattgatgtgaagaagaggaaagagaatctatgcacagaagtgtcttaaccttactagtaaatgtaatccaaggaggataggataatgcaagggctgaaccgaaccgaggctaggataggagggccggtccaagagaaagggaggaaccgagggctggctgcgatccaagactaacaattcgaacggaaaccagagaggtggattagat

SEQ ID NO: 185545 - DNA, 485 bp, Arabidopsis thaliana
ccccccccccttcccacgacgcgcacgcgccacgacgcacggacacggcgcggcggggcgacggccgttttaacagcggggggcgcgggccgggcaacaaaacacgcggcgcacggccgcgacccccgccgccccacgcagcccaagacgcgacgcgccgcgccgggcggacaccagcggccgggcgcgaggacccacacagaacgccgccaggaagggaagcccccccgaccgccaacccgccgcccaccagcttttttccgagcggggggggagccagaccacccagccggcgcgcccccccggcaaaaatggccccggcgagagcccgccgccgccgacgacgcgcgcccaccgcgcgcgggacggaggcgcgacgcaaggcgcggcgaggaggccgggcacgcgcgagagggaccgcgcgccgacacacggagcagcgcccggccagcgacggaggccacaccaccggacgcgcgcgcgcg

SEQ ID NO: 185546 - DNA, 543 bp, Arabidopsis thaliana
ggggggggattatctggtgacctcgacgactatgaggggatagctgcgccgcctgcaccggccggggacagaatgggtgggtccacccaggcgtccacccacgcgttcgatccttagaatcacttccttgttgatgacgcatggaccaccaaagcatacgtacttaaccagttgattgatggcaaaacatccacccggtgggacaaacatgctggaaggataaagagggcggctgaagagttttatgacggtgctgactcgaagaagaattacgtgcgctattctaccccccctggttggcaagaaggtggatgataaacgaaggaagcttgtgcgggctgactatttaacaaaggtggaccatgtcgttgttgcccctatgatgcgaacaactatacagacagttggtgcttctggaggagaagaagaacatactgatgcggcggctgcaccacagatggtggcaaataatgcgagcagcaaccatcgtgctaagattactaacaaaaacacccctccctcgctgctgaccacctcgggaaa

SEQ ID NO: 185547 - DNA, 366 bp, Arabidopsis thaliana
  unsure (1)..(366): unsure at all n locations
actcgcgaccgcctacgccggcgccgcgnggggcgctctgattctcgctcttctaccactctctctatagagagagggtacgcgcgcaaggaccgcccgcacttattgggtcgagccacgcgtgcggtcacgcatgctcatgagcggagtggcacgatagtacgaggccgtggtacacatgcgaacagaacatcatattgcagctgaagcagacacagggcatgaagatgtaggcaagtatcacatgctagctggcacacaggtacctcattctctagaggtagaaggaggtttcacgcctcaatccagaattagatggtgctgagcatgctcagcatcacgactcctagacatggccgtatcagg

SEQ ID NO: 185548 - DNA, 354 bp, Arabidopsis thaliana
  unsure (1)..(354): unsure at all n locations
ccccgaaaagagaacgagagaaccccccccagcaagatttcgccccaccccggggggcaaggcccccaacaaaaaaaaaaaaagcaccccaccaacgcgccgagggaacgcagccaaacccgacccacccccccaaccacccccccccccgcccccgccacccccacagaagaagagcgcacaccgcagcacacagcgcacnacgagagaggaagccgccagagggacagagagaagcgagaggaagaacccttcttttctccccacgggcagacggggacaacaaccnagagcgacacgcccgcagccccgcaaaaaaaaaaaaacccccccaggcccgcgagacgccaccga

SEQ ID NO: 185549 - DNA, 451 bp, Arabidopsis thaliana
agcacgcctacgtaagctagcatgctatttagagagcgccctaaattcctttttttgacacaaaaagacaagagactatgcaatgcagtacgcacccatagtttgacgctacttacatatacaattagttagaaggcaatcatacccaaaagaacgaaattgcgtcatgtgtgcggaattttttcttatgacgcggggccttaaaactcaaaaagttatgcttcagcagacataagagctcctaagactaaaggccaattactactacgggaatagcatatgcagaaaccgaaaacaaaacgctcggatctcaaacccataccctctagctaatatgcctgtgccataagctatgtggccaacgccaaggcctgataaaaaacgatgcccatccttgtgcggatgtacttggtagaataaaaaacccaaggcaatatagacaggcccacaa

SEQ ID NO: 185550 - DNA, 602 bp, Arabidopsis thaliana columbia
ccccccccgccccccgccccccccccccccccgcgcggccccgcggcccatagttcgcaaacccccccccctgggggccgcccccccgcccccgcggggcccgccgcggcctttccccgggggccccgccccaaaaaccgccccgcgcgcccgggccgcgagggcccccgggaccccgcccccgccccgcccccccgccgcgcgcgcccggcgccgcgcccccccgcgcaacccccgcccggcgcccgccggcgcgccgccccgccccccccggttttcccccccggggggggccccccaccgcccccccgaccgcgcccgcgcccagacaaaaacgcggcgcgcggcccccgcccgcccccgcgcgccccccgcgcccccgcgcgtgccacgcgaccagccaagccacccggcccggcccggccgacccccgcggcgacccccccccccgcgcgcgccgcgaaccgcgccgcgcgcgagccccgccccgcccccgcccccccgagccacccgccccgcgccgccgccagccacgcgccgcgcgccgcgcacccgcccgccccccaccgagaccccggacccgaagagcgcgcggccgcgcc

SEQ ID NO: 185551 - DNA, 441 bp, Arabidopsis thaliana
  unsure (1)..(441): unsure at all n locations
tttttttttnttttgttgtgttttaatgggggggaaaaacacaatgggaaaacaaggctgttaaaaaggccttgggccacgggaaaacaaccaaagggggcgaaaccttaaggagggctatgttccccttctttggagccggaggggaaaaccncccaaacccggggcgcgggtgccgcccccccaaagggtggcaaaaaatacggcaaaaaggggggtataaaaggggcgcccccagaggggggaaattccttaaacaaaaaaaaccctttttttttgtgcggcggagaaaaaaacaacacaccgtgcggggttncccactcacacgacaggggtgtttataaaggcgcccccggcgaccagcccaaaaggaaacagcgggcgttaaccgggggcgccggggggggcaacaccgcgccaaaagagaccttttctcccagg

SEQ ID NO: 185552 - DNA, 552 bp, Arabidopsis thaliana
  unsure (1)..(552): unsure at all n locations
tcccaaattcccctttcacccccccgggggaacccgccctccaatataatctctctttcacttaaccaaaaaaaacctccattggcttctacttcttcctttaccccttctcaacaaacttctccctttacaaccaacccattttnttaaaaaattggctcctaaaaaacctcccctnctttataaccccacttttttttttcttctcaaaaggggggtggtcccccccacccacgggcgcccctttttataaacaaaaaaaacccaaaccccccttccccnnttccattctcctccctcccccccttttggttccaccccccccgccccaaaaacaccaaaccccacacaatttccctcatccccgccccataaattaaaaaacccccaccaaaccccacactccggctttctcaacaaatacaaccccgcacaaaaaaaccaaaaatcccaccccccccccccctctcccccttccgacctccgctccccaaaagacacacctttttgcgacacaaaaaacccacaaaccccccacaccccaacactccc

SEQ ID NO: 185553 - DNA, 459 bp, Arabidopsis thaliana
  unsure (1)..(459): unsure at all n locations
ccccaaaaaattaaattcttacaactccccccatttttcttgataaaagggttttggatttattttttaacaccccaaaacaaaaaacccaaaaccgtaaaaaaaagaaaggggggggcatccaaggatctcaacattttttcacagggggtgtgggggnccccctccccaacggcccccactaaaaacaataaaaacccccctcttttttcnccccccttttctttctcccccccccgccaaaagggagaaactcttttggaaacggtattctcaaagnttcccacccgccccgacactctcccacctacacgcgcagcccaaccccgaccactgactacggacagcgctacaccgcccaaccggcgaaggacagctcgagcccgccacgtgcgccccgcgcgacaccgccatcctcgccgcacagagccaaacaacggacgacactcggcgggcgcg

SEQ ID NO: 185554 - DNA, 503 bp, Arabidopsis thaliana
  unsure (1)..(503): unsure at all n locations
ggggggcgaaaaaattccaaataacacaaccccccccctctgaggcaaaaagttccccccccccctcacgctcccgcccacccgaaatttcccgggcttctcaccccacccggtgccgggaggggggtttctataaacaaaaacaacacccaccgnctaagagcgcgtgctcctttttcgcacccaccccccttcccctctcccctggtaaagacacgaggtatttctaccaacccacagcgcggcgtccccgctcgtccaacctctacaccacaaacaatccttcgtctcctccccgcacacaacacgccctcaattcctcccttctcaattgcgcccgcccttcaccgccggggggggggctacattctctctcccctcctctctttccgtctcggcacaaaataaaaaacacgcggccggccccaccttctcttcctcttcccgtctcgatcttccccccctgcgccgagccggccccccccgctctcccaccccccccc

SEQ ID NO: 185555 - DNA, 160 bp, Arabidopsis thaliana
  unsure (1)..(160): unsure at all n locations
tcccctccaaatacccttcccaaattcccgggttaccccccggggcnaagtataaaaacataatncttaataaatttctaaaataaaaaccctttaaacctttcatttcacatcatcccaaccgccccaaatggggttcaaatcctcgaaccccctaccc

SEQ ID NO: 185556 - DNA, 336 bp, Arabidopsis thaliana
  unsure (1)..(336): unsure at all n locations
cctcagtaccgtccggattccgggttgaccagcggggggagggcgcgtaaaataacactctttctctccatacatcatttnttttcttctgagtcgaccatgggtgtttaatctccccaccaagggctgcatttacaaaaaacgctttaatgccgtaaggggccccgcaccggagccttcgtggtatgggggatgttggggacccaccccaggggggggccccccaaaaaaaaaaacccccaccacggtggtctgctccggggccgggccccccggccgccgacgccccacgctagggagggggggcgggagcgggggaccgcccgacgcgccgac

SEQ ID NO: 185557 - DNA, 488 bp, Arabidopsis thaliana
cgtaggaaagggtgcagcaagaagtttttacacggggggtggggggggttaaaaaaaaaattcgttggttggatgagagtggggaaggggtggcgacagacagtacgcaagtggttgagggcgaggggctaagagaggatgttggaagagtgtgtgaagtgggatagttggggcggagttgttgcgcacaacaatttataagtatgtgagattttttgtcgggatgttggtaaaataagtaataagcgggtgtgttgagtaaaaaactatcttcctggattgttacctcgcccgctccgacgttcgcgtacgtttgtttgaagtatgagtgtagtagtatatgcggtgtacatggtttgagctgttagtaacgtttcttgtttgtgtgcattggcgaaggtgcattagttttgtgtttgagtgttgcggtggatttgggtttgtttataactgtactaatttaaggttggatatgggatatcgggacc

SEQ ID NO: 185558 - DNA, 246 bp, Arabidopsis thaliana
  unsure (1)..(246): unsure at all n locations
cttcttttctttntttctgtggagggtcttcttcttcttcttctctgggctctggctctggctctctggaatcttctgggctctccacaaatttggctctcctctctctcttctactacagggggggggggcttcttttggggggggtcttgaaaaacaaggaaacaccttaatatccccaagactcttgccttctttcttaaatgggctaaaggggtattggcccttatttccaccccggaatat

SEQ ID NO: 185559 - DNA, 468 bp, Arabidopsis thaliana
  unsure (1)..(468): unsure at all n locations
ctccaggtaccggtcccgaattcccgggttttcccccccgggggagtggtntcaataaacaatcctaaccaactctctncncttttnnttcatcaaaaaacatctacttnaccaggctactcctgaggcttcagatccatggtgaaccaccattcttatcaccaacacaatctacctctgactcttggtctttttttttcggggagtggggctttcctttcggcgcgttggataactatgaaatcccatcccaaccctgaaatcattcctccccccactcccagatctatagaatttctatccatcccatttgaattcgacccaaaggttctgtcttctaatgtcaattttaacctgttaatcaaaaataaaatgggtgggaccccgagcctaaatttcaaatccccaccccccccttggaaatttcgcgttccaactgaaagaggagggggtttcattggccagctg

SEQ ID NO: 185560 - DNA, 461 bp, Arabidopsis thaliana
ttctcccgccggcccccccccgccccccgcggggatagaaaattccatgtgtaccaatctctcccagtaggggaaaggttacacccccctcccttaacccaaccaaaattacgcgtttttttcccacccgtgcgagaggccttgtttcaaaaaaaaacaacttccctttccggcgttttggggtttaaagaaaaaaacccttcatctggcggccgcgtcattttgcattacattttccatactttccgtggcgcgccgccgtcgatgcacatcgcactctcaacctccgtacggccgcgcgcgcaccgcaccccacactttttttttttctcgcggtttgttgtgggaccgcgccaccccgcgctccccgctactaaaaaaaaatctctcccccctttgggatgcgctgtctctgcgcccccacccccgacctccaatcttcactctggtcttctcggttg

SEQ ID NO: 185561 - DNA, 519 bp, Arabidopsis thaliana
  unsure (1)..(519): unsure at all n locations
cccccccggggggggcgccacaaaaccgcgggagaaaaaaaaaaaacactcaaggggagacgccccccccaaattnagaaaaaaaaaccagaccccccggaacaaggagaaaagggggagggggttccccaccaaaggagagaaccccgccgccaaaaaacacaaacccgaaggacagaaggagagaagaaaaaacaccccaaacccggccccaggaagaagaagaagaaaaaacagcaccgcgcgcagcgcagaggagcagcaaaaacgaacacacaaacaccacccggccggacaccaggaaaaagaacccattttttaaaaaggaggtgttgggccgaccccaaagccccccccacacagaaacaaaaaagaaaccacaacacagggggcgagagcgagacccacgcacgcccacgaagcgaaaccaggcgaaacgcggggagcagcacggagcagagacgacgagaaagaaagcaggaaccgccaccgcaagcacccgcgaagcacacgagcgcg

SEQ ID NO: 185562 - DNA, 450 bp, Arabidopsis thaliana
gggccccgcgaggaacaccaacccgccgcggaagaaaaaggaaactgcaggggagaacaagcccccggggttttggaggagaaaacccgggcggggcggagaagaaaacaagaacgccgccaggttcgcgccacccaggggaaagccgcgcgcacggagcagcaaccgaacccgcggcgaggggggcgcgggagaacgacaaacgcccccccacgccccgcgcccgcgagggcaagcgagcaagacaaaccacacgcaccgcgagcgccaggaacggacaacggccaaacaccaagagggcgcgccgcgggaggggggcccgcacgacgacacgaacgaaaagccaaacgaggggggggagcgacggaccggcccgcgccccgcgcgccaccaggaaacaaaaacaaaaaccgcaggaggaagaggaaggagaagagcgcgcaagcgaga

SEQ ID NO: 185563 - DNA, 167 bp, Arabidopsis thaliana
  unsure (1)..(167): unsure at all n locations
tggcacgcctgcaggtaccggtccgngatcccgggtctgaccacgcgtgcgcggacgcgtgtgcggacacttttccaacgcatatttaacaatgtctaacaagtgagaaacatcacactgatgattttgagttcaacataaccatgccagggatcaattagaaattc

SEQ ID NO: 185564 - DNA, 351 bp, Arabidopsis thaliana
aaaaaagaaagatgattggtaggtaagacagaaagtgaagggaggaaaaagttggaaaggtagagttcaggagtatagggcagggtcggcgaaagagaataaggataggagaagttttttggggggggggtagagacaggggaaaagcgagcatgaaaatgatcataaaagcaagagggttagagtgatttgatgtgggagtcggatgtaaaggatgaatgggtgtaaaatatgagtggtaagggtgggagaggaagcgatgagggtagattggtgggtagttaatgatatgaaagataagtaaataggaatatgaggaatatagccctaagttgagtgtagagaaagaaa

SEQ ID NO: 185565 - DNA, 473 bp, Arabidopsis thaliana
  unsure (1)..(473): unsure at all n locations
gatncttagagnttttgcctgggtgggccttttaaaaaaaaacctctcttcgcgcgaaaattagcgttgtgtggggtccggaaacgatgcagttcttcggggtggtgaggggggggttcttgggtataccgggggagagttgtagaagaacgtttttttttggggggggcgggggacgtaggggtcggtgcgagagaattaaaaaccctcgtgcggagggttggggggtgggggggggaagaggggggaggcgcggcctgagagcagggggggtgtggcggcggggcggggggccgcggggaggggggggtttcacccagtggtggggagtctttctggttgggagggttgggagacgaggtcggtggggtgtgcgggcagggtggggggtgcgggttagtggggcggagagggtgggggagacagcgtgtgcgggtgggtgggcgggtgtggcggggatggggccagggggg

SEQ ID NO: 185566 - DNA, 357 bp, Arabidopsis thaliana
cacaagaaatttttttttttaaaggattgtttggaaagggaaggaggagaagagaaaaaaaaaaagaagaacacctactcagaggagctaagagaccacgcgcgaccaaacaaaaaaaaatgataagccggctacatacaccagatatatggcccagaaataaccaccgccgccctacaacccatctcactcttagtggtagttcgcttagtacttattagatagaatgatcagtatcctgccgccaccctttcaccgaccaccccaccacacccgaacatcaataagatactctcataaagagtattgttcaatagaataagagatctcgcgcgactgccgataaaaagccaccaa

SEQ ID NO: 185567 - DNA, 572 bp, Arabidopsis thaliana
  unsure (1)..(572): unsure at all n locations
ttgagtgggcaaacaagcggggggggaaaaaaatttgtcttgtaaatgcccccccaataggaaaaaaaacacncccgcgagaaccagaaaaaaagagagttttcccacacgaggaaggcggccaaaaaaaccaaccaccacagggggagggagggaagcaaccaccaccaccagcggacgggaggaaaaaaaatctaaagacaccgcgcgcgagggagaacataagatattttattgggggggcacgccggggcatttttttttttaggatgttgggaggaacaactacggacaccaattaaatattatttccttatttataatgtggcgagagctacatgactcttcaagatttctttgtttgtttgatataatgtgtgttcacatatgtcataataacttgtacgtaaacgtaagtcttcgtagtgtgtgtgtttaatgattttgttaagagtatgaaggaggctatctctataatatgattacacaacacaccatactatcgtatagtttcgacaggatgtattattttatatatataattgagttctatatttattatattttttcct

SEQ ID NO: 185568 - DNA, 514 bp, Arabidopsis thaliana
gcgggggtggggaaaaaccttttgttttcgttgtggaagaggggcacagggttcgggtgagttggtatgaggatcgtagagaggggtgtagtcatgagatggcggagacaggagtttagaggggtggggataggtgtgtagtagtgtgtaaaatctgtcttggggggattagtagataatgtgggggttttttttagggggtgggaatataaggttttattggttttgcattgtaatgtggggctcggagtatgtgctaggtttatatggaatttttatggttagtgggtgtaggagggagaaatgaggtttatatggttattgttaaattattatgtttgttgtggttgtttgtttgttttttgggttgtggtggaatgtgtaatgtttagagtcttgtggtatagttcgttgtatttagtgacttaattgtggatttcctatgtatagatgtgtatgttatagtttgggttagtggtggtggttatgggttttgttattgtgggtggggttt

SEQ ID NO: 185569 - DNA, 416 bp, Arabidopsis thaliana
caccccgtaaaaaaacaacagtcaaggttcacccgggaggggctcgccctaacaaaaccagagaagccccaccgagaagcacgcaagctacaacgcaccacccacgcccacccacgccaaccagacagtgatccgcatgaatggcagggcggcaccagccaccgttacacgggggcgcaaagcaaaccacaccccgcccacagcactcgcgtaccccgcccccgggagagtaggagcagcacgatcaactagcgcggagcgcgggtcggaggaacagtctgcatgcagagaagacgaccacgcaaaaatacccccaacacgaacgacgacccggcgaaccgcggaacaagaacggccaacccacgtccagcgaagccacgaaaaccgccaccaaaccaccccaacaacccaagacg

SEQ ID NO: 185570 - DNA, 340 bp, Arabidopsis thaliana
accggacaaaaaaaaccccaaggggggggctagaacaaaaccccgcccgggaggaggagagaaaacaccacgggccgaaggagccccaaacagaacgggcggggcgcgcggatttttttagggagttggccggcagcgccgcgaaaaaaaaagcccccgtgggaggagacggcccgccgcgccagaatacagaggggggcgcgcagagcgagcgccaccacacaccgaaaaaaagggggtgaggatcagggggaaagaggaagcgagagaggcacccgcagcccccggccaacagacgccaaagggaggagcgagcagacgttgagagacgccggggcca

SEQ ID NO: 185571 - DNA, 298 bp, Arabidopsis thaliana
aaaagaaaaccacccgctatagaaggacgtgtgatctcaaaaaatttcgcccttgggggggggggcgcaaatcaaaaagcgggactagtgctagctaagcgacgaatagcttattgtgcgtctcttcgtgccgtattatgatctacggaaaacgcaaagagacgtacggtggagataagcacgctataagtgaggggtggggagaggtggagggagattttttttcaggggggggggtcggtcctcccatagggtgcgcgcttctatatgaaagatctgataagcagcggtacggtag

SEQ ID NO: 185572 - DNA, 484 bp, Arabidopsis thaliana
  unsure (1)..(484): unsure at all n locations
ggaaaaacaacacaacacaccgacgagcggcgagagagagagagagaaagaaagaaacacccccacaaagccagcgcgcgcggcgaggggagagaacaaaggaaaaaaccacgccaggcccgaccgcaggcagaggagaagagaacgcaacaccccggacaagagaggccacacgcgccgaccgcggggaacgaacacaaaagacaactttaaatangcaacagggggggggcgggacgacacaccgacccgccaacgacaacacacacaacacaaagaccgaaacgggcaccgccngaggcgacagacagggcgcgcgccacgaccccggagagcaaggacagaagcggcagcagcagggagcagaaaccgcaaggancgggagcacgcagagcgcagcgacgcaccaccacaccacacgacaacacacacgaggagggcgacgacgagacaggagcggggaaggagcgcagagaagagaaag

SEQ ID NO: 185573 - DNA, 487 bp, Arabidopsis thaliana
  unsure (1)..(487): unsure at all n locations
ttccattctttaaagattaaggacatnattcatcctcttccccacccctttcccgcagatgagcgagctttttgcgaaaagagaacaacaccccccccaatttcccccagcgatatcccccacaactgtctcaaaccctctttttttttttggggctgaggggacnccccccctctgggggtcactatcattaaaaaaaaaaggccccccttattccctaaccccccacaactcccgcctccccttttatccctttattgcctccccccttagatacttccaccaccaccacccgccccccctccgtctcagcgcgctactgcgtcaaacggccttctccccagccgctctccgcgcccactgccgcccccccctcccaccgacgcacaccacccacccccccccccccgaccactctgcgtcaccgtgtgcgactccatgtcccggcctagtccgtccgttccgccctccccggacgcggcccccc

SEQ ID NO: 185574 - DNA, 472 bp, Arabidopsis thaliana
cctcaaagaatgaatcatcgagatttcggcggggggaagccttgagagaaagaggggagcaagaccacggaaggagggagagccccgagagcgaagcaccagaaccgcgcacggccgaaataatacgacgcaaatataaagcggatgaaagagttaagaaagagatttttttaggggggtgaaaagggagcacgagcggggatacgcaagaagaccccaatgtagccagcgggagcacagaagactcatcgtggacaaagcgccggaggaaacaaggcgcggcacgagacggtcgacacaagatggcgccccgaggccaggaagcgaggatagagcaaaaaatatgctatagaccgcgagagccaaaatacaagagtaacagtaaacatgaagcgcggtgctagacagggatgggttagctcacagcgagaccggcacggactaaaccccgcatcacgcgaacggatcggcg

SEQ ID NO: 185575 - DNA, 446 bp, Arabidopsis thaliana
  unsure (1)..(446): unsure at all n locations
gcggagaggacgagaagcaagccaccagcccgcccccgcagacggcgaaaggaaaacacaccaaggggcgggccggcccagcacggtttttttttaaaaaggttgtttgacncagcccaaccgctcgcccccgccaccaacaaagaaccccccacagttaatcgggggggagaacgagcgcgggcggtgaaacagaaatataaggtggtagagagaaaggactaagggaggcgaggagatacgcggctgtacgcgcagaccacattgttgagtacaaggcaacgagagagggaagtaagatatagatgaagtgagcgaataagtgtgcgaggtcggagaggtaggccgcgtcacgcactcaataagtaagaaaatagagaatgagaacgttggcaagactggaaagtcgacagtgggaccgcagaacgcaaccgcccgccgcctcc

SEQ ID NO: 185576 - DNA, 635 bp, Arabidopsis thaliana
ggaggggagataatgagagcgattttccacccagtggagggggggggggcgtagagcgtgttttatttgactctgagatgtgaggtcccgaagatgagatgagggagtgataagccttcggtatctgtaggcgcgggagagaaaggaggtatgcaagcgatataagtgtgtgaccgctcatggtgcgccccagcatagtagacacgccgggatgtgagaggatgaaagaccgtattttccgagcggggggggaaaccacgtcaagatccaccattcacgagggtagcgatcattaatacctatgtctcaccgcggttcacggtcacggtgagtgtgcgagtaatgccatgttgtttaagcacagaaaaaaagagtgttccgcttttaccgtgagcacagtcgttcttagccactttcggttctcctggacctagttattcgggagttgaattgagcgcagcgcgtctggtcgtattgagctgtcgcataccgtatccacaaatagaggtgtcaaaccgcccatcatcgacatcttgtcaacgattatgttatcgcagtagtaagggtcgatgaagaagatcgttctgcacaagttgacacggaagatgacgaggaggaaggatgagtgaaagtgt

SEQ ID NO: 185577 - DNA, 398 bp, Arabidopsis thaliana
cgcggggggggggggggagaagacataccgcccgacccggccggcggaaggcgtatgagatgacaccaaacacgcaagcggccgcggcgggagaggaaagccaaaagataaggagcaccgaaggcgcccgacgcacccagaatttttttacacacgggggggggcgaggcgccagatccgccagcaccatgcaaaaacaaacaaagaagacggggggaggttggcgcgggcgcggggtgcccaccagacacagacgggagatggagcaaacaacaccaaatagacgcagcgacggagcgacccgcgactcgacccacacgattacgcatgagaggaaggagacaagagcaaatggcgcgcgagggaagtatggatcgggcaggccaagagacgcgcac

SEQ ID NO: 185578 - DNA, 436 bp, Arabidopsis thaliana
agggggaacagggggggatgacgggggggaggaaattacccacgggagggcagcacaagacagcaaaaaaaagtcgatggacgatcttattgaatgaccccgcccccaccccctccactaccgaactgatcccgattgcctcccggaacgagcgcggccatttctcgggcttttatccgtggggcaaataaacacaagacaccgcagataagggaattacaaacacaccgatgcagatccttcgaagaaccttacctcgtctctaataacaagccacgcagaagaaaaaagggaaatcaacacccgtcggatcctcaccgcgagcacactgactgcgccacccgccgagtcaaggataagtgcgactcactcgataggcaaccgacaacgcggcatgtgacctactgccgggaccccaaacggagtcacgcacggg

SEQ ID NO: 185579 - DNA, 166 bp, Arabidopsis thaliana
cgatttttagcccttaatacttacctgcctctactgtcctaagcgcttttttttggataaggaggcgtcttgcttctgcattttgaatcatctgctcaagaccttgtgctctgctgcgtgtatcgcgagtttcctgacgcatggctgaactctaacgaccttgtcg

SEQ ID NO: 185580 - DNA, 395 bp, Arabidopsis thaliana
  unsure (1)..(395): unsure at all n locations
ctaatgaaatattggacgggaggttgttcaagggatcgccaaaggggaggaccccccaacacaccattattaaaattttgcctgggtggcaagaaggcgggcgtctttttttctttggggggttgtattggggcccccaaaccccgcggggggcgcgcccaacaaaaaaaaaacacccccccctatcgggggcggcggtgttcggcccccgccccccggagtccgcaacgtgaaccgttcatagttcgcagtcggacggcgggggcgagttagtaaaaacaccgggccggtccgcggcggagcggagggtagagncgaaggcgggggcggagggccgggaggggggggcgggagtggacgagtgaggaagggcgggggcgccgcgcgagagaacg

SEQ ID NO: 185581 - DNA, 405 bp, Arabidopsis thaliana
ggcaaatagaggtttggccgggggggaggggcactgaacaatgaagagggaggaaacccggaggaaaacagccgaaaggggggagaggaagggtgggctggagggagaacagcaggaagtttgccggggagcgcagcgcaggagggaacccagcgggcccacatagagacttttttagggggggggggaaatgcagacaaaggcggcagccaggaaggttaacgaagtcagggggcggaggaagagaggggacggaggcaatgtggggggaaaagaggcgggttcggcaagactccggaaacgcgcagggagagagtaagtggggtggaggcgcacggggggaggaggggtatggagacagaagatgagggcgcggggagcggaggtaggaggccggagacgaga

SEQ ID NO: 185582 - DNA, 305 bp, Arabidopsis thaliana
agggaacgccctctactgtcttaactgcgctggttagttttttattttttccaagaaaacatgcttatgccacccattgttgcctttgagaaatgcgaacttttcctgaccaccacaattttggggggcaatggtcccgcccagatttcttccccattcaggatttccaatatgaaatacttacagaacttgggcccaagacaatctccctttccctggggcacagatggcatatggttgcctaggtgctatttttatcgtactttcttttttctatctttgatttttattctctttaaccttaa

SEQ ID NO: 185583 - DNA, 342 bp, Arabidopsis thaliana
caattaaaaaaaacaaacccgtcgaaaggaggcaaacagatttaaccggggggggccaaaaaaaaatatcgggaggaacagtcggtaaagcaaaacgagagtggggacgaacacgaaaaacaaacccccaggtgaaacctcgagaaagcacgaagcgagagctggagacacggtatttaagggggggcagaggaaagacccgctaactccagattattgacgtagaagaccgcgggagtgaggcattgaggacgtggatagagacaatgcacaatcaccacctaaactattgtagccagcccggagcatagcaccctgataaaaacccgtacaagagagaaa

SEQ ID NO: 185584 - DNA, 352 bp, Arabidopsis thaliana
attaaggtcagcgaggaacgcctatctacacctctaaatttatcaaacgaaacctactactctgcctagctacaatccccacctaagccatcataactttggggggggggaagaagtgtccgacctatggcccacctcctctctcccccctcaccccgctccgacctttccttcatgcttcagtgcaacttgaaacatagtgcatttttgcatgactttttctcgttctagaagagtctggggatgaagaaaacctacaacgccgttatcgggtctccaccattcccctcgcttacccaacctgatgacataggctcccacttactaccgctgacgtctcccattacgacct

SEQ ID NO: 185585 - DNA, 376 bp, Arabidopsis thaliana
  unsure (1)..(376): unsure at all n locations
ccccaaccaaccggccggggagagacaaagacagagagagagcaacgcgcncccgccgcggagcggagagagcccagaagaaagaacaccccaaaccggccgcgcggcgagggcccgccaccgaacaccacactttctatcaaacaagaggggggtggcgagagagacgaaccacacacgcacccgacgacaacaaacaaacaggagaaggagaaagagaagggcaggcaccgcgcccagcgcgcccgcccccacacagcaaagcaacgaacggcagcgagagagagccgcggagagaggagcaggacgcggagcgagcgcccggcccacacacagccngcgaagcacaaggaggggagaggggagcgaagcgaga

SEQ ID NO: 185586 - DNA, 490 bp, Arabidopsis thaliana
  unsure (1)..(490): unsure at all n locations
aaaaaaaaaaaacaacnttcgtccctttaacaaaaaaaaaaattaccaccttctcaaaaaaggggggtataggtttctcacaaaccaaaaaaccnacccccccngccctgctttccaataacacaacccccccccctcccccctagtaagaatttatctcataaaacaccccacccccaacccccgacatcacacaccaacaaaaaaacacacacccacaaccctccccccccacttctcacccaactatttttcttcaaagaggttgttttgtgccnccccccccccgcccncccccccaaaaaaaaaaaacaacccacaccacacccacaacaccccccttctgtccccaccccacatctctattccgcacattggctccgctgagcccacgacgcgcgcatacacaaacagtaccccgctcacaacacatcaaatatcttacaggaatatttatacgaaatatcctaaccacagcaagaacacaaac

SEQ ID NO: 185587 - DNA, 482 bp, Arabidopsis thaliana
acgcctgcaggagccgggcacggaatacaggggttcgcccacgcgtccgacagcactagaacctaagactcgtatgcgatcgcatccaaaggaccaattagcatcatgctcaaaagtctctacgcggcggacagcgggtagatagatggcccgcagctcggagataaccggcggattgacttccagcaactctttgtccttaggagggggaacaaaatctccgcccgtagggattcgggaaagatgcaatgctcaagctgctagaaccattcaggagctcagggctggacatgtgtatatataccaggaactggagacgggacagttccacgggcagatttacacggaacactaaggcaggcgaaagccaaaagccccccaggtcttaccacagtccaataagaaaactgaaagggcgagggcaccggtagcaccaaaaaatggcccaaaaagatggaaaggaactggacaaaatcattacg

SEQ ID NO: 185588 - DNA, 459 bp, Arabidopsis thaliana
cttcactcactaggggagctcgtcacgcctgcaggtaccggccgcttacagggtcgacccacgcgtcgaaaaacacggccgcaggcataacgtttgcgacacattgacaccgacgttgcttccttctcttaagctatctaactcgcgctcataactcgacacgcgcagatgattgtttgtcgtagatggacttccatatctattgctacagcggctaccatttgtactcaataaagttactatgctgtacatccgatgaatcggtcatgactgctataagactactattgaagctaccgtgcgagacgttggagccgttaacagagatagagttggcagagatcagtggacatgagaaaacgcagcatgttgtgggatacagtgtgttgacactgaagtggcatctgttgcacggagaccattgcttgaatatacgtggatgccgcacatgcttaaagg

SEQ ID NO: 185589 - DNA, 333 bp, Arabidopsis thaliana
cgggacggaattgaaggagtttaaccacggggccagaccccgtagagggagcagagaaagttggtggttgtcttaaaacggtgaccagtagtaggaacccgtttgtggccatgatcccgtggtactatgttcgtacagcgatcgttacaggtcgacgctggggtgggccgacgaggcggcgacttttttttttgtgagggggggagaaccgaaaccgctggtagtgtgtctcgagtggaacaactgtgattgccgggagcggtcggcgggtgggaggacagcaaggcgacggtgggtggtttcttttttttcaagcagtgtcgcccggttggg

SEQ ID NO: 185590 - DNA, 429 bp, Arabidopsis thaliana
acgcctgcgtgagctgggacagaaggaatcggtttttcctagggggtgagagcccagttaaaggaaaaaattagatagggaggcgggttgattgcggactaggccagggagagagatcccaaaatctgaaggggagagttgtgtgagtagtaggtcggacgaaccgtaagttgtgaaacggtgggaggagagagggttttttttttagggggggagaggcgggcgcagtccagtatgggggcgaagaggggcatgctggtgaatgggggtgcgggagggggggatgaggaggggggacatgaggatatagatgagagatgggagtggggggagcgattgcggatgtggcggagatcggtgtgtggcatgtctgtgggtatggggcacgagggggagagggtgagtcggacgtgggagaggaggggatgg

SEQ ID NO: 185591 - DNA, 479 bp, Arabidopsis thaliana
  unsure (1)..(479): unsure at all n locations
gcgggcggaaggggggaagcaaaagagaggttttaagagggggnaaaaaacgagaggggggaaaaaagaagggagaagggagagagagaacgaggggaaaagaaggaggagagggaaaggaggggagggaggaggaaggggggaggggaaaaaaaaaaaaggaagaaagtaaagaagaaaggaggagagagagagaatttttttttatagagggaggagagaagagtagtgagaattatttgagaatgggaggaatgtaattgttttaggatgggtgaaagaagggaatgatgtatgggagggagaggggggtgaggggtggtggggggaaaagggtgtgtggtgttgtgagattattgtacgagagggggggagggggggattttgtaggaggtgtagataaaaggatagtagggttgaaaggggtgttagaagggaatggtatgataggtagggatggtggttggggtgagatgtgg

SEQ ID NO: 185592 - DNA, 514 bp, Arabidopsis thaliana
  unsure (1)..(514): unsure at all n locations
gcctgcnggngccgggccgggcctcccgggttgtcccgcgcgggcggggcgcgcggggggggggnnggggcngttgggcgggcgcgggcgcgccgggggccgcgggcgcgggggccccgcgggcggcgcccgcggccgccgcggcggggggccggggcgccccgccgggccccggcgggcggcgccccgggggcgggcttttttttttggggggggggcgggcggggggcgctgcgttngggcgggccttgggcctcgtttgcttgtggcgtctgtgggtcggggttgtgtgccggggttttgttcgtttttgttcgcgtgggggggtggggggtgcgttgcgcgttgtcgctgggccgtgtggcgtggcgggttcccgtgtccgtcccgtcgggtctcttctgggccgtgggtggtcgtgtttgcgtcgcgggtccggtgtgtctgttcgtctggggcgcctggcgttccgccggtgggggggcgggtgggccgttcgggggccggggcgtgt

SEQ ID NO: 185593 - DNA, 442 bp, Arabidopsis thaliana
tggagagaaattaacgggggattaaaccgagacacaagaggaggagaagaggaggggccagcgcgcggcgggacacaatgccgcggacgcgcgaaaacggccggaaaggccgaggcgaggagacacacaaaaaagacaaagcacggcggcgggcgggcgcccgggtttttttttcagggggggaaggaggcgccccccacagccgacgcgaggacagggcccccccgggaggagcagccgacccgcgaacacgcggcgccggccggccggagcggggagcgggggataaatggttgtttatttgttgttgcccccccctccgaggcgggcctaatggggagttggcaccaagaacccgctggttccccacggcgggccggctgcccctgcggggggtgcatgggggggtggcgggcgtggggggggcgccgcgaacgcggct

SEQ ID NO: 185594 - DNA, 430 bp, Arabidopsis thaliana
  unsure (1)..(430): unsure at all n locations
acgccgcggaccggccggaatccgggttgcccagcggcgagcacagnnggaaacngcncgggcaaaagccaacgggcgaggggaacagcaccaagcaagagaaaggaccaaggggcacagggcgaagaaaggacagccacagcgaggcaggaaggacaaaacttttttaaaagggatacataaacggagatgcaatactgaggcatagggtgacaaaccggacgagagggagccaaggaaaggggaacgaaatgattataaaggaagaaggggcagacaaatcctttaaccaaaacggcaaccccgcatgaccgaggcgcgccaaggaagaggcatagccctatagcgagaaaagacaactaataaaaagaccctagaaagaagagggggagatacatccagatgcgcaggagatatgtaaaaagccaaa

SEQ ID NO: 185595 - DNA, 277 bp, Arabidopsis thaliana
  unsure (1)..(277): unsure at all n locations
cacgcggacggaagccnggaagccaaagaggggttggccgggggggggaaaaacccccccaaagaaaagaaggaggagggcggacgggaagaggcgcgacagaggagacacacaaacaacgcgcgaagaaggacggcagcagagagacgagcgcgcgagaccggggcgcaccgcgacaaaccaancacaaccncaaacgaaagaggaaaagggggagcagngaagaaagcgcgggcgcacgaagaaggagaagggctcattaggcaagggggggggc

SEQ ID NO: 185596 - DNA, 492 bp, Arabidopsis thaliana
cgccgcctgcaggaacctgggcggaatttacgggtttgcctacgcgttcgggctttggagagaaaggggttttttgttgggttctgccctgctactacagatagaggagcccctagaatacccaatgacgaaaactacataaaaatttccaacttcaatccgtgaagacaacttacgccaatagacagttcattgaggttctttttcaagcggggcgatgaccatcgaataactcagatcatgtcctaatggtacaccaacgctatgagtataacatactgaggtctttgacctttgatatatgatacaaaagataccctgttcgccgtacttgccagaacgaatcataatcctttaccgcgaactatgtccgttcacgcccccatagaacacagtctttccctactagaggtaagtaataaagacgttccctgtaatgccatgaagatacagcacggcactattacacaccgattgtaaagagaacagaaa

SEQ ID NO: 185597 - DNA, 468 bp, Arabidopsis thaliana
  unsure (1)..(468): unsure at all n locations
cgcgtacgtaagcttggatcctctagagcggctgccagcagggcgctaagcccacagcagggcagggcgtctgccggggacaggggcgatggcatggcgccgggcgcaggcgcagaagtgggtggctgtccctggaagggagcagttgttgtcctacaatcagtaagccttcgggaggcacaagcgcagtttttttttgggggtgatnacaaagaggtactgcgcatgctgagagaagcacattcagaggccgattcccagcatggggttttctttaggaggaggcccaccttagaccgcggaaggaaaactgcagttagaatgggttccgatagtcgcgaggggcactcctgtttatagccgtttctgcaaatcagagattgagaacctggagtagcaacgcgaacaactttagcgcaaccctccctgtgcgatgaatatgccgcgcctatacccccccttacattc

SEQ ID NO: 185598 - DNA, 453 bp, Arabidopsis thaliana
  unsure (1)..(453): unsure at all n locations
agctactacgcctgcaggtaccggtccgcaatacacgggttgacccacgcgtgcggtgctggaacgcaagctgcaggaaatccaggcgtcgtgcgaagcggatgaggcgatgccgagcaccatgaaagctgaggatcggcatgcaagaaaagagcggtagacgtaccatcgtatcgagcaggtgcggcgcctacggaatcttacattgggccaaagcggacggaggaacggaaggagcagaggagaaactggaaaccctacacccaggagggtgcaacactaggtcgancggcagctaatggccgaggctgagacggactgggccgatctcacataggacgacctgctggctttgattcacgacgcggccacgggcggaggaagagggacgatgtatgccagtcggggaaggcctagattcttggccttgcgcacggaagctcaggtctggct

SEQ ID NO: 185599 - DNA, 529 bp, Arabidopsis thaliana
  unsure (1)..(529): unsure at all n locations
acgcgaacgnaagctnggatcctctagagcggtttgcctgggttttttataccttacacatacaaaatacatacgagcatcagtggaacacatgcacgacaggagccaggttccttggtcgtcacaaatagtgcaaactaaggaaggtgtgccagggactagggagcgcattagtgcgaggacacggcacaccacctgaccgagcgtttttttcgacgggggccacaaaccagccggaggccgaccaggccaaaaccgccccaacaagagggatcggagccctggacctgcgggcgaaccaagcgccggacgaggacaccacgacaagcacggaatcagggaggacccgcagcaagggcaggggccagagagaaagaacgggcaagaacccccgacaccccagaagggcaaaacaaccaagccgcacaccccagacgagaaagaagggggaagagacacaaatggatcgaaagacgaccttaacaaaagggggcataggcataggaaaataagactgaggggagacaag

SEQ ID NO: 185600 - DNA, 490 bp, Arabidopsis thaliana
cgcctgcaggaaccgggcacgcaatacacgggtttgacccacgcgttcgaatccttatacagacaaactatgttccatctgtgtttactccccgcgcctttagctagtttctggtgcgcagacatgtatgaaaggcagacatccccatggacaaggacctcctggcgcggctcacgatgcagaacctgtcgaggtcctgctctacgggggccactgacgcggtggagggttacgccctgccaagcctcaacttgacgatctgggccctggacagggattcgatcatgtttcgatagaaacccttcgtgcttgccggaccccttcaacacccccattgatggcatggatcaagtgtccctaactcgccactcctctcaatacaaagacgggtaagacactggaggtcatgcgagcggtcagatagagggggggcccactacttgcacgattgatcctagaaaggccctggatcaggagattacctaaacgg

SEQ ID NO: 185601 - DNA, 412 bp, Arabidopsis thaliana
  unsure (1)..(412): unsure at all n locations
acgcgnacgtaagcttggatcctctagagcggttgccctgggtgtttaaatccttagcagcctaaggctcggtgagagagggggcggcacgtttgtaagcaaagtgaggtcccagagacggcaggcgcaaaggcgcggtatcgaggagagaacaagcaatatttcaataattatggagaaggaaacagacaggtctacactccgctaactttttttttttagaggggggaacacaaatagaaaccagcaagtgtgaactgggcgaaatggcccccacaaaaatcgtgaaactgagagacgccagccagctgacctttgtgtagccctatcggatacttgaaaacactcatagggtaatgcggttgattatttgtaataacgccacgcacatgcgcaatgggtgcgctatata

SEQ ID NO: 185602 - DNA, 482 bp, Arabidopsis thaliana
  unsure (1)..(482): unsure at all n locations
cgcgtacgtaagcttggatcctctagagcggttgccctgggggtttaaatctttaggaaaagatgaaaataaagggaaggagggattatgagatgaaataggggtgggaaaatggtggaaataaggggagtaggaggagagaaggggtaataaaaaaattagagaaaaaaaagggggagaatagagaaagttttttttaaggggggganaaggacaaatgggattcgcactggacaaaacgcccccccagtgtagatgccgccaccacaccatcgatgtaagccagctgagatagaactccaaaacagcggttgggatttgtaatctcaacaacgatggttggggcaatagtggcccgtagagagaccgcctaatagcgagaggtgtggcctgggacacaaggggaaggaggaagtcgagagggggttatggaaccagggggaaattcgcaagtacgcgcagacagagcgacacggaaacgt

SEQ ID NO: 185603 - DNA, 416 bp, Arabidopsis thaliana
  unsure (1)..(416): unsure at all n locations
cgccggcaggagccgggcacggaatacacgggctcgacccacgcgtccgagccgcatgcggacacacacgaggaggagcagggcacaccaggagaagtaggggcaccccgaggcagcggaaaacgaggagacgcagagcggacacgggcggagggaccagctggcgccgaacacagagccgcacgtctgggagcttttgtccagggggggccgagnacccaaacgggccccacgggggaggacgagctccaggcagaggcagcagaaggacaaagaacgcaaggagaaagagaggggagaaggagaacacagggacgggcgcgaaaccgcaaccgacgcaagctgaacatggcgaccaaggccgcccccagaaccgcctaacaaaacgagaagggagacaagacgcgagaccccaa

SEQ ID NO: 185604 - DNA, 402 bp, Arabidopsis thaliana
gcgtcgtaagcttggatcctctagagcggtcgccgggttttaatccctataaggaataaaatatgaaatcaggaaggtaagacatatcgtattcattcattgcatagatatgggagggtcacacacagggcacaaaaataaagatcttgaataaacgggaatgaatcattataactttttttaaaggggtgacataggcatgccgttgatcaccattataatcatataatacccagggcgtgcgataattgagcaacaccggaagtgctgaattgaacatcaaaaaggagggattttggatttttttatatacatgacagtggggaaaatcaaaaacctgtgacgaatcccaaagctttagtgagggagcgtcgggaagaacagagtgagtttcgggcgggg

SEQ ID NO: 185605 - DNA, 530 bp, Arabidopsis thaliana
tcgacacaactaggagaagctaccacgcctgcaggtgccgggcacggaatacacgggttgacccacgcgttcggtccatgaaacgagtaacaggatatagtctcagacggaagttctagcgtgaggaggtgaccataaggatcatagcaccgctctataaggacagcaatcagcacagagacttgacatcgtgaacaccgttcaagacaaacgacaccactttttgtaaaggggcggcagcaaagatctcctcttgctactactattgggatcattcgactaactctgctcgctgcgaaattggacgctaataatatacttgtatcttaacacacctccgatcgttggcagctcacggctcacagcaccttttaccctcgcgcaatactaaaaacccgacgtattcagcacaggacacggtctgaatggataagagaccaatatccatggttgctcatggattggggcatggcgcttatttcttcagactggtacagtgtggactattaaaacttgccgctgtcttttat

SEQ ID NO: 185606 - DNA, 560 bp, Arabidopsis thaliana
ccgcgtacgtaagctaggatcctctagagccttcgccctggggggtaaacctttatttattggtttttgggagaagattgggagatatagaggttaatagtgtaattgtagaggagaggttggggaaaaaaattgtgtgattagaaaggatggtggatatagtagatttagaggaggtgtggtgggatagattagatgtgggatatttttttttttgttgggtgttgtgagaggggagtggagtttaagtaagtatgtggtgattttatgttagagagagagagaaaggagaggagaagatagtattttatgagtaggaaaatgagtttgtaagtaatatatatgaggtagtagattatgtatgtgtgtgataataggtcgtagtaagttatggtaagaatatgttaattcatagacaacgtatgagttaaagggctatgtaccagtagtaatagtggaatgtgaactgaatcggaggagagacaggcggacgcgcggaccagtgcgcgaaatgtgagatgtgcagtgaacggctgaggaatgaagtataatgatattat

SEQ ID NO: 185607 - DNA, 519 bp, Arabidopsis thaliana
gcggggggagaggaggggggaaggtgagagcttaagaaggggtagtaaaaccctatgaggtgggagggggagaagagaactagatatttgtcttgacgagagttggtctgtgactataagaaaagcgtgatgtatctgttgtggttgtatgtggtgttttgtgcggcatgtgtaactgcgtgaaccgcgtaattgagttttttttttcatgagggtagaaggaattattgtggagttagttctcgggtgattggtgaatgggtgacttgaaggtggtcatgggcgtgaatgacgtgtgagtagatgtcgaataaggagcatgagagacgactgctgtggtataagagaggctgtggagaaatgtgccacgagattataagtcagctgtagaactcgatagtaggggagtggcggcaggaggtgtgtaggtagtgtagagttagtggagtggtggaggagattcagtttgtggcttttgatgttggttagtgtgtatgagtcgaacgtgtattgtagtta

SEQ ID NO: 185608 - DNA, 485 bp, Arabidopsis thaliana
tgcagtgaaagacgttatgtacattttctcggatacgtaacagcgcatatgaggaagaaagactagtgacacaagagtgatgggtagtgtgcgtacttctccagagtgggcggccgggattaagaccttgagtggggcggggcggatcgatgcgttttttttttgagagaggtgggcgacgagtccgcgacgggttaacatttcatgcagtacgcttcgcgcttcttcggaagatagttggtggtagtgggttataagaggggtcgagtgtagggtttcgagtgtgggaataggaggtcgccttgcgtgggagttatttttcgggggggagcgcttgttatttagcgtgaagtaaggagagtgagataggttgagatgattagagtcttggagcatttgatagaaaattatatggatcgagattgtggaattattttggacgggtcgactgttgagtgattatgggcacgtctggatcggacaga

SEQ ID NO: 185609 - DNA, 390 bp, Arabidopsis thaliana
acgcctgcaggtacgggtgacggaattgacgtgtgtgacggatgggggaagcctatatttggataaatgttttgaaatgaagaaaagtgtagttttaggaagaagtggtaataataaagagaagaatatgtaaaaattataaaagaggtaggaattagaaatatagataagggtatagcgaataatataaatgaattttttttttatgagagagataatataaggagaaaataaaaagtaagtaaaaaagtgggggtaattatatagagagtgaaagtaagtaagtaataagtggaagtagtgagagaagaataatgagtgagaggtgaaaagaggtaagagataagagaagaaagagaggtaatatgaataaaagaaagataaaaataa

SEQ ID NO: 185610 - DNA, 479 bp, Arabidopsis thaliana
agcttggatcctttagagcggtcgccctttggtttttttttttaattgaatattcctattacgagagaggagactctgacttacatgcgtgaaagctgaacgagatggcatttggtgatgtatctatcattagcacttctatgcagctcaacaaagactggaaagatacacaaacacgttctttaatcataggggagagggcgcctgcgcttcttaagaggaaaaggacccttactaaggtggacttcctaaacgtgcctaaagccagtgtcgcactctcatgaaccgttctctcttggcgggctactctcactctgccacagacaccgtgatagttttctggtcactcgaattgtaagatccttacgaggccctttttccagaccaaacggctgaacaaaccaaggggttccctgtactcttacattgatctaaacgcaggcttgagcgcaaaccttctgcattgagaagccttgaaa

SEQ ID NO: 185611 - DNA, 337 bp, Arabidopsis thaliana
gcgtgcgggaccgagtaggtattggtcctctggggggggggggaaacctggtttaaggataggaggggaaatatggaggtaagaagaatgataagttggaggtgaggtaggagtgggacgatggatgtaatttgtatgtgcgtcgcttgtgtgaagctagtaaaaggagataggtagggataaaggaagttttttttttttggaagaggggagaaaaaacaaacggtagacgagggagggtgggtttggaccggagagagtaggcgggagacgaagaacggaagacgagaggtagtagcgaggtaggtaggttagatagtgtagatggagggaggcg

SEQ ID NO: 185612 - DNA, 211 bp, Arabidopsis thaliana
cacgcgtgcgtaagctaggatcctgtagagcctccgccgggggggaaaaacccctgatcgaactaagtaggcggataccagggggtgaagaaatcacacagtcgtctgggggctataaggtcgcgaaacgagcgcggcgtagcgtgttacgggctcggcgcgcggccgcacgtggaccgcgccgcgcgccgcgcgcggaccgggtcggggg

SEQ ID NO: 185613 - DNA, 450 bp, Arabidopsis thaliana
ttggggacgaaaggggagtggggggtggtcctgccagctgcaattcgactgacctgaggagaagcacgtacgcctgcaggtaccgggccggcattcacggtccgacccacgcgtaaagcttatttaagttaccgtgagcggctactccggcgatgcttgtgtagttggcttggtatctatagcacacagacccctgaagtattggcaccacagaaacggacaaaccttgaaggcgtagaggatgcctcggatctcgatggggagatattttttttgatggagggggacggatgttaggacctgaaagtccggaaggaacgcacgtgaatcagtgtggagggaagtgaactacgggaggggcggggaaagtgcgggcgagagcggaagctgttgagcagtactaaacagaatagagagcagaacgggactgaggtacatatcaccgttgag

SEQ ID NO: 185614 - DNA, 473 bp, Arabidopsis thaliana
  unsure (1)..(473): unsure at all n locations
ctatagaagattatgaggnccactgccgcgtacgtaagcttggatcctctagagcgttacgcccttgaggttttatcctttttttttttttttttttttttttttttttttttttttttttaggattttttttttttttttttttaggggcggaaatagtttatcacaccaacaaagtgtctgaaaagccttggaaatttaagcaaaggaggttctttttttttggtggagggaaaacaagaagggacttaaatcaaaaattttgacaaattcccttttcaaaaaaaggacacaaaaaaattgaggtggaactcgggctggtgtccttaaggggggaaaaaccaaatttaccccctcttccgtcacgaataaaactcaattgtccggtttgtgtcgcaagaaatattttttatgtgttggtattcagtttccatggagaagaggcttttcgactccagcccgggatagtttca

SEQ ID NO: 185615 - DNA, 495 bp, Arabidopsis thaliana
gcacgcgtacgtaagcttggatcctctagagcttccagccttggggaaacccttttttattttatagacagaagggtggtttggaaaaatattatgtggaaaaacgagagaaaaagatctaaaaaagagacataagcgtgggtgaccttcttcttagtggagtgggcgggggggtatggatatgctgccagggccgattctttttttggtgaggaggggaggggcgggaggaggagagggcggaggcgtgacgggggttagagagagatggcgggaagagaggaggggataatagatatacgatgggttgatgtgattacaagcacaaggttgatatgtaattaacggaagtagcgagaggatagatagcaattgaaagtaggtatagttgaagagtcgtgtggtgtgacgggatagagagaggagtgtgtgtgaagaattaaggagtatagatggatatgtaggaatataaagctcataatacactgaggagga

SEQ ID NO: 185616 - DNA, 487 bp, Arabidopsis thaliana
gtacgcctgcaggtgccgggacggtatagcagtttcgacctacgggttagccctatgatttgattgaaagactagtaagttggagatatggatttatgtgaggagtggagaactggagaagataagaaagggcgtactttgggtggggaagaggagtataggggtagatgcttgtaggggaaagaggaaaaggtttttgttgtgggaggggcgagaaagggtgtggaagggttagtggatgtaaggagagctggaagagatagagatgggagggatggagaggtaggattggtggtaaaatgggtcgtaggggatggtgaaaggggtgatgggaagggggtagagaagatgttaggtggaggagagaggagagaaaggtgttttaggatagagaatgcattagggtatataagaaagatatggggggcgagtgagatttaagggtatgtagggtacgagatggtgagtgaagtgttaatgggagaag

SEQ ID NO: 185617 - DNA, 327 bp, Arabidopsis thaliana
ggtgtggatgggcgaaaggtgaaaaaatgaatagtactgccagctacattacgactcactagagggaaagcacgtacgcctgcaggtaccgggcacggaataccccgtgtcgacccacgggtacgccgacgcttgggcacaaaagctatcatacgagagttagagcaataggcaatctgaagaactagccatattctggccacgctattaacggagatcttcgtagcctgacgaggtcctccgttttgtacgcgatcttgcttttcagaatacggtgacgaaaacgacatttttttgtagatagagaaatcggagtctgcctattcg

SEQ ID NO: 185618 - DNA, 553 bp, Arabidopsis thaliana
ccgcgtacgtaagcttggatcctgtagagccttcagaggggaggggatatccgattgaaaattaaatgatagatgtatggagatgtggagggaggagttgattgagaagttagaagggagaatagaggaggaatattgaagaaaagtgattgagatgagtaaatgagagtagtgaaggatgagatgagaatggtaggtaggagagagatggataattttttttttaaaagggagtgaagaaaaatatagttaaataagtataagggataggaagtatgtattgtaaggattagaataagttagagagatgtatgaaaaatgtataaatatgaggtggatgtgaataagaagaaatagatggagagaaattattggataaggtggaataataatagtagaagaggaatataatgatgtgagaaaagtagaatattagaggacagagagggaacagagggtaaggagagagtttagaacagatgaagtagagaagattaaatagatagtgcgacaagagtaataaaagaaaggtcaggataggttgaggattgat

SEQ ID NO: 185619 - DNA, 530 bp, Arabidopsis thaliana
cacgcgtagcgtaaggcttgggatcctctagaagcgtcgcgggcgttggggttaatccctttgttatgttttgtttttttgtttgttgagagaaagaaaaaggacggaatgtttttgaaggggtagagaaagagaaaaatagagtatgggacagagggggaaggctgagcgaaaggataggggggaagaaagggggagggagacgagtggaagagaggtggggtttttatttcttatgaaggaggggtgggacgggcaagaagaggaagggaaatgatacttagaaaaggtgagggaaagaggttcagaggtaagttctgaagacagagacttgggtggatcgagagaatgggggatggtaggggtggaagggaacggtggagtagtgtcgtgggtgtaggaaggggaaaaggggcgtgggagtgaatgagggggtaggggatggtgggggagggggaggtgcgaagggaacggaggtgggaggggtggtgagggtgatgtgatgggggggaggaggaatggtaggggtg

SEQ ID NO: 185620 - DNA, 528 bp, Arabidopsis thaliana
cttcgactcacctgatggggagcacgcacgcctgcaggtaaccgggcacggaataccccgtccgacccacgcgtacggcccagactgagctttatattaggtgttgagaagaacaagcgcctcaatcttctcagtgcggtggcgagaaacgggcggtctgcagtatctagaagagactccgcaagttcagcaccgtttagccgccatctgactactcatagcactaaatgtttttttagattgcggagggagctagaggggagcagggatgacgttttcatagcttcgcttgtcccaaggcaagatgacagagggttctcacgtacatgtttgaggaggaattgagattctcggataaaagaaacaggaactatgcgtctgatcaatccctcactatcgaacgatcttacggggggtccgacgacgtataggttgtgacgaggcagactaccaatttgtgtgcgaggcgagcggctatttttcaaacacatgacgagtgacactcggtcctgatggagtggcctgcat

SEQ ID NO: 185621 - DNA, 473 bp, Arabidopsis thaliana
  unsure (1)..(473): unsure at all n locations
cagaaccgggaccgaagagaggttcaccgagggggacggccgaacgaaacaaaagnccaacacaaccccaacacaaaccaggagagcagaaacgcccagaaaagcgaagacgacagacaaccccagaaaaacaccacaccacagacaaatcggaaagaaagcccccaaaacgcgaagaattttttataaggggggaccacaagggggaacaagaaaaagagaagagaaagaaccgggggcaaaaaaacagagaaacaaaaggacaaaaaacaaagcaagggagaacgaagagagacacgacacagaaaagacgacgaagaccgaccagaacagacacaaaacaaagaaagagaagacagagaaacaaaaagcaaaaaaagaaaagaacagacagaaagaacacaagagggaaaaaaggaaggaggaagagcgtagacgaagcaaacaagaaagaaaacataccaagagaaaaa

SEQ ID NO: 185622 - DNA, 390 bp, Arabidopsis thaliana
  unsure (1)..(390): unsure at all n locations
agctnggatcctctagagcgttcgncgggtggtgtatactttttttttttttggcaaaaacaacaactagcgtggatgggctcgtgaagccacgaggggtgagaaagcaagaaagaaacctgggggccccaatccatgggtgatgatgactggagtttttaactttccattaaactttcaattggtcttccgggggttgtagaaagggttgaagttttttttttcgaactcccccaggacaatcagggggggcatcaagggttacacctgggggggattcttgtagaagccccccccaaaggaagcgtgggaaaaacgcgggtttttggcgagtgtttttgaaaaaagattaaaggcatttttggaggtcgggggccttgtggagagggg

SEQ ID NO: 185623 - DNA, 354 bp, Arabidopsis thaliana
accaaaccaggaaaagggcgagggccggaagaccgaagcgcttttctagaccccacgggcggcacacagtgaaagaggaagaggacgcaccaaaatactatttgggggggacgggacaccacccagcttttttaaaaaacccccccctttttggggggcccaacaccccggaaaaaaacggccgcccggggagagcggaaaagcaggccgaagcgggacgcgccagcgggcggagctgacacaacgcggagcggggggcgacggagcagaggcacacggggcagaggcagaagacggccaggggcaagacgccgggggcgcccggccgggaggaagggagaaaagagagaaaaa

SEQ ID NO: 185624 - DNA, 278 bp, Arabidopsis thaliana
cttacaaaaaaaaacacccccacggggccggagagacgacagagggaaggcgacccgaccaaccgaaacgaaaaaagcttccaggggcacacgacgcgccaagacgcaagagagaacacacggccgcaacttcttctttcggggttaaaacaaacaaccccacaactttaagaagaagcccccaagggttaggggcagcggccccgccggcgaaacgagacccctcacgccagcgaccccgaaacgcaaagcagcctacccacccacctccgggtgcc

SEQ ID NO: 185625 - DNA, 368 bp, Arabidopsis thaliana
aaaactcccccccaggcaagacgagacaaggagaggaaaccccaccaaagcccatacaccggagaacgccggcgcgagccccacaaagaacaaccaagaacggacacaccgagccgtttttttaaggggtaaacgacgccgaaggggaactttttgtagaaaacacccggggggggagcaccgagggcgcacaccggcggcagaccccgaccagcacaacgccccactacatacttcagtaaggcgactccccagaaaaaccaacccacagcgggcccgagacactgcacacaccaaggacaaaggagagagcagctgagggacgagataagagagagcccacaacggaggcaagaaaccaaaatata

SEQ ID NO: 185626 - DNA, 399 bp, Arabidopsis thaliana
  unsure (1)..(399): unsure at all n locations
ttttttttttttatggnnaacccccnnctgggtggntggntcgtgangccccgagggtgagaaggcgggaaagaaacctgtggcttccaatcagtgggtgatgatgactggagtttttcactttccattaaacttncattgcgtcntcggggtgggtagaaaggncgaaaggataaattttaaaaactccccccagtcaagctgtggcgggcgacccgtgtaaaaaattgcaggacttgatgatggaagcctcccaaggggaaggtcagtgaaagacgaggttctggggaagctggagagagagaatggagagaatgtaggggagaatgggagcatggaaaaggaagggaggtgagtaaggaagagataaagggcagacggggagaaggaaaaaggaaa

SEQ ID NO: 185627 - DNA, 285 bp, Arabidopsis thaliana
  unsure (1)..(285): unsure at all n locations
gaggcccgggtcgagcgaagggcgaagccttcaaacgaaaaaaaacgcccccaccggggcnaacagagagcagaaggaggcggaagcgcgcgccagaagggagaaccgcggcgagagaccggggcaggcagcaacgaggaagcgacaagaaaggagacgagagccgcaggggctcccctctccagagggggggcaaaacgacgcacgaacagacccccccacaaaggaaacaccccccggagagcaggnggcgggacgacgaccgacacgcagagtcaaggggac

SEQ ID NO: 185628 - DNA, 459 bp, Arabidopsis thaliana
accctcaggcccggcccggatccccgttccacccgcggtaaaactttttttgaaatgaaactctccacagacgtgagacttattgatgcagaagagaaggcccaacttgactgtatggacgttttcgatggcgagcactgccgcacaatggagtgtgtgggatggagcttggtgtagcacttttttttttggggggtgaaagtggagcggggcgggagagttattaggaaagaaaccgcagcggggggggggaaggcaactgggtgagggaggaaagcctccccgcaagggggaggcggagggggaggacggcagggggggctggctgcggagatgaaagcgacagaagtggtaagtcgaggcccgcggatgtgcgggggcgacctgacgacaggggaccgggggaccggggtgggaagtgcggggcgcgctccggacagctagaaaggcaattaaaaa

SEQ ID NO: 185629 - DNA, 402 bp, Arabidopsis thaliana
  unsure (1)..(402): unsure at all n locations
aaacctttaaanaacaaancccaaaccccaaggggagaacataacacacgagcaatgccccacatacccgcaaccagaaggagcggagtacatgccagccccagcacatatctcagcttccgaaactaaaacccgaagaactctcttcaaggtttaccacacacgcccgaacattttccgcaccccccccaaaagataacccgcgtcaccaaaccagaaaccatatccttgctataacatgaccccccaaagggccaccgcacagacatcggctgcactaaaccacatccctccaaggcgaaaacaggcaaccccgccgcaatacccacacaaagctcgccatggtaaccatccaaacgccccacacccctagctgacgacaccaaacccgcgaatccaccc

SEQ ID NO: 185630 - DNA, 499 bp, Arabidopsis thaliana
  unsure (1)..(499): unsure at all n locations
aaaaaaagaccccccaacggggcaaaaaagaagaacaagaaaaacggagagcctgagcggaaaaaatcggaatacccatgtttagagaggagaatgttactggcacacagggcgaatttcttttgaggggagccccccccgatttcctaattttngggtgggggaaacagacacccgagagagtgttttttttaaaaaagagccccccccaggttcttttttgggaggaaggcaacccccgcggaccaaaaaaagacgcccccccaagaaggaggaaggaaacaacacgcacaggacgacacaacacaaacaccgcacaaacggcaaccgncgatttacccccccaacccaagagccggggaccagggaggaacccaaaggacaacaacggggataccaagggctaaggagacctgacaaacgggacgagatacaaaaaggatagaaggaacacaaacgagaagagaatacggggaaaggattggaagtaaaagatagt

SEQ ID NO: 185631 - DNA, 456 bp, Arabidopsis thaliana
  unsure (1)..(456): unsure at all n locations
cgtaagnttggatcctttagagcgttcgccggtttttttattctttaggtaaacgaaagctgaagattctatggatgaatggagtatcattgataaaacaatcatatcattgatatgctcgaaaagaatagaggtaaaagaatgtttatatccacaaagcatatcatcttaactgnctaactatggtctttagggggtggaaccacgcatcgattggccctggaaaacacccccgcaccctatcattataaccttacatccatttattagcccagtgaccattgggatgcccataatgcctcatctgcataacccttgacacatccaataccgcgaacttgtttgctttgggtacgtaatatgatataccttcaagcttttcaatctgaaattgactgacgttcatcttattggtctaaaggccaattttgctttctccaaaaggactcgtcctgc

SEQ ID NO: 185632 - DNA, 431 bp, Arabidopsis thaliana
  unsure (1)..(431): unsure at all n locations
aagnttggacctntagagcggtcgnccgtttttttattcttgaattatnnaaaaatttttttaagatggggttttatttttacagccagagatgaagattaccaacctaattacatatattgcccggggcggttaatgtagtgacccaatcgaaaaatgcagagccctttttgatctttaagtcggggggggggggaaaacgccggcagctttattttcaaagactcgccgtggttttcttgtgctggccaggcatcaagagattgtgacctttggtgaactggacggtggttcaagtgttttaaaagaagaggggggttgttggtttatactgatggatgggggaggtgggggcaagtgtgggggacaccggggaggcagcgggggctacccgcttggggatggagggggggaggccatggggacgggat

SEQ ID NO: 185633 - DNA, 398 bp, Arabidopsis thaliana
ccggggggaccggccggatatttggggacgcaaaccttgttgggttttagaaaacagatggggactgtttttgttaagagagaaatggggcttgacaggaaagaggaggttttctagtgcaagggaggattgaagaggtagagccgcggcgggggttttttgggggggagcgccggcgggggggatgttaggggaaaaacagggggggggggggtgggagggggaaagagaagggagggagagggatgagtgagggaggcggagggacgggggcgcggttgggttgggggcaggggaggagggggggggagggagagaagaggggggtgggggagagggggggggggggagggggacggggggggggggggcgaggcaggggggggggggaggggggg

SEQ ID NO: 185634 - DNA, 488 bp, Arabidopsis thaliana
agcttggatcctctagagcgtttcgcctgtagttgaaacccttttaatttaaatataaacccacattaggggagcggcgagggggcccccgcgccaaaaacccacattgggaaaagggtcgcgggcggacaaccaaaagtgaactcgctctgtcccaaaaccaagcccccttcccccccaaaaatttttattttcgggggtgcgaaaaaacaacaaccccccccccaaagaccaaaccacaccccagcggtagaggagttttagggcagcccttaacaacaagacccccgcgacgaaaaaaaaacggccgaatgacgggggggcaagataccatggcccacgtggggacctgttttcccgcgaggggagggaggtctccccgaggcccccgcgaccggaagccgctcggcaattggcgagaatgagtgacggacaatgtgggcggtgtggcatgagactcccacccccggaggccgccagaagcgtgc

SEQ ID NO: 185635 - DNA, 197 bp, Arabidopsis thaliana
  unsure (1)..(197): unsure at all n locations
caggaaccgggccggaatncccgggtcgacccacgcgtacaacctcagcaactggaatgatnacaataacctgggtctgcacaaaatcttcaacaagatgcggaaaccacccttcgcggtgcgatggctttatacattatgcgatctccgccgaagcatcgagcgagacgagatgtacatttgagggactcacattt

SEQ ID NO: 185636 - DNA, 464 bp, Arabidopsis thaliana
cacgcgtacgtaagcttggatcctctagagcgttcgcccgtttgtttattctttttttttttttttccataagatatgtatagtttcatatacgaagccgaactttagttacacatacacacactggagtgactgagacatatatcaatcacttccaccaaaaattgttccctttacgaccaaaaggatctattcttattctgtgtgagctgaaactattatgaattggagagtttgtagggaaattcgaagcgactctaatctaaaacaacagaggaaaacaaaaaaaaacgtaagatttggggaagagaagaacatatgcgcacaaaaggaaagctagggatcttgaattgcatgatcgggcagggaaaggaccaatgtgtgcggtggtgacagacgcaacggggcggtggagagaatcgccgggggggagaagaccggcccggtcgggggaggcgggtcgg

SEQ ID NO: 185637 - DNA, 522 bp, Arabidopsis thaliana
gatcctcgagagaggtttccctggggggttaaatccccaggattatgaacggacgagagaaaaaagaagggaaacaaaagaggggccaagagcacatttgagcccataaataagcgcggcacgacatgaacctcaaaaaggcgcagaaaaaaaaaggaagaaagcccgaaaaaccgccaaaaaactttttttatgggggggggtcccacaacgcaaaacggggtggccaataaaagaacggaagaccggggggtggatgcgacgggagatggaaaaagacgatgaataagaacgaggttgaggagacgagagagacgaaacacgcagcggaagaatgcgcgatagagtagagcagatctagagaagacagtgataaaggacgcgcgaagaagtacaggaggaaacaagcgagcaaggagggtgggaggctgaggggtagacgaggagtagaggaagcgagcaggaggagggtgggaaggaaggaatgagaaggtagagaaatggagagagaggagagagaga

SEQ ID NO: 185638 - DNA, 327 bp, Arabidopsis thaliana
cacaagaaaaaggacaaggagagagggaggcagagcaaactggagccgaaaaacgccagaaagcgcaccgacaaaaaagcccgcgagcagagagacccgaatttttttcggggggggcccccacaaaaaaggcgtgggggaataagccgggcttggcgaacgagaggccaataaacgccgggagccgcagaaacgaaaccaagagccgagccagggggaccgcacgacccccagaaaggaggaggcggaccgcgccgagcagtaggcagggcggggcggaggaggggcgagggtggaagggggggaggcgacagggggggagggggg

SEQ ID NO: 185639 - DNA, 516 bp, Arabidopsis thaliana
  unsure (1)..(516): unsure at all n locations
agggggaacaccccgaannaaagggggaggccagggagacggtggccggggggggaaaaccccnaaaaccgaaggaangcagaagggcggggaggaaaaccgccaaaggcaagaggagccacaaagagcacgcgagcgcgcgaaaagcgcaaaagagcgccgaggaaagaagaaacaaaccggagcagcaggcgagagcgggcagggtctttttaagcggggagacaaaaagaaccggaaaaggcgtacaagagaagaggggacgagcccgcaagaaggcgggggcagcgagagaagagaagcggaggggaggaagaagaaaagcggaggggggcgggcgcaaacaggcgagccgaagaggcaagcagagaagggaggagaagaaaggagggaggcggggaggccgcgaagcaagcgagacggaaagcgggggcgaggacggccgaagaggggcgagaaagggtgaagacagaaaacaaaaaacgcgacaggggatcgcaggacaacgcgggggcc

SEQ ID NO: 185640 - DNA, 427 bp, Arabidopsis thaliana
  unsure (1)..(427): unsure at all n locations
gcccaagaccggcacacagaaagggaaggaaggccaggtgtaaacgacgacttttggggggggagcacgccagcggaaccggnacggagaaaccgggtcgaccggggcgggaaaaacccgaaaaaacagcgcaaanaaagacaaagagaaaaaagggcggcganggccggaggcaaggcgcgaagcagacaagaccgcccggcaaacaaagagaaacccgaagggccgacaaaacgggagaaggacgggccgggagaggggacgcgacacggaaacgaattttgtcggggggggggggggggggacaagaaaagaagggcgaagacgcgcgagcgaggacgccgagagcgaggaggagnagcaaagaggaggcgaacaagaggagagcccgcaggaggacgacaccaggaggcaaaagggcggcaga

SEQ ID NO: 185641 - DNA, 440 bp, Arabidopsis thaliana
cgggcaccccccccccaagaggaccaccgacagttgccggcggcgaaacccccaggacccacaagaacgaggaccgaaacgagacaccaaaaagaaaaaagccagaaagaaccagcgcggaaaacggaaggccgcccaaaaaacacggaaagaccgcgaagacaaaacacggccacttttaaggcgggggccaacaaacacgccaaggcagcaaaaaaccgccaagagagcaggaaagggcacagcacggaacaccggagagacgcgagtaaaacgaacaaagcggacacgaggagcgaaggaaagcatggcgaaaacgcatgaaaaggacggacggaaaaggcgagacacacgcggaaaggaacgaacggcgacgaagcgcgagcgagggcacgagacagagaaagagggggagaaaagaaaagagggggagaggggaa

SEQ ID NO: 185642 - DNA, 337 bp, Arabidopsis thaliana
ttttcttgttcctctataaactcacgagggtctgcagagctatttaacttttgaaattctagcctgttttgtggggaacggggttttaacctacagctctctggccccctctttttttttaccgcccacactctgtgctacatttctttcctgaaggaaaaacccttcaaacccaaaggaattttttttttttttggggggggggataaaaacctcctgccccattagtaattttcatccccccctttttctctttataaattaagatttttgtaacgcccaacaaaaatagggctgacccaagatacaagaatatctcctcggaaactggaattct

SEQ ID NO: 185643 - DNA, 489 bp, Arabidopsis thaliana
  unsure (1)..(489): unsure at all n locations
aggtcgaaacaaaaattgggcgtcggacaaagcagaaaaaaaaaaaaaagtttcttggtgagacaacaacagactttaggggaaaaacagcacgcctgcgagaacaagncacggaatacccctgtcgacccaggggtaaacccacgcaaacaaacacaacaaacacggataggggccagcagcaaaggggcacaaagagacacggaaagccaaacaaaaagagaacccagaagccgggaagggaaaaaacaagacaaggcgggggaaccgaagaagaaaaaaaggaggagtttttttttcgaagaaggttattggttgagtagatgatttatgaaactggagaaaggaaaaggaggtagacgcgatgaaattttggataattagcaaggaatgagaggaagaagaacaagcgaagagagaaagtatgtttggatgcaggacactagagaaggaaaatagataagtgaagagagggaaggaatagaggga

SEQ ID NO: 185644 - DNA, 639 bp, Arabidopsis thaliana
  unsure (1)..(639): unsure at all n locations
agaagccacaaaagccaaaaaaagcaaaaaaaaaacttttttttcacccacaaaccttatgggaagcaacacacccggcaaggacagcggcgaaaatacaaggttcaaaccaaggggggaaagaccacaaagacacgaaaaaaaacgaccaaaaaaaaaacaacgaaagacgcccaggagaaaggaagaacgaagaaccagagaacacacaaagccaccaccccagaaaagaaccgaaacacaccgaaaccgcacaaaagacaggaaaacgacgcacgcccacgcggcacgaaagcaccaaggaaaaacatatataatttttatgcggaaagggcgggagaagaagaaaaaagaaagagggagagagcgagagtagatgaagggagggggcaaagaaagaaaacgaagagaggaacagangagagagccaagaaaaggaaaaaacgggagagagaaaggagtagagagatggcaggagacagaaagaagaagccaaagcccgaacaggccgcccccagaaagagagggggaaaaacaggatacgaggagcacgaaacaaataaaacaacacacccacaccgaaccaaaaaaggcgcggcgcgagggagagagaagaataacacgaggaagagatcagag

SEQ ID NO: 185645 - DNA, 660 bp, Arabidopsis thaliana
  unsure (1)..(660): unsure at all n locations
gggggaacccaccgcgaccnggcaagnnaagggaggcaacgaggaggaggattggcgctaaggggggaaaaaaccccgcaagcagagaagaagcggaacgggagagagaggggagggggcgggggaagaggaggggcggacgcgggaagagggaaaaggaagtggcggagagagaaaggaggaggaggggcgaggatgcaggagagagacgcggggagaggaggaatgagagggagagagcgcgaccagacagagcgaaaaagagatttctttttaagaagcggagtggcggacgaaggcgatcggggagggcaagagaaagccagagagagtgtagcaggacggggaagagggagaacagggtaggggagaaaagaggggggaaagtagagggcgagaggcaaggggggaaggagtgagaggagcgacggagagaggggggagcgagagaataggagagaaggaagagcggagaagagaggaggaaagaagagaaaagaagaagtagaaagagagaggaaggagagaggggaggaaggggtggagggacaggacggaggagaggggaggaaaaagggacaagggcgaggaagaaggggaagagaggggagggataaggggaagaacagggagggagaggggagtaggggagagaggaag

SEQ ID NO: 185646 - DNA, 305 bp, Arabidopsis thaliana
  unsure (1)..(305): unsure at all n locations
gaccccgaaaagcggggcgagagataaacaccctaaaaacaaccaagttttttatcccacgcaacctttttttgggggggaccaacccgcagggannngggncgggagaaccggggttggaccaggggggaaaaaccgcaaaannacggaaaacagaaccaaaagagaacgcaaaaggacgccgggcgagaacggggcacgcacagacgagcaacgcagcaacaactacaggaaccgccgcccccgaaacgcgaaccacgcgccccagagccacgcaaccaaaaacttttttttttggggggggg

SEQ ID NO: 185647 - DNA, 542 bp, Arabidopsis thaliana
cggcggcgcaaaggggggcccagaaacaaacagaaagaccaagtttttacgaccgacaatggttggggggaacaacccacaggagaagggggggggaccaagattacagagggggcaaaccaacaaagagcgacaaaaaagcaaaaaacagaaaaaacccacgaaccgcgggcgagacaagacaaagaaccacccacaaaagacaaaaaccggaaccggcagacgggaaagaccacgccgagcgggggagcgaagagggagattttcttgggaggggggaaaaaagaaagaagagaagggcgagagaaggggcggatgggaagaaacagaggaggggagccagggcaagaggacgaggcagcgagagcaggaaaaagggaccgggaaagaccagaccaaggcaacgcaagaaaagagaaacggaagagacccccgaagaaaaacgaagccacgcccgcaagaaaggcgggagggggagaaaagacaggagaaaacgggcggaagaccgaggaaagcacgccccggcgccgcaacaggaagaa

SEQ ID NO: 185648 - DNA, 474 bp, Arabidopsis thaliana
  unsure (1)..(474): unsure at all n locations
cgccagtaagtctcggatcctagtagagcgtttcgnccctttcgtcaaatcccgtatatatgaggcaaaataataattgtaccgcgtaacaatgtgcgagcgggatggataagataggcataaataggagacgaccgccggatcgatcgaattatttccggcgaaacataaccttggtgaataggcggcgatcatccgattatcacggcccggagcatttttttcccggagggcgaacatttagcgcataggagaacatagatacgagaggaagatgccgcgggaagagagatctgcgattaagtacgccgattgcgccgggagggtggtgggtataacaggatctcaacacacgatgtaacgatgcgagaggggagtgggcgatggaggagagcggagcggagaggacgatcggacggcaatatgagggggcgcaatcacgggagttggcgtgaaatcgtaggggtcgacgga

SEQ ID NO: 185649 - DNA, 547 bp, Arabidopsis thaliana
  unsure (1)..(547): unsure at all n locations
gcgagcggaagcgacggcacgaaaggctgaaacaccaggttttttccacgcacccttgtggggggggacaaaccacgcggaaaaggnacggaaganaaaggtttgacggggggcgaaaacccgaaaagagcgaaaaaaaccaaaaaaaaagaaacgagggcgaggcaacggagcgacaaccccggcgaaacacaaacggaggcgcaacgaaacacacacgcgcgggccccgaagcggttttcgagggggggggggggccgaaagaaggcgaacgcggaatgaaagcgtcgcatagggagaaggagaagagacaaggccaagcccggggaggggggcggggcaggaaagaacgggcacgcgccgccgcatagaagagcgcgggcgcacccccgcgcaaaagcccagaaaagcgggaagggcaccgggcagcaaagaaggcggccgcaccggcgcgaaaacaagcggagagaggaggaggagagggccaagaggcagccngcggccgcggggcgacgagagggaaacgcagacgccgaagcgcggaagg

SEQ ID NO: 185650 - DNA, 486 bp, Arabidopsis thaliana
gcgcacgcaagctaggaagctctagagcggttcgccttggggttataaccatcgattatagcgcgcgaagatagaatggggcggaaaacgtagccgggcgaatatgaagtagtggccgagaaaaaacagacgcgccgtaaagggtaaaatcctggagtaaaagaaaaagagacgccaaaaagagagagagcaccttgttttttaaagggcggcgacgcgccacgtccgccatgatcaccgcaaaatgaccgcccaggacgagccgagaggcccgcggagcgatggtaaagggacaattcgagggcggagtatgggggttaccgcggagggtaggggggaaaggggagggagcgcgggagcggccgaacaagacgaaggggggaggggggaaatgaggggggggggggggggcaaggggcgggggcccaatggagaagagggagataggcgaggcggcgggccgtagcggacgagaggagacgagag

SEQ ID NO: 185651 - DNA, 587 bp, Arabidopsis thaliana
  unsure (1)..(587): unsure at all n locations
aggggcggaaacggggacgcgaaaaaggatagaagcgctttttgttttcgactcacatatattgagagcaggcacgccngcaggnaccggnccggaataccagggttgacccaggcgtccgatcccttaatgaaagaaacagatcctttttttttgggctgacttgggtcaaccaaatcgtaaactctcagaagcattccgatttataaaaaaaagagaaatggcaaattcagaaaacaagtcagctgggaggacgcaccgaaacattttttttttggggggtggacaagggggagcccggcgtatgggaggaaaattgagagtgcatggaccacacgaaaggccacgtcagccggataagggggggcccactatggcaatgaaatagggcccgccgggtgacaagttgaggtgaagggagaagcccgtaaaaatctccaaagcggaatgcggacggcggaagatgtaccttctggcaacgcccgttaaagagagcaagaaaggaaagtagagagccgttgacgtgcagagtcacgtgggggctgtatcgtggcggaggacgggagcgcgcacacacggcgattatg

SEQ ID NO: 185652 - DNA, 565 bp, Arabidopsis thaliana
  unsure (1)..(565): unsure at all n locations
aaacaaatttttttggggggagacagcaccccgccaagaagggggcgccgggggaggagcttggagaagggggggcgaaaaaccccagagaaaaagccggacagggaaagaaaggaggccagaaaagaggacacgcccaaaaacgaaaaaaaaaccggaaaaaaagccggagccaggagacaaagcagaagacgccggcgagagaagaaagaagagaacccggcacagacgaccgagaaaacgcacgggcttgttatcagcggggggcgggggaacnaggagggggagcgaaaaggcggcggagaaaaaggacacgaagaacaggaggggganacccgcaccaggagaggaaggaagggaaaaagaagcgcgggaaagacgagagtaggagcaggagcataggagaaaagggagaggataggacggaagcagcgaggaaagagaaggggagaaggaagaggggagaccaaacgacaagaacaaggagaggggaaggagcgaagagcgggggagagaggaagggggaaggaacagggagaggggcgcgaggaaaagaaaaaaaggg

SEQ ID NO: 185653 - DNA, 529 bp, Arabidopsis thaliana
ccgccgcaagcaaggagcctctagagcggttggccggggcgtgaaaaacccgacgaaaagcccgcggagagagggagagccgcaaacggaacccgccagaaagcggacataaaccgagggaaaagacgcgaggccgcgaaacagcgaaaagaaccggccagacggaacagaaaagggaacgcgacggcccgccggagaacccgcccttttcaccggggggcgacgaccccgtaacagaggacggcaaagagcggagcgaaggaacacccacgggaaaccacgccgcgagagcggacgccgggcgaaggaagaagcgcgccagcaacgacccagcagcgacgagaagccggccgacaggaacgcagcgggaagagcaagcacgggcgcaaaacacgggagagagaacggcgccggagcgggagccctggcgcaacaaagcgacaagaacggagcgagggagcgacaggggagggccgggaaaaggagccagcgagaagcaaagaggggcggcgggacacaagggcgaaaa

SEQ ID NO: 185654 - DNA, 587 bp, Arabidopsis thaliana
  unsure (1)..(587): unsure at all n locations
cgggcgcggaaacggccacgcaaaagaatagaagacccagcttaatccacacacactgggggagcagcacgccagcaggaaccgggccggaaanaccgggtttacccaggcgggcaaaaacgacagaaaacggaaaaaaacaccaaaaaaaaaacaaaccgacagagaagaaaagcgggcgaaggcgaacaggccgaacggcgacaaaccaaaacgcacgaccccgcaaacgagaaacacgacagcggcagcgagaaaccagaaaggttttttctaaggggcggggcgagaaaggaaaagacggcggaagacggacaaacggggccgcaggggaaggaaagcggaggcggggagcacagcaggaaagaccgcagagaaacgggacaaaagaaacgccgcaagcgaagaagagcagacaagcgcagcagaagagaagacccgaacacccgagacagaccagccgcgtaaaacgaggacccaacggcccgaagacgcccgagggagggggaagagaagcacaggagagaccgaagcgcggcggaccgagggagagcgcgccgagggagaacagcaaagaccaagaaaag

SEQ ID NO: 185655 - DNA, 169 bp, Arabidopsis thaliana
  unsure (1)..(169): unsure at all n locations
gggggagaacccccgcccgaggaagaggagggagccacgagagggcttcgagcgcggggggggaaaaccccggggacacaaaaagcgaccccaaggcggcnacacgacagacgagnaagagacggagagagcagacggcgccaggagggaggcagcgccacggagcgag

SEQ ID NO: 185656 - DNA, 709 bp, Arabidopsis thaliana
  unsure (1)..(709): unsure at all n locations
gcctgcaggaacccgggccggaatacccgggtcgacccaggcggtccagagcagaagagagggcagaaagagccaaggcgagaggaggaaagaacggccggaagacccagcgagagagcgagaaagaagaggagagacagcgagacagcgcgcagaccagagaaagcgagaggaggaaaaaggcagaggacggacccccttccagaggggggggcaaccgcaggaagaagaggagaacgagagaagagcgcccccagacgagaaagaaaggagccagaacccgcaggagcgaagacgaaagaggcgagaggacgaagacaagagcagcgggcgcggaggacggacaaagcagagagcagggcgggacgccaggaagcagagacaccacagagagagacgagggagaccagggaggcacganacaggacgaaggtaggggaagcgcgaggagaggaggaggaaaacaaggaggagaaggcagggggcccagaagaggaggcgaagaggacggacgggagcagggaggaaagcgccggcagagggagaggagggggggacagaaggagagaggaagcgggggccggggaggaaagagcgaggggcgggagagcgggggcgcggaggagaacggaggaggagagaggggacgggaggaggaggaggggaggagagcggaggagggaggcgaggagaaggaggagagaggaga

SEQ ID NO: 185657 - DNA, 139 bp, Arabidopsis thaliana
  unsure (1)..(139): unsure at all n locations
ctatagnaagatttatgacgtgaaactgcacgcgtgcatgagcgtgggatcctctagaacttgccgcctcgtttgtcttctgtgctgtcggccgacgaaaaaaaagctctcgggtacttatcgaaatgaataccgtcgc

SEQ ID NO: 185658 - DNA, 130 bp, Arabidopsis thaliana
ctgcaggtccggtccggaatcccgtttcgaccacgcgtcagcccaccatatgttatgtcgatctcatgacaatgtgtattttactgtctacacagcacagatataggaaaagcaaagcgtcctagatcaa

SEQ ID NO: 185659 - DNA, 175 bp, Arabidopsis thaliana
gcacgcgtgacgtgaagctgggatcctctagatcttgcggccttttttgttttcttttggctcagtaacgggtgtattttaacaattgtactagggaggaggggatcggaacaagtgtgaatctgaggctgaagggggatgcgcaccaatgggaagtaagcgcaagcttactcct

SEQ ID NO: 185660 - DNA, 578 bp, Arabidopsis thaliana
  unsure (1)..(578): unsure at all n locations
ccgggggcttgtggggggaaccgggggcgggcagaggaagggaggatggaagtttgcggggcggtgtgaggcccacaaactcaaagtcacagtaggccctgtgtagaatgtacctatcatgcacgagaaaaatgaacagcgctagaggcacataaagaagaagaatgatcgacaagtaactagtgtgataactggtgacatgcaaactgtgttattttttttttatagcggcagcgtggttggacgtaagagagatgtagacggaagagatacatgagtctggagaggtgggtgaatcgtcgtggtaggtcgaataagtggagggatagtaggatgtattcgtcgcgtatagtggttgaggaacgtcagcttatgtctaccttaatattgtatagcagatgtgagtagggatgatgtgccgaggtaggtcgtcaatatactacaccgctgcctcaatccacatcagtgacattgtattcatgattactcatcttagtgttatgatcgcgtgntgcgattgtgaatggacttgtagtgcatttaacagacaggttcacgtgatgatagcgctcggcggg

SEQ ID NO: 185661 - DNA, 879 bp, Arabidopsis thaliana
gctggggccgcacggagagctttgcgcgggggggaaatccctttgggggatggagcggaggggcggtaggtaaaacagtggcgccgagtgagagtaccgcagaggaaatgataccgcccttactaatgaaggaaatacgccatgatactaacaccatgttttcgacgtcgcgaacgcgaggggttttttggtgcgctctcacgaccgcgactcgagcaaattgcctctgacgcagcagctctccatgtaatgttggcacaaaagtataactgtccgcgtccaattacacgcatccacggtgcaatgatctggaatcgccacccgaccagcgctcacgcgcaccggagacacccctatccctaccgtgccatcaccgagctccgtaccgttaattcagacctccgacgcagccgtctctaggacagctcagcgccgcaaagaggcggaatcggtttgcacttaggtagcagccaactctatctactacgcccagctcacgaccagcgtctacactagtacagcccctctcccatggctcgaacccgctggtatctgaacggtacgaacactatcagacgtactaggcacaaaagtaacgtccgagacgtttaggcaataccctccactagctctccacccacattgcgccgtgatgtttggatcacatcccccccctatccgctcgaacgctcaagaacgcgagatccgctcacgttgcccgcctggtcccccgcctccaagagcgccgcttccgacggtggctactggacctaggagcccgacgcacataacgcaacgatgcgacggccgtgcgatgcgcctagacccaccagacccccaagccgaatagacacgtcgacgagtgtcatcgcgcggctc

SEQ ID NO: 185662 - DNA, 925 bp, Arabidopsis thaliana
  unsure (1)..(925): unsure at all n locations
cgccagcagggaccgggccggaatcgccggttcgacccacgcggaacgcggacggcggggggaggaggcggcacgcgacaggggggcgcacaagggggcaggggcggagcgacaggaagagagaagggggcggggagaggggcgggggggaaggcgggccgccaggaggaggcgaggggggagagggagggaggagagnccccctccagaagacggacggggaaacagaggacgagcggagaggaagagaagaaagcgcggccggaggagaaacaaaggaaggaggaaggcagacaacgagcaacaagaggcacacaggcgacaggaggcacacacgacgagagcaacaaccacccaacaacaacaacaagcaggagacaccagacagcggaaaacacgcacaccacacaccgcagaacggcggaaaggagcgagaaaacgcaggacaaggcacgcccgagagacacaacgaggcgcagcagggaaagcaccaggacacagcaccagaacgaaggaagcgcggcaagacgaaagcgaacagaaagcgccccacgaaacagcaccgggcaaggaatcaacgaacgaagaaccaagaagaaaaccgcagcaaaccaaaaagacacacacagagagacaacgcacacaaagagcagagcaaagaccacgccgggaggaaacagaagacgaagacgacgacggcggcggggaacagaccaacgcacccgaaacacgcaccgcgcgagggcaagcgacgacgacaagaacacaaaaagcagcgaaaaacaagcccaaccaggcgaagcaaaagagaacaacagaagagaacaagaaaacgcaaccgaaagcgccagcaacacggaggacaacgaccaacaccacgcaagccaagaagccagaatagcccagaacgagcagcgacgagggc

SEQ ID NO: 185663 - DNA, 777 bp, Arabidopsis thaliana
ccgcctgcaggaccgggcacggatacccgggtcgacccacgcggacagcacgcagagagcacagcagccaaggagagaggcaaggcacagagcaagggcagaacgacggccgcaccgggaagacaaaaagaagcgagcacacggcgcgccaggacacagccgcacgaagacaaacggcgcttctctggagagggcggagcaacaacacaccagacgtgcgacgaacgaccccccaacaagaggggggagaaccccacacagaccgagacggagaagcgcgaggaagaagaacgggagaagagacgagaccgcacgacacgcagcgaggaccaccaggacggacgccacgccgggaggacgacacagccacggcgcgaggcagggaagacacaagcggaaaagggagacaggccgagagcgcgcgggggaggggggaaggcgagaagagagcgggggggcggggccggggaagcaagagagggagcgggggcggggggagcggaaggggcgggggggggcagggaagggagggcaggaggccagcggagaggaggcgccccgacaggagagagcgagcgaaaagcgaggagggaaaagaaaaacacacgccaggaggcacagcagggcggcagaccgaaagcggagagagccgaccggagcggcgaccgagacgaacagagagagacgaacaccggcggccaaggacgcagaggcgaccgaagaacagcgcaggcgccaaagggaaggaagcgccacgcagcacggccggaggcaccg

SEQ ID NO: 185664 - DNA, 143 bp, Arabidopsis thaliana
  unsure (1)..(143): unsure at all n locations
agggactgtccctcaggtccgtccagaatccagtcgccacgcgtcgccaagaccatttccatgtaggatcagaaagttccatgggctacttcgantacaccctatgatctctgatcgctatagcactgatcacacatcatctg

SEQ ID NO: 185665 - DNA, 750 bp, Arabidopsis thaliana
ggcacgcctgcagggaccgggccggactctcccggggggacccacaccccccgggaagcagaaaacggacaaacaagggccgaaggatcgacccagcggcgggacaccgcagaacaactgcgagcagcgaaacgcaagcgcgagcaccaacaggaagaaaaaaggaagccccaacggtcctctcagcggggggagcgcgcgcgacaagagcggggggcccggagacagccaaccccgagaccggaaaacaagaggcagaccagcaaggcggggaaaccagcgcagccgaacaaagagcacaaggagagaagcccacgaagcgggcaggagagggggggacaggagaagcaggcaacggggagggaaaacacaggcgcgaaggcgcgggaccaaacaacagggaagacgcgacagagggaagagccggggcaggcgaaggcggggcggggccggcgggcgggacacggaggaccaggcgcgaaccggggcgccgggccgagcgagagcggcaacacagggggaggccacgcgggggggcaggcgacgccagggacgggcaaaccgggacggggagccgcccgagccaaaaaaccgccaacgggagcgacgggcgggcacaagaccagacagagccggaggccccgcgagacggaccgacacataccgcagcggcgggaaacgagaacacaccggaaagagggagaagcgccgagagccgggggggggacacggggcgaccggcggggcccg

SEQ ID NO: 185666 - DNA, 196 bp, Arabidopsis thaliana
  unsure (1)..(196): unsure at all n locations
ggaagaatattaggaggaaagaacggtctgacgtatagcgatggggatgagttatcaaggaggagggccgtttcttttatttattttgtttgtttagagcgggagcggcgcgaaggagagacagtttattcaaggacagtggctggttatanttgcgaagcagaacatattggcggtcctatgaggcggaggtggg

SEQ ID NO: 185667 - DNA, 648 bp, Arabidopsis thaliana
  unsure (1)..(648): unsure at all n locations
ggcgcgcctgcaggtaccgggccggacttcccgggggcggcccagcgtccgcccacgcttacgtggactcgagagcgcgactaaggatggcacaggcacatcaagaagctgaacacaacgggagacgaagagccgacacggaaacagaagttggagcaagagaaccgaaccctcctttctcgacggcggggagcgagcgaccagaggtcgattgttaacaacccccgccaggaaggagaggaacccccgactgcgaagagacagaccgacccggtgaagaagaaaaagcgccaggaagaaagagcaggagaaaacaggcccggctaaacacaaaaacgaacagaaggaacgctnggggcggcattagcaccggaaaaagggaaggcaaagaaaacagaagccacccccacagggccagatgcagaaacaccgagcgggacaaaaccagcacaacaaaggggacccagcaccaacacactaggagagccaggacggaaaaacccgccgaggcactaaccaggagggaagaggaagacccaccagcgccaaagcagatatgagaccgccagcaaacaagagagacgcacgcaaagaaaaggaaggaaaacaaagaggggaggagcgggcaccacgaagcgggccgaccac

SEQ ID NO: 185668 - DNA, 486 bp, Arabidopsis thaliana
  unsure (1)..(486): unsure at all n locations
agcttgnatcctctagagcggccttccttgattgtattgagtctttttatcccaaaaaancccccccccccaagggggggatcaagtccaacccgcacacaagactgacgcctgaccatgcaccctccaccgtttttggaggagggagtaaaatggagaaagtagtgcacgcgcccgacctatgacagggaggagaatgggtgaatatggggggggtgcgaaaacaaccccgggcggaggttttttttaaaaaaaacaccccccacaaatttttttgtgtggagggaacaacccccaccttgaataaaaaggcccccccgctagaggagaggcggagcgaccaagagggaagaggtagctgcgagtaaggagagaggcgcggccaagaggcaccggaagcggagcgcaacagcagcggaaggaaggggaaagagaagggaaaggaagggcacgaagcccgccccggagaaagagacgagagagacg

SEQ ID NO: 185669 - DNA, 670 bp, Arabidopsis thaliana
tggcacgcctgcaggtaccgggccggatacccgggtcgacccacaccgtccggaaacgaataataataatattgtaataatgagttctgatccagttcttcatctcatagatctctcctctctacactgccttctacaaaagtgagcacataaacttgcctctacagctgctgcgtgtatttttcagatactgtaaagaaattctattagctcaaaagaatcattcttcgggtacactgaaccataaaagcttctctcgactttcaaaaaactctctactttttacttttatccatttcaagcagagagacagatcgaagaacataaaaacctcgtgtttcttaaatctcagtgattctcaaattacccatcgcttacttcttttgaaccattagatttcacttgaaaaagccaagaaatctgcatcaaagtaactccttgtttcaacccataaattgggactcctcattgtttggggcgcgggaccaactcggactgcttgcagccattctagactcccgactggagattaaaaccccctggttcgacattggcctaaggaccaagactttgagtctccgccatctttaaaacaaaaacccagtaacccacggacttccaaaaccctcccattgggttctcgaagcgcccttcaaacgccctgaaacag

SEQ ID NO: 185670 - DNA, 267 bp, Arabidopsis thaliana
  unsure (1)..(267): unsure at all n locations
ataagctnggatcctctagagcggctttccttttggtgtgaaaacctttagaacgagtcgaccgcatactcggcgcatagcagacagcctcgaggcacagattagtgtccggcgaaccgaggagcgcatgagaggagatgtggggggtatgtttatatatattgattgtgttcgacggtttctaagttagtaatggatgtttttttttttcagggaggagcgggcgcgacggacggcaagccgcgttgctactgcggtgcgcttcga

SEQ ID NO: 185671 - DNA, 510 bp, Arabidopsis thaliana
ggcacgcctgcaggtaccgggccggactcccggggcgacccacgccctccggagcgattgggggaccaccgagaccccaagccaaacgccacgaagagctcgacagccagacgcggccaggaacaccacacgcacacggcgaaagcaacgaaggacacacccgcgccctcgtgacgcggggggaaagcgcagccggaaggagcccatgccaaaacaccacccgcacaaggcgacaccacgcacctaaacagccgcaagccacaccgagaacgcaaaaacacgcccgaccaccagaagacgcccaggaagcaaaggcgcgcgcgcaccccagggaccagcaaagaaaaagagcgcaagaaacgagttgccagggagccgaagcacgagagacacacacgagcagaaagcgaacccaccaggcggacccaagacccgaaaaccgccgcacccaccgcaagcaccgccaccagaaaaaaagagagggcaaacagaaaggggaagaacaaggcc

SEQ ID NO: 185672 - DNA, 733 bp, Arabidopsis thaliana
  unsure (1)..(733): unsure at all n locations
gggaggggggggggggctgcgctcgcganagccggggtatcctntcggcacgggaagagggggcccggggagggaggaagggnaaaggaccacagagcagcagcgcgggaagagacgcagcaacctccacaagaggggggcagccggcaagcacgagaggctgcgccacagagggaggaggnggacctcctcctaacttagggggggtggggaaanaagagagaggagttttctttttcaaaaaaacacccccccgggttgggggggcggcccccccccgagagaaaaaaaagcagccccccgcagagcaagaggaaggccgacgagcgagcacagggaagtcgcacgcgattcccggacgcagagacaaacaggcagggaggacgagcgggcgaggagcaaggcggcgaggcggagagggggaaggaggggacacagccgagagcgagcagaaagcgaccgacacgccaagactatgaggagacggaggaccacagcgtgaagaaggaagtgtgatgacgcagcagacaccacagacccggcaagacacgaggagacagagaacggacagacgccggggcgaaagccgagagggcagccaggagagaaaagaaaggcagcccgaagagacggcagcagaagagagtaccgaggagaggcaagagaagaagcggacgcccagggacgcgcggcgggccgagctgcagctagggcagcagggggcgaggacgag

SEQ ID NO: 185673 - DNA, 588 bp, Arabidopsis thaliana
cgcgtacgtaagcttggatcctctagagcggcttcccttggttgggtaaatctgtccactgaaaaagttaggcatcccaggtagtgagggattatggatgtggaataccctttcttcgtgatggtggtgtgggacagaggggatgaggagtggacttgttctatagaaacggcgtaggagaggaaagagggtttggtatgaaagtggtttatttctttggaggggggttagagacgggggcgacagtgggcgatagtgagtggacagtgggtccctcacaggcgatctttgtgggtttagggcccagaggggcttggttggcgactgggcgatagaacgagactgatttgggagcactggtaaacagttgttggtacccgatgggggaaagcagaggcagcggagtgtaccgggcgcgagtgcgggaggggagatcccggtaagcagctaggggtgtggggagaatagtttcatagaatagaagacttgtgggtgttggctgtagcttggtagtacgctataggcgcctaatcgagggagcgtatggcgatgttggtagtatcgactggggttgttaggagtgtcttt

SEQ ID NO: 185674 - DNA, 843 bp, Arabidopsis thaliana
ccaataaaaaacgaccagacccctccagcagtctatattaaaaaaccaaacccactcgtgacgcaaaaactctatcaaccaatcaaaagggacccaagagaacaaacaggacacacgggcaacgacacctctctccgcaaaagagaggaagaacaaatccacaaacaaatacaaccaaaaaaccccccccaaagtgtccggagaggaagaccaacaaacaacaaaaccaagacacgaacccagagagaccgagaacaacagagcaaaagggagagaaggaaacagcaaaacacacagacagcaaacacagaaaggcagccacagccaccaacccacgaacaaacagacacacaacagaagaacacacaaacaacaccacagcaaaacagaacgaaactaacagaaaacaagcacaaaaaagaaacacgaccgagaaaagaaccacaaaaacagcccagaacaaaaaaataaaaaaacacagacagaacaaaaagaaaagcccacaaagaacaacaaccacaacaaaataccaaacaagaaaacagaaaaaccgccaacacaaaaagaaacaagaaccaaagaaccaaaagaaagaagaaaggagacacaaacaaaaaaaacagcaaacaaaaacaacaacaaaaaaaacaaccaccaaaacccaaaccgcaacaaaaaacaaacaaaaaaagaaaccacaaaacaccaaaaaaaaccaaaagagaaagaagaacacaaaaccacagaaaacacaaaagaaaccaaagaagaaaaaaaacgaaccacggagggaaagaacaaaagaaaaacaaataaaaaaaaaacgcagaaacaaaccaccac

SEQ ID NO: 185675 - DNA, 870 bp, Arabidopsis thaliana
ggggacgggaaggggagagggagagggaaaacgaaaaacgagcgagacgacaaacaaagacagaaacaaagccaaacaaaacagcaacccgagacaacgaaccggaccaaaaaacgaagaaagaaggaggaccctctcctaaaagggggggcgccaagcaccaaaccccagaaagagcgcgcggcagccccgcaaaaaggggaaaaagaaagagagaagaaaagaagaagaaaaagaagaacacaaagacacagacaagcaggcacgaaaaaacgaaaaggcggcaagagaaaaacaccacaccagaacacacacacgaaaaggcaacaacagagcaaaaccaccgagcgacccgggaccacgcgagaggaaagcggggccacaggcagagcagagaaccggagaccgagagacagaagagaaagagcaggccacaaaagcagagagacaccgacccaagaaaggaaaaaggcaaagaggagggggcggagcacgaacggcgcacggaaaagggacgcccgccccagaacaagcagaaaaagcccacaccgaaacgacgacgcaaagacagcgcacgagaagccgcccacagagaagccgagaaaacaaacaccaacaggacaaacacgagggaagcagccaaagcacaggaaagaggacgaacagaaagaagccaagacgggaccccacagcgcgcagacaacgaggaccaacgagagaaggaccacacgccaacccacaaacaccgaaagagcacacgcagacccaaccgaacccgcaaagccgccaggagaaagaacacaaaccacccgccgagcgccgcacagcacgggaccgagaagaggcggaggaagaaaggggagaacgcag

SEQ ID NO: 185676 - DNA, 488 bp, Arabidopsis thaliana
gcgtacgtaagcttggatcctctagagcggcctcccttttttgttttatttcttttctgtcaacttttttttttcttttttcttttttttttttttgttcacccaccttttttctttatatcctaaaggaaagagtgtttttaacctcatgaaaacctttgatatctcaaaagaaaaagacccccaggggagatttttttttaatggggggttaaccacccagacccatccccaaggggaaccccctcccccctttttttgcaggaatcacctctaaataccttccttgtggcgtgtcggtatggaggactacccctatcccatcatcttttttacccatccccatccctgtaaacctgactcttggggggacccttggttccaccccggaattcccgacccggtcctgtaggggttcccattttccctatgaggtggcccccttggcccttgcccaaccctggtcataaccgtttcccaagggaaat

SEQ ID NO: 185677 - DNA, 508 bp, Arabidopsis thaliana
  unsure (1)..(508): unsure at all n locations
ctaagcttggatnctntagagcggncttccttgttttgtttagccttgaaatnaaatanaaatnantnnaaaaggggaaaaaaaagttaagtntggaattaaaatgaagaaagaagaaaaaaggataaaaagaagggataaaataaaatatggtggataaagttttgagggtaaaaaaaaagttttttttttgngggggggggaaaaanngaggggtgggaggttataaaaaagatgccctgaattttttggttgtatgataattaaatgatagtaatgaagggattggggtattggtttttgagatatgggagttggttgaaaaaatggaggggagatggtggaaataaataagggaaggtatgaaattaggggagtaaagaggataatagtattagtgtagaattattgtgattattgtaaaatatatgggagttgaaggtgaatagaggagaaaggaagaagtggtgggagattaatgggagatattgttttagaaattgggaga

SEQ ID NO: 185678 - DNA, 589 bp, Arabidopsis thaliana
  unsure (1)..(589): unsure at all n locations
atcgtaatcttggatcctctagagcggccgtccttgggttgtatgagtctttaaaanccaaaaacccccccccacggccaaaaaacaaaccataaagccacaaaagaaacacccaacaacgaggaagaggggattaaaagaggaggagaagagtgagttgttgatagtgaacaccagggaagcaaccacaaggtttgngtanttagagagggtggggcaccaccgaacagtaggacgttttattttataaaaaaacccccccccaaattgttttagttaggaggaaaatcgcgcgaaagttgaacgagggacgccccccgaagagtgatgaggacaggcgtcagggaaggaagagaaagaggaacagagaacaacctcaacccaaccgagaatacgaagcccncgggacccgactgcaggcggagcgcagagatgaagagtagagcagtggaatagcaaggccagagagaataatgaaggaggagaggggggggagaggggacggggcaaaaaatccgacactatcgcgaccagacaggaccaccgaataaactagcacgagaaaacgatcgcaacatattcgaacaca

SEQ ID NO: 185679 - DNA, 559 bp, Arabidopsis thaliana
  unsure (1)..(559): unsure at all n locations
gggaacgacgcgtacgtaagcttggaacctctagagcggccgtccctggggagtatgaggcgttaaaaccanacaaaaccacaccaataagggggcacgaaccaaccgaacaaacacacccacaaggaccgagccccagggaacaggctgagaaggacagaagagaaaaagggggaaaaaaggggcacgcgacaaaacgcagnaacaacccccctggtaagagggggggggcggacacacccgaccgacggaggaccgcctgcaagaagagaacacgcccccccagcacagggggccggggggccaacgaaagcaccaccgcacaacacaaaatcccgccgccgcgcgacgcacagagggccgcgcgcaacaggagagagaccgccgggaagggagcggagacgagcggcacagcgcgcagaagaggaggacacgaagacggaggcgggggggatggaggggggcgcgacggacacgcgcccgcaccgcgggggagaagggaggaagcgcaggggggagggaccagaacagggacgggaagcgcggggcgagcggacga

SEQ ID NO: 185680 - DNA, 882 bp, Arabidopsis thaliana
  unsure (1)..(882): unsure at all n locations
gggcgcgggggccgggctggcctccgagcagccgatcttcgggcgggagggggccangggccgacgtcaagcagcgaggcccacacagaccaagaactagtttcaaagcaacaaaaaagacagagcccgagagcggaaacaagagatcctctaaaaaaggggggggcaaaaaagacaattttttttaaaaaagcccccgggacgagagaggaccagcacagagggaaaaagagcgccggaggggagggaaaaaggcgaaccgaggaagaacaccaaataggagggccgcacgggcggcacagcaggaaccaggaggagaaggcgcggaaaagaggagcgaccgaagaggaagacgcgagaaggaacggaaaggaagcgacagaaaaaaagagagcgggaacgaaagaggaaaggaagaagaggagaaaaaaaggagagagcagaacagggaagaaaaaggcaaggaaagaccgagaggcggagagacggagagaaggagaaaaagacagggagcggggggagagaagagagacaggaagggaggagcgcgccgaaaagagaccccaaagaaaacaaacgagagagaaagaaaacgacagagagagaagagaagaggcgagacagcaggagagaagaaagaaagaggacgagaaaaaaggcgaggaagagcaccggggaagggaagtcgggccggatggaaataaagagaaaggaagagaaaaggcgaagagaaagaagcaaaaccaaaggaaagagaaggacgagagacaaagccgcggagaaagagcaaaagggaaaaaaagaaaggagagaaaagaagaggggaaggcggagcggtccggaaggggcggagaggaaggagaggaaacagaggagagagag

SEQ ID NO: 185681 - DNA, 241 bp, Arabidopsis thaliana
  unsure (1)..(241): unsure at all n locations
atgcgcgcgagacggagcgaggatcccctaaagggggggagcaaaccttcagatatagatgatntntcggagggagcgcagnnnncccgagagcacccgccagcccagaacacgcaagcagaggaagaaggaaaggagaaggaaaagaagacgcacacacccccgacgtgacagggaaaaatcttcccaaccaggagggggggagggaagaaggggagaacccgagagagagggggccaag

SEQ ID NO: 185682 - DNA, 179 bp, Arabidopsis thaliana
  unsure (1)..(179): unsure at all n locations
ggggcgcgccagggngtgcccggaccgactctcccgggggaggcaaccctgccttataagatataattttgcaatgagatattctttagaaaaacccgacacgtacataggcaggtttgatcagaagcatgagaattgttcacaagacccacgtcgtgagtgtgcgggccgggccagtg

SEQ ID NO: 185683 - DNA, 348 bp, Arabidopsis thaliana
gtcgagaagatcagttccgagcactacatgaggcacgcaggcaaaaccgcgtgttttttttttatggaggggtgcggccgcagacgggacccgagatgggtactacaatgtccttcgccgctgccacagtatagttaggagcgccaggtgcttgtcctcttcaccggcctccctgctaataatccgtctcacaaggattattgatcgcgactagaagttctcagcacggcagggggcgcgcgctaggaagatcgaggatgggagaggtaataggaggcgtaggctgggtgcttagagttccttgatggtgtttatctccgtattgctccgctagtatgcgccagtcag

SEQ ID NO: 185684 - DNA, 224 bp, Arabidopsis thaliana
  unsure (1)..(224): unsure at all n locations
atgcacgcgagacggagccgggaccctctagagcgggcgagcccaaccgttcgttaataaaaaatttaacaagcagcgagaagnnnnnngcgaccacacccacagacctgtcaccagcggaggacacgagagaggagcgaaggctaatgacgagcgcgcaccggagcgaccggaccaaaccttttcacaaaaggggggagggacgctcgccaccacgaaagaga

SEQ ID NO: 185685 - DNA, 204 bp, Arabidopsis thaliana
ggtgggccgcctgcaggtgccgggccggttttcccggggggggccaaccgtccgatttagatgtcctagtgcatggggataacccatagccgggcctctacgttccagtcggctaactgtgagaatcctgggctcggtcgccggtcacagttggtgcgggtgcgtcgggcgcgcgacgcgagcctcctccttttcggggggggg

SEQ ID NO: 185686 - DNA, 265 bp, Arabidopsis thaliana
  unsure (1)..(265): unsure at all n locations
caccgcacctatagaaagcggctcccttttaacggcgggtaaaacccaaagcgaaggaaaagaattgtgaatccgagaaggacgccagnnnnnccccgcaccacacccctgtaccgagccgtctcacagctaggagggatgaagaccaaagcagcgccggggcgcaaacggattttttaagaggggggcgcagcaggaaacagggaggggaagagtagagggcctcggggtcgcgggtggacggggaggaatacaaaaccacgcc

SEQ ID NO: 185687 - DNA, 227 bp, Arabidopsis thaliana
gggggcctgcaggcaggacccggcccgaactccccgggggggcgccggagcgcccgaaaaccggaaccgcgcagaacagactactaaggctcgcggcgccggagacgcgacgccggagccaccgccatggcgaccgggagaaaaacacacacggaacagcgaggagagagagggcggggaggcgacctctcttagggcggggggagcggaacagacccgatccggag

SEQ ID NO: 185688 - DNA, 846 bp, Arabidopsis thaliana
  unsure (1)..(846): unsure at all n locations
ggggggggggctttaagggcacccccccggcctcagggggggggacaagggccagccgcggggcccggggccgaagactcggcggggggcccgagcctccggancaacaccatgcaccagcagaagagagggaagcaacgcgagcgctgccccgagcgccgacccgagccggcccacgcggcacgcgaacgggagggcacaccagccgaccacgacgggcacacccagaagacaaacactttctctgccagaggggggccgacagccacaaccacggaaaccccgcgaaagaacgcccaaaccagaaaagagagaccgcgcaaaccagccccaccccacccccgggcaaagcacaaggcccgcacgagcagcggggaggaggcagccagggggaacgagcgggaagggcggcccggccgcgcgacaacgcgcaggaaggaggaggagaagacggggaggcgcgagcgccgcgggggcgcaacgaagcgaacagacccaaccaccggcagcggagaccagacacgcgaagaaaacagaccaagaccacaagaaaggcgaggaaaccgccgcgccgcggccaagcgccangcgagagggggagacagcccgcgcggcgccgagaagaagacagcagcagagccgcccgaccgacgcgacaacccccgcccaccgcgacccccccacccaaccccacagaaaaaaacggagaccacaggccggggaggcgaggcggacgcacaaggcgccacgcagcgcgccgcacccggcagcccggcgcgcgggcgccgcaaagacacaccgcacgcaccaccgcccccggccgcggggagggaacgcgacaacacc

SEQ ID NO: 185689 - DNA, 239 bp, Arabidopsis thaliana
  unsure (1)..(239): unsure at all n locations
gcccccacgaagcgggacccctagcggcgggcaaacccgggggcgaaagaaaggnnggggcgggggaagggnnnncggacccccggcaggaagaaaaccccccaaccaaggccgaagcgagggagggcaacccgagaaaaaggagccttctccgggggggggcccaaagcaggggccggggaggagaacaccaccgggaggaggaaaaaaaccgcctaccacgccggaaaggggaataa

SEQ ID NO: 185690 - DNA, 525 bp, Arabidopsis thaliana
  unsure (1)..(525): unsure at all n locations
ggtggggggggggtcttttagtncaccgcgccgggctagtgggaggtccagggcccgcttgtgggcctgcgggggctcttttcccggggggggctgggccggccctagcatttcgtgtttggtctatgttaggatctttttcgagctctatcggtgtcattggtctggggaggctacttgtactggggcggtttcactgtcattggcgggtgtgtggagcgggagagttttctcttttttgggggggtccggaagagccggggtactggcttcttggcgggtcggctacgtgctaaggttgtgtccggttgatgtagccgggccttggtgggtgtttttgggttcttttgacattatgggcgcggcatggctcttggggggttccatgctgttttcgtcctttgtctgcaggtggtagcttaacggcgtcaggcgggtactgtgtgcggtctggcgagtgctcgatcttctccgcttttttgggttttgtctagggtactcgggtcctggtgggtcttcgtgacg

SEQ ID NO: 185691 - DNA, 262 bp, Arabidopsis thaliana
  unsure (1)..(262): unsure at all n locations
caggcacgcgagcaggagcggggaccccnagagggggcgaccaacccgttcggtttaaaaaanttaaaaggaagaaaaggngatccccgagaacacgccgaataacagaggtcgaccacaagacaaaaaagaaaggaccacacgaaagataggcggagaacaaagacggggcgtgactcacagaaatcctttacacaaaagggggggggacacaaacagccggaaaaacgctggaaagaaaaaagcccagatgcggagaaac

SEQ ID NO: 185692 - DNA, 723 bp, Arabidopsis thaliana
atgagggggacaggtggcccgcctgcgggccccggccgggtctcagggggggaccaaccgcggcgtttgaatcattgagcagtaggaggaactcttgagtgacctgcttttagactgtcctaaataaaataacaagggaagtctcaggacatggagtgggcgctgcgcgggaatgatttgtgcggtttcttatataggggggcggcgtatccgcgagggatgcaggacagcggatagaggatccgggaccatcccggacacataggatcggatctgagtcgcaagagtttactcccggttctgaggaaaaatcagatcaccactttgatgtgtgggtagctagatccatggcagtgggtgttatgtgtctgcttgaataacagtagcatgtgacgcgtagtgtgagtcgctagtactatggctccggagccgccgcgagtagtggggcatcgctagatcggagacgctgtaatgggggggtggataagacgatgccggggacaagtcaacagtggctgagcgtgaatggtgcccgttggagcgatcattcttgataggacgtatttcgcgccgtcgtgcaaaggtgggagcgcgaggggttacactgtggcggcccgggaaatgaacaagagataaagaggtagcgtggtagtggggagggctaagaaatgaggaggtggagaggttgatactctttgcacatatggccgggcttgaagtgac

SEQ ID NO: 185693 - DNA, 281 bp, Arabidopsis thaliana
  unsure (1)..(281): unsure at all n locations
ctatagcctgacgaggacagacccaagcacgcgaacgtaagccaggatcccctagagcgggcggcccaaccttttttttttggaatttttaacaccgcacagcagagnnnnacaggacacacacggcacaggccaacacgccacgacaagagcgcagagcgaatcaaagaggaacagcaacaaccagcagcggcaaggggtttccctcgacaggagggcagaacaggagcgcgaggggtcaaaaaaaaaacaaacgcactattaaacactcctccctgaaa

SEQ ID NO: 185694 - DNA, 368 bp, Arabidopsis thaliana
  unsure (1)..(368): unsure at all n locations
atgcacgcgtacctaagcgtgggatcctctagagggggcggcctaaccttttttttttttagttttnagtgacgcaggtgccccnnnnnccaaaaccgcccaccagaaaaatatacacaaaccgccaaagggggaccgcgcgaaggaacggaagcgtagagcacagaaaggagggaagcaataacagactctttctaaagaaagggagggagcggggccgcgcaacccccgggaggcaaaaagaaaaggccctggttggcgaagaatgggcgccccccccgccgcgaggaagtggnatgggaggagagcgacgagagaaggggccgcggcgccggcncgcgccggacgcgacggaccgcgacgcccgg

SEQ ID NO: 185695 - DNA, 446 bp, Arabidopsis thaliana
  unsure (1)..(446): unsure at all n locations
cctgcaggaccgggccggaataccacgggtcgtcccacgcggtgcgngaaagcccgactaaaccagaaagacnaataaaaaaacctgggtgaangagaagaacagaggggagagccaaagaaaggagaggaacggggcgcggccccccgcaacgcaagaaagacccagcaagagggagaaacagagaaggacaaagcagaaggagggcctttcttttttcaacagggggggggagaaggaaccaggcaggagacacgcagaggagagaacgcgcacacggaaaggagagcaacagagcgcgggacgagcccgcagagcagccagcacaaagaaagggcgggaagcccaagagacaaacgaacaaacagcgaggaggcgaccgcccagagccggacgcagacgagccgcaaagaagaagagagaacacacaggagggccccaagaac

SEQ ID NO: 185696 - DNA, 497 bp, Arabidopsis thaliana
  unsure (1)..(497): unsure at all n locations
gcgtacgtaagcttggatcctctagagcggccttccttgnttgtagaaagctcttttaaaaaaaaatccactccacattcgcaagttttttatctttaatcctgcgaaagggatttccaattccacaaaaagataggtttttaggaatggaaaaggttccttaccacgaaaaaaaaaaaaaggccttcttttgtcttggcaacagggaaaacaaattgttaagcttttcccattggtcgggaaaaaaactcgcacttttataaccgatatgtgggaaaaccaaaggtattggtgtgttatacccgaaaaacaaaacacttttgttggagaggaggcgaaaactttggcaacccttccttttttaaaccgtttaaattccccacagagtgttccatgcacatcctagtttgttgacgtgctgggagaaccagacgcgattttgaaaagggcggaaagtagtcgtttaaaggagtttttacccagagtttgacttaacg

SEQ ID NO: 185697 - DNA, 481 bp, Arabidopsis thaliana
  unsure (1)..(481): unsure at all n locations
ttgcccccccggggaaggcgcgnnngaaaaaaaaaacaaaaggggnccnaaaaaaacccacccgggaaaaaaaacaaaaaaacaagggggggcaaaaaaaaagaccaaaaaaggggccccccgaaccaccaaaaaaaaaacgcaaacaaaaaaccaaacccacaaacgtttttttttctgtggggactgtttggaaccacatttttcgggtttctcctcaaagaaagaaaaagggcccaccatcccccctttttttttttaaacccccccccaaagaaaagagggtgtttttttggggaaaaaataataattttgtggggcctttttttttttgccccccaaaataaaaaaagagcggtttcttttggtactttctcccgaacgccaggggggatttttaatccgggggaaacaccaccaaccggcggctttggccccccctcgtgggaaggggacgccacccccacaccacaacaaaaaa

SEQ ID NO: 185698 - DNA, 983 bp, Arabidopsis thaliana
  unsure (1)..(983): unsure at all n locations
tatagggcaacatgttacgcctgcaggcaccgggcgcggattttccgggtcgggccccgcgccccggctgaagaccattctttcatctgaagaagaagaggcgcttctctgcttcaaatccgtgccttcgctctctcctctttctgcntgctcttccccgccgcccctttaaaatccccggctttcgcttttttttttttgaggggtgggcccaacccctgggggctccaaagacaaaatcttccttagggctttacagcttgacctccacctagggaaaaattggcgtggaaggcgcgctcgttttgggcgggaccgggccttccccctgaaagccagggggaaccccaaggccgtggggtgctggttttccaggggatacaccacccgcgggagtccaaagagacctaagagaaacccgctctttggaattggggctggnaatgaaacctcgcccaaaaagattagcgctccccgagagaaccttcgggtgagatagccagaacaaaggggaaagagggtcccggccccccttcctgagagaagaaacacccnagggtttagcgccctccgngggggcggggttttgggattccttttttggaacgtcttctttgggggcgaagagccccttattgtcctccatcgccccctttggtttgggtgttatccccaggcggggttctttaagaaacctttggtgaaagaaacaaacaaaaaaaaggggcggcctttaaggagcaagttctctccgcgggntgcccacttttttcttgttggcgcccatagcaattgcggcgcccgtttccagtggggggggagaaaccggggccccccctattgcctgggaacaccccttcgccgggggtatagaaaagcgccgcgagcctctccaaaggggcgtagggagagggccccctgacgccatgcgcgcggggggggtcgcccggccgctttgagcgctggccctttttttttttctc

SEQ ID NO: 185699 - DNA, 1015 bp, Arabidopsis thaliana
  unsure (1)..(1015): unsure at all n locations
aggcacgcctgcaggagccgggcccgaatattaggggcgagccagcgcccgcactctctctctctctgtcggacagagctttgcggctctccctctgcgccaggcaaagaatcagagcacgggcggcgcctccccagaacccggggcatcgatcgggaataaaaccagaaacgcccaaacccctcttgaaagggggggcggncccccccaaaagggaggcggcgggcccaaaacggaggcttaggcccggaccggggtccccaacaccccccggtaccttggggcgcaagcagaaaaccccaccgggggaccaacaaagaaccctcgcttacaaaagggggtcttccccccaaccagcgaaggggagccaggatgaccccacaaggcgcggaaccgaggaaagacccgcgcccacaacgcagcggggcgggagagggaacaagacacgaggtggcggcgggcgcgaagacctccgcagcagaaagcgggtcgcgcgagcccagccggtggggggcgcaaaagagacgccgcgctggacccccaaaggaggaaaggggaggcgcccctcccccaagcgcagggcgcgccgcaagcgagcgccggcaccgaccacgggggtgggccgcgcgggggcgggcgcgcggcgcgccccgcgcgccagaggccgcagaggaggccgccccgctacggagggggggcggcgccccgcgaggcgccctgcgcagcgaaagaaagaaagagacccaagggggctcaggacgggaagaccgcagcagggccaagacccgcgcgcgcgccccgcgccctcccggcccgacgagccgcccctggggaacacgaggccccccgccgctgccgccgcgaggagggggcgcggcgcacgcccacccgcccgcccggcggagcccccctgggccccagccagcgcccccccgccgggggcgccaaaggaacgagactaggggccggcgggacaaggaagagcgcgccggacaaagaagaggggaagagggag

SEQ ID NO: 185700 - DNA, 485 bp, Arabidopsis thaliana
  unsure (1)..(485): unsure at all n locations
tacgtaagcttggatcctctanagtggccgcccttggtttttcttttttttttgagtgaacttgatttcccaaaaatgcattacaaaaatctcagacgtgtgtatgaaaaaattcgcttttctttcctaccaaaccaaaatttagcccggagaattttaaattaagctaataaaaaaacaccttttttacaaaggttgtttggggcatcctcccctgataataaactaaaaacaccgggggtttggcttgcggggggcaaccccccccaaagcggctcccgatttttgtgggaggggggaaagtagaaaaaaaaaantccccccccgtttttccccccccggggctaagaagggggcttccccccacccaaaccatccccggggctggaatttatcttccccaccccccggcggggaggtaaacaccctttttaaaaaaaaaaagaagaagcccattttcgcgccgccgggttcttttttttggg

SEQ ID NO: 185701 - DNA, 674 bp, Arabidopsis thaliana
aaaatcctcccttcctttgtgtctacttacctaaaccctcttctccacttggtgtctttctatacttgcccttatgccgacacaacgggtttgtgttttcttcaaggcgggggttgttttcttctggttatctacagaagactggtttttaacccggcccccgggggcttggtcgggttttcaacaagcttggttacccgacttggccggtgtttatttgaccgggccaaacgggctttggttggccaaccgggtctctggggcgtttttttgtcaactttccggggggttaccccggtaatgctacgcgggaccatggttgaaaggagaaaatctccccgaaaattagccccggaaaatttgaccccggtgggtgaccaaaaaccggcttttgggaatggggagttgtggaatcacaatgcgaaaccccggggtttttagaaacaaaaaatctttttaaagaggttggacccccaaaccacaaaccttttagagaatttggggagttgaaaaggtgggtttttagggcgctgggatattctacacccggggggttaaccccctttaaagagggggcgagccccgtttcccccccccaaaatggaaaactttttttggtaagaacaccgtagataccttcttactcgcggcgacggcccccctgttgggccccc

SEQ ID NO: 185702 - DNA, 523 bp, Arabidopsis thaliana
  unsure (1)..(523): unsure at all n locations
ttgggatcccttctanagtctgcgcccgccgtgggggatggcctatatataaatattattatttacttttcttttctttgttttntttcttttcttttctctccccctcaccccacaaagaaaaattttgtcgcggcactcccctcatgctttttcaaattctgtttttgggcgcccggagaagaaatattgttagccctaccggcttttttttcctctttccgcgagattgtagaggcccctcttataaaaagggttttttcccataaataaaacaagcggtgagagcgccccccggctgggtgttttttccccttctttaagaaaaagaaaaaattattgttgttttgttggtgcggggcgcggggttcacaacaataaaagaagagggttgggcggttttgtgcactcagaaggcggagccccccccggggggggcgcttgttgttctctcccccggggcgcgggcggccggccgcgncgggcagtcgtcccccccccgggcccggtgtcggggatgggg

SEQ ID NO: 185703 - DNA, 211 bp, Arabidopsis thaliana
ggggggaacaggcgcggcgcgaggtgggcgccggcgcagtctttacaggggggggcaaaccgtgtccccgatatcaaaacagacggcgagaggacatgtcaagccccgtgacaaagccgagaggcgttcatgctcatagggagacagattagaccggcggccgtagagcccaatccattgtcagaggcgcaaacagcgaactcgagagatg

SEQ ID NO: 185704 - DNA, 136 bp, Arabidopsis thaliana
gggcgactagggtgtgagccctaaggggatgtccagagagagaagcttttatacagtggtccgccgcactcgcatgtccggtcgcgtcgtgtgcgagccacgaccgacagagatacctcggcctacgccagtactt

SEQ ID NO: 185705 - DNA, 894 bp, Arabidopsis thaliana
  unsure (1)..(894): unsure at all n locations
gggggggcaccaccgctcttcaggagagggggggacccccggaagaagnagcgcgccggagcgggggagacaggaagcgcggaccggcgcagaagcgccagagggccgccgcccaccccgccgcaacgacgcgagggagagggcgcacgcccagccgcgcacccgcgcctcttttttcttnagggggggggcggcccgcgccgacgggggggccgtggaaacccccccgccggccgcgcccgggccccgccaccgttcctgggaacgagcacagcccgcccccccccagatgcacccaccgccccactcccccagcaagagcgcgagagcgaagcccgccacccccagcacgcgggcccgccgcggccgcgcggagcacgagtggacgcgaggcacgacgagccacccgcgcgacacgacgcgcagcaaacgcccggcaaagtgaccgaacgcgaaacgcgagaagaggaggggagcgcagggcaggcagatacgacaagcagaacaaggaacgcgcaagcaaccaacagcaacgcgcagcgcacacagagccacgaatgaccagcacgcagcgcagacgcccacaacagacgccggacgcggggggcccgagagggtgtgcacagaggagacagagatgggaggccgcagcaacgcacgaagaccgaagagagagacaacgacaaaacgaagagcggagacgaaaggaaacgagccgaccgccccacgtcagccgcgcgaccgcggcaccgagtaagagcgacagcacggcacagtaagcggcgaggacaaggcacccgcagaccaggacaccaggcacggagacgcaccggcacaaagaagcgcgcgaaaacagagggcaggacggccacgctacgggcacagagagcgagg

SEQ ID NO: 185706 - DNA, 475 bp, Arabidopsis thaliana
tttttgacgtaacctgcacgcgtacgtaagcttggatcctttatttcgggcgcccgggggtatctattatataaataatcttttttctttattttttcaccttctatctttattcctttttctccccaacaaaagggtggacattaattaaaagaggggggaaagatttttttcccccacaaaagaaaagaatctattcccttttttttaaaagagaagatgggaatctttatataaaaatttttaaaaaaattttttttcccccctcttattttttccccgcgggagaagaaaaaaagaaaactattccccacctctcacacatgttttcgaggatttttgtcaccaccacacaacacaggcgtggttgtgtctttttttttggggatgatttcagaccccccaaaaaaaaagaaagaggggccccattaatagtttttgattaaaaagggtcttcgcgtcggggaaccgggtg

SEQ ID NO: 185707 - DNA, 479 bp, Arabidopsis thaliana
  unsure (1)..(479): unsure at all n locations
aaggggaaagacccagccccccggaggaagaacgggaccctttaattttagcccgcccgggggggaagagcctttttcaaaaaaaaaaaaaccaccccactatcacgagaaaaaaaaaaccaagggcaaagaaacgaccaagggccccgcgctgggggggcgagaggttattgccccacaaggatcaaaaaaaaaaccccacgcaaggaggacgaactgtagagaaaacgcgcacactttttttttcccggggggaaagaaatgggncccccccctcgggcgcggcaaaaaaaaagtagcaagccccccctggcgggccggccccgagatcttcccccccccagccgcgggaaaacctatctcacccgcgggtgaggaagagacgggggggcgcagaggacgcggcgtaatgcgaacagaggggccatgaagttatgccggggggacgacggcgggacgagcaggccgccgggcccggc

SEQ ID NO: 185708 - DNA, 216 bp, Arabidopsis thaliana
ttgttctggagttttcgtccccccccccccccccacacgatgaattttctggggtctgtgttgcagcttctttgtttaacatctcgatcccccacctctcgagtccttcagactgtttatacatcttcacttgtagctccctcatctcgatttcaccctgtctcttcccccatcccccgttgatcgcggagtctcatgatctctttctcttctcaa

SEQ ID NO: 185709 - DNA, 254 bp, Arabidopsis thaliana
  unsure (1)..(254): unsure at all n locations
tcactctctttggaagctgtccctgcggtccggccggattccgggcgcccaccgtcgcgcatgaagaatatcatcatgttctttgctagcgatctcttcgtggttcattggcccgtgctgctacagagagttctcantggtatctcattgctaggatgttaaaagggacttgtntctgcttcgtgttctctctctatctctttgtttccattgacttattgaaaaccatgccattgcgaaaaccttataaaatt

SEQ ID NO: 185710 - DNA, 824 bp, Arabidopsis thaliana
aaaaaaaaaaagcctggttggtgacaccccccgacctaatataggagaaccaaggcacccctgcaggtacccgggccccactttcccggtgcgcccaccccctccccttgtttaggttttttacaccaaaaattgaaaaaaaggggtgccgggggggagcttaccaacacaaactttcattaattctaacttcttggtttgcctctaaaggggcatgtggaagggactttttttcactttacggggggccccccccttcggtcaacattttatcttacacccaacacaaaattggaagggtccttggaaaacccaagctcgttccccccctttgtggcacccccaaaacggcatgttttctttgccctccccacaaattttttaaacagctcggggagaaaggccaaccttgggttccccccacccacaaaaaaaaacgccgggggccggagaccactcctccccaacacaacacgtgggtggagggactccttttagcccccccgaagagaagctctgccgcccctctccttctcttggtaccccaaaatattcccccccaaccactcccccctctataaacagggaccccacccacccccggagggagtctcaatccccaccccgcccccttgacactaacaacgcgcccagctaccctgcgacccccctctgggcgcgcccccccccagggcctcctgcaaggcctccgcgcgccccccaccaacaagccttctaccccccccccgctatctagctcttaaaccactcgcccccccgcccgggcagcatagtccctctctcctctcgtaaaccccccaccc

SEQ ID NO: 185711 - DNA, 342 bp, Arabidopsis thaliana
gacgtcaactgccgcgtacgtaagcttggatcctctagagttgccgcccttggttttttcttttgaactgaacaaaccagtttgcatatcaagtgtgtctgatgataatacagatggttgacgaagataaaaattcacaatataaacagaggggactgacaaactaaaaagagttttaaagaacaagaaggggagtactttttaaacttggtggtggcctgaaagggcaatttcctttccctaaaagggtccttgggatgccccttacccgggggcgcgccggtaaaacggggaattccggaacggggccctgaatggtttcccttttttccttagaggggg

SEQ ID NO: 185712 - DNA, 523 bp, Arabidopsis thaliana
  unsure (1)..(523): unsure at all n locations
cccggggggaagggctctttttaaaaaaaaatactatttttttttttgtgggtttcccggggcccggggggcgccgcgagccgcgcacacaggataagcccggcccccccgcccaaaaaaaacaagaccgccagcgcgcacggagggagtggaagggtggtggcgggcgtttaataattaaaggaggttgttggggcccaccccctcgggggccgcgcaaaattacttaaatcccctcatgggggtggggtgtccgagcccgcccgcgccgtgggaggaacgaccngggaggggggggtcggaaggacgagagtcagcgcgtgccgggggtgggagcggtatgcaaggggggggggggggcgctcgagggagcgacgagcgccacatcgcgagtggggccggggcggggtgtgctggggtgcgggcgcccgcggaggggggggggggcagcgaaagaaagagggggggagtcgtgggggtgtgtgccgagcgggagcggagccggcgcggggggcgcgcaagg

SEQ ID NO: 185713 - DNA, 507 bp, Arabidopsis thaliana
  unsure (1)..(507): unsure at all n locations
atgacgtaaactgcacgcgtacgtaaacttggatcctctatatttgccgccccgggataatcctattntataatatttttttttgagacaaaagatgaggattaaattacccaaacaaaaacaggagtttgatacaagagccaccaaattaacccccaaaggttggcgaaaataaattttgtaaataaaaaaaaaaaaaatttttctttttataaaanatttttttcatcaaaaagagaaggtttggaacactcaaatttgttcgggtttgcggggaagaaagaatacatttaactatacccgcttttttttttttaaatcacccccccttaaggcgctaaatcaaatttggcttcgtgaaataaggagaagggagcaaaaaggtgtaaaaaattctccctttataaaaagtgagaaaaaagaaaaaagccttctcctttttaaaaaaaactcccttctcacaaaagggcgcacaagatataaaagattgtgttttttataaaaaag

SEQ ID NO: 185714 - DNA, 488 bp, Arabidopsis thaliana
cgcgggggggtgaaccccggccgcagaaggggtgacggaaggtggacgggcaaggtagacgcgcactacgacagtgcggcgggggcctcgttccgacaggtgtatgggagtggtcggcccagccgacattcctgacaattttttttttgttgggggggggacgaggccgcgggggagaccgacggggtacgcggcctcgtggccctggggggcgggcatcgcagcctgtgggcccgagcccaccaccccccgcccccagtctggccgtccgcgccacacccgaatagggattaaccatcagtgaccgcgcgcgcaacataatgaggagagcgaaatgcatccataacaagtaagaaagccacctcgcaccgtagcccacacaggtaggtctggtaggcgcggagccggcgcataacccccaaacagaaaagagtacggagagactaaatacggatagggacaggacatacataatatagtagagaata

SEQ ID NO: 185715 - DNA, 375 bp, Arabidopsis thaliana
  unsure (1)..(375): unsure at all n locations
ttgagggggagaacgggcccccgccacggagagggccgagaacccatttatcgacggcggggggaaagcggccctaataaaaaattcnctcccccatcgtatagtcttctatcctctcgtccataaatgggcgggcgcgccccctaagaggacgggtggattcgtcggagggacatgtggtaggaaggacccgttctgacgagcatccctgttatagcgacccccagcgctttttttttctttcccgggggcttgttttggggacacacaccgacgacgggcgtgtgccataaaaatactaaaacacgcctcgctatttttctgatgtcgtggcgcgcgcccccccctcgttctaacggtttgtatctgccgcac

SEQ ID NO: 185716 - DNA, 567 bp, Arabidopsis thaliana
  unsure (1)..(567): unsure at all n locations
gccccccccggccgccccccccttcacccccgccccgggaatacttggggcgccccccccattgtgggaggaaccccccccccgctttaaattncattcttttattttcgcccctgggggaagccctcttaaataatatcctcctccacgcggggggaccaaaagtcttggcgcccgcggggcatttttttcattagcagaggagtgtttctcgttttttttttttctttcccgccgcccgccgtgtttttttggaaacgcggcgctttttttctacgtgtctgatgggcccacnctccgcgggttttttaaatgacnatacctccctttttcctcttctccctccccccccccccggcggcgccggccccccctcgcccgttcttttccgccgcgcccccgcgggtccctccacccgtgcaaggtgtctcctcctttctgtctctccggtcgtttttttctgtgtgcttccgccgtccttttccccccccccccgctcgtccgcctgtctcgcgtgtttgtttgtcgcgctgcgctgagtctccttcacctctcctgcccccctcc

SEQ ID NO: 185717 - DNA, 147 bp, Arabidopsis thaliana
cacccacagcagcttttctaaccagataaaaccacgtccaccaacggacagcgtggtgcccgaccaaagatgtggtcctacttcacaagtcgctctctctgttgtgatactggccacaggtccctcagatttacaaggcccgaggaa

SEQ ID NO: 185718 - DNA, 677 bp, Arabidopsis thaliana
cgcttgcgatgtaccggacgcgcgctatcaggggcgggccaagcccgcctaaacacatacttcacggtccaccgttagcttcagttcccaattgatcttctgagaggttcacaaccgcgcatgccgacttaccctaactcataaacccatatagtccaaaaaaaaacagccaccatttctcctttctggggagtgggggccccccaagacgcttttggaaaaaaaacatcacccaggagttgagaatgactggcctctcgacttcctcactgccccctcctcgttcttccctacccacccccctaactaattttttacatacgtgtccacgcgccggaacaattattgttaccagatcttcatccgcccttaggatttcacctctatgccgacccattctaacccgacgatgtggccgcccgccctcctgcgaaaaacggatacacttgcgttgtcaccacaaatgtaaatacagccaggcgattcatcagctcccaagcacacaacgaacccagcgagacgcttgcttcttaatatgatattaaccgcattgttaactagaacccgggcacgcacgcaccctcatgaacatctcacacccaaaccacccgaggaccacacgaaccacgcacgagtagttaggattgattaatgaagttttatatacgcttttacgc

SEQ ID NO: 185719 - DNA, 600 bp, Arabidopsis thaliana
  unsure (1)..(600): unsure at all n locations
cgacttaattatggaaacctggtacgcctgcaggtaccggtccgctatttacggggcgacccacgccctccggtggtacctaccatgttatgacttcatattgttcaaccccgaggactatggataagagctctatttcatctgcaaggcattagatccttttgtcctttctacaaaagctaaaaaaatttgtaaaaggatcttttgttgaaatgggggggaggtcattggaaaaccggttcttttcatataacctatccggcttaaccaagggttaatccaacaaacccaaaatttttttttcaaaaacgattttttccccagtgatacaaagagagaggggattttcatnttttgtggaaaaaaaattcatttctcctcggagggggttgcgggcaaaacccattttttattggggtgtgggggtttccttccaaaaaaaataggtcccctgcttggagggccttggaaacatttttgcttactttttgcggggccaaaaaattttcacaaatttttttttataagggtataaaaagctccaccccccgctctttggtgcggattgtggggtcccccaaccaaatacaatgtggtaaa

SEQ ID NO: 185720 - DNA, 138 bp, Arabidopsis thaliana
ttttataactgtccctgggccgccgattccggcgcccaccgtcgatgtaagtgtggattattgtgttgtgcagcgctagctaatccctaagttttctctctccgggaggaaatggatgttgaaaatcagatttcgatt

SEQ ID NO: 185721 - DNA, 649 bp, Arabidopsis thaliana
gaccccaacaaactggtttacttgatcataaatctttgtttcttttttttacttggattttttttaaatggcccgtacctctaactctgagttctgttggagaaaactgcctgaaaaatgttaacaagacaccagaaatggtctcacggtatacggggtgcacacaacttctccagtaccaatgaggatggaaacaccttgccatggcatggatccgaaaaccaaaagtcatgttccccgttgggcggcgaactctgcttcctgaagttagagagggatataccgggagaccaaatatcaggtggaaacatcaagggtgggaaccctataaagtgccaaaaagcggggtgagcttaaaaaccccacgcctttaggctactaactcctgaaagaattcttttttgccccctggccagaagatatgcttgcagggcttggtaaaaagaaaacaattttaaattcacttatttggtaacaagagacgggtctgaagtaaaaagttgtcacatctagctaagccttaaatattttggaaacgagaccaacccctgggcagaggcaagaataattaagcctaaacccctgattaagggggaaaaaaaaagtctttttaaaaaatcccgaaaaaagtttccggtaaaaaatttct

SEQ ID NO: 185722 - DNA, 763 bp, Arabidopsis thaliana
  unsure (1)..(763): unsure at all n locations
gacacagcacccagccgcaggccgagagaagagcaaagccagaagcacgcccaccgcacacgaaaaaaacccccctcccacaaaagagggcgcccccaacaccgcaccacagccacaacaaaaccaccccacacccccgcaagcgagcacacaccgagaagaccagcggcacgcccccacccaccgaggcaccccgccgaccacccaacagagaaaagcaccagagagcccccccgcacgagagcccggaagaaaccccccgccaccgaggacgccaaagagaacacacccaaacacacaagagccccgccgcgaaccccaccccgccacgaccaagaggacaccgagnaacacaccacccacagaagacccaataggcacgaaggaacgagaacgcgggacgccaggaacacaccacaaccacgaaagaaaaaggacccccccccccgccaccaccaccgcaccagagcaagcgacgaccgccgggaaagaacagcaccaaggaaagagacgaagacaacgggccccccacaccacaccaacgaccacaaaaccgcaccccacacgcagccgaaaagaagcgacgcacccagccaacaaccagccaaccgcacacaaacagaacacgagcgcgccggacacgggaggaagaagacgccgcaaacaaaaaacccacgcgacacaacgaaggagaggaagaagagaaccaacacaaagcgcacgaacaagcacgccccgacgggccgaacagcgcacacacgcg

SEQ ID NO: 185723 - DNA, 879 bp, Arabidopsis thaliana
  unsure (1)..(879): unsure at all n locations
ccacgcctgcaggaaccgggctccttttcccgggcgggcaacgcgttccaaaataattaatatatatggggcggaaccctcaccacctgtgtgtcggtgggaacccacacccacaatttccttttacaaaaacagcccctttttaaattaaaatccaaaactccggattttgataaatttcttcttttccgcagaatgtaggacggancaaataagcctttttttaaaaaacaatctccctcatattactgttgttgtttccccccccttttttatacaatatttttatatacaacgcatctctctttttttttatttctcttcctgagaccccccgtctttttctttatcttgtctaatcaaattttgaaacctcatcatactcataagtgacagcaccacttgttcgtttctataatcgactttttatattttgtatgatacacagatatttctcttagaaacgctcataatccataaccctgccgggaacatacacccttacctatttaattacgcaattatctatagtttcttttggttattcctcattttgctttttgtctatttaatacatttttctccccccgttttcttttttttttggggacattatacgcccccccgacccgatcaactgatacttctcttctaacacccaatgaaatgacgaggagcccccataacaaaagcgttagtctattatattagcatgacgcctcctgtcctttcttcttctccgctacctcgcctacatactttcttgttactcttataaaatatcgatctatattctccacctatttcattgtcagcgtctcattgattcatcccgcttcgtattaatttaccccgccctatctcgcacaaacattattt

SEQ ID NO: 185724 - DNA, 422 bp, Arabidopsis thaliana
tttaaaaaaaaaatgcccctcaccgccacccccccaacccaagcccccgcattcgggtgctcgacgtctagcaagtgctctgtccgaattcaccatttccgactctgtggcagagataacaaacgacatttttttttttgggggtttgttgggacacacccatcgcctgcctcaaaaaaaataaaattcccctaaggggaaacaacggggggcccccgcggagctagctggaatccagcgagcgtactgtccatcgatggctcgtgccagacattctccggtaggctatatcagattccgcttcttctatcgatcgcgtcttggttctgctactgaaacgggctgcacagggcgactcgatcgcagccacggattcgtcgattcggtcggtcggggctgaggtaattcctacgccgccagcg

SEQ ID NO: 185725 - DNA, 376 bp, Arabidopsis thaliana
  unsure (1)..(376): unsure at all n locations
gcaggcgggggacgacgcgccgcacccacacaccccacccgcccaccgccgcccacacgcgacacacacccaccacacacacaccgcgcgcacaccaaaccacacaacacggagcaaaccacacgncaccgcgaccccacaaaccaccacaaagccgaccccacccacaccccaaaccacgcgacagggccaaggacaaccatcttttttcaaaacagggggggagaacaaaaacaaccaaaaccaccagcacaaccccaaagaaaaataagaagaaagacgcacagcaagcacgagccccccacgccagcaagaggacacacacagcacagaaccaaacgnaacccgcagcgggcaacgacacaaccaggccaaa

SEQ ID NO: 185726 - DNA, 547 bp, Arabidopsis thaliana
  unsure (1)..(547): unsure at all n locations
gctggcacgcctgcaggtaccgggccggaaattccggggtcgacccacgcgtgcgggtcatttacattgatgatgaaacttagtttccagaaagtgggcaccatccagtgtttgaaagcagtggtaagcacagaaagccaatgggagctacgcttgagtnagagagattaagaaaacaatgatcccaatggttgtctcatttgtagaaaacttcttattgctctatagccaagggtngagtcgggacggagtactgacacaggggacccataggattgagccagtcttaggcagtcccaagtcattgttcattgagacccgtcacactttagtccctctcccttcagcatcattacagcttggccacccgtttcactgcaggcggccgctctagaggatcccaagcttacgttacgccgtgcatgcggacgtcattagctctttctataggtgtcacctaaanttcaatttcacttggcccgncgtttttacatccggtcgtggccttggggaaaacccctggccgtttaccccaactttaatccgc

SEQ ID NO: 185727 - DNA, 145 bp, Arabidopsis thaliana
ggggggcgagaccccccgggaggcccgcgccggaaccgcggggtaaaccgacaggcgcccggacagacgcgaacagaagacgacccgccggaagcgacgaacgcagaggacgaagcgcaccagccgccagacgccgcacacaaac

SEQ ID NO: 185728 - DNA, 458 bp, Arabidopsis thaliana
  unsure (1)..(458): unsure at all n locations
caaacaacgggttttaacaggggggcggcggaggcaaacccaacaaccacccacaagcacgcacccagcggaagcaaagaacgccccccaaccccacagaaccacacacaacaaaagcccccaccaagacgaagacgccggcgagagcgacacaaagaccagcaaacaaaacagcaacacnacgcgaagagcgaacacgcaccaacacccgctcttttttcacaagcggggggggccaaccacggacgagaccacaccccacaaccaccacccacgacaaacacaccaacaaacgcacaccccaccccacccccccacacacccccgcacaccgccagagcaccgaccccaggcacaaaggcccgaccacccaggagggccgcgacaaagcacacagaaagggggcacaacaacaagggggaacgacaagaaccaaaagcccgccgcgcaaaccgaca

SEQ ID NO: 185729 - DNA, 303 bp, Arabidopsis thaliana
  unsure (1)..(303): unsure at all n locations
gccccccgggacgcccaacccgaacaaaaaaaaaccctcgttgcccgggaagactanaagggaaaacaacaaaaaagaacccaccccggaaacgcggggccgaccccggcggcgaggaaccggcgcacaaagcagcagggcgccagcgaccagagcaccccgagccgaaccacgccaccgcacaacagaccacccgacaacaccgcgcgggcagccaaggaccaagacgacccaggaccaacgacacaaccaaacccccacacaaccaccaccggccagaagggcgcggcggacacgcaaaaa

SEQ ID NO: 185730 - DNA, 348 bp, Arabidopsis thaliana
ctcacttttggaaagccgggacccctgccaggtcccggcccgaattccccggtccacccacgccttccgagaacccaaagaagaaaaccaaacttttcaagtccccaccgaaaagaaaacaaaaaaatattgttgttagccgccgaagaaaaaggaatccaaagaagagccaccgaaaaattattgccaatggcaatttattccaccattcaccaaattccattccaccagttccaggttaattccaagaagttaaaacctaattccagaacatggtgtgcaaaccagccaattccggtgaaagccgccgtcttatccaccttgaccggtgcacaaggacctttcatt

SEQ ID NO: 185731 - DNA, 386 bp, Arabidopsis thaliana
aaaaaaaaaaaagaaagggagaggaggggagagaagaggaaaggggggcgggagcaaagaacgacagggcgcccggagggacaggggacggagaagggcgggacaacggagagacgaggattttttttttggggtctgaccgaggacgggaggacggaaagaaaaaacccccccccgcaggcggacgaaggggcacccggagacgccggggccgcgagggcacgcgacgaggcaaccaaacgggagagagacgccgagaacggcgaccaagcgggacgcaagccgggggacggaacggcgacaggggcggggaggaaacgaggcgcgcacccagaggggagacgcacagagacagaaccagaaacacacggagcgcggggagcggg

SEQ ID NO: 185732 - DNA, 471 bp, Arabidopsis thaliana
ctgcacgcgtacgtaagcttggatcctctaaagcgttcgcccttgggggtaatcctttttttttttttcccaagaacattgatttataaaccaatcaaggatgccagagagttaaaacgcaaaaaagagctcaccaaccttgtttcttattggttctttggggggaaaaaaagcccataaaacaaaattcccttttggtttaggagggggaacaccttaaaccccgtttgccggtaaaagggttgcacttggaaaaaagttccccccccctcttgccactcacatttttgtggtccccccacccgggggccctctctctttaaagaaaaacgggaccccaaaaaggaattctttcggcctcgtcttcaagcaggaaaaaaaactctttttccgttacaacccaagggctcccggtttctcgccaaaaacaccaatggtgggcgggggaaaaccccccggggggacaaaaaa

SEQ ID NO: 185733 - DNA, 505 bp, Arabidopsis thaliana
gcgcgaggccgcaagagaagtagatacgctagctttttacgactcactatttggaaaggcgggacccccgcgcggacccggcccgaatccccggtccaaccacaccgtccgggcaaaattggcgttcctctggcttcgttttctcggcgcacgggtggaacacgagattcgccctctctcacttgttccgtttcttcgaaatggctacatggctcgtttctctggacgcctgtttccctagcgcctccattttctggttgggccatggcgttagatctcagcagccaaactaggggactgaatggccagagacccagaggccttggggttagagctggaaaagctgctctgtggcaaactaagagaaggagatcaagaaactctctagctaggactaatggctcccgaacaaggatgaggaccccctccggaagagcgacccataaagcgacgaccagccaagggacgtggagaaccttctgcccgaagggccaaccctagggag

SEQ ID NO: 185734 - DNA, 367 bp, Arabidopsis thaliana
gaaggcgggcccccctgcaggacccggcccggaattcccgggtctacccacgcgtccgcccacgcatccgggtaaatttcgttttctgtgttcggttatgccggccgaaaagacaagaggtggagactaattggcagcaaagcgagtctctctctatatctgttgatatcagccgagcaatactttcggagtgctcgaaaccactttttttttcgaattatcctgtattttcttgaaattgttttctgcttccttataatgaaaatcacggtgaatgagcctccgactaaaactagtattgcctctggacacaatctggatcttgtctttgacatgggagaaactgtgacgaccagcttcaatccca

SEQ ID NO: 185735 - DNA, 628 bp, Arabidopsis thaliana
  unsure (1)..(628): unsure at all n locations
ggcggcgggggccgaaagccggggacggggggggggggattgatgtggggacgggctcccgcgactcgaggggggagaacgccccgcccccgttaggcngggcgccgccgagaccattcccccgggggggggaaggcccgcccacgaaaaaaccaccccccgcggngggggcggggcgggggccncggggggacgcgagcgaccggccacggagacggcggcgcgcgaggacgggcggcggggcgcgcggaggcgcgggcggggccgcccacgcgagcagcacagccggggcgggctcttttttttcggtgggtggcgcgaggggaggcggggcgggcgggcgggaaaaacatgggcccccggtccgcgccgcggggtgcgcgcccccgagggcgggggcagccgtaggggggacgcgcgcggcggtcgcccgcggggggcgccggctgtgcgcggtgggggcgcctacgcgccgcgccgcgcgccgtccgcgcgccggctggcgtcggagcggtcgcgcagtcttgagagcgagcgcgcgggcgggcgcgcgggtgcgggcggtgatccgcgcgggtccggcgcggttgcgcggccgcggggcggtccggcgcgcgcgcgtaggcgg

SEQ ID NO: 185736 - DNA, 561 bp, Arabidopsis thaliana
  unsure (1)..(561): unsure at all n locations
aagcccgcaggaaccggcccgaaacccccgggccgacccaggcgggccgggcacccgacaacacaccacgccacgccaggaacagaaccaacacgaccagaggaggaaagcaacaccccaggagcagcgaaacacaacaaaaacagacaaaccgacacgcaaagcaaacacaggcagaaaaaagcacgccacaacaccacaacacaaacaaaaccgccgcaccaagaaangaaccaacacgacagaccacgaggcgacaaacaaacccaagacaacagccgcacagaaacacaagaagccaccaccaaaaccagacaaagggaagacccaacgcggccaccaaagcagacaaaagccaaaaaccgccacacgccgcccgaacacacacccacaccaccgagaaacgaccgccagaaagcgagcaaccgaccgcgaccgcccacccaacacccaccacggccccgacacaagcagccacaggaaaaggaaaagcgcgaagcacaccgaagaccgagacgccgagacgagaagcgagcgagaagaaacaccacgaacccccaa

SEQ ID NO: 185737 - DNA, 176 bp, Arabidopsis thaliana
aggcccttcctgttctacttcgctcattagtcgccgcgcgcgaggcgcattcttttttttcattttaggacaacaaagtcctttttaagattgtgtaccaaggcgttagaagcagctactcatcttcgcgtgtattcgcttagtatagatgatatcgatcgcgctcgcgcaataca

SEQ ID NO: 185738 - DNA, 137 bp, Arabidopsis thaliana
ttggaggagaggcccccccgctacacgatctttcccacacactctactaggcgatgaggtaacctaacaggcgtcgccaacagcacgcgtcagccattcgatagcgaggttggtccgtgacacgcacaacaccgcgc

SEQ ID NO: 185739 - DNA, 360 bp, Arabidopsis thaliana
agtaccctcagaccgtccattcctgtcgccccgctcatttttaaggtcatgatttgggaatttttacaacttaaaaggcctatcaaaaaattttttataccccaccatattaattaaacaaaaactccccccctgataccttccatttacccaaggagaggaagaaggttttctattcttaaaagcttctatgaacctttagaaaaagggttccaacggccttttcaattcttttttagtccaatttcctttccagaattaaaaacccttttctaagcggatttaaacctacccctttaaaagaaatttggcctataaaacctttttaaattcttcccgaaccaaatataccctttttta

SEQ ID NO: 185740 - DNA, 139 bp, Arabidopsis thaliana
  unsure (1)..(139): unsure at all n locations
gaagctggtcgcctgcggtccggccggattccggtcggccacgcgtcggcacgcgtcnagcgtttctcataacccagaaatcgcnagagctttctcttgtctttgacagatctctcccatcatcgttcgggattcgatg

SEQ ID NO: 185741 - DNA, 474 bp, Arabidopsis thaliana
  unsure (1)..(474): unsure at all n locations
aattttaaacctttctaaaaagggtttcggtttcattttacttttaccatttgaccttccccatgccggacttatttctttttccttcttaggaacaatccccctccaaaaggggaaaaacttttttaatgattcaatcttttaataggtttaaaaaatccagaatttttttccccacaatttattatgggggtggaaaaaaaaaacccgtcattttaaaaaaaaaaaaagggccgctttttaagaacccactttcttccgcttgttcgaagtttattttttttgangccccaaataattcgctggccggtttccaccgaggttggaaaccctcgccccatttaaggcttcaaaaatccttttccgttgaaaaagaaaagcccccatccctcccatatnatcctaagagaaaggaccccctctctctttaccgcggtttggtctcaaaaggtctttttcccctctccttttttt

SEQ ID NO: 185742 - DNA, 478 bp, Arabidopsis thaliana
tggccttgcctggcccccttccttagcctggattcttttgagggggccgcccttttttttttttttttttttttttttttttttttttttttttttttttttttttttttatttttttttttttttttaaaaaaaaaaaaaagggcccttttttccgggttttttgcctccgaaattttgggggtcccttctttttggaccaggaacttttgaggggaatttttccaaaagtttttacccgggttgggaatttaccaaaattttttactttttttgggtcccaaaattcaaaggttcaaacccctttccaaacccgcccgaaaccaaaaatcccaatgggtaaacctttggggcaggtttcacggaaaattcccggcctggaatttggaaccccaataaaacctcgggggttttgttgctgcctcctcgcaatgactttaggggacaaattttactttttccggggtttggcccttgg

SEQ ID NO: 185743 - DNA, 558 bp, Arabidopsis thaliana
ttttggggtcggccgcgcccctccctaagcttggatcctctacaacatgtcgcccttttttttttttttttttttttaagggcaaactgtgacacccttgggggttaagagggagaacacagcttccaaggtactctaataatacttgaacaactcccaaaaaatccttccaagcacacacaaagaggatctcctctgtcgcgccgcagccccaaacaagcttttttcttatgggggggggaaccccttccaccttaattggaaactgcccaaacactttctcagagagaggcctctccttatgccccggtcaaataggagcgctattccttttaaccccctccggtccaaattctctttctcaacaggccaacaaccgctacccgagggaaaagtactataagagttactattttctgaggcccctctccaccggaagaaaaaggtggtttgtcttctgtgccaataataaagcgcgcactcccgataaactcgcaggattgtaaagagaaaaaagggggcgcggggtacatctgatcttgcatggaacaaactaga

SEQ ID NO: 185744 - DNA, 681 bp, Arabidopsis thaliana
ggggggggagccgacaacaaaaagagaggagagccagacgccacgcacagcagaacagccgaccgaaccaccgaaagcgaagaagagaagagacggagacccaagcggccaccccgacccacgcgcagaaacaggccgaggcaccttctcgaaagaggggggggacgggcgacgctcagaagccgaaaacaaaaaggcgcgcccgagggcgcgcgacaagagccagcaagagagagcgggaccgcagcgcgcccccgcgccccccaaggcgagcaagaagagacgcgagacgagggaagacaaaacaaagaacaaagacacaagcccgcaccacagggaaagagcagagacagagaagaggagaaagaaggcggcagagagggcccccaacaagagccgagcgaggaagaacgccgagagaggggagagggccgcgcagcccacgcgcgcgggccacgaggcgcagcacacgagagggacagccgggacacagaccacacggcgcggccgagcaacggcaggcgcggccaacaggagaaagagccgcacgaggaacgagcagggagagcaacagagaaacgaccccggcgcagaggggccgccgcgcccggcgcagccagagcgccgagccaacaaagcagaaaggagcaaagaagagaacaggagcacagacccaaggga

SEQ ID NO: 185745 - DNA, 619 bp, Arabidopsis thaliana
  unsure (1)..(619): unsure at all n locations
gacggcccgagaccgcgatttgggggaggcgcactcgccactcgccactcaaagagaacaaaaaaaaaagtctgggctatggaatataactctctatggcgatttcaggggcgcacaccgtgtcgcgctattctctgtttgcaccttacgtcgagctgtagatgtgaaaggaatggaacaatttaaagaactgcatgtcacgacataaaatgaagaagggaggctaaacattacgccaatagggggacctgggcggtggtactcatgtggggcccacctgccttctccaataaaactgcgccggccggaggtgtacaaccctttaagaacaaagatggtggaattaacctaaaaaaatgagaagaaaatttttaaataacccttcttctgatgtcctgaaaggggaaataaaaggctttaaaattgttggggtgaacttacggaaaaaaaaaaaaaaaaggggcctaaaacacttccccgcgccaataactttttaggccaaaaatacgcgcttaaagngagggaaacgggccaaaacttgaaaacctttcggggaaaaaaaggccccccctccaatccccaagaaaacccctgggatacgcggggtgtcccccccacc

SEQ ID NO: 185746 - DNA, 773 bp, Arabidopsis thaliana
  unsure (1)..(773): unsure at all n locations
tgggaaccggtccctgcggtccggccgattccggcggcccgctcaaaaaacaggaagatgtaaaaaatggactcattctctagtccatatttgtttggagttaagaccgctcatctgtatgctaatcgattctaaatggggtgacctcctggttaaagattagctaagggcttgttcctgtttaccccttgaaatggaaattcatggagggcctaggggttgactaagatgacctgaaatgaaatgggtgaggaacaattgaaaatgttgtaaattaaaaaacatctgaaaataaggggaccttcctgggtcaccaaaagatccttttttgggggaaaaggggttttcgggaagggaaccatttccccttaaaactttttgggggcctcccggatatctgggaagggaagagatccccagggagaggtgagagtttttccccattgtcctaaaaaaaaacccccgaatccccctccncttaagggtttggtcaatttttatttaaccccttggggcaacccctataaaaaaaaggcgggaaccttctggtttggggaaccaagacaaatgttttccttgtttttgaaattagttttttctgggggtgttttgggaaaaaaaaaaagggggcccttaggacaatttatcccggcggcgcggttttttttttaggcccaaataataggggcgggttaaacggggagggaaacccggtgcccaatatgcggggaaacctcttggggggtaaaagaggcccccccctcccctgccct

SEQ ID NO: 185747 - DNA, 490 bp, Arabidopsis thaliana
atgacgtggctggcccgcgtccgtaggctgggatcctttaaagcggccgccctttttttttttttttttttttttttttttttttccgggccaggactttaaatcaataaaattcaccatggaaatagtatatatatccattcctttttaatccttggctctacaaaacaaacgcaggtttccataaatccttagaataacaagatgatgtaaaatggtatgaaccctattaagggcgtaccatattaccatgggttcaacttttatagcagatcatagctcaggccaccaatggctgggtccatcagcaagtttcttttttgtaaacacaagctttctatcagtttcaggcatctccatgtttagagaaaccgactttaatgaattttcctgaactgggtgtttttaaagctctagataacctttttgaagagaataagatcgtcgcggggatgagcttcttctactcgaacttggatttcatctccca

SEQ ID NO: 185748 - DNA, 486 bp, Arabidopsis thaliana
  unsure (1)..(486): unsure at all n locations
ttgacgtggcttgcacccttccttaagctggatatcctttaaagcggccgccctttttttttttttttttttttttttttttttttncaaaaaaaaacctttgggttaaaaaaaaattttcctttcaggtaccattaacccccttggaaactgacctaagggaattccccaaaacccggaaaaaataacctgggcctgacattttaaaacactaagaggtttttttttttaattcacaatccttgaccaactgtttttgggcattgtacatattttcttaaatggggaatgaccgactatccgactgaatgttgtatagtccccaccaagggaccgaaaactagtcctttatcgttacatcaccaaatcatcagcagagtagtagtccgcattaaaacggtccatgtaggatggattgtgtcctcccgtgtctgttataaagagactaacaaggttgggggggacataatcgaatgtggggttgac

SEQ ID NO: 185749 - DNA, 473 bp, Arabidopsis thaliana
gacacgtaagctgggatcctctaaagtttccgccctttttttaagtttttttttaaaatggaccccaaaaaaaggggggcgcagggacaagaccccgggttttgcccaaccacgcgatatatatccccgatataccaggacacctttcccagggaaggctggggggactgaaaaaggaacgaattttcctccttgggtgtggggccacaagagggaataaatccacccaaaagcgccaccctttttttggacggaaaagggatgtaaaaaaaacaacactgttccgggaaacccaaagttgcctcaagccctggagccaacagaacacagccgcattgccccactccccgcgaagaaaaccccgctagcagaggggtgctccgcccccttaaccgactatcagaagagacgctgaataccacctcacctttttaccaaaatagggagagagggtcggtttagcataagcagag

SEQ ID NO: 185750 - DNA, 587 bp, Arabidopsis thaliana
gggcgcagcaccacaccagccaccaaacaaaaaaaaaacccagcacacaccccgacccccccaggacagcagaaaaagccacaccgaacagagacgacaacacagaagcacaccccccacgcacagcaacgagacaaaagcaaacaccaacaacgaaacaaccaccaaacacccacaacccaaaaagcacaccgacgccaacccacaaccgcccaccaccccagcaacagaaaaaccgagcacacccacacaccgaaagccacgcgcccccaccactacccgaagaagacgcgaaaacagaagcagcagaacgcacccgaccacgcccagcacgcacaaccaaatacgaagcgaacgaacccagcagaaacaccaccccagacccacagacccacaccccgccccgcccacccaaaaacaccccaacacaacaccaccaacaccaaacaaacacacacaaccacaagaccgccagaggcaaacagcacgaaccggcacaagacgactacgccaacacagcaaaagacgaaacacgaacgaccacctcaacacagaaaacaacgaaaacaacccaccaaccgacaaca

SEQ ID NO: 185751 - DNA, 688 bp, Arabidopsis thaliana
  unsure (1)..(688): unsure at all n locations
gggaagctggtcgcctgaggtccggccggattccgggtcgaccacgcgtcgaggacactagagacaaagacagctcgtagctacccgtctaagttctcgcagccggccgtctaagcagtcgtagatcacccgttgaacatctcgtagcggccgtctaagtactatcactggcggctaacagtcgtagtcaccctcgagtattcccagcggccgttaatcttccgatgaaattcttcnattccgcggagagttcaaggaggatcatcggagctgtaaaatggggagagttagctagaaggggggtgcttcggggcttctctatctaatgcccccgtcctaattaatgcggagctcaatcttgggtatgctctcctcaaaagtgaaaaagcatgtcttttttgaactaagtgaagaggtgcaaataaggaactcaaataatcgtttgtcctgatatgaatcagaggtgcaacatctaggaccaacccgcctgtgaggcttatttacctgacaaccaaaagtgcatttttttttggggggaaataagcataaatgttgctgccgtcaggagggccctacttttaataacttacggggaggggttccaattctattttcaactttgccaaagtaaacgaacccgggtaaaaattcctccggcctcacgagtataagaggtttcgccactaaa

SEQ ID NO: 185752 - DNA, 623 bp, Arabidopsis thaliana
ctggtacgccttcaggtacccgggccgggatttccggggggggccgggcgtggcgcccacacgttcgcacatttttgtagccgcagaccccttcaattcttcttcccgttggggaaaaagaatttccccttaacctttgggggcattgggccatttgtgatttctggaaactcccccctctttctggtcgggtgaggctttaaacgtggggggggttgaccaaaaaaatcctcgggggggtttcagaaagggaggctcctttaaatagacaagaagggtcctccaaggcccgggggggggggtggacaaactttaagggccgcgcggggagcgtggatttcccccttaatttttgtctttttggagatccaccaccccccccattctctttctcgccatttatgtgtcccccccgaacctggtgtgtttttcaaagaactttattcccggcccctcccccgggggttgggctgttttttcattcccctccccccgtggggttttcggggtctttcctcttagagaggccacccccccggcgcccctttttttgtgtttccccttgggggaacgcaaatattttcttcttttgcaaaaaagggccccccccccccccactcccg

SEQ ID NO: 185753 - DNA, 493 bp, Arabidopsis thaliana
gagttatgacgtggcttgcacgcgtccgtaagctgggttcctttagagcggccgcccttttttttttttttttttttttttttttttttttttttttttttttttttttttttttttttttttttttttttttttaaaaaaaaaaggttttttttttcctttaaaaaaaaattttacaaggtttgaaccttttgggttttggttaaaaggtttccaaaaaaccctcaggggggtttccaggttttttttttaaaacattttcaaaaaaaccgcccacttttttttttaagagggttggaacccagggtgttttttttcctaactgggccaggggggcagttttttttaaggcccttttttccttttcctttgggttccccgacttggtctccttaacattgggttaaaaatacttttggattttttccatcccctttttttccccgccttttttaagggggaggttgaaaaccctttttttgggaccaaaccg

SEQ ID NO: 185754 - DNA, 446 bp, Arabidopsis thaliana
  unsure (1)..(446): unsure at all n locations
cgtaagcttnggatcctctagagctttcgcccttgggaaaggctttttttttaaatacgggcccaaccgcgcaggcgcgcaccggggaaaccaaaaacgatgtcgctgagatcaaacgcacccaagctctctgaggaactatccccacccccggagagcacccgcaaggcagaacaagggagttcctcattgggtgcgggtgaaacacacataacccgcgggaacgcaaaatggttcccgttctgtttccctccggcccgccacaatggggaaggcgcccaccctaggatgaaggccgaacaagggtcaaaaggcgcggtcggctacgcatccaccatgcggccccacccaagagggagcggaccgttcgctatcacagcgaaaaaaccgtctcatcccacaaaaccccctccataaaaggacccacccctgcacgacctcccgat

SEQ ID NO: 185755 - DNA, 501 bp, Arabidopsis thaliana
taaaaatcatgacgttgcatgcgcccctaccttagcttggatatcttttaaaggggccgccctttttttttttttttttttgtttttaaacaaaaaacagggttttttttttttttttaatcggggaaaaaaaaaacaacaaaattttgggaacttaaccccaaaaggcccggattatttttccccaaccaaaaaacatttgccgaaaaaaagttccctttttgggggaaacctcggaattttccgggaggggcgttacacccgtaaaaaaaattcccacaatttgcggaagggtaaaggaaaaatctttggcactgccgcctttagggggggttaagcccttaaggggttccccaaattcatcccacccctattttccttgggttcttttccgcggaaaaaacaacagacaactttcctttaaggggtaggggttttcccgcgaacgcacccccacctttttggatgggccgcttttgtatccccgccttttttaaaaat

SEQ ID NO: 185756 - DNA, 420 bp, Arabidopsis thaliana
gacgtaagctggacctctagagcggtcgcctttttttattctacacaaaaagcgcttcacatatgggaaggatacaaaaaatcccggcgttctacattctctatattgcttttacagaaagaataactgcctgcgtacttatatcgggaggaaaagatttcttctttagcgtgtgagccctaagtctgcaagccttgaagtttctgttgagctcgggggggggatgcgaaaatttgaatcggggaacagacctagagcggacacttggctttaactaatggaggctcttaacggacaaaaggtgaacccaggttggacgaaaaaaatcctctattgaaccaaggtgcaaaaaggggaactttggaccaacgggatgttggttgggaaaaacatttgggaaaacttgactgcaaggtggtt

SEQ ID NO: 185757 - DNA, 502 bp, Arabidopsis thaliana
aactattaggaggactatgacgttgcatgcacgcctacctaagcttggattctttagaacgggccgcccttttttttttttttttttttttttttttttttttttttttttttggggaaacaccccaaggcaggtttttcccggtacttattccttttccttttttacccttttccttcccccaatgaaaccaaaaaaaaaaatttccaaattggttttccaaccgggggccttttttacccaagaattaaatttaattttggtttttggtttgggtcaaagggtttgaaaaattttttcctatttaaaacctaaaaccgtttttaatacccggtttgggtttttctttttaaaaaaaggggtttatgcaacaaattcgggcattaattgacccaaatatttttctgggtttgggaggtcaatccaattgaaagccggggaacttgccgttgataaatgcgcggttggggccaacctaccaccattgtggggggggggtcct

SEQ ID NO: 185758 - DNA, 432 bp, Arabidopsis thaliana
aacgtaagctgggacccctaaaattttccgccctttgtttaatctttttttttcgaaaagattgttccaaaatgggggagagccaaaagcacctttaacgggttaaacgggaaaagcggcctccgcgaattttgaaccctgtcccgtaaaaactacttggactcaaacagacaaggaaaacccccccatttcctatttgggttgattgggacaaaagacaaaaaagactacaagccccgaacattggtatacactattttttattgttatagaggtgaaaaagaggtaaagaaagccaccgcgagaggccttcagtggcaggggggaaggtctttccccgtacgggagctcgtcgcgttatatatccttacatgcgcgaaccatcagagagtacagaagccgaaaaaatcttgacgattcactgagcagaaa

SEQ ID NO: 185759 - DNA, 336 bp, Arabidopsis thaliana
  unsure (1)..(336): unsure at all n locations
cctgcaggagtcccgggcccgaaatttcctcgggtcgagcccacggcgccgccgatatacttggatccccgcttcctttgaccaaacaatatataattctttcgttttgcttaaagttacaccctatattaactcccttccactgggagccttcaccggcgggacccaagggcgggccaagaagaaagaattcgcatctttctgaaggggggggggccataacgattttctacaagcctaaaaaaaaaccgggattnaaaaaaaggggggggagggggttctttcgagagagagtttcctcttgtggccgaagctccggaaagggaccccggggga

SEQ ID NO: 185760 - DNA, 484 bp, Arabidopsis thaliana
cctaaaaatctggggtgacaggccccgccgtaagctgggacctaaaagggccgcccttttttttttttttcggagggaaaaggaaaaaacgggggagaaaaaaacggagacggacgcaacggacccctgcccgagcacaaaaacgccagccacccccccaccggaaaaaccctgtattaagcgaaaccggcgagatttttccggggggggggaacctagatcttatttaccgggggaaaaccctaaatcaccaagcacacaaaatttacaactacccaagacaagaggaggcccccgccatccacaaacccagcgcccttaacacaacagggagaaccccgaagggaagcaaccaaacgaccaaccaaacacacacgggcgccaagacaggcaaacacaaccagaggacaaaccacccaccccgcacacgaacaaacaagatccacacaccgcgcaacgtaattcccacgaaacaacccgttca

SEQ ID NO: 185761 - DNA, 990 bp, Arabidopsis thaliana
  unsure (1)..(990): unsure at all n locations
aaaaaaaaagggggcctgtgggggaccccccccgacttactttagagacactggtacccctgcaggtgccggggccgggtttccccgggtcggcccgggcggcccatcatataaaaattttttaaaaaaacgatgtctcaactggaaaatgggttcctcaccatggcttattggccaattttttggcttgggggtttttttgatttggccaatgggctggggggacctttttttttaattttttgggaaccgcggtggaaaaaaatctttttggttttcaaaaaaaaaaccggtccggaaattggcgcctcaaacccaaccaattacttggggaaagagattctctggccttaaaagacgggtctggatcgctcatgggtacccccaccgggggggtgtcctttgtgtgccggaaaaccaaggagaggggggagtttccccggcgcccctttcttacaacaaggtggtgggggggagacaatataaagggggcgccccccgttgtgggggccatcaagaaagaaaaacaccctcctccgcggctttaagggcgccccctttttttttttataaaacccccttcctacccccatttgctctgcgcggagggggggggcaatataatactcccccaccggggcggggggtggcgggcttggggattcacccccccccccttttcttttnggctgggtcgccccacccccgcgggccgccacccagagggaggaaacggaggggggggtggggtgtgtgtaattttctttcgccctgtaggagacgccccgccccccgcgcttgttggcgcaggaaaaatatcttagatgtgggagagggcgcccgcctttgaccaaactctcgttggggggggagtgcgccgccgacggggattacaaaacatccgcggccgcggggctgggcccccgcgcccccacaaaatttttctgtgttatccagcgcggggcgggggagcgcggaggctgttttccg

SEQ ID NO: 185762 - DNA, 196 bp, Arabidopsis thaliana
aatgatggtctactaggcacatctatcttggtcaactttttattgcagcctcggtggcaagaccggctacctcgcgttctttatcattgcctaaaggagttcccggggtgagggtggaaccctaccaggggcaaataggttcattcttctcttagggacggggaatgtcaaactacagaattttacaggggaacga

SEQ ID NO: 185763 - DNA, 520 bp, Arabidopsis thaliana
aggggacacttttggaagaatcttggaggtggctggcccccgtccgtaggctgggtatcctttaaaggggccgccctttttttttttttttttttttttttttttttttttttttttttttttttttttttttttttccggttgtggcccctctgggggcatttccacccgggggggacccaaccttggagaggtttaaaaaaaaaccatcccaaaaaaaaaaggtccttgtggccccaatgtgccaaaaaaaatcccccccaggctcttaaaaacccccaagggggctcccaaaaaaaaaaaacccctttttttccccccccaaaacaaaaaaccccccctgaaaaattttttttccccggggaagctgggggaaaaaaaagggcgccggggggacaattttccccaagggggggccccttttaaacaggggaaaccccctttgggtttttcccgaaacaaagggggtccccctttggttagcgggggaaaaaatgggggggggaggggggtcctttgg

SEQ ID NO: 185764 - DNA, 565 bp, Arabidopsis thaliana
  unsure (1)..(565): unsure at all n locations
ccccctcagaccgccgactcgggcggcaggcgcgcaacctcggacttcactgccctcttaaaaacccccggcccccaacgctccactggaacccaacacgaaacccccccgaccgcccaacccctcttagggggagggaagnagggcaactgaaaaaacccccccagagggccgcagcccccgacacaagggccccgcgaccaaaaacccacaagcggggaggaagcgcaccaagaaacgaagcacccccgaccaaccgccccccccccaagacccaacgagacccgccccaaaaaaaccagagccgaaccgccgcgccgcccaccgcggaccgcgcaacgaacgccggcgaaaaagccaccaaccgcgcggcgagccccgcgccgaggcaaggcgggagcccccaccccaccaagaagcccaccaccacacagacccaccgcagccgaaaccgccccccaccccccccgcgacacaacgaggcagaagaggccacgagaggcggcgcagggcacaagagtcccccacccgcccccacccacacaccacccgccgcacccgcagc

SEQ ID NO: 185765 - DNA, 785 bp, Arabidopsis thaliana
ctgaggtgatcatcatctcatgtgtttttattctcttgatccacaattttcattttccttccattggcttttcgtattgacccctgttaacatattttgtttggaagaaaaaaaaaaaagggcgcccatatatagagatccaatttactacccttcttcaacgtttagttttttttaggcccctaattcattccctggccggctttttcacgtgggattgaaaaccttccttcccacttattcccttcacacttcccttttccaagttggtttttaggaaaacgcccccactatccctcttcccaacattccccacccttaatgggaattggcccccccttttcccccttttaacccgggggttttgtgttaccccaagttgccctttttttccagcccttcccccgttttttgttttttctttttttctcccaattccgtttttccccaaattttaatggggcctcctttgtgtcccatttatctttccccccccccccccaaacttttttggtgttgtcccatgtggcccccccctaaaaacgttttcccttcgcggggccccccttttatgggccttttttcaaaagaacaccatcccctttgtctttttttttttttataggtttcccttcccccccttttaaaaagcgctttccacaattctccgtttttaaattttcctttttggggggtttttgggatgccccacccctctttttttttatactatattttcccctacaaacccctttagtctttataataaaagattgtttaatttc

SEQ ID NO: 185766 - DNA, 659 bp, Arabidopsis thaliana
aggtaccggtcccgatattccccggtcagacccacgcgtgcccccaacctccggccacattaaccaacccaaaatgggaagagaaacacttttctctctctctttctctatcccctccatctctctaaggttttctttccaccgcaaaaaattttcgtaaataccctcgaggaggagcaacaaccctaagttcttccaaaaactataagtgttccctaaagaccgctttaccaaaacatcttaaaaaaccttccaaaaaccccctttcaaaaatcatccctataaggggggaaatccccaaaaagtaatatttcttaaactccttaaattctctcaaattcaattgggtgaatggggttttttttttccaaatgattgggtggcccttggtactttctctaaatgggaaattttccaccccaccctaaataaaaaagtttgttgttttggcaattaaacaaaaaattaggggtttaaaaaaaaaaaatgcccctcccttaaaaaatggaggggtaaagtttggttcttttataaataaaaattttaatttgtgggttatccgttcccccccacttaaagatttaccaccatccttttaaactccttttcgcccccaaaaaccctatattttatccccttttggagagcctcccctcaaa

SEQ ID NO: 185767 - DNA, 840 bp, Arabidopsis thaliana
aaaaaaaaaaaaaaaatatataaaatccaaaaaaacaaaaaccccccctcaactccaaccttaaaccttaatttttttcccccccctccttttcaaacccttttttaataatggagaggggacccccaaaccggttcaaaaaaatattaaccggctcttgcttttcttttaaacccccccgggggaaacccaacccttcccctttttggttctttggcctccccccccctcccttataaacttttcctttttaaaaaacacccctaaacccccaaaaccaaaacccccttttcttttttttcccaaaaaaaaaaccttttcccctctcaaacccttgggttccataaccaagacaaaaaaaaacccccggcaaaacttttttttttaccccccccaccctttttttttttttcgtctgtgatacccgggacccccaaaccaccacccaattctaattcccccccccccgtttttgatgtttccccttattttccccttttcctcctcccccacaaaaaagcccccccccccccctttccaaaacactggggaggttccaccccctctttcttctttataacaaaatataattcttctctccaaaccagagccccttaaataaaacaaccggggatcctttcttccaaatccccttcacatccaaccaaaatcaccccccgccacaaaaaaaaataacccgccgccccacaacaacacatcccccgcctctaccatactactttttataacccatacacatccaccacccgccgcccatctcaccgttacataaacacctctttctctaatcttcccaatctatccctacttcaaatcaaa

SEQ ID NO: 185768 - DNA, 278 bp, Arabidopsis thaliana
  unsure (1)..(278): unsure at all n locations
tagggaaacctggtccccctgcaggtacgcgggccgaaatttcccgngtcgggcccaggcgcgcccgcataatgtttaataaagcaggaaagaacaaccccctttgattcaagaaccttaaaaggttccgacaaaaaatccacctttttatattgggatatagatatgggtttcaaaaaaaggaggggctcccgtcctttgggggtttttgttccccggggtgcgcggttatggggggaacctctaaagagaaaaaccttccccggttttcttggaac

SEQ ID NO: 185769 - DNA, 525 bp, Arabidopsis thaliana
ttaggtgacctatagaagagctatgacgtcgcatgccacgcgttccttagcttggattcttttgaacgggccgccctttttttttttttttttttttggggtttttttttttttttttttttcccacccttcctttttttttaaaacccttttaaggaaaatggccaaatggggtgccgggtgaaaccaaaaaacccacgttcccacccaaccaatttaaaactttggggcttaccctttttttaaaccttttaatttcaacctcaaaccaggtttaaagggaaccaaaccaaaaggttgagttttagggggggccaaacctttaacctttttaaaaaggtggttttttgttccaattcgaaaccccattcttggaatttttaggctcccaccacgtcaatgggttggggtggagttttcaacatcctgccttctttcctcctaggaccacatgtaaggattccatccactcgcaatatcatctaaaatgcttctgtggctgaaagcaaaaccgtttgtttcatt

SEQ ID NO: 185770 - DNA, 121 bp, Arabidopsis thaliana
  unsure (1)..(121): unsure at all n locations
tagggaaacctggtacccctgcgggtaccgggccgggatttccgngccggccccggggtccgctaaagtttttcttggagggggatggccacagaatgggatggcaaaggaatatataagc

SEQ ID NO: 185771 - DNA, 150 bp, Arabidopsis thaliana
  unsure (1)..(150): unsure at all n locations
gtaccctcaggtccggccaaattccnggtcgccccgcgtccgggaacttcttcttanactactctcttccctaatctgaaggtttataattctacactgaccctatactttttggaatgtttatttctttaaaacagttttctttaccta

SEQ ID NO: 185772 - DNA, 471 bp, Arabidopsis thaliana
  unsure (1)..(471): unsure at all n locations
gcacccttccttagacctggatatcttttaagaccggccgcccttttttttttttttttttttttttttttttntttttttttttnaacaaaaaaaaccttggcttcttattaatggtaataatagcgccggtcacaaatacacacatttggttggaggataatctatttcacagtgggagaagaattgcacacccctataaataaaagactcagtatttgttttttttatccccattcaagggtagaggggggttttgatgtaatgtttaaaaccacacggttttctttttgaacgctgttacagtttttgggggaaacattgccaaaaatcttgtgctaaaattagaacaaatgtggggactttccatttgggtttgaacctgcacaaagagcacccacgtgaaagtgtgttcttttgacccctgggactccaactgattttacgggaaaaaactctgaaaaagcttgc

SEQ ID NO: 185773 - DNA, 604 bp, Arabidopsis thaliana
  unsure (1)..(604): unsure at all n locations
cttatttcatctttcttataacgcctttttaagtttatttaccaaaaagttgtgaatcctttaaaaacataccataacctttactttttaacccccccccctttttaataaacttaaaacctttcaatcccaaaaaaaaaaaaaatatcgggaagatttcttcaccttttttatcatttcccaaaatttaaaaaaacccttaaaaacacttttttttattaaaagattttctcccttatttattaaaccccccctcccccntctttttatattattttcaaccataaaatcctattttttaacccttcttaaaaataaatttaaccttccccccctatttttttaaaaaaaagtttccaaccaaaaaaatttattttccgtgtgtttttaacccccccttccccctcaaaattaataatttttcccaacccccataaaaccttttttttctcttctctaaaaattatttccacaaacaattcccttttattttatcctcatcctttctcttcttttaaaaaaccctacacagatcaaaaatttttttttttctctttttcttaaaaaaataaatatcccatttttttctttaacattctcaatt

SEQ ID NO: 185774 - DNA, 420 bp, Arabidopsis thaliana
  unsure (1)..(420): unsure at all n locations
caggtacccggtcccgaatttcccgggtgggggccgcggccttcgatacaaaaatgggaggaagcaaaggggcccttttaaacacctatttctttcttttttaaaagatggggtgagtccctaaaaaaatccaaaaactcattgaagggttcccccccatctccgnaaattctcatcattttttttaaaagggtgctcggcgggnaaaaaaagggtgcaccttaaaaaaattttgcttcgggggcgtccccccccctttttttctccccccccttgttgaaaaataaaagaagcttgtgtacaagaaaaccttttttcttttccttcttcacgtgtaaactcccccccccctntcttccttgggcaggtgtagaaaaaaagtgtttggtcttatacgcccaccaccccctcccctttttt

SEQ ID NO: 185775 - DNA, 558 bp, Arabidopsis thaliana
  unsure (1)..(558): unsure at all n locations
ctggtacncctgcgggtccggtccgatttcccgggggggccaggcgtcccaccaaacatccaataaaattttttacactcttcttcatgtgcaagcaatgggaaaccttttgttctttgtttcctccccccaaaccccggggaagaaaaaaaaacccccatcccaaaaaaaacattttttttttccaaaggcgttgatggtcncccggtccggggtcttatttattaaaaacaaaagcaacccccccgggtgcaaaatcttttttctctcccaaaaaaaaacaacacagtcccgaaaaattgctttttaattaaaagaaacactccttctttggctggcttcgcttgttggtttcggccccccaaacaaaaaaagcggggggggggagaggatcctctcccccttttaatacccggccaatttaacaaagatttataagggggttttgagaaaaaaaaaaaaacccaccttgccttcaaacgcttgagttgcaaggagaaggggtctttaccataccccttggaaaaccccctttttttgttttttaagagggggggt

SEQ ID NO: 185776 - DNA, 792 bp, Arabidopsis thaliana
  unsure (1)..(792): unsure at all n locations
cgggggcttaaaaaaagaaaaccttcagcggggaatgggggttgctaacccttgttcatccaaaaatacaaaaagttngaaacacttattctccctccccccttattggtagaagggggggctggcccttttttgttttttacctacaaaaatantgtttacctggagggactgaggatctcgcggggcaaaggggttttcccccaaaagctttaagtttggttttacccgggaaaacattcccccattttttttaaagttaatcctgcccggcccccctccaaaagggggaaagttttgtctttaaggggaaggagtgaaaccgggtgggcgtgttttgtttccaaggggggcccccccccactcaaaccccctctttcttccgtgtgtattaaggataaaaaattgggaaatttttttgtgtggtttgttggcgctatagaattcttggggccgccaggaccccgagtatcttttttttgtttcgcaggaaaaattatggggggggggcccatactgttttgttttttgggcgtccttcttgaaaaactataaaagccctccccaatttttccccccggggggtatagaaattttgtttttctttttccccggaatataacttaaagggtggtgggcccccacaattgggggggggcggtgttaaggcaccactattatttcgcggccgtagattttttttttttattacccccacatgttgtgggcggggtgttacatagggagtttaacccccccgtcccctctgcggcgggccctcttcttcgatgc

SEQ ID NO: 185777 - DNA, 301 bp, Arabidopsis thaliana
atttttgccccccggtgagatgccttttatcaaagagaggaatgagcaaaggaggagccgtgcgtcacgcgagtggatagcgagacacaaataaagcagtctcgtaccggatcattctcagatagtgatgtagtagcgcagccagaacaccgataagttttttttttattgaggcggtggcggagcgcaagaccaagcatggtctggcgcagactaatataacactaatagaagggtccgagaagacagaggtgaggcagtgcagtagatgagaattatatcacgttcgttagagaggtga

SEQ ID NO: 185778 - DNA, 365 bp, Arabidopsis thaliana
  unsure (1)..(365): unsure at all n locations
accgagacgaacaccggcgacggcgagcgccagcgccacggcagcgaggcgacgccagccgcgaccgcggcacacggagccggccgccaggaaggacgagcacggacggcagaggagcggcgcgcgagaagagagacaagcgccacacaagagacacgaggagccgcgcgcgcggcacagacgcgaccagcaagccggcgcacgcagcgccccgccgaggcaaacgaggagcccaggagccgccgacgagagaaggaggaccgccgcaacaaagcaggcgcagaacacaaagacgcgcgcagcccgaggacacagcagaaacgagagagagnacacagcgagccaagagagaagcgaagcgcaaa

SEQ ID NO: 185779 - DNA, 333 bp, Arabidopsis thaliana
  unsure (1)..(333): unsure at all n locations
cccgagcgagggcgagacgaggccaccgaacagcagaacaaccaagcacagacgccagagacccccctccaggagcgggggcgggcacgaaccgagcgcagagcgcaaggaaaaaaaaaagcacccaccgcacgcaaacacaacgccaaccaaacccgaagcaccaagcgagagaaagcngacgcagccaggggacccgacaggcacggagcaaagcgagcagaaggaagcacggcacgcccgaaaacccacaaacccaaccgcctacacacaccccaccagaaagcggcgccgagacagacgcacagaggacgagggcaggcgccgccgcgg

SEQ ID NO: 185780 - DNA, 503 bp, Arabidopsis thaliana
tgggaactaaccgatgtttttttgtaccatttgggggattaatccctatagttatggttattatttgagttggatggactagatcagcgtggttcctcttgcactattcgcgccaatggacatagatacttcatacttaagatatttaacatatgctggataccagagaagcagacgaccgaggcagagaaggacaccgacgcgcgtttttttttaacacgattttgacgaggctcaatctcgactaacatgtgcaaactttttatataaggaccaacgttcgatttcgtcatatgtggaacccccgctcgtcactgaccacacgctagtacgtgagcaccatcaccccctctcttctgtatcctttactagttagcccacgttcttaatgatcattcgtcactcaccgccctctaccaagacggggcgcatctcgcttagacttatgtcacacggagactctgaaaggccggaacagcgatcggcatgttcataaatttgcg

SEQ ID NO: 185781 - DNA, 541 bp, Arabidopsis thaliana
cccccgcgcggccggcggccgccgaaaaacccggccgcgggaccgcgagcggaggggaggggccccgcagagcgcgcggagccaccgtcgccgcgcacagcgcgcccccggcaggcgcggcacaagccggacagcccaccgggcgcaggccgggagaccccccccaacacaaaacaccagcaccccccgcaacgccgccgccgccgaccgccgaccaccgcagcaccacacgggaccgcgccaagacgggcaaaggcggccccggcagcccgcccacccgacgaggaggagaccgccagcgcgcgcaacgcggcgaccagaggagcggccaggaacggcgccgcgacgaagccaccgcccggacgaggcacgaccccagcggcggggccgccgcccccaggaggcgacgcgcagagggcaggcgacggccagcgcgcgacccgcccgccgcacccgcgcgcgcggcgcccgcggacacaccgcgcccgcggcggcgccgccgcggcccgcagcgcggagcgcggcgccgcgccgggcccgc

SEQ ID NO: 185782 - DNA, 701 bp, Arabidopsis thaliana
  unsure (1)..(701): unsure at all n locations
cggcccccacgaccaaaaaacccccacaaggggcaggggggaggggcgcccccggcacccgggcggaggaccgcccgccacgcgcaaggcagcagaccgagacccgcccccacgacacgcccccagcccccggaagggaccgcccaccagacgacacccacgaccaaccgcacacccaccgcacaaacgaacaaaacccccccacaccccaccgaaccaaccaaccccgcggcgagggccgcgaaggcaaacacaccacgcgaaaggcgcgcgccacacgcaagaaccccgcaagcgccggggaaggcgaccagaaaggaacagacgcacgaacgagaggaggaggacaccaaagcgcagcaacgcccgcgcgcccacaaaacgacaccaaaaacaaagcccacacaacgccaccacccgcaccccacaggcggagagaaaagagaaaacgcaagccgacacgccccacgaccgccggcccaccccggaggaccagacaggcgccaggagaaaccacgccagcagcacagcgaagatagaccccccccccggggctacagaggcccgcgcaaccgcggagcgcgcgcggaagagcagngcgagagaagcacgagaggaccacgcagctccacaacaccgcacccaccgcacacacggacggagagcccgaccgccacccagccgccgcgggcggcgcgcgc

SEQ ID NO: 185783 - DNA, 670 bp, Arabidopsis thaliana
agaagacagcccacaccgccaccgcgacgcaccaacacaaaaccaagacaaagcgcaaacgcaaagagagcgcacccaaacaaccaagacgagcaagcgacagcacacagacccccccagaccagacactcttctcacaccgcaggggagcaaacacaccaaacacggacccccacaaaaacacaccacacggcccaaacgacccaaagccaccacagagcgcgaacaccgcacccaaccgacacgcagcgtcacaccaacacacacacaaaaagaacagaccaagtaaacgacccacacaaacagcaagccccccccccaccccccacaaccgcacacaaaagacaaggagaacaacaaaccaaccacagacccgcacaacccacacccacacaaaggagcaaaaagaaccaaacggaccagagagcaaagacgcgcacagcccccccaagacaaaaaaagaaaagcaaccagcgcggacccaacaaagcagccacaacccaccaagccaagcccgcgccagcacgacaccacacaagacgaaaacgaaacgcaacacaccacacacgaaacagaaacgacaaaaagagccagaaggaagagaacacctacaaacaggaaacaagggacagaaaaccagacacgcaaagaagcgcacgcagaaccacaa

SEQ ID NO: 185784 - DNA, 918 bp, Arabidopsis thaliana
  unsure (1)..(918): unsure at all n locations
atgcacgcgtacgtaagctgtggatcctcctagagcaggccgccccgaggcgnttttattaaattntttttttttttttttttttttcgccccgcaaaataagtggacaacaataaaaagcgcggggtaccgttatggctcatccctgctcaaacatttggacccggattgggtaagaaaaccggtcttcttccctggggggggggtgggnccttttggcgggcctggagggaaaataggcctaaaaacatctctatattgcggcggggccaggaaaattcaaaatctttggctttccccccattcacagggggtagaccctcccattgacccgagccccaaaaccccttccaaggacatctgctcaaaaaaaaaagcctcacaaaaaccgcccaacaaaaaacaaaaggggggaaacgtgtaaaacacaggacccttggttttaaaccacccccccaatggaaaacaaaagcggaacaccactttcccttttgggggatgtgaaaaagtttagggccccacccaagggcccccacccgaaggatttccttttccaaaaacaaaagcaaacacccnccctgtttgggccctatggcttttccgtgggcaaaaaaaacccctccgggaagacccttataggaatgggcggagagaaacaaaaacgccatgggagagccccagggggccaaaccgccccctgtggagcaaaaaaacacccccaccgcggctggcgataggggctttaacaaaaaaagaaaaacgccgcttttcaaggggaaacaaaatcccccaggaggttgtggccaccacctgggcgcgcttaatcttaaaactacccccccccgataagagaaaaaacacagcgggtaaggttccaaggcgtaactagcccgctttccccacaacataaataaacaa

SEQ ID NO: 185785 - DNA, 683 bp, Arabidopsis thaliana
  unsure (1)..(683): unsure at all n locations
gtacgtaagcttggatcctcttgagcggccgggcttgagccccnaaaaaaaannnnnnnnnnnnnnngnggggattggaaaaaaaaggcttatcataaaacatcttacaggaacattagttattttttcaagaaaattggttttggaggcttaacccctgggacaggaatggcctccttctctaggtgtgagccnccacattcttgggggcccctttaaatatccctcgcttgtcaaaacaaataggcataatccagggtgcggttttctttggtttaagggaccagggtcttctttttaaagctaaactgtgtggattcccccacaaacttaggatcgggggcttttattttttcccctgaaccccaggcttacaccccttaaatttttgggggcccggaactctacaatgggaggcgtctttgttcgggggaaattattaaacccggtttgcacccttgcattatgaaaatttggtggccccgggggggaaaaaaattttggatttttgttcgccccctgggcggtgtgtcgaaaaaaaaaaaaaaaggttttggggtttcacaaaaaaccgcccgggggggccccccggatttccggcccggcccggaggggtaccactttctctatagggggcgattaaacgcgtggcataatgaggaaatgcgggtcctgggggaaaa

SEQ ID NO: 185786 - DNA, 770 bp, Arabidopsis thaliana
tgcccgtcgagctggacccttacggcggcttgcttttttacagcttgtggcttcgatactatgcacacagacattcacggcacagggggatgatatgaattgatctgcaactgtttagaccaactttcacagtttctcaaaaggggcgaaccagaccggcaccccttagctctgaaacctgaaagaaagacagacccgagaacctccgggtatccggggaacccaggaccggatcttcaagaaatgcttttacaccaccccctttttaagaggctactcttcagggggcggggatccgctgagggcttttagggcccacggggcaagttttttcccgtttaaaaaatcacatggccctctctggaaaaaacctcaacaaagtcccataaattggctcttcgaaagactgggaaagttcaccgaccccggctagggaaatgcccccaaaagctaaaacgatgcccaaaaggctgaaatggaatagccccgggccactctatggaaacccctcttttaaaaacctaaaaacccgccttggaaagacccttgggaattacgaaaaaataaacccccgggagaactttcaattctccggcgactttccggagggcccatcccaactgacggggggaaaagggaactgctggccacacgcaaaaaatttcccaaagttaccaaaggccgggggtaccaacgccccacagttaaaccaaaacgagtacccccggggcccccttgagagggaccccggaccggccccaaaacgccgg

SEQ ID NO: 185787 - DNA, 434 bp, Arabidopsis thaliana
agcggggataggggggaaaatttttagccccaggggggcccagagaaccaccccctgcgtaacaaaaaaaccgtccgcattcctcgacacaccgcggagaatgatgaaggacaaggtaagatacggtagcgggcaggtggacccttcagttggcgccccctcgatccgcgtacgggactgtctgctccacagggttgcaggaggagctgagggagtgccgggggggaccgcaaacccagcccaccccccacgtccctaatatattgggacgcggttgaagtgagaaaaatagagacgaagaaatagatgctacaaaatacccgcccgcgaacacgacaaacgggaaagagggcgcgaagagcaagataatggcggtaggtcagtcgaggaggcaccgcggtaggagaagaaatgcctctcattatacatttccg

SEQ ID NO: 185788 - DNA, 286 bp, Arabidopsis thaliana
gtacgtaagcttggatcctttagagcgggcgggcttcttttttttttttatttttcccaaaagagggtgactactagctttttatcctcaacttccacaaacaacagcaaaatctaattaacaaaaatcttggagctttacgtttttttctctaactctaaattttttcaactcggggggctctaactgtgtgggggtttcttaaaaaccccccgtattctctctggaattggctttcaacccttaaaaaaccaatgcaaacactgggtaaaatgtttccatcggg

SEQ ID NO: 185789 - DNA, 465 bp, Arabidopsis thaliana
  unsure (1)..(465): unsure at all n locations
gtcgcatgcacgcgtacgtnnagctggatcctctagagcggccgcccttttttttttttttttttttaattttgattacttaaattgttcttacatcggccacaaagcctaaacattttttttaattaagctggaaatgggaaaacgtgatttcgatttaagagaaactaacatttgcaatgcaaggccaaaaccacatacctgttaattgcgaaacctcatagaacactcaggagcttatgaaagtgacagatttgctctcactggttggaagctccaaccttatttttttgccaaagcctgtcaacgccactgtttgcgatttcatgagacctgacaactccgtgaagagaaaacgcggagaattggcctgcgagcagaccattaccaccatgatgacctaggtcaagctagaatgaacactgaacctttgatgatgatcttctgtaagctggcgagataaac

SEQ ID NO: 185790 - DNA, 487 bp, Arabidopsis thaliana
ggcaaacccacgcgaacgaaaggtatgcatcctaagagcggctcgcccttattgtgggtgatttggatacacgaactgcttccaaaaagggaagatgttgcttgatttattaataacatcccaaggtattttattgaagtgcttgagagaaaccagcccccctatgaaaaagccaactaaaccacttcaaaactaatttcaatttttttgaagggggggcctttcatcatagcctatttttggttaacagagaatgagcttgttccttgcgaacctctaaacttcatgttcggccgcccgtaagataaaaatcgactgcactttgtttgggactactcttgatttctttcaacctcagacaaacgaatccctaccttccaaatttcaaaacccagaattttgcctggattagagtttcgtacttagacctaaataaatcagcatatactgggctctcgatgtttctcgaatgccatattaacaaaag

SEQ ID NO: 185791 - DNA, 289 bp, Arabidopsis thaliana
ataatacacccgaagactgaatacgccaatcaactagaccacacatcctatcttatgacgcattatatcggtgtgttggtgggttgtaacagtgaacattcacgcgagcaaaaatgaagagtatggcaacgaatatttaaccggctcctgtcgatgttatctaaactatgctcattattttatgccgctgcagtcccgatgatttttcacgacaagaggtaatacctcccgcccgatacgtcgccccgcgggggttgaacagaccgagaagaggagagaagtaagtagc

SEQ ID NO: 185792 - DNA, 441 bp, Arabidopsis thaliana
ccccccaccaaactggaaacccctaaaacgccctcccttgtgggtttggtctttttccaaatacccaaaccatctcacaaaagaaacaatttatcctacacccattttatcacgccaaaatcgtgccacacattctcttattacccatttccgacccaccttcgcctcaacgccgcaaagactcattatcccagcaaaacttctctttagggggggggacaataaaacacacatcctaaatcagcttaattccttcgccctatcacaataccctccccccaccaacataaacaaaaaaaaatctaggtccacgggacgataacgatcgaataaaacacatgttgttccataaccctctgcttattatccccccccgcgctagaaatcaccaccctcttgaaattctacaatcccacaacaccaaccccccaactccctcat

SEQ ID NO: 185793 - DNA, 471 bp, Arabidopsis thaliana
ctacgtaagcttggatcctctagagcgtttcccctttgggttatgtcttttttatttaactaaatttatttttacatatatggcaaaatgaaaaatacttttacaacttaatacaaaggcatctttatcataaatttaaacaaaaatatcccattggataattttggggcctaaaaaaacccaaatggaatatttaaaccttatttttatcgcgtgctggaaaaaccccccttattgttataaacagaaaacaccgattaaacccccaaaggaccttttccccctcttttttgacctttttggggggtaacctttaaaaaaaaaataaccggaacttgggccttatgtaaaaaggggtatcacgctggggattggaaaaaaaaaacaatgcgccccaaaaaaaatttccgagaagggggcaggaaaatgggaaaaggccgttcacagaaaaaaaaaaacccttccttggaa

SEQ ID NO: 185794 - DNA, 470 bp, Arabidopsis thaliana
  unsure (1)..(470): unsure at all n locations
cctttttttttttcttttttttttgagttaattctttatcgattttcattgctaagaagactatattgacaaaccacacatcatcttatgtttaagaaccaaaaaaaaaaagaaacccacatacaatctgtgttctacaatactatataantttcctttatgatcagtgatcatngaccatccacttggaaagaataatctaaataatttcttttttggtagataacacttcacctccctttgcgcccgcctaatagtcccgcggcctccctgtctttttacttttctcccttaaagaaaaatctnggttcccttttgttcttccataaaaattcaatggtaccgcactcttaacccccccctctggtcttgcccttaacctcgtactaaaaatttacagcatcccctttttttagacgcctttttttcaagttaattccacccaaaaaaacctttccccccgttttttt

SEQ ID NO: 185795 - DNA, 493 bp, Arabidopsis thaliana
  unsure (1)..(493): unsure at all n locations
gcgtacgtaagcttggatcctctagagcggttcgcctttgggtaaaatcttttttattaaaattatnngnnnnnngggggggtgcaaaactcttatttatttattttcttcttcaaggcgaagtggttataccccaaaaaacaagatttctggcaattatcagatggggaaccacaaaaacccagttttctttttttttttagaatgtagggcacacaaaacttagtttgtgggaggaattttgcgcccttttgttgacaccctctcctccagacgcggcggggtgttttccaaaaaacaatgtttactttcccatttagggggtttggggggaaacccgccccaaagagagccccttaagggattgggggtggggcgggaaataaacccatatcaaatggggttgtcaagggaggtttccacaagggtgggaaaccttttgttaaaaagccacaacgggcattttttttgcacagggcgtctttaaaaaaaa

SEQ ID NO: 185796 - DNA, 476 bp, Arabidopsis thaliana
  unsure (1)..(476): unsure at all n locations
aaaaaaaaaaaaaaacccaccccccaaaaaaaaaaccaccccaccggaaaaaaaaacccaagggaaaaaaaaaaaaaccaacccaccccccacggccccacgaagccaaaaccaacaaaaggaacgcaannnnnaaaccaaccccttttttcaggaaagaaagggaaaanaccccgccgcggggaaacacaaaaacaaaaaacngccccgaacccccccgngcgccccccccccccccacacgagaaaaaaaaagcgggcccccaccaaaaaaacaaaaacaacaagattggtgttaacaaaacctcccccacccgctgcgaaacgggcccccccaccttttgttattaaaaaaaaccacaaaacaactcccctaaaaaaaaaaatgtgttaaaaagaaccatccagaaaaacaaacaatcacaaggggggtccttttccaaaaacccttcgacaaagaaagaaaaccatcttcaa

SEQ ID NO: 185797 - DNA, 387 bp, Arabidopsis thaliana
aaaacactttttttttttttaaagacgggggttaaaaaaaaaaaaaaatttttttttaaaaaagttgtatagggttaagtgtgtttataaaccaaaaaaaaaagcgaaaaaaaggttttttttggggaaattttttaagggaaagtcggggcaaaacacctttttttttttttttaaaaggtaatgaaaagcccggttttcttagagagggtgggagaaaacccccgctcccattttgtcccttgtgtgttggagagaaagaaggccgtggttttttgtgcacttccgttgatagggggcggccaaagggaaaaaaatgctgtttagaaaggagaaaagaaaggagatccctatgtgttgcgggcgcggggtttttgttttggaata

SEQ ID NO: 185798 - DNA, 515 bp, Arabidopsis thaliana
  unsure (1)..(515): unsure at all n locations
aagcttggatcctctagagcggtcgccctttgttttagttcttttttttttttttgagcccaaaaccctgggattttctggggaaaaaacaacaaattaaaatcaaaagcccttttttgggcaacaatttgtctgggtttattggtggcccgatacccagaatacccaaagaancccaaaaggatangcttcttttcaaaaggcgtggattggaaaaaaaatatctttgggccaaaaacaaattaaaaaaaacccagggggtggggtaaaaaaaaaaancccttccccccttgggggcccaaactcccaggggacgggccccctactggggacggggggaaaaaaaaaaaccccacccccccccgtgggccggcccccttacttatttagaaaatttttgcgggggcgggggtctcccccccaaaatacaaaaaggggagacccttttcttttttctttgcgccccaaaaaacccgcagggggggggaaacaaaacccggggctcggtgcagggg

SEQ ID NO: 185799 - DNA, 504 bp, Arabidopsis thaliana
  unsure (1)..(504): unsure at all n locations
gacgtcaactgccgcgtacgtaagcttggatcctctanagcggtcgccctccggggttaggctttttcccttaaattttttttttttttntgttnnttttttttggggcgcaaagcctcaaaaatttatcttttcaaaggggtgcaaaccaaaaaaacttcataaaacaaaaaagcccacccgggggaaacctttttccatcttttttaggggagatgcgtaccccccttggggccaaattaaaaaaacccgggcaaagggaaaatccttaacgggccccctggggaactttttaaaacccacccttttttttgaggggccaccgcgggggaaaaccccttgccgcnttaaaaaatattaaggggggggccccacgttttgggggggggtgtttagaagcgtcccccccaccccgggggggaacaaaaaagaacgcgcggggtccacccgcgttaggggggggaataaaccagcgggtttgtttcccaaccaccccaaaaaaaa

SEQ ID NO: 185800 - DNA, 420 bp, Arabidopsis thaliana
  unsure (1)..(420): unsure at all n locations
tttcgccaggggggtggaaaaccttcaattttcccgcccctccagggggttctccccttttccttttgggggaacccgagttctttttcccaaagaggaaaaccccctccccgggggggggggtaaaaaaaggtgggggggggggaaaaaaaaaaactttttttttaaacctcttttttttttctcccccccccccctttttaagggcccccttattttttttgggggggaggcccctccccctccttttaaaaccctccccccccatgggtgttccctgtggaaaatacacacccttttttttgnggggcgttaacgacccctctttttttcttcttgagggggcttccacagggggggcccgggggggcgcccctctttccaaaggaaggggggggggggcgcccccccccccccccc

SEQ ID NO: 185801 - DNA, 511 bp, Arabidopsis thaliana
  unsure (1)..(511): unsure at all n locations
tacgtaagcttggatcctctagaggcgttcgcccttggggttgaggctttntaaataattaaatttgnattaaagttttacacatggtggttttttttttnnacatatgggggggaaaccccttaatttaaaaagggttttttggaaagtttcttttaaaagggggggggggcaattttaaaaatttttttttggttgtcggggatctactcttggggggggaaaaaaaaaaaaaatcccccccctcctcggattttgtcccttccccgcgggcgaagaaccttcttttttggggggggggcgagccgcttccttctttttttttttgggggggtgggggggtgttcgacgcctttctttttgggggggctttttgtgggggggggactttttttttttttgggggggcgtgtgtgagccctcttttttttttaaaagaacgggtgtgtttttttttttggggggctccaaatttttttggtaccgattgggccccaattcttccgggggg

SEQ ID NO: 185802 - DNA, 251 bp, Arabidopsis thaliana
  unsure (1)..(251): unsure at all n locations
gcggtcgccctttttttttttcttttttataggaaaggttgattttttaatattttaaaacaacgnagaacaannaaccggtccacgggggaaaaggcacgaagaagaattaaacaanctagactaagaaaacttcctttgaatcacaaagaaaagtaaaacacccctcaaaaatcttttganngggaggagcaccaaaccgataaaaagataaaaagctggaaacattggtctcaattcttctcccttct

SEQ ID NO: 185803 - DNA, 239 bp, Arabidopsis thaliana
ctgacacccctgcaggtaccggtcccgaattcccgggtcgtcccaagccttcggttcttctttctttaccaaaacttttcttctttactctttttcaacggccaaaaaaaatggaagtggatcctaccccttaggtggcccagaagggttaccgaagaaaagggggaacctacttttgcttgtggccaaaagaagtggccgttcttaaaccggggaaccatggaacccgttaacctggt

SEQ ID NO: 185804 - DNA, 421 bp, Arabidopsis thaliana
ctagagcgttcccctttggtttttttctttttattttaaatagggcctatataaaaattaaggaaacctaaaaaggaaggcactccccctttaaaaaaagataaccccctccttggggggagtttctacttttttttcccggggcgcacccccttttccccttaaaaaaaataaccggttgttggaaaccaaaacagaccactaaaaaaaaaccccccccccccgggggggggaacacccccctacacctcgctgggggtcgctcccaccaaaaacgaacggcaaatgaagggccccccccagggtcctcccccctaaggcaaaaaccctctcccctgggggaaccatggccccccctccttcaggcgggaccccaagcccgagcccttaaccggtgggggcccctcccgccccaacaccc

SEQ ID NO: 185805 - DNA, 365 bp, Arabidopsis thaliana
  unsure (1)..(365): unsure at all n locations
tgacgtcaactgcacgcgtacgtaagcttggtcctctgagcgtgcgcctttggttttcttttgtatggcaaagctataccttgtccggatcatataagaacaaagcccacatcatataatgaaaaggggctgcctaaaaaaatgggttgggaggcaatacttttaaaggggggttgagaaattttttttgggcagccggcccncttgttttttttccttatcctaaaaaaaaagaatatatcccatccccggaataatatgggggtgggaaaccaaaataaaacgggggcgattatttcccttggggaaataaaaaaccttgtcagaaaaccttaaaataccccccctgttacaggggggggcca

SEQ ID NO: 185806 - DNA, 343 bp, Arabidopsis thaliana
gaaaggtggtacgcctggaggtaccggtccggaatttccgggttgaaccaagcgttcggcccgcgttcgggcgggggcctctttttttttcctccctttttcttttcaacttttggcggaatccggggaacttatttagagaggaatttattaatattggtaattttaggatttttaccaaacatggattggccaccacaatcccattcttttcaataaggacaaaaaaatggtcattcttttttcaaagggtggggaaagggttcttgtgtgttctaggcaagttgaatatggacaaagcctggaggctactgtagatattcaatggaataatatgaatgac

SEQ ID NO: 185807 - DNA, 447 bp, Arabidopsis thaliana
  unsure (1)..(447): unsure at all n locations
ccccccggggagaggagcgagagaaacgcggtttcccccgcggggaggaaccgcggaagcaggcaggcgaacaggacgggaggagaagcccaacgaaccccgcgcgacgcgcaccacgggcgcagaccaagcggagggcgcaggggacgacgaaggggacgcggcaaagccaagaggaagacaaacggcgagagagagggggacacgcgagttttttttaccagggcggccagaccgggaagaacaaccaagcacaccagggcgcgcccacgcgccggacacgcccccggcacacaccgacggaggacacacgnaggagcgaggacaagaacgagcgcacagagaccacaaccgacaccaaaaaccaaaacaaggaagagacccccagcgaagcacaacaaagacaaccgacggaacacgcacagcgcaacccgcgggaagaagacc

SEQ ID NO: 185808 - DNA, 339 bp, Arabidopsis thaliana
  unsure (1)..(339): unsure at all n locations
cccccaaccttaggataaaaaaaaaaaggcggaaaactcccccctctccggttttttttccatctcgccaccctccctggtttacacataaaaaggttcccgtggccccccccaaaattttttttgggttgtaggggacnttcccagggttttcccaacgacaaacccccccttttttgatttgtgggcccccccccgactccttttttcgtttattacccgagggccccccccccccccccgagcggagaagcgggacaaacagtttttttttttaaggggggggggtcttgtgctccccccccccgaaaaaaacttctttctttctccacaagaaaa

SEQ ID NO: 185809 - DNA, 222 bp, Arabidopsis thaliana
tacgatcatataggaagctggtcgctgcagtaccggtccggattcccggtcgaccacgcgccgccacgcgtcggtgatctggatggtgaaccgcgtgatcagcttcgacgcggctttgactcgctggggacgcgtacttaactcacgtgaatctcaataaagatctacaggatggctgtgcctgacactgatactatttctcgactctctgcaatgtgaagt

SEQ ID NO: 185810 - DNA, 581 bp, Arabidopsis thaliana
cccccccggaacagagaacggaacgccccgagttcacacggcgggcggagaagcggagaaagggcggaaccaacgaaccaaaggcgcgggaaacacacggacaaagcaaagacagccgcgacgaacgaggcacacgacagagcggggacacgacacaaccacggcaaccaacagacaccacgagccgggcgaagcacaggagcgccaccaggaggcttttttcacaaggggaaagacaaagagacaaacccagcagaaacgggcacacaagacggccacacaccgccaccacgcgcaggcaagaagcacacagagaacgaagacaaaaacacaaggcgacacgggagaacgacgcaaccaagagacagacaacagcaacaaacagccagccggcaaagcgcaggggggagacccagcgcacggaaggggacgcaaccgaagcgaacacacaacaacgcagggaccgcacaccacaacaacagcacgaggaggccccgacgcacaaacagacgagcaaccaacgccaagacagccgaccgccagccagcacagacaccgagcaaacgccacgacgaggcgac

SEQ ID NO: 185811 - DNA, 578 bp, Arabidopsis thaliana
  unsure (1)..(578): unsure at all n locations
aaaaaaacttttttttatttaaaacccctttttttttaaaaccccccccaaaaaaattcccttttttttaaaccctttataaaaaaaaaattaaaccccctttttgtgtttttttttcccccccgatttttttaaagcccggaaaatttcccccccccccctcttttttttttcccccttttatttttaggnaaagaacggttntttttccctttccctccgccctcttaaaaaatttatttaaaactcccccctccccccctctcctcgtttgnggaaaacacccccccccctatntctctttttttttattaaaaaataaaatttttttatttaaaaccaacaaattttcttgcaatttctcccnccgcttaaaacaacacccacacccaaaccagttctcattcaaacctctcctttctttttatatacccccgtgggccaaccaaaaaacaccttcctccccccccctttatttataacacccctcttttcccttataaaaaaacatacctcttctctatatacctcctaaagtccaccacctcccctacaccccccgccaccaataaaatttc

SEQ ID NO: 185812 - DNA, 576 bp, Arabidopsis thaliana
  unsure (1)..(576): unsure at all n locations
accccttcccaaaatttcccccggtcaaccccccgcggtttcgggttcctcctttaacacaaaaacaaaaaaaattccccccaaacccaatcccaaaattattcaaaacaactttcccaccaaaaaattcaaaaacacacaaaacccaacaccaattttttttttaaaaaattttaaacctcttctcccaaacttcatttccacgccccctcttaaaaaaaaacccctttttcctggaagccaggccctccccccctcccncccttcaaaaaaaccattcaaattctctccccctcctccaacaaataaaaaccccccccaaatttctccgtaaaaacccaaaaaaaatgtttataattaattccaaaaaaaaaccgttttaaaacgcctctttcttcctctctccccccccccaacctcctcaaaatattttttttttttccccccccccccacctcataaaaaaaacaggcccccccctcccccccncccttactataccccccaaccaaattctcttttcaaaattttaacaaaccatcctcccctttaaccccctttaccaataaacacccc

SEQ ID NO: 185813 - DNA, 186 bp, Arabidopsis thaliana
tttttttttaaaaaaagccatcccgccacccccttaaaacaaaatcccttttttattcccccccccaaagagggaaccgggccaaaaaaactttttcccttcaacattaaccgagaaaaattaagggggcgtggaacaccttgtgggcgtctttctttaacacgccttaaaaaaaacgcttttttt

SEQ ID NO: 185814 - DNA, 522 bp, Arabidopsis thaliana
  unsure (1)..(522): unsure at all n locations
gacgtcgcatgcacgccgtacgtagctgggatcctctagagcggcccgcccttggtttttttttttttttattatttttttttttnttnttnngttttgtgntgttggggggtgttgaggnggtgtgggttttatgaaaggttaagaagagaggaaattttgagtgcaggggggggagcgcggggggggaatttaaaaatttaaaatttcttccattgggggggtttggcncggcgggaatatctttggtaccaaaaaaaaaagctatagggggttaaaaaagggcctctccctggttaaaccatttgaaaaatttttggcaatataagaaaaatatcccgccatttttctggaaaacatgtaagaaaaaagcgcccacactttattaattgccacacagtaaaaaaaccggcggaatattatttaagaaaaaganaggggcccctcaatttcccctttataattttatagaaagggattttctttttttttgtacccgccttttaatattaaatttgggtt

SEQ ID NO: 185815 - DNA, 478 bp, Arabidopsis thaliana
tgacgtcgcatgcccccctaccttagcctggattctttaaagcgggccgccctttttttttttttttggaaggtggaacccatgggtttttccttcaaccaatctaccattccccattaggtttttggtaccaggaaattaaccaaaaccggttcctgggaaaaatggttaaaaaaaaggggcccaaattaggggtggcctgttattttccagggaccttttgcggcccttcccgagacggtggaaacatcaaaatcaaccacccaggggccattggtccagcctaaggccctgtttatacttactgggctttctaatccgaggtttcttcagttttttcgtcactccccgggttcagcgatgatagctttccgaatgactcttttgcatccccaaagtagtctttaactttgtcgaacactgttttaagctggtcctgggttgggagctcaataacatctgaagtactaagtgcagc

SEQ ID NO: 185816 - DNA, 332 bp, Arabidopsis thaliana
tggaccccccggtcagttccatatcacaacattaagtagttcgtccgaactcacgcttcaatcgtcctcccgtgcccaagtacttccgtgccagccgcgcgctgatcgtgtgtcgctgacaatgtccgttgattctgacgctctaccagtgtgacggacggcgagcgacacacttgtcattttgtattcgcagtctgtcttagcatcggttagatggatttatgcattcgaacccacttccatactcatgattctgtgtctaccacgccgaaccgtgaggtcagtgatcacgattatgataggacgcgacgcggcttttcagacactttctc

SEQ ID NO: 185817 - DNA, 106 bp, Arabidopsis thaliana
  unsure (1)..(106): unsure at all n locations
tctatcactcactttaggaaagctctcgcctcaggtccggtccggattccgggtnaccccgcggtcgtccgatatatgagtttccggcttttcccattttttcttc

SEQ ID NO: 185818 - DNA, 563 bp, Arabidopsis thaliana
  unsure (1)..(563): unsure at all n locations
taggggccctattaaagattatgacgtcgcatgcgcccctacctaagcttggatccttttgagacgggccgcccttttttttttttttttttttaacccaatccgggttatatatggattctcaattttaccgggagagggtaagccgggataaattaacactcttttccaaggaccgtggctctgagatccaaacctcctttgtctgaaaagaggcgtgaattaccgtggtgcggggccacctctcttttgaggggaaaacggttataacctctatttttgccaaatataaaaccccccatggccaattgggaaaatcgcttaacctattgcccatggaaacaccttctaaaattctttgcctttcttctaggtggaanaaaagggataggaaaatcctctggactctggaggaccatccaatgctacaaggccttatctttgttgtttgaggagggtggccgaagcggcttttgcaaacaacccttcgtttattataaaaccatcccggttaaagcattgccctgaagccaaactagctgtttgactctttactcactgaa

SEQ ID NO: 185819 - DNA, 482 bp, Arabidopsis thaliana
tatgacctcgcatggaccccttccttagcctggattcttttaaacgggcggcccttttttttttttttttttttttttttccccaaaaattaagcctggatggacctaaattttttggttttccttaaggatccatggcctgggaccttaaggcccacttttggtggttggaaccttccaaaggctttccttaaaaccttggcaccattaaatatgattccttcgggtttttcctttggaggaaaataaccactttttttaattacttcaaacactgatcccggtttggttcgtgccagcctttttgcgttccatgctggcacattacggtccgtttctcccgtcacaatcagaacagggcatttgatttcttgaagccttttagacaatgggagttttttctctgagccattattatctgttagtgtagccaccgtgaattccacgagagctttgtcccatcccttggctttaagaggctt

SEQ ID NO: 185820 - DNA, 101 bp, Arabidopsis thaliana
cgacgagtcgtattcgcgcggatgtcgtcgcgtcattagacgtagtatagacagcgctccccgtttccgatcatagataagatcacagagtaagagattat

SEQ ID NO: 185821 - DNA, 429 bp, Arabidopsis thaliana
  unsure (1)..(429): unsure at all n locations
aaccttaaaaaaaccgggggggagagcaaaaaataaaaacaaaaatttccaaaaaccaaaacaaaaaatccttaaaaatgatttgaaaaggtggggcctccgggcccctcattctttgggagangnnnaccccccctnnnnntcaaaaccatacatcccccagggggggggtcctattctccccccccaaaaaaaaagcgggcccaaaaaatttgccaaggcaaattcccaaaaaaaccctttttttaaaaaactttccgagcccggaaaaacccaatccccaaaacagggtgggaagggttttttttccctcctcaccagaaatttctatacccccaataataaaattttgagggataaaaaccaaaaaaactcttggttttcggccattcaccaaaaaaaaaaacccgttttttaataaataaaaaa

SEQ ID NO: 185822 - DNA, 373 bp, Arabidopsis thaliana
  unsure (1)..(373): unsure at all n locations
ggtctaaacccatttccacggggctctacattctcaattcactcttttagggggtctcgcctctctgggcttttaaacgggggtcaaaccttctccattccacctattacttaaaggcgccgggggggncctccctcctttttatataaaaaataaaccccccctcttggtccgcnatccccaccccccacccccccccaaaccggtgttttttaaaccccaaaaaaatgtcctcgggaccttcaaaagaaaagccccttttctttccccggagaggggatctgtgggggcccaaccccaaacccgggggggcgcccaaaaattctacccgtccttatagggggggcggagcccacgcgtgaaattccctttc

SEQ ID NO: 185823 - DNA, 162 bp, Arabidopsis thaliana
ctcacgtacgttaccatggccgctctcacgacgaaagctcaatataataattactattttccagcgccatatatcaatgtcgataaacaaaccatttatatcagttatatttacagttaagtcttatgtgcttctacgcacatacacattttccgagctccc

SEQ ID NO: 185824 - DNA, 220 bp, Arabidopsis thaliana
  unsure (1)..(220): unsure at all n locations
aaaaaaaaantccccaacctttttctaaaagcttggcatgaaaccctttctcaaatgtcaccaaagttacaatcaaaagagccaagagtgttttttttttcattttaaaacccgttttttacaaaagtcccatgaaaaaacttccttttttttgaaaaggccaggggcaaaatttaacttctaattacaaattaagcttgtaaaagttaaaaagccctat

SEQ ID NO: 185825 - DNA, 215 bp, Arabidopsis thaliana
gtctccctcagtccgccgattccgtcccccggtcggaacataaatattcacttcaactaaattccacatgttaaaggatgagtgcctttatagctgtacatatcactatcttggccatatatgatctggactgttcatttcgggggggacttcctatcttctcaaaaaaatgtctggacatggaaaaaactcttttagtcataggtggcaatatg

SEQ ID NO: 185826 - DNA, 486 bp, Arabidopsis thaliana
acccctccaagtacccgtcccaaattcccgttccaccccgggtccagcccccctccaaatttttaaataggactttttgattttccaaaatttttgtgttaatgggaaacaaatattatccattccccggatccgttgacccataacatcccttcaaaaacccccttttttctttaaccaaatttttaagggattttctcccgggggtagttttcttccccttccaggcgtttaacaaaaaaaattaattccccctttctccaccccaattaaatccccccccccccatcccttagggtgtattagggccccttccttttttttccaacctttaaaatcaaaaacccccttttccttttttaaaaaaataccctcccccctttttattcccccccccaatatttaccaatctgtggtgcccttggaatttttcctttttacccaaaaaacctaagggttggttctccaaatcctcctttaacccct

SEQ ID NO: 185827 - DNA, 103 bp, Arabidopsis thaliana
gatctagatctacgtctccgatagagagcgaagagtatagtgtgcgaatgagcgagggagatcatcgtcttcaggatcgcggatcctttgagcaggatagtac

SEQ ID NO: 185828 - DNA, 466 bp, Arabidopsis thaliana
  unsure (1)..(466): unsure at all n locations
cgcacgcacgcgcaccggagcnaggcaccactagagcggccgcccgcgggggcggcggcgccagagcaaaggggaccaacaacggaaagcccgggaagacggcgcccaagaacacacaaggggaanaggcccagaagccgaccaaagccagnccccgcccggcgggacacacaaacccgaacagagaacgcaacacgacatcttacaggggggggctcaaacccgccaaaccagtcaacgaacgccccggaaagaactcgaggcccgccaagaggaaaggccccgagcgcccgagccacagcgacgaggaggcgaggacacagccccaaagggccaccagggagcccgaaggcaaggaggaagaaggtcgccggacaacccaaccccgcaaagggcaccaccaaaagaacccatccggaggcccaaagaggctcctccagaccaaacaagcccaggccgaccggca

SEQ ID NO: 185829 - DNA, 393 bp, Arabidopsis thaliana
  unsure (1)..(393): unsure at all n locations
aaaaaaaaaaaaaacttttttttaactcacccccccaaattaaanggaaaaaaacggcccccctttccaaaaaccgcgacccaaattccccttcccaccccgggttaaggcccccccaaantaatttttctaaaaaaatcaccaaaacaccccctaaaatttgttaaaacttccttctcccaaacaaaaaatttctccacccttttttttctttctttccaaaaaacatacccccccattcaaaaacccgcgtttaatcccctttattactataaatttttttttttgaaaaagatagggccccnccctttttgtttcgcacccctaaaaccttatttnaaaccccccttttctcttgccccctcccccgcttttcccccccctccttttttt

SEQ ID NO: 185830 - DNA, 401 bp, Arabidopsis thaliana
ttgacgtcgctgcaccgtcgtagctggatccttaagcgccgcctttttttttttttttttttacgacaatacctttggatgaaatcggaaagagctatccttcttgaatagcttaaaaaatcccaggggtcaaatggaaaaaaaaaacccttttttccccatccttttttagggcttttgtaacatttttttttttaaaggggggggtttaaaaaaacaaagggttttttccccctcaaaagggggcccccttaaaccctttccgccccccaagaagaagagaaatggtgggggggtttttccccccctctccccccctataggaaaaaagaaaaaattttttttttttttctcccacccacctttttatttctccggggggggggggggtgggggaaaaa

SEQ ID NO: 185831 - DNA, 543 bp, Arabidopsis thaliana
cgcgagacggtgaagtattccggagagggggggggggggaactattggggacccccttcgaagattcaggacttcacaggcccccgtcacgtaggctggaatcccctgaaggggcgcgccccggggcgctcgatggggagaacttacagaggtgcccggcgaggggaggggggtaataggcggatagatagaacatacggtagtattagaggttgctgagctaggtgggtaaagagaagaccgaccccaaagggtcatgggaggttagggttagggagtcagaagacaacatgttttttcagggagtggagcgagggggtagcgtcgggtggggctgtcaagaagaaagttttttgcgcgccggccgacttaggaaagcccccctcgatgtcgcagcagaagaggagagagcctatatggcaagcatcgacgaggcgtaggccgcgttatttgatacgagaaggcgccgccgggcgttgttctccgaagagtagggaaaggcccataagacaggagtgggcacgctagaacagaggggaggga

SEQ ID NO: 185832 - DNA, 353 bp, Arabidopsis thaliana
  unsure (1)..(353): unsure at all n locations
gatctccagctctatacgactcacttaaggaagctggtcgcctgcagtaccgtccagnattcccggtcgaccacgcgtncngttggactccttgacttacttttggccttggtttcacttgaaaaagaaaatttcctttggttttgggccttggttttcccggtcccccccgcgggggggggtttcaaaaaatacggcccggcccacaaagcccttgttttggagggaatcttcttttctcccccaaaaaaaacacccttttatccccttttggtggaaagagccccccccctgtgtggggggggggccaaaaaaaaaggggggtgtctttaaaaaaaaaaaaaaaaaaaaaa

SEQ ID NO: 185833 - DNA, 135 bp, Arabidopsis thaliana
tcgcttcgcacgtatagtgatccttggcggctcgggtccgcactgtggatgacttcgacctgataatttcgcgcttttgtcggagcgccctcatcccactctcctgttttcgccgttacagcggtaccccgagaa

SEQ ID NO: 185834 - DNA, 400 bp, Arabidopsis thaliana
  unsure (1)..(400): unsure at all n locations
agtcacctatanagatcttgacgtcgctgccgcgtcgtagctggatctctagagcgccgccttgttttttttatgacatgccctacctttaagtccaaatcaaagcaggttgatcctccggtggggtaacctacccggtgcttggttaaaaaaccaacctaatccaaaaggggtctctttttttttgggcccggatttttttaaaattttggggggaggggggccccccctcccccataaaaaaaagggccccgccccttgggggccccccctgaggaaaaacaaaaccactttttttttctaaaaaaaaggggtttttttcaaaaaaaaacccccccaacccctttgagaattttttatttttccccaccaaataaatacccccccccccgcccccccc

SEQ ID NO: 185835 - DNA, 483 bp, Arabidopsis thaliana
ggggcacttttaaagatttttgaggtggatggcacgcgtccgtaggctgggttcctttaaaggggccgccctttgggtttttttttttttttttacgggcggaacctttcgggaagagaaatttaaagaacggagaatatccaaaactttggatttgggttcttttaggaattgatgggaattgaaacggacaaggagtgaaccctaattgtgcaaagtcttttttaagggctggtgtgtcaggtactacttacaatgcgggacttaaagacgggggttataaactgagaaatgggagcctttcctcttgcaccaggaggatgggaggtgctttcactacttgaaattcgaaaagaagtagtttgagatactaaggtttccataggcttggggagctgaaactaattatatgcagtgggccacaaccgtctgactctgggacattggattgaagggaaacctggtatggggacttgaaattca

SEQ ID NO: 185836 - DNA, 463 bp, Arabidopsis thaliana
  unsure (1)..(463): unsure at all n locations
cgcgtacgtaagcttggatcctctagagcgttcngcccttggggataagcctttttctcatttttttttttttttttggggggtgtgatgtgatgagggtgggcgttggggggaaaacagagggaggaagagcaagttttagaaagagccatctaagatccgggagaaaaaaaagcgcctccagcagtaaagctctcctaactttgggggggggggggncgccccaccgcacacgaggcgacccaacaaaaaggggggggcacaacccgcgggggggggcgccccccttaaggaaacaaagccgcacaacaacaccgggggggcgggccgagagaagaggggggcaaacaacgccgggcggcgcaagcataaaaacagggggtcgcggaccaaaagaaaatataggcaaaaccacacacagagaaaaagatgacaccaaagagacactgtcccgtgaacccga

SEQ ID NO: 185837 - DNA, 378 bp, Arabidopsis thaliana
  unsure (1)..(378): unsure at all n locations
tcgtaagctgggaccttaaagcggctgccttggggtttaaatctttaatttttttttttttgggccgaaaccctatttgtattggaacaacaggaaagacaaaaacgaatttgtttagcatacaacaagaagaaaaaaacacaaaactaattgcttacacatacttccctctatactaagttctcttttcggggaaggccnngggaacaggggcaatctgagaagaacaaggggctngaatatagaggagtgaatattaccatcctctaaccacttaagatgattctctctaaactctaaatgcattaaacgaagcagcttttttaaccctcttaattataaggttctactttcaccatcggtagcagaaccccgact

SEQ ID NO: 185838 - DNA, 477 bp, Arabidopsis thaliana
  unsure (1)..(477): unsure at all n locations
cccctcgtaagctggatccttgagcgtcngccggggggaagccccggcacaaagggngagcaggaggagggnagaaacgaggagccaaagacgggggaacgcaggaacacaacgggcattccgaaagaggagcagagaaaaatacgggggcggagagcaagagggggctgttcatatcttggggggggggggaacaaagagggcgcagagaacgactgagcgcgagaaaccccgtggagggaaaaacccagacagagggggaagcggagcgggggaagtaagaaggggaggggcaggaagggggagggaggggagcgggggagacgggcggagggcgcgcgcgcgcggggggggacggaagcagagcgaaggggggcgcggacggagaaggccgacagggcacgcagagagggaacggggcggcggggggaggaagagcggggaagcagaaggggagaggagaggggagccggggag

SEQ ID NO: 185839 - DNA, 489 bp, Arabidopsis thaliana
  unsure (1)..(489): unsure at all n locations
cccgtcgtagcnnggaccnctagactttcgcctttggtaaaccctttaaaacggaaagccaatctcttttgcagatgttttattacaatccaaaacaaaaagttctgatacagccgtttaggctttttttttttttttaacctgcagtagaaaatcctgaagacttaagaaaaagaggatttttttttaacggggggggccgcggacgcgggggacgacccgggaaacccggcccggaacctggggggggaaccagctcccccaaaaggggaggggagcagagcgagggggaaacaggggaaaagggcggaaccggagggaaaagcggaaggcgggcacaaagccccacaacaaacgagcacggaagcaaaaagggggaaggccggggggggcctaaagaggggggcaaacccacgaaaaaaggggaaggcgcccaccggcccggccacccaagccgggaaacccggggagggccacgcaacaaaaaag

SEQ ID NO: 185840 - DNA, 219 bp, Arabidopsis thaliana
ctaagcgggaccttaaacttcgcccttttgtatttcttggtaacaaagctttagatttaattagcccgggaatagataaatgattacttggatgacaaagaaagcttaaaactttgccaataaagagccgagaccacatcacacaggtttgacatgttcaggcaggtttttctatttaaggggggtggcaaccccccagggagcaacagaggcaacagc

SEQ ID NO: 185841 - DNA, 401 bp, Arabidopsis thaliana
  unsure (1)..(401): unsure at all n locations
aaaaaagacaagggggccgggatgttattggcagcatttcaactacatgggatgctctgggaagcgaaaggaacccatttttatatttagggggggggaaacccaaacagacacccagacgaaaaacaggcggaggcaagcggggagggaggggggccggaccaaagagaggggggagcccccaaaaagcgggggcggagaaacgaggccagggaacgcaaaaggcgaaaacccgnnaacgaagggaggcaaccgcgcgaaagaacccggaaaaaggaacacagggcaaaccgacgaaaaaaagggaaggacaccgacgggggggaaggccaccaggagcggccggagggaaccggaacaagaggcagaaaagagggcgagagaaaggagacaaaaaaacc

SEQ ID NO: 185842 - DNA, 524 bp, Arabidopsis thaliana
  unsure (1)..(524): unsure at all n locations
cgtaagctaggatcctctagagcggccgcccggggggaaaaccccccaaagcaaggaatatttcaggagaagggaggcgcaggaccggaaaacagagagacggggacccgcgcaaagaggaggcagagatacaacagcggcggcggaaaacacgcaggggggcaaaacaaacaccgggggggcacacctaaaatgaggggggggacaacgcccggggcgggaacnccacaggaaaaaaaaacgccaccgcgggggggggggcggccacccagaacgaagcagaacgccaaagagcgccacccccgccgggaggggggacgcggccaggagccgacacccgcgcccgagagagaaggagagagagcggaggaacgcaacccacccgacacaagccgaagcccgacgcgaaagaggcgacggcgggcgcaaacggagaacagggagggaggaggaagaagcgaagcgaccgggagggaccaaacgggagggagagacaagcgaggcgagggacggggaccggcgag

SEQ ID NO: 185843 - DNA, 179 bp, Arabidopsis thaliana
gtaagctgggaccctctagagcggttgcccttggtgtttatttcccaaagaccagaaactctttttagtatggggaaaagatcagaagaatctagcttccttatactgtaagaaaacatatacagttaccatgaaaactcccttcttcaagaaaaacagccccatagaaaaaaaaccta

SEQ ID NO: 185844 - DNA, 506 bp, Arabidopsis thaliana
  unsure (1)..(506): unsure at all n locations
gtcgtaagctnggatcctctaagctttcgccctggggggaagcccttatccagcccccccttagaaagaaggggggacactcaccacctaggacgtggcgctactgccaagaaaaaaaaaccctcttatttataatcgaaaccagataaccagggcgcggcccacggcgcagggccacggcccggcgtttaataatttggggggggcgggcggggaagccgcggggattaggggcaaacatgctctccactccgactgggggggggcggggaccgaccatagaagatcgccgagtgtgagggtgagagaggttatacaaccagagcgcgcacccccgagccccttatggaccgtcgcaccgccacccgcagatgaccgggtaaaaacaaaccccatagcccggaccgcggcagcacctcttaacctccggacgtggagtgcgtcgacctcttgcaaggcctcatgcgggccgaaaccaagagacccccgcaacagaccctccccac

SEQ ID NO: 185845 - DNA, 442 bp, Arabidopsis thaliana
atggcctggctagacattatcattagcggtgaaccataaggctgaatttgccaacatatgatcttagaggatcatacttgtacatacaggacatgaattaagccatacaaagaatggttaagaaacaaaaaaaagctattttattttggggggggggggaaggacaacgggcacgggtcgagaaccagagaccaaagctcgatgggaggggggcggaagccatggagccaccgcacagggagagaccaggagcgacccgaggagcagaggacaaaagaggggggggacaagggcaggggggagcgaaagggacgcggagaagagagaaagggggcgcgggggagagcgcggggacggggagggacggggaggagggagggcgggagcgggcgggggggaaaggaaagaaggaggagaggccgagacggagcggaggaccggc

SEQ ID NO: 185846 - DNA, 475 bp, Arabidopsis thaliana
  unsure (1)..(475): unsure at all n locations
tacgtaagctgggatcctctagagcttccgccctgggggaaaaccctttttaacaaatacaaaattttaatctgggggggagatccccacaacatcgcgtaatcgaacacgggaaagccaaaacgcttttttgacctccccgtgcggaaaaaagaaacccgcgcaaacccccccaaacgggggttttctaatttggggggggggcgacgacgcaaaccacgccaaagccgaaaagaccccgcgagggggggggcggacccgccccaagaatatggaacgccacccgaaccggcaaggcaccccaacgccgcaagagcaacaccccagaggggcgcacaaaaacacaggcgcccgaacaaaagacaagcgcagacgggcggccaagagggcgcgcccgcaccccgggaaaagcacgcgcgcgccaacccgcgcccgcngggcgggcgccgagacgcggggaaggggcaaggcgccg

SEQ ID NO: 185847 - DNA, 486 bp, Arabidopsis thaliana
  unsure (1)..(486): unsure at all n locations
cgtaagctaggatcctctagagcgtccgcccgggggggaaacccccagggaagaaaggcacccnaacngggggcggaaagacacggggcacggaaaggaacaaccacncacaaacaccccagagacataggaaaatggaattaaacatcctctgtttttaccaggttacaagcaaagaatatgattcctcctttagcgcgggggaggaacccaaaagcgaaccacttggtacggagaggaaaaaaacnccaaaaggcgagcggccccaccaacnaagccatagccaacgccaaagcacacccccgggagagaagccgcgcgaacaagacagcaacacccggaaagggaccctaaacgcatttctggcttccggacccctagtataccttaagggagctatatagcctatatgcgcacggcgagaatgtcacattagcacaccccccaaaaccatgaattggtacctaatcactgcgtaccctgcta

SEQ ID NO: 185848 - DNA, 490 bp, Arabidopsis thaliana
  unsure (1)..(490): unsure at all n locations
cgtccgtaagctgggatcctctagagcggtctcnccttggggtttttccctttttttgtttttttttttttttttggggcggtgggaaatttctccatattttgggctgaagaaaacccaaaaccttttatggactaggaattggcctctaaaatattctgggccgccccaccaaccaaaaaagggagtttcctctttaacggggggggnagcaggcccaggcaaaccaannggcttggctttggggggggtctataatttacctatccgggcccacaattatggagagctgggcctatcctctcctggggtccccttgttccgggggtggggttcccactggcgttccgggaatttcaacctggtctacaaactccaaaggggagacgggctcattcgggaccctttaatcgtgggggctcaccatcccccttggggttaaacccttccgggtgggcccttgggtggggtggcaaattaaagggccttc

SEQ ID NO: 185849 - DNA, 401 bp, Arabidopsis thaliana
  unsure (1)..(401): unsure at all n locations
cccccctccgtaggctggaaccctctagagctttcgccctttgtggtaatccctacacacataacatntgcatttaattaatgcaaagttcaggcactcaaacatggcctaccattaccagaacagggtcgggccatgcagataccaaagatacacacagntatcagtccagcactatcctgctacttaagaatatatatatgacgggggggccaaggacgccacgaggatgcccgacggcacgagatccaaaacaggggcagaagaacttctaaacataactggagaaaagctgtgtactcattcgcccacgaggagcagcgtcaacaagaagacccaccgcaagagctggaggcgtggaagctcgcaatccaacatgaataactgaaaagtaatagtcc

SEQ ID NO: 185850 - DNA, 474 bp, Arabidopsis thaliana
  unsure (1)..(474): unsure at all n locations
ccccgtacgtaagctgggatccctctagagcgtttcgccctgggggtttaaaccctccagcctttatttataacaatacaggccgggggaactctctgtttccccccgcgcccttcttaaaggaacataccgcccggctctaagaaagagaaccttgccaaaggccactcccaaccaaagggggccgggcgaagaaccatttaatanctttcgggggggcaagccccgcaaccggaacgggagaccaccccaagggccgcacaaccggaggagcgggcggcggggcacagagcccgaggcaccngaaggagagagggggagaggcacaagggccaccgaccaaacccggaagcccaaggaacaaagaccaacgaggagcggccaccagagagaggacccggaccggcaccgggggcggccgaacccacaaggcaaggagaagaccgccaagcgagccaggaagcgaacggcccc

SEQ ID NO: 185851 - DNA, 457 bp, Arabidopsis thaliana
  unsure (1)..(457): unsure at all n locations
aagctngggatcctctagagcggctgccctttgggttttattcccttttaacggaggaatcgatgtagtgggataaaaagattcaactttaatttttcttacaagacatataagacaagttaggttaacataagacaacaaagagactacatagagtttaattaaactacaataaacaccagattttttctattaggggaggaagannagaagggggtnnaggcccagagccagaaaccctccggccatcggggatggancaagnacccacccacaccttggcattggtttctcacaccaatcgtgaaacaatctggaccggtggtgcaacgattcacgagctcctctgatctgtagggccacaaagcaagagaagagtggggagaattcttttgacccaacacaagaaccgagacttcaagttctttacttgggtaacactgggggtagcttgggg

SEQ ID NO: 185852 - DNA, 401 bp, Arabidopsis thaliana
  unsure (1)..(401): unsure at all n locations
aggcgaggggggcgggggcaccacacacccggcggcagaatatgagacgcacgaccgccgagggggcgcggccccgccccacgaagagctagggactaccccctcccnaaaagagggagggngaaaaaangaacacaagaaaaangccacggggaaaaaaacacgcccccaccacggggcggggaggggggcgaagccccaactactgcgagggcgcgccggccancgccaccgaccgacaaacgagcgcgccgcagcngccgccancgacagaggaggcacaaaacccgacagagacaaagacaagagaaacagaccaggaaaccgcgaggagagacaggagcaccacggggaagggagaagccaaagaaacaacgcaccagaaccacacaccacgacgc

SEQ ID NO: 185853 - DNA, 442 bp, Arabidopsis thaliana
tagagctttcgcctttgggttattcctgccataacaacatttagaaacagtaggggtcaatacagtgctcaaacggagaagagggaacagagaagaggaagtcgttttcatagatgctggagacacatctactgcacccgccgcgcctacccaccccggtccgcttttaatactcccgggggggggccccccccaaggagaaagacgaggaagaccacaaaccgcgaacaaagaccggggagaggggagaccgcgaacaaaaccgcgagaaggagcgcggaaaccaagaggggagagcagaagccacgaaagccgcaaagccgcgcgggccaagaaagaggccacagacgcccgcacgagcgcgagccgaggaaaggcgagccacgggaagaagggaaagggggagcaccgcgacgagggcgcgcggaaacggaacagaggg

SEQ ID NO: 185854 - DNA, 480 bp, Arabidopsis thaliana
ccgccgtagctgggatcctctagagcgttcgcctgggggtaggcccccattccccccgcttttctctttcggcgagaagaatatccacttttctactttcctagtgcgaaaacaataaacgcacatccacttttctcctttgggagagccttctcttcccctggaagagaccggactttggcgatttatcatctgggggggggacctgccaaccgacgcacgccagaaagcaaagggcttcccccgcagcccaccccgcgcgtccggattgaccacagacggactggccggggcgtggccgaggagcgggagcgcaaataccgacaggcgcgacccgcatgaccgtgggaagggggggcggaggggggggggggtataaaaagacccatggtcccgtgggcgggatgggcgtacggcgccggggccgaggcgcagccccggtccactggccgcgggcgcccgcggggaactcacatcgct

SEQ ID NO: 185855 - DNA, 390 bp, Arabidopsis thaliana
  unsure (1)..(390): unsure at all n locations
aaaaagacaaaaaggggggggcacaaaccaacaacgggaacagggggggaacaagcaagccggagaaaggggaccccacaaagcaagcaggagaaaggggattttttttttaagggggggaaggggaaaagggccaaaaagaaggccaaaacccccggaanaaagaggggcccaacaaggccaaaaaaagggcccaggggagaaacagaggggggaaaaaaaaacccgaagcaagccaggacggggagaagaccggccgagaaccccaaaaggggccagggaagagaaaaggaaaaaccccgagcaagggccaagggggaaaaaaggggccccgcgggaaaaccaggccggagcccccgagggggcgggaaagggccaaagaaaaaacga

SEQ ID NO: 185856 - DNA, 420 bp, Arabidopsis thaliana
agccctcaggaaacagaatagggataaagggcgggcggggggtggagaggcggaatcgcgtccgcggccgtgagggagaaaaagggggcgggaggcggcggttgaacgcggtgagctgaagagagaagtccaaagaaacgcgaagaccgaagaggccggcgggtttttcttttcggggcggcggggggagaaaccaataggaggcgaaaaaacaggccgcacgcgcgcggcgagagagggaggaggcggaggcgaaaggaggagaaagacggcgcagtaaaagcccaagaacgaacgacggggaggcgaagggcgcactaaagcccgaataccgcgaaccggaggtagaggctgtaaattatcagcaccacagcgaccgacgtgaaaaaaggccgcggaagtacataatagccgcgagag

SEQ ID NO: 185857 - DNA, 491 bp, Arabidopsis thaliana
  unsure (1)..(491): unsure at all n locations
acgcgtacgtaagcttggatcctctagagcgttcgccctttttttttttttctgagttatatcaacattgatatatatcatgaatggtgagtgatccaaaacaagaaatgaatacaatacaagaagatctggaatttgttcagactaccattcaatacaactacagtttccatggctcccgaaacaagnatttaataagtatgggggccaagnnaaaaaatgatgaattaancttcttcaattttaaacaaccattagcggacagaatccccgagaccgagaaccaaaggattctgcgaatatttaaagaaagaaccacctgcttttacatttctatttaccttttgggaaccaaatcaagctttggtgctcatttttgcctttcaaattttggtctggactttttaattagcttggctttatcttggaattggttcacaagcttccgataattaaaacccaacaattaatgggaagaaccagccagccat

SEQ ID NO: 185858 - DNA, 481 bp, Arabidopsis thaliana
  unsure (1)..(481): unsure at all n locations
cgtaagcnggggacctcgagagctttcgnccggggggaagacccctntgatgaaggagggggggattagaagagggaggcttatgaatactgaggaagatggggcaggattattacaaccaaaccttccaatggccgcaaagggacatacaggaatggggcggctgcaagaccgggaaaaccttatatttttgggggggggaggaagccgaggggggcagcggagcctaacagcacacaggccaaaggcgggggacgacccacgagaggggggaggggggaccagggggggcggcaggggacagagcgccccgaaagcgcgcggcgcaccggcgccagacccggagacggaaggaagaggccgcaccggcagggaaaccaccgcccccgagcgccccaaaccaggaagggggagagacgagggcgacaggcggcgggggagcaggcggccggggcgcaccgcgcgcgcagccccacggcgc

SEQ ID NO: 185859 - DNA, 515 bp, Arabidopsis thaliana
gccgggcgcaacccgcgccgccgccggggagggagagcgcaccaggcgacgttttgcaaaggcccaggcgaagccggggggcaacccgcgggcgggagagacgcaagaccaacagacgaccccgagccacacgcgcggcggcccgcgcgcggcccgacaaggacgcggacgacagaagaccgaggcggcaaaccagagcaagcgagcgcgaaccggaccggcgcaggcgcgcgcacggagggagggcacgcgccccgtgtcggcgccggcggggggaagggccgcagaggagacggaagagaggcacccacacgcacggcgcgcgcgaccccgaggccgagccggcccgcgggagagccgcgagcaggggagagagcacccgcgcgcgcctggcggccgcgcgccccagggcccggccaagagcggcgggcgcgccgcgcagcggggagaggaggggacccggccagagcccgactgcgcagccgagcggcgcgccaggacacggcagcaccaag

SEQ ID NO: 185860 - DNA, 317 bp, Arabidopsis thaliana
  unsure (1)..(317): unsure at all n locations
ataccccaaaccatattgatttcggaggggggttatctcaattccctcataggggaataaaaggacagaggaccctttgggttcagaagaaacccgaggtgcgctttaatggtcccgaacgggcccgaatttagaggtttataattttggggggggggggccacacgcggggggccangaagagcgagaggacggcagcaccggaaacgggcgggggggagggcgccgagcgggagaaaanagggggggggggaccaggcggggagagggcgaacgggcgcgagagaaacgcagaaggcagcggaggagcaataggg

SEQ ID NO: 185861 - DNA, 531 bp, Arabidopsis thaliana
  unsure (1)..(531): unsure at all n locations
ccgaaaganaggaaccaaaagagattttcgcggggggggagaaggcggnccaccccaaaaagaaaacacaaaggggggggaccaccacccgcccgcaccagacgcacccacaacaggagcgaccgccgcacgagacaaccaccgaggcaagacggacggaaggcggaagaagaacccgaaaagagcccgggttcctaaatacggaacgcagggcgcacccccacgcggagcgagccgagcgcacaaaaacgcgcccaccacgggggggggggggggcaaacccccaaaaggaaagacgcaaaagcgccaggaaccaacaaaacaacacaaggaaccacaaaagaacaccggacacaaacacccacaaagcccacgaaaaaccgcacccacacgcaacacacagcgaagagcaagacgccagagaggaagagagcgccaaggaaccacaagcaacacgccagacgccagagccagcccaacgaaagcaaggaacgcagcgaaccaaaacgcgcagggaaaagcaacagcgac

SEQ ID NO: 185862 - DNA, 478 bp, Arabidopsis thaliana
  unsure (1)..(478): unsure at all n locations
ggacgaaagcagggaaccacnagagcgttcgcccggggggaaaaggcccngacccccagaaagaagaaaaaaacgggggaaaaaagggccaaaacagcgggcgaaacgaaaacagaaaaaaaaaagagaaaaggagcaccgcggccccaacaccccgaaggagaaaggccaccggggagcgaaaaactcctcataggggggcggggaaggcacccgcagcacggggaacaaaaaaaagcgcgggcaggggggggggggcggcaacaacaaaaaagacacgaaaggcgcaagccaaagcgcgaacagggcggggaaacggcggccgaaagggaggggcggaagggggccgaaacccgaagcgaaagaagggacgaaaaagaaagaagccgggggccggcggggcgggggggacggaggggaagcagaagcgcgacaacacacgcaagggggagccggcgggagaagggcaagcgagcag

SEQ ID NO: 185863 - DNA, 422 bp, Arabidopsis thaliana
  unsure (1)..(422): unsure at all n locations
cgtagctggatctctagagcgcctccttggggnaagcnnnnnngnttagtgtaattattagattactgtttgactaaagacccaagaacactttattaatgatgtaaaaaaaaaaaactgatatcttattctgaaatcgaattcgatatccaaacgcttattttttgagctgttgcagtctacttgcaatggtcccagatgaacctcattaggccatcagcatcctcagtgttctagctgtagccccacaaatgcgctaaaaactggtgtgcccgaggataccacccggcctgcttccatgaaacttngtatttgcccgggttttagtaccctttcattgcccatgtttgggagttgcaacctttggccattgccgagaattccttgagcttttttgtttccaaatttatcaagatgatcag

SEQ ID NO: 185864 - DNA, 681 bp, Arabidopsis thaliana
ggcgccgaggggccgggcgaatccgttggcccgcggcaacccggggaaacacaggccacgagagcgagggcgacgggaggcccaacaaacaggcagggggagagccggggcgagaagcaaaggaagcgacaaagagaagcagcgaaagcaaacaggtttctctcttcagggcggcagagggaggagaggcggcggcaccaggcgaccgcaaggaccagccgagcaagaacaagccacacacaaccagagaagcagaacggagaccagcaccggcaagaagagagcaccccacccaagcaaggaacaaagcagcagcaccacgacaccacgcacgccgcgacaccagcaagaagacaccaagaccaggcgaggcacacagcggaggcccgaagagggggccgagccgagagaaaagaggggaggcagcgacaggccgccgaaggcaagcaagaacgggaacgagagggcagagcagaacgccaccagcaacagcagagggaccagcagccgaccactagggcgaagagggagcgccgcgagcggcgcaaaaacaggacaagacgacagaggaggacccaacgacgaaacagcgacagcaaaaagcagatcgcataagaaggcgggggaaggaaaagagagcgaaggggaaacgggcggcggaaaaccagccggaaagagggg

SEQ ID NO: 185865 - DNA, 861 bp, Arabidopsis thaliana
  unsure (1)..(861): unsure at all n locations
gctctaatacgactcatatatggaagctggtcgcctgcagtaccggtccgggattccgggtcgacccagcgttcgaaccagggaagctgttaagttttaaaaaaaaaactttgggttttgaaaggaaccccgcgaaagggaactttagggatggggccaagttttttgccttttcctctccccaaagtttttaggggccccccacaaaaaaaccccccccctttcttttgtgggggccccaaattttttttctcccccaaaaaaagaaaaaagccgggggaaccccttattaaaattttttttccccgggggggggggcccccacaaagggggaaaattttttttttccccaaaaaaaaaaaaaagccgcccccaaagaggggattttctttttttttttcaaaaaaaaaggggggttttccccccccccccggggggggggggggggccccccacaaaaaagggtttttttttttttttttttctctcaaaaaaaaaggagggccccccccccccccccggtggtgtttggggaaataaacccccccccgggggggggatgtgaaaaaaaagggagaacttttttttttttcttctcccccccnngggagaaaaaatagtggggagaaaaaaaagttttataatattggggggggaacccctttttttttttttttgtttcccccctaaaaatggggggttttatttttccaccaaaacacctatttttataaaaacaanatttttcttcttttttttgtgtagagagggggttttttttttcccaaaaaatctttttttctggggggccctcccccaccaaaataaaanatttttttttttatatttttttccccccgg

SEQ ID NO: 185866 - DNA, 830 bp, Arabidopsis thaliana
  unsure (1)..(830): unsure at all n locations
tatttaggtcacactatagagatctatgacgcgctgcaccgtcgtagctggatctctagagcgccgcccttttttttttttttaaaaataatccaggccttggccttgaagtccggcccatggaaaacctccctaaaaggaccttggccccccaaaaattgcggcaaaccccctttttttttaattgggggggggggggagccaattggagaacaaaaaaaccccggcccccttttttttgtttttggggggaagaaaaaaacaaaagaggggtttttttttttctttctttgtttgtggccncctctttttcgcgcccccccaaagaatacacaccccctttttttttttcgccgcgctttttattttatataaaaaaaaggggggttctcccccccaaaaaaaaaataaatctttttaaaaaaaaaaaaaccccccccccccgccccaaaaaaaaagggggggttgttttctaaaaagagggggggggggaggccccccccccttttttttttttgaggggggggaggacacaccccccccgagaagttttttttttaaaaaaaaaaatattttttttctttccnacgggggggagaaaaaagagaaaaaagaaactttttttttttttttttctccgcgggggggggggggggagagaggcccccccccgggggtggggtctgttttttcccccccaccccaagggggggagagntntttttttttttggggggggggggntaataaaaaaaaaacacaaaaaaaaaaccctttttttttttttgttgcccccccccccccccccggcgaaaaaaaaataatttttg

SEQ ID NO: 185867 - DNA, 560 bp, Arabidopsis thaliana
ctacgtaagcttggatcctctagactgccgccctttgtaaagctttttttttttaaacatgacagacaaatttacattacataacaagccgtgaaagttctctaaaccaaaaactgaaattgtatacaactcacatgaagaaaccatcttcataattctttttagaaaacactcaaaaagatttttattcaagagtgtgacctcaaatcatattcatacaacatctaaacacaaccgaaatgagggtgtccactggactcatatctccatggtgtatacaaatcatcctcgtgatgacataaacataccaaaatatgtaggaacaccaacatcgacttatgacctcttgctcctctctacagtagcccacatctacacattcacccctactcccaaacacaagtaaaccttaatacttagctgacctattctgctaaaaaggttctcaaacccactcccatatccacacaccccgtaccctaccagcaactcattcacgcttaacattaccaaatttttttcttaccccttagaattgaaatatatcacgtatcctcatc

SEQ ID NO: 185868 - DNA, 435 bp, Arabidopsis thaliana
cacgcggcagaagcttggacctctaagcggtcgccggggggaaagccccccaaagacgagcacaacccgcgagaggcaaccagcaccgggagcaagacgaacaaagagcaagaggcgagagcgccccaagacccaggcaaggaagccagaacgagagaaacgaacgacaagaaaggaccccctccaaaagggcggcggaggaggaaagcacagcaaggacgagcaaggggccccccgagaagacggggggccacgaaggccacggaggggcgcgaggaccgggaggacggaaccagcgagcgaagcgaagcgcaagacagaggcaggcgcagggcaaagaaagacgccacaagctcaagagcgcgaaaccggaggcgaggagcaacgagacggcggtaggagcaagaggaagacgagagaacagggaaggaagca

SEQ ID NO: 185869 - DNA, 150 bp, Arabidopsis thaliana
ggcgcctgcaggtgccggggctgaattgccgtttgcggcccacgcgatacgcctacacgatcatgggaagtcgtgagttggcagggcaggtgctgtttggtatgagtgtagtaggtggagtggtggaatgtattagcacgacacagttgt

SEQ ID NO: 185870 - DNA, 753 bp, Arabidopsis thaliana
  unsure (1)..(753): unsure at all n locations
atgattctccaagctctacatacgactactatagggaagctgtaccctgcaggtaccgtccgatttccggtcgcccacgcgccgagacttttgtactcacatttaaaggaggcacccttttttggggcttgcttaaaggggttcaaattttgtaaaaccccctgggaaaaatccctctgggtggaggtttaaacacttttcaatttaaattataaaccaaaaaaaaggggtttttcccgagaaaaaaagagtttttttttttggggggaagacccataaaagaacgcccctccctttttataaacaaaaaaaagaaggggggcccttttctttgtttgttttctcttgggggggggggggcttctctttgtgaatacanacccgaaagaacaaatttttttttggggggagggacacccaccaccctttattgggtgggtatattaaagaagagagagggggccgcgcgcccccaaaaaaaatattttttttttaaaaataagagagggggggggtgctttatataaaaaaaaaaaaagaggaggggctctttcttttttctttttttgtgtggggaggagatttttattttttataatataagaagaggggngcttttctcctagaggagagataaataaattaatatgtggttgcttgagaaaaaaaaaaaaacaacaccccctttttttttttttttttttttctncgcggggcggggggcgggcttttttttttttatactgggggggg

SEQ ID NO: 185871 - DNA, 492 bp, Arabidopsis thaliana
tggagttgcatgcccccctacctaagcctggattctttaggagcgggcggccctttttttttttttttttttttaaagaaccttttttttttactttttaaaatttttattttccagttttaggggacctaacaaaccgtatccaggttctggaggttggcagtcggccaaaagcaaaaccccagggggggcgcggatcctggcatttttttttagggggggcttgttactggactgcgagcactaattaaaatggcggagccctctttaaccctacggtttccaggttaaccctctttgttagttcaagtcgaccagtttcctcttccggcgaagcaaggaattgcactgaagttctttggtgaagccatttttgaacaattccgtcagaaagcaggtttttttttccacagctgaatccatatttgcgggaataccaaaaccgtaatgggaagggttccgaccacagggaccattcgacaaaacaccaca

SEQ ID NO: 185872 - DNA, 408 bp, Arabidopsis thaliana
  unsure (1)..(408): unsure at all n locations
cggggaccaccggaggccccncccccagaagccggggcccctaaaatttccccccccggtttttgggttttttaataagagaaccaggaggcgaccgagagagaccgccaggaaggaggacccacaaggagaggcacaaaaaccgcccaagggaaagagaaaccaaatgcagaaccaggggaggacgagcacaaagacagccggggggggaaacctttttttagagggggttgggaaaagagaccaagacgcgagacacacacgaccccaccagcacaaaaccctaagcgcgacggagagagataactgagcacgcccgccatataggctggagggagagcgaagagagaccccagagcacaaccccaagcagacacccacggccagagccagcacccggccacaaag

SEQ ID NO: 185873 - DNA, 259 bp, Arabidopsis thaliana
  unsure (1)..(259): unsure at all n locations
ctaaatagtcgacgagagacacagcgtaggcatggtggactcgctttgccgaggacatgatcaagcacgcacgagagaaacagagaaagagcacctgccgaagatagtaatatgtaacgagcgcagatcccgcaaagtcagaatgcgtgtcgtgcgcgcgacaggcattcgattgtccncaggcgcatatagctcgagccccacgcaagtcgtcgagcgctcaggacatcgatacagacgtacactctcgacgctagac

SEQ ID NO: 185874 - DNA, 502 bp, Arabidopsis thaliana
acactattagaagatctatgacgttgccatgccccccttcgttagcctggattcttttaaacgggcggcctttttttttttttttttttaccaaattttttaccttttgattggtttgccccccaggggattaacccccttttttccatttttaagttttaatttaaattcaaccacaaggttccaaattttccctttttgtacctaattaaattaagcattacttgttgtaaaggatatggatttatatttccgttttcaagtttttttgtggatttttttccagaatggatttgggttttggttggggagtagtttaaccaaatgttaatatccccagtcttcccaagcttgacggcattcaattaaacaacggactggaggatttcttaaaaggaaaaggaatttttgagagacattgatgaatatagatgagtgaccaatgccgttgttctacgacattgtaatgaaagagaggaactcactgcgattgaacaggcaa

SEQ ID NO: 185875 - DNA, 441 bp, Arabidopsis thaliana
  unsure (1)..(441): unsure at all n locations
cactatagagatctatgacgtcgcatgccgcgtcgtagctgatcttagagcgccgncttttttttttttttttttagacttttttttcttttagctttagtttaaattaggggacttccaaaggttcaggttggaagtgcgggggccaaaaaaacccagggggggcccgacccgggattttttttaaggggcttttaaaggcccccggggaaataaaaaaggggggggccccctttccccccccgggggtttataaaacacccccttttggttgatatttaaaaaaaattttctccccccccgcgggggaagaaaaaaaaaaaatttggaggattgtttttttggtggggcgcccctttttttttaaaacacacccccggtgagaggaggggtttttttttttttttcccccggcgacgcccacaaaattattgggggggg

SEQ ID NO: 185876 - DNA, 494 bp, Arabidopsis thaliana
acctatagaagtttttggacgtcccaggcacccgtccgtaagctgggatcctctaaagcggccgcccttttttttttttttttgtcctgggaacccaaacacataaccttaattggagcggcccttctgtgtgtcttacccatgataacgggaccaaattcttatttaaacatcacaatattcctacagaagagctatgcctcagtacgtgaacacactgcctagtgaggaggcggagagaaacattcaatgtggatgagcggctcctcagatgatcatagagcctttgtctcttaaccagactgagatcacgaaaatgctgacattttctctttagtgttcttaacgaaaagcatattctctctgaagagaatatgaactatcacacatatcttttccagcgcgcgagagtgtatgaccaaacgcctcacagagcgctggatccatcgcgtatactactaaggactccgatgtcgcctatggggctaatcact

SEQ ID NO: 185877 - DNA, 102 bp, Arabidopsis thaliana
tatgccggcagcagataatgaactagcggctccgagttattactgtgaaagtgccggcgccgagcgagaagatgacgttagtattagcgagcgtatatgaca

SEQ ID NO: 185878 - DNA, 306 bp, Arabidopsis thaliana
acactatctcatcgacatcgtaaggagacgctgcctccgttgggatgcctcacatagcgtacgccgtgaagtcacaaatgccgctcgctcgcctcgaagaccaaccaaggcaaataactcttcttatagggtatgcgtcgacgtatgtcgtagtgagtgataccatgtcattgagttgatgacggttgtctttgcttgcttacttattgctcctcagattctcttagcttctcgttacgcctacgtcaccagtatctctaaattgatatgtattgtgagagcccgaatagttcctaggcagcggcg

SEQ ID NO: 185879 - DNA, 240 bp, Arabidopsis thaliana
ctattatgatatccacatgcgagtaataaaaaagagcgagagtcacgatggacgacgcgcacttcgtcgtggtcggtttgcgacagcaggagcagacagctgtcatacatcgctcatgatatagcgtattatgatctcagacagcaagtacgttctcatacgtaaagacataggtaatctaatgtctggtaattcttcagtatatttaggcgtgtaagacgatattaactaatatcagtg

SEQ ID NO: 185880 - DNA, 233 bp, Arabidopsis thaliana
actatcgataccgcgagtgggtatgaaagatgagaatacgaattatagaggatcatatcgttacttgactcgcggtacctgacgagttgcaacgattcagcggaccgtccagcacctatgttcatgcccgcctcaaacggcgcgataatcttttcaccctgtggctatacttatcgtattaaaacatacatagtatgagaagagaagcacagtcagggttagcgtcaccagac

SEQ ID NO: 185881 - DNA, 508 bp, Arabidopsis thaliana
ttttggaagatactttgccttgcatggcccccttccttaggctggattcctttaaagcggccgcccttttttttttttttttttttttttttttttttttttttttttttttttgggttttttttttttttttgggttttttttttttttttttttttttgggccttttttttttttacccccatttttccaaaaaaaaaattaaaattgggtttaccttccaaaaaattttaaaggggtggggggttgccttttaaggtttaaaggggaaaaaacccccttttttttttttttccccaagccattttccttttttccgaacctttaacaaaaaaaactttgaaaccccggggttttttttttaaactttccaaaaggaaaagggagggcccctttaaggggttaaagggttttttttttgcccacttaacctattttttgggccccggttttttttttcaaatcccctggggggaagggaattttaaggggggggaaattttttttt

SEQ ID NO: 185882 - DNA, 185 bp, Arabidopsis thaliana
cgccggtcaatttgtgcacgagcggcgacgcgagaaggtgggggaacagtgaggactgactagttgagatgagataatgtcagagcccgatgttcttcgcgctagttcgtcaacgcgcccgcgacggacgcgggcagtctgaggcagagttcgtaactcatcgatacgtcccatataagcggcgc

SEQ ID NO: 185883 - DNA, 434 bp, Arabidopsis thaliana
ccaccctaccaaaagttgggatccttaaaatttgccgcccttggtgaggtggttactaaaaccaaacccttgtctaaatggcaccaacaccaaaagcacgcgcagaaccctgccaactatgccaccagatgaaattaaccaaacaggtttacaccacaacaacaacaacacaatctgaacttgatacaattcaacatttaaccaatatttttgggggggggcctaaaagccccgcccctcgacgtggggcaaaccccaaacaatctgtcgtttacggggtcgcgcctaaatgtcagacacgagacttcaaatcgcctcccccacaaaaaaacaatcttatcacaagaaataactcaccctcccgcgtcactacgccccacaacacctctacactgtgatcgacggtaaacaatgataataatgaaaaggattta

SEQ ID NO: 185884 - DNA, 537 bp, Arabidopsis thaliana
  unsure (1)..(537): unsure at all n locations
attttttgggtacccccgcacgcgtattatagactgcgacctccaaatatatagcccctcgacgggccgccctcccaaactcatacctgcccttttaagcccacactttggcgaaggctttaacgcgctccttgtcagagagcccaacggctccattcacccccctccttgaaatccatggtttgcaagatttacggagccaggaagcttccttttttatggggggagggcaacagtattcgatataaaagtaaagagttactagcaaactacccgctatgactttctatttgccggaccaccgtgaagctattccccttttgttcaatgccctgtcactacatataatactaaaaaacaaacctcaggcgaagactgtgacagaattagtaattgtattctggtaaggttactacagngtttccttggtccaaacccttatgtagagtaactccctttccctctccgatccttcaaattcaacgggcagaaaaaaaaaaatagacccgcctcagcacagtctcgacatctatatct

SEQ ID NO: 185885 - DNA, 508 bp, Arabidopsis thaliana
ttaggtgacactttagaagactttgacggtgcatgcccccctacgttagcctggattcttttgagcgggcggccttttttttttttttttaattaattcccaaccatttcttaagtggttattttaatattcttaattcccaagaacccctaattacctacctttaacctttaccttttaaccgaccttaaaccaaggaatggtggcctttccttccaaatattaattatttggggagaaaataatattaggcctactatcgaatttacatctttggaaaaaaaggaataaaaaaattccctcatctgggagcgaaggagacggggatatccgttggccgtttaatattcgccgaccatttttccgattctaaatacagtggggatatttttccggcgactcttcccatctccggcctattcactggatcatcctgaacacaatccaacgctagcctcgttaacttctccaccaccgtcacaggaaacgaatcctccaatctccgatc

SEQ ID NO: 185886 - DNA, 123 bp, Arabidopsis thaliana
ttggtgcttggtcattgaattcggcgtgtgcatttcttgtatgtgcagagaaattcaatataataacgcatgcgtcgggtgtgatgacgcgcacgctgtgtacgtagttttcggtgtagtgtc

SEQ ID NO: 185887 - DNA, 497 bp, Arabidopsis thaliana
tttggacgtccctggcccccttccgtaagctggaatcctttaaagcggccgcccttttttttttttttttttttttttttttttttttaaaagggaaacttaaaactttttttgaacaaattcctcaaccaaaaaccccgttaaaaccaaccttgccatttttttaagggtggttaaaaacaagtgaaataaaaagcttaccaagaggttttttctggagtttcaaaaaaaaagctcgattgggggggacaaagtttataatctccggggggtccttttttaccaccagggtaactttcctcatcaccaggggcatgagagccctgccggcctttttcgaccaaacataaatgttgttaaacgtcccgaaaactcacttaagcccatgccttatcctgcgcccaaggcaaaagcgctttacgcctaagcatagccgcaaactgctgactcactctcaagaacattttttgagtggacggggaggcccccacaaacgc

SEQ ID NO: 185888 - DNA, 491 bp, Arabidopsis thaliana
atgacgtcgcatgccacgccgttccttagcctggattcttttaaaccggccgccctttttttttttttttttttttttttttttttttttaacccccccaaattccttaaaccccaccaccaaccttttgtttccaatttaccccccaaaaccaaaagggggcctttaccaaaaggaaccaccggggggaaaaaaaccaaccggaaatttttttaaaaggggcctggttggatggattttctttttaagttttgcctccatgtttttaaacttaaaccccacctttgttgcacagaaccaccttatttttttattttgccataaagagccaaacactcccaataagccctaccatttttactttgcattttttttccctttagccctaaaccttttggctggcactccaaaaaaagctcatccaccatttttatcgacttgctcctaataatttcctccaccatttccgcctgggccttaataaccacgtt

SEQ ID NO: 185889 - DNA, 424 bp, Arabidopsis thaliana
tgacgtcgcatgcacgcgtaccgtagctgggatcctctagagcggcccgcccttttttttttttttttttttctttttatttttttatatgttttggttttttttgtatgtggctcgtttattttgtgttttttttttgggaaaaaaaagttcccccttgcttttaaaaaaaaagcctttgccccaaatccaaagggggggcttttttttaggggggggccgcattcgttttaaaaccccccccctacttttccaaggcctgtttagctggtggttcttgtccttgaggagccactccccccccccttttgggggcggtggacgttattcgcacgtggcttggcagggcatgctgacggacctttttttggtttctgacctgcgttccaggcccgggttcaattagccgtgaaaaactcgtgag

SEQ ID NO: 185890 - DNA, 601 bp, Arabidopsis thaliana
ttaataaatttttttccctaacctttgacaataaaaatagaccgacgggaccccccccataccaaaccaagataaaccggaaacaaccttctctcccagggagaggggaaaaggggggccaaaaaaaccaacaaaaccaactccccaaccaaacaaaaccttttacacaaaaaaaaaagaatgctccccttcacccaaaaacacaaagaatttccaaaacccaaaccccctttatagaaaagacaattccccaccatgcccaacaaaaaaccccaacctgaaagggcatccaaccccctgaaaaaaccccccgggaaaaaccaagctttcccacaaaaatacccccaagaaaaaacaaaacactttaatccccccccccccccaaaaaaacccgcccaacaaaatataaaaaaaagcgtaacaccattttgaaaagaaaccaacccactttaaaatactaaaattggggacccccccccccccccccgggggccaaaaacaaaaaccccgacccggggggggccccccaaaccaaaaaaaacctaaaacccttgagggaagacagttccgcccccaaaaaacacccccacaaaacgggccc

SEQ ID NO: 185891 - DNA, 817 bp, Arabidopsis thaliana
  unsure (1)..(817): unsure at all n locations
aaaaaaaaaggcccatgggaattaaaaattgctttaaaatccataacccatttaaccctttccaaaatgactccccctataaaactaaaataaaggcgaacctctgttttctaggggggggtttcaaaaaaaaaagccgggccaaaaaaaaaatccttcttcccccccacaaaacaataacaacccttactaaaattgtgcccaacccctttggggaaatgccttttgacaaccaaaaaacccacccccctaaaaaaattgggcccccgaaaaaaccaatggttccccaaagttccaccaacccccctataacccccatgcctgggtcccccccctttagacccccaggtttaccccaccaaaacccccccctgaaattttttttcttttaacgccccaatttttctccccacccctaaatttcctttttttccccatgtcccaaaaaaaacaccttcttttctctcaaagggggcgcaaaagccacaaccccaatcccccttaaatattttctccacttctctttttctcctaaacacaaaaaaactttgtaccccccctttggattttttttccctcacacaaaacaaaaaaggtcttccccccccccccccaagngaacaatcctcctcctcctctttacaccaaaggaaacccccttccctatccaccatttcccgcctataaaaagacccacacaacaagaacagaaacaaacgccccattaaacactacttcctcgagacaatcccccactttaatatcaacaattgcacagaaacttcaccacccacacctatcccttttttagaaaaaa

SEQ ID NO: 185892 - DNA, 610 bp, Arabidopsis thaliana
  unsure (1)..(610): unsure at all n locations
cccccccacaaaaaaacgccgggggggtgttttttgggggggccccccaaaaaagggggacgccccgccgttctccccttccttnctcttcttcttttttttnnggggcttgtcgggccccncccctggggggggttctcaatttttattttnagcccgaatggccgcccccgcgccccgcgcccctcctcttatagtgcttctcccccccccttcttcttctccnctacagaacctcctgtttttttctcccccccccgcccgccccccccttctttcccccacattgtctcgcgccttgtcccccccacctccctcgctccccaccaccgcctctcgctctcttgttcttcccacctgctctttcccccctctctttcctctcgtttgcggccccgccttctcttgctctgcgcccacttctccccccttatttccactcgccgcttgccctgctgttcttctctctctttttcgcctcccgacctctagccgcttcccgtccttcactctcgcctctacccaccacgcttcccccacgggcccgcccgctcctcgcccctccgttctcccgctttcctatgatctctcctcctgctcgcctcccgcc

SEQ ID NO: 185893 - DNA, 734 bp, Arabidopsis thaliana
gttttccctcttaaacatttctttaaaaaaggtgtgggcgattttaacgcgcgcttttaaaacatataaccaaatttcccaggtttttttcttctctctccttccaaagattcccgattccccccctaatcaaacccccatttgtttaaaaccaaaaatttttttccttatagaatataaaaacccaagggtctctacaaaactccttttttaaaaaaaagaccctcttttttttttttatcttacaaaaataaacccccaaaggctgaaaatccctgtgccctcccgggggcccccgattttctcacagatttttctttttgtaaaaaaaaccctccaaattttttgttttcccgggccccctaaaaaaaaaattggtttttttataaaatattttgggaaaaccccctcccttgtaaccttttattattaagaagacctcctacccccatccctctttaaaaagcgggttacaacattcttcaaaaagaaccttccctccccccttcccccaaatcccccaaaaacccttttttttttttttaaaggaaccccaagcactttgcccccctataccccacgacaaaaaacagatggcttttataacacccccccaaggacgccctttttctctctcctttctcttaaccatatttcgctcctaaacacgattatcccgcggcataaaattatgtccaccccgctatcatccctccttccccaaaaaacccccc

SEQ ID NO: 185894 - DNA, 535 bp, Arabidopsis thaliana
  unsure (1)..(535): unsure at all n locations
tcacctctaacttaatcctctaacgccgccttctttttttttttaaatagcataatttaaaccaattatactcacataatttaatctcactagaatcaaaccaaaaaaaaaaggtcacaattcttaactttttttctcagggataaaaccttnaaaaaaaaaattaaaaaaaaaaactgatgaaccaccattaaaacctcgcccaaaaaaaaacctctttccttatcccctccgaaaaaaaaaatgccctcaaaaaaaaattccccacctcatacaacaactttcctctgaaacaaaaaaccctctctaaaattccaaacaatccccctatttttctcttgggaagtggcccctaaccctcacaaganttatatttaaccctccaaacttttttccccctctctttttgccaactccaatttatttaattctttccccaaaaaattgggcaaccccccccttaaatttttattctcaaataaaaaaaaaagaaaaactctttccccctaaccccaaattagaaaaacacatctcc

SEQ ID NO: 185895 - DNA, 671 bp, Arabidopsis thaliana
  unsure (1)..(671): unsure at all n locations
ttttaaaaaaaggcccctcccgggataaaaaataaaccagggagcccatttacatgcctataagagccccaaaccccgggcgtgggggctcaataaaaaaagaagatatcctaaaaagtgtttggaaaaaattcctcttaaggaggggttgaagggaaggnaatttcggggaaaaaaaaaaattattaaacccncccaaattttttttaaaggcgtncccccccccacccgagcttttgttccttccaataccaaaacctggggaagggggtggggggttttccctccccggtggcccatttttaataaaaatgggggagggaagaggggggagccccaacgggcccccacatcctcccccaaagcgtccaaaactctcttaaaccaagggggtgagttcccgagggtaaacccccaaatctcaaacaccccgcgcggggtggtgggacacacccccataatacacacaggggggggagggacaaaacacccgcctttggcttccactataattctgcgcggcccgcgtgtgggcccaccccgaaataattccccgaccgcgcccccggggggggaacacagtttatccattaaggagggaggacataacagggggcgcgcgaaaacacgacaaagggcgccctcgcagaaaaaaatttcgccgcccccac

SEQ ID NO: 185896 - DNA, 216 bp, Arabidopsis thaliana
  unsure (1)..(216): unsure at all n locations
ggggctttttttttttttttattgaaattgataactaaaaccaaatggcgttatcttccttggaagaaaatctcacactgcttaagggaagggggacttattattggtatgaggggctcacaaatcccngtnttaaaccagagggggagggaaatttttttttccacccaaaaaaaaaaaacctgatcatttccccgtgtcccattacggtttcct

SEQ ID NO: 185897 - DNA, 837 bp, Arabidopsis thaliana
  unsure (1)..(837): unsure at all n locations
tttttttaaaaaaaaccctaatttttcctaacctttaaatactaattccatagatcccttcatagaatttggattaaaatccctaatgggatttttattttacatttaaaatcctctaaaaggcaaattaaaaaactttcttaaaaacgggttgtgtggtcttnaacctgggttgaaagaaaattatttactcttcgctggccagacccacaaactttcccacttcaaattccaataaaaaactgagcaaaaactcaaattaccccttggggaacttggttttgtttttaaggaaaacccaaaggggccaaaaaccgtttttttgctctagggggacccaaaaaaaaaaattaacccccactttaaacggggttgggttcctccaaaaaacctaacttttttaaaggcctggaattattgccagggtggggttctttccttttttcacgcaaatttttgcggggaattttttttttaagtctcatctcccggaaaaaaaacaatttttttccttttgggaccctaagaaaaaaaaaaaaaaaccggaatttttttttaaaaaaagaggggttctttttctaaacggggacggggtttgggtgaaaaaaaagatattttttttttggcagaaagccaaaaattttttttttaagggcttttgcggccgcaggtccccttttagagctggtttaaaagattttttaattttttgggggggtgtggcaacaaagccccacaccccctaggcgccgaaaaataaaaaagaagaaaccgcccacactttacagggtgttcgccctacccagaaaaagcgctcgcgcttttctacaaaaataa

SEQ ID NO: 185898 - DNA, 651 bp, Arabidopsis thaliana
cccccccttctccccgcctccctctcttctattcgatgttctttgttcccccttgctcccccctcgtatatacccctacaaattctcctcttctcctcctttccctccccctctcccactcctatcatccttcatcattccttcttttcctttttccttccctcccttatagcctactcgttccataatcctccttcctttcctacgtgttcatctcctcccgcctcccccctcttctctttactactcttctcgcacccccattccatcaacccccaacaaccctcctccactcctaccctcttcccgtctctttcccttctccccttctccccttcctttctctttttcattcaacccagctcctctttgtattctcctacattccccattcccccctctccccccataacccttctatctctctggttcagttcttctcgctgccctcacaaaccccttatccccccctccctccccacctcccgccccaccatacacttctctaccatcttcttccttccccaccttttaattcccttatcatcatctaagtgatgcccagccactcccttcttccctcgttcttctctttcctccatcttcttcatctctctctccatcccccactcccttatcctaccccactcc

SEQ ID NO: 185899 - DNA, 691 bp, Arabidopsis thaliana
  unsure (1)..(691): unsure at all n locations
tcccctctaactgatcttaacgcccctctttataattttttttttaaaaaccctttaacttttttaaaaaacccaaaacatctttcttcaaaccataaacccctctcctttttttccgggcaatttttttttttcaaaaacacacgtttatttttccttcctcccacctaaaaattttttttaacccaaactaaaaaattcctttccccccctctttatttcctaaaacaacgcccctttaaaaaaaaaccccctttccacaaaattaaccttctttacccccaaaataaaaccctttttacaaaaaaaaaatccttttttttcagccccaaaataaatcccccttataaggccccccctcccaaaatatcacccacaatgttttaacccccaaaaaaacaacccagtctccctctattaacccctcacccacaaacccctccctaaagaagtcctcccattactttttatttcacccctccccccaaaaaataaaaaggcccccccccaaaaagtgggccctccccttctataaaccacaaagttgtttncccccccaaagcccaaaatctctcttaaacccggaaaacctctcaaaaacaattatactcaaaaatttctctcccttaaaaaaaccacccccccccttaaaaatccccttttcacaataacccccaattatttanccccc

SEQ ID NO: 185900 - DNA, 802 bp, Arabidopsis thaliana
  unsure (1)..(802): unsure at all n locations
tttaataataattttttttntnnttttttttaaagccaaatttttatatcacatatatatgtttaagcacattcaagttctaaaacccacctccaaccccttcatagggaaaagtttctaaacggagagcttttttttttgcaaacctaaaaaaaaaaacaacacctttttgttggcctaaaccaaattaaatcccccttttctcttttttaaaaaattttgttttgggggcacttttttaacattggttccttgggccataaccaaaagatctttttcttttttttgaaagctttaactttttttcctttcaaaaacatctaantctcgtattttttttcctcttaatcaacaaaagaggcgtggaaaaagaaaaacacacccaaaaaccccctccaaggttgtaaaatgttttttatataaccccacaaccaaaaacaaatatcccttcaacaccaatacattaaaatttttttcttacncttctccctccccgggcaaaatttatacgctgggttaaacaaaaaaaaactttgtttttaaagcgttcccccccggttttccccttcaaacacccttcttatttccccccagaaccccgccgcctctttaggggccctcccctatatatccccgtttttaaaagaacccccccccccttctttatttataattttaaaaaaacaaaaaaaaaaccccccgtgagaaccccttttccaaggaaaaataaaagagagggtcctcccagaaaaaacctcttgtcgcccttacccattttcccttaaagnggaaagcccccgcc

SEQ ID NO: 185901 - DNA, 714 bp, Arabidopsis thaliana
  unsure (1)..(714): unsure at all n locations
aagcttggatcctttagagcggccgcccggcttttttttaattttttnttttttttttttttttttttttttttttttttttttttntttttnaaaaaaaacccccccctttctccaaaaaaatcccctccccaattttttaaagggagtgcccttaacccctttaaaaaaaaaaacaaaactttaataagggggggcggaggacctttttttccccttttaggggggggaagacccttctttggaaattgaccccaaaaaacccttattttgctggggaacccccaccctttaaacaggtttgtttcccctccccccctgaaaaacctaacgtccccccccttgggataacctttttccccggcgcttaaagggggacccctttcccttttttttccccccttctctttccctaaaaaccttcaacccccccgtgtgaaaaaaaaccctccccctttcaaacctttttagggctcccccggtgcacaccgggtaaatccccccattttttccccccgccccattttccaaaactaatccccggaaaaggtccccgacaacccccctttggggaaaccataatagctcccccgcggtccgcgggggggttctttttgtgtttgccccaaacccttcccaccccaaaataaccccctttcgggcgtttaaaccccttaaaacgctttaaacaaaatacccccccccgcgggacct

SEQ ID NO: 185902 - DNA, 671 bp, Arabidopsis thaliana
  unsure (1)..(671): unsure at all n locations
aaaaaactccccaagagtgtaaaaaaaaaccaacacccgcgaggaggaggttttttctcctccccccccacaaagaaaacctaaaaaatcccaaaactctgaaaaaacaagcccgttcaaagaatttcttattaatagggattgtagggccccnccgggggggggttcaaacttattttaccccaaaaattacccccgccccgccccccccccccttgttttcctccccaaaacacagaaaatcttattctagcgcctccccccccccgggtttgcctgtgtaccacccccccccaaaaaacgctatgtgtcttgctaccctctcccacgtcagagcgccttcaggcaagaacccccccaaagaacacccgcagcgtgatccaccccctatacaagacagcccgaccacgtgacttctctctcgcacacgcttgcggcgtacctccctccctgcacccccggtgtttctcgattactcagcacctgcgcgctctcctgctccgcccagcagccctcctcccccgacccttaacgcgcaccgcactactctctacgaagcgctcgcgcacgtcaaaaacgcatcttccgccaatgactccaacgcctccactagagtgcgcgtgcttaactccacgccctctccactacggccgcggctacgttttctcctt

SEQ ID NO: 185903 - DNA, 921 bp, Arabidopsis thaliana
  unsure (1)..(921): unsure at all n locations
aaattttagaacanccccccccgccttccttgagcttggttcttttaaaccgcggggctgcttttttttttataaaataccggatttttttaaaaagtctttnaaatttcggcccaattaaaaatttcctggggtggccttcggccctaaaatacccaaggctttttaaatctaaacctgaatttttcttcatgggtgttgggcccccctcgggggggaaaaattattatttttcccccccccccccggtaaccccttctttttcccgcaatagggaaaggttttttttcccccccccccaaaaaaagagagcgtcttttcaccgggggggccccggttttaaaccttttttgtttccccaaattaaaggacggggacccccccgccctcctttcttttaaaaacccgcggggccccattcttatattatgccccccaccccaaatttttttcttgataatcctccaaacccccgggcctttgtttaaaataacgcggcctcctctctttccctataaagaaaaaagttttctctttttcaaaccctccccgcgctaaacaaaagaccgtccccctccccctccccccncgagtccccactttaaccccacaaaagaatggcctctccctgccttgggcgccccacctgtcttaacttacccccgcccactgttttccactcttccttcctaaagtgtttcttttcgggccacatcttctctctacgtcctccccgaggggcgggttttcgcggcagccctcctttgctcgcgcaccggaccccgctacgctttctctggccctcccttactcgcccctcctcgcgcctccgccacgagccaagggatgggcgtgccctcccgcgcctgcgcacccccctctttgtttttgttgtcgacccctgtcttcggcgccgtccgg

SEQ ID NO: 185904 - DNA, 616 bp, Arabidopsis thaliana
gggggggtggtttttattttggaaatttatttttcctttaaaggtaggggtttaacaccaccatgttcaatttttctaccgaaacccccctaaaggggttaataaaaaaccctttctcaaaggggttgaaaggaaaataggggggggcaaaaaaataagtggaaatgggggagctatcccccacaaaaaaccccctctttttaaaggggggcccctcgggggggggggttttctccaaccaccgaggggaactgcccccttctccccacaaaaatttacctgtagtagagcggggtaggcgaactccccaaacttcttgtggtttaaataacaacccacccacggggacccccgggctttccccttaataaaaaaaccgggggtgttttttgtccgggcggggggcaccaaattgcgcttgggggggtctttttctttgttttaaaaaaggggggggggaaacccttttttaggcgaccaaaaaaattatcggggagggggcaccctttcacccgtattgggaaaaccccctgggggggagttcttttgtgctcacgcgggggcccccagggagattgggccccggtgaattaggaaacccattccacgggggggg

SEQ ID NO: 185905 - DNA, 239 bp, Arabidopsis thaliana
  unsure (1)..(239): unsure at all n locations
tccatccaccctcctagcttgtccttagacgccggctttttttttttttttcaaaaaatttgttatactaaggaaatcctgccctcctccaatttattattttatcaagaaaaaaaaaacctttatccaaagggatctgggatttaaaggggggctcttaacataatagaatgagcgccctnncctaaatattcgccccacccacataaaataaattttaacctttattaaacaaaaaa

SEQ ID NO: 185906 - DNA, 463 bp, Arabidopsis thaliana
  unsure (1)..(463): unsure at all n locations
cgtagggcttggatcctctagaggcggggggcgggctttttttttttttgacaaccaagatttattttcgcttaagagggggctttggtttaacaaggaagaagaaagataacccaccttccgggattttccctcattaactttctttaaccaaattgttaatttgtcggcggactttttcacacccgggtgcgtgggncataataagggccgcagggggaaaaaaaaaattcccaaaaagacaattttcccctctcccaaattataaccccaacccttcccttttctttcactaatcagcgggcgtgggggccgcgaacaaaaactaacaaggggggtccttaacccggggagaaatatccggggcggggggtcccctttaactttttgcgggggccaccctgttgggggggaacaaggtgggggctggggacaaacccccccgcggggcgcggggggggcc

SEQ ID NO: 185907 - DNA, 884 bp, Arabidopsis thaliana
  unsure (1)..(884): unsure at all n locations
ctacgtaagcttggatcctctanagcgggcgggcgagccgtttttttttttattttttattcaacaaaggttggtgctttaaaaaaacatgttcatggtcatcatggttttgagactgaaaacctacattttgactttacaaaggaagggccccctttctctttttttggagtgagggccaaaccggggtttgaactataacctcatttgaaaaggggctgaaaccccctgaaaacaagccctcctttaaccctttggagggggtggagcctcacagaggaaaccagtgggggaaacccacctcggttttagcccgtttgagtgcttccttaatagaaaagagaggttatcccaaaaataataaacgggcgcttccccccctgtttaaaaaaagggttcccctttgctttgggacccccctaaaaagaaaaacatcagtgggaacgggcttgtgcttaagagaaggtttttttcaactcccgcgccccaggggagaaaactcctgtggtaaccccatttggagcgggtccccgcccgtgggtgtttgaaaggtcccccaaccctaggtgtgtacaaaccgctcttcttttttgccataaacgaggggtgggaaaaaaaatcccccacacccctttttgggcttttttgtgtgggaagaccccgtgagtgttttttcttctcttgacaggggcgctccttgtgcgttaatatttggcgcccgttccgcggacacgacaagacgttgttccacgagtgtgggggaggtgtgatgacgccccctccccttcttcttctttctcccacgtgtcctcgctccgcgcgcctgatgctggtacatgcgcgggggggccgcaagcccattggcttgtcttgaaaccacacaa

SEQ ID NO: 185908 - DNA, 815 bp, Arabidopsis thaliana
aaaaaaaaaaaaaaaaaccctctttcttatccggggtgtggggggaaaaaaaagggggggtatggaattaatactcgcgccccccggggccccccccccccccctctttttttctcctttggggcccagggggggggcgccccgaagggacccacccccccccgggcgggggcccccgaaccttgggggcaagaaacccccagggggttcccccctggtgggggaaagagggaaaataaacctcccgacccccaaaggggggcccccctgggggaagatccccgcgggggggggcgggcgggaaaaaccctcttctttgtgggggcgccccctctggagggcgccccaccccccgtagtggagaggtgcgggcccccttccacctcagaccgttggtttttattgggccccacccccgccccactgcctgttttggtgtggggaccccaaagagggagggccagacatttttttggttttggcgggccctgcccgtgtcataagaaaaagaacacggcggggcgcccgccacagcaccctacggcggggggggcgcccccggtaggcgggccccaataccgcaacgggatgtctctccacgcgccaccgcccgcgtacagccccgccccccctctttgcgggggcggcgcgcgcgggaaaccccaaagacggacggtcggccaacccactcttgtgttgggggggggcaacaaaagacgcccccgggcggggggggcccgacgtcccggggcgccgggcaccccccttcctagggggcggacgggcccggcgagacgtgcgcccggccgggagca

SEQ ID NO: 185909 - DNA, 909 bp, Arabidopsis thaliana
  unsure (1)..(909): unsure at all n locations
ctacgtaagcttggatcctctatagcggccgcccttttttttttttaatattttaattttatnatcccccttaaaaaaaaaaacaaaccctccttcctcttattaaaaaccacaaccttttaaaaatcccaaagataacactctttccgaacacacaccaaaaaaaattttatannggagggagtcggtcattttttttggggattggctaaaatattaacacnccctttccccaaaaaaaaaccctcccccccgaaacctttccccttcctcccggagggctgcccaaaattttcttggcattttccccccccaaaaacatttttgaaatgtacaaaaaaccttttttttttttaaaccccccttggccccttcccaaccataaaaaaaaggattttggaaaacttaaaacaacacctttaaaccttgcccctccttttctaaaactcaaaaggggttttaaacaaaccccttttcccttaaaaaaaacccctctccccacaaacctataacaacccaccggcaaaaataacccccacccccgcactatttcccccgcccccccgtgctccaacccctaaatttcccccaaccccccccccaagcccacccaattttcccctttaggagaccncttattaaacgcccccccaaacaatggcaactctctctcccctcagaaaatatntcctccccccccctcccacccaaaaatacaaccgaattataaaattaaccccccgcccccaatatcagacctcccccccttttttcctcacccctccccccctttccaaaaagaaactttccccccactctatataactccccaccccggaaagccctcttcttctcccccccaattttttttttccaataaaaacccacttgtatcccttctcccccccc

SEQ ID NO: 185910 - DNA, 770 bp, Arabidopsis thaliana
  unsure (1)..(770): unsure at all n locations
ggccttctttttttttttttatatttagaaggaaccttttcttttctttaccccaaaacaaaacccccttttgggtttatcctcccgaaaaagaaaacttatcttttttcctacccncttacttttngattggcttactttactaaaagagaagtcgttttttcccccatgggcttngaaaacacaaacccacctcctggtggttggattccattttgtnccccaccttcatatcgccttcttcgggtttttcccaccccaacctttttttctaaaaaaaaatcccttaaagctaaatccaataaaaacccccctcccctaaaaattttgtctggaaaaaaacttcaaccaaattgggaaaaaaaaaatccccctaaaaaccttgattcgaccccccctttgcccattttaaaagaccgaaaaaaaacctgcccctggcgttaagtttcttcccgggaccttttttttttcccccccaaaaaacccctgaagcggctacccaaataattgccccacaaataaaccattttccccctccacaaaaaccctttaaaaaaacactcccccccccttaaatctcctcccattccttccaaaaaaaaaacggtattggccccttttccacttttcttcccgcacccaaaacaccaagtaacctttttgaccaaaaacaccccttttaataaaaaaaacccccccctctttctaagggcccccccccgacacaccccctaaatcatttccctcagccccccccccctcaaaacttc

SEQ ID NO: 185911 - DNA, 614 bp, Arabidopsis thaliana
  unsure (1)..(614): unsure at all n locations
agcttggatcctctagagcgggggggctgtggttttttttttttaataaaactcaacccggaaaaaccccttttctgtttaaacaaacctaattttttggtttaaagaaacccggagccaaacaaaaccctctttaatttaccccaacaaacaaagggaaaaaaaccccttgaaaagggggggggggggttttttcttcatggggggggctgaaaaatataaattcncccctccccgaaggggggggaaaggggccaccaaggtggggccccttctctttgcaatgcgcaaaacattggtgttgaaaacccaccctctttctctctccatttttgtgggtataaagaaaaaaaacccccgcttttgtgtttcaaccttcctgaagaaagatttctccccccttctaaaaacccccctctaagaagaaaaaactaataagcctccttttggaaaccaaaaaccaaattgcgcttttagatttgcgttgggcacaaaaggtccccccgagggtatccgtgttaaaaacaagggctcctctccccttttttatttacgccccaaaagaggagagagggggtctcctccccagaggggaagaagaactttggcccttt

SEQ ID NO: 185912 - DNA, 346 bp, Arabidopsis thaliana
  unsure (1)..(346): unsure at all n locations
tgcccgcgtcgtaagcttggatcctctagagcgggggggctttttttttttttttaaaaagaatcaaactaatctcgggttaattccggacgggacatggttgggaantttctcggattcggggaacaaacagaaaaacctcaggaaaatttactaaaaggctttacttttttaataggggggggacaaatatgggaacatattttttaaaaggtggataaaaagaggtgttataaaaaccgaaggtggaaaaaaaaaaaaaaattctattttcttgaaaaggggggaacctcccgggacccaaattaaaaaatttgcgccgggggggttttacgggccggggggg

SEQ ID NO: 185913 - DNA, 892 bp, Arabidopsis thaliana
  unsure (1)..(892): unsure at all n locations
tttttttttttattggggcagaaatcaaaagaaacccaaaaaccttggaaacaaaacctcttgaaatggtgaaagctccttcccttccccaaatgggatttccagaaattcccaaaacacaatccacactgaaaaattccccgtgtcaaaaaaaaacaaaacgggggggggtgtcccccgggaaacgaacggaaagaaaaaacctggntnttccttccttcccaaggtggcccttcggggggaaggggctttttcttttgggttttttggggccccttttccaacaaaaaccaacaatttctttctttctttgggggggggaaacctctaatttcttttggcttngggcccgaggtttaaaaaaccagggagccctttgaatttttccagacggggtttggggtccaggggtccaaaagggattaatcttcngtattcctgtgtggggggaaagcgcccttattgggcccgaggggggatttaccccccccctagggcccccccagtgtggaaccaacccttccctaaaaaagaaattttatctcgcgtgaattgggggccgcggcccccccgtgggggggggttacacgaccaaaagcccttggggcggtggcttttggccccccggttttgtttagaacccggaaaaacaccctcccgtgttttggcctttagccgaaaaaaaaaacgccggggggtggggtccccgcggtatattccgcgcgcgcccctgggggccacccacttttctttaagagcggcctatagagcggcgggaacgaatgggcttattgntgccgtggaaaaatttattcccccaacccaaccaaatcaggcgcgagagaagggtgagggtcggggcncaaaaggagataacataaaataggccgcg

SEQ ID NO: 185914 - DNA, 627 bp, Arabidopsis thaliana
  unsure (1)..(627): unsure at all n locations
attaccctccctctactatcttaacccgcttttttttttaaaaatcctttaaaggcaagaaacttctaaacttacaaatttaaaaaaattacctatatatctatagcctattttcatacaaatataaccatttttttatttgagtgtnccccaaggagaaaaaattaaaacccttttaaattctttgagctctccattaaaacaaaattcccattataccttataataccttttaccatttttttttttttgcaaaaataaaccttttttttcttaattcctccccccaactttgaagaaaaaagtgtattcacctcttttacctccaagaatttcaaccccttanaaatccacccccctttttttttttttttatataaaatcctctttcctctaacaatttttttcttttctttaaaaatccctcttaaaaaaaaaccccccccaaaaaaaggcgccccccaattttcacaaattaaaatggtgtcactaaaacttgccaatattttctccccccccccgcccccaaaatcttntaacctctccctctctctctgcccngtccccttaattagaaattagaagggcccccttctttgggtctctttgaattaaaaaacccccctg

SEQ ID NO: 185915 - DNA, 699 bp, Arabidopsis thaliana
cttgactcccatgccgctacgtggcttggtccttaagcgggcggcgggttttttaattttttttttttttaggataaagcctttcggtaaaatccagggttgtacttgacaaaaaaaaactcggcccaaatctttaatttgcattttaaaggggggcggtcatcattttttgctccgaaaaagaattataaattttccctgtttccgcctcccccccttggagggggggggtttttttttttaggccccgggggggccttaatgggagggcccgggggggttggctccttgggggggggccccgtttggtccggggtgaaccccacgcaaatatcccttgttttcggggcgctgccacctgggggttggccagaagcgcttccgtggggggcattttccctacctttgtgggaaaagtcctaaccgtttttaggggggggttcccgaagcccggtgggtcaccggggccaagtgtttcggggccttttcccctaaagaccccctgtgagtttttttaacgcgggggtgaattttttggttttggggggggtttttccccggtcaagtgaaaagccccttcgccgggggacggaacctttttaattacctcggttaggggggaacttttcttttaggtttttgggcgcggctttttaaggaggggggccctccttttttttgaagcgttttttttggggc

SEQ ID NO: 185916 - DNA, 751 bp, Arabidopsis thaliana
  unsure (1)..(751): unsure at all n locations
taacttgatctttaacgccgcctttcttttataaaatttttttttttttttnttcttttgaaacaagatttttaaccttaaataaacaccctacaaatttttaattcccacctaacaatactgattaattctttttttttgaattcccccccaccctttaaaaaaactttaactaaaccctaccctcacactaaaaaaatttaaaaaagaaagttcaaaaaaacctttaaaaaattccttcaaacaaaagggacattccctttttttttcaccctttttttataagtttatattttctccccccctttaacaacaaaaaatacacttcttattaccaaaaatttaaaaanctttccccctctctttttataaaaccccgtatttgtatctttaaaacacccccttctacacaaaaaaaaaattttaaaacccctcttaaaaaataaaaaccctattcccctaattttctccttttaaacccttttaacaaaaattttttggacgccataaacttcccccctttttaacacccaaaaaaattcccggggttatcttttttataaacaatgtgtgatttataaaacccttccctttttacaccttttaaaccaacccctccccaataaaaaattcctaaaaaaaaaaaattttgcaaactttttttcaacaccacaaatttttttccccacaacaaaaattttcttctctttccaaaaaacccccccctccgccttcaaaaaataaaccctat

SEQ ID NO: 185917 - DNA, 829 bp, Arabidopsis thaliana
  unsure (1)..(829): unsure at all n locations
tacttgacccctgcccgtcttagcttgatctctagagcggcgccttttttttttttttaactcaaagggtttctcattatcaaaaccttgggaaaatttacaaaatctccatttgtttagccttaaggggagtttctttatcttccctgattacaacaaagggttnggtttaaattctggggggggtaacaaaatttccagacagaaataatccttaagagcttttctctggcactatcctcttcttcttcttttaataacctaaaaagggggaagcattggggccctttttaaaggggaaaaaagggtggaaaataagtaaaagagagggggaagagctaaaaaacccaccaggctttttgttaacaatccctcctctctttttccggggagggccaattttntttttttgcaaaacccaaaagttccctttagggttattaaaaaaacaatcttttttttttgggaaggggggagctttttttttttcgaacattttaatgttctcccttgtgtttcaaacgcgggggggggaaaacccctcttttgtttgcaagaacaaactcaacggacttgtgtctattaaaaaatccatcaactttttctcttctataaggttttgaagggggttttccaaattcctcatattttccccatttgtgatcccccccaacatgaaggcgccttttttttgggcccctggaggggggaaaggaggccccccctgtatttgttaatatgagggcgccgtggcgccttccaaaaccgcgggggataaaaaagcggggtgtttacaatacaaaaagctttcgcggggcccctttttttc

SEQ ID NO: 185918 - DNA, 774 bp, Arabidopsis thaliana
  unsure (1)..(774): unsure at all n locations
ctctttttttttttttnttttataaacttaatattcatagaagcaaccccaaccaaaactatcacccactaaggccttgtttgaaaaaaaaccaactaataggggcaagggggaaggccccggtttttttccggtggaggtggaccaaaaaggactttaataaaaaaaaaaatatgggggggaaagggggctttaaccccctaacctttcctccagaggtggggggcccccggcggggtaaacaccaaaagggtctttaaaaaaacctcttttttgaactaaacccccaaggggaatttcccctggggaagccccctttccctttaacaactttttccaagggagtggggaaacgcaaaaaaaaccctcttttctttgaccccaacccccccaggggagcgggccctaaaatcttctttcaactttgaggaggggaaaacacctcgcggcggggggttttaggcaaaacaatccgcgcaaactctctcccctttttaagcggagaggtggcgaggaaaccccaaaatttctctttcatggaaaagacagagagggggcccgccaccgatggggcggcccttcacagtctgcggccctctcgcaccaacaagctcctcggaaatcctccctggcgtacaatcggaacacggccgaaggtgtcagctcccgtcccggatccctcaccggatgagcggccgcagcgtcggcccacgagggcggcggcacgctacgacagcaccttcgccccggattgtgaagaaggcagcaaggtca

SEQ ID NO: 185919 - DNA, 842 bp, Arabidopsis thaliana
  unsure (1)..(842): unsure at all n locations
acttctctccnccctctttccccccccctctccttctccccccccccccccccaccccccccccccccacaaaaaaactaagaccccaccccctttttcttttttttttcccacaattttttctttctactatccccgggttgtcggccccctctcttgggcccccctaaaactctactctacccgataacgcgttttttccttttccccccccccctctttttgttaccgctctttcttcttttcaaccccgcctcccccttctcctctttcttaaaacaccatctccccctttcttttatcccaacaccccccttctccccttccctcccccacccccactttcttcccccccccttctcaaaactttcctcaccaaatttactcttctctctcgctcttttcccctccctttccaaccaccccccctccccctcctttttttccttttccaccatattctttctttttccccaacgccctgtattccctctcctcccccaccaccccccctactccccccccattccccctctttcccctctctccaaaatacatttccccccttaccccccatccgaccaccccatctctttctacaaatccctcactatctattccccccccccttcccccntcccctcacctctcgtccttcctctctcttttcctcccccaaccccaccccccctccatttccacccttccccctccctcccttcccccccctcccctcctttctccttattactctaattctccgagcctcacactctctctatgatttgtcactccccctctatctcctcttatatcttcttcaccccgtctccgccacccct

SEQ ID NO: 185920 - DNA, 668 bp, Arabidopsis thaliana
aaaaagaatttttctttctctggcaaaccccaacgggggtgttcctcccccacaatttctaagcgcgtccttttttaaagaaaaacctcccttttttcccggtgttcttttttttgtggattaaaacacccacatgtgtccctccccttttggaaaaacataaaaacacattttttcttgcagagggaaaaattcatcttcaacgggtgtgtaaatctcttatatccctgggaccctctgtgcgggggggcccctctcttttcattttttaaaatgtgcctccctcccccccccctttttgttttttccattttgttcaccaaaaagaggcgtcacccttttaaaaacccccccccttctctttgttttacaaaaaaaccctctcgttcctttttttaacacacgttggtgtttttgggcaccatcttctttagaacccttctccctcttgttttttcttaaagggtatttctcttttttttgtttataactttccccccggttgcgcgatcatcaagttctctgatatgaacctcctctccccccgcccgggatacaagcaccctcatcaccccgcgcggcccctgttttctctctttgttcacccgacgtcccgacttctgccctttatgtgtttctctacccggcttttgtccgcttctttgtcc

SEQ ID NO: 185921 - DNA, 314 bp, Arabidopsis thaliana
tttttttttttttttttatcaaacactttattaaaactctcaagcttaagaattaaacatcgatgaacttataggtaaaattgataacaaactaggggatgaatcaaacctttattgctggggggttatggtctttctctacaacccctttttcttttaaaccaccttagggggatagcttgaataacctcaccaaatgcaatctaatagagggaacttaaattttcctggaggttcgacttaaaaaccaaccttaacttcctccattatgcttttctcggactgaacaaaaaatgagttttcccgaaacctcc

SEQ ID NO: 185922 - DNA, 813 bp, Arabidopsis thaliana
  unsure (1)..(813): unsure at all n locations
gtaagcttggatcctctagagcgggcgggcttgctttttttttttattgaaaactctctatttcaggctcttgccggaccaatgaaagcagttaacattttatcaaccaaaatttggtttaaaaataaataccagcccgggggttttcaccgggatgtgggcctnaacgaggggggctaataaaaaaaaaggcgtttggatttaattttcttacctcctcccttttggttccggaaaaggaggggcaggggggtagcggganccacttcgacacctttcctaaaaagtggagccccttctttattaaaaatcccctggaggggagaacgccgtccccgcgccccttgttaaagctaggggccctatcccaaaaacccgggcccggggatgggccctccgattcacaggggggggcccagatgggacaccctggccgggataacccgggtcccccgggggggtttgtaccgggcggcctttttgagagggcgcagggggttgacctttacaggggccccaacgcgggggggggggggggggcgcccttttttctccccggcggaaaaatagccgaggggcgttgaagccaacaaaaaatccgaaacccctttggaagggacccttcgaccctcccaaggggagttggccccaggggggggggaaacacgcggggggggcccgttggggtaaggttcccagagggccggggtgaccaaaagagaacccccggggggtcccgggccggccctcttttgggggagggccggctgatgagggcttctcccgggggggtttttacttttgggggggggt

SEQ ID NO: 185923 - DNA, 509 bp, Arabidopsis thaliana
  unsure (1)..(509): unsure at all n locations
ccccctcctaaacttgaatctctaaagcggcggcctcttttttttttttaaagaaacaaaataattggcttttataaaaacttctaggaaaataaacatgtccttgctaaaaccaccctttctattaccaagatgnccaccattttttaaccccaancacttttttttttcccnaaaaaggggggggaanaattttcccaccaaatcccaaaaaaaaaaaactcccccctcccgtttctttccaatctcccccagggggtttttcctctcaaaccgcgcttttgggggaaccctaaaacctttggcccaaggtctcaataaaaaaaagaacctttgtcaccacccccttgaaacaccccctagaaaaaaaaaagcttttcttttttacccccccccccccttttnttggtttgggacaccaaaagaaagtaaacaaccttcttaaaggtcctctaaacggctaacaatttcctttcccctttctttttcagccccccccccaatctttt

SEQ ID NO: 185924 - DNA, 256 bp, Arabidopsis thaliana
  unsure (1)..(256): unsure at all n locations
ttttaattaaaattttnnnnnnttattttccacaataaacatcactgtgattcccatgggancaacaatgtccacaaataatgacaacattttttgtaaaaaaaaccaccttctctttattaataaaaagaatatttaatttcggggggggagggaaacccaaaaaggccctattaaaaaaaaccaaattttttgggaaatatttttttaaccccccctcttttaaaccccctttttattgcccttaaaacccccc

SEQ ID NO: 185925 - DNA, 617 bp, Arabidopsis thaliana
ctccttttttttttttttttataaacaaagtgaatagaaaagagtttatcccctttatatccacaatgcattttttacccccccactaatgacaaataaccctttttcctccgaggcaaggggatcttaaaaaaaaaacttttcaccctcctaccctcacgacagttccttgcaaaatttgagggcaaaccataaaaaacccggtttttaaaaaaaaaaaaaaacccttttcaaaaggtcttaatttcccacaaacctccggtttaaatacattgttccccccaacttaggggtttaacccaaaaaactttttagggcccaacaaaaattttcccaaaaacaaacaatcctccctcaaatttctgcaaaccttacccggaggaaacccctccttaaaccttttataccggccggaatttatttctctatgccccccaccttttttaaaaaaaccgcgggaaaaccaatggagggtttcaaaaaccaaaaaccccctaaaggctaccccccccctccttatgaaaaaataaaaaaccccccgctcccaaattccaccccccgcccccttccttagggtataagcgcaaccgctacttcctaaatcccccccccccccc

SEQ ID NO: 185926 - DNA, 420 bp, Arabidopsis thaliana
  unsure (1)..(420): unsure at all n locations
gttttttttttttatgaaaattttcaatataagccgtaattaattagtgaaaaaaattattaaccaaaccccttttgttctaagtttagttcctttaacaatgaataaaccttaaataaaacttaaggggtgattttttttgtggtgaggggnaaccttcacgggggggaattaaaatttaataaatacttcgtggacccccccccccgttaaaaccgctttttaaaaaaaatccccaaggtgggttttncgcctccccttctttaataaccggaagggggccttttctttgtttcttttccacaaagagggtgtttggcggggttctccccctttaaaaaccctttcccacctaaaagagggggttttctttataaaaaaaaaaaggtggtccggtgttaaaccaaaacaaaacgcggt

SEQ ID NO: 185927 - DNA, 584 bp, Arabidopsis thaliana
ggcccctgcaggggaacgcgtcaaggaaatacacctttttggacccaaggggggcgggcctcttaaagaggggagtatcccccccctttttctgttttcttttttcgaccgcgcagcaagaaaaaaagaagaaatgtggggggggcgtccgggccggagtaaaagttgtgccgacgattctctccccgttccatgttgcggaaggtgaagaggagaggaccccccccacaactttttttttcggggggggggggcttcgggcaccaaacaacgagacgctttgacagagagaaaccacctacctcctttctcgcccccaaccacacgaccaacaaacgagatgcaaatccatgatcgtcgcgaccagagacgtattctgaagacaacgcacctcctctttctgatacgcgagagcgaggacggtggaggtaactgctctcccaggagaaccacgattgtgatacgctcatcatgtataaggaaatatgtgcgacagagtcgctggtatcagtccacggcgccatggcgggcagacgcgcggtgccctgactgcccctcattctgatcgggggaagcgatgagac

SEQ ID NO: 185928 - DNA, 258 bp, Arabidopsis thaliana
tgccccgctagctgtcttaaggggcgcgggttttttatttttttttttttttttttttacaaacgggcaacttgttggttagacctccgaccacttacttttttaacttccggttaaaaagggggggggcccggggatccaaaaaaaactggccctcaagcctccttttcaaaaggccgttcttttaacctaaaatttgaccaccccttcggggggagaacaaccccaaaaaaacaattttctttttttctttttaaa

SEQ ID NO: 185929 - DNA, 600 bp, Arabidopsis thaliana columbia
  unsure (1)..(600): unsure at all n locations
aggctgaggggaaaaaggggtaacccaaanntttgtttggtgacggccccgannntttaaagggagagacggaccccggggggggggagggggggacagctttccccccgggggggagagcccagaaagaaatggggggagggcgggggggggggagagggggggggggggggcgtggagaagaggtgggaagggggggaggggaaggaggtagaagggaagggagggggaggggagaggaaggacgagggagagggggttttttctttggaggggggggggagggagtgtcgatggtatggaaaaaaagttggtggggtgtggcgtgaatatggggaggagaaaagtgagggggtgagcaagggggatgtaggaagtaggtaggtggttgggtgggtgtgcttagttggagaagggtagtgataagtgtgggttgagagatggatgagtggaggggagggtgagggatgtggatatggttggtgaagtaatgtggggtgtagaggagttcgggggtaaggagtgaggtaaggtcgtgatatgagtattattgtggggaatgggtgttttttggtagggatgtatttaatgtttgtggga

SEQ ID NO: 185930 - DNA, 332 bp, Arabidopsis thaliana
  unsure (1)..(332): unsure at all n locations
ttacacccatcaccctcttagcttgatccttaagcgccgcctttttttttttattgaaaagcgtaggctaccctattttttacagaagattaatgtgtttgtacccatcacatcaccatcaccctcaattataaaataacattttattttgtcccttcccttaaaatcttctcctccgcagtnggcgatagagaaaagatatctcatacaaaaaaatttttttctcataaccacacttcttgcaaatggcaatggcttcttttttttacctaaattatttattaaaacacttccgtctcgagctgncatgggatttccttatttgccgtttc

SEQ ID NO: 185931 - DNA, 227 bp, Arabidopsis thaliana
  unsure (1)..(227): unsure at all n locations
cttgatccttaacgcccccttttttttttttttttttctaatattctattaattaaactttaacgtttttgcattcccatcttaattcacctatacctacacttttctttaagtgtaacnaacaataaattttaacaaacccaccttttctttttcattttacctatctattccacactccccccataactttggaacacataatttttgcggttaaactaactaaa

SEQ ID NO: 185932 - DNA, 608 bp, Arabidopsis thaliana
  unsure (1)..(608): unsure at all n locations
ggggaccccacggaagaccccatacagatggctagcacaaaatgtctcaccctctcacctaagtcgaaaccaagcacagacaacattcctccttnccccggggggtggggacacacccccgtggggccgcaaaatataagatgcgcacaagccccttccctcggccgcccgtcgtcacaacgcgggctgcgctccggagcgcccagcggcagcgtctggccccacgtggaagggcagagcaagaggatgttcgggagcgtgtgaccatacgcactcatccgcggcgaagggtcatagtagcaggcgcgggagagtcgttgagaggcgggtcggtagagtgcgagcgacgtgggaacaggagagaggacaagggcgagacgggaccgaagcacccgcgggcgggcgcgtctggcagcgcgcgcgcgagggtcagcgagcagacgggggccagggcagtcgcggtcgaacgaaggccgtgggggctgaggcgaggattaaaggggacgtagtgatatcgcgccacgcctgaatccgcgggccagactgctatatgtaagtgtagtggtgaggactcaacgccccggtcccgcggttcgggcgcgggatac

SEQ ID NO: 185933 - DNA, 648 bp, Arabidopsis thaliana
gccgccttcttttttttttttttttttttttttaggggtaaaaatcaatttcttcttttcataaaagagtatgaagcattacaaccttcgaggaggtcaaatcgacctcttaatccgtaaattcaataaattttaactttaagttgcctctgactacgaagggtaaataattccggtaaacaaggacccatcagatcattactttttcagaccacactcttggtaaaaattaacatccaattcttatttttaggttttaaaaacccaaaaaagatatggtaaatctttaccaaacttttttatttttgaccacccctatccctctttttaatttaatgtcccttttccactctggaagtttgcccctaaaacttttctattaaaaattttttaattccccctccatatattttaagagggtcccacaaaaatttttctttgatttaccacaccaaagcatttcaaaccttaaaaagggttccccctcctccctcttggttggagaacccccctataggccggcctcgcttttttcaaaatagcccctttttttttctataatattataaaagaaaaatttttttactccctcttcaagagcgtttgttattcttcccctacctttaacctctgaaaaaaaaaaatttc

SEQ ID NO: 185934 - DNA, 907 bp, Arabidopsis thaliana
tgccccgtagtaagcttggatcctctagaggggcgggcttcttttttttttttataagcataaacttaagcaagattttattcctccgggaaaatattacatttttggaattttatttttctctagtattaaaaaagggaacaactaattatacggaaattccttaagggattaattttctataaagggggtagaggttaatcaagttggggggaaacctataaaaaaaaaatggccttcggggtgggccgccccaccacataaggcaaaaaatccctttccgccccccctttttaaagccctgccccttctcgcctgggatggatggggagaacaaaacccggaataatcgggagggtgccttcccaataaaaaaaaaaccggccccgaaaaaaagaaagccccgtggagaaaaaaatagggggcaaaaattaaaattaaaacggggggggaaacccgggaaaaattaacccaccaaaagccttccgggaagggaagagataaaaaaaaggccaacacgcatttggcaatttgaactttcaaaagcttttcccgggaacttctttttcatataccggccggggcgggtgggtccccccggtatttccggacccggtcccgggagggtaccaatctttcctttaggggggcgctttataagcctggcggaataatttggaatagcttttctctggggagaaattgtttccccccccaattccacacacatatacaaaccggaaatttaaagtgaaagccgcggggcgcccctataggggccctacctcccttttttcgcgtccccctcctcccccttctcaatgggaaaacttgggtcgcctctttttattaattccccacccgcggcgaggggttgttcttttggccgccctgtgttttttttttc

SEQ ID NO: 185935 - DNA, 347 bp, Arabidopsis thaliana
aaattttttttaaacgggaaatttatattcccgggcaaccgcccccttgttcaaccctgaaattccgacccgttctttgaggcgtacattttttccttaagtgaatgcttttaaacctggcgaaacattggcataagcttctcctttaaaaaatttttccccttcacaattccacacaatacaaccgagaacttaaaggtaaagcctggggccccaaaggggacctacctcactttatggcctgccctccctccccttttcaagagaggacccttccccccctctcttaaaaaatccccccccccgggaaagcgcttttccttttgccccccgtttttttttttttc

SEQ ID NO: 185936 - DNA, 869 bp, Arabidopsis thaliana
gcacgcgtacgtaagccttggatcctctagagcgggcggccttgtttttttttttttttaatgggaaatattattaatatcaatatgcaaataatgggacaaaaaacatttatttatttgcaatgggactgcaacagaaaataaattttatctttttaccaaacaaaattaatagttttttacaatgagggggggcatttaggagggccccggaaacaaaacttggaattcttccaatggatgggccttgggttccgggacgagcatccaaataaaagggaagagcttccctccgacaggcggaaatatgtaaaatgtgccttgggccctcccttaaacataaggggaaagcggtactcaccaacccccccactagccatggatggaatggtacaatggggcctggctgaaacttttatatttattcggaaagatctcagactatatgagcccaaggggggcccttcttctaccgaaggggaaatacttccgaaaggaaacccaaaaggttaaccaaaaacaaaattgggatcacattcaggaagcaccttcttttggctgggagcgggaagctaacctccaaaagggggggggccgggggcacttccaccagcagaaccataggaggggggctgtttccccattattcccaaaaaaaaaccacccaggtttggggtcccaacccccacatatattgtcccaggtttcttaaagcaccttttaaaaatgggtttgaaaaaggggaacccggtgcccaaaaagggtgataaacttaacccttccccccaagggggcgtgctttttctaaacagaagaacaaaatttatttttaacattttagaacccgaataaagggtaccgaaaaaaaa

SEQ ID NO: 185937 - DNA, 479 bp, Arabidopsis thaliana
  unsure (1)..(479): unsure at all n locations
taagcttggatcctctagagcggccgccctttttttttttttttgttagaaaaggattatgataaataaatagtaacggtaaacattaacaagtgtatagagagtagtagtgtcataaatcaaagagttggtgaagcagaagagatcatctcaaaaatctgattatgtaaacttcgcgtggcttactacaacaccgcccgccggaaaaatgaccctcctttctgattgatcttcctccaaatttatttcatctccttcccaatctgttacctttcctccagcttcatgtacacatatgatcccaacagcatgatcccaccnactttattgttctctgagttttgcctcggagaaaaaaaactgatgctctgcccgaagctaccttcaaatacttgcccaaaccttccacaacatgtgggccaaaagaagaatctctttattttttaagtcccctgaaacattacttgcgtccaaaaaac

SEQ ID NO: 185938 - DNA, 419 bp, Arabidopsis thaliana
cccccgccaaaacgacaaaaaaaatgttgggcacccccccattaaggggacgccccgaagaaaggccggacccctttaccgggggagaccgacacaaagagggcgacagagaaaaagagaagccacagcgcggacaaaggcgagcgacacaaagcggcccgaaaggacaccggccgaacacgggaggaagaggaagaaatttttcgggggggacaaaaacagcaaagcaacaaaaaagcagcagagggaggagagcccccagcgaggaagggcaggaggggggcagacaacggaaacgagaggcaggaacggccgaagggcggccgaaagccaaaccaaaaggaagaagacgaccggagaaggcccaaagagccagccgacgcggcggggagcaaagaaaggagagagaaaagacgcgc

SEQ ID NO: 185939 - DNA, 654 bp, Arabidopsis thaliana
cgctttttttttttttttatctcattataagtctaatttccacctcaagattcaaattaagttgtcattcaatcacaaccggtcccaacttttacaatgagtgcttccgggacagttggacaaagcccctgcttgtttgactggtcaccaggggccggaggtttcacggtcctttcggggcatggctgacaaaatcacataggacatgccactttcgtttagctcttaccttaactccaaaacctcgggtaatacgaggccaggggcaactccccctgggaaagaagtctttttttccatggccatttcgggactcttagccctaacagtcccatggggaacttgggagccaaagggtaaatgctttgggtggacaagctgggtgcccatagaccattcctccggttaagattggaccagccttaccaaccggtctccccccccgtccccccggtgggggcggtggggccccggattacgcgcggcctggggcacccctttctttggggggattaggtggggacctggaatgcggtcctggaattgttccccccctcccactcccccggagcaagggggggcggggccagggaggaccctatagggccccccgcctttagggaacccgccccccttataatcgccgcggggggc

SEQ ID NO: 185940 - DNA, 430 bp, Arabidopsis thaliana
cctccctcgcctcagaccccaacgccatgagatccattcacggcggacagttactataaatcgcatcctaacaacttattatattatcccccctaccaccccaccgaccctcttcttctcttcgggtgtggggcccccgccctccgctgtcccccaaaaaaaaaaacccaaaatcccgcgcccctcttctgctttttcaattcatgatacaacacctcagctgactatgcgacttaatacggattgccacatcgactaagtacccccccatgtctatctgcacaccactgatataaccctaaccagcgaccttcatgaattctaatgtcccgactaattgaaagcattgttatagactatccttactattactatctcactcgcaccgatctcgcaatcgtcccctagacaaacacctaattctctattt

SEQ ID NO: 185941 - DNA, 256 bp, Arabidopsis thaliana
aagaatggccgggggggtgggagggaacggcgggtttttacaagtagggggggaggacgaagggtcctagagaggaaaatgtgggagtagtaggagaagtaaaaaggagacagggggactggctccacagaaggacaatgggggaacaagatgacatgaaagaggaagaagagacggaagacgtgggagacaggaacggcaaaggagcacgcggaggttgtttttagagggggtggtggaaaggagcgaaggggcg

SEQ ID NO: 185942 - DNA, 898 bp, Arabidopsis thaliana
  unsure (1)..(898): unsure at all n locations
ccccctacctaagcttggatcctctagagcggggggcctctttttttttttttaaaaaaaaaactaatctttaattcatcttacaaaagagcgggaagcccacaaaaaaatgggcggggtttagggcccttttgtttttaagaggggtacctggaaacagcaaaaaaaaacttttttattttccctnaaagggctgtgcgaaaacactaaaaaatgttcttcgttaaataaaaaaggggcccctcaaactttaccaagacttggaagatgaaaaatccttcctcttcgctcttgggaaatttggaaaaacctttcccatctttcaaacacacccactttttccaaaggggtcccctcagggggataaaaaaatacctctcttttctttcctccctgggaaaaaaccctcaccttttttatttttgggctttaagccgcctagaaacgggtggccatatctttttttgtctttgtgtcttgacacacccccgagggcctccaaaacccttcctctggatttaaaaaacatttttcttctttcacccttagtttttttttaccctcccccaggaacctttaagaatccattttaaccttctctggggagagtttttgcctaaaaaaaaaaaatgacgagttttttatattcttttttagaaaactttcttggaggttggactatattcttaatttgaacaaatattttgggcatggggcccccatttttggggccactttttcttttttccactcttttaacacaaatatccctttgggagtgggcccgagggggccttacccccccgccttcactaaaaagggtgagtctttttcacccggaactcccctcggggggggttttttacccgtttttccaccacttatgggggagcggagg

SEQ ID NO: 185943 - DNA, 497 bp, Arabidopsis thaliana
  unsure (1)..(497): unsure at all n locations
gacgtcgacctgcacgcgtacgtagcttggatcctctagagcggtcgccctttggtttttttttttttttttaaaaaaaagggaggaaannggcaatataaaattgaatcgaaacgctattagtggataatgtcaacttcaaacttgttacatggattggcctgcgcaagctgacgacagctacagactcacgctctcgcccgccagcagttccctcaattggaatgtctgggccaccaccacnggggggccctcgcccaaaaaaaaaaaccccctccgggcgtggggccggtgcggcccgcccgcgattacacttttgtcgagacgagtatgtctcgtcccgaccctcccctcccctgtccgccgtgtttagcatgtcttcactgcgttccggcgtcctgagttttgaggcgtctcgccctacccccgccctctctctgcgcctgtcttcccgcagcttccacgctatccctttctgctctcctcccgcgggcgct

SEQ ID NO: 185944 - DNA, 309 bp, Arabidopsis thaliana
  unsure (1)..(309): unsure at all n locations
gacgtcaacgcacgcgtacgtagcttggatccttgagcgttgcccttgggggaggcccaaaaanaaaacaacaacacacaaagacagatctgcaaagcgagcgaggaagcttgtgacagacatatgaaaatgcaatccgacgaccagcgaacgcgcgaatacagtacaagcagtagaaagcacgcaagtttgtttttggggggggggacacaaaaaaaaagcacctacaaaattgtccacgcagcccctcccccagctccccaacacgacgtaatttccccaccgcactatgtcgctcacacgcacgtg

SEQ ID NO: 185945 - DNA, 352 bp, Arabidopsis thaliana
aaatttaaaagggggagcccgccaacaaacaaccaccacggtctttccgcacaaacctaccaaagaccaagccgaagctttagcgaacccaaagacagcaagaagacagaacaacccgaaatttttttggggggcggagacaacggtgcggacaaaactccccatggtgggaacactataaatccggcgcgtgtggttctcttgtgccggcttgagctcggggggcgctcgtggaccattcatatcagctgcgcaatgctgtagcctagggcaagcgagggaggggtctccggagttattgatagattggctggtgagggggaccggcggagcgcagacggtcaggaccggg

SEQ ID NO: 185946 - DNA, 533 bp, Arabidopsis thaliana
  unsure (1)..(533): unsure at all n locations
cacgcgtacgtaagctnggatcctctagagcgtttgccggggggggaaagccccctaaaaaaaaaaaccccacgagaagggggagggaggcgaaaagacaggataccacggcacggaaaacggaacgagccaagaagccagaagagaagacacgcccaagcggcgccgacaaaacacgaaaaaccaagaagcaagacgatacctcctttggggtgggcaacaaacccgaggtgagacaccaggacaaaagggcgcccgcagcagaacggccaagcggaggaacacaccccacaacaaagcaagccaagccgcaagacaacgtaccacagagaacgggatagaacgcaacgaacgccgtgacgagacacaaagacagcgcagaagagaaaaaaaagaaaaagaagaccaaaaagaagaagcttgaacggcataacaaacaaaaaaggagaacggaagcgagaaggtagcgggaagatgagaaaagggcagggccatagacggcgaggtgaccggccacgagaaaaccgcagaca

SEQ ID NO: 185947 - DNA, 520 bp, Arabidopsis thaliana
  unsure (1)..(520): unsure at all n locations
ccccnnntaaaaannaaaaaaaaaaatttcacagggagcgaaagtctncaaacaaaacaaccaccagaagcggggacagctgagagagaacagccccacacaagaaagcgaaaagaccagagaaatttggcagaaacaacacccaaaaaaaacaccgaaacccgccacaacccaggagtttccctccctggaagtttggaacgacacaaccaaagaaaccaggaaaaaaaaacaccccacaacacgggggccaagcgggacccacaacccaccacgaaaacgcaacacaacaaaacagccccacagaacagcaaccacaaaaacaacagaacaacaacgagaacgccaacgcgcggccgacgggaccccgacacccgcccaccaaaacagcagcgacacaacccccgacaaacaaaaccacagacacacaaaagcggccaacggaaaagaaaggaggccgcgcccgacagaaacaaacgaacagcgccccacagcgaaggaagaaaagaaaaacaacgaa

SEQ ID NO: 185948 - DNA, 468 bp, Arabidopsis thaliana
  unsure (1)..(468): unsure at all n locations
cacgcgtacgtaagcttggatcctctagagcgtttgccctgggggggggagccccaaaaaaaaaaaaaaagcaaccaaacacagcgcgaactgggaggggacctatggcagaaagagtgaacggggagcgcccggccacggagacgctattcacgcggagcaccgcccgctctcccataccacaacgaagggccccgcgggacggttctcctcattgggaagtttggcgcaaacaaccacgaggccccccggcggaagaganaggcgccacacgcgagagggtgcgcaaggggggcattccatcagaaggatgcgcaacacccactaatacggacgccgcgcccacacccccgcacgacatacacagcgccacaacgcaccgaaacccctgccgccctgcgcgcatgccaagggtgagggcggagcaaagagagacaataaagtcgccccggcgcagccgccaccccg

SEQ ID NO: 185949 - DNA, 381 bp, Arabidopsis thaliana
aaggcaggaggagggaaagaaagagatgagagaagcaagagggagagagaaaggagaactttttttttggggggggagagactattgtatctgtatgtttggttgcttgtttgacttttacggttgttttttttttgtatatttttttatgttttgctatgttgattttgattattccagatatttcatattgatgttatgtttgtagttttatgagtttatcactcgtgctattaaatattactatctactaagagtgtggttgtcctagtttatatggtgtatattattttcgtgtgttaataatagtgaagtatagttgagtctattagtatattttttggtatttgtttaatatttaattcatgattttgtttttct

SEQ ID NO: 185950 - DNA, 465 bp, Arabidopsis thaliana
  unsure (1)..(465): unsure at all n locations
tgacgtcgactgcacgcgtaccgtagcttggatcctctangagcgccgcttttttgttttttttttttttttttttttaaaaaactaacctcaactcttttatttatttatttattaatggttgggttggaaactaacaaacgccaagaattaccaatatatatagtaacatccaaagtccaaacaaagccacctcttattnnggtttttttagggggtgggcccacctacagcaaaacaaacaaaaaactacccccccccatgacctcgcggggattacacaacccggcacccgttcatccgcacccccactcccaacctcaagccgccgtccgagagccccgaaccacacaccatcaaccccccgtcccccccacctctatttatcccgcctcgaccccccccctcccggccgtccgggtcgcctctacgcccccactcctcccgcacaccatcccgatcttg

SEQ ID NO: 185951 - DNA, 303 bp, Arabidopsis thaliana
  unsure (1)..(303): unsure at all n locations
cacgcgcacgtaagctaggatcctcaagagcggtcgccggggggggaagagccaccaaaaaaacaccgcgncagcaaacgaacgagcgangcgagcaagacccccgggcaagccaccggaaaagcaacggaaaagcgcccgaaggggcgccaagggaacccgaaggcagaacgcagagaggccgaacaaagcgaaaaggagccctttctccggggggggggaacaccgcacaaagaagcaaaagcagaagagagagccacgccgccgaaacaaagngcagcccgcgacacnccaccacaacaa

SEQ ID NO: 185952 - DNA, 401 bp, Arabidopsis thaliana
  unsure (1)..(401): unsure at all n locations
aaaaaaaaaanaaccnaaaagggnaaaaananaagcggagacgcgggcaccgcccccagggcgcgcgaaaaggccccagaacagaccgcagcaacacaaccagccgcacgcacgccaacggaaaaacccctccaggggggggggccccaaaccacacacacaacccacaaaaaaaacccccccaccaacacggccacacaagcaaccccaaccccaaaacgacccccccaccacacaaaccaccccccacccaaaggaaagngagacccggaggccgacgagcggcagacgcgacacgcaggcgagcggcagcgcgcacagcgcgggggccgaggcaaggcgcgccaagagccagcacgaaacaagcaagcgacaccgcacccgccaccgaaacgaccaga

SEQ ID NO: 185953 - DNA, 440 bp, Arabidopsis thaliana
  unsure (1)..(440): unsure at all n locations
gccgcgtacgtagcttggatcctctagagcgtcgccctttggttttttcctcttaaacatataatataagaaagagaaagtaaataaggggaactgcgaaaacctaacgagataagcgaaataagctcatcaagacgcacggagacagagcgtaaccaatacgcaagcggaagaaaaactccctcnctgggggggggacaaccccagccacctgcaacaaaaaactccccagaaagggggaaagtcagatcccagtcactcccgcacggcaaggcgtagttcaacagaccacaccgacggccagagggaaaaatataagaaaggaagagtaaaagtaacaaagagaaaacacaagatgccacatacccgcgatgagcgaataaccgcccacacgcagcaccaagaaaaaaaatgaaccgcagtgtgcttgcataacgaag

SEQ ID NO: 185954 - DNA, 508 bp, Arabidopsis thaliana
  unsure (1)..(508): unsure at all n locations
gggaaagacgngacgcctgcaggtaccggtccggattccctttttacccacggggggggcgggtgcaaaaagacaacaaaaggggtaatgccagaggggatatttcccgagtctggcgttcatagcggcatctttttgggtggaggacccaaacatgaggccaagcttcagtcaaattatcagacttggtcaatggaggcctttttttcggtaagttcggccccatcctcagggtttcncctaaaaaaaacaccaacagggaccaatggcccggccatcactggatttctcattcctacaaaaggggaaatttgccttcattccccaggttttctgttgccagaggaacataaacttttaggggccagaagggggttttctttggtctttcccactggcactggtttgggtggataaatgacacttgcggaggggaggaggggcaaaggttacgctcctctaaagtctctaccgtggttaaaccttcattcttctttttgaaaggaaa

SEQ ID NO: 185955 - DNA, 565 bp, Arabidopsis thaliana
  unsure (1)..(565): unsure at all n locations
acgtcgacgcacgcgtacgtagcttggatcctctagagcggtcgctttttgggtgagagccnnnaaaaaaaaaanaanacaagaggaggcgactttttcaacaagcgcgaacgaagacccatcaaagaagatcagcgcgacaaaatcacaacgagaaccgcgcgaacacaagaacacacacaggagcaccgaaagaagacgacttccctccntgggatgtgggcgcccaaacaaaccacaacacaccaccaaaaaagtacccccccgaccgaccgccacggacaccgacaccaccatgcgagagaaaagagcgcgaggaggatagaagggtgcccacgagagggtagtagaaagatgatcggcacgacataaccgccgtgagacctaggcgagagtatcaatacggagaagccagacaacgacaggaacacgcagagcaatgacagataacacggtgagaagacaccgcagcagcgaccaagcgtagaaaatgtggcgttagtccaccaggtttagagtccacacaccgaaggcggcggcacaaaaaccaaagaagagagcagcg

SEQ ID NO: 185956 - DNA, 519 bp, Arabidopsis thaliana
  unsure (1)..(519): unsure at all n locations
gacgtcgactgcacgcgctacgtagcttggatcctctagagcggccgctttttttttttttttttttttttttnnnaaaagagaagtttgtattctgaaacaattaagctgtctaatctataaactctacaaaatacagaaatttgcgaaactctaaaacacaagcaactgttgagtagcactacaatgttcgttgcggctgtttttttttgggggggggcgacacccgcggtgacaaaacctaaaaaaagatctccccccattcgcgcccccgtcaagcaaccctgtcttgcttgcgcctgggcccgtagctgcctgcgcgtgctgcggcgatggtgggccgggcgcggtcgccccccgccggcccgtctccgcccgcgttcccccgccccgcggtgctccgagggcgcgcggacaccgcgcggtcttcctttgcactcctccctgccgccggcggcgcgctgcgctgtcttccgattccccgcgcgccccgggcgcgcgcccgcctgcgacgctcgc

SEQ ID NO: 185957 - DNA, 504 bp, Arabidopsis thaliana
ctgcatgtaccggcccggaattcccgggtcgacccacgggtgcgtgcggttgagagaaaacacaaaaaggggccactcactcaattaggtttcttgtaatactctctacatctgtcttttctttcttcattccatctccagaaatgggagcttgttcaacactctggatctaaccaaagaaaggcgttttctataggtgtcgaggtttatccatcaccaagggttataaaaacaaagccctccaagaccgaagggggtctacacaaaaacttgctgcgcctcagcaaaaccaagctgtccctcaccgtaccgacgtcactacaatcacgtcccccctcctcggcgcccctttaccgcacctcttggtgtttctccttactcacccgatccatactccggtgtatagcttacgttctactttctagtcggtacattattagtgacgattccctgaagtctgttacaacacacgcccttgcgccacatacccacattggtgtccgt

SEQ ID NO: 185958 - DNA, 168 bp, Arabidopsis thaliana
  unsure (1)..(168): unsure at all n locations
aagaaactccagctccatacaactcacttagggaaggctggtcgcctgcggtaccggtccgaattccgggtcaccacggtgcgggaattttgatattaaaggggctctcttctctctcggtcatggttcaaaactagttctaggggttcacaaccanagatagagaga

SEQ ID NO: 185959 - DNA, 329 bp, Arabidopsis thaliana
ccccacgtggcagccgcgacgcttctgatcttctcccgtactgatcagcgttccggctagcgcactattagactttgcggccagcatacatagtgtagatcaccgcgcggcgtgagtagcgtttagttggtttactggttttagctttcgagccgcccaagcgtctcactcgcctcccgccgacagccgcgcctagtacaatttagggaatgccgctccagcccatcctttcatacccattatgccgctccccgacccacatcccgcagtacgccctccgccacagtttagagattcagatcctagcgcgccaggatgtccatagaaga

SEQ ID NO: 185960 - DNA, 395 bp, Arabidopsis thaliana
tctcaattgttttgcctactgcccgcactatcaatattgcgcagacttcgtcctcaacgataagatatacctagaggagcagctcgcagcgggcctcactcgtcacaagtccgagcagcgcgcgcgcgccgcccgcccctattattttctttcatccgagtcagcagccgttgttctgctgacgttcaattgacacagacagcgcacgccttctcgccacttccggtccgccctcttttcgagcgtgtagtctgtatagtaattaagtcatctctccccctagacctcctgcgccacccttatcgcgcatggccctagcctatatcatccccacgcacagcgccgtgcgcgcatgcggtgctcgcggctgagcagagccaagctcgcacgcaacc

SEQ ID NO: 185961 - DNA, 162 bp, Arabidopsis thaliana
atggcggacgatagcgataaacgaccgaccataaagagaggacgtggaatgaggtggaaccgggagagaggagcgtcggacttgcagtggctgagaggaaaacgtctgtcaaatattagctatagtctgaagtgcataagagtgagtgggaagcaggcatga

SEQ ID NO: 185962 - DNA, 230 bp, Arabidopsis thaliana
  unsure (1)..(230): unsure at all n locations
atctctatttgtcttattattatctctagtcgtcgatcatctcttcgagtcgggacaccgactagttcgcactcctgtgcacttagtactgttctgcattcgcgcgagctgccaccgagtgattgtatcggatatcgttatacgtgatcgatagttcatatacgaactactggntcttgtgctcagacacgcgcatgatatctctacgcgattgctgtgctttcgttttt

SEQ ID NO: 185963 - DNA, 542 bp, Arabidopsis thaliana
gagttacgctgtcctcggcgtcagctacttaagcgacttccgatattcaccggatggcgactgcgactagtatcggcgaaaaagagagaataagaataaattactgagtagagagtagtgacagatagcgagtgtaataagccgtctccaattccatattgggtcaagtccgcatctagtctcacgttctatcgaacatgatatatctagcgacttccaacagacgcattctacccgcccacatgtatttattgtaccgtcggtgcagtgagttatacgagaagtaaaagagcaagaagcccagcctgtcctattacacccgtactacaccaacccaagacagagaatgtataatatttagatcttgccgactgatttataagatagtagacatgcagcatcagaaaaattaatagagactcgcgcagcatagatgttagaatacggagaatcggcacgataataattgtatgtccgaatgagacaatacattttgatatacatgcggatatcgtcgcccgtgatgtagaggttagtggact

SEQ ID NO: 185964 - DNA, 470 bp, Arabidopsis thaliana
  unsure (1)..(470): unsure at all n locations
ccaataccccgttcgaccccgcgttagagccgggataaaacaaatcaaaaccccaaaatcaagcattaaaaaacaaccctaggaggacaaacctatatcaacctgcttgcccacaacacctttagaacaccaatccgcccatgttcccccccctaattttaaaaatcccaaaaatccttttggcaagacagcccattaaaccacctcaatttcaaccatnaactaaaaacccctaaacacttttttttcccaaaaacccaacaaactggaaaccccatgcccccaccccgagcagtgaaccacacccccccatataaataacccggacaacccccaaaattcaccaaaaacacccatccccccccaccggaacgagcaaacacccccctgaagagcccccccccaaacccaaaagccaaccgccactctaaaaaacgggcacccgaaccgaacttcacaaaaaaaccccc

SEQ ID NO: 185965 - DNA, 363 bp, Arabidopsis thaliana
accacgacatgacccaatggagagagtagaggtgaacgagtatgagcctgggaagatacgcgtaggttgccatatatgcgtgggcgaagcgggcgcttaggtgaggtgtattcttggaagcatatcgagtcccgcgggtcgtaccccacgctagccgcttgtaaggaaaagtgtgggaagggtcgtctaagacagagcccacgagcgtacacttcgtgcgcgtcactacggcgcgcttaacggtagcaatcacgcgtccccaactattttcataacaccatgcggccacgagagaagcatgaccgccgatatttggagacgtgggagcgagatatagagcgcgttgatagtttaaccagccag

SEQ ID NO: 185966 - DNA, 460 bp, Arabidopsis thaliana
  unsure (1)..(460): unsure at all n locations
aggccaaactgcgagtaggtcgagtccgaagatacgtcgatatgcgcaggattataatggggatccggtacacgatgcgcgtggtggcatgagagtagtagctcgcgccacgtaccgccagcgacgcggcacgagataaactacgtccgctccggcagcagaaagcgacacgatagagttagggcaagcgataaactacaaaaaattataatatagtatagcgaccatttactgagtatgtcaaaatcgacgtcagcagnttgccatctgattcgtatactacgcgctacacaattattcgtgcaagatagtaaactgacatccaccggttcatatacttttacgagcgactcgcccgcacgccgcgtcgttgaagggaacggacgcgggatagttgcgccacgcaacacgacgggactgacctcggctgcgcttactaaccaccgtctgcggacggtca

SEQ ID NO: 185967 - DNA, 148 bp, Arabidopsis thaliana
  unsure (1)..(148): unsure at all n locations
cccgaagttgatgccgggtagcaactacgctcatcgagcgcaaagcgagtggacgacacgcctcccctcagtaggttcgcgctgaccagtctcatcagcttgataaattataatcacccaagccgactaancgatgaagtactacgcg

SEQ ID NO: 185968 - DNA, 609 bp, Arabidopsis thaliana
  unsure (1)..(609): unsure at all n locations
gagacgagcggagggcccccccgggggaccggggggcatccctgagagcatagagtaagaaatttataggggggggggggggctggggggaacaggggagcgaaaaaannncnnnnnnnnaaaaaaaattctctcttagagttttttccaaaaacccaaattccaatttataggggaaaggctgggtgaccccctgtccgaggtaccccgggccccgaaatttcccggggtgnaaacccaaaggggggcgggggcgcgggggtttcttaaagggtttggaaaaaaacaaacaaaaagggggaaaaaaaaaaaaaaaacttttttaaaaaaggggtttccaaaaaattttttccccaaaaagggagaagtggggggatgtccctttgaataaaaaattcccctaaaaacgggagttttggaaaaaaaaaagggggaccaaaaaagggagagggggggttnggcttttaagagaaccccaaagaaaaaggggggcccctttttttttgggggggaggggaaaaaggcccccccccctttttgaaaaaaaataaaaggcccccccaagagggagggcgcccccttttgtgtgcctcccccccaacaaacaaa

SEQ ID NO: 185969 - DNA, 99 bp, Arabidopsis thaliana
tcgtgaggtaccagcaacttattatagagtcttacatgcttcaacatatatactgcggaatagtgttgttgttagcacgagtcagccagacgctgctaa

SEQ ID NO: 185970 - DNA, 120 bp, Arabidopsis thaliana
gaatccgctctatacatattgggagctggtccctgcaggtacgccgaattcgtgacacgcgacggtgaaacaaagacggcgtgtacgagtctcacttatctagagtagtgacttcaacag

SEQ ID NO: 185971 - DNA, 476 bp, Arabidopsis thaliana
  unsure (1)..(476): unsure at all n locations
ggggggggaaaaccccgngnnggggnggagggacaagggccgaagccgcagngcaagaagcagcagcagagccacgcgcgagaggccaagggaaaaacaatgcggacgggagcggggggggcaggacagacagacacaggcaagggcattttttttaagggggggactcgagcgttggcagaaggtctaaagtttggtgccccccaacaccgtggttggtgtgtgtggggagccgggacggacgccgtgggcgggacgcgtgggtgggaccacgggaatatcggagacgggggccgtggggaggtgcctaggttgggcgtgatgatgtgatgggagtgtaaaggctggggtagaatggttggggaagaggtcgaggactggaggggaagagggggtggggtcagggaggggcaatatagtggagggggaggagtggtagaaggggggagggcgggggggcatagagaggggagaga

SEQ ID NO: 185972 - DNA, 184 bp, Arabidopsis thaliana
  unsure (1)..(184): unsure at all n locations
cctgcaggtaccggtccggaattcccgggtcttacccacgcgtggcgcnggagntggggagganacnnaagcacactnagacggaagctccttcgccggtgaaaaacagtgtttgtcggccgtccggccgcgcccatattaggggaagaacggttgggtgtaggggctgtcattgtttcaccct

SEQ ID NO: 185973 - DNA, 502 bp, Arabidopsis thaliana
  unsure (1)..(502): unsure at all n locations
gcctgcaggtacaggtccggattcccgggttacccacgcgtgcgagcgtttaagacgtttgnncnntnnnncnnnccccgccctatcacataaagctttcatagttgtcagcccacccctaccccctcgttggaaaggagtagatacacttgagttcggctttccggctcccccccaccccccccccgttccctcttttagggggggggggacacaacccacgagttttcgcgagaaaaacccgctcgtccgcggtgcaaccacattaaacggtatgagtgttgtgtcccttcttactgtgtatatggaattcgacgatatcagccgagataattcattccctcctctactaatatagcgtgctcccactcaccactatccattttactatttcttgtaacagacggcagtcgtgaagtttccaaggttatagtagtgatacggtcgcccgggcccgatcgagtgggcagtcgtacgtcgtcccgcgcgccagcgacatctg

SEQ ID NO: 185974 - DNA, 186 bp, Arabidopsis thaliana
agactgggggagggagaagaaaagaaagttttacaagcgggggagggggggtaaaaaatataattgtgccgcgcgcctcccataatttgattattatgagtggggcctgtatcgtgaaggatgtagaatgttaggtatggtgattgactgatagaagtagattaaaacgaaaagttttttttttat

SEQ ID NO: 185975 - DNA, 450 bp, Arabidopsis thaliana
  unsure (1)..(450): unsure at all n locations
tttttcaaacccccacaaaacacaaagggggtgtttttttaccaaactcttgaaccgaaaaccctcaaccctctaaacagaataattccatttaaggggaagaggaaaaaacccccccaagcccaaaaaaacccccccctttttttttcaagggaggggtggggcctctccctggggcgcttcaaaattgaggaaacctccccacacatggggtggttcgtcccccccctncaattttttccccaaaacaaaaccccattttttaaatgccccttaccggctcccaaagcttttaacaacttgtcccaaaagcaacggtggtttaccttttaaaccgccccttttttatgccacccagaaaaaacatctaaatcccctccagctcttacgcccagaatttcccctttagaaacaaccccccctcgcctcctccgtcttaataaaccccct

SEQ ID NO: 185976 - DNA, 513 bp, Arabidopsis thaliana
  unsure (1)..(513): unsure at all n locations
tcctagcttggatccttaagcggttgccttttttgttttggcgcttcaccaaatttataccatanattcctaaatcactgaattcagatattttctttcatacagaattaaagaaaaaagggttcaatcacactatcacacctccgtttaccttaactaacggggggngggaagctccccttcctcatctgagggagtgggngnttccccattggtggcatttngcaaaaaaaacccaacaccctccattttggcctaatgaaagtgccccataccgggccccatcccgccaaccccaaaccgcagaaccttggaccccaacccccctttgaaagcggtttatccacgtaaacctccaccccagggtagggaataaaaaacggggggtttttccccccatcttccagggggcaaagcgcggcccagacccaaagcatggctctccaccgggccccttcgcttccccgcgggcccgttaccgcctgccctccccccccccctcatccgacgcct

SEQ ID NO: 185977 - DNA, 523 bp, Arabidopsis thaliana
  unsure (1)..(523): unsure at all n locations
cctgcaggtaccggtccggaattcccgggttttaaaggggggggaaagcccgcaaaaaaaaaaagagaagaggagggagcgcccacacgctttgagccgatgagcgagattaggctcgtgcgacaccgcgacaggactcaatgataagagagaaggaattgggacgatgcgagataaacataggtacgaacccanaaagagttccctctttttgggggggggggaaaaaacaaaggaatagtatgtgagaacaaaaaagagacgcactcagaaattaattcttcgagagcacagtcacacatctataatataagagcgaatccagtatgtaataagtgacgaatatatcatcgagaaagccattgtaaatttgatgattgcactaatataagacaatgaaaacttcggacaatagaaggcaagttatgtgaatcgagaaacaacaaacaaccaccagcagatcgaagcgtagtaaagataaagttaagctgatgaacagaaataataaaaaacgtctataaac

SEQ ID NO: 185978 - DNA, 318 bp, Arabidopsis thaliana
  unsure (1)..(318): unsure at all n locations
cacgcgtacttaacttgaaccttagagcgttttcctttttgggtgaagggccgcccacaaaaaaaaaattatnttctatctaataactcttttcacactaccaacaactcaacgccagcaagacacgatcgtgagataaagaggtgtcacctactttaaatcactatcattcccacgactgcatggcgggaccgacccgcacccgacacagaaagagagcaacgcccacaccgaaacatttttttatttctcggggggtgtggggggaacaacataccaaagggcgcgcggctccataaagaaaaaaaaacacaagac

SEQ ID NO: 185979 - DNA, 436 bp, Arabidopsis thaliana
  unsure (1)..(436): unsure at all n locations
aaaaaaaggacaaacccccccattaaaaaaaaaagaagaaagcaacttaaanaaaagggagagagggccggcccaaaaaaaaaaaaaanctcccccacacaccaccaccactttctaacccaaccacacaccaacctaccccccgaaagcacgaaggcaaggcaaaatccgaacaacaaaaagccacaagcgagccacacagcacgaagaggcgagacccacgaccagacaacacgcacttttttttcttaaccggggggggtgggccacaaaacccaagaccgccaccccgccaaaacaaaaaagaccccccacagcgcggacgcgaagacggcacgggccccggaccccagggacagagaccgccacgccacggacaacaagcgcgacgacgctcgcacggaacacaacagaagcgcgcggcgagagcagagag

SEQ ID NO: 185980 - DNA, 436 bp, Arabidopsis thaliana
  unsure (1)..(436): unsure at all n locations
cgcctgcggtaccgtccggattcccgggtcgacccacgcgtgggcggtttaaaanatatataaaanacatgccaccctaaaattattaaattactagcccgccgcgaaaaactaacttaacggtgttgatatagaataattacaatgacacccaaagcacacacatttttttatagggggggggaaagccacactttatcctaacaaaaaaagatacgagacacatacacacaatatactaattaggagacaatcggaaaatttaatgaaacttaataactcaatagatatgtacacgcaaaaccaatatactatatgagaccaagcactcacatccggattggtttgacatctaacacgcacacaaattgagataatggtattgaagaattattaaagtacgtatatatgaagacagcaaaacccacagcagata

SEQ ID NO: 185981 - DNA, 406 bp, Arabidopsis thaliana
  unsure (1)..(406): unsure at all n locations
cgcctgcaggtaccggtccgagattcccgggttgacccacgcgggggaacacgcatncaaaataatttttataaggagccccaccgagaacatgaaaaagtaagtgtctttttagtgtcgccgacagaaccacactacgaaatagtcatagtctgatgaggagtggatcgtgtagcagtgttgataaggcagcaaccacaaaaaacttcttcattttataggggggtggttaacaaacagacttaaaaatataaagtaagaataatacacactcaaagattattatagattacgtacatcaatttataattttttttaatcatgctagtattatttatgttaaatctaagagatcgctacaaagttcgatattagctatttgtgttattatgtgtttatggtaagt

SEQ ID NO: 185982 - DNA, 529 bp, Arabidopsis thaliana
  unsure (1)..(529): unsure at all n locations
cctgcaggtaccggtccggaattcccgggttttacccacgcggggcgaagcccaatgtaaattaatatgaataatgactgcgggcgcacattagataaatatgaattaatgtgttattgtagagcgacagaactaatttgagttttttagaatccggtaggagttagagtcgtttagatttcaataacaccaaccccaattcactanattttagggggggggacaaaaaaacaatactgtgatatgtgtaaaataagagtgtcgaatgaagtggtaaatctatggtcgtatcatagagtaatattacaggtgactgttgttgagatgttatgtatagtactaatctgttaaaaaaagatataatataaaataatatttcgagtcttgttttaaacgatcacgatttactggatataggagtcacgcgctgtctgattgtgacaagtgtgttgttaatatattgttagtgtatcaaagtgattatagatatactctttcctttttatttatgtattacttgctttaagcg

SEQ ID NO: 185983 - DNA, 425 bp, Arabidopsis thaliana
aaaaaaaaaatactcaaaattcagacttgagacagtcgactcagaggcagcgagtcgtgaagaggattgcggtgtcaataacttcatctctgcgtccttatgaacggacatcgagcgtgacccgggaaacataagtaacgaccgcgaggaaatttttttttttaggggggatgtttgggcaccacacaaagagcgggcgggcccgctcaaaaaaaaatgaatccacaagagcggtgaggggagtgggaacgaagtattgaactactgccaccaggatagacaagcaagtagaggaggtccctcgaagatcaggacgcctcgtgcgccgcacatcgctccttatcgctgagcaggcttgtcagatgacgcggcgtgcgtgagctcgcgtgacgggtggcgtgcgacaggcagacggcagagcaagt

SEQ ID NO: 185984 - DNA, 521 bp, Arabidopsis thaliana
  unsure (1)..(521): unsure at all n locations
gcctgcaggtaccggtccgngattcccgggttgacccacgcgtgggagcacgcgtacgtactctgttagaagaccacacaccgacacatatatgtagttcatgtaagaggttccattcttaataatagatacattataataggtggtaatattctgtttcttgagcatgaaccagtcactagcattcccaaaggcatttttatctaatggggggggggaacgcaaacgaatgttacgatcataaacaatacatcaccttatggaatggatcctaaacgattgtttatatcaggtcatagttatatgttaattgtcgatagtaagatcgtatatattatctatttgtgtataattgttgttctttatacatcatatctatgttcatctctctcacacaactttttttctgttagaggcttggcctacagttaaaccgtgttttggcatttattacgatttgatactagatgtcatgtttgaatatatgagatacagtcttctagcatttcactacgggaccc

SEQ ID NO: 185985 - DNA, 556 bp, Arabidopsis thaliana
  unsure (1)..(556): unsure at all n locations
aaaaaaaaacaanccccggaaaaganaaaaagaaaaagaaattataacaaaaggagggaaacccgcgccccccaaaaaaaaaacaaccacacacccaaccgccgccgacaacaccacaacacacacgcacacccagaggacacgacgacgccgacccgacacccccccacaaaaacaacaaacgacagcacgccacgccacacccccaccgcgcccccgcgggcgcgccacaaaccccgcgaaaactctttttttcgcacgggatgttggccacccccacgccgggcgtccccgcccacaccagacaaaacccacccccccgaccgcgcggccaagagcccccaaccacaaaggaccgagactcgcgctaacccccaacacccaccaccacccagacaggactacgaagacacaccgcgccccacgcccgcgcccacccacaccaacgacccaacacaagacacagctgcccgcgcgcccgccgcgggcaaacgcccgtccctcgctcactcagccacacgagaaaaacaaacggtaagagtcaccaacgacgacg

SEQ ID NO: 185986 - DNA, 400 bp, Arabidopsis thaliana
  unsure (1)..(400): unsure at all n locations
gcctgcaggtacaggtccgngattcccgggtctacccacgcgggcgtacgcctgcgagaagacgacagatggggacgacacacaaaaacatcagnaggagcgactcacaagaaggaccaacagaccaccaaaacatttttaacgaagaanaaccaaaacaatcacgtcaataaaagtaacaaaaaaccaaacaaaataccctcaaactttggggggggggaaaaaccacacacaaacacaaaaaacaaaaaaaaccaccccaaacaanngggggcgccaagggcaccacaatatatataattacacccaatatgtacgaaataaatacacagccaagcagaatcacacacagaacaagtacaacatataaacatagatgcaacatatcctaatcttacac

SEQ ID NO: 185987 - DNA, 507 bp, Arabidopsis thaliana
  unsure (1)..(507): unsure at all n locations
cccaaaaggagcagaagccccacgaaaacaccaacccgcgccgcacgccgcccacagagcacccggcgtcgcgaaacagagaaccaaagagcccgacaacacgacagcgcgacggacgcacaagaagaaaaaaagtttcctaattttaggggggtggggcaccaaacacacacgcaccagaccccaaaaaaaacgccccacacacgcctgccagactagagaacaccccgacgcgcaacaaataaaacaagaaatccatacacacaaaccacgccgaatgccanggcgcaacaaacacccaccgcgcaccaaccgcacacagacgaaaaacacgaacatacagccacagcccgcccgacgcgacccacacaaccacctcgcagacagcaagagacaacagaagaaaggctacaacgagccgtattcaaccaagagaacgcaaacagaaatcaaaaccacgcacgaactcgacagagcaccaccacgaacaagaacgacagccacaag

SEQ ID NO: 185988 - DNA, 513 bp, Arabidopsis thaliana
  unsure (1)..(513): unsure at all n locations
ccacgtaagcttgcaaccacaagagcggntgtccacagagggggaaggcggcacaaacaaacaaacaaaacaacaccacacaacacaccccaaccnacaccccaccacccacaccaaaacaacaaaacaccaccacaaacccaccccaaacaacccacaccaccacaccaccccaccccaccccaacaacnctnctccacccaaggggggtggggaacccacaacccgcgcggcggcgcaaaaaaaacccccccacaacacggaacacacaccgcagcccgcgcacccaacgacccacgcgcacagacagccacacgccaaaagcgacggccgcgcaccaagcaagcgagagccgcgaccgcgcgcagcgcaacagaacagcgaccccacgacccgcgcacgagagagcggaagagcgcgggcgggcgggacgcacaaaagaagaaagacaaaggaacaagcccacgcgaacggaaaccagagagcgagagaacaagccaacgccgccgagac

SEQ ID NO: 185989 - DNA, 450 bp, Arabidopsis thaliana
  unsure (1)..(450): unsure at all n locations
aaaaaaaacaaccccccccttataaaacacaaggagggaggcgtttgtaacacgaggggggaggcgggggccaaataaaaaaatcaanctctcccaagagtcgcgaaactttaccagaaacgagaccgcaccgggagccctcgaggacgcgaaccgccgagaggcagcagcgggagaaaaacaggcgcggacaagacaaccggaggaggagggggcacggcaaccgcgccgctttttttttctcagggggggtggtgcccacccaccccacacgcgcgccagcgaaaaaaaagagcccacgcaacgagggcacgagggagcgcgaccaccaccccagacagacccacccccacagagaagcggcaaacagaagacgacagacccaccagccaccgcgcggccccacgagaccgaacgagcgacacagagacagcgcgccccaacggcgcg

SEQ ID NO: 185990 - DNA, 383 bp, Arabidopsis thaliana
aggagtaaagaattgttttattacaaacaaacataataaaattgacaaatcttgataatccatctctctctcacaccttaaaataaaaaactcataactactactaggcgggtgggagttaaaactccacctctttttcaggggtgatggactactatgggggggcttccaaataaaaaacaaagcctagggtgggagtttaaagcccccccccccaaaaaaaattaaacctcttcaacggcttccacaaaacgcaagcgcttaagcacttaattttctaaagaaccggggtttctttaagggaaccatttaccccccccggtagtttccttttagtcaagggaagaagggctaaccttcttcgctttttaaagcgactcgcc

SEQ ID NO: 185991 - DNA, 294 bp, Arabidopsis thaliana
  unsure (1)..(294): unsure at all n locations
aaaaaaaccaacccccgaaagaaaaaaacaagagaaagatgtaganggaggagacaaacccacgcaaaacaaagagagggggcagaggaggggacgcagaccaacacacgaacacacgaggcagcgaagacggcgggcccgacggccgcaaccaaacaaccgcgcgacgcccgacaccgacgtcggccgacgccaccgcgagaacccccgctttttttttttcaaggatgtttggacaacacaacacgagcacgcggaccgcaaaaaaaaacgccacccccaagagaaaaccgc

SEQ ID NO: 185992 - DNA, 420 bp, Arabidopsis thaliana
  unsure (1)..(420): unsure at all n locations
cgtacgtaagcttggatcctctagagcggtcgctttttttgtgtgaaggcggcccaaaaaaaaaaaccaccnaaccgtaaccgacgaacctgttcatcccgccagtcacaagagcggcgtctggtgcaaaatatattcacataatatcttcaacaacaacactacatcgacctcgttagagcgtacagcgccgggcgaaagaacacaccagaacttttttttttttaggggtagtggggccacaccaccccggggggcgcggacgaaaaaaaaaaaaagcccccgcagaacgacgaaaaaaccgagtaaacttatatactaacagatacaaaaacacctaatgcagcatcgcatactacctcagtttcccgcacgacacccgcaacactcaaactgacaacttagacagatcgaccccac

SEQ ID NO: 185993 - DNA, 408 bp, Arabidopsis thaliana
  unsure (1)..(408): unsure at all n locations
ttttttttatatttaataaccaaataatcccaaatttctttccaaaatttcaccttcttaaaattctttctccctctccccacaaaaaccacaaccctaatttgttttctcccccctgccttctcccccccaaatcaaaaatttttgtaaaaagagggggggtgttccccaaccattgtgnggtttttttattaataaaaaanaaaaacaaaatgttttgnccaaaaccccccacccttttttttttcccttttatccccccaaattccccaacaagtttttttttttcgcccccttaaccaggaccatgttttttaacccaaaaatccccaccttaggaaaccttccccctttttcccttttttaacctttttcccttaaacaaaaaaaagccttttgtcccaaccc

SEQ ID NO: 185994 - DNA, 392 bp, Arabidopsis thaliana
  unsure (1)..(392): unsure at all n locations
cgtcgcntagcacgcgtacgtagcttggatcctctagagcggcctctttttttttgtttttgctttnaaaaaaaaaaaannggaggaaaagagaagatgaatttatnaaatttggtatctacaggacacccttaaaacgcaccggcaggattttcgttcactaggaacgaccactgtgcgccacggtgacgggccgccgcacgggaacgggagttttcctcnttttgaggaatgtttgagacccaccanatgggggagccttcaaaaaaaaaaaatccccccaggggcggggtgggagcggaggcgcgcgccgactcacaaacaccacacacatgctaccgcgatgggtaacaaataacgagtcgcgtcccgaggaccgtcgcgggagcgac

SEQ ID NO: 185995 - DNA, 524 bp, Arabidopsis thaliana
  unsure (1)..(524): unsure at all n locations
ttttttttgattattcttttttatttaaaaataatntncccccccncaaccccaaaacccacaaccccccccccaccccctttcttttttcttctctcctccctattcctctaacaaccacatctttatattccaccaaccacacaatatctcccccccaccctcccccccaaaacacacccaccttccttccttttggggggggtgttgcaacacacccttgggggggcgccccacaaaacacaaaacacccccaacaccgccccccctctcccccgcccccccccctcgtctccccccttctcacagtaccctaccaacactactctacccataaccgctctccattctccctcgtctcctcatctatttcgtcacgctccctgcctcgtcacaccctctcccctattcgcagtacatacccctacacacatcatcccccaaccatagacttccttctttctcccccttaccagtccaaccacacctaccccacatacctatacccaccactagccacccac

SEQ ID NO: 185996 - DNA, 346 bp, Arabidopsis thaliana
  unsure (1)..(346): unsure at all n locations
gcctgcagtaccggtccgngatcccgggttgacccacgcgtgcgtacggctgcgagaagacgacagaagggtctgttctatattcactcaccctctatctctttctatcgttctccgctggcgccgcaactatactgtatgttttcagtcttgattgtacatgaagcctggtggtttatatagacgcccacccacccacaccctttttttttttncgggggggggttagggccgacgccgcgcgtcgattcccacaaacattaatgtccacgtattattgcagactagctcccttgtcatcgttctacttaatgtcttatcgacgcatgttgttatgtcttgtctt

SEQ ID NO: 185997 - DNA, 441 bp, Arabidopsis thaliana
ctgcacgcctgcaggtccggtccggattcccggtttgaccacgcgggggacacgcgtccaaaaaaacaaaaaagttcacggatgtggcaccaccaaacaatagacatattagataaagtaatggcgaaaatggatttttaaagaagagataattaacctttagacggataggaatggacggaggcgcgaaatttgctcattttgggggggggggaacaacaacataccccacaaaaaaaaaaaaaagcccacaataatttattacgaataataccctaactatgatcaacaaatagtggaaataaaattatagagtgacgtcaccacgaccttgaatcgctgagtatattaaagacagaagcggctcagcagagtgtggaatatttagttatttacaatttgtaacagtagagaccctagttgattataaacatactgata

SEQ ID NO: 185998 - DNA, 428 bp, Arabidopsis thaliana
tcgcaaaaaaaaacccacattgcaaagaccaagaaattttcggagggggaaagttccccaaaaaaaaagcgtttctgccatcgttcttatttctccacatccaagcacacatcgtccgtttcccttaaagcgatatctacaacaacaaccccgccgacgtgaacgcaaggaaaacctttttttccgggggttgaaaacaccttcatcggcgcaaaaaaaaatacaccacgatccgacacatcctccggcgggtatccactactcgacaatgtccaaaatctactctacacaattgcagtaggtggcttccgatcatacgtcaggcatgtacttttcccgccctcgttccgcatctgtctatacaaagtaataaacatatgtatttattaatcggtcttaatcctaactcattgtgtactttattaatc

SEQ ID NO: 185999 - DNA, 454 bp, Arabidopsis thaliana
  unsure (1)..(454): unsure at all n locations
gcaggtacaggtccggaattcccgggttgacccacgcatgcaagcgcgggtgaaaaaaaaaannnnnnncnccccccccccccctttataattttttttaataattaaattcaacaaaatcctaacttcttatattatagtaatataatacataataagtgataacaaataacaaaaaaccacacaaaaacaaaatttctcttnttaggagttgatggggacccccaaacggggggggtcaaaaaaaaaaaaaaacccctctactgtgaaaaaataagtagaatacaaagtacgtggaagacgtaggtgaatggaaaagatatgattgataaaaagaatgaagaatgcaacaagcgtaatgataccgaaagacttccaaaaacgataaaataatattttttattgttacacaatacgttgcgtgaacaagttttgaatagtactggttagagtt

SEQ ID NO: 186000 - DNA, 387 bp, Arabidopsis thaliana
  unsure (1)..(387): unsure at all n locations
gcacgcgnacgtaagctgggatcctctagagttgccgggggggggaaagcctgacaagagaggagcgaggggggcccagagctaagcatccccatccccggcgacaatcgagggctagggagtgcgagccgggcgcttcggcgccgaagctaaaacgagagagaaggggtaccacctgaaaacaacccaacacaatcttttttttgccggggggggaagcatcgcagggcgaggagaacaacagcgcaaaccctcggcaatgcggccagagatccgcgacgagaaaaaaaagaatactcaaacatccgagataattcggcccaagaaccacgactcgcggaggcgaaaacgagggagaaggagccgaagagacgcgcaccagggaaa

SEQ ID NO: 186001 - DNA, 347 bp, Arabidopsis thaliana
cggcgacgcaaggagcaaggagagacgagccgagaggcggcgtatttatttgggcgacgggggcggagagagccagcggcgcagcgaggcgagaggcggcgggcaacgaccgcccagcgaccgcgcccgcgcgaaagcggaggagggcgaggggagccgcggagcccgagacagcggagggccctcgggcgcggagagcggcaggcaagcgcggcggcggaagagacaggagagacgcagcacccggcagggcgcgcgcgggcgggcgacgcgcgggccgtggtagcccgggggcgctgtagaagaagagggaggcaccgagaagactagcgcgaacgggaacagag

SEQ ID NO: 186002 - DNA, 353 bp, Arabidopsis thaliana
gcgccaacgcacaagccacttcaagggcgaggggggaaaggataaggggaacaggggggggagatttcgggggaaaaaacggacgacagaacggggagcaaaagcgacagttttcaggggcaggcgaaaacccgccagacagacgcgacaaacgatgaagcaaaggccaaggcaagcggcgacaggagagagagcgggagagacaggaagataagacggacagacggggagagaagctggaagtgaggatcgtaacaaaccaatcacagagagaacaagcaaatgaagagataggaagcaagacatcacccatagtataggacgagcacgggcgaggcaacgagcaacgagag

SEQ ID NO: 186003 - DNA, 265 bp, Arabidopsis thaliana
gcggggggcccgacggccagagtcaatgagtagtgtcgacggtctgccgggtctagagagagcgcaagcaagaaagaggacacaagacaatagtccagagcgtgatctacgctgccacaacgattgccggagtgcgcgtcgggatgcagccaggaccgagaggctggccgggtgagagttgagactcggtagacgttatataaaaacggacgataaggccgtctgaagatcgctgcggttttttactctactcgcatgggaccgc

SEQ ID NO: 186004 - DNA, 491 bp, Arabidopsis thaliana
gaaactgcacgcgaacgtaagcttggatcctctagagttgccgccctggggaggacccgctcttatctgtagaagccgtacaaccccagtcaaaatggacaaaccatccgggagctgcgcgtggggcgcggagcgagcaagaaaggcgctgcgccttcatataccgacccgcctgacccaaccggaataagacccacacgggggctttttttttgcggggggcgccccatacacacaccccgagaacgcaaagcgggcgtccgcgggaggccgcgggcgtcaccgcacgtggtaggggcgccgcacgaccgtaggaggcgaaatcggggagtccccccgccggacggtggggtagctacaaccgagcgggacaacgagcacggagaacgcgccgccccccccctgcacccgcccacgcgcagagtgagagcagataggctagacagaggaggcgcaccgcgcccggccgactcgtgtagtgcctccaccca

SEQ ID NO: 186005 - DNA, 576 bp, Arabidopsis thaliana
  unsure (1)..(576): unsure at all n locations
cgggggaggggagaggcggattttgaagggggcggggngaagaacccgaggagaggggaggaagcgagaacaagcagcaaggaggccggagcgaggaggcaggagggacaaggggagaaggagcgaagagaggaagagcgaaaaagaacgaggaagagaaacggctgaatgagcagacgccggagggcgggaagcaggaggagaatagaacagcgagcaaacaaaccgagaggggtatattttaaagaggaggagggcgggaacgggggcgggggtaaaagcgcagacaagacaagagccgtgaaaggggaggaagaggagaggagaggaaagcagcgcaaaccgaggccacgaaagcaagcaggaaagagcggggggagatggtgaagggcagggagaggagagaagagaaaagagccgacaggacaaccgcgcaagaagagaaagatggcgaaaccgaggcagacattaaggtcggccagggcacgggagggccgagaggagatgaaagcgggatagcaggcgatgctacacacagaaaggaggagaggagaggcggggcacagacgaagagcg

SEQ ID NO: 186006 - DNA, 338 bp, Arabidopsis thaliana
tttcacacgggcgccaaccggcgagcccaaacttcagtgtcgcaaacactcaaaaagttgtgcaggcgtacggaacatcctcttgtaacaataagttgcgcttacacccctgggccgttatcaaatcgctcaaacccagagcggagtggacaaaacccgacgacgctccataccaaagcggtgcagtggatgaagagagtaaggatgtgtaattaagaggtaaaatagaggccccaggccccggcgagccttgttttccagaggagcgtgtgatcgcggagttaaatgaagaaatagataggcaggccgtacgaaacgacacggagaagcataagaca

SEQ ID NO: 186007 - DNA, 421 bp, Arabidopsis thaliana
cggacgccttggggaaaacctttttcagccttcttttggtagaaattgcgagcaggaggtagaaaatcagccaggaaaacaaaaaattgtggggttctcttatcttaacttccaagggatttggggtgggacaagcaagatgacggggtgagctttttttatgatttaggccataagaggaaactcttcacttcaagtggatcagaagtctggaaaaatcaaggcttggagaacactaagggttgggttgaccagggacaaggtaccctcgacatggcttttgaggagagaaaaactgttttcatcaaaagagatcttggtgggtaagggtaacgccgcgagttaacctaaaagaaaggaaggccgaaggctggaattggctttcaccggacgccagcttagaaaaaggaagcaaaggggg

SEQ ID NO: 186008 - DNA, 438 bp, Arabidopsis thaliana
aagtttatggggtaacctgccgcgtacgtaagcttggatcctctagagtttccgccctttcgtaatcccacaaggtaataatgtgttcttcgaagaagaagcgagtggcatgaataagtcacacacgccactgtatgggaatgaccgccgcgaatgtgtccgacgacgagagaggaaagatcccagcctctaaaaggcaactgggggatgaaaagcgttttctttttaccgggggttctcgtatggggggatcacctggatcagagtagagctgtgacaacaaaaagaaacatctgcgtttttcggtagaaacctgcgggtgattgggagcgggccagcgacacagccactcccttcagtaacggagcaaagcacccctggaccactcatttatatgttcatgccgctaccctacacaagaccggcgagagagatgtg

SEQ ID NO: 186009 - DNA, 483 bp, Arabidopsis thaliana
gccccgacgcagggggtgcgctgggcgacctccggcaaatggggggggacgagcccgaggggtttaacggggaaacccgggagggaaagaactgggtggacgaaagaaaggtgcccatacacgacccggacgccgagcagagagacgtgccgcacacaaggccagagggggcaaacccgcggagcggcgaccgaggcggctaccggcgcaagagacgcacgcccgcgctggtaggttgcgaagaaacaggacgggagcacaaaaagggagaagggaggagagagggtgtagcggaaagcagcgtagccccaagggaaggcgtagagccgctggcacgggaaacatcgatccacacaaaccgggggaaagtgcggggccggcgcggcccagccggcggatgggagagaaccgaggaggaggcgaccattcaaggggggagaggaaaccaagaggcactccaccatacacgcacgagcggcagaa

SEQ ID NO: 186010 - DNA, 485 bp, Arabidopsis thaliana
ggggaaaacctggtcgccagtgggaagcgcgcgaggaatactttttgtcgaaccagggtgaaacccccacgatattcacggcagacgctggttaagaatacggcccctcctcgcgacgcagcagggactacggtacgtttaaatataactaccgatttggcggggggcgcgtaccacggctaaaaccggttgtgtatacaatagcggagctgatagaagcgtatttttttgtgatgaggaggaagcaccggataatgacaaaaacggaggagactctctcaaccctgagaccacaaaaacagagacaaggagagaaagagggacgtaagataagacgacagacgtccggcggcagtgaaagtgctggcgcgagtcatagatacggcagcgtagaagatctacagaacagagcacaaacggggctggggagactcgggagatccacaagctggccagacccatccgcgagtagactatatcaggtg

SEQ ID NO: 186011 - DNA, 268 bp, Arabidopsis thaliana
ctctcgcgagaatttttcccataaccaccggtcggttagtcgcaccggaatccgccaacgttacacaataactatcgccgactccggctggggagaccacctccctcacgacacttaccgtgcgcaggggagaagcactatttgaaccactcggatacatgaaattcgaaaaccgttggtgacccattcccaataccgatacatccaaaaactacgacggccacggaacatgctgtagacaggaacattgatattgccccggccaacc

SEQ ID NO: 186012 - DNA, 533 bp, Arabidopsis thaliana
ctgcccgcgtacgtaagcttggatcctctagaagcgtgccgcccttggttcaaacccttcttttactttctatgcgagtgttcctcacggcgctgttctttgggtgcgccctgtgcggggggacccccccacaaccgaaacaagccccctaagcagccggggcgtacccacgcgtcccgagcccagaggccaccccccttttttttttcccgcggtgccggcgctcgttcacacccccccgccggcccgctccccccgccgcaggggccccgccctaaccgacgctctcctatccccaagacacacagccgccccggccccgccgctccccgccttggaagggctgcgcccactggtcaacgcccggcgccagggcaacccgacagacgccacccccctcctccacaaatgccccaccccgaccccacgagtcggcccccggaaggcgcgggggcgagagtccgcgggccgcccgcgcgcccccggtcggcgagggtcggtctcagtgcgacccccccgcccttagcccccgg

SEQ ID NO: 186013 - DNA, 288 bp, Arabidopsis thaliana
aagcaccgcaccccctgaaagtaccgggaacggaattcccggttcaacccacggggtacggcgatcacacaatacatcataaaatggtatttatacaaatttcatccctgggcgcgacgtggtttgataagataagttaacctcccatactattccttcaaacctccaaccatgtattaagtaacattcattatttcatacaccaaggactgatccgcaatttttttatttattggggtggtttccacaaccacactcccacaaacaagccacccgagaaataccctt

SEQ ID NO: 186014 - DNA, 397 bp, Arabidopsis thaliana
ggggaaaacaccccccgcgagagaagaaggaccgccccggaaaatacgggggggggggagagccgacaacaacaaaccgcagggcacggacaacgaagcgcaaaaaaggcacgaacaggagaaagaggaaacgaggcaggagggaggaagaggggaagggagaacgacgagacgccaccacagacgagcgcacaccgaggaaaggcagggaggacgacgagagagtttttttagcgggggggggggggacaagcgcggcggacgaacgaccaacagaaacacgacgccgcgggaagaagacggaggaagagcgcaaccacggacgagcgaaacagagggaagagaagagagaaacagcgacgaggcgcgaacggcaaccgaggcagagcgcggaaag

SEQ ID NO: 186015 - DNA, 471 bp, Arabidopsis thaliana
  unsure (1)..(471): unsure at all n locations
gaccaccaaagcggccgccctcggggggaggggacccaaaaaaaaccacaaaaacacaaacgggagcgcaaaacaggagcgaacgaggaggacagcccagcacgcaaccagaagcaacccaaaaaacccaccgagccaacccaagaaaagccgcaaaaccccgcaccaagaaaagcccctccaggttgtagggcaaanacccccccgcccaaacaccccacaaaacacccgccacgacaggagggcccaaaaaccaaaaggacgccccaagcagaaagagaacaggcccccgccaacacagaaaaaacgcgccccgcaaagaacacccaaaacacacgcccgcccgccaggccaanacccgcacaaaaccacaaaaccacaggaagaccaacgacaacagccgaaccgcggaccccaaccccacgcgaaaccgcaccaccccgaccagaccgccagccaacagcaaacccc

SEQ ID NO: 186016 - DNA, 516 bp, Arabidopsis thaliana
  unsure (1)..(516): unsure at all n locations
aggaaccagccccgccgccgccccgcccccccccagagacacacacgcaggaaacaacagacccacccgacgagaagagaaaaaaacccctccaaacaangccgttgggacgaaaagaacaggggcgccagaaaaaaaaaaaaccccccgagcacagggaggcagacaccccccccacaaagaccgacaaagagaaaacgcgcaccgcaagcagaacaaagccaccgccgccaacacccacaccacgacgcacgcaacgagagcccgcgacaacagacacccaaccaccaaccgcaagaacacacaccacacaccaccaagcacacacaacagagaacaaaacacacagcaccacgcggcaccaccaacaacacacagcagaagcacgagccaaccaacaaacacaacagaacaagcaagcgcagaccaaggcaaaacgaacacaccacgagccgaacaccaagccgcgagcaaaaccacacaagaacaacacaaacagcaaccagaccaacaaga

SEQ ID NO: 186017 - DNA, 540 bp, Arabidopsis thaliana
  unsure (1)..(540): unsure at all n locations
gcctgcaggtaccggtcccgaattcccttttcgacccacgcgttcgttccaatatacaaaaaactattaatagaggaatatacctttatcttaacaccctaaaccaacctctttaaataacacaaccctcccaaacccccttctcccacaccccccactctactaacaaaactctcttctccacaccaaaccagacccaccccagtttttttttctgaggggggtctcccccnaacaccccccatatatcataccttaaacaaaaacataaccacaaacccccatcaaactcacatcccctcaccaacaacaaatacttacgtcacaaacctaaaccgctccactctattctaagtacccccacccctcaccaacaaaactatacataatacccaaccccaccatcacacaccacactcacacttcaacatatctaacgacattataccaacaacaacaacccactcatttatccaaactaccatccacagaaatcccacatgcgcccccacccactcacacctcattaaaccaccacaa

SEQ ID NO: 186018 - DNA, 226 bp, Arabidopsis thaliana
ggggaagcccgcacgcctgcaaagtccggtccggaattcccggtgtcgacccacgcagtgcggcccctccataagccacagttgattaccacgataacttttttgtgacaggcatgccatctactaatcttcattgataataacaaaacatgaatattagttaatccgttttggggccagcacgaagatagatgtttaatctccctccctccccacattactctac

SEQ ID NO: 186019 - DNA, 360 bp, Arabidopsis thaliana
  unsure (1)..(360): unsure at all n locations
gcgtacgtaagcttggatcctttagagcgggctgtccangggggttggttttctttaatccatggaaacactagaagttttattaatttcaaggatggctgagttttaccaccttggggagaaaggagaccaccccgtaacctttattagaacatggattcacctggccttaccactttaagaatgaacgggctttttctgggggtgtggacccaagaaaagaacttcggcaaagaatgccggccaaggtaacggcccaatttgccatccggggaactcctcctttggacaggtaacaattcgtggacaactcgggcctggttgtaaatgggactgtatcaattgacgtaagctcaatac

SEQ ID NO: 186020 - DNA, 511 bp, Arabidopsis thaliana
gcgccgaggacgggaggacagaacacgcgccgcggaaggagggaggcgcgcgcggaaagggacacggaagggcgagggagagaggagcaccgcgccgggggagcgcagacgcgcacgagggaacacgaggacaggaaggaacaggagggcgaccgcctttttttatcgagggggaggaggcggcgccggggcgaagacgggacggagggcacgctaggggggcaagggagcgcccggcgagagacgggcgcaggggccagacagcgacgaggggaggaagggaaagacgggaagacgcgcgcacaacccagaggcggcggggcaccacgcgacggcccggcgcgcactcagccacgcgagagcgggacgaggcccggacgggtgagaggcagttaaagaggaagaaagaaggacaaacaagacactcacaccggccggcgacacggcgcgcagaacccccacccgccaacaggacgcccgcccgagagcgaaggcgggagaaccaaacgaa

SEQ ID NO: 186021 - DNA, 446 bp, Arabidopsis thaliana
  unsure (1)..(446): unsure at all n locations
cgggcgcctgaggaccggccgcctcccaggcggcatccgccgccaccgncgccaagggggggagagacaaggnggagaangaaaaaccgaccggttggaggacaacgccggaccccgaaaacaggggggaaaaaaactctctcctccaggggagcgaaaaaagggggggcaaaaaacccccaaaccggggggggggccccccaacgaatcccaggggggagacgccccgaacacccgnggctaggccccccaccccccgaaaaccaaacagggggggggggccccccaaaaaaaaaaaggggcggggggaaccacccacacaaaatcccccccaacaggaaagaaaaaaaaaaaatacccccaacccctccccgccggcccggggccccccccccccccccaccgaggggcccccggaccccccccaacgaaagacacgaaacccc

SEQ ID NO: 186022 - DNA, 306 bp, Arabidopsis thaliana
ggggaaagctccgtcacgcctgcaaggtacacggtaccggcaattccctggttacgacccaaggcagtacgccagacacgtagaataaaaaacgttaatcaataaaaactatgccttaactatccacacaatcttcaaagattatatttagctcaaaaacatccatacacacctacaaacccaccacgaattccaaattaagacatcacaataaataaatataaaaaatgtatacacacaaaaaatattaattagagatgtagacaacaccacaaagactatgaaagaactaacatatacaaaagc

SEQ ID NO: 186023 - DNA, 540 bp, Arabidopsis thaliana
  unsure (1)..(540): unsure at all n locations
ggggggggggggngccctggngngggggggggatccccccccannaaagnnnnggggnnaaagagggagaaaaaaaccagagaagcgaagccaccgggcccgcgacccctccaaggcgcgggcgagcaaagcacagcagaaggggggagggagaagggcccccccccccctaggcgttgggaaaacaacaaggggcgcagggaaaaaaaaaccccccgagggggagggggggccccccccacaaaagggcaccagggggcaggagaggagaacgacgacgcagacgaccacgcagcgaacgcaacaaagcaaaaaggaagagggggagacaacgaacgcaaagaccaagcgggagaaaaggagcacaacaagccgacgcgagggcacggagagcaaacccgacgagagaagaagggaagagaggagccacacgccgagggaagcgagcacaaaaacgagaggcgcagacaaagcaagagcgagaagcagaaacggaaaggaagcaagcgacggacgagcccgcagaagagcaaagaggaa

SEQ ID NO: 186024 - DNA, 435 bp, Arabidopsis thaliana
actcgggcggggccggagactccggggggggaagcccggagggaaaccgccacaggggggggaaaagggggggcccaaagggaaacccccaaggaaaaaaaatgagccggcacccacccaacccaacaagggagggaacgaacaggccgcccctctcttgagaagacgggaccccccccgcgggcaaaagcgaaaaagcccccgcacgggcggggggggggccaaaagccaaagaggaaaccccaacaccaggaacggaacccccgccccacgcccaagccagagcgcccccgcagggcgcccgccagcccccaacggaaaggccaggggcacccccccaaagcacggaggggcgaccccggagccccacgagggcaaacaaccccaccccccaaaccgaagcagcaggcgaggcgaaccggacgccgcccaaga

SEQ ID NO: 186025 - DNA, 573 bp, Arabidopsis thaliana
  unsure (1)..(573): unsure at all n locations
gggcgccggcgggggccgggccgcctcnncgggggggggcatcccgcccgaaaaaaaaaggggccggccaaggggccccacacccaccccaccaagggggagggagccccacaccccttaaaaaaagaaaaaaaggaaagggggcccccgggggaggggacaaaagaaccctcctaactgggatgttgggggaaaagggggcgcatggcccgcaaaaaaaaccccccaccccggggggggggagcccccccccgcaacaaggccccgcgacaggggggagaacacacagcgcggaaccaaagaagaagcgagacaacgcgggagcagccccccccgcagcaaccggacggagcagcgaaaaagcaaccacgaaaacaggagacggaaccgcgcaccgagaaggggacgaacgcgcggagcccgcgcgcgcccgaggcgaaggaggcgcaacacccacggcgccgggacacaacgcgagggcacgccagcacgggggggagacagcagcggagcacgggagcggagaccggcagggcggaggcagcagcggaagggggagggaggacgggggaa

SEQ ID NO: 186026 - DNA, 505 bp, Arabidopsis thaliana
  unsure (1)..(505): unsure at all n locations
ggcgccngcagggaccgggccggtgnancgagggggacatcagggccgaantggnnnncaacnncggggggggnngacagggaagacaaaaaaggggggaaagagggggcggcgccctctccaaaaacgggaaaaaaagcccccacccggcgggggaggaaaaaagaaaaaaaaaaactcctctaactttgggactgcagagaaaaaaaaaggggggggggaaggagaaaaaacccccccccaggggggggggggggccccccccacaaggggggggcccccccccccgggaggggagaaaacccaccccgagggggcccccaccccccgcggacccccccccccaagccaaagaaaggaaaacagccgagacagggcaacccgccccctccgcgcgggaggcaacccaacctacaaaagcggcgcagaggagagagggggacaagaaagaacacccccgagagcgcccacgggccggggagggaacaccgacggcgcccggggg

SEQ ID NO: 186027 - DNA, 472 bp, Arabidopsis thaliana
  unsure (1)..(472): unsure at all n locations
ggaaccaaaaaagggnagggggnggcggaggggncaaaaaaaaaacagggggattatcacaccccgaagaacccaaccagggaaagaaccccagaaaagaaccggcctcctcctacttgggatgtngggnnnncggggggggaggaaaaaaaaaaaacccccccnnaaaaaggaaagaccccccngaaaaaacaaacccccccaaaaaaagggggggggggaaaaaaaccgccacaccnccccgggggaaaaaaaaaaaagagaaaacggggcgcccgagggccaacaaacaccgcccccacaaaaacaacggagcgagacgagaaaaccaaacgccacaccaccgggcgcagaaaagagcaaccgccccccacgaacaaagggggacggggggcaaagccggaaagcccaagaggcaaacacagcccgggaaaagccccaaaggaagaccacacgaggagagcggcgaggc

SEQ ID NO: 186028 - DNA, 494 bp, Arabidopsis thaliana
  unsure (1)..(494): unsure at all n locations
ccgcggacggagcngggacccctaagcttccggggggggggaaggccgggcgcaggaacacaaaacagaagagggggcgcggatcttgcattccaaaccatcaaatacagaggcagtggcgggtgcttttaaaaccacagccaaggccatatacataatggggcgcagggggagagaagccttttatattttggggtgggggggagcgcccccgggacggaaaaagaaacccccgggacagcaggggcccgacacagacaagaacgcacggcgaggaccagaagggggggggggggacggcaggggacgcccccgaaacggccccggaacgccaggagaggaaagcgggggggggaaaggaagaggcagaaacaagcggaagggggggggggcgcacacggggaaaaaacaagcgggggggggggggagacaaagggggcgcccaccggagacggggaggacaggaccccgagggaggcgcgggggggaccccc

SEQ ID NO: 186029 - DNA, 483 bp, Arabidopsis thaliana
  unsure (1)..(483): unsure at all n locations
cgattgattaggtgacctatagaagnnagctatgacgtcgctgccgcgtcgtagctggatctctgagcggcgnctttntgttttttgggcctgtaaaccaaaacagaagaaggggtggatttttttttcccaaccctcaaaatccaaatccattcccgggctcctttaaaacccaacccatttcttataaataattgccccaaggggggaaaaaaactctaaatttttgtttgggggggccccccctttgagaaaaaaaaattcctggggggagcccttttcccccccaaaaaaaaaaaccccccttccccaacccttgttgggggggatatttttggccccccccttttttttgttacacaaaaaaaaaaaaaaggggggggaaaaaacaccccccaccgggggggggggggcccaaaaaaaaaataaaaattggggtgggaaaaaacaaacacccccccttttttaaaaaaaccccccccc

SEQ ID NO: 186030 - DNA, 484 bp, Arabidopsis thaliana
gccgtacgaagcttggatcctctagaacggcccgtccctggggggtgggaagccaaaaaaaaaaagggaaccaccccgagggccccggtcttcgcacgcggcgcggccagcgggccggggggagaatcaaaaaagcggagcccccgccagcggagaacccggtagggaaaaaggcccccttgtggatgtctctccacaccaaaacttcataggtgggggggcccccccaagaaagaaccccaccggaaaacagccgaaccccggcccccaaaaatggccggggcccaaaacaggaaaaggctcggacaacaaagcaaccatgcctttgaccccaagacgaaacactgaaatcccgggcccgagtcccccaccacaagatggccgaggacgtggaagcaagaccaccctccccacaactccccaaagaaaaggggcacaacgccgagggtgccaagcacccccaaggaagagagaaaaaacaccg

SEQ ID NO: 186031 - DNA, 546 bp, Arabidopsis thaliana
  unsure (1)..(546): unsure at all n locations
gccccgggagggagaaaagnancaagggagcaaggagacccaacaagagacccgtgaaaacaccccccgcggcagaaaaaacaccggggggagagcagaaaagaaagcccctccaaaaaaaggagagggganaaagnggggggagacaccggggaaaaaaaaacccacaaccgaggggggggggganaacccccccggaaaacaaaggcgcacggagggggggagaaaaaaaaccgacaaagaggggggacgccccgcgagaggggggaaagggggaccgaaagcgaaaaagcgcgaagcgccggccgagaaaaaaacaaccccaaaaaggccgggagaagagaacaaccggggcgcggggggggagnaggggagaaccgcggggaaggaggaagggcggagaaaaagaccganaaaaacgaccaacaacagagagagagaggggcaacagcgaaaagaaaaagagcgggacagggggcggagcaggaagacaacggaggggcgggcgaaggagagacagggaaaaagaggggacagggcggagcg

SEQ ID NO: 186032 - DNA, 474 bp, Arabidopsis thaliana
  unsure (1)..(474): unsure at all n locations
aaggaggaaagcggacaaacaacgcccacccccggagcaagaaaacaaaggaagggggaagtttagaacccccacaccctcaggggaagaacaaggaaaaaaggtngagggagcactcctcttttttgaggctggggaacaaaanaccggaccacaccccagaaaacccccccccaaggagggagggggggcccccccctcaagaaaacccaggagggagggccccccccacaaaggggggggaggaaggaggccgggggggggagatccccgcagccccaaaaaaccggagggcccacaaaaaagaaaacagcgagggggcgggccgaacccccgccgccggacgaaaaccagacgccatccacacagccccaccgcgggcgcgggggaaaacaacagggcgcgaccccaagaccacgcgggggccagagcggcccgcagagagggaaacaagcgccccaccccaacacaaga

SEQ ID NO: 186033 - DNA, 255 bp, Arabidopsis thaliana
ccgaaagcaggaacgcaccacagcggccgcccacccggaagaccccaaagacagagcaaaaacaaacgcaagaagacacaaaaacaacaaccacccgcgacacaccaaccgagacacagagaaggcccaccgcgccccacaagagccaaactggaacccacaaaccactacgacaccacaacaccaaaaccttccaccgaggggagacacccccaccgaaagaaagccgccaaaaaaaggaaaaacaacacaacg

SEQ ID NO: 186034 - DNA, 559 bp, Arabidopsis thaliana
  unsure (1)..(559): unsure at all n locations
tcgtaagcttggatccttaaacggcgccctgggtgttccgttctggaaaaacacacaaacgggtaaataaactttccctaaggccccgcattagggataaaaaaaactaccccccatcctttnttccaaaaggcattctggtgctccaagggctggaaaaaacaacaactcttattggggtgaggccgagaaaacaatccagcaaaatcattcctgggtcctttggaaatcctacccttgaaaggaccgtgtccccctgccctggatcccggcttagccctgaaatctatttggcaacctctttcctgggaacaaccaactggcaataccacaatatttgtgctatgaaaaagtggctttcacggctacgacaggataaaacgtttttgattcccggcgagggggaattacttttctttccctaccccaaaacctgtaaggaaaaccagccgctgttccattcaatacattcccaaaggcttttcccgcccccctcccgaaccataaaccggtctaaaacggggacacctttggtgattccaaaacaaacttaccccga

SEQ ID NO: 186035 - DNA, 465 bp, Arabidopsis thaliana
cggacgacgcggggggggcttttgaggggggggggaaaccgagaaagggaggagggaggaaagagagggaggaagaagaggaggtgcggaaggaatggagagagagagtgcggaggcagaggagagagggggggaggggaacctcacaagacaacggcggagagaggaggggcgggtttttttggagggggggcgggccggaagaggggaagagaggggagaggaggggcgggacgagcagaacgcgcgagacacgaggggcgggacgggaggagctagtaagagcgggacgcgcgcgcggagagagaaaagaacccgggggccacacatccacgagaacgaaaggaagaaagaaggaagagaagaggaaggggaaagagcacagaggccggggccaatacacaaggcagcacaagaaatgaggcacaactgcaaataaaggcacaaaagagaatcaaaaaacga

SEQ ID NO: 186036 - DNA, 455 bp, Arabidopsis thaliana
  unsure (1)..(455): unsure at all n locations
gggggggggggggggggggcctccnggnnagagnngggggagccggccccaaaaaaaaangagcgcccggacacggggggaanagnaagcagcagcgccccgccgcgggccgcacagggggcgaccccttccagagaggaaacgcacgcgacgacggcgacacgcggagggggagacagagaaaaaaaccctcccccttttgggattgctgggagaacaacggaggggcggcagggggaaaaaaaacccccccagcatacgaggggggggggggcacccccccaagaacgaggcagcacggcggaggcagaggaggcacaagaagaggggcgggccgcccagcccagacgggcgcacgccagggccgcccgggcccaggggaagccacggcgggcgagcgggcgggccgccgacagacgcggcacaccgcggaggcaagccggccgcaacggcac

SEQ ID NO: 186037 - DNA, 341 bp, Arabidopsis thaliana
  unsure (1)..(341): unsure at all n locations
gaagcgggaccacagagcggcgcccccggggggaaaccaaaaacagggagacagaaagcgggacaagaagaggacggcggagggccacacaggagaaaagaaacacaccaacacaanacggaaaccaggagaccacgcgccacaacaaaaggaaaaacccaaccgtgacagatgacgggacacaacaaaagcgcccccagacaaaagaccaggaaagcgaccgcccaaagaggcaacgcggagaccccccccgaagacaaaaaaagacccagccgaccacaccgaagcccaaaaaaaaaggaccgggacaaggcacggacgcgccaaaaccggcaaaccaa

SEQ ID NO: 186038 - DNA, 384 bp, Arabidopsis thaliana
ccccgcccccgccaacacactaacgcccccgccgaagcccaagcaccaacagaaacaagaccgagcgcgaccccccaacaacggaaacgcacacccacaccaacacggaacaacacacccaaaacccgaaacgcgcccgaacgccccaggacagacgcccaacaccccgaacaaaccacccgcgcggccacggacggcgcgacgaacacgccggcaactgcgaaacaaccgcggcagccgatgcggcggcccaagaagccacaacgagccgcgcccccccccaacgcggcaacacagcacaacccgccggcccgacaccccaccgaccggcgccgcaggcgacagaccgaacgccaccaaacggaaagaacccgagcgaaaaac

SEQ ID NO: 186039 - DNA, 487 bp, Arabidopsis thaliana
  unsure (1)..(487): unsure at all n locations
ggagggggngggggggcccccgnnagagggggaccaccggaggagggggggggggggggggggnanngnnngggngaangagggcggaggacaggagcccccccaaagaggggcgggcgccgcacacgcgagagaaaggagcggaanccccctacaaaagggcgcgggnaagagagcagcggagaggcaaaaaaaccccccgccggggggggggggcccccccatgaaaaagaggccgaagcgacgaccccgaacggccaaccgggacgcggaccacccgcgggcggccccaacgacaaaccgcgcgcaccacgagaacagcgcacagacggccaacggccgaccacccgccggcgcacggcagacggcagaggcgagcggagcagcaggccgagaaaagcacgccgccacgacacggcacaaccggccaaccggccccgcacccgggcgaaaaccgagaccccaggcaaaaaccaacggcaaaagc

SEQ ID NO: 186040 - DNA, 581 bp, Arabidopsis thaliana
gggaagacccgaccccaaagaggaacgcggaggcaacaatcaccagttaccacaaaagaaaagccacaaaccgatacgaacgatccacagaccacgatggaattgatgttatcttactaaccgcttgacgaacggaacatggacagcgccacagccaaactccaaacccgccgcgcggtgcggagatcgcaacagaattcatagaagtactccctcacccccacaaactttttttccacgcactgcccttacacaaaccgccgctaccgtctctacgcgactccaagacataaataaacaacgcacactacgctccacttacatattaaatattacatcacttccgaccaccaacccaaaacgacaatccgcaacccaaatacactgtaccttaacattccaccccccgcattctcaccgtacctcactcatcagatcactccctccacttttttatatatgccatttgcctactcgtatctttttattaataaatttatcaaccccgcaccccaacaccgccctactatatatccgcgcaaaaaaaatcccctaacattaccccaccacaacaaataata

SEQ ID NO: 186041 - DNA, 464 bp, Arabidopsis thaliana
  unsure (1)..(464): unsure at all n locations
ggggggaagaggggggagaaagaaaaacaaaagacgaaaacgacaagaagaagagaccccggagagagaaggcaacggacaccgacaagggagaaggagaggggggaagggggccccctcaaaaaaagggcggtgggagnagaaaaagacgcgaacacagagaagaaacccccacggcagggggggggggggacgccccccacaaaccagaggcgggaggagagaggggagagcgaagcgggggggcgaaagacagggagggcgaggcagaccgagggcaaaaagcccgggggggaggagggggggagggagggggaggggggcggagagaggaaggggagagggagaaagagcgagaggagaccgaggggacagagggcggcgaggggacgcgcggcggcgacgaaagcagacgcgcggagccgacgccagagggaggagacgaggagcccgacaagcgaccg

SEQ ID NO: 186042 - DNA, 339 bp, Arabidopsis thaliana
ggaggttactcgggggacacaacaaaaaactagaatccttcagactactatgacggacgcacttttagggaaagctagggtacgccctgctggtaccagtgaccggaattacccgggtttgacctacggcgtacgccaacgcccagcgggcgtacactgcgcagtggcacgctgtgagatttattatggggtgtaccgaacgcagtaatacgttggtggtgtcctatcaaatgggagagagtggccctaagctatacgcaaatggatatattgattattttgggacaaacacaagagggacccaggcgtgtacaacatatttcacgccgtgggtaccca

SEQ ID NO: 186043 - DNA, 473 bp, Arabidopsis thaliana
  unsure (1)..(473): unsure at all n locations
gtaagcctaggaacccccagagcggttcgccccggtgtaagagccctctaaaaacaaaaaacctgccgnccgcaggcgacagtcccccccaagccaaaacaacaagcacaggacccgccaacacaccggccagaccaaagcacaagagcgggcaaacgcccccgcacccgtcgcacacaaacggaaagcacccccctccttctaagaagtgggcacgcaacaagcacgcaagaccgaaaaaaaaccccccccgcgcgcaaaaaaacacagccgaagacccaccgaaccacagggcccagacgggaccccccgggaccgagcccacgaaacccagcgcgcaaacacagccgggcgcgcccaaaaaaaggaccaacaacacgaaggccgccgccaaacaaccaaaaccgtccgcggaaacacccaatccccccaccgcccaaccaacgaggccgcgcgaccagaacacaaacaaa

SEQ ID NO: 186044 - DNA, 292 bp, Arabidopsis thaliana
ggcgcacgcacacgtacagtgaccttggatcctctagagcggtcgcccttcatgttagaacattaagaaggactacacgttctagataccactgggaagacaccgtgcagaataccatctggctgtatgccacttacacataggcccgcaatgagctcgccagatctatgtgtaaaagaggttaaggccacatacctttttgtgggttgggcgccaacgtagaatagacgaatcgtgctgtgtgtgccgtgctaactcaccctatctaaaagagatggaggagaaggcttga

SEQ ID NO: 186045 - DNA, 338 bp, Arabidopsis thaliana
ctaatctatcctaatacaacaataggacgctgtctccacacgcccagttgcggaccgcccggcccggcgccaccccgcgaagggtcttttttgtcaaggccatacgtcgaccaacccgccagatagtcgacgttttggcgctggcagcccccgaactacattcaaaaagacgacctcagggaccagaaacaggccagcccagggttaccgccacggctcaacagagcgagcggggccacgttccccggtagagcgtaggaatgaacacgttacctaggctgacgacacgcgccatcactcgaggcgaggcggcctgccctggcccccagaacccaaag

SEQ ID NO: 186046 - DNA, 291 bp, Arabidopsis thaliana
tggggagcagaaaggaggaaagagtgctcgctcacttctgggggaagcttttttcgggggggcggccgccttcttctactgtttcatattattattccttttttgtccgatgggtttattttatctgtgagcccgccgattttgatttgaaattcgttgaatgcctttccagcagtcctttaatcaagaacggatcactgatagaataagcgaaggcaagatgcgtcagaatgatggaagagtctgcctgccgggaaagaatgagaggtagagaaacggtgggaggggggg

SEQ ID NO: 186047 - DNA, 386 bp, Arabidopsis thaliana
  unsure (1)..(386): unsure at all n locations
tagagactgcggctgccgtcgtagctgatcttacgcgctgngnnnnnnnnnnnnnnaaaacagctggggccagacgccaagctttacttttactaattgttaacgcttggaacagcaaagaaagacctcctttcgttccagggttaattccctggtttgggaactttttaaaattgggggttttggaaacaaaaaaaggtttttttggggattttaaaaatttttttttcccccttttttgggggggtgtggccccaaaaattttttttttaaatcccccctttttcccccgggttttttttttggggaattttttttggccctcccaaaaaaaaatattttttcagggaaaaggggtttcccccatttttttttttttccccccc

SEQ ID NO: 186048 - DNA, 631 bp, Arabidopsis thaliana
  unsure (1)..(631): unsure at all n locations
ggggnggggggggggggggcgcccccgnaaaggaggggatccancccaaanaangggggnggaagagagggggganaaaaaaaaaagaaggagggaggggggggggagggaagccccccaaagaaaagaaacgacgcgcaggcggacaccagcaggggggaagggaaggcctccctccccctcgggggccgtggggaannaaaaaaggggcgccggcgacgaaaaaaaccccccccaacgcgggggggggggggggccccccccccgagaaaaacgcgcgcgcagcgagaccgagcaaccggcacggcgcggcgcccgccgaaacggggcgcgagggggcgccgcggcgcccgggccgcacggcgccggaccaagccgcacgcgcggcggcgcgcgcccgcgcgccgcgcggagagagaaagggcgcgcgcgaacgctgcgcgccccacacggcgcggccgccgccagcgacggccacgacagcggcgcgagccgccatcgcggggaagcacgccggcgcggcaggcgccgagcggcggcgcgccgaccaccacgcggcgcgcgcgccggccgcgcgggacgagacgcgccgcaggccgcgccccaggcgcacccagcggcgcgcgaaccg

SEQ ID NO: 186049 - DNA, 585 bp, Arabidopsis thaliana
  unsure (1)..(585): unsure at all n locations
aaagggggggggggggggggcctttatgtaaccgcggcggggcttgtggggggaaacgcacgccggcgggggggnggaggcnnnagagcgttcggggggggggaaaagccnnngaaaanaaaaagngggggggaaaggggagaaaaggnnaaaaaagagggggaagggggggccaacggcngggggaaggaagctgttaacggggggcaaagnaccaaaggggaccccgaaacagagagcggggggcaaaagaattcctcctttggggggggggcaaggggaacaggggagaaccaaaagcgaagaacaccccccccaagagggggggcggggggaaacaccaaaagagggggggccccacccggagaacgggggggggaaaacggccgcccggcggacgacacgggangcgggaaagggaagacgggggcgcgccggggacgagggcaaaagacaaacaacccccgaaaaaacgaagaggcggcgcgggaaaaccgcgggggaccaaccccggaagaggcgcgacgcgccagcccacgcgcggggcacagcgggggaagcggacgggcgacgcaggcgaaaccg

SEQ ID NO: 186050 - DNA, 455 bp, Arabidopsis thaliana
  unsure (1)..(455): unsure at all n locations
cgggacgcctgcggggaccgggccgccttccaggggggagcatccgcgcgggggttnggagaggngggaggggggacagacagaacaaacaaaccccggggaggaaaaacggaactcaccccgagaaccaaaacccaccccaaggggcaacaaacagagggggggaaaaaaatccctccttggtcgggcagtcggggaaacnagagggggggagggaggggaaaaaaaaacccccacaccgcgggggggcgggggggcccccccaaaagaaaaaaaacccacaaaaaaaagcgggcgccagcccccgccgaaggaacggaaaaaacccgcgcacgagaagggggggaggagggaaggaaacgaccacgactccagcgggggaccacccggcacccatcggcgagaaaagaaggagcggcccgagcagcagcgaaccccgccgcgagacccggggc

SEQ ID NO: 186051 - DNA, 510 bp, Arabidopsis thaliana
  unsure (1)..(510): unsure at all n locations
cgcggcggagcgggaccacagagcgttgcccggggggaaagcccccnagnaaaaaaagaccgacaggggcaaagaccaccaaaaaacaacaagagaagacccgngaaaaccacccagccggcatcaaagaaggcggggcgcgcgaagaccccaccnncaaaggaagcaaaacaaaccgccccctcttgtgggcgcgggaangcnaggnaaagaaaacaagaggaaaacagcgccccccagggggggggcgggggccccccccccaagcaagngggccacaccccaaaaaagaggaagcgggggcgagcggcgcccccccgccaagaaaaaccaagggggggcgagaaagacaacacgaaagggggggaaccccacacaccggcgggggagaggggccccccccccccgaaaggagagagaaaaccccccgaaagaaccgcccggaacaaccacaacccgcccccgggaaaaccgggggagagggaaggggggggagcccacacccacccc

SEQ ID NO: 186052 - DNA, 634 bp, Arabidopsis thaliana
  unsure (1)..(634): unsure at all n locations
gccgggcgccngcgggaccgggccccgaaacgggggggggaccagcggcagccaagagannggggacgcgggggcggagaaaaaacccccccccccccacccccggggggaggacctctttgtaggacccccaccccgggccccaggcggagggaggaaaaaaaagaaaaaaaaaatctcctccaaaaaaaggggctcgtagggacaaaaaacccggggggggggggggagggaaagaaaaacccccaccccgtgggggggggggggggggcccccccctgagggagaaaaagggcggtgggggagggagaaagaaaccaacgaccacgcccgcgccacaggcacggaggacgcgagcccgacaacggcccggcgagcccgccgggaggacaacggcggcgggagagccgccccccgcgcaccgcccgcgagagcagccacaaagggcgggcgcggagggcgggaggccgccgcgggcaggagcagagcgccgacgggcgaagcgcgggaggagcggagagacgacgcaggccccggcccgaggggccgcggccgcgcgcgcgtcgcgnacgagcgccaggcgggggcggcgacaggggcggcgcgccgggagaggaggggggggggacgggca

SEQ ID NO: 186053 - DNA, 509 bp, Arabidopsis thaliana
aaccgcccaatatggggaaggctggtccgcttccaggaaccgccccgaaattcccgggacgacccgtgggtgcgttccaataaacatacactaacaatggatggtacactactattcaggttactataattctaccaaacaaggtgactatctgaacattgtcctaagtgtcggaagacgagcataacaaacaattctcggcacctgcaggtttcctggtcggccaaacatcattctttatcgagggtggttgtaaagaccactgacaattcttcgcacctgtataagagacgactcgcttacgccttcccgcctcttttataacgatccttaagtctatttgtttgttatctaatattaatatggtgttgtcttgtatctcttgtgctattcgacactccgggaacgccgagctctattctgtatagaaagagcatttgcggttagaggaatccctttgttgctcctctttctttgacgtcgctgcctgcctcactatccgattattc

SEQ ID NO: 186054 - DNA, 626 bp, Arabidopsis thaliana
  unsure (1)..(626): unsure at all n locations
acgtaagctcggatcctctagagcggtcgccggggggggaaagccggagaaaaaaaaacgagaagagancagcgggcacccacacaaaaaaagcccgagctgctatccatgccatatgccgcagggaagctacttgaaaaaagaaacgcgtataaacacaggaaacaacccagacgcgtcaggacacaaaacattcctgnctgcttgtttggaaacacanaaggcgcaaggggggcaaccaagaaaccccccggaagcggaagcaccaaacccacccgcctgggggccaaaacacggaacaacccaagacaaggggcagggccaacaaaaaagaccacaaaaaaagcaccccccggacactgactaacagccgaaataaggaccgccgaccggcaccaaaagggcaacacagaacaccctacggggaaaaaagagagacaccgggagggcccccaccagaccagggaacgaaaaacagcagacagatcccggacccacagggccaaccaaagaggaacccccaaccacgcgccccgaaatccggaaaccacgagcgaacccggacacaaccaaagaacgcgcaggcacaacaaaccagaatacaaaccgaaggaaaaaaaaccggc

SEQ ID NO: 186055 - DNA, 601 bp, Arabidopsis thaliana
  unsure (1)..(601): unsure at all n locations
cgcgtacgtaagctnggatcctctagagcggctgctctggggggggaattctttttaatacaaatctgggatcacaagagatagatctgagggaatgtaagcacatggaatttagaaataagaatggccttaagaaagaagtcgcccaatagtgttacagaatcactaccgctcggttngngatccagaatttctgataagctgttctcgaanacanncagcagagcagaagccaaaaacaatcagagtatgaataagggtagccaatatttcggttctgagctgctggtgcctctgcttgaagcgtatttcctctctataacctgccagaagacgtggagtgcccattcggaggacgggggtacgggagattcctttaggaccgacccccctctgggcatgggcagcgcaactcatccgaacaatggaacaccttttaactccaactctcctgaggtcccataaaacaccctcggcttccaaaaaatacccggaggtccaaggcaagggctttaagacacagcgcccctcgaacaccacctccagaaaaaaggattgccccctgtgcgcttnaacacccttctgggcatttccccgccga

SEQ ID NO: 186056 - DNA, 119 bp, Arabidopsis thaliana
aaacagcgccacaccgcgagcttgaccagagcgcgcttggggacccaaaaaccaagtgtaacgcaaagcgaaaaacactatcgcacgaaacaccagcggcggggacgaaccagccactg

SEQ ID NO: 186057 - DNA, 467 bp, Arabidopsis thaliana
ccccccccgagaggagggcaaccgcaacgatatacggggggggggggaaagccggcgagacacgacccaagaaccgaaaccgggcagcaaacgagagaaccacccacccacaacagaccgaccacgcagaaggccgaaagagagacctccacgcaagagagaacgaggaagaaacgaacacagcaagagcaggcagcaccccacgcgcaattttatttaggggggggggagaggccaaccgcggcgcacaagcaggaacaagacaaccccacagcaagagagaaccgagagccaacaaggcaaaggccaggaccaagagagaagccggaaacgaaggagacgcgaagcgaaaacaaaagcaaaaccaagacaaaaacaagaggaacacaaaggacgaggaacgaaagaaggagaagggcgaggcggaaaacaacgcgaagacaccgaccgggacggaacgcaaacga

SEQ ID NO: 186058 - DNA, 255 bp, Arabidopsis thaliana
  unsure (1)..(255): unsure at all n locations
ggagaaaaacaacccccccgccaacaaccaaaagaccgcgaggcgggaggcgaccccctctagagggagaaccccccgcggaaggccacaccccgagaaccggggcgaaagccaacccgcccctcttttctttggggggggggggcccancccaacgcccggggcgcgggaacacgaaaaaaaccccacccccccgaggaggggagggggagagacccccccaagcggcccgcacacagcggagagagcgagcac

SEQ ID NO: 186059 - DNA, 430 bp, Arabidopsis thaliana
cttagagagcttgacgccatgcccgtcgtagctggatcttaagcggcgctttgtttttgtaaagcctgagaaaaacaacttgattggcattacagagcaaaaaaaaaaccgagatcacctcttttatccttgaaacacctctttgtcaagcttccttataacctagttacacacaaactcgacaaactaagttgactattacaagtggaaaatattatacttcaattcaagtagaccacctgctcttcttgtaatatcacgcacacgcataactttctctttatctccccctatttcttggctggaccactactctgacacccttgcacagtggcttgtgggatccacccacactatagcttggatttttaccccgctgacacatacagcttgcgagcggagctcgatctctttttgaaagttgctctat

SEQ ID NO: 186060 - DNA, 482 bp, Arabidopsis thaliana
  unsure (1)..(482): unsure at all n locations
gagcgttcgcccggggggggaaaaccccgaaaaaaagggcacngaaaanaccgagaaagacaaacacaaagaagggcaagagagaagcgaaccacccccaaaccccaatcttgcgggggacaaaaaaccaccacacacaagaacacaaagccgggagggcagcattttctttgggagaggcgaaggccaacccagaccaaccggaaagagggggcccacccccgggggaggggggggggggacaacaccccgacccaggcagaccaaagccggggaggaaaacacaccacccccaaaagggggcccccgaaaggggggcgaagggggggcacccncccccagggccacgcaagaggggaaaagagaagggggaaaccccccaaaccgngcgggggggggccggcgcacggccccccaccccaaaaaaaaacaacngaaaagaagggacgcaagacanaaagaacgccggggaaaccccgcac

SEQ ID NO: 186061 - DNA, 508 bp, Arabidopsis thaliana
  unsure (1)..(508): unsure at all n locations
ccggacgcctgcgggaccgggccgcctacccagtggaccaccagcccgcgcgaaaaagaagaacaccggcggcggcaaattcccccaccccccgtgagcccaatagagagagaagaagagatgccgcccggagagagaggaggatgggagaggacccggnccaaactcctcccctgtggaggcagaggncnaccacgaggggccccaaccaaaaaaaaccccccacncccgggggggggggggccccccgagccggcgccccgggggggaccccaccaaaaggcccccaccgggggggaaaggaacgggagacaaccccggggcgccccccaggcggggggccagaacagaaccgcgggcccccacagagggggagcagccaggggggaggagaaaaaacagggccggggaggggcgccgggaacccagagaagggggccccccgggggggcaaacaaaaccacacgggaagaaaaggaaaagggcgggcccccccccacgcggcgaa

SEQ ID NO: 186062 - DNA, 429 bp, Arabidopsis thaliana
agggggaaacgagagaatttacgcgcgggggggaaagccgaagaaaaagaaaaacacgccggcccagcggaaaaagaaccgcgcgcggcggaagggccgccgccaagaagagcaccaaaaagttcgataggacagaggaccacaccagaccgagaaaaaaggaaagcacggcgcgcggatttataattagggtgtgggagcggcgccgacgagaacagcaccaaaaaaaggggccccagaacgagggaggggcgggcaaaaacacaacagaaaccgagccaaacagaaaacccagaagaaccggacgagagggaaaagcaagaagaagacgagaacgaggaggaacgcggacgggcgaaaccgacgaaaagaagagggcgcgagcgaacgcagaaaggcaaaagaccgcagcacacacccacaccaaaa

SEQ ID NO: 186063 - DNA, 499 bp, Arabidopsis thaliana
  unsure (1)..(499): unsure at all n locations
ccgggacgccngcagggaccggnccgcctttcccggggggaccagcgggnccgcnngaagaagnngaaanaacnaacagagangggggngcccgccccgccgngaaaccccaaaaagaacaagaaacgggaaangaagccgagaaaagggggggaaaacccaccccaagggatccctcctaaagagggccgacggcnaaaaaaaaaacccccaagggggagaacaaaacccccccagggggggagggggggaacgcccccctttacaccagggcccccaaaagaaaaaaaagccaaacaccagggggacccccccgcaccgaagaagccacagaaggagggagaaancggggggtgaaccccgcgcccaccgccaaccgggggagggggggcggcggcccaaccccaaacggcgcggcgaagaggggaaaagcggcaagaccccccagaacgggccagaagaaaggcggaacacccccaaggcggccccaaaaaaaaaa

SEQ ID NO: 186064 - DNA, 208 bp, Arabidopsis thaliana
gggcagggcgcgagggagggcagaggagcatgtttggggaaaacaaccccacgactagcgcaaacagaagggccgggcgcgcaagaggagcggtttatctttctgggagttgggggcaaaaccgccagggtaccggtgagaaagaaaaagcccccacgagggggcagggggccgcgcgcgcccgactagggcgggcggcgccgggggg

SEQ ID NO: 186065 - DNA, 531 bp, Arabidopsis thaliana
  unsure (1)..(531): unsure at all n locations
gggggggggggggggggggnggagatttttgcgggggggggaaaagcccgtagaaaacaaaacaaggagagcgcgagggggcggcccgaggggagggggagggagaggagagggccgcggccggccggcgggacggggcgttcgagagggcgcgggagagacccggcggcggagacggagagagggggagcgcgagagcgggtctcataactttgggtgatggggccgaccaccgcggggcgcgcatatacaaaaaaaaaaacgccgcgcggagggggaggggcgggtggagaccccccaaaaaaaatcatagccaacgggatgacaggccagcgtgagacagaaagcggggcgcggcgtggagggcgtgagcgggacgcgggcgccaacggatgcagccggacaggcgggagggatgggaagagggacgggaggacgagagagcaaggacgcgacaagcaagaagagaccgagaagggcaagaatagcacggagggcaggcggagaggcggagaggggggcggcagcgcg

SEQ ID NO: 186066 - DNA, 535 bp, Arabidopsis thaliana
  unsure (1)..(535): unsure at all n locations
ggacgcctgcagggaccgggccggcccaacccggggcgcccatccgtccgaaccaaaaggacaaccccagnacccacagcagcaaaagagacccgggcagcagcagcagcaaaagaaaccctgggcagcagcacccaaggccagattaaaacaggcacccccccccaaaacccctctctctatgccaggaagaggaaaaaggaccagaagaaccccccccccacacacccccgccggggaagaggggggcgcnccccccccaaaagaaaacccccacccccccgcggggggaaaaccccccgccccccaaccaaaaagagaaacgagggggnacaaagaagaaaaaaaaaagacagaaacgaagaaaacaaaaaaacccaacggagggggccgccgagaaaagaccaaaacccccccgccgcggcggagagcgaaaaaccccacgagaaccacaccaaaagacaaccggcggccggaagacaacacagggcgaagggagaacaccgaggcaacaacagagaagcccggggccaaa

SEQ ID NO: 186067 - DNA, 437 bp, Arabidopsis thaliana
ctttagaagaactttgacgtcgcatgcacgccttccttagcttggattcttttaagcgggcggccttttttttttttttttaataccaattttgggcgaccattatggtgaattaaaaattccggatttggagaaggttccatggagttaaccaaccagggaaaggaaaaaattggattattaattgtgccccaaaccaaacaaggccttaattaaacttaatcttaagaaattttggtttaataagcaaagaaacccccgggttaagtaaaaggttaacattactttttttggttctttcacagctttttcggctttttgggaatttgtttttgtggcaccctttgttcctttggtccaatgagggctttaaggttaaaagtttttaccttcgcgttgagattcagcaggaccggattctctcaggtttccagtta

SEQ ID NO: 186068 - DNA, 358 bp, Arabidopsis thaliana
aagaagggaggaagggacaacggcggaaaaaaaaaccccccccgggggggggggggggccccccccacgaaacgaggcagcacgcaaggagaacaacagagaagcgcaggcccgaagacaacacaaacgcccacgggccccgcccaccgccacacccgcccaacaccagcacaaagagcaaacgggaccgccgaaaccacacccgcgaccgcccgccacaagcgacggacaaccgaaagaccaacaccaaccgccacccgccgcggagaaagacgacgcggccacacagcgaaaggacacgcaaccccaacaccagcgaaccggcagacccacagcccaaccgaccgaccacccaaaa

SEQ ID NO: 186069 - DNA, 556 bp, Arabidopsis thaliana
  unsure (1)..(556): unsure at all n locations
ggggggggggggggttcctttccggggggggaaaaggccccggagnnnannnggnggggaggnngggggggggnggnggggaaagcagaaggagacgcgagggagggaggcaccgagagagagcactcttagggaagaagcagacacaaacgggagaacaagcgaaaagggggaccagaccacgtttctttttcagggggggggggaagaagaaaaaacgccaacggacggaaaaaaaaaacccccccacagaaagagggggggggccgcacccccccagcaagaacgcacgcaacaagaggaggaggaggaaaagaacgcgacccggaacacaggacgccgaaacgagagggaaacaggcggcgaggcaaggagagcggcaggacaaaaaaagaacgcagacgccggcaggccgagcgagaagagaacggacgcgaacgcagagcgagacggaaacgcagcagacgaccgaacgaaaaagaggagagcgacgacgcgcgccaagagaagggggaaagagaagaacgcgcgacaacgcaaaaccgcagcgcgacac

SEQ ID NO: 186070 - DNA, 182 bp, Arabidopsis thaliana
  unsure (1)..(182): unsure at all n locations
cacgcctacgtaagcnnggatcctctagagcggttcgccggggggttaaagccttttaaaaaaaaatattttttcatnanggaggagacttatcaaaaangcaacaagatgagtctctttgaaaaccaaccagcgtacatcaagtggagaaggcgcgcgaagaaccatggttccatgacgca

SEQ ID NO: 186071 - DNA, 451 bp, Arabidopsis thaliana
  unsure (1)..(451): unsure at all n locations
gggaaggcaggacccccggcaggacccggcccggaattcccggttcgacccaggggtccggccaccggaacaaggactcccggccgcagacaacactagtgtgtttctaatctctattcgcttaaacccctttttcgaccactattcccgttccgaacctgcttgggaagataaaccgcaagacccacacagcttggccaatgccccaattttattcggggagggcctngaaaacaaggaaatcgctaaacggctaaaggaacccttaaggacctaaatctctcgcggtatgaaatctcccaaccactgccctatcgggaagggaaagaaaaccctgaagtcggaaccaaacaaaagaacgtcgacctgattacgctatggctcccaaataatcctcttccgtgtggcggaatcggctcggtaaacaatatcacactccaagactatgaaa

SEQ ID NO: 186072 - DNA, 444 bp, Arabidopsis thaliana
  unsure (1)..(444): unsure at all n locations
ggggggggnnccccttaccggagggggggggaggcggcgcccaaaaaaaannnnaagaaaagagagggggggcagaacaacacaaccaaccagcaaggcgccacccgaggcaagacactcctaccgcggaaaggcaccagagacaaacgacgacacgaacaccaagacagcaaagaaacatccctccaaatctaggaatgaaagggaaaancacagaaggcggcgaagagaaaaaaaaaacccccccaggcggggggggggggggccccccccaaagaagaggcacccccccaaggagagaaaaggaaggaaacggacagacaacagaacgaaacacaacacagagagggaccaacgagacaaacccgcagacacagcgacggggcgcgcacagacacagcagcacacaccaagacacacgcagaaacagaaaagcacccacag

SEQ ID NO: 186073 - DNA, 438 bp, Arabidopsis thaliana
accagcccttttagggaaggctggtccccttgcgggtcccggcccggaattaccggttcgaccacggcggtcccgacacaaaaaacaaaccactacatctggctgtgtcactaaacacgacttctgctacttcttcaaaacaagttctctctgcatatgtctaacaggcggaggagaagtcttaacataaattcgcccctcctctatttgtgcgcccgccatcgctcttatttatctgcctgaaaacccttacatactaacacgtaaagaaaaaccactcgcacccccacgaatccccacacacaacactaacctccccgatattcaccacaacgttatgatattttactctactctcctttaagcaccccctccccgcaccccctctcacgtatcgtcaccacacctccaaccccctaacagcttcacgtccgtcac

SEQ ID NO: 186074 - DNA, 439 bp, Arabidopsis thaliana
ctaaacgacccataaagggaaagctggtacgcctgtaggtatccggtcccgaattctcgtttcgaccatagcgtccgacccgacaaaaaaaaccaactctcgcagtaaaatactattactcatatactttcaaaccgcataataatctataaagaggacaacgacttaggatactatgaatatgttatataaataaaattacttctgaagtccattgcaaaaaaaaaatatttatcttaaatgatggatcaagtaaaacttactatttaatagtctatcaaacacaataatgttaacatattcactatacttacccatctaaaataataaatattaattattatataacaaacacaaacaaccacactcgatcactatcgataaaactatctgtaaacactttcaaccgcagcacttctttacttcgtaaatcgttaca

SEQ ID NO: 186075 - DNA, 470 bp, Arabidopsis thaliana
  unsure (1)..(470): unsure at all n locations
cgggcgcctgcagaccggccggctcccaagggccagcccccccaccggcggaaaagggaaacnctcaaaacccccccaaaccaccacgccccactacaaaaccaagcgcccccaacgaacggcggcccccccagcctcctccccaaaagcgtgaaccaaaagcaagccgccgaaaaaacccccagagaggagggggagcccccccnngcngggacaaacnnnggggagccgccaagcaagggccagaaaaaccaacacaaaaacagggaccacacgccccgccgaccagaaaccgacaccaaaacaaaaagaagcgcaaaaacccccccaccccaaccaaaaaaacaggcaaacccgaaacacaacaccacacggacacaaaccccccgcagcgcgcagacacccccaaagaccacacagcgaacagcagcaggcagacggacagaaccaaacaaaacaaacaaaacgaa

SEQ ID NO: 186076 - DNA, 552 bp, Arabidopsis thaliana
  unsure (1)..(552): unsure at all n locations
cgcctgcagggaccgggccgctanaccggggncgccatccccgccggggaaaaagagaacagcngaggggggcnccncagagaggggaccagaaggccacggnnngagaaacgaaaaacaggcaggaggagggaaagccggcccgggacaagaaaaaacgagaaaacccctccccgagggacagatgggaanccagggagagggggtccagggaaaagccccccactgaggggggggggagcccccccccggggggaacaagagggggggaggggagcggaaagggaaaagaaaagaaaagaaacatctcaccccccaaagaaaaggggggggcggggagaaaacaaagaaacgggcggaagaaagggaaacagcgggagacaccggaggggggcgaccccccaggcacggcgcagagcggagaaacggaagagagcaaccggggacgcccctccccgcaaaacacgacaacgggcaggagagacacaaaagatcccaacacccaaaaacaacaacccccgcgcaagcacaggccgggggggggagacgcac

SEQ ID NO: 186077 - DNA, 479 bp, Arabidopsis thaliana
  unsure (1)..(479): unsure at all n locations
cacgcgtacgtaagcnnggatcctctagagcggttcgcctangggtttaattttttgaaagaaacaatgtttttcacataggtgcatgtgaatagtgaagaaagaaacaaacaaagaatgaatagcgaaacatctacagtacttggagttgcaatgcaaatcaatgcattgtcgtgtgaagaagatagcnggattttgttgggtgttttgcngncaacagcnacaacagaanaacaaaaanaagggccagagacaggagcagcggngncagacaaacnccaggcngcncggaangcncngggaggacnacgagaagaagcacanccggacccagcnccnccnnggcnaaaccaaaagagaaaaggcgnnncncgnccccacaagagcaaacaggnanagaacaacggccngagggcccnnnacaagnanancacgaggaggaangnngagnggannccccngagcacgaaacacacgca

SEQ ID NO: 186078 - DNA, 244 bp, Arabidopsis thaliana
  unsure (1)..(244): unsure at all n locations
aaagaacaacacggcgggagacaccccccaacaagagagacaacggaagggcagagacagacacaaggaaggagagaaaaagncaccctcaaaaaacaggaccgccngggaaanacacaaaagcccgagcaaaaaaaaaaaacccccccgngccggggggggggggggggcccccccccccgaacggcgccgccgacagggacgaacggcaacgacccagcccaacaagcacaccgccccaaag

SEQ ID NO: 186079 - DNA, 460 bp, Arabidopsis thaliana
  unsure (1)..(460): unsure at all n locations
acgcgcagcgacgaggcgcccaccaggtgaacgcggcggaccaaggcagccgcgaaaacacaccccagacaagaaagccgaagactatttttttaccaagagggggggggacccccccgaaagcgcgagacagcaggaaaaaaaagcccccggggggtggaggaaaggaaagacccccccgcgcgctgacgagaggagcggaagcctcccccccgaaaaagggacacgcaacggaagnaacgaaacgaccgcatcgcccccgccgcggcacgaagacgccagcggccacccacacccccggcggcccccccgaccggcaccgccccgggcgcccgcccatcccccggacggcgagaccaacccaacacagcgccgcgagactaccgcacaccaacaccccgcaacacaccacaccgacccgcgaacgcgcgctatacacccgacgaggacgaggacacag

SEQ ID NO: 186080 - DNA, 385 bp, Arabidopsis thaliana
ggagaaaaaaagaagaggggggaaagagggagggaagaggaaagagggggggggagggaggaggggttttagggagaaagaaaggagagaggagaggggggagagagaggaacttttttttttggggtgggaaagaaaaagatagatagtaaaaaaagatttggagagagagaggaggataggaggatgtagatagaaagaaataataaagagatagtttaggtgtagatttgtgtagataagagagagggtagaatagaatgggtgggtatggattgggatatggggaaagaatagtagttatatagtgaaatagggaaagagaattttaatgtgaaggagtaggttggagagtggtgtgggataagtgggtttatttggaaat

SEQ ID NO: 186081 - DNA, 444 bp, Arabidopsis thaliana
  unsure (1)..(444): unsure at all n locations
gcacgcgtacgtaagctgggatcctcttgagcggccgggctaaacctnntgaaataagagatttctgaacatatggcgccaggcaggagctctgaattcacaaaataaaactccatggaagcaactatacccgaaatcgagaacataactcctgaggcgcaaaacatacccaatctctcttctggaggatgttgggnaaanaggaaaacatgaaggaaaagaaacatgcaatacatagggggggggcatgccaaccaacaacatgcgagtcaaaactcccattgaaacccaacccctgagagaaaagtccgaaagatgagggataacaaaagggcggccacggaggagaaaaaaggcaaagatgaagagagggggcgcaataaaacagcccctcctggggggtgggggagggcaaaaccctgacgtccgcctaaaaaacgggag

SEQ ID NO: 186082 - DNA, 524 bp, Arabidopsis thaliana
  unsure (1)..(524): unsure at all n locations
ggacccggcccggaatacccgtttcaacccgcggtaaagcctccccaaacaaaactatttttttccaccgagaacacccccccaaaaccaaccggcacccccccancgccaaccttaaacggctaaactttgccttggtctccggagggggacgacaccctccacaccgacacaaccccccagcttaaataacggctgttttcaccccccgccccgcacacacctgtcaaaaaacacaattatctccccagncccggctgtggcgcaccccccctcccctccggaccccgcacacccccctcacccaacacactccacacaaacaaaactcacaccaaaaatcccacccccaaaaaaccgcaaccccacaccgcgcacacccaacacctcttcgtccccaaacacctaaccgagagagaaacccactacccaacccacccaaaataaaataatcacaccacccccccccttcccagcccacctccccaaccgcggcccaaaaaacacgctccacccccaccccc

SEQ ID NO: 186083 - DNA, 402 bp, Arabidopsis thaliana
aggaaacgtccctgagtaccgtcgatcccgtcgacacggtcgcgctaaaaagaactttagaccattggcgacttatatattaatgaccgggggaacttcactaaatggaccttcttagaagggtttgttcgaaaacatcttggtcgcctttttctggatattaactaaccccgggatcttccggaatagactgcttttacttaataaaatcccattcggccaaaaaacctgatttgattctaagaaaacaaattgccaacttaaccatgcaaacatgtgttggttatggaaaggcaaaaaaacaaaaataaacctttgttcaccttcttctaatttcacaaatatgcatctcatggaaaatttccaatggcttctactaaacatgtgccatcagggttacaa

SEQ ID NO: 186084 - DNA, 302 bp, Arabidopsis thaliana
  unsure (1)..(302): unsure at all n locations
ccccccgcaggaaccggnccggaaacccggttcgcccaggggaaaggcgaaaaaaaaacagatttttgggccggaggaggaaaacgaccgggaggacggcccgcccgcaccacgccccaccagagaggggaaccccgcaccgggcaccagaaagcccccgcgaaaacaaaccgacgccggccctttaattttggggtgaggggggnccccgccgggcgggagacctgaaaaaaaacagctcccccgcagagggggggaggacccccccccgcacgaacaggaaggaaggaggaaccggccgc

SEQ ID NO: 186085 - DNA, 375 bp, Arabidopsis thaliana
  unsure (1)..(375): unsure at all n locations
gagaaaaaagaaggcaccagcgcgcgaacacacaggggggagggaaagagggggaaggacgcccgctacacaaaaaggggcgccgggggaaanaaaacggggggccnccagcgagaaaaaacccccccggggggggggggggggggcccaccccaggaaagggggcccccgggagaggggggagagagaggggcagcgggcgacgcgaccgggacagcggaccgggcagccgcggggccgggcgcgcaggccggcgcgccaggagaggcgagcgcaccgcgggcgcaggccggggagggcggcgggcgcacgggggaccgacaacgacaggaccgcggacgagcgaaacgcgaaggcgccaggcagcgagcgcca

SEQ ID NO: 186086 - DNA, 510 bp, Arabidopsis thaliana
  unsure (1)..(510): unsure at all n locations
cccgaaggccgggcggaaaaacttttccggccgggggaaaagccccaaacaaaaaaaagttttttataaaaaaagcggaccaaggggcagcccgcgacagaacaaccaaccgccccaccagaagaaggaagagcacgccccatgacaccgcagccgtgcaaccaacgcgcgaagacagacaaaccaaaaagaagggagacacttcatanatggggggggggcacccccccgcaacaaaccgaaacggcagaaaaaaaaccccgccaccacgagaaagagaggcgcggccaccgccagaccaaacaagggacgaagcagagccagcaaagagcgacacgaaaaagaagaaaaagaagaaaagacacagaaactacgacaaaaaaaagagccccaaaaagggcgcaagaagagacaagacgaccgcgagagaaagcaacaccgcgacgagaacgaggagaaggcaaacgaaggcaaagaacaacaacaagagagcagcgacgacaccgcaaa

SEQ ID NO: 186087 - DNA, 465 bp, Arabidopsis thaliana
  unsure (1)..(465): unsure at all n locations
cccctgaggtaccggccgaatcccggtcnacccacgttaaggcattaacaaaaagatttttttcacgggaaacgaaggccccaaagacaggtagccacctccgggtggggacaaagagtttactgcagagaaggccggaaccaacaaagccaagaccacgcccgcaatttcctaatgtatgtttgananaaaccgcggcggtttgggaaaaaaaagccccccagaagagggcaggggccgcacgtgagagagccggagccggcagtgcccgtgacccaccccagagcaaggggcagagaaaaagcggagcaaataacgagaacaccacggctacagacccgaaacacacggaccgacgggtagcaaggagcactcgagacggtaaccgcacacaataagaacaccaactcccgcgagccacgaacacgcaagagcccgacagacaaaccggctgaagataccgaa

SEQ ID NO: 186088 - DNA, 544 bp, Arabidopsis thaliana columbia
  unsure (1)..(544): unsure at all n locations
ggggggggggggtgggtgtgggggggggggggggggggggaattttggcnatggccgnnaaatantngnangactgccgccnnnnnnnnngggggnnnnggatttggggggggggaagctgggnnggnnagnangggggggggggggggggggggggggggngngggggggggggggggggggggggggggggggtttttggggggggtgggggggtggggtgggtgtggggggggggggggggggtttgataattggggggggggnnaaagngggggggggggggggggggaaaagcgccggggagggggggggggggggggagaggggggggggggggggggggggggggggggggggggggagggggggggggggggggggggggggggggagggggggggggaggggggggggggggggggggaggggggggggagggggggggggggggggggggggggggggggggggggggggggggggggggggggggggggggggggggggggggggggggggggggggggaggggggagggggg

SEQ ID NO: 186089 - DNA, 473 bp, Arabidopsis thaliana
  unsure (1)..(473): unsure at all n locations
ccgggacgcctgcagggaccgggccggcttacccggggggacccatccggccgagcccaaccgancnnnagagggggggggaaaaagccaaaagagggcgccacgaccccgcccaaagaagattaacaaaaacgcggggccaagccggggcaaaacccaggcgagaaaaaccctaccctcgcggtccgggggcggggaaaaaanggcggggggagaaacaaacaaaaagccccccgacccaaggggggggggggccctccaaagaaaaaccccccccccacacccccaataaaggaaaggggggcccccacaccccccccccggaaaaagaggggggcgcggccccaaccgcggggcgggaaaaaaagaaacacccaccccccgccccccccccgcagaaaaagggagaagggggggccccctccccgccggggcaaagaaagagggccaccccggccgtaaaaaaacgggga

SEQ ID NO: 186090 - DNA, 504 bp, Arabidopsis thaliana
ccctgaggtaccggaccggattcccggttcgacccggggtaaggccaataaaagtgatgctttagcctgagtgagctccagagggaagcagaagcccagcaagggaaatagttggggaaccaaagaatcaaaaggggagcacccagaaaccgacaggagaaactcgacagaggaaccaagtttataatttggggggggcaccagccccaaatcgaccagtgaaaaaaaaaaaaacccacaaaataaccgcccggaagaaaaagaacgcataaacgaggagcgaggcgcccagcgtgcagatgccgagggagagaatgggcgagacgagagagagggggacaccgagggcggtgagcggcgccaaggagggaaagggaagaataccgggaccgccaggaagctcacggagatgaatatgcacggtaaacccggggcacagcaagcggggcaccagacccccgggcccaagaaaagaagcatagggctaccggaccccgaacaaat

SEQ ID NO: 186091 - DNA, 218 bp, Arabidopsis thaliana
  unsure (1)..(218): unsure at all n locations
gcctgcgtgagctgggaccctctagagcggtcgacctacgcctncgcggacgcgtgggcaatgttacagaagaaagtgaaaagaaagagagaaaggggaagaagaaaaatgtataactcaccatgaacgttgctcacactcctcactattatgcttgggatgctgcgatctctttataagctccggtggatctncgacacctgaggtgcacctcactg

SEQ ID NO: 186092 - DNA, 530 bp, Arabidopsis thaliana
  unsure (1)..(530): unsure at all n locations
cgggacgcctgcagggaccgggccgctantccgaggggggcatcacgtccgctttcatccataaacatctatggggctcaacggaaactggaacccggcgaaccctaaatcgccatctttatcatgggcaaaacgaatctccgataatataacaaatagcgtacacaaaacctcctcctcccaggggccgtggggcgggaggacaaaaaggaacgaacaaaaccccccccggcggggagggggggggccccccagccaggcgggaccctcagggggggagcccgcgggggcgggaaacagaagctgaaaccccaaaaaaggggggggaaaccccgagaaaaaaaaaccgaaaaagacgcccggaaaaccgccaaacccggggggcgggggagaaaaggcggggcaaaagggccccggcaccaacagagggggggggggaaaggggggggaaaaaaaccgaccacccccggggagcgccggggggggggcccagcaggggaacacaacacaagaaaacgggggaggaggca

SEQ ID NO: 186093 - DNA, 450 bp, Arabidopsis thaliana
  unsure (1)..(450): unsure at all n locations
ccggcccgcccgcagggaccgggcccgcctaacccagggggggccagcgngnncnacagaannaaaaacccacaaagggggggcaacaccccacaaccaaaacggaaaagagagggcggaaagcacaaaacaagaccccacggccggggaaagnagnaatcccccaaaaaccgaagccgcccccccccctcgatcccggggaagctcggcaaaaanncacccagaaacacccgggaaaaaagaaccccccccttgggggggggggcggggcacccccacaaaaaaacgggaggggccacgccgaggagaaaaggggcgccccgggcgcacaaaaaaaacaaccggcgccgcaaaaagggggccacccggacgagagccaacgccacaataaaccacgccccaaccaacagggcgggggcggccacaccaccgacgcccgaaaacacgcac

SEQ ID NO: 186094 - DNA, 329 bp, Arabidopsis thaliana
  unsure (1)..(329): unsure at all n locations
ccgggacgccngcaggnaccgggcccctaacccggggggcacgcgccccgaagggcaaacacnnnggggagagaacaaaaangggagcaaggcaaagaagccaaaacccccccccgagnganggagcnnaaacacaaagagagaaaaaaccccccgncctctcnttntgaggaggcggnngacccnggggaaacccgcaaacaacaaccccaaaagaggggaggaggaacccccacnaaccccaaggagggggaaagaaccacacccacccagggacaaggaaaaaaaaaaaaaggaaaagccccgcaaaacaaaccccccacccccaa

SEQ ID NO: 186095 - DNA, 504 bp, Arabidopsis thaliana
  unsure (1)..(504): unsure at all n locations
gccgggcgccgcggaccggcccctanccggggggcatcccgccgggctnnaggaccancaaggggcacgaancggggagccacaaggggcgcgnaacaagtttctacnaaagaaagagacgggggagcccccaccggacgggaacctctcctctcctctaagggtggnaaagaactngggctataacgggaaaaacaccccccaaaaggggggggggagaccccaccaaaaaggaggccgcaagggaaacggcctgaaagggaaggctctataaaaaggccaagggccagcagcagcaggaaacatggcgcgggggaagaaaaaacggaaggggggcgggtttccacccgggaacaaaaagggagagcaaaaaaagaaaggggggggaggcaccgggagggggatgagaaaagaaaccacgcggaggggaacaaaaacaggaaaaaagagaagaagctcgggggggaaccaaaaacaacaccggaaggggggggaaaaaaaaaa

SEQ ID NO: 186096 - DNA, 425 bp, Arabidopsis thaliana
  unsure (1)..(425): unsure at all n locations
cgaaaaaaaaaaaaaaaaaagaggggggncaaacgggcnncgncncggcgnnggagaaagacccaacacttttttggggagaaggncgcganacaanncaaccggggcgccgggcaaaaannctctctcgtcccttgggncgtagannnngacgggggaanaaagaaggagaaaacgcccangacggggggggggggggacccccacccagaagcggccgcagaagggggggaacacaaaaagggccgaaaaaacacgcgcgaacgacccggggggagaaagggccaaaaccgggaaagaaagggggggcaaaaacacccccgggggaggggccaaaggggggaaaaacacaggggagaaagagagggcgcccgccccagaaaaagggggaacacaaaacagaaaagaggggccaggggggggaa

SEQ ID NO: 186097 - DNA, 490 bp, Arabidopsis thaliana
  unsure (1)..(490): unsure at all n locations
aaaaaanannaannaaaaaaaagggggacaaacaaacaaaggcgcacgagccgcgccgcgcgcccgagcacgctccttcaaaagaaccgggccacaaagaaagccgaagagcgncgcggcgcagaccgaggaaaaaaaaccctccctcacgcgggaaatgaaagggcaancaaaaaggggggggncggcaaaaaaaaaaaccccccccgggcggggggggggggggcgcccccccaccccgcgtcgggcgcgcgggggagacaaagagcaccaccccccggcggggggaggcgagcgggccggcggcgcgcgccgacggggccccgcggaagggccgggggcagcccccagaggggaccgagaagacaaggacgccgcacgacgcagcggacggcgggcaggccagacgccgacagacggaggacgcgcggcgagcacggggcggccgggagcggagcgggcgggccgcgcagggggaggcgcagagagg

SEQ ID NO: 186098 - DNA, 176 bp, Arabidopsis thaliana
tagagactgccgctcgtagctggatcttatacggcgcctttcctttttaatgataattcgttattcaaaccaagctaatcacggaatctccagataatatcgctaaaaagctttaaaacaaacgctactaaagataaagaatggagagggatttttggtttgagagtgtgcaccga

SEQ ID NO: 186099 - DNA, 552 bp, Arabidopsis thaliana
  unsure (1)..(552): unsure at all n locations
cggggcgccngcagggaccgggcccctancgcgggggggaaccgcggccgaaaaaaaaaaaccagcgcacaggaaggaaagcaaagnngggaagaaaaaggggaggggccccaaagagccgcgggggaggcaaaaaacaacaagaagagggcaggagcccgccggggaacacaccctccaaaaacgagagcggaanaaangggggacggacccagcggcaaccaacncccccgggcggggggggggggcaaggcccccnaaagaaaggcgcccaccacaaaaaangcccacccgcgcgccaaaagaagggcgccgggaaaaccagaagaaaagggggaaagaagaagagaggggggggcgaagaaaaaaaaaaagaggggggaaaaggaaaaaccccgggagggggaagaggcccccaaaacccaaagagagggggggccgcgccccaccaaagagaggggccccccccggacccgccagggggggggggagggggcaaagaaaagaaaaaaaaggaaggggagaacgccaccaacacccggagagagaggg

SEQ ID NO: 186100 - DNA, 275 bp, Arabidopsis thaliana
gagagagaaaaaaaaaccaccccgaatggaccgcggaggggccccccacccccaagaggccacggcccaaacgaagggggcacaccaaacgagaccagagaagccccacaccaccgcaaaggacgcgaaaaacccccaaccgccgaccgcgggaagcacaacaacgccaaacaaggaaccgaagacgcagcacgcaaaacccccagccggagggagagaggagcagaggcacgaagctagaacggaacaagaaaacaggaaggcgcaagaacaca

SEQ ID NO: 186101 - DNA, 506 bp, Arabidopsis thaliana
  unsure (1)..(506): unsure at all n locations
ggggggggggaaagccgggnnaaaaaaaanaaaaaaacgaaagggggggggagggaggaggagaacgggggcgggggggagggggagggggcgggaggggccgtttgtggggcgcggacgcagagcgagcggcgaggagagggcggggcgggaaacaggagggattaaataatcgggcacgttggggccccacaagggggggggagccggaagaaaaagaaaccccccccggggagggagggggggggcccacccacccggcaaagcacccggagcggcgggaaaggaggcaaggggcgcggcgggcgccccggccgagcgagggcgcgcgagggagagggcgggaggggcgcgccccgacgacacgagtcgggagaacgagaaaggcgcggaggcgagccggacggagcgagacggcggggcggaccgggagaggaggagggcgacgaagcgccgcggacccacgcgcagcgggccgaagagcggcggagcagaagcgcgccgag

SEQ ID NO: 186102 - DNA, 455 bp, Arabidopsis thaliana
  unsure (1)..(455): unsure at all n locations
aaaccgaacagaacagggccnnnnaaaaagggggcgggcggcccacgcaaaaacaacagaaagcgaggaccatcaaaaggggatccaaaagccactacagaaacaaaggaacgggggagcaggaaaaactcttcttaagcagatgggcccccaacagaggaagtaggaaacgggagcccgccccccctcaacgggggggggggaccccccaaatgggaaaccccccaggggcctcgtaaagggcgaagggaaggggggacaggaccaaaaaacccccgaagaccaccgggcggagaggggcccacggaaaaaaagcaccccaaaaaccaccccgggggggggggagcccaggggcccgccaaaggcccacacaaacccaaaaacccaacgaaccccgcaaaccgcccgaccccaaaccaaaaaaaaaccccccgaagggccgccccgccaaagga

SEQ ID NO: 186103 - DNA, 525 bp, Arabidopsis thaliana
  unsure (1)..(525): unsure at all n locations
ggcgcctgcagggaccggnccgcttttcccggggcgccatcccgnccgggcttctgctaaaancgcgaaagaganatccnacgaancnccacaagngcgaannncgaacggagcttctattccatggcgaccaacggagagaaggtcacggctacgggggggaaaggctcgttgtctntcggggggggaaaacccnaagaaaaggggggaccacaacaccaccgagggagagcgggcggacaaccccccgaaggagaagccaaggganncncagacncgggggaaaaaaaagaaaaaaaccgccccaaagggaacgggaccgacggccgggggaagaccccggggggaaaccccgccgggcgaggaaagccaaaaaaaagacccccccccgccaaaaggcgcggggccccggggaaaccgacccgaagagagaaaacccaacccccgggccgaaaagggggggaccggacccagaacaggggggaaagggccaaaggcgaacaaaaaaagcagaggaagggggcg

SEQ ID NO: 186104 - DNA, 448 bp, Arabidopsis thaliana
  unsure (1)..(448): unsure at all n locations
cggggacgcctgcagggaccggnccgcttttcccggnnggacatcacggccggattttcctccgctctctcacagggatcaccaacaagaatcatgacgagctctgttagagagaagattttaagaccaacgggatttggttaaacgttgctgagaaaggagacaaagaagtgctcccgtttcggggggggcanggnnnccccgagacangggacacaagagcccaccagagcggggggggggggacccagggaaaccacgnggccggcccagagcacagaggcggcggggaccccgaanccccaccgagccacgaggggaacacggggaggcaccgaggcggggaggggaggggggaacccgaacacaacggcaccacacaaggcnnngggggcggggcaggacgggggagaaacaaagggggggggccaggggggggaaaacaaac

SEQ ID NO: 186105 - DNA, 229 bp, Arabidopsis thaliana
  unsure (1)..(229): unsure at all n locations
acgcgtacgnaagcnnggatcctcttnagcggccgggcaaaccctnttaaaaaaaacttttttttnnnnnggggggaaaaccaaaacgggaacccaatataccaaaagccaaaaacaaagggcctccaanaaaacaccgggctacaaacgcccatcaccgcacaagaaagtttctccttaaaacgggggggaaaaaaaannccaagttcaaaaaaaaaaaattccaaaa

SEQ ID NO: 186106 - DNA, 371 bp, Arabidopsis thaliana
agggccggccggctcccgggcggcaacccgcaaaaaaagaaggaaacagggagacaaaaaaaagaaaaagaaccccccggcaaaaaccaagggcggcacggggaaaaactcctctgggggggggacaggaagaaaaaaaacccagccggcggggaaccaaaagcagggaaaaagaaggggcgccaccccaaaaacccggacgcccaaagggaaccccggggaacgaagaggccaccaaccacaaagggcggccaaaggcccagaacaccggacgcaaggaaaaaaaggggccccccacaaaagggaaaggcaggggggggacaaaaaaaagaaccgcggaggggaaaccgcacacaagagaggaaaccccc

SEQ ID NO: 186107 - DNA, 359 bp, Arabidopsis thaliana
caaaaaaaaaaaaagaaaaaggcgaaaaggagaccgaacgggacggagacacggccgcccccgttcaggagcaggcgaaggagcgcagagaaagaacaaaccgaagtatttttggccgcggaagaaacggggacccaaaaaaaaaaacccagagcgaaggggaggacccgccacagaaagcaagggaacacagagagagagaaccgcccccaccacccaggaaacagcaacaccacgcaaagcggaagcaggaagccgaagcgagaaggcggggcgaggaaaagacacgcaccagcaccagcacaaaacggagaagcccagcgcagaacggggcaacaagaaaaaaaagagaaaaacag

SEQ ID NO: 186108 - DNA, 249 bp, Arabidopsis thaliana
  unsure (1)..(249): unsure at all n locations
aaaaaaaacaccccggggcggggggggcggcccgcgcaaggcgggcgaagagcgcggccacacccccacacagaggcgccttaagaacgcggggcgaaaacaccgcagagaggagggcggcccgcccgaaagagagattatatagggcacgttgggnggcaaccgggcggggccgcacaaaaaaaaagccccccccccggcgggggggggcgggccacccaccaacgccggcggcgggagacgcgagac

SEQ ID NO: 186109 - DNA, 515 bp, Arabidopsis thaliana
  unsure (1)..(515): unsure at all n locations
cgggacgcctgcagggaccgggccggcctccccggggggacccatccgcccgactgagtgggcaaaagagaccggggangcaaccnngggagccgaagaaaaccaacaaggaaaggagcatctccgcccccgacaagaaaacagcaggaggacaagacacaagggaagaggaagctcctcctaccacagggggggggcagnncccaccccacccaaaaggaaaaagcccccaggggaagaaaacgacaccacccccgganaagcggaagaaagaagcgggcccagagggaaagaccaggggggggaaaaaagaaaggcggcggccccggggggaggaccacccagagaagggggggaaaacggccccaccccgcaggggggcccgcggacaaaagggccccccaaaaaaaagggcgcacgcccaccccgggccccgaagacaaaagggggaagaacccccccgggcggagaggagaaaaaccggggagaagaaaacccccggggggaaggagggg

SEQ ID NO: 186110 - DNA, 579 bp, Arabidopsis thaliana
  unsure (1)..(579): unsure at all n locations
cgcctgcagggacccgggccggcctcaaccggggggggagccagccggccgaaaaaaactcangaggaaaaaaagccgaccaaggggagaacccacccgccggccccccccggggagggagggcccaaaaaagggggggagagccccagggtcgacccaaaagcccgacaaaggaaaacacccctcctntgagaggttgtnngggacnnnaggaccaaacccccccaaccaaaaaacccccccccgcctagaaaaaggggggcgtcccccccacccagggggagagggagagaagaaaacgcccccccgcccccgcaaggaaaaaaaacacccaacaaccaggaccgccaaagggccccccaaaagaaaaacagggccgcacccgcgcaaacaccacgcgacccgcggccccgccacccaaaaagccccccacgaaaaaacccacccccccccgagaaacggcaaccccaacaccccagcgagaagcaacccacccgcgcagaggataaaagaggaaacaagaagaccggcaacaccaaacaccagaaaggaggagaagacacccgcacccccccacaa

SEQ ID NO: 186111 - DNA, 502 bp, Arabidopsis thaliana
gggggggggggggggggctggggagggggggagccggggaggaaaagggagaagaaggggaaaaagaccacggcgacacaagcagggcgacaacccctccaggacggagccaccagcgcagcggagaacaggggaggagccccctccaaaatggggggagggcgggcgccagaccgccacgcaaaaaaaacccccgcggggggggggggggccccccccggggagaccggggaggccggcccccgccacgaagacacacaaccgaggcgagaaaccaccgcgcgacggcgcacgccagcccaacccgacgccggcacacccacgaaaccgggggaacgacgcccccgcaaagcaccaagcccacagaccacagcacccgcagcgcgacccggaagcgccgacgacacaggaccacgcacaaacagagaaggcgaacccaaaccgaacccgcgcagcgcgaccgacgcaaccaccgcaccgcgccggcggcgaccgcgcgcgc

SEQ ID NO: 186112 - DNA, 370 bp, Arabidopsis thaliana
  unsure (1)..(370): unsure at all n locations
aaaaaaattctttggaggggggggaccggganacacaggaaggggcggccccaaaaaatacgcttgcccccacccgaggcaggcccaaaccacggacgggaaaaaaaaaggaaaaaacttacagccggggggggagggnnnganagggcggtcgaccagaaaaaaaacccaccccgggggggggggggccccccccccatacgcggccgaggggagcaaggggaaaaagaaacaccgcaaaaaaaacgagcccccgcgacggccgaaaaaccgggacgaagaaaaacagaccagcggacagcggggaaaaagacgcccacaacagcagaaaaaaggggagaagggagagaagggaccggccgccccacgc

SEQ ID NO: 186113 - DNA, 435 bp, Arabidopsis thaliana
  unsure (1)..(435): unsure at all n locations
ggggggcggcaaacgggaacaaanaagcaggaacagaaaaaccaccccgaaaaccaaaagaagggaggggggaagaggacccacaccccgggggggaaccggggaaggcaaaaaactcctcctttggaaagcagggggggagaccaagccccacaggcggggggagaaggaccccccccgggggggacgaaacggccacccgcccgggtgtaaaagccccccccccaccaaaggggagggccaacggggggggggcccccccaaaaaaagcgccgcggcggagaacacaccgcagggagggcgggggcccccgagggcaccacacccaggggaagaaggcgggacgaaaaaaaaaacaaacggcggcgccggcggggggccccccaagaaaccccagcccgaaaccccggggggaagccccacgccccccaagag

SEQ ID NO: 186114 - DNA, 355 bp, Arabidopsis thaliana
  unsure (1)..(355): unsure at all n locations
caatcaacaagagaaaacngcggaggaaggaggaggtgacgaccccagaaccacaaagaacaagaggaggggcacaagaccccaattccaaataagggcgagaggcaaattctcctaacagggttgttggncnncncnaagaaatnaaaagaaaaagattcaccaaaagggcggagggggtgggcccctaacaaagaggcggagggagaagcggtgggggagagaaacaagggggcaaccaaggggggaggagaagggcgcggaaggacggagggcgagagccagagggaacgcggggaacggagaagcggggcgcggggggggaacagggggggcgcggggggggccaaggagc

SEQ ID NO: 186115 - DNA, 507 bp, Arabidopsis thaliana
cgcccgcgcgaaccggcccgcgcgcggggcggggcgtgaaataccggggacctcggcgcgcatgcaattccgcggggcagaccccggagcgcacaacgaggacccggacaggtagagcccattgcgacagacggccggcgcggccgggccacagccggaacaggccgatgaaggacaaaacgcaggccagcacccacagagagaagcagcaaccgcgcgggaagaagagaaaggaagcgcgagcagagaacccgcgcgcgagcaggagggagagtcccgtggtcgccgcgacggaccgaagaaggccacacagcaggagtgttttattgaagggagagagccgagcggagacgcgacgcgaaaggaagaggaggagacggaaacacgccccacgcaacgagaagacccaaggtagcgggaggagatgtgcgaggcgaagcggggggcgagcaaggacgacaaggggcaccgagcgaaaccgcaccctcgacgcgacggcgccccacg

SEQ ID NO: 186116 - DNA, 511 bp, Arabidopsis thaliana
  unsure (1)..(511): unsure at all n locations
ggggggggggggngnaaatacgggggnggggggaaggcgggaaaaaaaaaaaaaaaaaccgaggggggggggaggggaacggcgcccgcgaagaaaagagagcgaggacgcggcgcgaccccgctataaaggaccgaagcgacccgggaggggcgagcaggcggagagcagggagcgggaggtttatttatttggcctgcaaggaacccaaccaagaggcagccaaaaaaaaaaaaaagcccccgaccccgaaacaacggccgcccccaacaccaccacaaggcgggggcgaacggggagggagagggggcgagggggggcacgaaacagcaaagcgccagaggccggcgcggggaggggcaaggagacacgccacgagcggccgagggagggacggaagaggaccgagccgagcgaggagagagcgagaaggacgcgaaaacgggggggggggcgggagcggggggagaaaaaggggacgggagccacaagcagcacacgcgacggcaca

SEQ ID NO: 186117 - DNA, 476 bp, Arabidopsis thaliana
  unsure (1)..(476): unsure at all n locations
gccgcgtacggagcttggacctcttagcgggcgcgcaaacttggaaaaaaaatttttacacccacgagactgtagaaaaaacaaacggcgcggcacacagagaaaacactgcatgaggaaagacgccgcgaaacgccaacaaagacggcgggaggaaagaaaaatccctcgtttttgaggttgtagggaccaaaanagaggatggcaggccaaaaaaaaaacccgggggaagggcgagtgagggggcccacccacacgcagggaagggggaaaacaacgggaaacaacgcacaatgcccgcggtgcggaaaagaacagacgggtgatcctagtatatgaaaaaagcaactgtccaggaaggaggagaacgggaacaacgcggagagaaagccaaaccagccctcgggggcgtgacacccaggaagggggttttctcagggggaccaaaaggacaccaggctgaggggaacaaaaag

SEQ ID NO: 186118 - DNA, 438 bp, Arabidopsis thaliana
  unsure (1)..(438): unsure at all n locations
cccgcgaagcgggaccacagagcctcgcggggggtagccccgaaacaaggnngggggggggggggggaccaaccaccgcaggagaaacaggcaaaccaaggggggcaaccaaaaagggagggggaccccacacacccaaggcaaagggccccccgaattttttcgggaagaagggnaaaacaccccaggccccaagaaaaaaggccccccccgggggcgaagggggccccaaaaaaaacccgggggagggtaaggcaaacccagggggggcccggggaacccccccgagagcccagggggccccaaaagggcccaaaaaacaacccccgggggggggaggccccccgggaggcacaaaagagcgggaaaaaacccccccccggggaaaaagggggcccaagaccaaaacaccgggggggccccaaaaaaccgcccccc

SEQ ID NO: 186119 - DNA, 337 bp, Arabidopsis thaliana
  unsure (1)..(337): unsure at all n locations
tttttcttttttttttttttnnnntntgggntttttttggggccnaacacaacttccaggagaaacaggctttccaattttgggcaaacgaatatgggtatgggggatttaccttcaacgatttccctcctngacggggtgggtggnnaangnaagaacaaaaananngaaaaaacacaagccccccaaggggcaagggggggcccccacggncnccaaccggggaccgggaaaaaaccnnggggggngcaggcaaaacccaacccgagcccggggaaccacccacgaagcccaaggcagccccaaaaggncccgcagagaccaaccccggccgggc

SEQ ID NO: 186120 - DNA, 515 bp, Arabidopsis thaliana
  unsure (1)..(515): unsure at all n locations
cgcctgcagggaccgggccgctanacccgggngggcatcgcggccgcagaaataaaaacatagcnctggggggaacgcaaagggcaaacccgccagacacagagccggnccaatcagggagacgctccgcatcttctataaggagaaacgggggggggcaaaaaatcctcctccttcggactgctnggaaanncggcggggaaaaaaaaaaaaaaagccccccccggggagagggggggaccccccaattacaaaaaaaagggacaggaaaaaccggggggagaggggaggcgacccaaaaaaaggcccggaacggtgagaaggcgccgagtcgccgaaaaaggccaaaaaagacgaagggaagaagaaaacccccgggaacccccctcgcgcggggaaaaaaaaagcaccaccgtaactacccggaagagagacgaaagaacaaaagcgggagaccaagaggagaacccgagacccaccccgcgggaaaaaaagaggcgcgcccaaaaaaaaaa

SEQ ID NO: 186121 - DNA, 374 bp, Arabidopsis thaliana
  unsure (1)..(374): unsure at all n locations
gcacgcgtcgtaagcttggatctctagagcgggcggcctttgnntnnnnnaataaaaggttttgtttnaagacagttgttttggtnngggggttgagtttttggaaaaattggaacccaattggcctttagtccagggttaggccaaaatccgtgggaatattttccctggcttttttggaaaatggggtgggggaaccgacccaaaacaggggaaaaaaaaaaaggaaggcaaacccttataggtggggggggcgtataaaagttccaaatttttaaactggaaacatcccaaatttttttcaaactttaaggaacagagggttacaaaagaggagagtttccttaggagggtttggttttcgggtttttttt

SEQ ID NO: 186122 - DNA, 486 bp, Arabidopsis thaliana
  unsure (1)..(486): unsure at all n locations
ccgggacgccngcagggaccgggccgctaaccgggggggcagcgggcccaaancaccccaaaaaaaaaagagaaaacccaccagaaaaaaaaaaaaaaagaaagggggcccccgccagggggggaaacccccccccccaagcggaaaaaacgccccgggcccctcaaacccgcgggtggccccccccgggggggggggggaaacaacccacaccccggcgggggggggccccccccggtgtcgtgaacaaacaggggggccccccaccggagaaacccaaacggggaaaaggggacagaaaccaaaaagaaaggggggaaacccccgggggggggggccccccgcccgggggggggggaagaaaagggcccggcccaaaacccacaaccccgccgggaaaaaaacaggggcgggaaagcgggcgcccccgccaaagagggcaaaacccgggagcggggggaaaaaaacaagagggcggaaaaaaaa

SEQ ID NO: 186123 - DNA, 196 bp, Arabidopsis thaliana
  unsure (1)..(196): unsure at all n locations
tccctctagaagcggccgcccttttgtttttttttttcttttttgacgccaaatgaaatgggagaattatgtgtacctagtgtntttgaaaattgtctttgtnaggaaggtattaaacaaaaacaaaaaaaaccgtggttaccaaaactctcctccatacaaatcctatgggnaatgtaaatttataagttctctg

SEQ ID NO: 186124 - DNA, 606 bp, Arabidopsis thaliana
  unsure (1)..(606): unsure at all n locations
ccccccgggggggggggggggggncccctcngggnnggaacggagccngggggggggagaaagaggaaagaaaggggggaaggaggaagagagaaaaaaagaagggccccgaggggaggaacagaactcttcagaaaaaacagcggggacgaagcgagggagcccgaaggaccgggaagaagagaggaggggccccctccacacaaaggggccgaanggaaannaacaaggagacgcccgggcgaaaaaaaaaccccccacagcggggggggggagggagcccccccaccagagagaggggcgcgacgaggagagagacggaacacccaaagacaaagaaggaaacaaaagacacgacgaggcacacaaaagagaaacagacaggaaaggcgcgaccccagagcaaccgacccgaacggccacgaggccccgcgggacacaacgcagacacgccggacgacgcggcacagagggcgagcaccgccgcgagaggcgcgagcggcaggcggcggggacacgacgaggggcgccagccgcgatggccacggcccgggaagcagaaagacagaccgggcaacgacgccaaccggaacccagaccgaacaa

SEQ ID NO: 186125 - DNA, 411 bp, Arabidopsis thaliana
  unsure (1)..(411): unsure at all n locations
cgggggggtttaggcccgaggagaaagggggaagcnnnaaaaaggggaaagngggggcannnannncccaaggaaacacaaacaagcccaacaacaaactttttaaaactgggaacacaggaaacaacaacaaaagggcgcaaacaaggagacatcttttttggggaagaggggaacccaaccgaggggggggccagaaaacaaaaacccccccccaggggggggggagggcccccccgccccccagaaacggagaagggaacgggccccccacgccccccggaaagaaggaaggaaagaagaaccgccaaaccaggggcgcccggccccggaaagagacgccggggggggagaagccccccgcgcccgccacgacgccaggagaggaaacccgcgacaaacgcgaggggg

SEQ ID NO: 186126 - DNA, 375 bp, Arabidopsis thaliana
  unsure (1)..(375): unsure at all n locations
aaaaggggggggaacaccaaggaaaaagcaagaggagcgggacagaggcagcccccctaagcaggaaggacgaaagagccgaaaaagcagccagagggaagaaggggccccgctacaaaaatgggccgtcngggngggagcaacgcacacaggcaaaaaaaaaaacccccccgcgggggagggcggggggcccccccaccccgagaggaggggagacgccaacgcagacagaaagacaaaagacaacagggcaaccgaacagcaccaacccacacagagccagcccagaacggcaaaccacaagcgagagcgagagccgacggacgcgcagcaccaccagcccagaacacacaacccacagacgaccgacgacaa

SEQ ID NO: 186127 - DNA, 507 bp, Arabidopsis thaliana
tgcaggtacccggcccggatttcccgggtctacccaggcgtccgagccactgatcctggttcttttggttgaacattgaccataacgtgagaaatcctgattccttcaacagcagtgaagaagaaaaaggagtctccataggttgattaacatccggcttcgaaagcatagaaaacaaaatccgggacgaaagcttctttaggagagcggtgtaccgccgaaatacatcctccgttcttttagaaatagagaaaagaaagtctggcttttcgtggaatcagaacgctgaccctggaaaacgacaacttttaagcttcagggattctgctacggaccaatggacatcctgtacaaggattctaatccacaactctggttgtaagttcagatttttatatgtatctatacatgcctgggggacggacacctgcgtataccaccaatgggagtgtaaaggttcttttaagcctcctcaagggaaaagtgtgtttatcaaatgtcactaaa

SEQ ID NO: 186128 - DNA, 440 bp, Arabidopsis thaliana
  unsure (1)..(440): unsure at all n locations
gggggggggggggnccccccnngggggggggggagcggccccaaaaaaaannnnnnnnnnnnagggggagacacaacanacgaacaaacgaccccgccggacgaggcagcccttcaacgacagcgggagagaaacgacaaagaccggagcggcacaccaaggggccccctcccaaaaagggctgtcgggagaganacagggnccaacgaaaaaaaccccccccgcgggaaggggggggcccccccacaggagcaaggacaaagaaagagagccccacacgcacagccaaaaaacgaggcgaaaaaacacagggcacgaagcggaaacaggagcaaacacagcaccgacccgcgacggagcaaccgacccggcccagaaagccagaaagcacggaagagaccacacacccgacaaggaaaacccacccaacaaaacagaga

SEQ ID NO: 186129 - DNA, 365 bp, Arabidopsis thaliana
gacctgcacgctcgtagctggatctttagcggcggctttttttttttgaattggatcctatttcttgtcgcttagagaactgagaacctcattacatacaatcaaaccaccatccctgttggtagactagcagtgatttttaccagagtttcacacattaagggttatggctatatttctaagagcttcacaatcaagcatgtaaggggcttagctggcgttaagcagacaaagctagcttctgaacagacaagctgagagtcttcaaagcacagaacgagcaggggacaatacatccaagctttccctgggtgaactctgaacgccaacaacaagttcctccttactctcttaaatctggaccg

SEQ ID NO: 186130 - DNA, 588 bp, Arabidopsis thaliana
  unsure (1)..(588): unsure at all n locations
cgcgggcgaggagggggtgttgggggggggggcttactgttgctcgcccacgatangtggggggcccggggcgcgacggggggcgggggagcccttaggaggaggggaggcgcccggccaaaaaaaaagagggaggacacaagaaaggagacaaaggcaacaggagaaacgaggaaagaaagacaagccgagaagggacaaccaggggaacacaccagagcaacgaagagaggagaaaagggagggaggagcgacctctaccaatacaagaggaaagaaccacaggcgagaacgccgaaccgccggagaaggagggaaaggaagacgaaaccacaacgcggagggcaccagaaaaaggcgaaagggacaacaacaaaacaagagaggacggacccgaacaacggaaaagaagaggaggaagggaagaagcgcacccggaggagagcacagatccggcataaagcagcaggaggggaagacacgagagaagaagccgaaaggacgaaagagagaagcaagagagaaaagagaaaagaagaaagaggagaagaagagacagaaagacaggagaaggagagagcgtagcga

SEQ ID NO: 186131 - DNA, 508 bp, Arabidopsis thaliana
  unsure (1)..(508): unsure at all n locations
ccgcctgcgggccgggcgcgctcncggnggaagggagccggcgacaaaaggggggacaaaagggggcccccgccacacgcgccggagaaaaaancaccccaaaaggccgcgcaggaaagagaacaaggaggggaaaaacaaaaaacccggccccctcaaaaagggagtaggaaaaaccngggggccacaaaaaaaaaacccccagagaagggaggggcccccccccgcaaaaaacacgagaaaggaggcgcaaagaaaggaggggcagccacaaaaggcagaacaaaaggcggccgggggcgcggggccccccccgggagagcgaacacacaagcgcacccgcaccaccaggccggacgaggggggacggggagaaagacgaggagggcaagaaagcccgagcaaaaaagaggaggcgagaacgaggccgccgggaagcgcggcgaagaggcagcagaacagccgcggcgagaagaccgcagagagcgaacgggcgagaggaaagaaa

SEQ ID NO: 186132 - DNA, 521 bp, Arabidopsis thaliana
  unsure (1)..(521): unsure at all n locations
aaaaacnacaaannagcggggaaaagccgcgcggcgcgcaccaggcgagacgcacgcgncaaaggccctctccggcgagacgcgacgcgccagacagaagaacgcagccagcgcgacacaagcagagggccccctccaaaaaaggcccgcaaagggnnaaacgggggggcggccccagaagaaaaaaaccccccaacgcggggggggggggggggccccccccgcgggcggggccgcgcggcgggcgagagagcgccccccggcggggggaggcaaggagcagacggacgaggcggacgacgcgaacgagcgcggcgggagaggcggcagggccgggcaggggccgcgacgggcgagcgagacggccgcggggcgcgcggggcccgggcgcgggcacgccgcaggcggggcggcgcccggggccggcgcggggcgggggcacgcgggcagagcgagccagaggcgaaaggcgcggagagcccgcgacggagcacgcggggggagaacgcggaggaggcggg

SEQ ID NO: 186133 - DNA, 515 bp, Arabidopsis thaliana
  unsure (1)..(515): unsure at all n locations
gcctgcaagaaccggnccggaattcccggtttgacccaggggtaaaggccctcaaaccaagnnnatttgtgtccccgcgaacacgagtatccgcgaaagccgataaaacaacccccggcgggacaaaggaaaccggaaaaagcacaccaaaaggcacactgaaaccgaaaaggccaaacccaaaaagaattttttttgagaagtggggaaaccaccgcacccacactctccaaaaaaaaaccccgacaccccagcctacaaaaagagcaacgaggccgggaaagagaagagagggcgggggccgaacaacaaaccaccgcaacgagccaaaaaccaaacccgggcaagaaaaacaaccccacgggcacacagaccgggcaaaacgggcaaacaggcggggcggaagacacagccaaacgcagaaagcagcagacagcactacgaaaagagggggcgccggaacgacacgaatacgaaccaccgcgggaccacgaccaaacaagaaaaaaaaaaaa

SEQ ID NO: 186134 - DNA, 559 bp, Arabidopsis thaliana
  unsure (1)..(559): unsure at all n locations
gggccgggccgcttanngaggggggggagcacgcccaaaaaaagggggaaaaagaaagggggggggncaagagnccaancaccagggagacccaaaaaaaaccgcgccctacagagcgccccccggagaagaaaagaagggaagaagaaagnagaagaggggagcccgccaaaaaacaagggntcgtaggggaaanntnnggggcgggacgccggaaaaaaaccccccccggggggggaggggggggccccccccaaaagagaggagacgnaggaggacagancaccaaaagcgaaggggagaggagcagacgggacggacggctgcgagcaaggagaagaagagccgagcgggggaggagcggccgggacggcggggcgaggagcggcggcgggcggcgggacggcggccgacggggcgggaagaggccggaccgcggggaagagggcggggaggggcgagaggaaggccaggcgagggggcaggaaacggggggggagcggaaaggaggcgagggggcgggacgccggggcgaggacggaggcgggaggcgggcggg

SEQ ID NO: 186135 - DNA, 485 bp, Arabidopsis thaliana
  unsure (1)..(485): unsure at all n locations
ctgggacgcctgcaggtaccggtccgctatcccgggtcgacatccgcgcccgggccaactgattctggtttcggtggatgaacaatgaacagaacgagagagatcctgataacatcaacaacaagaagaagaaaaaggaatctccattggggatttactccgcctcgaaagctctaatcgaatcggggcggagnacagaaggagacccttatcgccgaatacgcccccttcttgtggggggaggaaaagagtctgcttttgtggaaaagaacccgaccctgaagatgacaactttaagctgagggtgctgccacaaaccaaagatttcttctccaaggattctaatccacatctcgggggggaaggccagattatatatatacatacacacaggagaggggagtgttcattgagaacaccacccaaggcgggaaaggagcttctttaaaaccgaaacaaaaaaaaagggggggacaaaaagggca

SEQ ID NO: 186136 - DNA, 534 bp, Arabidopsis thaliana
  unsure (1)..(534): unsure at all n locations
gagagagacagagaaaaggaggaggaggtcttcagagcggcgagaggggaaaagcccgggaggggagagaagagcggcgagggaacaagcaagggggagaagaagaagagaaccgcgaagcgnaagcaggcgaagcgcgggcagggggaagcggnaggcgcacaggagagcccgcggcagccaccccgggccgggggaccgggcgggggacgagggagggcgagaggggaggagaggcatccttaacggacggagggggggggagaggccgacaccggcagcggagaggaagaacaacaagcagaacagagggagacgagagaaggagggagagcagcaagggaaagagaagaagggaaggggccgggggggaggaggggccgcgcgcgcgaagggggagaaggagaggagagaggacaggagagcacaagaaacgagaccacacgcgcaaagagagagccaccgaggacgagagggagaggtacgaggcgcggagacgcggaagagacagagaagagaaaagagaagaggggg

SEQ ID NO: 186137 - DNA, 434 bp, Arabidopsis thaliana
ctatgacgcagcatgcacgcgtgcgtaagcttggatcctctttagcggccgcgcgggctcgtattctgttattccttttttactctcgttttcttctcatctttctttcgcgtgaaaaagcgggcttttttccacgatcgttcatgaaaagaaaaggctgaacccaagtgatcgtctcgcacccatcaaatttttttccaccggggggcaaaatattcacctctaggtcaacaatgagacacaaaacatgttttgaaaaaaataccctggcttggtttcctaccgtcgcccgggcgcccccttctttttttgccccccacaatatcgggcaatattgggcgtcctgccgataagttgaacaaaggcggccaccagatctctaaatgccacacgcgctgttttttgtatcttcttgggggccacgttcccccaac

SEQ ID NO: 186138 - DNA, 970 bp, Arabidopsis thaliana
  unsure (1)..(970): unsure at all n locations
gcccccgnaggagnggagagaaaggagagccacttcnaggcgcgggggggaggcccccaccagaaaaaaacgcggagagcaaagaggcacacgcgcgggagagcgagagacgagagagaaagagaggacaaccgagacacccgagaacgagaaaacaagaagagcgcaaggacgccgagagagcaaccgacatttttctgtaaggggggagccaccccagcgcacgggaccgccgaaaagccccccaagggagcccacagcgaccagagcagagagccaccgcagaacaagaggcaccagcccgagccgccccaagagagagcacaccgcgccaaaccgagcagacccccggccgagcgagaagcggaggggacccgacgacccgaggacccagccgcgcggaccaccaagaagcgcgagagagacacgcaccacgcgcgcaagccagccaacggagcgagagaccgcaacgagcagggcgcgctnggaaggaagggagggaagaagcgaccaggaagaaagaacgaccgcacgccccgcgaccggacgcacgaggcgggagaccgcccaaaccccgcagaagccgccccggcgaaagaagggcagccagtgggcagcgcgacgagggagaaaggaggagacggcgcccgccgcgcggaccgaaagagggagacggccgcaggccgcgcgagccgcgaggaccgcgcggaacggcgcgacggacaggagccccgggagacaacgaaggcccgccccgcacgcgggcaacagaccccgcgccccggcagcccaaacaagggtatcgaagcaggcgcgagcgcccagaacaaagaggagcgcgcagcgcgcgcccagcccggcgagggcgaggagagccggtcgccggaagacgccgacaagacgacagaacagacgcgcacagcgcgcagagaaaaaaagcacacagggccgcgaagaagaagagagaaga

SEQ ID NO: 186139 - DNA, 411 bp, Arabidopsis thaliana
  unsure (1)..(411): unsure at all n locations
aggcgccaaaggggacaacgacaacaacacggcgaccgcacttaagagcgagagaaggagaggcaaaaggacagggccaccgcggggaccgcgagagagacaccagcgggccgcggagcggggaggggagaggggggagcgagcgcccggcgcgcgccacgcccaaaaaacaccgaacgcggcacgggccgaggcacgcgacgaaagagagcgcgaaaaccccgccgagagagagaagccagagcacgaggagatgtttttcccgcacccccancccccgccgaccgagacggacggcgccagcgagagagcggaacgcgagagaacagcgaaggaagagagggcgccgaagtgcgagagcgcacgcgcgaggaggagagcgggagaggcggaggccgggcggagagcgcg

SEQ ID NO: 186140 - DNA, 1005 bp, Arabidopsis thaliana
  unsure (1)..(1005): unsure at all n locations
ccgcgtacgtaagcttggatcctctagagcgggcgggctgtcttttttttttttttttttttggaatataaaaacattggtctttcctaaaaatttctcctttgttcattacaccaaaggtttgcataaaaagtattttgtagatcttttcgaaaatatgtcatggaaagccaacttttttaaatgggggggggagaggcaaaaggggggcaacaaatataaaaaaatctgcccatagggaaagtggggtggggcgcatgcaggggcgccccgcnncccgccctgttttttatccaaaaccttagtttattgaggtctctgatccggtgtgggtaaagggaccatcccactttgcccttttaaagctggcgcaggggtgtttgggatggtgtcgatgcggtcagaaaaaaaagacaccgggtgtcttgttccggcggagcaaacggacagggtggggggtncccgantaggtgaaagtggggacaaatccgtcttaacacttgtatcggaggtgcgtcgtggagaagattcttaaagcgcgtgtttttttttnttgtcccccgattgggtgagggcgatttgtgaatacgcgctgcaaggtgagggggcgtcgcgtccggctcgcatccagcaacccacgttcggcggcgccgtagcgtatgtgggagcgtcgacggagacaggcgagacaggatcgtcgcaccacacccttcacgctccgtggttcattgtgggatgcccgcgtgtggggtgttgtggcccgcggcgcgactcctggggtatcgccgacgcagtagggcacggggtgcggagacgacagggagaccacgcccccccccgcagcggagatgtatcaagcgagcgcacgccccacgcacccatatatatgtattatgagctaattagatacgacgagcgcggagcgatgtggatataaagtacgtgagtagcagagcaggataatatgtagacgacatccgccacagaaagtataatgagagatgg

SEQ ID NO: 186141 - DNA, 459 bp, Arabidopsis thaliana
ggggggcgccccagaaaaccggcgaagagtcaagacgagtagttggagatggacagtatccataccgcgccacagagctgtaggtagaaattcactaacagcgcgcacgtgtggaagggtaaagcgagcgccgaaagtattttttaagagagcgggagcgcacgaagaaaggatgcgcagataaaaatgcagaatgtagccggccgaaatgattacccctagtgttagactcgctagcgggtgcgcccgcactgccccgccatagattaatttaggaaaacgctcgaaaacagaggtaccacacgggaatgagcgaggatatgatagacgccgcgcgggcccccagagagcctggacaggtagaagaagtgtaaagtaagagggggactggcgtaagacaaaaaacaaaagcagagtaaagaccgattcccattgttccagctgacgagggtcgaatga

SEQ ID NO: 186142 - DNA, 798 bp, Arabidopsis thaliana
cccggccttgcgggggaacaacggcgggggaggaggtaggaattttttaggggggggtacccagttgtctggaagagagtgagggagtaggagagagaattggagtgaagagaaagagtggagaaaaaggaaaagcagcctgcagaggtagagaagacagacgaatttttttttaagggtggagcaaggcagagtagatattaaaggccgagtaaaagaactaataagccaaagtctcgcagttgggagagcctgcggccccgaaattatgagaagatcgtagacagactaggagggatgtagcgtgttgtctaggagagagggagagcagggggtgcatgagagaaataaaggggagagaagagcgacgagaggaggtgaggggaggaggagtgacgagtgggaagagatgaagagagagtgatgttgattataatgcgatggatggaggaatcgttgagtgagaaaaagggaaggagaggcgatccgcgaatgaggggtggggagtgcaaagagttaggggggttctcgtgtttggttattggctttccggtgttgtgctgcagggcgctgggtccgtggtgtggtgaggcacctgcttggtttttaatatggtaggcgtgcgggggtgccccggcgcgtcgtcgttgtgccgcctccgctgctttgccttcttcatctgttcgcgcgccgtttagttgggggctgtgcgggccgcccgcggcttgttggttgtcctgttccccaaacccgcagtttctttttgtttgtttgggtgcgcgtggagacttcggctcc

SEQ ID NO: 186143 - DNA, 318 bp, Arabidopsis thaliana
  unsure (1)..(318): unsure at all n locations
agggggagngggggggaggggggggggaagggaggtttagcgggcgcgaacggcgaccccgagccgcggacgcccgcgggaggaagggagggagacgagcacgagcgaccgcgcgaggagagccgaccacgagccgaccgacgcgccgcgacgaagacacagagcgaagcccgcgccggaggcaccacaaaaggcgcaatcgcgaccccagaccgcagcccccgcacccccacgatttttttcgaccccaccgccgcaccaacacaaacaagacggaccccgacccaccgcacacgacagaccaagagacccacgaag

SEQ ID NO: 186144 - DNA, 456 bp, Arabidopsis thaliana
  unsure (1)..(456): unsure at all n locations
gacgaaaagcagagggggcnaccggcggcgaggattccgccgcagaacaggagaggaaacacgcgcaggcgccaggaagcaaagacagaagcgagcggggggggaggggagaggggggaaagggaagggagagaccgcagagcnaaacgacgcagccgaaacgagagaaggaaagagacgaggggagcgagcggggagaagagaaggacgganaacgcccgcacgagtcaagaggagggccggagagcagggcgcagggaagcttttttcttcaccagacacagggagaggcgaaggacgagagcggagagagcgggcgagaacagagagacagggacggagagaggagagagaagagcacgaaggaagggagcccccacccacacgcggagcaggaggcaaggcggaaaaagcgacggcagggcggcgagcgaccagacagcgcaggcgaggcag

SEQ ID NO: 186145 - DNA, 869 bp, Arabidopsis thaliana
  unsure (1)..(869): unsure at all n locations
ggggggaaaacgccgcgggcgccgggaggggggggccgggcggggggaagcccggaaacgaacaggacagcgagcacgcgcccagccgcgccacacccgccgcagcggcgcccgccgccgcgccccccgcccagggcgagacgaccgcggagagacccgaacggcgccgaccaagagtcctcctcccagggggggaaaaaagcgaaccccacacaaagacgccgaacaccacaaaaagaggaaagagaaacacgcgaccaaaaacaccccccgcccgccacaacaaaaaaagggccagcacaagaaagcacccaaacacagccgaaaaaaacaaaacacaaaccacccgcaccaggaaaccgacccaaccaaacgaccaccaaaaagggagacaagggagaaacacgccaaacccacaaaaggagagaggggaggaagaagaaaacgaaagaacaagaaccacaaacacagagaagcgaagaccaaagaacaggcgagacgcccgaaaacccgcgaccacaagaaaaccaaggccaagacggccaaccccgcaccagcaacgacacacgcgcccagacaagaaaagaaaaacagagacacaaacgaaaagagaaaggcgcggcacggccgcgcaggaagcacagggacccccggaacaaaccaagaccgccacaaaacagacgaagagacaccccacaacacacaaagcaacacaccaacaaaacaaccaacaacaaaggagaacgcacagcggggaaccccgcccaaggangaggaaaaaccgcagcacacagcagcggcgcaaaaaaaaagaaagaccagaaaagaccgcgagaagaacagaaagaccgaaaaagaacaaagaaaaa

SEQ ID NO: 186146 - DNA, 545 bp, Arabidopsis thaliana
  unsure (1)..(545): unsure at all n locations
cccccgccccccattctccaaaaaacaaaaaaaacnncggaacnngtgntgggggaacgccccccancctttanangggagaaacganagaacncaaaaagaaaacaaaagagaaaacctccaacaaacacgagcaaaacgcccaccaccagcaacaacccacgcccccacgacgccgacacaaaaagacaaagaaagagacagcgcggagcgcagaaggagcgcgagaggagggccgcaccgcaaacgacccgcgagacgagaaaacccgccgccagaagacgagcacgcaccggagagaacgaagggttcttgcgggncggggcgggggcggcgcgggcggaggcgccggcgacaggaacgaggaagagaaggagaagacgaagcccagagggcgaaaacgcagcgaacacgcggcaaaaagacccaccacacggcaccgagtacgacaaaagccccagaaagaaaccgaccgaccccacgacggcagaagccaggacagagcaaacgagaaacggcagacaagcagaaccagagcggaagac

SEQ ID NO: 186147 - DNA, 397 bp, Arabidopsis thaliana
  unsure (1)..(397): unsure at all n locations
gcacacacgaggaaaaaggggggcgtttttggagacaggcccnncttaaagagagaaccaccgccaaccaggcgcgccgcgagggtttccggaagccgggaaaccgaccgaacccgcaacggccaaagaccgcgaaatagagaggcgccgaacgcaccgagccgagcggacgcgaggaagaaaggacgccgggcagagagcgagagccgccagggacaacacccaagcgaaaacgagtttttcgcgcagccgcggcggccgagggaagggacggcccgaccgcgccgagaaagagcgagaagaaggaacgggcgcgaagaggagagagcggagccgcgaagaagaagcaccggccagcagcccacaggcgcggcgcccccgcggcccacaagcagac

SEQ ID NO: 186148 - DNA, 394 bp, Arabidopsis thaliana
agggggaacagcagccgcgtaggaagattgggtgctcttgagcggggggcaggcctgttttttttaggtaaagggaggcgctttgtattcgggagaaagaaagaggtcggggccccctcattgtctctttgataaagggatcgcgggttgagccacaattacccgaccacaggggcgcggggggccttcctctatccccaaggggagaggggcccaatccttggaggcggagaataaataaaaaaaatgccccgttttcgcgcttttttgcgccccgcacgtcgtggggttgccgtaccttgccgcaccggttgttgatgtgtcggagcgggcagtgtgttgaagggacgaaactcacggggggcgctgtgactgcgcggaggcagaaggatag

SEQ ID NO: 186149 - DNA, 569 bp, Arabidopsis thaliana
aaaaaaacgagcaagcgccagcagtttcccgcggggaggggcggcgaagaccccgccgccccgaagcaagacaggggagcgccgacacggagcggacccacgcggcgccacgagaggaaccacgggccacgacgcgcgcaacgccagcacgccgggcgcccgagcggggagcgaggcgagaccgccccggggaacgggcccacccccaacggaccgttttttttcacaccgcgggggcggcgcagcggcgcccccgccacgacacgcgcgacaaacaaggcaggagacaaaaaagagggaagaagcccgcacgagcccgaagagaggacagaaggacgccacggagagagccacgcgacgcgcgacagcacgcggccggcggaggacggcaagggccgacgggagggcaggaccgcgcgaccgagaagagcgcccggggagggggagcacgagaagggcccggcggggacgagagcagggcgcgcgcccccgcgagaccaagggacacgccgccacgggagaagggagcagcagcgggcggcgaacaccgccgcgccagcgcgcgcacc

SEQ ID NO: 186150 - DNA, 776 bp, Arabidopsis thaliana
  unsure (1)..(776): unsure at all n locations
acacacaggcaacaacacaagaagaccaccaaacaaaaacgaccacgggccacgagcaacaacggaccagcgaacaacaccgccaaccggacagaaaagagccccaaacaaggggaggttcttcccgagggggcaacccaaacacaaacccccagagaccccaaaaccatacccgccaagcgcgccgacgccaacaaccccaccaccccaaacaaaaagaaggagacacacgaaacaaaagagaaacaaaaagcgcaacagaaaacagaacaaagcaacacaacacgacacgaacgcaacagccaggcagaggcaccagccaaaacccagcaacccacggagcgagacgagaccaaaagcacgaagaacgagtaaaacaagaaaaagaaaggaaaacagaaggcagaaaacagccaaccgcccacaccaacccccacacaaatacaggggnagccccccaaaacccccgccgggaaacacaaacgccacaaagaagcacaccaagaccacaagcgacaaaccagaccgacccgagaaagagcaccgacagcagccacccacaacaccacacatccccaccccaccagcgcgaatcagagaagaggcgcaggagcagccccagacgcccagcacaacacaagaaancaaccccacgaagccaccagaaacagacaaaaacgcccccccgcgccccccacacaagaagagagaggaggcagaaagccccaggccacgcaggacagggaaagcgcgcagccgcgcgagggccgcgggag

SEQ ID NO: 186151 - DNA, 205 bp, Arabidopsis thaliana
agaaaaagggaggagaagggcgcggacaggcttttcacacgagcgggcggagagaaaaccccggggccgccagcgggcgggcgagaggcgaacagacggcgacgcaacggaaagagaacagcgagcggagagacggaaagcgaagccgcgcgaggggggagggagggccgagaaacacagcgacggggcacaggaagaggaaggc

SEQ ID NO: 186152 - DNA, 809 bp, Arabidopsis thaliana
  unsure (1)..(809): unsure at all n locations
ggagacactgccgcgtcgtgagctggatcttttacggcgggctttgcttttttttgtatgtattaataagctattaaaggtcagaagaaattctcgaagtggtacattagccccgggcagcgagcgagccgttaaaaaaaagaaacaggggggttttcttaagggtggggggcaggacgtaaattagggagttaaactgtgtgatgagagaggttccttgagatctcagcaagtgttttgctgcggctacgcgaagtttttgtgggcctatgttgaagtgttggccagccttccgtaggtattgggggggggagcccaaatgagctgcgtggacaattgtgatagaagggctggagattgggatgctcggggccggagctaaggagtttaaggtaggggggggtgtcccaccatagcagtgtgtggtttgttagtttttttagggaggaccaaaacactttggcgagaaattgagtgcgattgttttccntttacccgttttgatttgggcgggtgtaggaccgtagaagggagaaggtggggccggcgggagcggtgggaggaggctgcgagagggtgtctttgtcgtggcgcctaatggtgattagcaagcgaccttgcgcagtgactcagtgtgtgtccgcgggggcgtggagggcccccggctgatcaccgttatatgtgtcagatttttagagatggcgtgggaggctgtgatcgtcgccgcgcgcggcggagctgtgggcagcaatattagaccgcgtcccgctttattttttttgcgcgattgctcgttctgctcgcattgc

SEQ ID NO: 186153 - DNA, 252 bp, Arabidopsis thaliana
aagcacgcgtacgtaagcgttggatcctctattagcggcgcggccgtgaacccttttttttaataaagaaagagacacagagaggtacattcacaaaatgagaggactctgctgaaagcccggacaaaagagacacaagctgaacacagaaaaaaagaaacaccaatgggcaaaccgaacaaatcctcgtatctggagcggggaaaaccaagcaccggaatcccaccataaaaagaaaacagaagggagggg

SEQ ID NO: 186154 - DNA, 478 bp, Arabidopsis thaliana
  unsure (1)..(478): unsure at all n locations
gggggncgggaccggaactttaagggggaaggaaaaccgccggagggcaggcgcggcggagaggacgaggcggagaaaacggaaagaggcagacaggagcgcgaccgacaggagagagaggccgcgacaagggcgaaacagcaggggggccaaagagacagcggacaggccggaggccgaaggagggattttttttaggaaaaagggagcagaaaggagccccggagagcagcccagagaagacagggtcaccggacaggagcgaacacagaggggaacggccacccccggagagggaggccggcggcggtgggaagcagaagagcgacacgcggcacagagccagggcgcgagagggagaagcaacggcaggcaggagagcgcgggacgaagaggaaggggaagaaggccgaaaagagcgcaaggcaagaaggcaagagaggaggagaaggagagacacgcaggcagcgacgaacca

SEQ ID NO: 186155 - DNA, 622 bp, Arabidopsis thaliana
  unsure (1)..(622): unsure at all n locations
cggcctgagggggaacagcccgccgcggaggaaggtggagacctagacgccggcccagccgtccgtttgctagggggccagccgacgacatgcagcggcgaaggggtgcccccggcggacgcgggggcgcagaacaagccggcgggagggggaaggtgagagcgcggagaaaaaggaaaccttttcgcagcgggggggaggaggcacagaagaagcaaggaaagagccggaaccacaagaagcagacggaggcgcggcccggcgaagggaccccggacgtccgcccttatgagggagaggggcgggcggcggcgaaggaaggagcgacagaggacggaaggggggaggaagcaccaagaccaagaagagcggcaggccggagggaaggaaaagaagagaagagagaggcacaagcaaccgacacgaagcaacgcaggcacaaaccagaaatcagaaaaggagagtgntgaaagggagagagaggcagaaaggtgggggggggggggagaccgggggccgggggcggcggcacagtgagcgggagacacgggcatgccccgcacaaaccgcggcccgggaagagagagcgggcgcaaggggaggcggcacacgggaagaagac

SEQ ID NO: 186156 - DNA, 447 bp, Arabidopsis thaliana
caacgcccacaacaaaacaacgcaggaaacaaaaaagtcgggagcgaccccacttgaagggaaaccgggcgccagcagaccggaccggaattccgaaaagacacaaaccggccggggggcggaagaggacgggaaaagaggaagggagagcggagacggaggaaagggagggaaaaccggcgacaaggggagaaaggaacgccccagaagaacaccacaacaaaaaggtttttaacaaacggggacacggcagagcggaaaaaaggagagcgagagagaaaaaggaggaaccagccccgcgggaaggagacggaacgccggaagaaaagccgagggaaaagaagcaaaaatcgcccgagacgaaagagaggagagaacggaaaacacggagagcgagaagcgggcacacgaacagagaagaccgggcaccgaaaggagaggcaaaga

SEQ ID NO: 186157 - DNA, 903 bp, Arabidopsis thaliana
  unsure (1)..(903): unsure at all n locations
cccccctgcagggagaaaccaccagcaacactgataccacattttctcctgcgcgggaccttaaattaaataacaacatcagcgcgtacatcaggctgggaaagcctccaccccccggtaagtagtgtgcaaaaatacgtagactagtcatgcgcgtagactctacccggtattttttttaacgtgacagatcacccgacatcgtcgaataatatcccccataataggacaaaagatataacacgaaattgacggctcagcgctatgacggcgctaaccgcccctattatttttttcgcacacgctaccgtgattgacccgacacctcaatcagcgacaaactttattaccaaggaccgaagttaacagagcgcccgggagatgtaataaaagaataagatgaaaanaacacgggtctgcgccagcagtaacgaacaccgcgagacagtagaaagagcgagagtctagctagtagaatagatttgtagaatattaccaaatataacgatgaaccgaacagccgtgtcggccgagcacgaggtagcgcgaggatcaggcgcggatacgcccggtaattaatgggtagctagttatcaaaccagtacatgataatcacatacccccgttcattattgatctttcgtgcctccccctcgcatgccattactactacgatagtcggtcaattgtgaatcatcggctccccgcccatttgttttgtttcgttatccccagttgtattagcggtgccccgccacgacccgtaaaaacacacgcacaagagccattagttcgttttttcgtactaatgccacaaccattacaaatagatatatactatgctgccccgccgctcccattttttataatggctgcttactaaatgaggtgggagaaaaccgt

SEQ ID NO: 186158 - DNA, 697 bp, Arabidopsis thaliana
  unsure (1)..(697): unsure at all n locations
agcgaggggaaacaagcacaggcgccgagaggacggagacggctccagcccggggcaagcccccacagaaaaggagcgacacagcagccaccccagcaagaagcaccgagcaccaccccgacacgcgcccccagccagccggaggcacaagggagcggccggccagaacggacgcagcggacgacaccggcagctttttcaaaaaaggaggagggagcgcgggggagcagcaacagcacaaaggcgaccgccggagagacagaagaacacggaaccagagagacgcagccacgacaaagaaaccccacaacacgcgcgcccaaaagaagaggaagaaagaaagggacacagaaaggaggcgccgcaagaagcagggggaaaggagagacgccacccagcccacctcgaagcaacaaaggggaggagaggacacagcgaggaagaagaaagaaggaggcagagcaagaaagaagacgaagccccacaagacacgagagaggggnnnncagcgaggagagaggaaagggggagtaaggagagaggaaaagaagccacgcagccccacacgcgcacagacagacgccgaagaaaaagcagacccaggcacgccgggagagcagggcggcacacgaagaaagacaccagacccgacacgacaccgcgcacgacagccggcggggaagagccgcgaggagcc

SEQ ID NO: 186159 - DNA, 334 bp, Arabidopsis thaliana
  unsure (1)..(334): unsure at all n locations
aaaaccgaagcagaagacgaggcggaagacacaaaccaagccccccacagaaagacagccagacaccgacgccgaagaagttttttttggcagccccgcagcggcgnaaggcgcgcgccccaccccgcgaagccggacgcacaacacaaagcagaccaagcgagggacacggcgcgcccaccgagcagacaacggaggaaaagcaggcaccacaacggagaccagcgcaccggcgaaagaccgcacgaccacgccgcgcagcgcgggaaaggaggcagagccgagagcgggcgaggaagcccgggaaccgaccacagagagacagaagagagaa

SEQ ID NO: 186160 - DNA, 178 bp, Arabidopsis thaliana
ggagggggcttttagacacgaaaaagggccaaccaaaacgcgccgccgagcaacagcacccaaggagagcagagagcgcaaaagaaacgagagagcacgaggccaaacgaaggcaccggagagccgaagaaagagacgaaagaacggaaagggaggcgccgagacggcacgaaagaca

SEQ ID NO: 186161 - DNA, 662 bp, Arabidopsis thaliana
ggcgggggggaggctcacggcccgcccgcagaaaggggggaaaggacccggacggagaagcaggacaggacgaccgcgagccaacaaagaaagccgcccaagagggcggggacgaaacgcctccaagagggaggagccccagccgaggcagcaaagagagcccacccagaaagcggaaaaagagagagaagccacagaaggacgccccgagaacggacacgaaacgcgaccccggccgccgcacaagagacgacgcaggagcgacacagaaacgccgcggcgaggagggacaaacaccagcgcaaagaaagagaggagcgccccgcaccgcagccgggaagcaaggcggcgtcgccggcccggccgacgccgcgcgcggcgcgcacggcgccacacacaccgagccgagaaagcgcagaaaaagagagaacccgcgccgagagacggggcaaagaagagaagaagagagaaacacagagagacacacgcacaaccacagcgcccaggcgagaaggaggacggagagaagagaagggcgagacacccggcgaaaaagagcgcgaggcgagaagagccagcgcgaggacgagggagagagaagagagcgcacgcaccgaggagagaaaggacgggagccaggaggaggacaggagcgagcacag

SEQ ID NO: 186162 - DNA, 506 bp, Arabidopsis thaliana
  unsure (1)..(506): unsure at all n locations
ggaaggagagggaaaaagcggtttcgcgcgagcacacagaccaggacgcggccccaggaaagcgaccgaggaagcggagacacaggaagagagccgaaggaagcggacgcagccagaaaggagaagcaaagcgcagcaacgagggaagaagccccacaaagacggacgcacccaaacaagggcgcgacaggttttttttaagaacccccgcgcggcggaaggagcgacggcggcgcgagcgaagacgacgggaggagagaggagagggagaagagaagaaggagccgggcaatggaaagagagtagagaaaggccggggaagaagaccagaagcagaagagaagaaagnagcaagggcgacggacggacaaggagcgaaggagaggaccgagaaggaagcccggagggaaaaagggcaggcgaacggagaaaagacgtagcaaagcggcgcaggagagagggggagaggcgaggaagaggagcggggagagagaagagggagagag

SEQ ID NO: 186163 - DNA, 830 bp, Arabidopsis thaliana
  unsure (1)..(830): unsure at all n locations
aagggcgaggcgacgaccgcaagagcaggggccgacagcgagagagcaacaacacacaccgcgccggaggcacaggcgggagaggcgaacccctcaaacgggagcggggggcggcgaggagagagagacgggcggcaaagagcgagcagaaaaacacgagacaacacaagcaacacgcccgaacccggaagacacaccccccggccgccgcagagaaaaagacacacaagacacgcagcaaaacaaaaaccccgcgcgaacggagtcgacagcagacgcggagagaccaccacgcccggacggcagaaacggagaagagccgccgcaccggcggcggcgccggcggcagccagacggcgaggcagagaccaaccaaagcagagagcacgagccccaacgagagggaggagacggagagtgggcaggnggaggcggcgacacgacgacgggaagaggcgcgaggagacgcgggagacgcggccaaacgccccagaaacgcggcggacggaaagagaacggcggaaagcgggacgaccgccccgcccggcggaaaggcagcgccccgcgccaaagcccggcaagcgaaggagcccgcgcagaggacacgcgcgagcgccccacccgaggaaaacgcaggcgacgcacgacagagagagacgaaaacccgggagcgagcaggaagggagagccggccgagccaacacggagaggcacgcgacccgccgcccagcccgcgcgccgggcacggaaggagcagccgagcgcgcccccccgccgcagcggaagagaagggcgccgagacggacgcggcggggcgaggcaggcgcaga

SEQ ID NO: 186164 - DNA, 679 bp, Arabidopsis thaliana
  unsure (1)..(679): unsure at all n locations
acacggagccccccccgctcnccaacaacgagagaagaaaaaacacaaagcttttntggggnaacgcccccgaaagtttaagagggggaaaacgggggggcgggggagggaggaggaggagaggggagggttgaggcggcgcgcgcgcgcccagaaaagaagaagcgaagagaagagggggacaccaaagcacccacaacgacaacaacacgacagncggaccaccgcccgcagccaggaggcgagccgcggggacggaaaccagcaccagcccgacagaagaaagagaggggaacgccgcaaggcaagaggagccgcgaagagaagagattttttacacagacccgccccaccggaaagaaaaggggagcgggggagagagaagacaggcggaggagaggggcgaggggagagggaaggagaagacgagagacagagccgaggaagagagaacagcagaagaagaccagacagaggaggagcgagaagcgaaggcgaggaagagaggaggccaagagagcgagagngccggcccacgaaaggcagaggcacgccagagaaagaaaaagccagagagaggacgaacagagaaggagagagatagaagaaggacgaaggccgaggagggggagagacagcgagagcgagcagcacagcgcgagccggaggaaggcagaag

SEQ ID NO: 186165 - DNA, 455 bp, Arabidopsis thaliana
  unsure (1)..(455): unsure at all n locations
atagggaaacaggncgccngcagnaccgggccggaatttccgggcgacccacacgcccgcggacgcgagggcgagacacaaggagccaggaactaaaaagcggacaacgaaaagggcaaaacaaaaccgccacaacggccgggggcccataagcggggacacaccggcaaagccccgcccaagcaggacgggttttttttcaaaagggggagccagccccacaagagagaccggaaaaaaagatggaataaaaaataggccgacagagaatcctatccctcctccacccccaaaatctgctatgggggagagtaaaccgcgggcaatacccccaaaacactgcagcccaaccgggcggaaaaacctgagggaaggcgggccaaaagaggccagaactggaaagcaacataagaacactcccggccttgcagtcagccccggtgtgaatcaaccac

SEQ ID NO: 186166 - DNA, 533 bp, Arabidopsis thaliana
  unsure (1)..(533): unsure at all n locations
ggggaacccgccgccggggggtgggagaaatgggttctttagacggggaggaagacctgttatattaaaaagtgccgcccggtggaatcggtgtggatagagggggaaccgcacacgggttgcgggctggtggagtgaggcgacggatggagagattgtagggtgaggtgagagtagggtaagcgaagtttttttcttccccagggggggagcagggataccgccgcctgtgtgcacgagaaatgtgagttgtgagtgatggccgtagctacataatatgcccacaancccagcagactaaaataatgggagtacatgtagagcgatcggaaagggggggggcagcgataggttaatattatgcagatgataccagcataaggagctcatgtcatgagtgaataattgggatgaaaagcccaaagacatcacctgtagccgcgtgagagactggtaagatagtggccggttgtggatcncccgaattaggatgtggaagttgtttgctataaaagcacgctcttcaccccgcc

SEQ ID NO: 186167 - DNA, 316 bp, Arabidopsis thaliana
ttacggatccggaggagtttacgcgcgaataggcgacccaaacattttttttacaacgggcggagacatcaccgattgtgccacgctttatagacacactgtcgtcccgacagatacaattgtgtccacgtcttgcggcgcatgcatcgtagcccacccattccctcttttttatattcttcggtctgtattttggattacatatgtgtcactaacgacaaggtcacggctgtctctgagggctagcgagaggccccgaactgagaatgtacgcgcggcaaaggctgagaaggagagacacgcgagacagcgggcc

SEQ ID NO: 186168 - DNA, 705 bp, Arabidopsis thaliana
  unsure (1)..(705): unsure at all n locations
tggggttggattctttgggggggggggatctttattatttatttttgtcgggttgtagtttgttgacccttttattccgccccctatcataaattagttatatcgaactctattagatcgaaagagaccccaggatgagagaaaatttttttctgcggggtgaagccaaatgcacggggtttagattaaaaggatgagcctatttgtaggcataagatgtttccccctaccnccctctttttttttatagttgccgctccgcctaaaaacaatattactcacgctttgtctacactcatattttcgtattcccaccgctcgcagaatatcatttccttacattcgcatagcagaatcaggatgttaattatagtcatttcttctccacacaccggcccatcatcgccgattatgacgagttcaggagagatgaggtaacgtgtatatatagtagtagattgattgttcgattgttagaacaagacctatctcttccacagatctaattgggttgattgtttaaatgtccccggtatatctgtccctaattattatactcggcgtgacggcgagcaaagaaatgaattaaaggttaacatcatttttaatttttgagcttgtgacttgtttgatagtgtgatgcgaccgacatatagtagtattaatatatgtgtgcactatgtttgattggtcacgcctcctacc

SEQ ID NO: 186169 - DNA, 254 bp, Arabidopsis thaliana
  unsure (1)..(254): unsure at all n locations
ccaccggcgccttgaaggggggaaggaccgaggcgagcggaccaaagagaaagcagagagcgcagagaccccgcgagcacaccagccagagaacgcccagaacgcgagagggcgacgagagaacgagcagcggcggagcgcaggagcgaggcgaggagcacagacaacgaggacacccccgacncgagaagcgagacacgaacgcaacacacacacgcgccgacagagaccgcaaagcgcccggacaggcagag

SEQ ID NO: 186170 - DNA, 557 bp, Arabidopsis thaliana
  unsure (1)..(557): unsure at all n locations
ggggaggaggcgacgcggcgcgggggagagatcgacgacctttagaagccgcaaggacgctgtggggagagggcaccgcgagacaagggcaggcgccgggccgcgccggagtgccggcgtccccgtcgtatgccgcgggggagaacggcaccccagtaccgccccatgccacaaaaccaaagaaaacntttgccccttnnnnnntttaatttaacccccaaaccctttaaataaccgttttcccccttttttaagggcgaaaaacccgggggcccacccccggggaggaaaccccccggccccccgaaaaaaaccccccgttggggaaaccccacacaccgggtgtgaaaaaaaaaaaaaaacaaccccccctttataaaaaacccccccccaaaaaaaaaaaaaaaaaaaaggccctcttataaaaaaacttttatttttttttgcggggaaatatttctcccccccccaaaaataatatccgcgcgggaaaagaaaaaaaaaaatatttttttggtggggggggggggccccaaaaaaacataaaaaaaaggggg

SEQ ID NO: 186171 - DNA, 283 bp, Arabidopsis thaliana
gggagaggggaggtttgcgggggaggggagcagaaacacccgaagccggaggagcggcggcggcgcgcggagacggaagcaggcagcgaaccaagcacggaggacgaggcaggcgggcagaggagcagccaggcaaaggaggagaggaacagcagagcggagcaagaagcggcacgcggcgacgaacgcggcggaggaggcccacgagagagagacggagacagacgcagcgagaggatttattttctcaacagcgcagcaggcgagaaggagggaggaagcg

SEQ ID NO: 186172 - DNA, 516 bp, Arabidopsis thaliana
  unsure (1)..(516): unsure at all n locations
ggaaaagcgcgggggcccccccccggcaaggaattttcgggcccggaggaggaaaccgcggggtaacacaaacccacgccgcgccggttttttaaagggggttttctttttttcaaaatcccccaagaaagagggcagaccccccgggggttttttctccaaaggagggtttaaagaggggcccccaactgaggccggggtcgagaaaaaggggggttttttttttttttacacccgcggagaacccggggnggaaaaaaattttcgcggggctctttttatttccccgcggagaaaaaaaggaagtgggaaaaactcctgtgataaaccccttttttctttaataaaaggggagcgtgtttttccccccccgggggggagtctcccggtaaaaatttgtgtttcaggggggggggggggttttttaccgccaaaaaagaaaaaaggggggggggggaaataaataattctacggcgggcgcctctttcttttgggggggaagatttttttttgga

SEQ ID NO: 186173 - DNA, 669 bp, Arabidopsis thaliana
  unsure (1)..(669): unsure at all n locations
ccgcccgcgtacgtaagcttggatcctttagagcgggcgggcaggcgtgtgttattaaatttgtttctcaagggggagtttattatacataatgatagtgtgccgcgctgcgcgtaaccttttttttttcgaccacccaatattcttggtgtttgcgcgaaaaaggcggtaagaaagtccctcttttttgggggggggaggcaaaaaaaaagtcccgcgagaaaacaaaccccaataataaagagaggacgccccaacatgggggtgcacccctataaagcgccatattgaagtgggaggggcgtctccccgcgaggtgaggacagacaaaagcgaggacatgggtgggcgcggggggggcctttatgaccagcgcgccgaatcacgggaagagagaagagaaggcgcgggcccccggagcgaggtcgttggaaggacaactgagaggcgagtaacgaggggagagcngggggnaggggaggggttgatttttgtaccgaggttgagaggaggaccagaagcgggcggccggcgagggaaggcggccagggcgaatcccaactccccccattatatggcgcgctctcaggagaagaagagggggagagggatgttacgatagagagtattagcgaagcaggggggctactgcggctggagggagggcga

SEQ ID NO: 186174 - DNA, 181 bp, Arabidopsis thaliana
tgaaaggggaagaagcccgcgacaccgcccaagtgagtatccggggaaaggcgagcggcgtcaaggacgcggcaagggcggacgcaccaaacggaagaacaacgaaccacgaacgcggaggcacaagaccagcggacacggaggcaacagaccggcatcgtcatgacggcgaaacgggtcc

SEQ ID NO: 186175 - DNA, 803 bp, Arabidopsis thaliana
  unsure (1)..(803): unsure at all n locations
ttgatgacgtgcctatgtagagcttgacgcgctgccgcgtcgtagctggatctctgagcggccgccttttttttttttttttttttggggaaaaaccaatttggcctttgggccaaaagggggggggggatgcgacaaaacccctgtttgtggggaaaaattttggggaaaaagaagaaaccccggggggttttttcccctctcggagagggaaaaaaaaaaaaaagagcgccccccctgttttttcttttctgggggggggggagagggagggggggcggatgaaatataaaaagaggggccgcggcgcccccccctcccctccctccacgcggaggggggggccccacccctcttatttgtttcccccccccccgccgccaccgcgccgggggggggggccccctttttttggggggggggagaaaacccccccccccctgggtgaaacaaaacaaaaaaaaaaaaggggggggccgcccccccattttcccccatttttttttggggcccccccacccccccggggtatattctcccccccttcccccgcggggggcgccccccccccccccccaccccgcggggggtgtacacaaaaaagggggggggggggggggggggcgctctccctccctttaaaaaaaaaaaacattactccccccacaannagtggggggggggggggggggggcccccctccttccctctaataatattctctccccccaccccacagcatcaaaaaaatatgggtgggtgttatatgggcgggcggccccaccccccccctccaaagagag

SEQ ID NO: 186176 - DNA, 223 bp, Arabidopsis thaliana
gggcctcattttttctcaggggggggcaccggccgtgtataccaactaacaactatagcgtatatgataatatatttacgcttctactccacgcgcgggcgccctgcttgagctggctcacgtcatgttcttgcgcacgctcggaactgagctgcttttctcgtgactgtgtttcggcttgtgtgtcgcgtaattttttttaaaaaaggggggggggaacaaa

SEQ ID NO: 186177 - DNA, 471 bp, Arabidopsis thaliana
cgacgaaagatggctccgtgaagaacagccccagcggcatggacgaggaaccatccccccccttcaggaagccgcggaggtgccgaagcgagcacgtggccgatcacaggcagaagcgaactcatgggcgagcagagtgtgtacccccgcctccgacaccaagcgaggaggtgaagaggagctccggagagctcggaagccaggctgcggtgccggaggcccgtgcgcctcgagaccggccgcgatatagctcactccctgccatcaacatgccgcacaactgagaggctacagcatcggtccaacccagtactgcaactatgttgggagcagctagagtggctagcggaggagacgctcatagtacaccgccagagcgattctcggtaccgccgactctgctcaaccgctgctgacattggatccgcaagaaataaccctctacagcgcgaccccccgttgtggaggcac

SEQ ID NO: 186178 - DNA, 437 bp, Arabidopsis thaliana
gcgtacacaagatttgcattctttaaagggggcgggtcatcctaataaataataatatgtgggtaacctatcttattattaaaattaattcgaagcgctttcataatcaacgatgttctctatataagtttaattgagagagagattgggcgagaagaggagagggttttttttgtggtagttgaaagagagaagtgaagtgtatgcataggaggcaagccaacgaactatagccccgatggctatgtcgatgtggatgtcatggtgtcgacaaccacacccgcgtccacgttttgtagttgatggtaggagacgggtcatcggggagtaagatgagtgtagtgagaatgagtgggcgagcgtcggcagtgagagacaaaatgtaagagacaacttcacagacatgtgcaaaaaacattattatacttatctattga

SEQ ID NO: 186179 - DNA, 872 bp, Arabidopsis thaliana
acgcctgcaggtccgcgccctttttcccggacgggcacgcgcccacaaaataaacacccactcaaaatgcgactacagccccaaaacaaagcgtcccactctgcgcagatggcggccggcggcacctcggacttccggacggcgacgatgaggtcacagcagaccttttttttcccgggggtgtgggaccacaaacaccaaccttgcagaaaaaaaaaaccccacccctggcggcgaccacgaagacccaagccgcgcacctatgctcctgttacacacccatgcaccaccgagagccagtcgaccaagcggaggccgagatccgtacagagttgacacacgagatgaaggcctatacgctgaccggagtcggcagagtaccccggggcgccgtgcggggagtccgcctcgaccatggcactccgcgctgcccgcatggctcagcacggcgtgctcagctacaaccacaaactaaacgcgccaagaaatgaacacgtagccaggcgacactatcagcacagatgcacgggtggagcgcggctaccggaggcgtggaacagagaactagattaaatgtgaatgtcatcaatcgagagtgaaggacccaacgaccacagtaccacctccattgactaccagcccgacagtgaggagagacgcgtaagagagcgaaagaccctggcaagaggataataacgccacttacaaccaccagagttagcggtatgcaacgcatccacagtcgtggacgaacacgagccacccacaaatcactgctagcgtctcagatcactcgacccgtatatgatttgcaggcatacgacagacgcacgcacggcacgtcgaaagcgcagcacacagccaacaacgaa

SEQ ID NO: 186180 - DNA, 301 bp, Arabidopsis thaliana
tgtcccagcctatcactacttagactgcctgcgcgccgatcgtgcccctgccctctcgtggaaaaaaagggacaaaaattttctttgaaaaaatggggttagggcttttttggcttaaacccccgtttctcggggaaaaaacccgcgtaagatacccccctccaaaaaactctccctttttattattgcggggggaaaaaaaaaaccccccccccccctttataacacagagttttggggggggggccccccccctcccgaggaggggaggggggggttttctctcccccccctcgcgggg

SEQ ID NO: 186181 - DNA, 709 bp, Arabidopsis thaliana
  unsure (1)..(709): unsure at all n locations
ccccctaaggggggaacgcccgccacggacacaaaagagganacttaacccgccgggccaacccgcatcaccacggatacgcctcaccgcggagaaccacacaccgcgcgacgccaccggccgcaccgcgcccccctaataacacaaaccccacaaaacacacagccccaacaggccacaaagaaccaccccttttccctcgcggagcgggcacaagagaaaacaccctctttaaaaaaacccccgcacccccccccgccacacccaagagaaaaaccccgcccacaccaccaggaggagcccgccgccacacccacccggagcacatgccgcccccacacacccacccacaaaaacacgcaccgccccacccaagcacggcgagacggcccagactaaactagcacgcggccacgacccaccacaaacagggaacgcagacgcaaccaccccgaacgccgagaaccccaaataaaagccgccccccagcgcagagcccagaaaaacacccggcggcctaagacaaggacgcgacgcccccgacagcgagcgcacagacacaggcggcacccaaaactcaccccccgcagaaccaagacaccggccaaggagaaacaaacacacggacgggaggagaccgaccccccccacaagagacacgggcacagcgacagagcgccgcagaccgcacccagcaagcgaggagcca

SEQ ID NO: 186182 - DNA, 872 bp, Arabidopsis thaliana
ggcggagcgggacctttagagagggcgcaccaccagggatgagaaagcgcgggaacaagacgcaggaaggcgaccccagcgaaatacaaccgcgaagccgaacaggaggaacgcaaagaggggggaggaggagcacggcaagggacagggcgccttttttctggggcggggaccaagacgagcggacgaccgagcctgacgggacgcacgcggggagcaggacaggacaccgctgcccgagggcgcggggacagacgaacgcgggccggcgagggggaggacgccaaccgagggaggcggaggacggagcagggcgggcaaaaagaggaaggcggcaagaggggcggcgcagagagggaagactagaaaaaagaatcgggggggcgggaagcgaaagagaggagaacgaaagacaagaagcggaacaaagacggagagagaagggcgggaggcgcggaagacagccgagggggggagcgacgtgacacgacgcacacccggaaacaaccagaacacgaaaacacgcaacggaaaggagagaggggagggagcagagaaagacgcacaagggaagaacgacagaggagaagacacaagccgccccgcgaccaaaaaacgaacacaccgaacggagaagccgcgccaagaggtgagagatgacagcggaaccggagcaaagaaagcagccgagccaaaggaggacgccacaacggaggtgcccccgccgcggacggagaccgacagaccacggagcacggagcaagtgcaggacgccccgcaagcgaaggaggcccgacaggcgacggacgacagagacaacgagaacgagatgagagagaaagcggagaggacgagagagcgaggagagacag

SEQ ID NO: 186183 - DNA, 878 bp, Arabidopsis thaliana
  unsure (1)..(878): unsure at all n locations
aggggggggngtctttttgggaaacgtcttacgcccaaattttagaacaaagctcgtccccctccccgtacccggcccttttttcccgggggggagccgccgccattataattttaccaaattaatctccctcttgacccattttaaaaactcgcaactaatcctttctctcccggatgtaaaacgctcgcccctaacctccatttcctcccgcaggaacagaacgaatacccctctctcttttctcgggggggtgggggncaccacctccgggcccccaaaaattattaacnccccccccctcttcccttactaccccccccattcctcttactacccccacctctaaaaacaacaccccaaactcttatattttttttttatccccttcacaaatcttcccaacccaccaccaattaaactctttcttttcataatccccttctcctattccaaacatcatcaaatcactccctctaaccctcttacttcctatcttacatctcctccaccacactatttcctatcccgcttttctctccacacttaatcatactcacactacttccctccactttacactcctctctattctcatgtctccttaccatggatagtcccgtttaccacccgcccagatataaacgaccgattctgagtgtaactgtcacgacccacgcactggtacaagggacaagttcgcccgccaatacataacaagtgatgaaacgtaaggagtcacctgcgctcggagacgatcgacgcctgatgcgcgcgtcgcgctntagctggacactctataattctcatcaaccgagtttgcataacaccgaggtgaccgcacactttatgctatgtgcggcatagtgctcccgtag

SEQ ID NO: 186184 - DNA, 465 bp, Arabidopsis thaliana
  unsure (1)..(465): unsure at all n locations
tgganncnntagagcgtttttcccaggcgggcgaatccttttttaaaaaaaagccccctctctttagaggggcagatagacccctaatttgcttatgagggaaatccaccataacagaggtttattagggagcagagaacacgatggatcttaagacaaggttggaaaaagccccgaaaccaacaacattccgtcggcttttttggggggggggagggaacgacagagcccggactcgactcataaaaaaaagtcccccgcccattctacggggtggggcagggaccccaccctccttttataggggcgcgtcgcccaacgttgcgactgtgagctcattacatgccacgtgggtttaccccaaaacaggcttctcatatcccgtgggatggtccccagcccccgctatcctggaaacgagagacttgcacacctttgtaccgacgcggtgttagtcgagcagcc

SEQ ID NO: 186185 - DNA, 469 bp, Arabidopsis thaliana
  unsure (1)..(469): unsure at all n locations
ccggnccggaanncccggttcgacgcggggcgaggacccatncngngaaccngganccaccaccccccgggggggcaaggcaccaggggagacaacaaaggcaaggccacccgacnnccgctcttggccccggaccaaanagcgaagcgcaagcagcgcacggcccacaccccngcngagttggtcttggttttggccgatggacacaccaacggggcgagttagatgaaaaaaatgccccccaactcgaggacgggggggagcccccaagcatgtatgcgggtatcagcaggggaaaacaggaacagggaaaaagatgttcccagggccccgaaccagccagggagggagccaagggcccggccaacaggggaaaaaggcacacaccatggcccaactggcggaaccacgcaaaaaacccgcaacaataacagcaggaaagaccaaacgggccgacaagaggggggag

SEQ ID NO: 186186 - DNA, 340 bp, Arabidopsis thaliana
  unsure (1)..(340): unsure at all n locations
ccggcaggnaccggnccggaancccggttgaccccgcgagcanccccnnaaaaaaaacncnccacanaccnannaccggcgacgccaacccagagagggagannanngccccccaagcgcagggaggaagcaaagacagagggacccgcacnggagaaggcaaggccacncannacaanggnagngnngcacctcctcgttattttgagngaagagncncncaaaggcggnncnaaacaaaggcaggagcccccacgnccngnngggggaccgccacgccggagcaaccancggnanggcccccggcgcccccnanngcgacaagaaggngagaccgaag

SEQ ID NO: 186187 - DNA, 499 bp, Arabidopsis thaliana
  unsure (1)..(499): unsure at all n locations
gagcggcctccccaggggagcgaaaacctacaaaaacaacgaaaaacacccaaggggggggaanggcnccaagncaaaaaagncaacggaaagaacaaagaaacaaagcttgtttgccacacaaagggagaaaggaacccgacacacgggagaaaaaaaacacacggaccttcggtgggntttaggaagataggaaaacccaaacaagggcgtcggaacaaaaaaaaagcccccccaggggggggggggggggggaagccccacataaaaaaacagggggcgaagggaaagaaaacgagcggggagccgagccaaacagagtaacaacgacagcagtgcgcaaaggcgcgggagggggcgccgcgacaaagaccaaacagccaaaaggcgaggggcaaggccagaagaacaacagaggacggcgaaaaacgacacgacagagaagacgaagagaacaaggcagcgaggacacaaaaaacgaacaagcgaagaaccagaa

SEQ ID NO: 186188 - DNA, 510 bp, Arabidopsis thaliana
  unsure (1)..(510): unsure at all n locations
agcnnggacccactagagcggcctgcccacgcgggagaaagccacngaaaaganacnnacccccccngaaagggggagangaggacgcggaagccgcgggaggaaaaaacagggacaccccaaaatcagggccaaaaaaaaccaaagaggggccccaaagagaggggggcaccccccaaccaccggtggcttttcggaggaggcacccccaaagacaaacnccccccgggaaaaaccccccccgggggggggggggggggagcccccacaaaaacaaaccccaaagcccggggaagcccacgggagggggggggcccccccaagcaaaaaccaggggcggggccccaagccccaaaaaaaaagagggggggaaagcccccacacccgggggcgggaaacccccgccgcccaaagggggggcggagggggacccccccccgaacaacccgaggggaaggagaaacgggggaaagagaacccgccgggcgaagggagggggagagggagggg

SEQ ID NO: 186189 - DNA, 486 bp, Arabidopsis thaliana
  unsure (1)..(486): unsure at all n locations
gcccgcaggnaccggnccggaanncccgggctgacccgggcggggcgaggcgnacnngaangnnacnnacgcccccggaaagagcaagaagaggacgnggaagncgngggaggaagagacaaagacaccagagtttcagnannccaacgaccccgagaggggcaggncngcgagggacacaccnnnngggcttcttcttctttgggncgttggcaagacaagaggcacactatggattgaaagatccccccacaggtggggggagggggccccccccgattactaaccctaagacagggtgacacatggccgcaggggcgccgggaaacgaaacaagacgcgacccccccaaagtaaatacaagagaccataagagaaagacccccaaacccggcgcgcaacaccagccccggccacacaggaaaggccgctgagccaacaccccccgagcccaaaacaatagggggaacgcgcgctgaccgccgg

SEQ ID NO: 186190 - DNA, 467 bp, Arabidopsis thaliana
  unsure (1)..(467): unsure at all n locations
gcccgcaggnaccggnccggaatncccgggttgacccaggcgggcgacactcgnccgcggacgcgngggggcggaggagagaaaaacnnnnnccnggccacaananangcanggagcgganggccaccctcttatgnacnanggnacaggccacncnaccgagccangaggacngacagngcnnngaagtttgtggtgttttcggcgcggacnnganncacaggggcnncngcancgaagaagccaccgcccccccaaggcgggggcagggaaaaacaanaacgggggggcccgcagcaanagagggcagcgcagacaggggaaaagccgggaccnccaaccngagcggagncgggcccnccggcggggagncaccgcggaagccagggggcccgcaaaaacagcacccccaccnaaggggaaacaagggaaaaggagacaaagaggaagacgaggggaaccccccc

SEQ ID NO: 186191 - DNA, 356 bp, Arabidopsis thaliana
  unsure (1)..(356): unsure at all n locations
cgggggggaacacccaccccaacaaaaaacccacccggcccacccccgcgacagcgcgagggtgtgcaaccagccccgcgggggagaggccgagagggcgaagagnggagggaaaagaggagaggaggcggggcaacccctccaaaaatgaggaagttagggcacccaacaanaggagggggacaaagaaaaaaaaaaaaccccccccctgggggggggggggggggagggggcccccccaaaaaaaacacaacaccccacgngagaaagagagaaaaccagccaacagaggggagggacacgcccccccgcgcaaaccaaacacaaggcacagaagcagcgcaccgcccagcacc

SEQ ID NO: 186192 - DNA, 453 bp, Arabidopsis thaliana
  unsure (1)..(453): unsure at all n locations
gcccgcaggnaccggnccggaancccgggtttaccaggcggcgaagcccgaagaacaaancaaaccacaaaggcgaagaagcncngnncanagnangcaacaanacgncnccnaannnncgaccctgcgggagcncaggaggaancnccnncaccngcngcngacncgccaggacgagaaccttcttttgatcttgcgagnngaccgncnncancaccggaagaagaaacaaacaagccaccggcnncagcaccggaagaagaaccnccccacccaccagcgncancaccggaagaagaaacnccccgggcaccggccccaacaccggaagnagaacccccgcgggcaccgccgnccgcaccagaaggagacgccccgcagccaccggccncnacaccagaagcagagaccccccagccacccgcccccgncaccagaaaccaaaacccccca

SEQ ID NO: 186193 - DNA, 342 bp, Arabidopsis thaliana
  unsure (1)..(342): unsure at all n locations
gggaaaannaannnnnaagcaggggaaagagcnncntttgtttttgagggtgnngntnttattgtntttnaacaagtatctgaggcncancgnccgttcccttccattttgnaagnancgggaaaaggacgngcgggaagccaaggacaagaccccccaagacgggggagagagggaaacgcccaacaggaacccggaaagcgaggggagnnggcnaaccaaaggggagaggangcnnacncagcgcgaacgggcgnacaaaaaagggagaaagcgggagcagggcgggaaaaaacccaagaagagcaacaggaggagcaagcgggcnccggaggaaaggag

SEQ ID NO: 186194 - DNA, 163 bp, Arabidopsis thaliana
  unsure (1)..(163): unsure at all n locations
gagcggcctacccacgcgggcgcaaacccgangacggaaaccaaggcccccacanagccgaanagccacaccggagaccatccggngaagnacagaaggcagagaagaagtacttcacataaccgatacttccccatgtttactatagacaaaagngaaaaaa

SEQ ID NO: 186195 - DNA, 462 bp, Arabidopsis thaliana
  unsure (1)..(462): unsure at all n locations
ccgcggnaccggnccggaancccgggttacccaggcgggcgacccgcnnncaaagaaacacnanccccagncncgggggcanggcncancncgcncncnccccnccggggcagacggcagcaacaaccggccgcccccccccggngacaccggcccaaanaacnncnggaacaaagagggaccagttgtgnttnttttagaagttgcagacgcancnncaggaaatccaagataacataaggcccacacgcaaggggagaggggtccccccagaggaagtgaggaggctacctgtgcaacaaccgatcaagagggtgaaagccatcaatggaggacggggagctcgaggctaccgaaaagcctgagaacacatcctctattccctccctccctaaagtgacacccaagactttgaaacaactcctattcgaccggcggggcatggtatccgggaataaccct

SEQ ID NO: 186196 - DNA, 339 bp, Arabidopsis thaliana
  unsure (1)..(339): unsure at all n locations
gaccanagagcggcctgccacgggggggaaaccanacaaacacgaaaaagagaagaccggggcaagaccgacaagaacaggaaccaggcgcaacgacaagaagcagatatcccaaagcacaaagaactgatatgcacactgccaattggctcacaacagaaaccagtcgtggcgacaaggagtgggcacnaannnnaaaggacataaaaccagcgaaacgcaccccaaaggcgagggggagggggaggcgcaccaaacaacggccaaagctgaggcccggggaccttgagccagccgcggggaaccagttgcaggaaaagccgtgaaagagggcgcggc

SEQ ID NO: 186197 - DNA, 487 bp, Arabidopsis thaliana
  unsure (1)..(487): unsure at all n locations
ccggnccggaanncccgggttgaccggggcgggggaaaccgagccaaaaccngnnnngaagccncangcgggggcnaaccacaacaaaagagggggaccaagacccggccggagagcgccacttttgaccccaccagggagagggcagaggaagaggaagagaacgagcggcaccaaagacctctctncttttaggagagggccaaggcacacaaggacccgggcgacaaaacgaccccccgncagagggggggggaggccgccccaaagaggaagaaacagaggagccggagcaaggccagacgcgggcggggcaaaagcaacagacgaaaaggcccagccacagagcaaaggcaggcggagcaacaggagaagggggacaccgagccccagcccagaggcgacagcagacagaaggccnggaacaagccaacagcgcggggaagcacacacaagcgcgggggcagnagagaaagaaggcgcggag

SEQ ID NO: 186198 - DNA, 455 bp, Arabidopsis thaliana
  unsure (1)..(455): unsure at all n locations
ccctgagcggctcccccggcggggaaatcccattgaagacaanaaacccccaagagggggacacccaaaaatacaaaggagcaaaacaaaaaataacatcactcatattttgtnctgaagaaaaaataaactcacagaacaacaatagaaacctatagaggaaaatagctaaaattagcagttggcccccccagaggcgaccaggagaaaaaaaaagccccccanaggagggggggggaggagcccccatacattaaacccgcccgcagggcaaacacaactgcgggggacctgaagatatctgagggggaagaacaaggagcagcaaggggccggccaggcaaaaacaaaggggatgcagaggggagcgcacggaactgcgggggaacaaaatccaggaaccggactggggggcctgaacaaggagggcaagaaaaagccccaggggagagcgg

SEQ ID NO: 186199 - DNA, 466 bp, Arabidopsis thaliana
  unsure (1)..(466): unsure at all n locations
acggggggggacnacgggaacggaaccaagggcacacgaaccacagcacgccagggtgtttaaaggagcgagaaagcgcacgggcaggagcacagaagagagagaagcggggaaaagacctcctgcgtgatctgggaaggagaggaccgccaaaaacgaagagnacccaggaaaaaagaacccccccccaggggggaggggggggaggggcccccccaaaaaaacgaacccgcggccggaggaggaaagcccgacagggagagggnacaaaaaggacgcacccagagggagcaagaggcaaggacgacagaaaaagacagggggcggggggaaaaaaccaacagaggcgggggcgaaaaggacgcgacagacgaaaccgcgggggaccacacagagagggaacgcgcgaagaaggaacggaacgagagcagcggaaacacagagagaagngcgcgagcggaggaag

SEQ ID NO: 186200 - DNA, 472 bp, Arabidopsis thaliana
  unsure (1)..(472): unsure at all n locations
aaaaaacaccgccccacccncgggggagcangaaaccaaaaaacgaacgaagacgaccaagcaggaaaccaaaagtttttagcaggagggaccaaacgcgaaagaagaagaagacgagcggacncccggcaaaaagcgtgggacttggcgaggagggacacccacccgagggggcccaanaagaaaaaaaagccgcgcccagggggggggcccgggggaagccccccacgaggacccgangccccgcgggggggggaaaaaagcgggggggcgggggcacggggagggaggccagggccaaaccgcggggcggggggaggggggagacaggcaaaccgagagaggagcccgggggggggggggggagcggcgggagggacggcacagaggggaggaggcagagaagggaggccgcgaaggggcgcgggggaggagaagcaaaggcggcaggaaaaggcagcgggagaggggg

SEQ ID NO: 186201 - DNA, 351 bp, Arabidopsis thaliana
  unsure (1)..(351): unsure at all n locations
agaacgaagggacaaggggacggngcnaccccaaccagacgaganaacaanaggacaaagttgaagaatgaccatcaatttcctaatttattgatgcctttatacaacaaaacgacgaacggtgactttcggagaaggaaacccanaggnggagagaccagaaaacaaacacgccaccngaacaggggggggggaggcaccggcaggagcaaagncacaagcccaaccgcggcgaagcacgagaaaccagacggcgccggcaacggcgcaaanaagaggacgcngagaagaggaggcaccacaacgaccacagccgcagacacagacagacaccaaaacggggggagaacg

SEQ ID NO: 186202 - DNA, 402 bp, Arabidopsis thaliana
  unsure (1)..(402): unsure at all n locations
caggtaccggnccggaanncccgggttgacccaggcgggggaagtctcgngggcggacgcgngggccagcanacccagggcagncnccagggggcnaagggaaccaaccagananagnaagggacagttttgcngnncangggcncggacnngncaanccgaagaaagggggcaacgncaacaacggcctgcncttttcgaagcaggacgcggnanagagggagncaaaggagaagaccaccacaccaggggggggggggggcggcccccggcgggagagacncccncacncgnaggcaccagcaagcgggagaagcagcaanggcccggaaccgcacagaaaaggggggcacaacnggcaggaggcacaacacagacgggacggacagggcagaacaaacc

SEQ ID NO: 186203 - DNA, 166 bp, Arabidopsis thaliana
  unsure (1)..(166): unsure at all n locations
ggacccacnagagcggcctgcccaggcgggggaaagtcccnnnaagaannaaaacacccccgggagaaggggggggaacanacacaaagcacacgggcaaaaacnanggggncgaacaacaccttttcccggacactgaccatgcctctttcggtcaacaaaacac

SEQ ID NO: 186204 - DNA, 234 bp, Arabidopsis thaliana
agcttggacccactagagcggccgtcccacgcgggcggaaatcctaatgaacgaaaaggtcccccccggaaggggagaggggagcccaccccccaaaaaacaagaaaaaagccccccacgacgacctttgtcgaagcgaccggccgactgatctcgcagggaaaaggaccaaaaaggcaaaaactccgtggaaattaagaggcggaggacaaggacggggagacaacagagcaa

SEQ ID NO: 186205 - DNA, 504 bp, Arabidopsis thaliana
  unsure (1)..(504): unsure at all n locations
ctgcagtaccggnccggaattcccgggttgacccacgcgggcgagccgcgaacgagcgaaaagcgcgcccacagnggagagaagcggaagccctcacacaaaacgcagcacacggacaaccaagcctttttctgttgaagcggaggccaacaccgaccacattgtcccaaagaagccatctacaaagttttttatttttttgagggggggcagncaaagaaagtgcgtggaaaaagaagaagacgcccccgactagggcgcgggacagacccacaatgacgaagggcccattgcgcggtgggaggaagagaaacaacaagctgcgctgcgatagacggagaatgaaaccccacaacggggttactacaaacagcttaggagggaactcgaaaacggtcgaaaaagcgagtccgggcaagaacgccccctcacggtcagaagaaagtgacaaagcccgacaagctagcaagcacaaacaaccgcaggaaagaaccgcgcggggcc

SEQ ID NO: 186206 - DNA, 456 bp, Arabidopsis thaliana
  unsure (1)..(456): unsure at all n locations
cgggggggaaaatctttnttttaaaaaaaattgagacaagtacgagggcaataatgattaaacgatagggcataacaaaacacggaagaaaatgagtttttattaggaacgaaaaaaaatcaggaaaatctaacgaccaccgacannccccaccccgggtgggagtttagangtctggcccnacaacaagggcgcgcgcgagcaaaaaaacccccccanagggggggggggggaggagcacacaaaaccaaccnggcgccaacaancaacccgaagaagaggggcgcgcaaacaaaccgggagaaaccganggacccacaaggggggaacccgacacaggaacaagagccagggagcaggaaggcggcgcggcagcgngcagaaaaagagaggggaagacggccgagagaggggaccgggacgaagagcaaagggggagagagggaggggaggagc

SEQ ID NO: 186207 - DNA, 268 bp, Arabidopsis thaliana
  unsure (1)..(268): unsure at all n locations
agcttggatcctctagagcggccgtcctacgcgggcgtctattctttctgaaaattgcaggtacttcatcttaggaaggaagacaaaaatatctgttccttggaacacattttatattcatgcactagtccccccaacacaggatgctaaactataaatcgcaatcaaaagttaacacanacagtcggtcgtcattgaggggaacccacannnccacctgataaacaaanncnggaatgccaaggcgactcagagagaagaaaacgag

SEQ ID NO: 186208 - DNA, 577 bp, Arabidopsis thaliana
  unsure (1)..(577): unsure at all n locations
ccgggggggggaggaaacccccnnnnaaaaaannnaanccccccgcccacaggggggggncccaccccacccgcaaaaggcgcgcggggaccacccacacgcacgagccagagatttggaagaaaccaaaccgcgcccacccgcgaccagagagagcaacaagacaaacnagaacagcacganccgcaacgcgtcaaaaaattcgggacagaaggggacacacaaaaagaggggggacaaagcaccaaaaaaaaaaaaaccccccccacaagagagggggggagggggggagggcccccccccaaaaaacgacagcacaccaccaaagagcacacacaaaaaacgagggaagcgagggaggagagagagacaaacaacaagcgcccaacagacaacaaacaaaccgacaaacacgccagaaccccaaagagcagacaaagagaccaagcacacacacaagagaggaagaagaccacgcacaaagagaacagagaaccgagaacaccaacccaaagccggcgagacaagacgaccacagcaacgccgccgagaccgaacaagaacgagaaccaaaaac

SEQ ID NO: 186209 - DNA, 468 bp, Arabidopsis thaliana
  unsure (1)..(468): unsure at all n locations
ccggnccggaancccgggtgnacgggcgagcgaccctanannaaacangaaaacgcgcccggggggggganagaccccangaacaaacaggccagaagacggagagggacaagnnttcgcggacagaaggcgagnacaaggcaagcagccaaaaaccaaacccgcngagcccgcctctggtgttttggaaggaaggcgcaaggagcacagaggggaacccaaaaaagcaccccccaccggggggggggggaggccccgacgaaaaaaagcncgcaggagaaagaaaggggacgcagaagggaggaagacgaccaaagaaacaagaagccgaggcaaaccnggggaaagggcagaacaacgccgggaccccgccagaaccagaaaaagacccgacgcgccgcaaaacaagagggggcacggacgagggaagaacaggagaggaggaagaagaaacccgaccagggaagg

SEQ ID NO: 186210 - DNA, 476 bp, Arabidopsis thaliana
  unsure (1)..(476): unsure at all n locations
ggancctctagagcggccttcccaggggggggaaaatccttttcgagagtaacatagcccagggagggggccaaagcctgcggacgcaatacaaagtttgcagacaccgagtaacacactgttacaattctgaagagtcgctctcttaccaagaacgtattaaaagagaaaccnnaacagctggaactttgaaagaaggnncganccaaacgggaaccaaaccgaaaaaggcaccccccgggnccacgagcggaggaggggcccccaggtgcagaaggacgcagacccaagagacgggcacccgcgggggagaccagagcaacaaggggaccagaaaaggacgagagaacacggaaaaggacgagccaaacccaagcagaagccacgacaacgagagccgaccaggaaaacagcacaggggacgggaggcaagggaaaaaaagcacaaccggccaccacnccaaggaaggaacagg

SEQ ID NO: 186211 - DNA, 495 bp, Arabidopsis thaliana
  unsure (1)..(495): unsure at all n locations
cggnccggaanncccgggtcgacgggggcgggggaagctncnnnaaaaaagcnanccccccccngnggggggganngcacaagccaacaaaggggnccgaccagacgggaacggccgcatcttaccacgccaggaggcagaccaagcggcagcaccagaacaaggccncaggcaaaatacctacaatttgggcaggccggcaaaacccggcggggnnganngggagaaagaaaaaccccccccggggggggggagggggggagaccccccacaaaagaaaaccaaaggacaccgacggaagacaaaagcggacggaccggggcaaacagcaacccacccccgcaacggcgcgacaccgaacaaagaaaagaaacccaggaagaaagcccgaacgaagcaacaccagcgacacaagggaccagcacgcacccaacagggcggcgaacgccaagagaaggaacagcgaaagacagggcagacgccgcacccgaagga

SEQ ID NO: 186212 - DNA, 463 bp, Arabidopsis thaliana
  unsure (1)..(463): unsure at all n locations
aaaaaaannnnccacccccaaaggggggggccccgcagagacaaagaggcgccacggccccgcgcacccgaggggcggagacatttaaaccacggacagccacacgcgccggaagaaaaaaagacggaaagaagagagagggggcgttccctcgtcctttgggggagaggaggaacaaaacagcggaggccgcaccgaaaaaaaaaaacacccccccggcaagggggagggggggagaggacgcccacccaaaaaaaaaaaaaagaaagcggaacaggacgagggcgcacggcggggagacggggaaaagccgccccaccgaacgcaggcgcaagaggaggaaacagagcgacagcacgaccgcgaagaagagggccgagngacgcccagaaccgagcccacgaaagagcagacgacacacgcgcacgcggcgcacagcgccgcgaccgaccaccggcacgaa

SEQ ID NO: 186213 - DNA, 364 bp, Arabidopsis thaliana
agctgggacccactagagcggcctccccatcgcgggggaactccctttgtaactgtcccgccgaccccccaggaaagaggacgcccacgggccacacacaacacgaatgaccgggacttctgacaggctcccctccccagagacaaaacaaaaaagggaaaaaaaaaacaaaactctcctgggttctgggagcgtacaaccaccccagaggttaacaaaacagaaagcgccccccccgacaaagagcgcggggaggccaccaacagcctcgccccccgggagaaaaaaaccgagccgggccaggaaaacagccaacgcccccacaaaaggggcccttcggaagggccaaaaaaccccccggacg

SEQ ID NO: 186214 - DNA, 502 bp, Arabidopsis thaliana
  unsure (1)..(502): unsure at all n locations
gcgtcgaagcttggacctctagagcggctgcctcgcgggcgaattctcttaagatctttttggtgttgatttatgggggcactcaaaacccagatgtcgcacagcgcccacgaatagcagatgcagaggttctaagagaaaggttgtctaacgcaacgggaggcgatgagcaaaatggggaagatggggtggacttttggggggggcagaaacgcaccgnaccccacgcgggaaaagggacgaccgccctgcgccagcagagatgagccattaattggagggcctaccctcaaccgcatcacagagggaggactaccactgcaggatattcgaacatcgcagagtttgatagcaggtccccgaagactgaaagaaaattgccgcagccggcatccaggcgaagacgacaaacattgggaaccgcagcctgaaaaagactcctagcgtgcacgcagagagaaaatttaggaaaggggcccaaggtctgacgactgaggatgta

SEQ ID NO: 186215 - DNA, 149 bp, Arabidopsis thaliana
  unsure (1)..(149): unsure at all n locations
cactagagcggcctctcgggggggcgagagtccacttaaggggaccaggagccgcncaccggggaanaccaagagaaaagagagaccnctcaccaaaccaaaaaccgataatcttcatacttaaaaanagaggacggcgcgaaaagaga

SEQ ID NO: 186216 - DNA, 444 bp, Arabidopsis thaliana
  unsure (1)..(444): unsure at all n locations
ccggnncggaannnccggggtgacccgggcgggggaaacacnacngaagggggncgcccccggnccgggggggncaccacacacnaagaggccccaaccaccgagaacccnaaccccncctttctatgatctacacatggggcgccatggagaaggaccctcaaaagcccccaaacatggggtgaccttttggaagtagaacaaccaaccccagggtccactccaaaaaaaaccccccacaggggggggggggggaacccccaaagaacaggcccacggggaccgggaagaggacaaaggcgcgagcagcaagccccctcacccgggacggcgagggggagggccaccagacaggcaaggacaggccggcaaacggacaagagcgcggggcggccaaaacggcaaaaaccgcgggggccgtcgcaggaagggggggagcagccg

SEQ ID NO: 186217 - DNA, 293 bp, Arabidopsis thaliana
  unsure (1)..(293): unsure at all n locations
ggaagcnggganccactagagcggccttcccacgcgggcgaaattccgnnagacgacagcnggaccccagaggacagcggcnaaccaaggacgggccngcgacgaaagcaaagaaggagncaggggctttctgaaaagcccaaagtgtgctaagacatatataggaagtggaaaaaacaaaggaactggctcgcaaattgagaggtggggaaaaagaaancgaancagnaccgacgagagaacccccaggggnnagaagcgcccacgaaccggcaagagccaccgagcccaac

SEQ ID NO: 186218 - DNA, 492 bp, Arabidopsis thaliana
  unsure (1)..(492): unsure at all n locations
gganccacnagagcggcctacccaggcggggggaaagccacnacgaaagaaagccgaccacgacancgggggggacngccacaaaaaccaanncgnnggaggggcaagggaaacaagcggaggaatcccgctatacaaacacacgcacaccgcgaccaacacggcacacnaaagaacccccggcgtgcgactgggngcgacggaccaaaccaacacgccgagancccaaaaaaacaccccccgaaccgggggcggggggggagcgcccaaccaaagggcaaaccgggaaacgaaggacccacacaagcggcgcgacaacgccgaccacgagcgcgccgaggaccagcagcggcacagccaccggggcccggaacggacgaacgccgcggacgggccccacccgacacccaagggacccgaagaggaggagcgcgggcgaagaacaacgccgagagagagccggcggaaccggggcccgcggacaggcgcggg

SEQ ID NO: 186219 - DNA, 487 bp, Arabidopsis thaliana
  unsure (1)..(487): unsure at all n locations
gtaccgggccggaanncccgggttgaccggggcgggcgaaccacaanacnacanangggggacccccaaagcgggggcnccgcaaacnaaaaaaaaccccccgacccacgacggagaagaaacgaagggcgccccaacccgcagaacaccgcacacaccaaacgaaaaaaacagacaggcgcccaaggcgcgactccttttcgtcgacctgggacgatgcggcacaaccgcaccaggggcagaagaaacaaaaaaaaaacaccccccgccgaaggagggagggagggaggcccccccccaaacgaacctccgccaaaccccagagaacccgaaaacccgccagacggacgagcaggaagacaggcccaaccggcggcagggaaggaggggcccagcccatgagaaggccgacacagagaacacgggcagggacccagaaagggcgccggagacccacgcccaaaaggaccaccaccaaacgagccaa

SEQ ID NO: 186220 - DNA, 459 bp, Arabidopsis thaliana
  unsure (1)..(459): unsure at all n locations
cgtacgtaagctgggatcctctagagcggcctttccatgcgtgggttaaccttttttttgcgagaagcaaaaaaactctttattcttggtatgcttcaaattcaaacatctccgttttttaatacagagttcatatatggatttgttcgcaggggacaaccaatggaaccaacaggataacgcaaannaagattcctataattccgggggtagggaancaactaacaaactggtgacagacaagggccaaactgttaagtcaaaagagcaacaaactcatcaatcttcttgtccgaactacctcctttagagatagcttcgcgagccagcaccttaagcttctcaactttctgcttaactctttccctcttttttctttcatgacctcaacaagcatattgcaatctttttctttactgaaaagcccttttcatggggcttactcttaaccccaatttt

SEQ ID NO: 186221 - DNA, 482 bp, Arabidopsis thaliana
  unsure (1)..(482): unsure at all n locations
ccgggttgaccggggcgggggaaaccgcnnncaaacagnngcgacaccaccaccgagggggaccgccgcgagaagacgacagaagggcaccgcgccgagaagacaactgaatggccacaaaaaaaaaccaacaccaggaagccccaaaggccgccccaacaaagcctctggtgggtcttggggacgaagggaaaagccaacaaacgggaccccggaaaaaaaaaacccccccaggaaagggggcgggggaggaccccaaaaacaaacaacaccccaaagggcacaacaagcaccccggggggcggacccaaccgagccaagcgccagggggacaagcagagcgggaagcaacaccagcaacccagccaccgagagaacccacgaaaaccaccgaagcaggccacaacccgaggacaccagcaagaaccccagagaaagacaccaacgagaacgaaaaagccaagaagagccaccccaagccg

SEQ ID NO: 186222 - DNA, 467 bp, Arabidopsis thaliana
  unsure (1)..(467): unsure at all n locations
aaaaaanacagaccccccnancggaggggggcccccccccccaaaccacacncagagcccccagagagagaagggcttttaaaagccgccgccacccggggaaaccagcaaagccaccaggacgagaaaccagctcccctcctcctttggactgctgggcacacaggaggggggggtgccccaaaaaaaaaaccccccccttggcggggggagggggagggccccccaacaaaacagcaacgacgggacgagaaaaaaacgaaaggccgggggggcaaaagaaagcaacacccgcaaccagcgacacgaagcaaagcacgccccgccaacacgcaccggcccccgacaccagaaacacccgacgcaaagcaacgcgccacccacagcgcgaggcgcgagaacccgcccgaaaacgacagaacagcgcacaacgaacaaacggccaaccgcgaaacagcaacaaaaag

SEQ ID NO: 186223 - DNA, 166 bp, Arabidopsis thaliana
  unsure (1)..(166): unsure at all n locations
ggatcctctagagcggcctctccacngcgggcgaatatctttttttactgctgctagaacactacaaaggagattccgcatgagcatagataggactcgaatctttctttaccacaagagggttttacaaagatacaatgatcatgtcctataagagaaggatcaa

SEQ ID NO: 186224 - DNA, 415 bp, Arabidopsis thaliana
  unsure (1)..(415): unsure at all n locations
ctgcaggnaccggnccggaatncccgggttgacccacgcgtgcgcacactcgtccgtacggctgcgagaagacgacagaaggggagagnnagagggtntagncacactctcattctcgtttgtgtttttgattgtgcggagaattggtgatagataagcttcttcttccctcttctcaacttggngganctgngtgctattttcggggggaggcncaacggggccagnaccttccccaaaggaanacgcccccanggggccgaggggcaggccagaccgannccncggccgaccccacccncagnnacccgaaccnccacaccnagacncncggnggcnaccagangcagcagcagcagcggggcgncnncccggccancggcgcaacccaggggcanncagcacaagaaggagg

SEQ ID NO: 186225 - DNA, 504 bp, Arabidopsis thaliana
  unsure (1)..(504): unsure at all n locations
agctgggatcctctagagcggcctttccangcggtgttaagtctactatataatgggcctctaaagacattttaaggaactgacattaaaaccaattattagatagtatataaatactgtctggaaaattcctctatacaaacacacgcacaccgaattcaactttgctcataacagaacacactgtgctaacatggggggnggacgagacagatatcccgcaatcccaaaactacaggcgcacaaccttgacaggtgtatgaccggatatacactgtgcttagggggcaatgaaagacttattcatcagctgaacagcggtgtccatgaccttgcaagcatgttaaggctcctttccactgggttccagaatttaagatcaactttaacaggccacacctaaacaccaaggaacccaagagggggtacctgggccagaaacaacgcattcaagtcctggggattcaaggacaacgttccatcgcaaacccaacctcccaaagg

SEQ ID NO: 186226 - DNA, 373 bp, Arabidopsis thaliana
  unsure (1)..(373): unsure at all n locations
ctgcggtccggnccggaatncccgggtgacccgcgcggggaacaaganacagaagggggacccaaagnnnncgactnngcaannnagaaaaancnnnctatccactcggagaataaannaagggctctcaannncgaagnctgcttctccaacgaaaaaaacgaaatctttaatggcgaattttttgtatcttcgggggcggaggacgcaccanggcgagnnncgncaggaagaccaccgccnaagagcaggcgcgcggcggccccaacnatcccccaaaacccagaaaccgagnacgccannnccggcaagaagcagccgaaacccgggggaggggggnnngcgaaggaagccggacccgaacccgcaggac

SEQ ID NO: 186227 - DNA, 284 bp, Arabidopsis thaliana
  unsure (1)..(284): unsure at all n locations
gaccacagagcggcgcncagcggggaagccactaaaggacgccgccacaccacccaggaaaagggaaaaaggacaacgagggaaaaagcaaacagacaaagaagagagaacttaacgagcaacaaaaaacagtggggagacgacctacgtgagaaatagggggaaanacnacccaacgcacgacccagagaaccaccccgaaccggagggcgagccaaagcccacaaccgcgggaggccaggaaanaagccccacaaccgagcagcaaacaacgaggacaaccc

SEQ ID NO: 186228 - DNA, 459 bp, Arabidopsis thaliana
  unsure (1)..(459): unsure at all n locations
aaaaaagagcccccccggnacaggggcgcaccacaaaaacaacaaaaaggccacggnaaaagaggcgacacgcccctttaacaacgggaaaagaaggaaagagcacagcacgccacccaaggcccgggccaaacaccgctggccctcggggagaggggaccnaaccgcggagggaaaaaagggcaaacaaaaccccccccgggcggggggggggggagagccccccacaaaaaaagagagccgcggggaggggggggaggggcaggcggggagagcagaggagaaagagggagccggagaggaggaggagacggggcgcagagcggcccgaggcgcccccagaaagaaagcgccgcgggggcaggcgaaagcgagagagcagccaaaagaaaacagcgagggggccagaaggaaccggcacccgccccaaccggaagcagaggcaacgacacgcacaac

SEQ ID NO: 186229 - DNA, 428 bp, Arabidopsis thaliana
  unsure (1)..(428): unsure at all n locations
aaaaacnacanacggcgcnnncaaggggggaacacaaaccgncaaaaagccaccgccgcaancacgccccacggggcttttacaaaggcggcggccgacgaagcacccgcccggaaaccccgaagacggcgacaaaaccgtccaatctgggaagaccgggccccacaccggggggaaaggggccaaaaaaacccccccccccgggggcggggggggggccccccaaaaaaaaagaacacccccaggagaggaaacgcggcgggggggagaacgacgcgcgaaaacgcgagagaaaacccgccacgacacggggcgaacccgaaaaagccagcgcggcaacagaaaggggccgccggccaagaaacaaccgcgaaacgcgggaccgcgccacgaaaacggaggagagcgcaggcgcaaacaacgcgggc

SEQ ID NO: 186230 - DNA, 442 bp, Arabidopsis thaliana
  unsure (1)..(442): unsure at all n locations
ggggaagcaaaaccaaacaaaacaggagagggacccggggagcggagccagcagtttcaaagaccgcagggggacacccggaaagcggagaccgaggagaaaacccggaaacacaactgcgccctggaaagccggacacaagacaggaagggacaaaaagaaaaaaaaaccccccccacgggggggcggggggggaaaccccccccaaagacaacggggagcgggaggggcgagggaggacgagcgcgcagaggaaggaggggggagggcgacacaggagaagacagccccgcgcacggagccaaagaacacggggggcaacgaaaacagcgccacggaacncacgaggacagacaggccccaacggcaagaaacggccacgagaaacgggagacacgaaaaggcccgccaggacaccgaaagcagccgaacagaaaggaaa

SEQ ID NO: 186231 - DNA, 430 bp, Arabidopsis thaliana
  unsure (1)..(430): unsure at all n locations
ccgaggggganccaaaacggcggaaagaggaggagacagccgcgcaccaccgcggcgggttgaccggggngaccgccgggcggggagccagcggcggacccagaggcaccccaaaacaagggtggngtttgggnaggccggcccaccacacgggggggcggcgccgagaaaaaaacccccccgcngggggggggggggggggggccccccagaagaaaccaancgccccgccggggcngagagcagagccggccgggagngcacgcccaagcagcgggcgccccaaaccaaggaaagcgcgccgcgggggggagccaacgggggaacgacgaggcggcggagcaaccggccccagggcaaaaacccagcgcncagcngggaaagagcacaggaagcgaaaggccgagcagcgaggggaggggcggggaaa

SEQ ID NO: 186232 - DNA, 410 bp, Arabidopsis thaliana
  unsure (1)..(410): unsure at all n locations
gccacgaggggacaaacttttaggaggcgcggcggcggaaggaaaaaacgccccccaaaaaagacagcgcgcgcccaaaacctcaaaatttggaacgaaagggccccccaaccagggggggagcncacgaaaaaaaaaacccgcgccccnggggggggggggggggagacccccccccacaaaaacacaaaacnccgcggggggaagagaaagaacgcaggggggggggggcacgcacgaccaggcgcagccgggacagaagccacaagaccacgcgagaagacgccgaaaccggcaggcgccggacccgcgagacaccgacgagggaaagcggggagcgcaagcgccccccaagcgacaacgagccgagcgagaggacgcgacgacagggaggggcgaaggacaagaag

SEQ ID NO: 186233 - DNA, 548 bp, Arabidopsis thaliana
  unsure (1)..(548): unsure at all n locations
gggaaaccaccccccccaatcaggaaaccanaagagcggcctgaacaagggggagaggaaatcccccntaaaaaaaaacacaccgccccccccaaggggcaaccaaaaccacgcacaaagagaaaaggaaaaggacagaaaccaacagaaaattttccgaccacgaacaacagaccgaaggcacaacacaacaaccaccgaaagagaagacccacaacttccctcaaattttcgaagaagaagaccgaccccaaaaccagttctccagaaaaaaaaaaagcccccccaaagacggggggggggggaaaaacccccaaaaaaacaccgaaagccgaagaaactcgaaaggacacaaccaagccagacacagcacacagaacaacggagaaaacgagaaaaaacccaaccaacaaaacaaaaaaaccacggaaaaaaagaacgaaacaaaccaaaccagcagaacgagaagaaaaacaaacccacacagccaacaaaacaaccacgaccaacccacacacaaaaaccgaaacaaccaccaacaccccacg

SEQ ID NO: 186234 - DNA, 423 bp, Arabidopsis thaliana
  unsure (1)..(423): unsure at all n locations
cggnccggaanncccggttgaccggggcgggcaacctcngcnanaagacgacagacgggggcnnagggggggacacgaaaacangnnccannncaagcaaaagaggngagagccacnatttcagcgcgcccgggagggcgaagncagagccagccgaagggcnccgccccccaattggtggtcttttaagangaaggagangacnaggaaacgaagcaaagacacaaaaggcccccacngggggggagggggcggcgccaccaaagacaacggagncgaaaagagaccaacagacgcccaagcggagaaccgcaacggaccccgccgcacgccacaagaaagcgcgagncacggccaaagccagcagacaaaaaaacccagaccggcacacaaaccgaaccagccgaagagacccaaggaaga

SEQ ID NO: 186235 - DNA, 271 bp, Arabidopsis thaliana
  unsure (1)..(271): unsure at all n locations
aaaaaanacncccccccccnnagaggggagaaaacacccaaanggaacagcaccgggaccgcaacagcaagggcaccttttcaaacgcgacagaagaggcgccgagcgagacaaaagnagcgacaaagagagcacgagaaaaaatccctcccttttggggcaagacgggacccaccaccaggggggcgggnggaaaaaaaaagaccccccccaggggggggggggggggggccccccacagaaaaaagagcccccaacacggaggaaagaa

SEQ ID NO: 186236 - DNA, 466 bp, Arabidopsis thaliana
  unsure (1)..(466): unsure at all n locations
cgtacgtaagctnggatcctctagagcggcctctccatgcggggtgaaatccttttttttttttaatatggaagaagcttgataatataaccaagtttggttgatatataggtccggagttcaatttattgtctgctaaatggatgagataataaaatatacaaaccaacacccaaccgaacacagaagagtgtggtccatatgggggggacnnggcgcgancaaagaaaagaccagaagggcctccattagggaccaaagccagnggcactggactcgatgcaccttcttcaacgctcaagatcccagagnggaaattgatttctgagttacaaaaccaggacatacactggtgatgatgaacgatttggggccgcttacccaatactcggtgtcaatgagatcatggcagctttcggttgtatggatccaaaacatactggtggcccaccctttgacttgaaag

SEQ ID NO: 186237 - DNA, 484 bp, Arabidopsis thaliana
  unsure (1)..(484): unsure at all n locations
ccgccggnaccggnccggaanncccgggtttgacccgaggcgggcgcactctcgncncgaggacgcgngggaccaacagcagggggcggcnaagnnancananagncaanccgcnaanacaagggcancanngatttcaccngcnncaanngaacccgnacangagnggggngggaacgggaggacaanggctggtgggcntttagnggatgagagccagannncaggaggacgccaaaacaggaacacaccgacnccggaagagacaaagcccccgacggggngacacaggncgaaacaacncggaaggggccaagggcgcgggaaagccgccnngggacgggcaaaaggaagaacacngnagggaagggcnccccancccgaccacccaaagaggcaaaacggggcaacgagaagcaancccaccaggacgacaaccaaaagagacggggggaaagaggcgcggaacccccagcngaggaag

SEQ ID NO: 186238 - DNA, 437 bp, Arabidopsis thaliana
  unsure (1)..(437): unsure at all n locations
cggcggagctgggaccatagacggttcnccggcggcgaaaaccccnacagnaaaannncnncggaagggggaaaacaaaaaaagggggagcgggaaccgaaacccgagccccattaaagaggacaagaaacacagccgaagagaccgagggagaagaagaaccacactttgctcacattactnggacgaaccaccagagcggacctgaccgaaccaaagacgcccgcctgaggggggggggggagcccaccgaaaccggaccttcgacccaaaagagggcctgacccgacgaggcgcaacccgcaagaaaaaccgcacaggaacaggtcaagaccccgagagggccttaacccggaccacaaaaggagggtctcacacggtacgcgccctaacgtgaagaaacatcgggaagacaaggggcccgtccccgaaggcaa

SEQ ID NO: 186239 - DNA, 240 bp, Arabidopsis thaliana
  unsure (1)..(240): unsure at all n locations
caccaaaananaaagaagcagggaacccnacgncctataanacaaaaaaccanaggacacgaaacgcaaccaagaagaagnncaacccaaaggacctgnttgttgagaaganacacgacacgancaacgacnnnggcaaaaaagggagacccaaggccagcgccagagagagacacgcancgagacaagcgngccaaannaagcacaagggccaaaaaagcangaaggagaaccgaagag

SEQ ID NO: 186240 - DNA, 481 bp, Arabidopsis thaliana
  unsure (1)..(481): unsure at all n locations
cggaccggnccggaancccgggttgacgaggcgggcaagcctngcgacaacnnanacccgccaangcgaaggaacacaggcgcaaaacgacgcagagcggggaaaaaacagacgactgttcgggcacaggccacgacgaggaaaaggaagaccaaccgcgcagaggaaacagaggcggtcgtctattagaagctcgacanacgaaagagaaggcgttaaagaaaaacaagcccacgagagggggggggggggagaccccccatggaaagaatgggaaaaccgaattgacagcgaaaagagcccgtcaccaaacgaagcccagcaaaagaaccgagacgggaacctgggaaggcggacaagaaactaacccaagcctaaaagcggggggcaacagaggggaagaactcggaaaggcctgcaggacgagaaccagagacggggcagtgaaggcagagagggacaaagaagagcccgcgagaag

SEQ ID NO: 186241 - DNA, 503 bp, Arabidopsis thaliana
  unsure (1)..(503): unsure at all n locations
ccccgccggnnccggnccggaanncccgggttgaccgaggcgggcgaggctncnnccaaacanncnnccccccccggaggaggggcacccaaaagcagcaaaagaaaccggaaggcgcaacagacacaagattggtaaaacccgcgagaaaccaaacgaagcaccgcacgcaacccaaggaacaaaccgccctcgtccaaaaaagggaagaaagaaccccaccacccgggacgcagaaaaaagaagaaccacccccccngagaggggggggggggaggggcccacccacagaaacaacagccccccccgcacgggacaaaaaaagaaagcgagcgggaacacgcaaacgcccagccggaagcaaccaagaaaagacgcaaggccgcccgcaacggcaaagacaccaaccagcgcaacaccgagcacgccaacgcccgccccgagagacagacaggccaccaccagccagaacacccggcggggcccccaaaggggggcgcgaa

SEQ ID NO: 186242 - DNA, 336 bp, Arabidopsis thaliana
  unsure (1)..(336): unsure at all n locations
ccaaggggacaagagagannnaacanggacagacaccacgcncaaaaaggcacaaatttcaaggaggacgaaacccaagcccngaggaaangggannnggaagcaacggaactctcggtggcctttagaaganacccaaaagccacagcggccaaaaccaacaaagcaagcccagagacacggagagacagaaccncgccgcnagaaggagcgagccgnccanccacgagaaacccgaaagccggacggccaaagagcgccagagncngcnncncaancagagcggacgcgngggccgacccgggaanaccggaccaggaccggcaggcggaccag

SEQ ID NO: 186243 - DNA, 317 bp, Arabidopsis thaliana
  unsure (1)..(317): unsure at all n locations
cggaagctgggatcctctagagcggctgccctggcngngggaantccccnnagnnnnaangangaaanccaaaactgaagagngaagacggaaacgnnncaagaacgggagagagagacaccaggccgattgcccgaagaancgctaggacccgagcataaggaggactcagaanccngaccacgcttttttttnttttaggggggacccacccgnagacaccaggaaccaccncggggacaacaacncncagacccgaaaccacnacgagcgcccaggaagggccaagcaaagngcacagcacaagggccacgagg

SEQ ID NO: 186244 - DNA, 469 bp, Arabidopsis thaliana
  unsure (1)..(469): unsure at all n locations
gccgccgtcgaagcngggaccactagagcgttgcccgggcggttaaccctgnnnaagaagggngcccnacaacaggaggggagacatcgccacgcgcagcacgagggggaaaagcgggcaccaaaaccatctgggcggaagcacaaagaaccaacaggcggcagccaccccccggacaaaaaaaggtgtttttttctttgggggggggaaacaccccgaggaaaacaacccgggagaaaaagcccccgcgcccgcggggggaagaaagacccccaaaaggacggggggccaagcnacaaaccagaaacggaggccgaaaaagccggacccaaaccaaaacaggggaggggaaaaaaagcaaaaaaaaaaccccgaaagccaaggcccccaccngacaaccaaaaaacccccaaagaaccccccggggaggagggggagggcaaaaaacccccccacaacgagaaagggc

SEQ ID NO: 186245 - DNA, 521 bp, Arabidopsis thaliana
  unsure (1)..(521): unsure at all n locations
aaggacgggccggaancccgctcgacgacgggaaacccccagagaagaaggagagcccaaaaaagganaacaaacaacgccacgcgcggcgcgggcgagaaaggacaagcacaaaaccggaacccacgggaagaagagagaaccgcggggagggcggcaacaacaaaaaaaaaaaaacggctgccgcgagggcgggaaaanaacacgacgagaccccaaacaaaaaaacccccccaaccgggagggggagggcaggacaacccaaaagagcggaagaacgccccggcncggggaaccgcacagagcgcggggggagaacaccaagaggccgcgccagagaggagcaagaaaaaaggcgagcgagcagcgggcaggaggcaggagaaacaaaccccggcggaggagaacccgaccagaaagacgcacagagacgacgcccagaaaaagagagggggcagagaagaacacaaaggcggcaacgaaaccgaaaaacaaaaaccgggagaggaacaaagcgcaag

SEQ ID NO: 186246 - DNA, 506 bp, Arabidopsis thaliana
  unsure (1)..(506): unsure at all n locations
cggcgnaagctgggacccactagagcgttcgaccgaggcgggggatacttccnnaananaanggcaaacagccggagaggggggcccaacagcgcccgggaggggaaacccaacagccaacagggccactattatgaagagagacccaaatggcccaaaaaacacaagagattcgcggacaaaacccctttctccttttttggnagaaggaccccgaggagggagaaccgcngaaaaaaaaggccccccacgaacagggggagaaaacaacccccaacanagaggccgcagggaggacgacaaaacacagaacgnggccggcaccagacccaacgagcaacccggagcccgggacaagcagagggacacaaggaaacagggccgcgcgacaaacagaaggaaaacgcgccaaacaccagaagagaaagggaaccgccagacaggggggggcggcccaaacgcgacggacccaaaggcacaaacaacagcggaagaccggaaccccg

SEQ ID NO: 186247 - DNA, 165 bp, Arabidopsis thaliana
  unsure (1)..(165): unsure at all n locations
gggaagaaacaaaaccaggcgcacaggagaacacagaacagancgagacaccttggagaagagcagaagaacccaaacgaccagaancaagcncaagggcccgaggcacggttttcttatcaggggggggaacagcccagaagggggagccnnnnacaaacaaac

SEQ ID NO: 186248 - DNA, 410 bp, Arabidopsis thaliana
  unsure (1)..(410): unsure at all n locations
gcgggggggttggggggggcacttcttgaggggggaaaacccttaaggaaaggccagactagcggggaaataaatccacaacttacaaagaacccacaccacaacacaactgagtacggccgcagctcagaccgccctgcccaaccacgcaaccgccccctctccaagggaaggcgngtctttttttttttttcctcacgaagagagggggagtccttagaccgcgcgccacgcgtccgtcgcccaggtcgcccagacattcacggacaccgaacggggagcgtagtgcacttacctccccgggcgaaaagagctagtaaacgagagtacacatacgcagaaacccgcccccactcaccctcccccctctgcgacggaccgccgcgcgccacgccacgcccgccacccgg

SEQ ID NO: 186249 - DNA, 503 bp, Arabidopsis thaliana
  unsure (1)..(503): unsure at all n locations
cgcctgcatgtaccggtccggaattcccggtctgttaatgggagcgtaaattcatattttcctctgttttttttccatattggctgaagcatgacaaaagattcacactttcctctgttttcttatgtcaaaatttgaaccaataactgaaagatttggtcaagaagaggaaatgggaagaacacgcnccgctgctacgctgagggggggagaccaaaggcaggattacaagtcatcttaggattactggggatcactgggagcctctcatgtctctaccgattccattccgggggttactttcttagaaaacgaagacactagctacaatatgctacacaatcaaagaagtcacgagtgaaagattcgacctaaaggccgtggacgaacgtgtgggtgaaggtctaataaagatggacagcttgttcgaaaagctttagaaagaccgtcatggatttgggggaaagagccaaagacggcagcattaatggagtagaagaatt

SEQ ID NO: 186250 - DNA, 490 bp, Arabidopsis thaliana
  unsure (1)..(490): unsure at all n locations
gcgtacgaagcttggatcctctagagcggctgcnccttgtttttttattctgtcaacttcaactatttattccttatcaaatatattatgtttccaaagatttttgcctcactttgaaagtcttattagttatctttgtcaatttctaatagaatttgaatgtcttttggaagtattatatcctaaagacaatagtgntatttgctactcctaacgcccccatctgtgttccggaaaacgttaagatctccaaacaatttgtatggaggaacatatggcctctacggctgcctgtccactgtagccgcagtagcagcaccggatgtgcccgtggctctagcaggaaatgagtttgagacttgcaagtttctctcaaagaccatattctcattgcctccttggctccagaatgttgagtcattactggttacttggccaccgctccattgtggctgaggataaccgtatgaatacggttgttgctgctgca

SEQ ID NO: 186251 - DNA, 480 bp, Arabidopsis thaliana
  unsure (1)..(480): unsure at all n locations
gcgtacgtaagcttggatcctctagagcggctgcnccttgttttttatatctttttttatttttttattcttttcttttttggtagaggaaggcaaagtcattgttccattgcaactgggtatataacatcaagtgtatatgtgttaataatgcaacttaatcagctatatatttctttggagaaactttaaattgtattttatatgcacaattggccaaagtttaatccaatattcacaaaaacgcatcccggactattctcgccatgacccttgacccaagccgactcaaaatctcaggcagtactgtggcaaagattccaggcaacactggaagcagttcccgaacaacttgagatacatctactacctgatcaggattattcgacatggagcttcttgcggtaaggaactcgattactttctgaacattgttcaagatgaccttgtcttcttccgtcacggatggaaaaagtgctg

SEQ ID NO: 186252 - DNA, 455 bp, Arabidopsis thaliana
  unsure (1)..(455): unsure at all n locations
ggaccacgagagcgttgcccgggggggggacactaaangacgcanagcgacccccaaaagcggggacgcaccaccggcaagaaaacgaaacacaggcaggggaccatttttaaatagaagccgcacaagcgatgggagtaataaagcaaaggaacagcaaagaaattccctcctcctttgagaagttggagaaaccaccaaagagannaaaagaaaaaaaacccccccacncgggggggggggagggaaaacccccacaaggagggcgggccccgccgccgacagaccacaacacaagaaccagagaaggagaaggggagaaggaggcggcaccaaccgccccaagggccaaacccccgacccaaggccggacaacaagggagaaccaaaaccgaaaacacccaggggagcgaggagccgcgacaagacaacgcggagggacaagacccgccagg

SEQ ID NO: 186253 - DNA, 457 bp, Arabidopsis thaliana
  unsure (1)..(457): unsure at all n locations
ggaccacgagagcggttgaccggaggggggagaagcgncanaaaaaaaaaaaaaccgacccnggaaggggagacggaccgacaaaggaaccaaaaagcgcacaacggcacaaaccaaaggaagccaaaccaccaagagaaacggaaaaaaagaacagaccagggaaaaaaaaatacctaaaactttgnagccgaaacacccccagaaacgccanagacaaaaaaaggccccggaaagacgggggggggagaacccccagacggagggaggcacacgagcccagacgagccgccgcaggcaacgccgcacggcccagcaaagccgccacgaacggccaaaacccaaagaaaaaacccgacagacggcgcacacaccgcgggcaaccccgggaagcaaaggaaccgaaggggacgcggaccacccggcgaaaagcgacagcgggcggccggggaaaacg

SEQ ID NO: 186254 - DNA, 416 bp, Arabidopsis thaliana
  unsure (1)..(416): unsure at all n locations
aaaaaagannnccgcccgaaaggggggggagncccccngacacaaggaaaggaccccacaaaacagcggaggggatgccgagacgggcagggggcacagagacaaagcagggaggagggggggcggggaaaaaaacctccttttttggnaagggccgcgcccccccaaggaggcannnaaaaaaaaaaaaacccccccnnnggggggggggggggggccccccacaaaagaccggagccccacgggacaagaggaaacaaagcggggagggggcgaagagcgggagaacaggaagaaggaggacgaccgacgggagcggagagacaaagaacagcgccgggacgaccgcaccgcgaaccgcgcccccagcgcgggcggagagaggggggagcgggaggcgggggcgcgacgggaag

SEQ ID NO: 186255 - DNA, 456 bp, Arabidopsis thaliana
  unsure (1)..(456): unsure at all n locations
gcgtacgtaagcttggatcctctagagcggttgccctgtgttttttaatctttttttttttttgttttttttttttttttttgttttttttttgtttgatatttttttttntgagaaaaaaagatatagggcccttacaaaaaggggggactaaaaaattcccctttaatacctgcaaagcctttccaaaattttcctagtccctaaggggggaacccggggaaatttggaaaattggcctcaaaaaataccccaaaaaccgggttatttggaccaaggcttttatttacccccaattccccttaaggaaccctccccttatggggggggggctttgggaaaaaaagggggaaaaaaaaacctttttttgggtaaaaaaaaaacccgtttttttttcctttaaaaaaaaaaaaaaacaaatgggggggggtgtaaaaaaaagggggcggggggggg

SEQ ID NO: 186256 - DNA, 512 bp, Arabidopsis thaliana
  unsure (1)..(512): unsure at all n locations
ccccccccccccggggggggagcaccaaaccaccccccacgccgccagaggccccaagaaaaagaggcgccgcccttttgaaaaaaaagagagcgcgcggagagcgcggccaagaagaaaagacaagaagggcnnnccgaaaaaaaataccctcaaaaaaaggggaagtttgggccccaccccacacaacggcactctggcagaaaaaaaaaaatccccccccccaggggtggggggggcgggggagacccccccccataaaaaaaacaaaagggggcagcgggggcgagccgcggagcaccaccacgcaaggccgcaagacagccaaaacaacgcgcagggagaagcgcccgcgcgccagaaaggacacgaggcacacgaaaaaccaccagcaagaaagaaaccagaaaccacaaacaaggagagagacaaaggcggaagcccgaggacgagagccaggaggcagagacacagcgcgcgcaggacgcccaagcaacgcgcaccgaaacgca

SEQ ID NO: 186257 - DNA, 489 bp, Arabidopsis thaliana
  unsure (1)..(489): unsure at all n locations
gcgtacgtaagcttggatcctctagagcggctgcncctggttttttaaatctcattaagaaaatatgattacatgatcgcatccgagacagtacaatagaccaagacaggacagctaactgttgcgcaaccaaactgcacactcacaagaaatttaataatacattcaggaaaataaacctcagaagcagagtttctagatacttggggattcgangatgatccagaaacaagtagaaactttgtcgacagcactcaatcagatccccgtgaaaacgttttacattaagaagagagctggaaacggccactagttttttttcttctccatccaaaggcaatgtaatataggaaagtcagtccagccaggataacaaacccgatttggaacacattgtacttgtaaaggtacttaattcctctaagggactgcaatgtgtggccaaatatctcctgtgcagcagtggcttgagcgtaatatccaaatgca

SEQ ID NO: 186258 - DNA, 465 bp, Arabidopsis thaliana
cgtgacgtaagcttggatcctctagagcggtcgccctgggcgtgttaatcgtgatagtttaagtgttccttctatggctataggcccgtgttagtgtgtacttgtctccgatcgagggaaaaacagagaatttttttttttttggggaagaaaaaaaaaccaaaaaaagacggtgcgggccccgggcccaacttcgtgatttggagggggggagaggaacccgaaggaacaatccccccccgatcagacaccaccctgggggggggcgggctccctcaccgggggggcgccacgcgggggggcccccctttttgaggggaagaaaggtaccggggagcccccccacctttggtgattgaacacgggggggaaaaaaacacggccgattccctgaaaaaaggggccccccacccgccccccccgggcgcgaaaaaaaaaacctcgggcccccagcccccaagaacc

SEQ ID NO: 186259 - DNA, 198 bp, Arabidopsis thaliana
  unsure (1)..(198): unsure at all n locations
cgcctgcatgtaccgggccggaattccccgcttcgacccgcgcggacaatccgcttttagaagctntgccgcgcaaaagaagagacgagaggggagacgnanaaacaaaaagagcgagcaaaaacccggaaggccaagcgtctgcancaaacactgtccttggaaagctcgaactcgaattgcctctacacacaaccc

SEQ ID NO: 186260 - DNA, 495 bp, Arabidopsis thaliana
cgcgtacgtaagcttggatcctctagagcggttgctctttttttgttttttctttttttttttttttgcaactaaacataaacaaggattagcagaatagaaggaaccaaaatccaaaacacttattattgcttttttaataggaagctacctaaaaatatatctaaacattttgctgaacttaaaaggccatattggtgcatgacttagacttgggggaacttcactcttttccatcagccgcgcggagtgagcctagctgaaccggtgcttgagttccaaccacctttgatgacccgaaaagcgacacatcgcttccctttgctttctctttctcgatctgttcctttatccagaagtaggttattctaagcccctccttcaatctcatattaggagcccaaccaagcttttctttgatcagattgttgtctgagttacaaccacaaacaccttccgggccaggaatgtggtgaattggaagcttcttttcct

SEQ ID NO: 186261 - DNA, 476 bp, Arabidopsis thaliana
cgcgtacgtaagcttggatcctctagagcggtcgctcttttttttttttctttttttttttttgccaaagaataataaatcttctgattttacttgtctgcattttacagtgcagataaataatcagaaagcattggtcatgttccaacaattcaacatttgctgttctaacacaagagttgggctcctccatcgtagtttgtttgggggcagtcctggaaagatgaagacttaagaaagagcagatgaaacttcatcccgtgaagtatccattggaagtatcgatacggatggtatgtccagaggttttgccctctttgttactgtcaatttcaatccttctgtggtgtgaattgaacctcctgtagtcattttcaccggaggagctcctggtgcaatctgaaagttaaatcttcgaataagcattgcgattgctaccacattctcaaaggaagcaaacatgtcgcctatacata

SEQ ID NO: 186262 - DNA, 483 bp, Arabidopsis thaliana
  unsure (1)..(483): unsure at all n locations
acgcctgcagtgtccggtccggaattcccggcttgacccacgcgtccagctccgagaagacgacagaagggggagacagggcagcaaacaaagaagaagaagaagaagaagaagaagaagaagaagaggatgagttgcgttacaccagcacttcctccttcactctttgctaatgggtatcgtgacggctcctcggctgctttggggggaccaacnagaacaggncgggaaaggcaagagaaacccgccgctcataaatggcgcgcggggacagcctacgacggcacccgcgggggaggggggcgagaccaggaggcaccaccaactatccaattcaatggtaggaaaagccctaattccgatcacagagctcggtagaaaagagcttcagctcattggagctggcaggaccgatgcaggagttcccgcctggggtcaggagcccatcttggcactcctttagactttctagttgggatagct

SEQ ID NO: 186263 - DNA, 505 bp, Arabidopsis thaliana
  unsure (1)..(505): unsure at all n locations
cgccgcggagcnggganccacnagagcggctgaccgagggggggtaggccccgnnaaaagaaggaaaagcaccccnggaaaagggagacaacacccaccgcgaagacagagacanaccagggaccgcaacggaaaacttaacgagcgaacggaaaacccggcaaccgcggaaacaagaagggcgaaagggggcaatttctttcttcttcgagggtggggaccccncaaggcccccccaaaaacaaaaagggccccgccnagggggggagggggagcacaccccacaggcaaaacaaccacccaggaaggggccaacaagggggcggcccccagacgccgcccgaggcggaaagggaccccgccgaaagaaccaaacaccacgagcaacaaacgccacaccagagggaaaggccaccaaacccgccaagacacccacgggaaggcccaaccccaaagagcccgcagggaagaaacccgacgcaaacgggaaagcaaagcccagaaa

SEQ ID NO: 186264 - DNA, 394 bp, Arabidopsis thaliana
  unsure (1)..(394): unsure at all n locations
cgtacggaagctgggatcctctagagcggttccccagcggngttaaaccnngcnanaagacncccaagggcacaganngaggggaaacaaagaacggaaaggaaacgccgcaccacaaacncaggccagagatctctctagggcagggaaagggngcaaacccaaacaacacaaacnnaagccgcgaaagttttttgatnacggcgtgggccgccgagccagaagaangaaccgancgcacaaggcgcgaacagaggaagaacgcggaagccgcctctngacaagaancgncgagaacccaaaaaggccgagaagcncagcaagagggccgnncncagccaccacaccancggaaanaaccgccacacagccggcaggcnagaccggcggaaac

SEQ ID NO: 186265 - DNA, 506 bp, Arabidopsis thaliana
  unsure (1)..(506): unsure at all n locations
cgcctgcaggtaccggnccggaattcccggcctcgcccacgcggacaaacggctgcgagaagacgacagaaggggacgaagcaaaaacatccgaggaaaaaaccagaaaaggaaagagacgaaaaaggcggaccaacaagcaggaacaagcggcggaggagcgcgcgacacagaagcaaacgcaaaagaccgctccctggaggggggagcacgccgcgccagcaaggagcagaacaagaaccccaccccgacgcgggaggacaacacgccccccggggcgaaaacacagggggggggcaggaccaaggccccccccaaacgggcggaggggcgccgagggagacacccaaaaggcccgggaggccagcggccgcggaaaagccagggagaagccacagcgcggggagaagagacaccccaacgccgaacggggaagacaaggcccaaagncccccaggccgcccgaaagagcgccccgcggacgccccacacaccggaaaaaaaaa

SEQ ID NO: 186266 - DNA, 482 bp, Arabidopsis thaliana
  unsure (1)..(482): unsure at all n locations
cgcctgcagtgtccggtccggaattcccggttcgacccacgcggacgcccggcngcgagaagacgacagaaggggcccggaaaaaannncacaanccaaagagagggccccggagagaaaagncncacccccccaacagaacngaagaggggcaanngaaagccgnnngcacgaaacanccgcgcagctttctcctttaagggagaaggngagaccaaagaggaaaaagggcgcatagggcccaacaggaggatgaggatgggcccaagaacgcgccgaccggggaccccggagccgggaaaacaaaacacccgcccagacccacaaggaaagagggccgggcgggaacccaagcccaccatcgggggggaaagcgccaccagaaccctccagggggaaggaaagaccgcnaaggccccaaagagggacaccgcagggcaagagccggaaagacccaccacaagggccgaagacagaggagc

SEQ ID NO: 186267 - DNA, 487 bp, Arabidopsis thaliana
  unsure (1)..(487): unsure at all n locations
gcctgcatgtaccgggccggaattcccgctcgacccacgcgacaatcgattctctctatatcggagccgcatgagcatcgtcggagctcgatcgtactattgatcctctcaattttatctcccgtgactctctctatacgatacgagctactttctgggcacacgaaatgcatctcaaaataccgtgccttggcgcggggaccancggaaaagacagcattagaaacccncaccaggagcaggcggtggcggcggcccacaaaggcaccgggcaggggcacacgcgccacaagggacaggctgaacacgaaacgggacggaggaaaancgggacaacccgcgccgggaggcgggggaaacagggggacacacaaggcggcgccccggccgccaaccaaaaccagaacgacgccggacaccgaccacggaagggaggacagggacccaaaccaagaaggggggaaaggggcaaaaaagagacaaggca

SEQ ID NO: 186268 - DNA, 437 bp, Arabidopsis thaliana
  unsure (1)..(437): unsure at all n locations
gcggcggtccggccggatnccggttgccccgcggcaatccttgtctaggatgcactattgccggagacagagatcacccttttagatgggcgcagaacttttgcccacattttttttcggaaatctggctgagatctctagaagagaaatgagccgactactttttttttgagagggaaaggngcagaaggaagaagaagaaaanacccacaaggggagggggcagatacaagggagccgcagaaaagaggacaccccccaaacccggggaggaaggacccaaagcccaaaaaggcgcacgagaccagaaaggaggaagcaaacagggaggaccgaagggcacaagaccgcagggacgggggccgggcaaggaacaaagaagaagaaaaggaggggagaggggaacgaaaaaagaggcaccgggaaaaaccaagaaa

SEQ ID NO: 186269 - DNA, 491 bp, Arabidopsis thaliana
  unsure (1)..(491): unsure at all n locations
ccccccccccggggggggaggagacagacgaccgacgagggggggggggacacccacaacaaaggccggcggcccgagagggagagaagaagaggccgcggggcgccgcgccgggagaaaaaaagggaagacgcggaaaggaggaaccgcctccaaacaaaaggaaggattggagaccccccccagagaaagcnccccacaacaaaaaaaaaacccccccgggaggggggggggggggagggcccccccaaaaaaaaaaacgcgcgcgcggagacgagaggagagaagacagaccgacaaaacccacccgaaagagacgcagcggcgccgaaccggcgagagacggacgagccacaaaacgcgcgccacgccagcaacaaaccacagccccaacacaccccccagcaaaaaagacagagacacacaggcgggaaacgaaacagacgaagacggccgacgcgccagacacgaacagagagaccaacagaaaa

SEQ ID NO: 186270 - DNA, 482 bp, Arabidopsis thaliana
cgcgtacgtaagcttggatcctctagagcggtttgcctggttttttattcttttttttatttttattttttttttttttttttgttttttttaaaagctttcccacaagctgggatcagggatctaactaaatggtttccccaaaaattttactggaaaaaaacttaccctttaaatttctggaaaacgggttctttttgtacctggcacataacaaagcgaagggtttctaagagaaaaaccttacccccttctcaggacaagggacccacggtttttttttacagaaaagggatccaacaagggatcaatcaacatagggttaaaagctccaaagccctttactttttaattacaacctaaaagatgggtccctttttaggcccttggatcttatctccgcccattttccatggtggaaaaaaacaagcctttcaccctttgtgggggacctggccatccttggagatgtcttttttggg

SEQ ID NO: 186271 - DNA, 468 bp, Arabidopsis thaliana
  unsure (1)..(468): unsure at all n locations
cggaanccccgctcgacgaggggggaggcctntctagaacgaagcggccgacgagggggaacccacacgggcgaccaccgggcggccacgcggccgaaaaaagaaaggccgcgggagcacaaaacccccaaaagcgaacgaaacaaccgcacgggaacaaagaaacgggctgccagaagaagganaaannnacaaccgcggagaaaaagagaaaagcccccccgaggggggggggggagaaacacccaacaggaacccacggaagaaagaggggggcccaaaggccaccgacaaacaaaggagagcgcgcgaccagggaagagaggcccccgaccacccgggaagaacacggaacgcaacggggcaacgcgcgccaccgccggaaaggcgaaagcaccgaaaggggcgcggcggccgaggcccaaaacgcgcaaacgcggagcccaaccggggagaaacgagcggcaa

SEQ ID NO: 186272 - DNA, 504 bp, Arabidopsis thaliana
  unsure (1)..(504): unsure at all n locations
cgccggcaggtaccgggccggaatttccttgttgacccaggggggcgagccgctttctgccacgcgtncgggaaaaaaaggaaaacccaaaccactattttattgtgtgggtagctagagagagaatgggtgtgttgaaagactgtatgtgattgtggggaaaagattgcaagggtgtggacgggaaaatttctcctttggggggggagannnannnnnggagaaaagaaaaaaaaaaagggggcccgccctgagggaacgaaggttacagaacggggcgcggggaagggacaggcgcggatatggggggacgggaaaggaaagggaggggcggcggaggaaaaaaaggggggagggggaggaaccccgggggggcgcaacagaaagcgaggcggggaggaagagccggagtgtcgagtagtgggggatggacaagagggagcgggacggagtggtggtcagcgacaaagagaggagagtggggtcggaaaaggggcgccgggc

SEQ ID NO: 186273 - DNA, 456 bp, Arabidopsis thaliana
  unsure (1)..(456): unsure at all n locations
acgcggcgtaagcgggggacctntagagcggtcgcccggagggttaaaacccatnaatataaggggtggggaaaagaagggggttttttttatgttgaatacaaggcgtatcatcccccactgaacgaagcagagtcaaaatggggccggttgctggtataagaaaaccagagaggggcccattttaaaaattttttttttgggggggtgggggaaaaccccccggggcctcattaacccttgaaattggaccccaagaagggggcggaaaacgcaatggagaaaaggagacggcccgcgggcgaggaatggggtacacacgagcgagcatggccaacagagaaaataagtaaaaagatctgagggggggaggaaacagagagatatttctaaagcggtctagggggtgggggaagttatcgcttaaagatcggacagagaagctgggtggaaaaa

SEQ ID NO: 186274 - DNA, 488 bp, Arabidopsis thaliana
  unsure (1)..(488): unsure at all n locations
cgccagcaggttccggnccggaattcccgggttgacccacgcggccgagtcaagctgatttagccatggctatggcgggggctattatccaatcttctccgctctccttcaatagcaacaacgcaaagccacggattcatagttcaggatcgctcggcggaatcaaaagccaaaatagaggctctgcattgtttttttggggggggaagcccaggccgaggaaggagaaggaaagccctttcgatatggcactcagccagtaacgcgaaatgcagtgaaggacaaacacagaccggtactcgggagtcaccgactttaacacagggctgctggtccctctaaggaaaaatcaccaagcctagacaaaggaggagacggtttcccaccgggagaagatggacatggggggggaggagaagggggtgacctacttgagtcaagatagcagtttcgaggacgcagtgagagaagtcgaaagagcgagaagt

SEQ ID NO: 186275 - DNA, 414 bp, Arabidopsis thaliana
gatgtaaaacgacccgcgcggggggcgcgccgggcgctcacccaaaacgtggagcgaactcaccgcgaaggtttttccaagacccccgcacctcagaggccaacgcggcccccggaggaaaattcctccttgggggggggagcagcaacagggacaatcttaaaacaaaccccacaaccccagggacgggggcacgccccctttagcggggggaattctcgagcgcaataccgggttgtcaggtactaggcgcggcctaccaccccctcgcttcactcagccgcggcagcccgatggactcgcgggcaggcgaacgcgcgatcgaagtccgcccgccgtcagccttccacctacaaccagggagctcggatcctgcgactaccacgcgagcggccccgcgactcgccccgatcc

SEQ ID NO: 186276 - DNA, 523 bp, Arabidopsis thaliana
  unsure (1)..(523): unsure at all n locations
cacgcgtgacgtaaagcttgggatcccatctagagccctttcgacgcgtggcgggtaaaattccanttttttatgtttttattgttttctcgagcgaaatgggggtgccctcgaaagaaatagactttcaataatggcaagccactacatttattggagcagaggagtgatattaattttcctgcgttgcgtggggaagaaaaagtgtaaacaccacaaatagagatgctcgtggttagactctcttcnctaagaaggcgagaggcggngnnnagaaaaagagnngnnaaccacaccaaaaaacaaccccgcaaatnagagaatataagaaggacgagagcacgacaagaacccttggcggacggggtttaccaccctggtaaaaaaattggcgagaaaaaaaaaactccgggggaggtttaaagggtaaccccaagcattggattgaaagccttgcccttggggaaaaccttcttcctaaggggtctctgaaacgtgaacctggaaaagagcttttaatttt

SEQ ID NO: 186277 - DNA, 486 bp, Arabidopsis thaliana
  unsure (1)..(486): unsure at all n locations
cgcggcgtgagctgggacctntagaccctcnggggggggttaaacctttaataaaaaatttatgtattgaggggggaatttaaaggatggggattaggttgatagattggaaaggttaaggtgttagtgaaaaagaaatttttttaaaaaaaaaagaattatgataaaaaaaatgggnaaagttttttttttggggggggaaagagnaaaaannnagagggnaancgaaagggagcccaaggaaaggcgagagagggcaccggggggaaacccggggaggaaacaaagcgggcacggagaacacaaaagcgcgtgaagagagagaaacgccgcgagggggggcgaggggagcgggaacggccccaaacccgcgcggaggaggggaagcaaggacaggagcgggggccggggcgggggggaggagaccgaaaagcggggaggggcggggagggggggggggcccagcgcgcggggaaaaacccgggg

SEQ ID NO: 186278 - DNA, 485 bp, Arabidopsis thaliana
  unsure (1)..(485): unsure at all n locations
acgcgtacgtaagctgggatcctatagagcggcttcccgggggtgtaaaatcagacaaactaacaaatattataattttgaagatggaagatatatattttacagtacaacaaatggggaggagaacaggaagaacattgaatgatcgtgtgttagtaggaaaatagcctaaacaaaaacttaggccctcaacgttttttttcggggggaggagcnnngggggaggggagcaggggacaaaggggggcacgcgggggggggagcgaggaagaaggaacagaagggggacngcccgggggaagagccggaggaaacgccgccaaaaaaaagggcagcgggagagggggaaagaagcgggggggagcgaaagaaaaagggggcacggcgcgggtgggcggggaaagggggaaacagaagaggacaggggccgagaagagaaaagaaaaaagggccggggaggggaagcggagaaaacacgaaaggaa

SEQ ID NO: 186279 - DNA, 539 bp, Arabidopsis thaliana
  unsure (1)..(539): unsure at all n locations
gcgggcgtaagcggggatcccctagagcggcttgaccggggggggaaaacccccatnnaannggaaaggatagagaccaggcacccgacagngggagggggaagagggccctagacaccagggccccacggagacggattttaaccgagcaaacgccgggggaagcaaaaggaacggacccggacgggccagcgcgcgtttttttttgggggggggagacccacgnnccacagagagcaaacgtcgaccccgcgcccgccaagcggaacaccgggngggggccaccccacaacggacccccaaacgaacaccggaggacaacccgggccagcggacggcgcggccaagcggacgaaaggcgaaacgaaaggcgcggggcggcgaaaccgaggagaggagagcgccccggggacccgcgccggggacgcggaaaacgggggaggggaacgacgacgggaagcacggcgggaggaggcccgccaaggggcggcaggccccgccccggaggcggagacacagccgcccgcagcgcgagggcg

SEQ ID NO: 186280 - DNA, 552 bp, Arabidopsis thaliana
acgcgtgcgtaagctgggatcctctagagcggtcgaccggggggttaaatccttaaaacaagaaaaaaattacttaagggagggacatacatacatcttcaatttgatggtatatacggaataaaccatatactttgtaaaaatcaattgttataaaatgtgaaaacaggttgaaaaagaaaagacccaaaaaaccagatttttttttgcggggggggaaacagagaagcaaagggccggtcaagcgaggggaaccaacaggaagaaggcaagacgatcgccggggcagaaaaaagagaagggggggggaaaaaggaagaccaggggcccaggcggaggaggggggggacaggggggaccccgccaacaagagccaaaagggggggggcgggggaacagggcaggggggaagacgaccggcacgagggagagccggcggggggaaaaagacaccgcgggggaaagggcggggggacgaaaagaagcgggcgccggggaggcggagaaaaaaaaagaagggccagagaggcagagggggtgggaagggagaac

SEQ ID NO: 186281 - DNA, 440 bp, Arabidopsis thaliana
cgcgtacgtgagcttggatcctctagagcgtttcgccgcgcggtaattcctttttttttattttttttttcttttccggggtttcttttattctttttcttttttttgccaaggaaaggggacactcaaaatttaaaggggcttgctcgggggacccaaaaaaaaaatgcccccgccaaaaaaagggtttccctccttagggggggaaaaacaaatcttttgattttcctcccccgaggtgtgttttattttggggaaggggtttaatccaaactattccttttggcgactcacatggggcgggggaagggggctaaacccctatgcccaaaaataggatgggggcgtccgggcacatgctaacccaccccactatcttggatttcaaccccggcccggggggggttttttgggggggaggagaattcaggacccccttt

SEQ ID NO: 186282 - DNA, 494 bp, Arabidopsis thaliana
cacgcgtgcgtgagcttggatcctctagagcgttcgcccgttgggttaaccctttttttttttttttttttttttttttttgttttttttttttttttataaaaaaaacattcgggtgggtattatcgggtctaaggggataccccctgggggaaaaagaattgcccctgttttttgtttttttccccaaaaacactcctcctttgggggggaaaaaagggaaaggggaaaacctggtgtattgggggccattttggggggaattccccccccaatggtgaaaaaacccggtggctaaaaaaaaaccgggcccaaccttttggggttgggtataaaacatagggggggtgggggttcccttaaaagctcacaacaaaacttttcttaaaaacttgggggttagtttcttttgggaaatcttgtttggtccctaaaaaggggcgggggaaaaaattctcgggtgggggtctcacaccccaattttgattcttcct

SEQ ID NO: 186283 - DNA, 484 bp, Arabidopsis thaliana
  unsure (1)..(484): unsure at all n locations
cacgcgtgcgtaagctgggatcctctagagcctccgaccttggggttanccccttttttttttttttttttttttggagtgaggcttgttttttctcgccaccggaaaatgacgttgtaataccgaaaaagagacgtcttagaagagcgaactcaccgtttatccagggcgaaatcaaaaaaaaggggggaagttccttctttgggggggagggggacagggacccaatctgagccaagggggccccccgagggcgaaggggggggnccacccggcggcacggacggggggaaagaacagaagacccccaaagcggccaaaggcgcccagggtccggggcggaacccaacgtgaagagcgaacggggggaaacagagaaaagccccaggacgaggagcagggccgccccccattctcaagtgcgtttgggggggggttccgcgcagcggaacgaggaagagcacgctgcccccccctctgcgat

SEQ ID NO: 186284 - DNA, 524 bp, Arabidopsis thaliana
  unsure (1)..(524): unsure at all n locations
gcctgnggtgccggngcggaatncttttttgaccacgggcgcaaggccgcnaaggcttcagcgcgggcggacgcggggggagcctacagcgagaagcgagaaagaggcaaaaagcgcaggggagcccgaaggcagccgggggaccggcggggagaggaacgagggtgagcgggaaaggacgcggaggaaattccctccttaaagggggggaaaaaaagacaagcgcgggcgacgacgcaaagaaagaacccgcggggagggggggggagggagaaacgccgggggtggggggggtgggaaaaaaacacagtgcagggggtgggcgtcaacgagagccggatgcggaggagccaggagggacaagggcgaggaaggccgtgagacggatgcgatgataggcaaagtagagcggggaggagaacgagcgtgcggtcggcgagggaggagaaaaggagaaagagagggggagaagacgaagagggcgggggcgagccgagggggggcgctggcgccaaagagaagga

SEQ ID NO: 186285 - DNA, 526 bp, Arabidopsis thaliana
acgccggcgtgagctgggatcctctagagcggctcgcccgggcggttaaaccccttctttttggttgaatatgagattacttggagcgcgggcctcagcacgtcggctattacggtggcgccgttgcggcggcgcgggagaagagaaaaagaaaaaccgccgcgtcacatgcgttgtgacaacggggggggggggaaacggtgaaaaaccggccgataatccctccttggggggggggacacgcccaaaaaaaaaaaaaaaacgaaaggcccccgcgcgaggggcggggactcgccccccggggtgagggaaaaacaaacccgccccccgggaaaggggccggggcctgagggcccggacccccccggggggggagccctccgcccgagaggagaaaagccccgggggaacagacccgccccgcccccggctaaaaaaacccccccggggccgcccaaacggggggtgggggaccccccgcggcgccccccgcggggaggggggcggggccccggggcgctgggcc

SEQ ID NO: 186286 - DNA, 495 bp, Arabidopsis thaliana
ccgccggcgtgagctgggatcctctagagcgctccgccgcggggtaaatcctttgagggaaaaactgcacaataaaaggggggaatcgaggaaaaacaaaatcaattccggaccaacaacaatggtcgggtccgaaactcgagaaaagggtgcacttcaaatctgtgattgataaacaagaaagagagagagctcctcttcaggaggggggaagacgcaagagccttgggcataccacacagatccaagaagaggcggctggaacagacactggggtgggccaaacaaacctatcacgacggtgttgggggcggggggaaaaaaaccgcgtcttggccccgccggggggggaatagccgcgcccctttgggccctccttcccaatcctctaaaagggagccttggcgccctgaggacggcgggagccggttcttgcccctggggggagagacagcgggggggggggggccaccccaggggaagcccagacacaca

SEQ ID NO: 186287 - DNA, 445 bp, Arabidopsis thaliana
  unsure (1)..(445): unsure at all n locations
cgcggcgtagcngggancnnagagcggctgccggggggaaaaccccnnnngagggagaaaaacgggaggggcancaaaacaagaagagaaaaacgggggggaaaaaccaaagcacgacagtaaaccaaaaaaagcacggcggagacgagggcagaagcccacaaaagattttttttgggggggggaacaaagaagacacaaagcaaaggggcagccaccgccaggaaggggacacgcgggacagcacccaaagacacacaggggggggggggaagaaacagaggaaggggacagaaagacgggagggaccggacgaaccgcggcgggggaggaaaaacggggggaaaaaagcaccgngagaaagccggggggcaaacgcccagaaggcaacagaggagggggcaagccgaggggggaggggcggcaaaaaccggggaaggcggag

SEQ ID NO: 186288 - DNA, 477 bp, Arabidopsis thaliana
  unsure (1)..(477): unsure at all n locations
gcggcgtaagctgggatcctntagagcggttgangggggggggaaatcccccntnnnttttttggaaacactaggaaggggtataaatacaaaggagtgtcggagttttacaacattaggagagaaagagaacaactgttgaaacatttttgagaaacatgggtacagatggcgcgaacaacatgaagatgaactttttttttgggggggggggggacaaaagaagagcagccccgggaaaaaagccggcgagagggggggcgcaagaggaaagggggggacagcgcgctggaaaggttaaaaggggggaggagcggggaatagggggaaaaagggggggggcaagagggagatggactaaagcgtgaagagcgaatgtgggaaatcgcggttccgtgtggttttttggcggggggggaagaagggagacgagaggggacagggagagaggatatgaagggggggggggggtgagaa

SEQ ID NO: 186289 - DNA, 512 bp, Arabidopsis thaliana
cgcgtacgtaagctaggatcctctagagcggtcgccggggggtaaaacctttttttttataaaaaaggctacttctcaaggctaaacaatcataactcggactggacttgaacaaagaaaaaacgtggtcttgttggctttgaactactgagggaatagggtggaggaagaaggaccaaacataaacgcccccctcctaggagaggaaacaacaatccaaaacccaaaaagacaaaagcaaccgccgaagaagcgagcccctttccaacactttgggttttcctgaaagaggaacctcaaagaagaaaaaaaaacgggaaagacgaaaccaatcgcaagaaagaacaccacaaaagggcggatccaggggccccccggaccggacgcgcaatcgggtttccccggcactggggggcaaaaccctactcttccctccgcggaggcggaggaaaaaagaaaaaaccaaccggacggacccgcgccccgagaaacgctaactaaagaaaacaaag

SEQ ID NO: 186290 - DNA, 490 bp, Arabidopsis thaliana
acgcgtacgtaagcttggatcctctagagcggtcgctcggtgggttaaatctctttttttttttttgggaaacactacaagggttttatatttaaagaatgtttgtgttttgcgacattcgacgataaagagaaccgcgcttatacctctatagtagcatgaggacacatgcgctaacaattaaaaaatccactcctcctttgaagtggaggggaacacaaaaacagcgcctcccaaaaaaagtccaccaagagggaccgcccaacttgccagagaggaaacttctcactttgtcaaaaaacactggttagacactgtgtcttattggtaatgggacggaatccttctgctttggcatcatactggaggggcccttgatagccccgcattctttgccctttttaccagaggtgtctaaggcgttttttaaattgatgccggggtttttccaaaggggggggccggctccatcttgtggagcccattgggg

SEQ ID NO: 186291 - DNA, 418 bp, Arabidopsis thaliana
  unsure (1)..(418): unsure at all n locations
agaagaaaggggagaggaggaggagagagtagagganaaaaagaggaggggnaggggggggggttttaaaagaagagatatttaatttggtgatgggttgagaaagttaaaaggaaaattccctcatttggggggggggggacanagaaagggggggggatggtaatattcctcacgagtttgttggggggggggggacctttctttttgggcctgggcattgcgtgtgaggcgagggttgggggaggggaccgatcctttgtcttggacaaatttggacatggggaactgtcggggagcccaaaggaaaatgggggtgtggaccgggctatcaaaaatcatgcggtgcgacggcgccttgggcttaaagggccattgttgggggggggggtggggtaattcgtgtgggagagggctg

SEQ ID NO: 186292 - DNA, 487 bp, Arabidopsis thaliana
cgcgtacgtaagcttggatcctctagagcgcttcggcggggggttaattcttttttttttttataggcagatatgatgattctcttattaaccaaggtgttgacaaatacatggacaagggattgtttattaaggtaatacacaaaatctacatgaatgaataatattctcaaaacattcatagagcaaacttctgtttagagggggcgaacaacaaacaagggaaaataagaaaatgctcgagcgacttagacacgcacgcttctttaaaccaaactttccacttgggattctactgaaaaacccaggatcaagcttcttgtaaagactatgaaacttcatgaacatagaatccataaaaccctccactttcggtttgtattttttaaacaaaaccgggtttgggggggccccacaaacccgatatacaaaacaggggggaaattggaacagctcccgaccatggaagttccccttaatcccatta

SEQ ID NO: 186293 - DNA, 504 bp, Arabidopsis thaliana
cacgcgtacgtaagcttaggatgcctactagagcgctcgcgcggggcggggtaaaatcgttttttttttttttgagggcacccatctagaagtgcaaacaatagaagggttgtaatagtgaaagcaagattggggtgaacaacatcatctcaaaaagcattcatcgaaacatgatttctcgggccctgactacccaaggacttccctccttaagggggtcggagccaaaacaataggagtgcccacaaaaagaaccccctgcgggaggaatcgccgaaaaagctactccccaaattgccaattcggggacttctcccttggagaggcaaccacttgttggagaaaatagggagggtttggaaatagggctggctccatcctcggaagcgtccttgttgacaccggactcgtgaacccctgttcccggggcgttagcggcggagggtaagtccccggcgccaaaagtcacgatgggcgtgatcgccgaggggttgtcggacccaa

SEQ ID NO: 186294 - DNA, 491 bp, Arabidopsis thaliana
  unsure (1)..(491): unsure at all n locations
acgcgngcgtgaggggggatgctntagaggggttggngggggggggaaataccgcggtngnggggggaaaaaaggaagaaaagggggggtgcatttgaaacaaaatcgcatggggaggcgattgagaataagaagaaaccttttgttgaattgtgtagcaagggttgttaggttcatagggaagggaaagaaggtttttttttcggggggggagacnaaacgagaggggagaggaaagagagagaggagcgcgaaggaggagggcgcgacacgcgggcgggaaggaacagtgggggggaaagaggcggaacgagcggaggcgaaagggaggggccggaaccagcgggaagagagagccgcgcgggggccgggaaggggaggggggaggcccagggacgaaaggcgaaggagaacgggccccgggaagcgcgccgcgagccaggaggaagggggagggggggaggggcgcgcggggggagaggggggggagg

SEQ ID NO: 186295 - DNA, 530 bp, Arabidopsis thaliana
  unsure (1)..(530): unsure at all n locations
cgcgtacgtgagctgggatcctctagagcgtttgcccgggggggaaaacccctcttttgggtgttacttaaaattaaatatgtctacaatagtttgtggggggcattatttggtggctaatggaccttttttaacaccttgcccaacaatcccgccttacacgggaggggaacctccgaatttacaccgggaaaacacctttttcttgtggagggggggccacgcgccacacccacgcggcgggggcaccaaccncttacggtattccggggggaacgtcgaaaccgccgattgaaggccgacggtcccagggaatacctcccgggggaccaggggccacgtagcggaggcttgataggcaaggggcggacgactggctgtttgtcacctccactcgcgggggggggaggccacacgcgggaaacatttgcttcagggcggggtttgcgccacccggcgcgcacagccggggaaccggtgacggagccagattgccgcggtgtgggcagattggaagcggccgcccgcga

SEQ ID NO: 186296 - DNA, 437 bp, Arabidopsis thaliana
accctgcagtccggccggaattctggttgaccacgcgtcgccaccgtcgtcggtggaaagacaagaagggggtctaggggttcttaaaaaaaagaacgaaactgagaatatcttggcaggagataagctgctgctaatcttctccctagaaaaattttttaatgagggctcactgtgaagacaacgtttaaattttcttgtcgagaacgaatatgtacagagccagggaaaaacaattgttctttgacttgggggggggggaaactagcgtatcggaagatagagataaagtgtttgcattacaataagctcggttggaaatagccttagaagaaatgctgcggctagatacccaccgcgaagtggaggtaagaagaaaggtccacctgcttaataactcctagaagctttgtgttgggaaaatgttcagcatagta

SEQ ID NO: 186297 - DNA, 509 bp, Arabidopsis thaliana
acgcgtacgtaagctaggatcctctagagcgtttgctgggggggtaaatcctttttttttttttaaacagaaggatggattattcatcaatgaaaatacatttaggggaagatccgaaaggacacaactacaatgcattttttcacttatatggggttaaacacctgaaattttaaacaacggggctggggttttttttaggggggggagaaaaaaagcgggacgggagaagaaaaaaagggcaaggggaaagaaaccaaagcccgggcggaaaaagagagggacaagggaccggaaaaaaaaaagggctgtgagctggaaaaaaggcagtagatggcggttaaccgaggtggaggtatttttacgaaggggagcggaaaaaaaaagatggatgatttagaaaagttggtggttcgagaggaaagtgtgtataaacattagagggggttgtgtagggagtgaaataagtaatttacaaatgttactgacgggtaagaattattttgttg

SEQ ID NO: 186298 - DNA, 546 bp, Arabidopsis thaliana
  unsure (1)..(546): unsure at all n locations
aatgtgagggggttgggggggggttcctttaggttacccgctggggggctgtgagcnagaaacgcacgcgngcgtgagcngggatcctntagagcgttcnggggggggggaaaaccccgntttgggangaggacaaaacgaaggggggggaaatgtatctaggggggggaaactttttttttaaagagtctaatacagaattttaaaaggggaaatacactgggtgtttgtttccttaagcgaggggggaacaaagctctctttggggggggggggaaangacagggacaaacagggaaaaaaaagcccagaagaaagggggggagggaaaaaacaaaaaggggacgcgggccaggggaaaaggggcgcccgggggaggcggaggaggggaggaagaaagggggggccccgacccacagccggagggggggggggccggcacgagcgggggggggggggggcaagaaggaggagcacgaggaccaaaagcgagggaaaggggagagagggcggaggacacgaaagaaagggaagggcggggggggg

SEQ ID NO: 186299 - DNA, 207 bp, Arabidopsis thaliana
  unsure (1)..(207): unsure at all n locations
acgcgtcgtaagcnaggatcctctagagcgctttcgggggggggctaatcccctgnnananganaagggggaaggacaagaaatgagaacagggggaaaggaaggacanaggaatttaaaaataagaagcgccntaattatgaaatacccaaatagttttacagaatcactaggcttgggttgagaccagatttttttctaaagggg

SEQ ID NO: 186300 - DNA, 521 bp, Arabidopsis thaliana
  unsure (1)..(521): unsure at all n locations
ccgcgnacgtaagcgaggaaccactagagcggtttcccgggggggaaaaacccctnnaanaagggaggaagggagaacaagggaacgacacgcggggaaacgggaacggaaaagaagggggacaaaaccaggaacggtttaactataaaaagaaaggaaaaggaaatctgaaccggggcggggcaatcactatttctttttaagggacaaaaacaaccccccggcggccaggagcaaaagcacccccaaacggcggccacacgtggggacaaaaaaagaggagaagccgcaaaaaaccgacgagccaccagggggccgcangcgagtagggggccgaaggaccccggaacgcgggacggaaacaccagcgcgaaaagagcaagaaccccaccgaggaaaacaaaggacccgaccacacaaaggcgcgcggggggcacncgcggaaaacaacgggggcgcccaccgtcgtagggcgaaaaaggacgcgggagaaacgcgggaggccgaaaaaagaccaggca

SEQ ID NO: 186301 - DNA, 507 bp, Arabidopsis thaliana
cgcgtacgtaagcttggatcctctagagcggctcgtcggggggtttaaacccctttttttattattatctattggggctggggtttgtgaaaaaaacaaaaattttctttccatcccgggttaaagaagattccaaaccctgactttcaaagggtaaaaaaaagaatacggcaccaaccggaaccaaaagggctcctcccttagggggggaaaaaaatgggtgtgggggtcaaaaaaagccggccacaaatttgggtgtccacgggaggcccttaaggtgaaacccccccccggggggggcaccccaaatgaactccccagaaaaaccaagaaacgaaccttttgccataaacccgcagcacaagcgggtcgaagcctgacggggggcggtataagggccctgggaatatacccgccgccagggggttgtggggcgaggcggacccataaacaccacagaaataaccacccgcccggggaacccacggggaggatggggggcccctt

SEQ ID NO: 186302 - DNA, 502 bp, Arabidopsis thaliana
  unsure (1)..(502): unsure at all n locations
cacgcgtacgtaagctgggatccactagagcgctcgcaggagggggaaaaaccccnnagaagangggaaggacaccacaacaaagggcaggggggaagggaaagnaanagaaagcacaacagacgcaccggaggagaagcaccangaaacaagaagagagaggagagggaccaaaaaaagaacgagggaaaaaagagccacagaagggaggaggnaagaccccaccnggaggcacccaaaaccgccccgggcggaccgggggagaacccagccgcctggaggagaggccccaaacacggacacaaaagaaagggggggacacaggacgacacaacaacaggagaccgggggacaacacaagccgcaaaggcccggaggggngaaaccaggaaaagaaacgaagcgcgccgaggagcccaaggagaagcaacgaaaaaggagacgcacccccaaaggcagagaaaaacgacggcgaggggggaaaaacgacaacaaacggaga

SEQ ID NO: 186303 - DNA, 489 bp, Arabidopsis thaliana
  unsure (1)..(489): unsure at all n locations
cgcgtgcgtaagctgggatcctctagagcgcctcgggggggggggaaaaaccccntttnagnngnnggcaaaaaaccatggggcaccaaaaatggggggattgcttccaaaaagggcaaagctacaaaacaattacgttttcacataaggtggggttaccatagggagcgcaccaggagtcatggaaagaactcgcttcgtgagggggcaaagaaaccaagggggggccctaacaacgaacccccgccgggggaggcgggggggcaaccccaccactggaggacaagcnccacaaaccccaagaccccggaccaccccgaacaccggggcaggaaccggaccgaccagccccaacgcaaccgaaggcggcggcgcggggaaaccccaggaccgcngagggggcgcccgcgacaacagcgaagaacacaaaggccgggcggaggaacaaaacgccaaagccgaacgggaggacccaaaccggggagccgg

SEQ ID NO: 186304 - DNA, 480 bp, Arabidopsis thaliana
  unsure (1)..(480): unsure at all n locations
acgcggcgtaagcngggacccactagagcgcctcgccgggggggaaaaccccntgaaagaagangacgggaaacccagagaaaacactggagaaaaccggaaaaagaaccaaccaacaccgacggacgggggccccccaccgggggcagaacccaaccacaagacagcgaacacgcggggggaaagaacctgctccaaaagggggggcaaacaaaacaccaggcgccaaaaaaaaacacccccaaccagggcccaaaaggggggccccacaccccgacaagaaacagggaaaccacggaaaacggcccgaaccgaaaaaaaaaacgcgcccaagcggggggacgcccccaacccccagaaaagcgcaaagaagaaggaaacaccccaccgcgacacccccagcgggaagagggagagaagggaaacaggacaagacacgcgaaaaagaaaaccggcagagaggaaaagagggccgcgccc

SEQ ID NO: 186305 - DNA, 569 bp, Arabidopsis thaliana
acgcgtgcgtaagcttggatcctctagagcggttgccctggggggtttattcccctttgaagaatgtgttctaggctagagaaagatgatattcaaaaaaaggacgttttttctaccgggggaagaggccggacaacccacatataggttcgggacaggagctttggtcgcagggaaggacggcctgaaaaacaaaacaaaatttttttttttagggggggggaaaccccaaccaaagaggaaaggcggcgacaaaagaacgctccaaacgagtggggagatgtgggcgccacccggtgctaggcgacaacagaagtggaaggtgaagcttttaggagggggggtatgatgccgttaagaagagagtctaggggcggaaataggggggagagtgtgctttgtgtcaaatgatgtggggggtcgcgcggagaagggtgtgtgggcgggtgcggtgtctaggctaacattgttacagaaggagggagtgcgaggggtgatctgaacgtggagagtggtgtctcttgtgtgcgagtgaagactgcacagatgttcgcttctatgtgagtggt

SEQ ID NO: 186306 - DNA, 434 bp, Arabidopsis thaliana
  unsure (1)..(434): unsure at all n locations
acgcgtacgtaagcttggatcctctagagcggttgaccgggggggnaaaacccccagagaanaaaanaaaaggaangagagggggaaaccanaggacaccaacgcgaaagaaggaaaccaacccccccaaacaacgcacgggccaaaagagaaggccccaaaccccgcaaagaagcgagggaaaccaaaaaacatttttttaggagagaaaaaaaaaagcccgcgggggcccccccacacacggccaaagggaaaaacaccgcagcgagcccccgcgaaacaaaagaaaccgggggggccccaaacccggaaagcggccggcagaaaaaacccaaaaacacgccgcgcccgcgccgacgaggcccccgaagcgcaagaacccacaaaccgcagagaggcggggcggccaaggaacggagaacaccaccgccccc

SEQ ID NO: 186307 - DNA, 509 bp, Arabidopsis thaliana
  unsure (1)..(509): unsure at all n locations
cacgcgtacgtaagctaggatcctctagagcgctcgcccgttgcgtaaaacctttttttttttttttttttttcttctaggggtctctaagaagcaaaaactctctgggttctcttgggtacaaaaaaacactttccccagttaaagaggaaaaaaaaaaacatcgcctaggattccggagggaaaaaaaaaaaacacacctcccacagggggactnanaacaaacccttcaaagttggaccggaccatcaccaccgacgggggccggggggaacaaccaaaagacctcctcacccggaaacttccccccaagatttggcaccaccgggacgaagcccaccccccaagaaaaaaccgtgccgggccttggaaaaaacccggaaggggccccaaaccccccccccaagaaaaagggctgtgatgtctaccggccctcaggggcaagaacccctgggaaaacctaggccccgtccccggggagaacccctggggcaacaacggccgcggga

SEQ ID NO: 186308 - DNA, 423 bp, Arabidopsis thaliana
  unsure (1)..(423): unsure at all n locations
acgcgtgcgtaagctgggatcctatagagcggttgccctggggggtttaacccttgactgtaagaaagtttcattaatggaatggagcaccttntattacctttactattcaataaatatgtagcaagaaaacaaatttgtatccaagttggtgggagaaacaactttcgggggaggctgtaagaagaaagacacttttttttttcggggggggaaaccccaaggagggagaggggaacaaaaaagaccaagccgcccgggacagggggggggaagagcccacggggaaaaaacgcccccggcagggggggcgccaaacgcgggaaggagggaggcaaaagagcgacgcgggcaagaggaaaaggggcccagaggagcaagaggaacagggcgaaggaaacgagaaagccgagaaaagggggg

SEQ ID NO: 186309 - DNA, 494 bp, Arabidopsis thaliana
gggggggggagatgcgtgtttgagggagatgcagttgggggtaaggggaagattttttggaggttggagattagagtagcttatggggggagcttgagggcgggttgaggtggaacataggtgcgttgaggtgggaagggggctcggagaaaaaggaggggaggtttcctgcttggggggggggaaaaggaggaaagggccggggcgaaaaaaaaaggggggggcggggggggggggggggacacccacagcggcgacggggggggggagaacaagcggaccggctagaggggaggccgaaaggggggagagggagggggggtggagggggatagacggaggacgcggaaggcggggcggtggaggagaggagagaaggaggcggagggggggggtgagcgtggggtgggggtatacggtaggtggggtgacggggggtgagggggtgtgtcatggggcatgagattgtggagtagtggctgtcgtgtgtggga

SEQ ID NO: 186310 - DNA, 542 bp, Arabidopsis thaliana
  unsure (1)..(542): unsure at all n locations
gcgcacgaagctaggatcctctagagcgctcgcccgggggggattaatcctttttttgttttatttccccctgatcaagggggaatttttatagaagaggctttttacgtctcccccgcatgatggccgtgagagacttttgagaaaaaagaaacagcgcgccttttctacgtgggcggccgggaaaaaaaaaaaaactcagcttcctggggggtgggggaaaaaaagaggggaggggnaggagaaaaaagaaaacccccgggagggggggggggggggggaccacacccccgcgaggacacccgggcggggaagaacaacggacggggggggccgagaacacccacaaaaaacaaagcgcgcgccgcgcgcagagaagcaggcgcgccgcgcagaagccgcgcacacaacccgcccccacgggccgggggcggggcgcgcggccaaccgcacaaaaaacacacgccccgacgagaccgcgggggaggccccccaaacggggacacaaaaaccgcccgcccccgcgagaggagacccacgca

SEQ ID NO: 186311 - DNA, 501 bp, Arabidopsis thaliana
  unsure (1)..(501): unsure at all n locations
acgcggcggaagctgggatccactagagcgcgtcgcgggagggaaaatccccncgaaggnggnagggcgncgnggaccgggggaaanaccgaaggcaggaaaaaaacagaggcccccccaaaccgaaaaaaaacagacatccacacaaaaaccgggggggcacaaagggccaaaacgaaaggggggggaaaccgcttccggagggaggaggggggaaggaaaaanccccacaaagaaaaaacgccaaaaaagggggagggaagggggcacaccggggaacgggaacaaggaaaaaagagcgcccacaacagaggggaaaagggagaaaggagacccccgcgacgagaaaaaaagggggcaccaggcccaaacccccccgaaaacagacggggggggagaccggggagaagaaacgggggggggagaaaaaagccgcgaagagggcaagaaagcagaaaacaaagggagaaggagaaagcaacacccggggaacaagaaccg

SEQ ID NO: 186312 - DNA, 446 bp, Arabidopsis thaliana
  unsure (1)..(446): unsure at all n locations
aagctgggatccactagagcgtccgccccgtcggaaggcggttacgaaaaaaaaaccataaaaaccaaggggggacacagaagccacacgcgccgactgggatataggggagggacaccacggagccgcacacaaaacgggcaaaaggcgcctatgagaggcagaaaaagaaggcggacaaacaccaaatccctcctcaacggggggggcaagacgagagcaagggaanccaagaaacacagcccaccaagggggggagggagcgacaccccggggggagcgccggacgaacccccccggcgggcgaagccgnggcgagggaagcaaagaaacgaccccggaccgaggcncgcgggaaaacaaccgggggcccccgcccgcgggggaaagggaaaccccagggcgggcncccccgcacccccagcgaccccaaggggcaaccccaa

SEQ ID NO: 186313 - DNA, 534 bp, Arabidopsis thaliana
  unsure (1)..(534): unsure at all n locations
aaaaaaaaaaacgcccccccnanacagggggcggcnaggaagcgcgcgacacacaacaccgcgccacgagcggcgcccacgcacagaccaaaaaacagcctctcggagaaagggacaaaggagggagccccccaccccgcacccccagcgcaccagacacaccaccaacatttcnnttaaacaaggcaagttggggcgacccccccccggcgggggtccgcgccgaaaaaaaacgccccccccacaaaagggggcggggggggcccacccccccccacacaccaccgacagccgaggccggcgccccgccaccaccccagcaccgagacgggaaagaacagaccgccacagacccccagcacaaagccgccccggcagaccacaaacacaccacaacagcgagaccaccaacnacgcangacgacaagggaagggaaagacgccgcagcgacacacccacacagccacagccaccaaaacacgccacataaagaacacagaacaacacagacgaaacacgccccgagaacaaaa

SEQ ID NO: 186314 - DNA, 481 bp, Arabidopsis thaliana
cgccgggaccgggcccgaattccccggtctatccacgggggcggagaatctttttcttctgggtccttggtcctccaggcccgatcttttttccaaaaacccttttgaattctttttttgccaccaaccttccgcaatcctcgattttcaattccgtggctgtttttttccttcacttaccgagggcaagattgtagttggggcggaaaacaaaaaccgttgacctttaggccaactcccaaactggcccgagggggagaagcttctagggggtggttaaccgtggctcgttcaaatcccctcagggtccccagaacccatcagggactcttcttatctcctcaagcttggctaagcctggcatctttcgggccgtctgctcaccccaggggcagaagccccacccgggttttgaagatgggaaccagcccggttgaacagggccgcagaccctttcgaatgcctccacctacagggaccc

SEQ ID NO: 186315 - DNA, 465 bp, Arabidopsis thaliana
gtaagcttggatcctctagagctgccgcccttcggtgttgcttttttttctttttttttttctttttttttgggttttttttgcagccacattttttttctcttcacgggaatctcccgaacaacaaagtcttttacggggacccgccggtaggcccgggaaaaacaaacgccggggagggattgcgtcatttgggggggaagaacacaacccgggggggtttgccccaaaaaaaagcctccccagatggcgggcgcccccccccaaaaaaagtcttcccaaaaacggcggcttttcccaagcgcaaaagcggaaaaaaaacccggattccgtttcccttccttaccaacggggggttcctgggagaaaccccacctatacggcccctgggaggtttaatgaccaaggccctttaaacagccccacaaaattgggcctccgccacacaaaactccgcaaaccagg

SEQ ID NO: 186316 - DNA, 482 bp, Arabidopsis thaliana
  unsure (1)..(482): unsure at all n locations
taagccgggtcctctanactttcgccctttggtttagctttttttttcaaattatttattgtngattaggggaccccgcncgcaccttcatttatcctttggagggaattaaattgtgtccaaatttaaaagaaacgaaacattattaattatacttaaacaccaaaacaacccaaaaaactcctcattatgggggtgggccgnacacagagcggactgcacggaaaatacccccaaaccgagggggagggggccggaggcacacatagggcgacagaaccaacacccaggagaacatttcttgtcggggggttgaatttacacacattaagcttcaaggggcggggacttgaaataaccctaaacattatgcacaacttcaccaacctggagcactcaaaaagagcctccttggccccaccaccggggtaatattcaaacacacgctataggggggcgcggaccctttcccaggcacaatt

SEQ ID NO: 186317 - DNA, 512 bp, Arabidopsis thaliana
acgcctgcggtaccggtccggaatcccgggtctcccacgcgtgcgattattagttcaaaataacaaaaacagaagtaagagaaaatctaggcagctcgaaaaaaaaatgaaggatctgtcagtggtactatctctttatggcctaagcagtaagtggaatgtatatggacgagcgaacaagctccatatctgtgatgatcgggggcccaaacagaagcactcagacctctattgcgccaagaaaatctcgaaaggcccgacatggaaaacattatgtcaagtttggaaatatctatcacttggatatgacggataattttatggcagacgacactgtgatggagtacctttagacaatgggcctgatattggactggccaacgattggatgcgttagaatgtaaacccggtgtgggccagggaggcacctttgaatgggccgctacagaggatggaatttattttaggctaaatcaaggggcgaacccataaggttattaattggaggccat

SEQ ID NO: 186318 - DNA, 455 bp, Arabidopsis thaliana
  unsure (1)..(455): unsure at all n locations
cgaagcagggaaccataattttcgccgggggggaggcgtntaaaaaacaccccgccacgggggggggggggacccacccagaaaacaaccgggcgagagaagagagcaaattgacgaggggagccgggccgaaggaacaaaggtcgcggacccagcgccccaaaattntttttagggagaggggaacgcccccggggggcccactaaagcaaaggcccccccgggggggggggggcgggccccagaaagaaaggaaggcgaccccgggacgcccccgggagaggggaggactcaaacgccagcggaggaaagggggccggcgggcggacacaaacccgacgaaaacaacgccgacgggcaacaaagaaaggggcccggaagaggccccccacgcccagggggacggcgaggaggaaaggagaaacgaggcggccgagagggcagcgcgagggcgc

SEQ ID NO: 186319 - DNA, 492 bp, Arabidopsis thaliana
  unsure (1)..(492): unsure at all n locations
cacgcccacggaagccgggaccctctaaagcggtcgccccggagtgaagcggttttaaaagcaaagcccaagcagacaaaaggggcaccaaaaacacacacacaaaagggaggggcaaagagccacccacaagaagcccttgggcccacacaaaagcagggagggcgaaggcgtctccaaaggggggcgatttctcatttagggggggggaagccccaaagggggggccgccggaacaaaaaaaccgacccaaaaaagggggggnccgacccccggacaaaaaccccnaaagaggggccaaggacgcccacccaganaccacgccaggcgggaccacacggggagcacaaaggcacaacggacaggcagggggcaaaagagaaacccccaagaaaaaaacgccgccacgaaaccccgccgcaggaaaacaggaggccgccgggggaggnggcacaaaaaagcgcccaggaaaaagggggcgggagaaaggca

SEQ ID NO: 186320 - DNA, 343 bp, Arabidopsis thaliana
tttcccccgcggggtttttttttttaaaagaaaaaacaaaccaaacatggtcattgcatttgtacttattgatcatggtccaaattgaattagccgaatgatttttcagtttaaagattttaaactacaaaggaatacaaaaaaaaaaaaacgaccgttttctctttttgggggtggggaacacaaaacgggaaaccaaataaaaaaatggccctaaacatttgtgttttgggagacattaaaacaatggacgaattttttgattggggttccctttcaaaattaaccccgttaatttatccgggaggggagacccgaaacccgaaaaatattgggggttggc

SEQ ID NO: 186321 - DNA, 341 bp, Arabidopsis thaliana
agatcttagcacataccactcacttagggggctacacgctgcagtaccggtccggaattccggtcgcccagcgtcgcccgcgtccgagaaaccaaatgaaagctttgtctttttaattgataatcctttttattactggcatatactgctttttcacttttacaatcccaaatctttaaagagaggaaccaaaagaaaaacagatttccagggggtttttttttcatttacaacataacattccttgggccgattattctttttttccagaacatggagacttacagggaagaaccaatggttaaaccgggttggaattgctctctttgataaacccagaa

SEQ ID NO: 186322 - DNA, 548 bp, Arabidopsis thaliana
  unsure (1)..(548): unsure at all n locations
tgcaggtacccggcccggaattcccgggncgtatcacgcggtccggcacgccgtacgaccaagcctaccaagactcctgggatttggtaatcacaaaaaacccaaaataacctcacccagtttcccattttctttcctttccggccgggcccccccactccaggagaaacaaaccacacacactcacccccccaaacccttttttcattggggtggaaagccaacccccgagaacgcgcaaaacgaaacaacaaccccaaggaggcacgaggcacacagcaaaccctcaacgccaccgcaagccaaaaaacacaatcggccccccccaacaaaccccaagaaccaacaaggccattggagaacgcccaactgggccctaatatttattttacacttcacgtcgcctcttatctaatctctcctatccaccctcacaatacccattctctagctcccccaccgttgttccttcacaacgccacccctcctccgttcatcaatggaaagcgacttctttctcaccacagattctgaatgttccacccccc

SEQ ID NO: 186323 - DNA, 470 bp, Arabidopsis thaliana
cacgcctacgtaagcttggatcctctagatctttcgcccttggggtatggcttttttttttatatagaccatatgctcgctgattaactcaaagatataccactaacaatagtcaatcaaaattttgaaacgtcatacaaaaagaaatttctaaaaaagacacaggataagtatctatgtatggacgaaacatgctaatctcggggggtcggggaatagggattgatatctgacttaaggactacattcttactaaaaacaaagaagaacttttttggaaaactaaacagaatttgtaacaagagcggaatgtcttgtaagggggtgactcctctcaaacctcacctgagggatatagctccttataccagcattatgatatcatcaagcgggtctctggacaaacaaaaaaaggtcgaaatggtaaaagcattgtagtggccactggggtagcttccagccccccgaaa

SEQ ID NO: 186324 - DNA, 474 bp, Arabidopsis thaliana
gtgagctgggatcctctaaatcgttcgccccagagtgaagggggttttcaaaaaacaaagcaggcccgcccgagcggggggcaccccccgccccgccataatgaacacaagggaaagaaaaggaggctccttggggagagaaacaaggggccccgggcagacaggcgcacgcccaggggaaaaaaacctcttagggggagggggccacaacacgacgggccctcaagaaaaaaggcacccccccggggggggggggggggcagaccacaacaggaagggggggagaacagccccccgacggccaccccggggggagggaccacaggcccgaagccggggaaggggggcctaaaggaagagagggcatggccaaacacggaaaacgcgggagggcgggcaggacgaaaaggaaaccgccggcggggaccgagggaggggaggcgcaaccaaaaggcgaaacccaaggggagggaa

SEQ ID NO: 186325 - DNA, 488 bp, Arabidopsis thaliana
gaaacacaaatttcctttaatggggtaaaggccgctaattggggaacacaaccaacaccaacgggcatgggttccctcagcgtgctcgtccccgtcgcttcagttacctcagctccttccttttctttaacccctggttacttttctcaatgggggaaagactaactccaaattgctcttcttttggaaaccccaaaataaaatttttccgggcgggaatcctacccgaatccgactccccccgccaccaataaccacccggaagaacacaggcaaaacccaaactaacaccccccgtccggtaggggggccttttcttttccttgggggatacaattcctcccgcctttaattgggaagcatcttgggacgctcaagctcaacttttaacaacctccttaactttgtgcgccttatccaaccaccaaaattccgatccttacatagcgagttttcagggtagaacaatccactacactccgcctcca

SEQ ID NO: 186326 - DNA, 468 bp, Arabidopsis thaliana
  unsure (1)..(468): unsure at all n locations
cacgcccacgtaagccgggacccacaagagcgtccgccccacggggaaaggcgnnacaaacccaaagggaccagccncngggggaacacaaaaaaaagaaggaaaagcagagacggccacgcaaaaccaacgnccacctcgatgaaaaaaccgaacgaccaaagggcaaagcaacaaacagacaaaacgggtnttttaaacggagtggacanaagccgcaccccaacaaaaaggaagcaccaccccccacaggggcgacacgaagcaagccancaagcacacacgcggcacgagcaaaacaaaaccccgaggagcacaaaaccagcccaggcaagccgagcaaaggaacgaccaaacgcncccagcagcaccgacagaccaccanagggggccaaaacagncagaaggcacggggaccaccacaacaagagccccccacacccggggaacgagaaaaaccaaccaggc

SEQ ID NO: 186327 - DNA, 355 bp, Arabidopsis thaliana
ccgttttttttcttttttttagaccccgggaccttgtattccccaaccctttcttcctggcctctcactcggaaataacccttttctttctcttcctggtcctcctcctccagaaattaatctttcgctctggccgttttattttttccaccattcaatccttcaaatggaaaaagtggcaggcattattacctggttggagccgttataatattattcggcttgataaagggttaattggaaaagggattccggtggttaaaaggatggaggtctgtggggtagaaatggattccaataaccgatgggaaggttcataaaacctagcctaaaggtgtggttccaggaccaccca

SEQ ID NO: 186328 - DNA, 364 bp, Arabidopsis thaliana
gcctgcagtccggtccgaattccggtctacccacgcgtccggccaatggggttaaagggttataaaactttataattcattccgattaccctaaggcagcagccgttaactggaaacttcttacaaaaattcttaaatcttgggcttgaggcaaacctttaagttttttaggaggagccaggcaggctttaccttagccttcttttaccaacttccttgcaagaagaggcgaaccaaccttatgagtcattaattcatttttggaggtttggggaaggattaggggcttggagggatcatggatccagaaggagaactcttggttacggattccttgaaccagtcataggaaggcacttctgga

SEQ ID NO: 186329 - DNA, 205 bp, Arabidopsis thaliana
cacgcctacgtaagcttggatcctctagagttttcgcccttgtgttttgtctttatatgattaaaaagctgactaaattacgggaatgttacaccaaaggtttaaagtttatgggggccgagcgccataacagtcttcagcagatacacccagtagaaagataacacggaaatggacacagatctaagatgtgggagacaaaata

SEQ ID NO: 186330 - DNA, 518 bp, Arabidopsis thaliana
gggagctgcacgcctgcaggtaccgggccggaatttccgggtcgaccacgcgtgcggtactattgttggcacttagactagtgaagcaaagttcatatacttaaaattctgggtttattagtgttaaagaccaatttcagtctccatggaaatagaagcaagaagggttattgaagagaggaggtgaagaaaaagaagaccatcttttcacctttgacttgaaaaaggataaccccgataccgatgaagagaagactggggaggacattcaaaccgttgaccaaacaaataacggtgagaggaggggtctggagcttgtgatccgagatggttcagggggattgtaagaaactaatctaacgaaggaatgggtccaattttaacaggtctggggcttacttggctttggtctttgtccaactttgacttagatttttcaaaaacaaggatttgttgggaacccttcctcagacgggaaaccccatggttcgacttttgttgtggttggaacggattcc

SEQ ID NO: 186331 - DNA, 458 bp, Arabidopsis thaliana
  unsure (1)..(458): unsure at all n locations
acgggcgagaatagccggtgctcattcggcgtgcgtgttgtccccacaacttcacagtaagtgttacgatgtcagacacgttctgacgtgctccgcattcgtgaaaacataagtgtggccctccccgccccgtccggtgcaccccagtttcgctatgtcagcctctgtactctcgggactgagcgcgctgcagagttgcagctggcgtgactggggttgggattaggtgcaatgaacacgtgggatgggagcgtagcgatgtcgtctgagagtagggtgggtatggaacagccgcgtcacgtgcctcctgtagcctcacgcccgcgggtgggtataagttgagcagtatgattgtaggtcgcagcgagggtgtgttgcttgtggttactcgccgtctcgtgaacgccaggcgcgaaacactggccgcatgggcactgtggcgncaggtaggcgcaagc

SEQ ID NO: 186332 - DNA, 395 bp, Arabidopsis thaliana
cgcctgcaagaaccggaccggaataccggcctgaccgagcggtcaaagcagcaaggaaggaacccaaggcgaaacgggggacgacacccgcgccacgaaagccaggacgcaagagcggggcgcccgcgagcacagcggaaagcgcgacccagaagcggacaagccgggggagagagaagcccgcgcccgccaatgggggagggcggggggggcacaaaccgggccgcgaaaagaagcaagcaagagaaaaagggcgaagcaaggggagcgagagcggccaagcaggaagacaccacaaaagcgaaggaaggccgcaacgcagagagagaggacgcaccgaagaaagggagaaggaaaaacggcagacacggaaagaggagccaggcaaaccaagc

SEQ ID NO: 186333 - DNA, 535 bp, Arabidopsis thaliana
  unsure (1)..(535): unsure at all n locations
ccccccccccccaataagggggaaaaacggagcatccaacgaaggancggaaggaaggagagaatttaggggggggggaaaggcggacaaaagacaccgaagctgataagcgcggggggtcctatcagcaggccttgtagccgccataataatgacactctactttatatcgtcgtcccatacactctaaaccccatacgccgagctcgccagtggtcacaaaagcacgcccaaatttttttttgcgggaggggggcagagcggacgccacgggaactcctcgatatctgaaatcgcgccacgagagcgaaaggagcaaacaatatatctcgttcctcacacgcgacggacagtcgacccagcagccccaatacatccagatacgaacgacactataataagacgacaggctctgtcggagacattttagatgaggctgcttccccagacgcgcggaatgctgatggcgatgggggattgtgtgttttatgacggattagtaaacctcagcaatgatattattcagtgtaaagta

SEQ ID NO: 186334 - DNA, 445 bp, Arabidopsis thaliana
ggaaaccgccccgtctaaacttgaacctataagcgccccctttttttcttttcaacaagggcggtttcatactaaaggccattattaccacaagggaaggctagagctacccatacagatatcattaacccgcatcacattcaactttaaccgaagactagccaataaacgggtctaaaattttttatccgggaaatctaaacccacacccccacgattaccacccttcgataaattcctcctcgttaactgatttgctccgtgtaccctcgaaggcccctcgacctccacaagcacacccacaacatcctcacgaatggccacagccgtgcgtataacaatactcgacgcctacacacaataaattgccaagcacgccccatccagcgagaccacaccgtcaaagaacacgcatacagcgctcttcggtcatatgctaaaataa

SEQ ID NO: 186335 - DNA, 478 bp, Arabidopsis thaliana
agcgccccgaccgtaaagccagacaccctatcaaacctttcaccccaaccaaacctctcatttccctcacccccaatatatagggaaatcctttgcattctctcctcatctacgccaatcaacctcactatcacctccataactgtgagcacaagagactgcactcaccgacctacaaacacgccgtttttttaggggccactatctttaactcgctcttcctaattttgggcccttttctctcccctcttagactcccgccactcattctgtaactatataaagaatattttgatagctgagaagtatcatataataatttataaaatttttattctctttctactccatacacctccgtgaaatatattgataaattactcctcttatacccacaagaaagatctctgtatatcaccactcgacaatatgtcatttcacaattaccataatttcctcataattgtactcttcctct

SEQ ID NO: 186336 - DNA, 446 bp, Arabidopsis thaliana
acaattaacctaagggaagagcgggtcccctggcaggtcccggtccggatttcccgggtgaaccacagccttccaacctcaatcctgagaataaaaccatggattccctgaggaggggccaaagcttaaaggaaaagaaccttaactttaagtccaagttaccttggatagccaaagaataagtaaaaaaatatggccggttcgaatgctttttccattcagttatataaactcttggaaaatgctgtggtttccaatccaacacatggttaaatgctctggtaaaatcgcccttgaaatatggcttggaattaatacctatgggtgtcccttggtttttccggtgtgtgggctttttacggggatgaaaattcggaaactcgtggtcatggggcctcctcaggcttttcacaggggtccatacaatagcgaaggccacttaaaaa

SEQ ID NO: 186337 - DNA, 319 bp, Arabidopsis thaliana
aatttcccgaggttctgacccacagccgtgcgaggcctgattccttcttctctgtttattcttttcaacctgaaggctttttgcttaccttttcggatccaattccttgttgcttacccggtacattcccagaaaaccttgcctttcttccgaccggcgttggtgaccacgcatcggtgacaacacaccagtgatttgcttggcgttcttctttcaagggcccctttttttaattcttccttatcttgacgagacgaaggcgaattcaaggccgaagtcttgcgtctaaccacatggcccaaagatcttgcaaacgaag

SEQ ID NO: 186338 - DNA, 498 bp, Arabidopsis thaliana
  unsure (1)..(498): unsure at all n locations
cgcctgcaagtaccggtccggaattcccggcttcgcccacgcgtgcaagcgatccctctgctaaaantaaccagtctagggggcatggcccatagctctgccagatactgttacacaccgatattcgcgcaacagaatcacattcgagtgcctaagctgttctcaccaataacgaaattctgcatagtattgagaattttttttgtgaggggggacaatcgaccatgctttaacatttacagccgctgtgatctagctcatgagaaagtactcgaggtcagagtaaaactaatagacagtcgcagaaactcggtgcgccgtggaggcggactatgtaatgactcgacagaccgtttaatgtaggactgcggcgcagaattactgaattagaaaggataactagtcttagttatattcaccttctactcctgtatcgtatcttgagatcttctatcgtcatcaaaatgctcccctatctagcctaaagatcaaatatct

SEQ ID NO: 186339 - DNA, 296 bp, Arabidopsis thaliana
cgattactctatggaaaggcggtgcccctggaaggacccggtcccgaatttccgggatcgaaccaagccgtgcggtttgttaggattgtagaggattcggcgacgaactttggtgtgtttcggtttagattaaacagcttccttttagaaaaccctaaatccttgtggaggtcgggtcggccaggtggttaagggccccaccagagacctcgtgctctgaataaatctttcgagaggaacgcctgtcgttgtggttacattgtaccggggtgcgcgcgagttaaaaatctctgtta

SEQ ID NO: 186340 - DNA, 276 bp, Arabidopsis thaliana
cgtcgataacattatttagaatatccgagtgtgcgcaacgtagcgacggagaaaggcgaccagacggtataacagagcccgcagtctattcattttctcccgcaacgagtaacataagtcatcacttacgataacaacatcctctgtactcttctctataagaaatagtgtggccggcgcgggctaaatgatagtgtatagatgttcggtgcttcacgtggttcgatgtgaacgaacacccgaagacctcaacaattcaggacatacaacaagggc

SEQ ID NO: 186341 - DNA, 223 bp, Arabidopsis thaliana
tctgggagggaatcgatactaccccatggatacgctgcagtgccaaaagcccttcggtatccacagcactcgagcgatagttcattgtatgaacattaagataccccacttcggccacctccgaagaggctattcgggtctcccctagtttgtcgtcacgagtgctctcttactgttcttatgtttctttatgcctaaccgtcaactgaattccgcagcattc

SEQ ID NO: 186342 - DNA, 496 bp, Arabidopsis thaliana
  unsure (1)..(496): unsure at all n locations
aactgcacgcctacgtaagctaggatcctatagagcgttcgccctttttatattttgcatttgacgtgaagggtgatataacaggggagcatttagtttacgggccaacgcttgagattgtagtaggagacctacgaaacgtcaatcagcgcaacgaaaccacgtaccgaaatcgacacgacccgctaccccccccaaggttttttttttggggggaccaccgngcccgtacgatgggcatagaggaaccctttatcctatttaccatctgtcaatgataccaggctactcgagtggtgccagaaagtctgcctgatatcatggattcgggcgttacgtataagtttggcgtgcgaccccgactgaggaaagggaaccaacaattatgtataatagcggagcaatgtagggtgaaggttttaaatagtttggacgtatgcaaagttgtacacagcttttattggagacataagtatcaagccgatacgaatagtat

SEQ ID NO: 186343 - DNA, 417 bp, Arabidopsis thaliana
gtggcccgctgcgggacctgtccagaattaccggggacgcccacgccgtctggataaaaagactactgtgccaaaattaggaaaaggatatataccagagtatcagatttcatgtggatgaaaagtcatcagatgatctgaaatttggaatcagcctttcattatgtagggcttctcagcctggtgagagtatatatttcgagtctaaatccccgaagtctggaaaatatttccatcctaaagttctacggagccattacctttgaccacttagggaggaaaaacagaatacctaatcgtctctcgccttaagatggagatttgcgaaacaccttaaattaagtgaatcttgtgtgccaaatataatatcctagagtagaatatactgaggaatttataggaagaaggtgtccgcta

SEQ ID NO: 186344 - DNA, 318 bp, Arabidopsis thaliana
acgactatactctttaggtaaagctgggtacggcctgcaggtacctgggttcggtatttcccgggttcgtacccacgccgtgccgatgctaacttgtctttattccggagtaaattcatgatagaaaatttcatcgatggcggccaagtagccgtagaagaatgcctggccgagaaaaaaaccggcgctgtgagacccggtggtaagaaaaccaggtcttgttgaaatagggtatccgggcgggttaaagaataccccttagggcgggagaaggaaatttgccacctaaaaagggaagcccgggtgaacaaagaaaag

SEQ ID NO: 186345 - DNA, 516 bp, Arabidopsis thaliana
tggaccccttccttaggcttggattcttttgaaggggccgcccttggttttttgtttttttttttttttttcaacggacgttttagaagggggtttttttctagaaaccttggggaaaattccgaattttaacccggggttagcctttttattccccccccttaaaattggaattgttttccaaaagccccttaaaaccttggtttgaaccggggtattaagtaaaaaaaaaaaaaaagaaggttttgagcttttttttaattccttcaagtttgggggatcctttttcctttctttgggaacaaaacccttttcatggtggccttaaatgaaccaaaaaacccttactggtggtcttccatgggcctctgaaaattgggacattttaaagggttttggtgggtttttaaaaaggcagatccccgcacctttttttctcaattatccttttttggcccgaccttttggagggggggaatattggaacttggattttgtttggttttttcccggagg

SEQ ID NO: 186346 - DNA, 298 bp, Arabidopsis thaliana
gccccggggggaccaaaggcaacataatcctcgaatcaaatacaaggccccccccctccatccagaataaagaacaacctcaccaaaacccaccatagtctaacccaactttttttccgaaccgaagtccctaaaccccaacttccaccgccagcaaacgcatactacaaaacgagacgacccagcacagcaaaggctggcgagccacaaaccgaccagaaaaatacacaacccccgcaaaaaaatcctgccacacacccataacgacacaaaataacaccccacccctagcaatcat

SEQ ID NO: 186347 - DNA, 495 bp, Arabidopsis thaliana
cggcaaacaaaattttacaggaacggcggacagagccaccacccaacccacagcagcgccgacgaggcaccacgcggcgcggaaccacaagccggcgagaacggagataaccaggtcaacacacacgcggcgcgaagaaaaaacgtcatgcacgcatgtcgcccccagatcggcggcacgcccaggcgcaaacccggcaacagaacccctttttatcttctggcggggagcaaaggagctgacaataacgcagagcaagaaagacaaatctgcatataaaatagatgtacaaccccagaaatacatccaacacccacccatcatattcgccgcacatgatgaacgcaaagcgaccaccctccggccaaccccgcagattactcacgccgatggcaaccaccacacgacgcgcccttaactgccctacatacgcgtgacccaacgaatctgtttatcttttgttgtcttgcttaaccggcgcgcgggctgaaggac

SEQ ID NO: 186348 - DNA, 361 bp, Arabidopsis thaliana
gccgcgtacgtgagctgggatcctctagagcgttcgccctttgtgttatttcttttatcgatcatagagctttgagaccggggggcctctacgttcgccaggcgcgtcgtttacgagaaggggcgacccccaacgtaattaactctccactggccccgaggggacaatgggaccccgaggaaggaaagagggagggttttttttttgaggggggaggagcgcggcgccagcggcggcggcgcggcggacacacagacggcctgcgggaggagggcggccgcgacacgaaccagcgacacaagagagacgggggggcggcagacgtggagtggggggagtgagggagagaaacagcggagga

SEQ ID NO: 186349 - DNA, 317 bp, Arabidopsis thaliana
  unsure (1)..(317): unsure at all n locations
aaaattttggagatgtagaagtgatgaaaagaagaggagggggtggacgaggtgcgtagggatgaagtaagaggaggggtgaagaaaaaaaagagaagtgaggagtgtaaaaaaggagcaaggagagtaanagtagaagagaaatgggacgagatagagagtagttttgaagagagagggggaatatcacagagggaagaagagaaggaaaggagtcgggtggggcgtaaatataaaggtgcgaatgtgaacaagaattgaagtgagaaaaaagttagataaatagggatgaagtgggtgataaagaggacaaagag

SEQ ID NO: 186350 - DNA, 256 bp, Arabidopsis thaliana
ccgcctgcaagtaccggtccccaattcccggtttcgacccacgcgtccagaggattttaactttttcgagtatataatgacaccagacgcgaggaccccgcattctaaaaagggcatagcggtacaactctttgcccgctaacgaggcgataggatggccgacacgttcgaatctaaccgtaacaaaagaaatatttcttgccccaaatattcctgtgcaggtgtgtgctactcgaacacaccggtcatttatgct

SEQ ID NO: 186351 - DNA, 373 bp, Arabidopsis thaliana
aataatattccccgataaatttactcaattcatattttttatacggaaagaaaactaatcaaccaatacacctcataaaatcatttttctccaatactacacattctctataaagcttactcttcaaattatctcctccattcctaactacacacaaactaatcctaatctaacataaaatcttttctgaacaataattaactttatatacgtccatcgccccctaacccacattccaatccccatcactacaccatcctacatccacctctatcctattcctaactctatgcaccacttctttccctacacaaacacaatacacatccacctacatcatccgtctgcgtattgtacttagattatcctcaat

SEQ ID NO: 186352 - DNA, 303 bp, Arabidopsis thaliana
gaatactcaaaacaggtcttaaaatgacaaaaggcgcgtaaaataagggggggcacaagacgaagaaaatcgtctgatgcgcatgttcaagagggagagtcgcgtcggagcacgaagtacgacaccgcatgaagcacctatcaagctctatcgaagtgcggcgagaatccgagggaggtggaggcgtgtcgacatcgattgttccagcgaccccgtctgacttccccagaggatacagagtacacagtacgtgagcatagcgatggatccgaaaagagagaagaacaataagacgcaaataga

SEQ ID NO: 186353 - DNA, 447 bp, Arabidopsis thaliana
ttcccaatctcgggcgtaacactcttgacgaactgtgtgttggtctcacatatttaatgtcgtggaagattcatttacggggtccgtgtctcttttgttcgtactaccagattgagaagtagcaccccattcttgaatataacgtcttttccctttgtagggtcggtgttccgtaccaagctaagcctgttggagactctatttcatcattaggttgtatatagtcgacatccgtgcttttcaagaatctctcctcgggaaggtatagtatagtgatgttatcgcctcgcaatgtcgtccctgggatagggtctgcatgtatagaatcacgaacgaagactcgatacagactgtgttaggagcgagttacaagaggtgaacgtgttctctgattgtgatgtatatgcattgggagtttactctggtactttaaatgagggctatcgt

SEQ ID NO: 186354 - DNA, 445 bp, Arabidopsis thaliana
aacgaccacccttagggaagctggccccctgcaaggaccgggcccgaattaccgggtccaccccacccgtccgattatgatcctgtgtaacactgtggttaggcataccaagcatccaggtgaccgcaaagctcttgtacgaactcattcccaaagattcgccttgttatataacgaatagctttagagcctaaaagaaccaaacagccaaaatcctgggcattcctttggcgcgggccgcttcaaacgataccaacttaccgtaccccttacctagcacttagttgggattcgtcatttcgccagcgaatttcatgttcctgcgcgacactcctctcaggcgtagctacgaggaccccgcgctcgatcccacgcctggacagtttgggctataatgccccgttatctcgtaacagcaatacgaagaaaagaagacccccctctc

SEQ ID NO: 186355 - DNA, 333 bp, Arabidopsis thaliana
tgaggcgtagtcgcaagggcgagtcctatgcctcatcaaatagatgggtccctcgattcgccggccctgtaatactacctacatcagagattatagtgattctttattatatcgccgatccaagacacattttcgagcgctcggcgtgaggcacctcagcccaacacgcggtacaatgatgctctctacgtcttcttttcgcgccaatcgacttcctgacaattaaatgtgtcgatacgagtagctagatcgtataatcgcgacagtcttccgaagatatacagaggcatatggtaacatcccgcaccaaacgacaaacctagctcggatcgc

SEQ ID NO: 186356 - DNA, 371 bp, Arabidopsis thaliana
ggccgccagcgaagggagacacacccgcggagaacgacagcgcaagaccacgcgcacagcgccccacccgcggccgcccgcgcaccacgaaccaaacagacaccgggagcacaccggaccggcacccaagccgcggccgagccgcgccgcagcagagagaacaaggcaccgcacgccacccgaagacgcagccgagacgacgaccgcgagggcgggcgcaagggaaggaaggcgtgatagagcgagggggacagagaagggcgggaggcgacggcgggcggcgaagaccgcccaccacgagaaagaacggcacccaccacgccccgccggcggcgacggagaagcgcgccggccgaccccagagaccgccg

SEQ ID NO: 186357 - DNA, 281 bp, Arabidopsis thaliana
  unsure (1)..(281): unsure at all n locations
ctgcacgcgtacgtaagctcggatcctctagagcagccgcactatgtgtcgtgtctcgaaatcagaacaacttagatagggtcggcgacacgaaccctcccgccagacacaatacgccagagacacaacactagtacgggtgagtataaccactgctcatccgctgaagggtgggcgcgcgaggntacgcgtccggcggatgcgccgcactcttttcctgcggcgggcgtaaaaacacagccgagccgcaccaagcgaaacacggtgcgcgtggggagtgc

SEQ ID NO: 186358 - DNA, 230 bp, Arabidopsis thaliana
  unsure (1)..(230): unsure at all n locations
gatcctacctagagcgtcncgcgccgggggcgggcagtgtgctttttattgaggaagtgcacagcgctaaatacaagggcggggactaatctcacgccggctgcacacgggaaatgtactgggggctgccacaagggtgtagtaaggtgcgcaaggtacgaaaaggcaaggagagggaagagacgcacagaggtagcagaggcgggagagcagagagaggaggggagagg

SEQ ID NO: 186359 - DNA, 424 bp, Arabidopsis thaliana
tacgactcactctagggggaagctggctacgccctgcaaggtcccgggtccagaatatccagggtcgacccaccgcgtgcgggcgagaggaacatgcgattcgggagaagccacccggaaaaccgaaagtaaacgcgggctagagttagaattaaagcagatagaattccttgttaacggatgggattcctgaagaaccaaagttagaaggatgaagaaagccttttcgtcttgaacggttgggagatgttgtatttacctctattggactgccgcgccttcggttgaattaggtcttcctattggcctctgggaacccaagatttttccctttggatgctatggtcaaacaagaagcgctttggaaatgtcttcatctgggcttttcggtgccctgattaaggctctttggttcggaaacctg

SEQ ID NO: 186360 - DNA, 568 bp, Arabidopsis thaliana
  unsure (1)..(568): unsure at all n locations
cacgcgnacgtaagccgggatccacaagagcggctgaccggggaggagagagccaaataacaacagagaaaacgctgacaccagagatactcgggaagaccaaagagcgaactaggccggagtccgaaagatcacagcgacgaaaaaaggagaagcgggggtcgggggaccccatatccagcgagaaaagagggggaaaacaggaaacacgggcgatttttctttggggaaaggaaaagaggccagaggaacgngaggggcaaaggacaaaccaggagaacaaaccaggaggggggggggaaagacacggcccacgaaacagagccaaccccgcgccgcccgacaaaacgagggacgagaggcaccgacacgccagggggggaaagaacgatcgcggggaggggagggagccgcgggaacacacggcaaaaacagcaaagacgccagaggaggaagacaaagcagaagaagaaaagaggaaagaacagcgaagcgaacggaaagcgaaaaaaccagacgaaaaaaaagacacaaagagaagcactgagaaagaaacacacgagaaaaa

SEQ ID NO: 186361 - DNA, 256 bp, Arabidopsis thaliana
ggggggcccccctcagcacatttttggcagcggctggagctctatcgtcagctttgaatcttatccgaagaccgacatttgatctactccacttctgatgtggtccccaccgaaccattaacatttctacaatccctgcctgtcgcccccaaaagaaacccggaggagagtacatgagtaacacttgttacattacgaccgctgcagttgaagcacccggctcgcatccccaggactagagtttatcaggtgtgta

SEQ ID NO: 186362 - DNA, 582 bp, Arabidopsis thaliana
gccccccaaaaaaataccggggacaaccccgcccaggcccaggcccccaagacgaacagggtctccccctcccacccccacgtccaatacacagcaaaacacaaagacacacaaagcgagagcaaaaacagaaacaaaacgccgaaacaaggagacggggcccaaatcgcgcgccgcaccctccaaaaacgcaccgacgccccgcgccccaccgaccctggccccgcacagacaattttacgggccgggggggaaccacgagcgggaccaaaataacagaccgcacgacagagtagccgcgcccccccaaccacggcccaacaacccagacagcggaagaagcgcaggagacaagacacaggtgaggggcgggggccccaagcgcgcccgagagtccagaaccgagacgagcgagagcactacgacgacgggacacagcaaccacacagcacaggaacgatggacaaagactcggagacacgaacagcaacgtgaccacgaacacaatacgaacgcccatcactagcggacagccaccccggccaacggcgcgcagcagccaaaaaaacaaaccgccacgcc

SEQ ID NO: 186363 - DNA, 560 bp, Arabidopsis thaliana
acgactcactctaaggaaagctggctcgcctgcaagtaccgggtccgaattcccaggtcgaccacgcgtccgatcgactcacaattagcaacgatactgatgagagatcgaaagggggacctcaagcaacgggaattacgttgtgatggaaagaacagcgcctagctgtaaagcaaagcattgcctccaaaacgacgactaaaaccaaaaccttccttgtatctatgtggagctgatcatttaaacgaccgggatacgcctttgataagtcaacaaaagagttagtctgcggataacccacgtaacagttctatggtacaaaagctctcagttacgaaaaattcttgttagcggggctgcccatcgcacactacggttacgataacaaaagcgagtaccacgtaacagcaaagacgtacctactccccaactacgcggccccgcggacctcacttcgacttgaggcaaaggcataacttgcgcgtctcggcggtaatctgactctcgccaagcttatccgtatcaccctagcacctacatgtggcaggcctcgcactcag

SEQ ID NO: 186364 - DNA, 507 bp, Arabidopsis thaliana
acgactcatcttaggaaagctggtacgcctagcaagtaccgggccggaattccgggtcgcccacccgtcgcggacgcgtgggcttcaaacacagggttaggatctaaaaagggacgcttcatcacttgtttaaccacctgacaacaagaattaaaaggttagacgaggttggtggttggcaatagaatacttaaagccagacatttgagacattgagaacttaggggaaaaagggggggaaaaaaacggttaagagagttacgagaattaatacggtagcttctcgagagattcaaagtggtccttaacatcacgcaagtgtacggcctataactggtagacaataagattgggatatttctaaacaatattacagcgcgaatcagacccacgctccaccccgtaacccgcttgttgaaaccagattctttggggtccccaaccgcttgggagctgcaagtgcctagggaatccattatagagtgatcccacgccaacaaacccaag

SEQ ID NO: 186365 - DNA, 538 bp, Arabidopsis thaliana
cgactcatctttgggaagctgggaccgcctgcagggtaccgggtcccggaattaccccgggtcctacccacgccgtgacgttactggtttttaataacgcgcgaaaaacccccttgtcgaaaaatattcgcagtgcctctctctccaccttaagaaaagagactccttccccctgtcttttcggcccggggttgcaactcaatctggaagtcggcgtccttggccggagaaccaaccttctctggtaccattacacaagctatgctctgggatcgcagggagaatggctggttggaaactacgggtgaatcgtataacgcctgccgtctccatctcgcgattcttacactgaaggaccatgcgattggtcgtagccagcaactttcctagaccctcgtcgccggctgcagacgctactgtcttgtcgtatgcatagatcgtaccagcgtgttgtagaccacaggggacttcaccgagcagctacatcgacatgcctctcgccggttgcatgtgatgggaccatatttctctcttaaga

SEQ ID NO: 186366 - DNA, 492 bp, Arabidopsis thaliana
aacctgggatcctttagagcggccgcccttttttttttttttggtccaaaacataaaacctttttaaggaccaacttaggagaggccggccaccaaactatgggcggccctctctatggtcatatccactgttgcgagacgtacagttcacctttataaccagaaaaaacgtgtcccggggggtttttttatcactgaacctcggttagggaatcaccagtccttgggggattaaggcaattttcaaagcccggagcctcccttttggatttgtttagttctcccagatccaagtgaacctaagggcgggggaaactcgcttaccctcctttcccgtggagctgaaacggagggtctccctccgtttcaggctcgggaacggatcaagaccctctcggcgcctctcgggcctgtttgacccgggggctacgcttggacacggggtccgggccagggttaagcctggaaccccggtgggcaatttagggaacg

SEQ ID NO: 186367 - DNA, 400 bp, Arabidopsis thaliana
gaaacgcgacacacctaggctcggccccctgatacagaggacgccgccaacggaaagacgcaggcaaagacgcgagaggacaccaacaagaagacgccacaagagcgcggcggggcacgggacaggacccccgccgcagcaacccacccacactccgcgaaggagacgaccagcccgcgccccccgcgcgccgccgcgcaccagcgccaacagcgaacgagcagagcaagcaaaagatatgagcccgggcaccaaacggaaaccaaccgacggccgacagaccgacagcgcaccgaacatccatacagacaagcgcaaacgccacacccacccacaatgacacacccagaagaaataacaacgacgcagaacagagcgacgaaataacaagacgtgcgcc

SEQ ID NO: 186368 - DNA, 478 bp, Arabidopsis thaliana
acgactcactttttggaaagctggtacgcctgcaggttccgggtccggtaattccaggggtcgacccacgcgtgcggagagacagagcaagttcagatttcaaccttctcaaaatgatacaccctagttccgtagctctacttgtgggaaaggcggttgggaatcaaatggggagccagtgtttcgatcttttccaaactttattacacctgaaggggcccccctttgtttctctccaggtaggccaggattcctgtggcaagacgtatgccgattaactcatagttatatcttaatggacaaaattactcaaaagacaatacatggcgggaccaatccatatctctcatttagtatgaagcttccccattttgcctcaaacaatgttcacctcgattacaaggcttcagatatttattatattctaatcaacctttaagtctgtttgtatgtatagaacatctcgttactgcaggct

SEQ ID NO: 186369 - DNA, 251 bp, Arabidopsis thaliana
  unsure (1)..(251): unsure at all n locations
gcacgccgtacgcnnnaagctatggactcctccttagagcaggctcgcnnccttttgttatttgtttgttcttttctcaacaccacaatttttctcgtgcattggcgcatacacaaagttgttctcttgggatagtgtctcagctcaccattaactgcataaacaattacgcattcgcggttgttataaccatttcatgttacataccatagatcgatagagaaacctgtggaaaaataaatataccagag

SEQ ID NO: 186370 - DNA, 489 bp, Arabidopsis thaliana
ttagcctgggttcctttgagcgggccgcccttttttttttttttttttaaccagaaagatttttccggttttagcctcaattaagcctctggttcccattccacaattcttaaaatttaaagtttttcccctcgagaattccttttttttttttttttgtagaggaaaaaacaaacccccccccgaggaccttttcttttaggaccaaactctttgaccagagagggttttttccaaccagccaacccagtattaaggattttagaccaaccccaaggggatggggtaaagccaggtagctttgaaacatggtccaaggagggtaagttggggcggaaactcgggaaaccgccctttacccgacaaccgatggagaattcccaacacttcttgttaaaagttccctgtaagtccttgaacttagacgattggctaaaaacaccggaagacccagaatggttgtcattgtcctccaccccatagttcgga

SEQ ID NO: 186371 - DNA, 469 bp, Arabidopsis thaliana
  unsure (1)..(469): unsure at all n locations
cgcgtacgaagcngggatcctctagagcggtcgccctgtgtgttaaatcatatttatgatgatggtggttttaacgaaggaaatatggtttgtttaaccaaaagaccttgaccggggcaaaacaagggaaaccgttggagaacacgaaacgcctctaattactttaagacttaaaagtcgagcaaaaattacgtcccgacggggggaaaaaaagccggggggaacaagcccaaaagagggctccacccgaagggaggaaagaaaaagaaggcagcgcggggccccccccccggcggaaattttttgggcaggacaggggccttttggtttatacaacccctcttggttcggaaaacccccaaaccccccgggtccttccggaaacggggggcgcccccggaaaagccgacccgttcccgcgaggggacccgcttttccatttgggggggcgaataaacctggggggaaa

SEQ ID NO: 186372 - DNA, 451 bp, Arabidopsis thaliana
  unsure (1)..(451): unsure at all n locations
gaggggtcgaccgggggggaaaaacccaacaaaacnnanacaggaagaacaaaaggggnaacaacacaaaaccacaccccccccgcggggggagacccaaagaaagccacaccaaaaaaagaaaagggaaaccaaaaaacagaaacaaaacgcggaaggaaaccgcgcctcaaaggggggggcacgaaaaacccaaaacaaaccaaaaaaacccccccccccccaaggaaggggaacaccccccccccggggggggccccagaacaacccagaggggaaagagaaaaggggaaagacaaagagcgggacccaaggaggaaccacaccgaaaaacaccccgaggagacccaacaagagaccccagcaaccgggcaccaagggcgaaccccccgagggaaaggggcgacaaccgcaagaaaaaacaccaaaaggaccaaagaacaacaaccga

SEQ ID NO: 186373 - DNA, 465 bp, Arabidopsis thaliana
  unsure (1)..(465): unsure at all n locations
cggaagcnngganccactagagcggtcgcccggggcgttaaaacctacagtgagatggaaacggagcctatggggagaagaaagaaaggcaacgacggcaaggcaagaagggcccggccaccccccggaaaaaacaaaaaaagccgacccccgcagggggggaaacaggggggcccaagcgcggattctcatcccggggggggccaacccccgggaggagaaacccccccccaaaaacccacacccgggaaggggggggcgcccccaaaaaaagacgngccaaaaccagaacacaccccggaggggggggcgccccacacggggggcagccaggcccaagaacggggcgcccaacccaccggaaacaacgggagcccccccccccgggcaacgggccccgaaacccccccagggccaaccgggccggccccaggaaaaaaacccccgggggaggggggcgggacc

SEQ ID NO: 186374 - DNA, 389 bp, Arabidopsis thaliana
  unsure (1)..(389): unsure at all n locations
agaagaaccgaggggagaccaaagaacaacagcaangaaggaaggtttcaagagcacgccgccccccaaaatgaaggaaagcgcgccccgaaaaaaaaaaccccttaaaaggagtgggaacccaaaccggggacccaccccgggaaaaccacccccccaggggggggggggggggccacccctataaaacccccccccgcacagaaacttaaaaaaaaggcccccgccccccacacaaaaccaccaagcaagagaaggggccaggccctgaaccccccaaaacaacaccaaaaaaaaggccaagcgaccaaaccctcaagcgggaccccaagccatctcgcggggggggagggggggcgaaaaaaccaacgggcgccgaacccggggag

SEQ ID NO: 186375 - DNA, 494 bp, Arabidopsis thaliana
  unsure (1)..(494): unsure at all n locations
atgtccggccggattattctttgggggcgaggaaaatccccggaggnngnnnttnnnttnnntagggggagggagaaaggnatgaaaaggaaangagagaagagggaaagaaaagagagaattttatggggtgggaaagagtaataattgttggggaagaaaattaaagnagaaagatctctctttaaggagggggannnaanaagaagtgagttggaggggacactacggcaacctagtagtactggagagggtacaccctttctgggcttaatggagaaaagagcaaggaggagaagggagacgggtggtgtattcagaacaacgagttaatgtttacaaggggggggggggtatttcgcgagaaaaaggaaaatgggtcggagaaaggcggactaattttcgccgaaggaagatgggcttccggaagaggggggtcgctggttgtgtcgccttgagaggagaatctgtgttagaaggagagggctttggaa

SEQ ID NO: 186376 - DNA, 416 bp, Arabidopsis thaliana
  unsure (1)..(416): unsure at all n locations
gaaagggggggaaagaaagaaaaaccaggacaaaaaggaagaacagaaaaaaccgggagaaaaggcccaacaaaaaagacgcgaacaacaacaaaacgaaacaacaaaccacggccaaagcctttttcnttaggagaggggaaaacccaaagagggcgacgcaccaaaaaaaaacacacccccacgagcaagagaagggcggagaccacaaaaacgaaaaaaaccgcccccacacaaccccacaaagaaggggagacgccaaaacacaaccgggaacaaagcaaaaaaacagaaacgagagagaccaaagcgcgcaaaaccgcgccgacacggagggaccaacacaccgaaagcgcaaaccaacggaaaccgcagaagaaaacaggaacgaacgaaaaaaaaccaaccccgcacgg

SEQ ID NO: 186377 - DNA, 395 bp, Arabidopsis thaliana
  unsure (1)..(395): unsure at all n locations
gaccnagagcggtgccgggggataccccgaannganngncaggcagggcncagcgaaaaccaggaaaaagcccggcacccgccccggacaatgaacacaagaaaaacaggcgcaagcccnaaaacccccaacaagaaccccttatccgcgagggggaaaaacggggcaacagaaaaaaacccccccccccaggaggggcgcccccaccaaaaaaagggccccaccaaccccgagggcgcgaaaaggaaaaaaaacccccgggaaacaccccccccggggggaccccccaccccaccggcgacagccaaccccccccacccaaaaaaagctggtcccacccacccgaaaaccccggggagccccgggaacccccccaaaacaaaacggccaacaca

SEQ ID NO: 186378 - DNA, 493 bp, Arabidopsis thaliana
  unsure (1)..(493): unsure at all n locations
cgcctgcagtgtccggnccggaattcccgcttcgaccggcgcgtacagcacaatgacaccgngcncgcccaagcccacggacacctcacgaccnccacagcgaaagaggccggggacaaagacgacaaaacttctctccgcaagaacaagaaaaccctacacagccgccaccaccacgccgcaggggtttttttttggagggtaggaggcacggaagagggncgagggcggaaaagccaccgacaaccaacgggcgggcgccccaaacacacaagacggggaggaacccggggcagaccccgccggagggcggggagcgaccggagccgaacagccgcaacagggcggagacggagcaagccggagggggcgcagccgccccaacgacgcacaaggccaagaaccccaaccgggcgcaaacggagggcggagccagngnccccggccccggggcccaaggcgcaggggccaaccaaaaaaaccaggaggccca

SEQ ID NO: 186379 - DNA, 281 bp, Arabidopsis thaliana
  unsure (1)..(281): unsure at all n locations
cccgggaanaccggaccggnaccggcaggcgnaccagcnancccaagagagaggcagagaagagcgaggcgcaaccaagggcacagccggcgccagcgngaaaaagggagacgcccacaaagccacacaacaaacccgtccggagcagtggagngnaaagcccggggggccgaaagagagaacaaacccacaccaagggcggggcgcacaccgcccgcaacccagacgggaaaccggccgcgccagccgcaggaaagaaacgaccaacgcgcggggagagg

SEQ ID NO: 186380 - DNA, 471 bp, Arabidopsis thaliana
  unsure (1)..(471): unsure at all n locations
cccccggagggaccggggcggaattcccctcaaggaggggggaagcgnannaangaaaaagaggcaaaccacgggcgcgagacaagcaacaggaaacgcggccataggggggaccaaaacaaaaagctctggggcgcgggggaacacgaggaagagggggaaaacccnagagggaaacaaaaaaatattctcctttnaggggaggggnaaanaanagaaagggggggagcaaaaaaaaaaaaaaagcccccgagcgagagggggagaggaaaaaaaaggacgcaaagcacgaagggggggaagggggacacagcgagaggagcgaggacaagaagaagaggacggagcggaaggaaagacagcaaggaaaagagaacgagacagagaggagaacgcgggacggaagaaagcgagaagaggggaaggggcaagggagcggaggcccgcgagcaaacaagccgcgagagacgc

SEQ ID NO: 186381 - DNA, 496 bp, Arabidopsis thaliana
  unsure (1)..(496): unsure at all n locations
acggaagcnggggacctctagagcggtctgccctttgggttttaattccttttcgattgttttcttcagctaacaggagccaactaatcaacaactagccctctggcgctggccaggggccgtgcccgaactttaaggcggggggaaaacaaaggctttaaaaaaaaaacacccacccagggccgaatccctcctcgggggggngnagaacccagcccaacaagaaaaaaaatagggacaccactcaccgcagggggacccccccccggaggtccctttctttgcgggcaaaccccccctggttatgcggggccccctgtcgccccccggcgggaaaaaaaccccgagggcgtccgaaaaagaggcccccccctccccctctccctggaggagaccccaaacagccacaccccctttgttccctaaaaactcccgtcgccgcccccctagggcttcaaaccccggcaaagggcaaacccgggagccgcgaacattg

SEQ ID NO: 186382 - DNA, 344 bp, Arabidopsis thaliana
  unsure (1)..(344): unsure at all n locations
gaccnnagagcggtcgccgggggnaaatccaannaagaagccancaccggaaagaggggaacctcccaggaaggaagccggaggggccgggaacacgagggggggggttactcagaaggggaaataacaacaggagcttctacttgcatagggaagcaaaccaattcttgtgccaggatggggncccacagcagcacgggacggcacaacgagcccccananncaaggggacccggcgacgcgaaaaaagcgcccgaaaacaacccgggcaaacaggcccaagccccggaaaaaccgcagggcccaccgggcacaccccggaggggaaagggcacgaaacccca

SEQ ID NO: 186383 - DNA, 417 bp, Arabidopsis thaliana
  unsure (1)..(417): unsure at all n locations
acgggggggaaaaggatanaaagcaggggcctcggagcgaagccagagaagcaaaacatatgtgtgtggggattatcacataccatctctaaataaaaaggcccaccccaaaaacatcgnctcncgcggggggacccaaaaaaaaaaaaaaacccgaaggggaaaaacccccaaacaaaggagagggggcgacccccccttttttgggggcccaagaggaaccggggaaggccaaccccccccccgcccggacaaaacaacacccccggggcgcccccccagcccgcgggaccccccccgacaaacacaagggcccggaccccgccccccaaagagaaacaagcccccccccccgaagggggaggcccaaaaacaagggcccccccgcgccagccccgaacggcggggcgggagaaa

SEQ ID NO: 186384 - DNA, 564 bp, Arabidopsis thaliana
  unsure (1)..(564): unsure at all n locations
cgcctgcagggaccgggccggaatncccgggtttacccaaggggaaaagcaaaganaanaanngaaacggaggacggcgacgggaccgggacacccgaaaaaaccccacccgggggagagagggagcgcgaaaaccctctcaaaggggcccacaccggcaaagacgcgagaccacaaaaaaaaccgcggcgagcgcttttttttataggggggggggcaaggaaaaaacggggaaaccgggggggaaatagacgcgaaaagaggaggagaaacaaggaaaaacgaccgccggctagatcgagacaaaaaagggcgaacaaaaagagatagctcgattgggccccaaaatggggctaattaaaaatgggaaggggggtgatttttatgcaactcggggatcctcgagcaagctaaaaaaaagctgggaagggggcgtataaaaaaggggttgaggaatagtgaaaacttttaatgagcgagaattttctgcccggttatggcgtggagaaccttttcacgtaagaaatggcggcgtataacctgttccgagtgtgagaacggggg

SEQ ID NO: 186385 - DNA, 325 bp, Arabidopsis thaliana
  unsure (1)..(325): unsure at all n locations
acggaagcnngggaccannagagcggttgnccggggnggttaaaccccnnannnnnangngaccgaagaaaaagaaaagggggaggcaaccaacaaacacaccatacatatatgagaaactcataggcaacttaaaagggtacacaacttccaacttaaggcctgaggaaccacacaccagggacatgctactggggggccccacngcnaaagggcgagagancacatgcatggggaaagaccaagaaaacacaggaagaggcgccacacggacgcaaacaaaaacccccccacaacaaaaccagggaaaaaaggccccaacccc

SEQ ID NO: 186386 - DNA, 427 bp, Arabidopsis thaliana
  unsure (1)..(427): unsure at all n locations
ggtaccgggccggaattgcnggctctacccacgcgggagatccactctatcnctaggggacttaagaggaaaaaaggggagaggccgaggctgaagcacatgtggaaacaaatctacggccgatataggtttcatgtgctctagagaatcacaacatggcctcaaagccactccctaaagtctttttttgggagggggggggaangcgaggggagccaacgccgaaccaaacccccgcggaacgcaaccgggggagggccaccccaaaggggcgggggcgcgcgcgggggcggaggggcgcagaagagcacgcacccccggggcggcggccagagggccccccgaaggagaacaacaacaggcgcccgagaaaccggaacagggaccccccagcggagagaggccggcaaagggagcaacacgcaac

SEQ ID NO: 186387 - DNA, 451 bp, Arabidopsis thaliana
  unsure (1)..(451): unsure at all n locations
ggaccnnagagcgggttgccgggggnntaaaccacgcaagccacaccnaggganggcagggaagacaagncncnacaaaaacagggaaaccnaaacaagacagaggacaccaaaacaagaaaggggaaagacaacacaaacagggccggaagaaccgcccaccaccaaaagggnttttgtgcgggggggacngaaaacgcccaaacaaaagacaccaaccacaccgcacaagccgggggggggcggncaaaaccncaaacccgaaccaccngcngcggcgggcaaccgggggggcccacccgcananggggggcacgaaaccccaagccaaaaaaccacgcccccagaccggccgacacgaaccccccccaaaccgnccgacaggaaacaaccccaaaaaacgcgaaaaccggccgagggaaaccgggacacggggaaaaacgggcccgga

SEQ ID NO: 186388 - DNA, 541 bp, Arabidopsis thaliana
  unsure (1)..(541): unsure at all n locations
acgcctgcaggtaccgggccggaattgccggtgtcngccgaggggggagggccaccgacgagagangagcacgggaaggaacgcaaaaccccggccacccggcagaggagacggacaacaagaagcgggggggagacgcacggggggaaccaagacgcacgaaccgaacgaaagggcgaggaagaaaaaggggacgacatttttttttaagggggggggggaaaaacgggccccgggaaggccgcaaagacagagnggggcagaaaagaaagggggcggcggagggcccacgcgcggagacacaccggaacgcggggagggaggaaagaaccaccggggggagaaaaagcggggggagaaagggggggggagagcaggggaaacgagggacgagaaaagagagggagaaacccccgggacaaaagccgcgggagcggggggacaaagaaaaacggcaaagggagaagcagaagacgccgagggagacccgcacccaaaagacgggggaaccccgcgggcggacggaaaaaaaaaggggggc

SEQ ID NO: 186389 - DNA, 180 bp, Arabidopsis thaliana
  unsure (1)..(180): unsure at all n locations
ggaagcnngggaccacnagagcggctcccttgggttttatacncgnncggnggaganangangacannagggangaggaaagacacacanacggaagaggacgcaagaaacaaggacggggaaactgttttagctatggagcccccccccaaccacaatcatatccccagaagatatcag

SEQ ID NO: 186390 - DNA, 433 bp, Arabidopsis thaliana
  unsure (1)..(433): unsure at all n locations
ggcggagcngggancctntagagcggttttgccgggggtttgattctttaagataagaaggggggggagaaactgagtcaaaagaactaaaaagccgcccaaacgacaacaaactcttgaggagcgtcccactttttcccagaaaaagtaatggataaaaaatttcccaccgggacggagaggcggtgaaataaatggggggggcaagaagcaaaaaccaaggggcacgnagaagaacccccgacagaggggggggcggggggcgaaagaacaaagggaccccnaccagaggcgcggagccgcccgcacccaaaacaaaaccggccccgggggcgggaacgaaggccaaaagcggccccccaaacggaggaggcagcggcgcacaacaaaaacgcaggggaacacgccgacgaggaaaaccggggcgggcccc

SEQ ID NO: 186391 - DNA, 492 bp, Arabidopsis thaliana
  unsure (1)..(492): unsure at all n locations
cgcctgcaggtaccgggccggaattccctcttcgccgacgggtaagtcctnttaaattntggaagggatggagaaatacgctaagagtactaggggtgcgctcattggaaaccatgtcaataagatcatcccatttttgcagtcgagatgtactccatttaaatttgcccctctggagggagggaattttttttacggggggggcacgaaaaagaagcggaaaggctggtagtaaagtgactggggggttgggaggttttgggccggctgagcattgggggacatgataaaaagggttggaccttggggcgggtggggggatatgttccttgggggttgtgcgccttagcgcaccagggggaatgctaaaaaaggagtgtcgtgtgccagccacgatggagggggggccggaaaaattgcttaccgggtttatggggggtggagcgagaaaaggcgtttgggggtgcgatgaaggtgccgaggagaagctct

SEQ ID NO: 186392 - DNA, 466 bp, Arabidopsis thaliana
  unsure (1)..(466): unsure at all n locations
cgacgaagcngggacctctagagcggcctgccttggtttaatcctttaaacattaaaaagatgatggcgaggaggagtcgactcagacaggggaaatctactatgaccaccagggtaccgtattttttcgaacgatgaacaaccagcggcaaaatatgtacgtcgaaaaaaaaaaaaaatcccttcactgggggggggagaacccgggaaccaaagaagggaaacacgcgccccggaagcccgggggacagcacaccccgatttttccttataaggccggcggcagccaatttcggagggggaggccgggcaaagcctctaccacccccgggttttggaaaccggacggggcccccaacaccataggggggggggaaacgtccccgggggacaaacccccctcttgctttcttcgcggggggccccgaaaaaaaacaaaaaaaaagggggagagggcttccctggg

SEQ ID NO: 186393 - DNA, 427 bp, Arabidopsis thaliana
  unsure (1)..(427): unsure at all n locations
cacnagagcggcctgcctttgtgttttttttctttttttgttttttgttgtttagtatgaggtcttttttttgtgctttttttgttgaacgggaactggtgtataacattgaaggtttttacaaggggaaccaagggtttacaaataaataagactattgaaaacggggttgagctcggttggggggaagaaaaagaaggaaaaacttttcataaaaaaacttggaacaaagggaaaggttggtcctcttaaggcatttttgcaaacccaaaggggacccatgcagagggggataccgtcctcaatggaatttcatttgacacaacaacgcctttttttggttttccaaaaaaataaaatccctattgccacaccctttaaacttcattcaccattttttgttggcgggctctaatacaaaaccctt

SEQ ID NO: 186394 - DNA, 483 bp, Arabidopsis thaliana
  unsure (1)..(483): unsure at all n locations
acggaagcnngggaccactagagcggttgccctttgtgttttattcttgttttttttttttgggaaaaagcacaacggaagcagaaaatacggaacagagggccctcaaaacattttagcttggcgcaaggacatatgtctacncgacgtacaataaaccacgaacattctatggaagagggcaatcaaattcggttgaaaagggacatcgccaaacccccaagccatgtttcttggaactgcaacatgaagagtgttcaggagccactgactcaaagtcccccacgggggccagaaagcccctaaatccttagttattcaccccatgtagggcttctgttaaacacctggagtcccctaaaaaccttggtagtcgtcaaccacacatttcttggcggccttcggcagggacaccctggagaccctacacaccccgctatacactcgggacccgcctactgcgggggaacccccccccacctg

SEQ ID NO: 186395 - DNA, 406 bp, Arabidopsis thaliana
  unsure (1)..(406): unsure at all n locations
cgcctgcaggtaccggtccggaattcccggcttgaccacgcggacaacgcacgcgcacgaaaaaacaacccagagggggcgcggccgaccacgggaacnaccacccgcgggcacaaagcgccacaaccacagaaggggacagcagccaaaaaccccacaacgaagaagaagcggcgcggacaaaccttctcttttaagggggggccacaaagacggaaggaacgcgccaaaaaacccaacccaaaaaaccagcaggggcgcccccctcaggggaccggacaggcgaaggacccacaaacggaggaggaagccccgacccagaaaaaccgaagccacgaaaccgcaccccccggccgaccaagagaccaggaaccgcacaacccaagaacaaacccccaggaaggag

SEQ ID NO: 186396 - DNA, 482 bp, Arabidopsis thaliana
cggaagctgggatcctctagagcggcctccctgtgggttttaattctattgaattggttttggcttttttgtttgagaggatttttttttgattacccgattgttaactccacagtccactgacagagacagagtttgtggccccccccccaaagatgggaagaaattggtggaaaaaaaaaatgatgttcccctcatagggggggaagaagcgaaaggggcccaccagcaaaaaaacacccgcccccctctgggtgtttgtgggaacctcgtataaatcccctctaaagggcgggaaaaggagctcaaagattgagggcggcccaccaagcctgcggggcgccgcgaccctttgggtccaaggagttttatgcggggccccatcctttttttggaaagtcaaaaaacaatccccgaaaactaaagaagggccaccaaacaactggggggggaagaaaaaacgcgggggcagaaaaaaaaac

SEQ ID NO: 186397 - DNA, 186 bp, Arabidopsis thaliana
acgcctgcgtgtaccggtccggaattcctttttttgaccgacgggggaaggccttatctgggtattaaatatgggctttattgagggtgtgtttaggatagatgatgacacgagggaacacatgggggggtaaattcggtgtgtatatatgtggcgatagattttgccttggggacaatgttgggt

SEQ ID NO: 186398 - DNA, 248 bp, Arabidopsis thaliana
  unsure (1)..(248): unsure at all n locations
ggcggaagcnggganccactagagcggcctccctttgtgttttttttcctgtttgtttgagagtttatactcatgtgggatgtaagaagagaaagaaagagccttggtcttcgcgngcggaggaaaatatttgttttggcgacaaaaaaaataggtctgagaaaccctccagatagaacgcagacgaaggtggcgctcccagaggggggggagaaagaaagggcgcaacctttcgaaaaaaacgccca

SEQ ID NO: 186399 - DNA, 475 bp, Arabidopsis thaliana
  unsure (1)..(475): unsure at all n locations
acggaagcngggatccactagagcggcctgccctttgtgttttatttcttggtttttataatttttggttttttaggtgctcatgcttncgaaagaggaaaagaattctttccaaagccataagaaccaccctttttccccattttttttttccagattaaagggggaaaacccccccgaaaaacaggggggtaaaccggggggtgggcccttttcccggacagaaaaaaaacatttccttcaaaagtcaaggcggctcagaggaaagcgtccctccaaaggggggcaccacaaagacctgagtgtttagccgggccccacaaaggggtttttaagcccctgtttcgcggagcaccggaccccccttttctgggaggggggtaaccccttttctttttttccccaaatataagggaagggggggtttttgttttggcaaccgattggattcgccccccccccaaaaaacctgggc

SEQ ID NO: 186400 - DNA, 445 bp, Arabidopsis thaliana
  unsure (1)..(445): unsure at all n locations
ggaagcnngggaccannagagcggcctgcctttgtgtttttttcctgaatntntatcacctttaagttttaccaggtggaggtggtggtggcggtgaactgctgctgctgctgttactgctgcttctttttcctctcagnggcctcttaggactgcggctccttgaaatcttcctaggaatccttcttggtcttggtgaactagangaagaagatgacctcccacgtctcccagctggacctcgtcccttgcggggtgagatggaacttgaacgagagcgaccaggcctacgaattggggatcggctccgcctacggattggagatcttctgggaagacctgggaagcctcttggaggggagaccttttcttagaggaagaggagccctctttcgaacagactggcactaatttcttctagggaagcccctggaggaaatcattt

SEQ ID NO: 186401 - DNA, 191 bp, Arabidopsis thaliana
gagcggcctgcctggggggttaaatctcggtggtggtttttttaagcaacaacagcggaagcaaaccctaccggagaaaatactccccagagaacggaaaggctcccgaaatgggaacgccccgcgaaacacaaacattacatgacacgagaaggggggccctgtataataaggcgctgagggcaacccac

SEQ ID NO: 186402 - DNA, 470 bp, Arabidopsis thaliana
  unsure (1)..(470): unsure at all n locations
cggaagcnnggatccnntagagcggtttcgccttgtgttttaatctttttttttttttttcggatctaaaagcgggaaggaggattgatcgaccctcatcaaaaaaaatgcatacaccttgaatattgcgatttctatggtgtgggagtatgaaaaaaggtcgatgctaagtatgcgnggggggggcaattaattgggggtgaggaccggggccctccgggggagaagctcaccagcttagggagaagagcttgggcaatacacggaaacttcttccactcatcaaaaagagcttctagaatctctttggctttctccttaaggggaaaccacaatccattcctaaaacggaacagaggttttttcccgggccgacattaaccatcttttcccccaccatggttctccgggagaattttgaccctgtgtttagggaagaaatagctttattggctgccgggaggagaaac

SEQ ID NO: 186403 - DNA, 179 bp, Arabidopsis thaliana
  unsure (1)..(179): unsure at all n locations
agcnngggaccnntagagcggtcgcccgggngggnaaantcccagagaaaccngcanggnancncacagaagcaaannngacactcgcgtgacagcataagaaagaatgaaaccaaatcctaagtttcacatgtaagaacgtctggcacaaagcatacttggactctactatgcctatc

SEQ ID NO: 186404 - DNA, 448 bp, Arabidopsis thaliana
  unsure (1)..(448): unsure at all n locations
gaccnnagagcggctgccgggggggtaaaccccgaanaaannaaacgncggaaanngggggaggaaaagaaaaaccaaacccgcggggccgggggcaaaacacggaacacagggaaaaaaccagggcacgcccgcccggaggagagggggagacagaaaaaaaaancccacccctcaagaaagaggggggganacccgcgaggaacccaaaaaaaaagcgccccccnnggggggggggggggaaacaacaccacacccgggagcagaccccggaaaggcaagaaaaaaagagcaccaaccccccgaaggccccgcgggggacaccgggcccaccacccaaggggggacccggcgaagcggacaaccaaaaacccgcccccagaggggcaaagccacaaaaggacccccccccaccgagacaaggggccccacccacccacgccgggcc

SEQ ID NO: 186405 - DNA, 449 bp, Arabidopsis thaliana
  unsure (1)..(449): unsure at all n locations
gcgacgaagcngggaccactagagcggtgcccgggggtttaatccttttttattattcttttctgaataaaaagcacgatgccttacatatatcttttgcagggaatagatatatttacaaaaagataagaaacgaaagaatatgaaatatacttagacaacaataaaaccaaagacctaatttttattggggggggcgcacacaccggggaccccacggaanagagancacaaccaagggggagacgaccagagggaaaaatatttttcaagatcaataccaagataacatttcttacggggggaatggcttccaaaaatgaactttatgggacgcaccttgaattaacctaaaaatatgccctctcctctaagctggccattcataagtgcctcctggagccccacccggttaaattcataccccacaaaatggggggccggcctat

SEQ ID NO: 186406 - DNA, 458 bp, Arabidopsis thaliana
  unsure (1)..(458): unsure at all n locations
cgcctgaagtaccggggcggattacaggttttaacgggggggagagcgttantattaaaattatcacagccgggaggaagggggggagtcggagacagccggacaaaaaaaacggaaagatgctggggggcggttgtttatttcttgttatgggggcggatgggctaaatggggggaagggtgtaggggacgaacgagaaaagcggcgtttttttttttggggggggggggcaagaagaaagggagagagcctgtttggaggagtgtaaatcctgtaaggggggagttgggtagaaagttcatggacggggggggaaagagtatttgacttgggggtgggggagagagattgaggggagagagtaactgttttaggagtaccatgtagagaaggggaccagaatgtggaaggtgggagcgcctttgttgtagggatcgaatgtagaatacgtgggggg

SEQ ID NO: 186407 - DNA, 431 bp, Arabidopsis thaliana
  unsure (1)..(431): unsure at all n locations
cggaagcnngganccantagagcggttgcnccttgngtttaattcttttcaggggaacttttcattcacgtaagcacgacagagtcaatacttgtgacgatgagcatcaatatttactactggcaaaagtatacttaaacaaaaacaaaaacacgggtaagggtctaagggaaactactaaaaccagctgatacgggtactacnccanaganggatcaacataagactcacacgcgngggatttgccggtcaccatataggtgactggggatgacgcttaattttgccagcctcgtttacacttttgcccgactcttcctaagaactactcaccttcataaccgggaagcctaacacttggggcttctataagggcccaaagaaattcttgcagaaggacaagtcccccattatgattcgaagtccgaagg

SEQ ID NO: 186408 - DNA, 343 bp, Arabidopsis thaliana
  unsure (1)..(343): unsure at all n locations
atggggaagcgataaagggggggtggagggaaaggccgtctaggttaccaccgcactnaccttaggagagagaaccacgcctgcaggtaccgggccggaattcccgggtttacccacgcgggcgaagccgcntgaagcagacgacgcgggcggacagcgtggggaggaattataccctctaagctgtcgaagctccggacttcttcgagacgtgtttgttacttaaacacacgaaacaaggaaaacgcgcaaactaagggcgttcctcgaatgaaaggggcctttttttttccgggggaggggagagaancagggaggaagccctcggagagaagaagatgaa

SEQ ID NO: 186409 - DNA, 419 bp, Arabidopsis thaliana
ggggtgccgcgtggctgtgggggggccgggcggcgtgggggtggggcgggcgcttttgctctctcgctccctcgttgtttggtggttcgtgcttggtgtgcgcgaggtgttttttttttggggggggggggaacacgagagggcgggcgggaagaaagggcgcaccgtaggaggggcaagagagggcgaaagaaaggagacggggaagggggggaggagaggaggcgggaaggaaggaggaggggggggagccgaacaagcccgagaggcgacgatcagacggggcgcagaggcacggggccggacatagcaagatgttcgtattagggttggataggtgtgacgggtttgttgattgtggtggttctatgtgtttatcgatgtagtgatgttgagatggttttggtgtggatgagatg

SEQ ID NO: 186410 - DNA, 271 bp, Arabidopsis thaliana
  unsure (1)..(271): unsure at all n locations
agcnngggaccacnagagcggtttcccttggtgttttaatctcatgagaacgcttttaaggaatgagagggatttgtttttcctaaataaacaagagcgctcgggtaaacaaatggcaactggggttgaagaaatttgactcatccatagaaggcgacgctaccgcacaagatccggactatcatcatggggggggcgcccagggcccgggaaaacaaaaaggaagaagatccccaacccagccggaggggaaccgcaccccttaccaacc

SEQ ID NO: 186411 - DNA, 536 bp, Arabidopsis thaliana
  unsure (1)..(536): unsure at all n locations
cgcctgcaggtaccgggccggaattcccgggttacccacgcgtgcgggcacgcgtacgacaagagaacggggacaagagggatcagaagagctggactggtggagccggggataactcaggaggagattggtgagcgaagcaaagaaagcgaaaatctccggaggagaaaaagangagggagagagttcctctttggggggagggggaaagatgccgggggagagaaaaaaacaaaagggtgagcaatggggggggggtgggggaaaaaccccagggaggagaggtgagaaagcggaaggaagtaagggaacgaacctccggaggagagcctgcacgaaggaagtgcagtgcggaggcgtgagggttgagggatagaggcgggggacaacgaggggctggtataccgccgagcgccacacggagcagaaattggggaagactaagaaaatcagccaatatgcaggtagcgagaagcacaatctttggtgtatgctacgaaaacaaccccccgcaacccaactcccaacaatggggg

SEQ ID NO: 186412 - DNA, 435 bp, Arabidopsis thaliana
  unsure (1)..(435): unsure at all n locations
acggaagcnngggacctcnagagcggcctgcctttgtgttttttttcccggagtaacacggaaccaaaccgaaattgaaacagcaaaccgatccatattagcttaggttttacacttttactttggttactgtcattcataaatctgacactggacccaaaacagagtaatgcaactcttagttatcaaactcngggatcggagaagaaacctacggcccgaggcatgtcttgaatgcagagaagactcttcttctctttgcatatgagatgtaatcaattgaattaaagaaaaggggaggaaaaataaaattaggaacttaatgagattgacaccatcagcttcgagtcttaacggttttgaagagtttcgatttgccttttttcccctgcaaagcttctttgcttcgcatcttcaaaacaataaaactttctt

SEQ ID NO: 186413 - DNA, 409 bp, Arabidopsis thaliana
  unsure (1)..(409): unsure at all n locations
cccatgacgagagcccaaaggggctggattgagagcagaccgcacctttgcccttcttcatctcttgactcccactcacctttgatgccgcgcccctggatctctcattcctaccggaacaggaccttccgaaagcggctaaataatatgggagtgccaacagnaaaagcccccgggagaaccaaaccccctataggcgggaaacgttccgagccacggagaggcccccggaaagagcccaaaagagggagccccttggcgccgggcaagaaaacagggaccaagaaaagagggggggcgatatcccccacatggtctaattttcgaatgggcgcagccctcatttcccattagcgtggtggaaaaatcccttcggacaaccccacgtcaaatgaaaacccgtaagggt

SEQ ID NO: 186414 - DNA, 473 bp, Arabidopsis thaliana
  unsure (1)..(473): unsure at all n locations
gcgcctgcatgtaccgggccggaattcccgctttcgccggcgcggacaggcaagangcaaaganngangggggcgggagcggaggngaagcagaaaagagcccacgcgacngncgaacgagggggcccaaagggcacagccgcgaagagagacgagaacagccaagggagggcaccccccncngcgaaagactctccttggggggggnaaaagnngacacgaccaaggacaagaaagggacccccagagagggcagagggcgaaaacacacaagcagggccagcacgggagcggggagagacacagcaggggcagcccgaccgggggcaccgggcccgcaggcaagaaccaagaagccaggaccaaggaacgccaagaaaccacacaaagccagggcgaagaaacaagaccggcgaccggggcggcgcggaagagggcgagcccggcaagccccaggaggaaaaaaaggcggc

SEQ ID NO: 186415 - DNA, 489 bp, Arabidopsis thaliana
  unsure (1)..(489): unsure at all n locations
cggaagnnngggaccannagagcggtcgaccgaggggggaaaaccccnnnnnnnnnncnnncncgcgngnnggggggagaaaaaaccacaggaacccaggggggagaaaaccgaagcacgcccaaagacagaaaacaccgaaccaacaaaaacccgacaaaccccgaggaaaaaacaacacgggaaaaacaaatcctcnccagggggtggggacaacaanaaagagacccgagcacgcgaaaaccccccccnccagggggggggaagggaaaccccccccccccccgagggggagaaaaaacaggcgggggcacacgcgaaaccccagaacggggccccagggcccccaccaaaccaaaaaaccgaaaaccgcccaaaaggaaggaaaccccccccgcccgagcaacgggccccccagggaaacaccccccaccaggccggaaacaaaaccccggagcaaacccaaaagaagggccggggccaggccgg

SEQ ID NO: 186416 - DNA, 426 bp, Arabidopsis thaliana
  unsure (1)..(426): unsure at all n locations
aaacaacaaggggaaagggggganaaacaaaaacaaaacagaccagaaccagcgggagagcacncaagagcgggaccaaaggggcncacaaaggggagagaccaacggaganggggcagccaaccggtgttagggggggganaaaacaccgccggggagggaacggaaagccaccgaaaagcgggggaagggaaaagagcaaggacagggggggaccgaagaaacacaaggaccgggcgcagaaaaggaacaaggggaaaggccccggggaaaaacaagggaacccccccagcggggcccccggaaaccgagggacgaaaaacccgccccaaccggggagaacaccgcccaaacccacgggcaaggggaaagggaaaggagaaccccggggcccgcccccaaaaggaaaaaagacgccgacccccc

SEQ ID NO: 186417 - DNA, 126 bp, Arabidopsis thaliana columbia
  unsure (1)..(126): unsure at all n locations
acaaaaaacagaacgggggcggntaataaggcggacggagnacangacannaaaaacaaaaggaggacgaatttttattttcctcatataagcagcctctttgttttattaaccaagccaccaccc

SEQ ID NO: 186418 - DNA, 273 bp, Arabidopsis thaliana
  unsure (1)..(273): unsure at all n locations
gcggagcnngggaccnnagagcgtttgccgggggtttaggccccaagaaagaaaaacagccaacgggcgggcgagggctcnggaacaacngcaggaacaccaaaaaagggaaganggacatagagtgcatgcaaacnaaaaaaacaagcacgagaatcgacagaacccggaacataaaagtatttttttaagcggtgcnagagagcacccacaacccccccgcagaacaaggcgcacaccgggggacccagcaaagaacccaaccgcgcgggg

SEQ ID NO: 186419 - DNA, 517 bp, Arabidopsis thaliana
  unsure (1)..(517): unsure at all n locations
cgcctgcaggtaccggnccggattnccgggttacccacggggcagagctcttnaantccttatttaatcatctcatcttctggaaattcgaggtgtttataggggtggggccttagcactggaaggaatgttttcgtccggggaccaacaaagaaaaaatctcttgtttccttgaaatcggcgagggtctctttttgggagggtggggacagnacgaacaggcgacaacgcagaaaaccccacgaaaccagtgcgcggcgcgccccccggagacgaaagggggggtcgcggaaagcaggaacccacaccccagcgcgaggcaccccaaaggggcggccccgcanagaacggcgaggagacctcacgcgcacgaaaaggaaagagaacctggccagagccgggagaaaaaggccgccgcccctctccctcgcgggggaggagacccttttaggggaaacgtactgtgttttggggcttacgaggcgcggtatcccgccgccgggagcccatttatctt

SEQ ID NO: 186420 - DNA, 509 bp, Arabidopsis thaliana
  unsure (1)..(509): unsure at all n locations
acggaagcngggancctctagagcggtttgccggggggttttattctcccaacaaanaaaaagggagatgaagggggatgatcaaggcgtctaacatgctgggggacaaaaggcccgcacaaagatgttctttgtctaagaaaaacacccaaacaacaatcgcacgcggaacccgaaaacaaccccccgcngaccccctcaagtggagaggggccgcnaacacaacggggcaacccccaaaaaaagaacccccacgacgcggggggggaggggaccccccccagaagaggnggaccagagaggcccgggagggaaccaccgaagaaacgcggaccgcgcccccaggggggggaccccggaagccaaaaaccaaaaacccagaacggcgcgggggaaaaacgaagcgcccggggggccgcccccaaaaagaaaaacccgcgaccccggcgcgaacaaccancccagaagaaagaagcgcaaacaaagggggggcaaaaagagggaaaaac

SEQ ID NO: 186421 - DNA, 401 bp, Arabidopsis thaliana
acgcctgcaggtaccggggcggaatggccggctttacccacgcgggcaagcccacttaaaatatggaagtgaactgagagggggcgctcctgggggccttcatgagaggcaattatcttggcagagaggaattctgcgggccgtcaaccagccttgtctcacaggggaaggattgagacggaaaagttttttttttaggggggggggaaaccccggggagcgaacccgacaggggacccccacaacagcgtggcaagcggaaccccgcagatccggcagcggaagtcaaacgggagggaacgttccggggggccggcgagatgtcctctccgcccgcgcgtaacggggctcgtcaccggtcgcgctgcactgccgagctacgtatgtctggggcccgcgct

SEQ ID NO: 186422 - DNA, 523 bp, Arabidopsis thaliana
  unsure (1)..(523): unsure at all n locations
cgcctgcaggtaccagggccggaattacctggtttacccacgcgggaggcccgcggtacacttttcatctcctagacagaggagactcgggagatgagaaagaaaatggcgggggggtgttattaactatcagataatacacagtgaaattggttgcacggagacctacctggacaaaaaaaaaagaagcgcggattttttttttttaagaggggggggcaccagagtngaagagcgtgggaagggaaaaaggagcgaaccggttagcgctgtgtgaaggggtacccaataagaaaaaatgcggagacggtaggagacaataggccgccgttgagaaaaactcgccaagaagaaaacctggtgaaacaaaaggcgggaatcagcagaagggtggagcaccgcaaggcaaacgaacgagatagggggagcgagagggagggggagaagggaaaggaggaacgcgcnaccggaagggaattggtagacagctgcagtagacgggaagctgagaaaaagtcacgcg

SEQ ID NO: 186423 - DNA, 458 bp, Arabidopsis thaliana
  unsure (1)..(458): unsure at all n locations
cgaagcnggaccnnagagcggctgccggggggttaaaaccccgncnnnnggnaangaggaagagggggggggaanctgcggagcgggggcaaacaaaaaaaaacaaaggaaggagagggaaccctgggccccccacaacccacaagacgggcaccaaagaaacccggagaagggcccaaaatggtgggggggggaaaaaaaaaacaccccaggggggggnaaaaggcaaagccaaaaaggggaggggaccaaccctggggcaagcccccccccccgcgggggcaaaaaaaagaaagggggcccaccccgaaaaccccaccacaaaaaatcccccccccgagtcaccccaccctgcgccgaaaaaccacagggttcaggggaacggtgggaccagaaccccaaaaggcgggggggaacaaaagggggtgagggtataaccacccaccccacccagccct

SEQ ID NO: 186424 - DNA, 557 bp, Arabidopsis thaliana
  unsure (1)..(557): unsure at all n locations
caagtgaccggagccgggaattcccggcttcngacccacgcgggcgcagaccacngcnntnncagcaaggggaaatgagagaaagagaggcgggatagagaaccttntgaaggctggctgtcaccctcacattcctattttcggttggggagggaagagaggaatggcgttgctcataatccaagaacaaaccatatggggggctttctcttgagtgtccgcgagggggaggagtttcttttttattaggaggcgaggggaaaaaacgcgcagaggaaagaggccgcgagaagaaagacacccaccacaacgaaacccggcgagggaggtggtcggaggacggcgtggggacactaacaccatttaccctagggggtcgcagcaaaagaagagggggatgttggggggaatcaatctgcggaaggtgttgtgtggttacgagaagcaatatgtgttctcctctgggggagtagagacgacccgggggaagggttgagaactttgcggtctttagggggaggcggtttcggagtttcccctgtcgtagaggggcaacc

SEQ ID NO: 186425 - DNA, 462 bp, Arabidopsis thaliana
  unsure (1)..(462): unsure at all n locations
gcggaagnnngganccnnnagagcggttgnccggggnggtttanacccaaaaaaaaggggagaagcaccnaagaagaaaaagaaaggcacaagcctaacacaaaaccaagaaaacactcgggacgcaagcggcaacagagccccnacnacagacacacccanaacgaggangcccagagagaccttactactaggggcgtccccaacaaacaaaaaggggaaagggacacaaaacacacaacagacccggggggaaggaaaaacctctttctggggacaggccccaaaagaaggacaaagaaaaaccgggcccatatttttgtgaattccgagggtgttttcaaggtccccatttaataccattcaagcatccaaaanaaccccctggagagggcgggtttcataattataaaacctggtccttgtggttcacgaaaaaaagtccttcccctcccacaccac

SEQ ID NO: 186426 - DNA, 404 bp, Arabidopsis thaliana
  unsure (1)..(404): unsure at all n locations
aggggttgnccggggggggttaagaccgnnnggngaaaaaccacggaaaacaagggaacganagggaanangcgaaacagacagcccacaaaggncgcacaaaaagaccgttaaaaacaaaaaagaccagaccaccagggcaaaaagccccacagaaacacaggaacttttttattgcggtgtagagggcaccaaccgcaacggtgaacccaaaccggaaaaaaaacccccgggagagaggggaggagaaccggcccccccaaatgcccagggcgcccccaggagaaaagacctagggtcccacagaggaaagaaaacggacaacggggcgacgaaagcctccaaagggggaccaagaacccagcaccccgccgggcggaggcccccccccaacaccagaacaa

SEQ ID NO: 186427 - DNA, 533 bp, Arabidopsis thaliana
  unsure (1)..(533): unsure at all n locations
acgcctgcagtaccgggccggattcccggcttacccacggggcaaagcctaaaaatgatatgcgcaagaatccgacgggtgttgttgtaagcactaggttgtactatttgaacaaccaaacactcgagaaggatttgtgggaggacttccttagggggtacttctgcaggagagagtaattgaacaacacttttttttttagggggggggaacaaggnggaaagagaaaaagagagaaaaacgcgtggccgacacacaaaaagaggtggggtgaaaaaaaaaactaaaaaggtggtggggatgataggagaggaagggggtgtgatattattgactctggtgcttgtaagacggattcggtgcttgtcgtggtccggcttgaagtgtgggtagctggtatatggccgagaaggaatagagataaaggaggggaggcgtggaggcggggggagaagtgagatacggtggtaggtgttgggagagggaaagctggggataaccagacgtgtgagtgagaatatggaggtggggat

SEQ ID NO: 186428 - DNA, 479 bp, Arabidopsis thaliana
  unsure (1)..(479): unsure at all n locations
agcnggganccacnagagcggctgccagggggtttaatcttgtaanaganttaggnnnggngngaggggaaaaaacaaagccctcaatccaaaaaccaaagaaaccgccccagcggggataacccccccccaaaaggcaggccggggggagaaaaaaagccaaacaacggagcggaggttcctcttaaaggggggggggacaaaaagaggccaacacaaaaaagaacgccgcgaacaaaaagagccagagggcaaaaaaaccccggcaaagaaaccaaaaaacggcgcggagaagacaaaagagaacccccccctaaaagggaaaagcgccgcctgagaaaaaaccattacacgggaccggccccccccggcgcgcggagggaggggggagaccccccaaggggggcaaaagaggaacccgggcggggagaaccagccaaaaaggggcccccggggggcacccagggaaaaaaaacggg

SEQ ID NO: 186429 - DNA, 497 bp, Arabidopsis thaliana
  unsure (1)..(497): unsure at all n locations
cgcctgcaggtaccggtccggaattcccgggtttgacccgcgggtgcgggccancgttagagactcagtcgagcagagagggacgacgattgggcccacctccgaagaagatccttaccttggcatgggtcgattcacttcccaagttgcctgggctgatgcctggtgcccatggtgcaagagccctgaagtgtctcttttttgggggggagggaggggacccgtaaacaaaaggggggagggagcgggccggggacggggagggggcaacgacaggcggccaggggtcagggcaaaagcggcgggaaagaggggggggggggccgagcgcaggcaaggggaacccgggcaagggggggggaacggggggagggagcggcccgcgagcggggaaacggagcgacgggaacgggcgcgcaacaaagaaaagatgggacggggacagggggtgagaagagacccggggaggagatcgtgaggggggagcgcaccccgag

SEQ ID NO: 186430 - DNA, 397 bp, Arabidopsis thaliana
  unsure (1)..(397): unsure at all n locations
cgaagcnngggaccnnagagcggttgccggggggnaaaaacccgacncaacccaaacaagacanaaaggcgcccccaaagggtncccgaacgaaagcagggaaacatntagaggaagcggcaggattgcgggcacaaaacgagcagggatgagaatggaagccccccacaaacggcacaacccctttttagcgggggcgccgcncccaaggaggggcagggcgaccaccacccgcccccaccggggggggggccgcccccccgccccaaaccccccaccccggggggacccccacaaaaccgggacccccngggggggcacgggggccccccccagcgaacacgggggggaaaccgaaccccgggccggggccaaaagcgcccccccagccgcaaaa

SEQ ID NO: 186431 - DNA, 378 bp, Arabidopsis thaliana
  unsure (1)..(378): unsure at all n locations
gaagnacgagcgaagaaagaaaaaaccaacacaggcgcaggattagcagcaaacgagccaccgagacccgaaaacgccaacccagaccacacatacttaaaaggagcagggacacccccgcgcgggaacgcggaaaaaaaaccccccaccggggggggggggggggcccccccccaccaacaaaagccccccccgcaaaggcacagaaaacacgcagggccgaaggacgaaaccaaaaccaaaagaaaggacccagcaaccgaaaacccagaaccagcccacacagacgacgaagaagcgaaagcggaacgacggaaagccgcgaaaaacgaccagcaggcagcacaaacagacgcgcggaagaaagaagaaggcccg

SEQ ID NO: 186432 - DNA, 375 bp, Arabidopsis thaliana
  unsure (1)..(375): unsure at all n locations
ggggggaagcttgagaagnacccggggaacccccggcaccaggccccccgccaacgtttctggggcaagaaaaaaaaacccggaacccggaacccggggggaaaaaaacccaaanttantcgggggtgggggccccccccccgcaaaaccccaaaaaaaaggccccccacggggggggggaaaaaccccccctttcaaaaacccgggcgaaaaaacaaaagccaatcccgggcgaggagacacggcccccacaaaacatcgcccgaccccagcaccccggaaccccgccgacaccccaggggtcggcgaccccttgatcccccccccaaacaaggcccccccgcgcacgcaccccgaccaagccaccccggccgg

SEQ ID NO: 186433 - DNA, 507 bp, Arabidopsis thaliana
  unsure (1)..(507): unsure at all n locations
cccgcccgcagggaccgggccggaatcccggcttacccaaggggaaaagcggaaaggagcatctgggggctctgctcgggcacagcagaagaagncactcaaggaatcgaaggtactgggctcacagctatcgtcacaggagcaccaagagggacgggggaagagaccacgcgggttccggcgcgnaacctgtgcctcaaggggagagggcgggaaggaaaacagaccccgggaaaaaagccaccagaaaagagacggaaggaaacaccccaagccaaaacggacggaacgagaggggaccccaacccgaaggccacaggcaagaaccccgcaaaaaaaaaacaagccagaggacccgcccaagaaacagaccaagaaaaaaagcggggacgaggggcaggggccccccgagcgacccaagcgaaaacagggaaggaacagggagcaaccaaacaaacgggggcacagagacggaaacaaaccccccggaggaaaaggaggaaaaaa

SEQ ID NO: 186434 - DNA, 467 bp, Arabidopsis thaliana
  unsure (1)..(467): unsure at all n locations
ggaagcnnggaccncnagagcggctgcctgggggtttttatctttttcattgtttttgattttttttggggggcgttttttattttttcttatcgtgctcgaaaaaagaaaagggattggttgttttttgacccattacttttgtgcgaccaccttggcctcggcggggggggccccaataatgtttgggggttgccccgcccccccccaaaaaaaaaaaacccaaaccccccacccggcggacgtttcagaaccccggggaacaggcgccataaccccccccccaggaaaaccttctggtgcccggaaggctccctcttaccagggtgctgttttgggggacccccaggggccccaaagctctccccctcccccacccgctttggggtggggggtgttaacaaaagggggaaaaaatgggagcgggaccccaaattttttctttttgggggggagaaggaaaaccc

SEQ ID NO: 186435 - DNA, 498 bp, Arabidopsis thaliana
cgcgtacgtaagcttggatcctctagagcttccgcccttggggttagtttttttttaattaaaaatcacctttattttattttcccgcgaagttttccaagagttaaagaccttacaatggggtataaaaataggttacaccaaaaaagattatcccgccagttgttttttcccaaacaagtgtccttcgccgccaatttttttttccggggcgtgggggtttggaacccgtgggagcaatctaaaaaaaaaaaacaaggggcgagacttttttgcaaggacggccctcgaacgccccccccgtaggggggggtccaggggagatagccaaactgcttgtcttggagggagacggccgcctgtgcggggacccttttgcctctgaccgctaggggagtgatgctcaaagacatggatgtgcggagccacctcgtagtgccagggcggagccgcaactgttggggtagtgtcgctgttatagcgtgtgccttgtaatgt

SEQ ID NO: 186436 - DNA, 550 bp, Arabidopsis thaliana
aaaattttccccccctggggataacccttttttaatacaaaccccttcctctctcctctccctccctctccttttttccacacttttttcttttgtccctctggcaacactcccctaactttttctcctctccccaattttccaacctccgctcacagattttttattattcccccctctcttctctacttttttatttaccgggtggtggtgactcacagcaccttgtgcgcgtcttttaaaaaaaaaaaaatacatttttttcttttctcacaattattcatcccccctctcctaacccactccccccttttttacttctccaaccaaaccacctctcgatccgcctctttatgttctaccttcacttctatccactacttatcaactcttctctattctctctctacaactatttaccacaccctattttcattaatttgccctttccgtaacatttattatctctctcacccctcacgttctttccactctcaatgcactatcatatactatcctcttcctccaaacaatcatccttttctccaca

SEQ ID NO: 186437 - DNA, 369 bp, Arabidopsis thaliana
  unsure (1)..(369): unsure at all n locations
ctccaaaaaaatttaattnatgggaaaaacataaatcccaacctttttccatcccccaattctaaacaatggaaaaaaaacctcacttgttttaccccaccaacctttttcccattttctttctgagcgggggctctttcccgcggngaaaataaaaataaaactcctttccccctgccaanccttttcccccccctccctttttctccaaccctttcttaatctaacactcttanaaaaaaattttcttttcccctttacccttggtccccttttcacatttctctcttaaaaaaaactcccccctcaaacaaattctcttatcccaacttccccctccacccttcacctttccccctcttcctctaa

SEQ ID NO: 186438 - DNA, 284 bp, Arabidopsis thaliana
  unsure (1)..(284): unsure at all n locations
ctcatatcctttcccaatttccccttggccacgctccaataaatancccttaattttttttgangaatcttagtttttaattcttaaccgaaaatgattttctccattcttagttttctttttaccaaaactttatataaaaaatctctaccttggtgggtnaaaaataagtgtccttaacaattaaatataaactcattgcccattttctcctaattttcgatttcacaagagttgatcataaaaacttaccacaccatttttcaatcaattttttttaaaaa

SEQ ID NO: 186439 - DNA, 868 bp, Arabidopsis thaliana
  unsure (1)..(868): unsure at all n locations
tcatataccccttcccaaatttcccnggtcgagccacccctccaataaaatcanagttttttgaaaaatttgaaaaaaaataaccaaaaaaaatcaaaaaacccaccccctaaacttgagaaattcctcctaaaccagaaccaaaaaaaccccctcattatttttttttttgaaagaagaggataaatcntcttccaccacctaaaaaaaatnactccttaccatttcantcccttttttaggaaaaaaactccttgtttgaaccacttgtttaaaaaaattgtgcctcaaaagtttcaatcaaaagtcgactccaccaaaatctccttatccgtaccaaatttttttaatcttaaaaaaaaatgattccccttcaattcctgttaaaaaacccgatttttccacacctaattaaattttcaaccattaatcctaatctttttttacctttccgtttccctttacccttaagactctttcacaaccacccaanagttaaatcctttcaaaaatatcctgctcaaaatcctaacaatttccctttgtttaaaaccccctcccacaaataattttaaatttgccaagtttcaaaaacttttttttcttaaaacaactttaataatggttcttactcaaagccgctatcaaccttttcttttcatcccncccattgctcaaaaatcttcacccgagtctctttaatcacaccacatttccttccataaaaaaatttttttttattttacacagagcaaccctttnctctactctcattttaacataacaatttgatcacacccccttaagttcctttaaatcaaatctcttttaacccgtaatttttcttttaaaaaactatcctcttaat

SEQ ID NO: 186440 - DNA, 186 bp, Arabidopsis thaliana
ccaacttatcacttttaggaaactgtccctcagtccgccgattcggtcgccacctccttaacccaattttactcttaaatcttatctgctatacctaccccttcatcccatttaccggcttaacctaaccataaatatcgcacctaaatcaatggtctttcatcccaaactacaaaaaatcatctc

SEQ ID NO: 186441 - DNA, 515 bp, Arabidopsis thaliana
tgcgcgggcggaggttgggaaccttaaaattgcacgctcggggagcgccacaagaccatctgccctcgtgtggtatcgttttattctggaccgggtgcggtcggttatgaagaccgtcctacatgattgggacgtatggatttcgcggtggttcactggcattttaggcgctcgaggagatagtattttatgtaggggggggcgcggcgactaatgttccaccaacaaagtaacgacaggttctcgtggcccgccaccgtactctaccctcgggcgcgagctcgacggacgggcctgcgtgcgctccctccacctacattccctagggtgagaaacacgtgggtaactttttatgtccgtgatagagctgcgacgtgcgggagcacgtccgccgcggacggcgccggagagggtagatgactgaggaaggcgacgacccggcacagacgccacgagccaggcgcggtgcggcgccacacagacagcgtgaatgacagtgggtggtagtcgcgtgc

SEQ ID NO: 186442 - DNA, 842 bp, Arabidopsis thaliana
cccccccccacggaaccccccccaaactccgccggggcccgggccgcaaaacaaaacaaccctaacccgaccctcaatactttccccgcgcccccagatccttcccccagtcaccccactcgatcatagcagcgctaagcccaccaccccacgaggccccgacccttttatttgggagtgggggaaacaccccgcgctcccaaaaaacaagccccacggcccgcgggagcccccccccccatcctccccacctaccccctcctcccacgacacgcacgccaacacaccccccccccccacccgccgcctctctgaccccacgccacactgcgccctccgctgaccacgtcgagccccccgcccttaccaacaccctcgcactaacggccccccacactctgtcctcccacaccgtctcctccgcccccctcaacgccattgtgccactccccccgccccgagggatcccgccccgccccgccccgccccccgaccagcgcgcccgagacgggcgggtatagtccgtcacagaggagcagagtccgcgcgcgtgggcacagtggcgggcccgtcccagtagagggcgcacacgcttcgccgcccgcacacccgcgcacagcccccccgagttagcggctcccccgaagcccccccccgccgacttccagtcgtagacgccgtgtagcacccccccacgcatcaccgaccgccccatgccggcttagccccgtccccggcccggaaggcaacaacagggtcacaccgagttccccccgctccaccccacgccgctcccccgatcccgccccgcagccccacgcccgccctgcagcccatacaga

SEQ ID NO: 186443 - DNA, 833 bp, Arabidopsis thaliana
  unsure (1)..(833): unsure at all n locations
acttttccccctccggtcaccttcccaatttccngttgggccagggccccaaaaaaccaaatttttcctcttctaaaaaattttctactgccctcaaaaactaaaccccgtttnaatcccatttttaccctgcttaaaaccttaacattaaatctttccccacccttttatccaaagggggggttttccttcaccgnccttcaaatatatacccttttacaaccttcnnntcccccccctcccgctctcatttaatttctttgccccaacaccctatgaataaaattttttttgaaaaaaagaatgggccttttttttttcccccaaccttttttatcaaagaaaaaaaatttgttaaaaacactgtgttcccccaacttgttgtttcaaaaaaacaaacccaatggcttctcctgcccaatcttcttgaccacacaattctcttagggcgaaaaactctcatttttttaccaaccacaatataccctttttttcccccatatactcttttttcctctaaccccccccactaaacagccgttacaaagaggagatcccccccacataccccccctcttcttctccttatcaaaatcccctatccccaccctccaaaaccgccacctatctccacccgcccccccataaattctttcttcacataaaaacaaaaaaaaagcccccccctaaaaaccgattcttccctcctccaacctcccttcaaaccacaacaatcgttcttgcaccaaacataataaaacccccctaccttcttctaacaccccccttctataactactcaccacctctcctattttttaattccccccccc

SEQ ID NO: 186444 - DNA, 785 bp, Arabidopsis thaliana
  unsure (1)..(785): unsure at all n locations
cccaactctatccacttcttaggaacactttcccctcaggtcccgtccggatttccggtcggcccgcctcccttaacccaatctttccctctctaaagaatcttcatcatggcctagtaaccttagccccgtttcaatccctctttacccgcttaaacctcaccataatcatcccacctcttatccaagctgtgctgttcatcaccgaccttacaaaaaatctcttaaaaactcngatcccccctacggctcacttcattctttcccgaacccctggcattaaattttttgagaggagggatggtccttacctttttccaacacttttttcctaagaaaaaaattttttaaaaacaccttgatacccaccatttttcttcataaaaacaatcccaagtgcttcacctggcaaatttcttgacaacaaacttctaacggccagaatcctccatttttttacccaccagtcttacatttttcttcccccttaaggtccttttggccgtaatcccctaactaattggttttaaaaaggagattcccccccattaagcctcttttcccttttcttatcctaaggttctattcagaatttaatcatgcccgtttttttccctcccctccaatgtttttttttattttaaaaaaaaaagggcccccttaatccccttcccctctccccttttttttttatccatttatccgccctttaaccgtgagaaaccgctccactttcttaacctctttgcttcataaaaaccccccccttctttcccccggaagcc

SEQ ID NO: 186445 - DNA, 552 bp, Arabidopsis thaliana
cccccactctatctgcctgccccttgttcccctttttctctccggggtcgtgtttagaaaaaaacactcccctcatttcataaatttttgcgtcccatcactcttctctacacttataatcagttatgttgtaaagttgtagatccattctccccgtcaccccctccgcgatctaattcgccccaacacataatctttttccaatagggggggggattgcccctcccttgctcccacaaaaaaaaaattagattattccagtcgcctttataccttcgatcccctctctgtcgcttagtcgctcttcttattctattcttttgattgccacttccgcctcggacatatactaatattaagacgtatgagttacagaaggaatactagtacagatttcatcttttcctcccttcgaatctatcattcatagccctattacctaattctagtatgcagattactattcattcactccccgcgtcacgctacaaaccgagacacgtcttgcagacaaaagccataccaccaacgaacacgacgacggagaggata

SEQ ID NO: 186446 - DNA, 294 bp, Arabidopsis thaliana
ctgtccccctgcaagaccggcccgtatttcccgtcgggcgggcgggtcgaaatattcccaaacaaaaaaaaaccccttatggcccagggccgccacgaaagagttttttcctcccttgcttggcggaaaggcgcgaaacgcttccgcccggcatttaaaaaccccctattctaccaggggggggttacgaaaacttgtcccctaccaataaaagctttcgggtggcctcatgcacagaccccaccgctgagagatacttgcgttccttttcgggcgaagaaccgaaactacctc

SEQ ID NO: 186447 - DNA, 335 bp, Arabidopsis thaliana
  unsure (1)..(335): unsure at all n locations
acagaaagttttttttttattgggcggggggcgggggncgagaggcctcagcggtgccgcgtgtgaaaaacagacgggaccctcacggggtaagggagaaggagtgccgccccgcgcgatgaggcggagggcgagagaggcgtgggcgcgcgagagagggggcaaagcgcaagagggggaacggcacggataggcgcaagatggctggacagaaggagagagggctcgcgccgcggggccggggcccacggcccgggagacgccggagaacacacgcacaccaggatgaggcgagagggggggcaaggggagaatgagcggtgagggggagaggc

SEQ ID NO: 186448 - DNA, 831 bp, Arabidopsis thaliana
ccccccctcaaaccgccgattcgggcggcacctcaaaaatacataaataaaaatttccttaacttcataccacatacagatcctcacctccctaacccaatacacacaaatcaacaactcctcccacgagagagaccaaagcctttcaaaaaaaaacccccaattcaaccttcccccccccccaaatacacaacccaccacaaaaacacctcccaatccacccaaacacacccgccgcacaaaaccattgatatcaaatcacaaaacccaacaacaacttccccgataactctaacacaacccccctcccaaaaaaaataaccacaccataaacaaccacaacaactataaacaacaacaccaacgaaataacacaccccccccgccatcacacaaccccctcccccaaataacaaatcactcaccaaccaccccccaacaaaacactaaccccaacaaacaaaaccacaaacatccaaaccacaaaacacaacgcaacaaaacaaaaaacacatacacaccccccccaccaaagttcaaaaaaaaaacaaaactaaaacacaccaaaataccaaccacataacaaccaaccacccctcccccaacacacacacaaccacttaacaacaccaataaacaacacaccacacaaactacaacctacccataccactcaatcaacccccccaaccccatcacaacattacaacccacacccccatgactcacactctctccacaacccacccacacaatagcaccacgaacaatacaaaacacccacacagacgtacacccatgaacacaaccatcaacacaaacacatcaaat

SEQ ID NO: 186449 - DNA, 872 bp, Arabidopsis thaliana
ccccccctcgcaaaacccaatcccgttcatccggagggaaagccggaaaaaaaaacttccctcttttacacaaacaacagtctcataagctaccctttccattcacatataaatatactcacaacctcttttcacctccatttatttatcccccaccaacctcttattctgggaggagggccccccaaaggatgtcccaaataataaccccccccctcccccctcctcctccctccccccctcccctcctctcacttacacttcctaccacctccaaataccacctccgtaattgtattttattcccactacacaaacctaacataatctaacacacatcatatttttattcccttgtctctatacaccaaatatttaccccaactcgcctcttttccttcaacaacacacctctatacaccttcccccacctcaatcaactttaattcaaccatatatcaccatctatttattatcttgcacctacattcaaatataaccaaatattactacaatataaacacccaatgtcctcgtttcttaccccaccccactcacctcgactatcaagctacccaggcgctccccacctctcaccaccctgatacatccgacccagtttttcccctccccgctatcttcccatttcattcaacacttcccctcccatctttcatataaatgcatccttccaccactaatatacatcccccccacagtctctcagctatatgaatataatcctttcaatcagtacctcacttcattcaccaaccctcccatcatactatcaaaaccacacacatcaattccaccatccataaacatcttgtaaccaccttattatacccacgcgataataaatacatccc

SEQ ID NO: 186450 - DNA, 444 bp, Arabidopsis thaliana
tctgcacgtcgcccacgacacgccgtacggtaagccatgggatccctctcacagcgggcccgccctcttgtgcacatacattaatgggttgcttttaacccccagctgtacgattcgtacgcggcttgcaacggacccgcgcccgtttcagagctgccccccaacacttagactgacgaacctagcccggcctccatacctagtacgactagaaatacggagacccgatatagcagtgacaacggagatcctccgtaaggggggggggacatacgcagaacctacaatggaatcataacccataaaaaatcgccaccacgaatcaacacccgcgcccgccgccgcattccgcgccatcgcgcgcgacacccaccctccctccccctccgccccaggcactgaagccggagcaataactattccccccaacaaggaggccagact

SEQ ID NO: 186451 - DNA, 156 bp, Arabidopsis thaliana
  unsure (1)..(156): unsure at all n locations
agggaaaaccttgtgccccctgcgagtaccgcgtcccgaaattccccgtgtcggggcccggcctncncaataaatacaatcgattntatcccccttaaaaacccctcacacctaacttcttacacttctccagagcgcctgattatttttgcttcc

SEQ ID NO: 186452 - DNA, 281 bp, Arabidopsis thaliana
  unsure (1)..(281): unsure at all n locations
gtgtttttttaaataacatcacctttaaatttaccacggggacgtggtggtagccaaaaactnctgcttctgctaaaactgctgcttctttttcctctcaggggcctcttaagagtgggggtccttgaaatcttcctacgaatccttctggggggggggggggctccataagaagatgacctcccacgtgttcccggtggaccttcttccttggggggggagatggaacttgaacgagatccaccaacccttcggatgggggatcggctactcctacggat

SEQ ID NO: 186453 - DNA, 833 bp, Arabidopsis thaliana
aggctacgcgagcactcttcgacttacttaggaaccctgtccctcagtaccggccggaattcccggtcggccagcgtccgatttaacaaccccccaaaaaaaagaggtaaaagaaaaacgggaaatgggttgcatcttctttaccgccttatctctgaaaaaaatctgattttaatccaattaggattttaaggagagggctctatgggcccaaaaaaaaagccattctgggggaacgtcgggggtttgtttataaacccttcggggatctgggtctacttgaatcacaggtcccccgcaaatttttccaggaaccctgccatccaatcttgatattccggaccacccccccctgtcggtgccaccgttatccatttggacaaaatggcattgcctctccccgaaggggtcacttccatgctatttcaaccgccggggggttttccggggccccggccttgacttccttttatgggactgcttgaccggggcaaaaaaaaaattacacggcgtcagggagaacccggaacatcgggacacccgattcgggtggggaacaacattgtgtgcccaaatacccaaaaaaaagctggttccttgtattggggggggtgatagggctttatccacttgggagctccaaacggcgtttgggggccgcgaatggctctccccattccccgccggctggtgaaaagtattaacaccacgtgtgtcgcccgacgtaaggataacgtcaatgtgggggacatgggggaggcgagaaaaatgggcttaccattccgcactaagttcttgtttatggggggggcgggggtcgggggcctggtggg

SEQ ID NO: 186454 - DNA, 560 bp, Arabidopsis thaliana
  unsure (1)..(560): unsure at all n locations
ggagacgccttgagacgagaacagatctctggaggtcagcaacggcaacgcgtaatcatagtgtcgtgtatcgccctatgcactgtgaatgcgatgcgcggcaactcaatatgtatgtcccatcgtgcggatcgcgctgttgtcatctcaatacatttgtgaatgtgtgtcatggcagagggaaatgtttttattttgaagcggtgaggagagcgaaggagacaccagagcggccgatcttattccttcantcttatatcgatatttagcgacggatagtacatatgaatacgaccatgtacgtttctagtataagagatagtcggggtatagttatctatcgtccgcccactactgcatatagaggatatacgtgccacggcgatcagctattgaagtgtgcagacgtatatgagttgaccgcttttgtacagacattggaataggatgctgaaaggccgtcgtgagatctgacgagatgcgacagccgaagcggacgcacattttatgagagtcgttatagcatgctacgcgtagcctctgcgtcagtatgtttacga

SEQ ID NO: 186455 - DNA, 830 bp, Arabidopsis thaliana
aagagacaaaaaggagaacgcacaaaaggagaaaccagccgagagggaagcgcaaagaagagaccgcaggtctttcttgatacggggggggaacgccaaagaacaaagaccgcgaagaaaaagaccgccaaggagacgcgggaggcgaagcagcggcgaggggcggaagaggggcgggagagctgacaacaggacagaggcacaaagaaagaaaagagaaggaaggacgcaccagagcggagacagaaactcatggcccacaccgaaacacgaaagggacggcggaaggcagagggccggggcgggagagaaacgacaacgggggggggcggcagagacccaagaaagagagaaacagagtgaccccccaccgaacaagccagaggcgagccgaagcagggcggcgcagagagcacgagagcacgaaacaggggagtggggagcgcagcccagcagagcggagaggaacgcaaaaaacacacatatccaaccagcgacgcggaaggaaggggaggaagaaaaagcggcgggacaacgaggaggaggacacgaagggaaagatggacgcgagagaacgccacgcacactgaaacgtcagaagcggcgaaccgagggcaggacgcacaagaaaccgatcaagcggagacgtgaagaggacgagaggggacgagaaaggaaaacaaaaaaagaaacacagataacagaaagccagaaagagaaagagaaataaaacagcaagaaagagaagggacgccgctggatgcccgaccgcgcaccctaaagaaggaaacatagaagggagaagaggaagagaagaacagcccccagaa

SEQ ID NO: 186456 - DNA, 550 bp, Arabidopsis thaliana
gggggggagtctgttgggacccctccgcctgttgggggacaggggcgccttcgggccgggccgcatttccgggggggcagggccccgtaaatacaggaaggattcttaatttttctttttttcctgcaatcggaaaggggatcggttacccacgttgttgaacttggcctttgcaaaattcaatactgggggcggagaatgctcctttttttcggggcgtaggcggaaagaccgggggccgaccaaaaaaattgggggcaaatattcctggggggtggaagattgtcttttcacaccccgagatgtttgtgaaccgttggagcaaaaccttgtgaagggaaggctgctgtgttgggtcccctgtgggagaatttaattgtgcacccgcgggggtggaaggcgagggccgtgtcaaaatatacaactgcggggaacgatcgcggagaagccgcggtcccccagtataaaccaaggagcagaggggtgtaggggagagagtggtgcgaggtcccgtaggcactagtgggtcggtagatagcggatgcaagcg

SEQ ID NO: 186457 - DNA, 191 bp, Arabidopsis thaliana
cccaacctaatcactatttggaaaccgtaccctcagtccctccgattccggtcggcagctcattactctaaatcatacaaaactatatgaaaccccacgcacttaacgagaaatactccaacttcaactgtgaacttcaacattcctttatctgaggaggagttcccaatccaaaattcgaatcaaaaaaa

SEQ ID NO: 186458 - DNA, 566 bp, Arabidopsis thaliana
cagcccttcgaccgacgaatcattctttttccttttctttccaggggggcaaggcgttcataactcatacctacttctggggcggcgattttcctctcgtcacttgtcgaccggctttgtcttctctatttttaagttcatatttcttgtacatcctcatcccattcacaatttttatctcgcgcgagaaactagattattttgacagggggggggagcccccacacccatctacctcggtgctaaaaaacaccgattgcatcttcctgcgtgccgttatacggggccgcggtagcgcgatagatttttccgtcgaaaacaatacaatagtttgcagtctccataaagatagtacaatatactgtcttctgagggactcgcttcgcgggtgatgactcgctgacgtaagcttggcttttcccacttctactctattgtttctcccttcccccgtctgagcgacaccacccgagtagctactgtatagcagccaacgaggcgcacagatacgagtacaccccgcacgtgcaagtacaagagatagagacaacacacatcccgccccc

SEQ ID NO: 186459 - DNA, 543 bp, Arabidopsis thaliana
  unsure (1)..(543): unsure at all n locations
ccctcaggtcctgtcccgaattcccggtcgcccaggcgcccatttaataaggatatgcctttaccaacgttcccttggaccctccttcccttctgcctacttggacatgttctcctcacaaccgggggaagaaccgacccaatttcctgttccttgtttataagcgagaggcgggtcttctgacgttttcataaataaactgactagcgnctttgctttcctacttctcttgcttaagacggccttcgttcctttttattaagaaggcccctgtacaaaccccaaaaatcattggttatgttttgccaccagagagactctcattctttttatacttgttctttaaaattgttagaaggataatttcccaaacacccccggcgttaacttttttatgcctgaaaataacccctctctttttcccctgagcacacaaattcttcttttaatccttcggcttaattctatccagtcgcgcaatcctccaactttgccggaaaaggtttttttttcccatttcccctagacaaagagcgtttattt

SEQ ID NO: 186460 - DNA, 429 bp, Arabidopsis thaliana
  unsure (1)..(429): unsure at all n locations
tggaggtcgaccgacgcgttcgtaagcttggatcctctagagcgttcgccccgggggggggcccncttattttactatcttgctctttttggagagcttgggcctaaaaacaggggggtttttttcggggcgcgcagtcgccggccgtgagggaaacggggcgctccaaaaaagataagggagggcggggggggggtcctcggggccgctttttttcgggatgttccgggnaaacnccggtggcggggacaagaaaaaagggcgggcgaaaaaaggcgggggcttttataccctaggggggtggctcttgttcttttgataaggggatcaccacaggtgggggtaggaatagcggtcgtgtcttcacccaggtgtgtgagagggcgtcaggtctcgccgcgcaccttaaggttggcgcccgcgcgtgtg

SEQ ID NO: 186461 - DNA, 618 bp, Arabidopsis thaliana
gccgaccccttttcctaatccttttaaccttttaaaaaatttgtccttatcccccccttaccaaaaccctaaaaaacaccccccccaacacaccctaccattaacaccttctctctttcctgaaagatggcgcccccctaacccctttaaaaaaaaacgccaacacctttttctccgacttcctcccctaccaagccctcaaaaccacaaaacccgcaccttcttcccttttaaaaaaaaatatctccaacgtagccaccctcctcaaactccttataaaaaaaatctcaaccaagagacccaccctttattataaccaaaatgccctaccccccactcacttcatccacaaaacaacacaaaaaaaccactccccccacaccacccattcttatattaaacaccccttcaaacctcactattattccaccccccattatctaaataatacaaccaaccccacccaccctctccctctcttacaccatccataaccttacaccacaacccaacaacccctacttattctatacacaatttccccccccacctaaccaaacacccataataatcacaacaatccccaaccacccatcaatacaaatcaaccacccatct

SEQ ID NO: 186462 - DNA, 282 bp, Arabidopsis thaliana
cctgtaaagaagagaccaacgaaatttcccggcggggggcagaaagcccagtaaataaaatacatcacgaagaacgagtgttagtccagattccgcccagccgccctggaccatccgtatgagtgcggagactcgtatataataagtatcttacgtgtataggacgatacgcgagcccgatgaggaggaaacattttttttcccagggggaggagaatccagagccccgaaatacgcaataaaaaaatacctccacgatcgactagtaggtgaggccacgtg

SEQ ID NO: 186463 - DNA, 194 bp, Arabidopsis thaliana
attttagaagccttttcccctctactaccctccccaatttcccgtcgggcagggcttctaaaaaaacaattgaaccttggaaaatcacaaaacctctttataccctcgatatacctcctatttctataggtttaaaacttttatcttctcaaaacaaaaaaagtttccaaccctctcatagaaggggccctttt

SEQ ID NO: 186464 - DNA, 767 bp, Arabidopsis thaliana
  unsure (1)..(767): unsure at all n locations
ttataaccattattccttggttttgaaaaaatgacccaccctttaccccttttaacccatttggaagttttccctgccctttccccaactttttttttgggggggggctccttntnnaagatgaacccaaaaaaatacatcccgggtcctttttcacccaagcccaaaaacaccttttttttttatctttttttaaaacaaatttccttattcttccaagttcctccatcaaaaagattgaaaaagtggtgttttcaaattttttaacactttttcaagaaaaaaacctgttttttattttattttaaacctttttttaaatttaaaaattcctcccccagctccgcaattccttaaaaaaaaaaccgccaaacccctttaaagttctttttttttccgcggtcccagaattttttttgcaaaacaatataataatctcacaggaaagggccctccccctggactttctccctcttaattgtagtttaagaacctctcttcatctttaaaaaaagaaaacaatctttctccccaaaaaatattttttttttattatatttcttccgcgcgtcccccccttctcccttttattataaagagatgttttttcaccccctgtaagctcttttttcccccccacaccttttttanaaaaatataacacccctctctttttcagaggctcttcccacacatctattggcacaccccctcctcttcctctctttatttccagaaagcacccacacagataacacctctttttt

SEQ ID NO: 186465 - DNA, 1040 bp, Arabidopsis thaliana
  unsure (1)..(1040): unsure at all n locations
ggggcccccttcgagggaccgggccggaactcctcggggggggcgggggcgccataaaaacacantactaagatttgttgggccggcttatgggtgaagagttccacttaacccccatgggtattagtggggcgaatttgaataaaatggggtgggtgttgcttcctgaaggaggaaaaaaaacctttttattgtttataagagtcgaacgcttcctaaagggggcaaccataaaaaaaacaaaaacttttttggagggttgggcaaatgtgaaagtgggattttcctttttttataaaaaacctcttttcttttgggggggggttgatatttccatcccccaaatgtggcctttttttttgtggagtgtctacacaaatgggggagggtggggcgtttttcccccctggagaaaacccaaagaggaggtgttttttcttttggacgctgtcaacagtggccactttcttatgatggtgcggaggagggggggccttcaaatttttggcctttcccgacccactagaaggttgcgctgtcgttgcgaaagtggcgtctctcgtagacgtgtagcgctgaggtaattaagtgtggtgggggcggaggctttgtggagaagtggtgggcgggcgaggaggcggtggggggtttgcggcttgtggaagggtgtgggtgttccttgtgcaggagggcggggggtgaggatcgtaagagggggtgtcgggtgttcgtgggggggtggcgcccctccccgcagcttgcagccggggttgcgaggcgcgggagggcgcgtagcgcgccggtgcgaggcaggtcgaggcggctgtcgagtgtaagagcgcggtggcggcggggtgcgtgaacgcgagtcttgttggtcggtgcagttggtctgcttgtgggcgccgcgacgggttcgggaggtcgcacgcggcagggtggggtgccgccgcacgggatctcccttctttgggctacgtctcgttgacgcggtgttggttgggtgcttgggcgtgggagtcgtggggggcggggacggg

SEQ ID NO: 186466 - DNA, 586 bp, Arabidopsis thaliana
  unsure (1)..(586): unsure at all n locations
ttccctcaaaaaaaaaaaattttnccccaaggaaaccaaaaaataaaccaaagcccatcctttccctcaaaagaataatctaactcaaaaaaactttttattcctctaacctcaacacacaaattacaaaaaaaaacccccgcaatnttttttataaactacaacaaatttttattttccntaatacacaaaccaaatcttcccctccttccctttaataaatcacacaaaaaaaaaccataccccctttaacacacaaaacccccctaattttacccctaaaattcctcctaaaaaacattttccctataaccaactttttcacaactaaaataaccaaaaatccctaaacttatcttcaccccttaaccccccccacaatcactctaaaccttcttaaacctcccacaaaaaaccccaaaataaaacacccaaaaacccttctcttttactaaacacaaaaccatcccccctcctccctcttcttgcccccacaataataccacaaaacacaaacctctccccctcacaaaaacccccatcttataaccacaaaacaaaacccaaatcatatccccccccccca

SEQ ID NO: 186467 - DNA, 456 bp, Arabidopsis thaliana
  unsure (1)..(456): unsure at all n locations
cctttaattcaaaaattctcccgcccataatttcaaaccctccaccaaaaaaaaaaaccatatttcacccccccccccaattctctccctctaaatcctaatctccccccccttttctttcccctttaaagaaaactacccccctacacctnggccctcttcctataaaaaattccctccccttaacacaaaaacccaaattcccacctcccctttctcttttaaccaccacaattaaaaccacaccccccttcaatcaactcccataaacatatttttccactccaccaccctccttccctttttattccccncgggatcctcctacccaacacccacaaacacctatttttctccattccccccctatcaccccctccccccccccccctcctttaaacctcctaaaccccctccccctttcttcttcttttaaaacaccattttctctctccc

SEQ ID NO: 186468 - DNA, 458 bp, Arabidopsis thaliana
  unsure (1)..(458): unsure at all n locations
actcccacctctcactattaggacctttccctcaatccgccgattccggtggcagcgtcattacatccttcaacctacatcaaatcaatcaaccctaacataagtattctcttttctccaactcgtgaacaaaatcacctaattatttaaaagatgtgaattgtgggctnaatcaaaaacagaaatggtcctttgttttctttcatcaaggaccatgatgttaacggagctttattcttctggaaaaaaaaaaatttcttctttgtttttctggtgggcccacctttttcctttaggggcctaaaaggtggtggttgttggttcctccttcccgcggctgaaccccgtttcttaattcataaaaaaaaggttaaaaaaatgaaaggattaattttttttaccattccagcgcttgaagggtcctctttaattaaacactttaggttaaaaattttcct

SEQ ID NO: 186469 - DNA, 634 bp, Arabidopsis thaliana
gagggggccgcgggggggggaggaaggggggggatctttggggaacgcccccggaactttaggggggaacagcccccctgcctagagcttggatcctctaaaagcttgccccctggggggaggggcctcaaaaaaaaaaaaaacaaccgcgtccgtgcgggaggcgcctaggcgggcgggggcgcgcgcggcgcaccgcgcgggcggggcgcgggtggggggggtagggggggaaggcacgaaaagcgggggttgacggggggcggccgggggtgggacggttttttttttttgggattgtatggggcaccccccagggggggggcggttaaaaaaaaaaaagccccccggcgcgccggggggagcaggacgagcgccgcgccggtctgaggtatgaggtgggcggcgccaaccccactccaccgcgcaaacggcacagaggcaaccagcagcgatgtgggaacgcagagagtgcgacccgagaggcgggggtagcggcgcgcgaggaggaggcggaggagacggagaaggggggggtgtgtacgtacgcgcggcgcggcgggtgccgacccagcggcgggcggtaagtacggaggcgtcggcgcgcggggacgagcgggaggggagaccccgc

SEQ ID NO: 186470 - DNA, 681 bp, Arabidopsis thaliana
  unsure (1)..(681): unsure at all n locations
cggggcttttgtctgcaggaatcatgaataaattacatcccctacatgggggagggaccctttgagagggggttcacgttacctacccttacaaaaactaaaaatncattccttttataccctttagccgcttggtatatattgcctttcactattggcttttataaaaatccccggagggcctggctaagaaaaacctacaagagtgatagggaaaaaacaccctggctaatggtttgattcgccccccaattttccaacattaattgaaccacattttttgggggggaaaaaccatccaaatcacctttttgaaagggtggttttctcccacaacaaaggtgaagtaaattttttcctgggcctggtcattccttacgaaaaaatcctcccaaatattaaaatgggcgggtttacccgtgaagggagaaccctccccattcaaaatattgggccgcttttttttcccgtggaaaggggaaaacaaaaggtggcttaaagggtccgaccccaccaattttcttattttggaaactactaggccccctcctccggaaaaaaacccgccccctttttccacttaaaccttttgtgtggaaaaaaagggcaccggtaaattctatccccacggggtggggaaaaaactcccgcaaaagctcaaaacctttcttgggtggtggg

SEQ ID NO: 186471 - DNA, 445 bp, Arabidopsis thaliana
  unsure (1)..(445): unsure at all n locations
gggggggcgaagcgcggaacacacaaaaangaacacccaaagaacggcgggagcgacaagcggcgaccgcgcggcacacgccacgccccgaggcgcgggaaagcacaggaccgcgcccacgacggcgacgccgcgcccgccgccgcgggggcggcgccccctccccccgcgagcgggggcgagccccccgggacgcccggacggaaaaacaaagccgccgcgcaacgcgagaggggcggagcagacaccagaaccacgaccggaggcggaagaaaaccgcagacaaacagccaaagacagagacacagagcaaacgacacgcacccacggagcccgaacgagcaccggagcagagagcaggatacacgagggaaacaaaccaaggaggaacggagagcacagagcgacgaacgaagccgacccacgcccgacgagcgagagagac

SEQ ID NO: 186472 - DNA, 496 bp, Arabidopsis thaliana
  unsure (1)..(496): unsure at all n locations
gctgccgcgtcgtaagcttggtcctttagagcggcgccaacctttttttttcttctgttaaaaaaggaaaacttaagccttgttcttggaaaccctacaatatctaagaacattccaacacattttctttggccttgactgattcaaacaaaaaacacaacccaaccgtaaattctgaggggacaangcgccggacaaaacaaaacacataaaaacccccncgcgggggcggaaagaccggaccttcattggggaaagggggggggaagaccttaatgacttacttgggaaaatgggaaaaaagaatngtgtagaaacttctaaaaccctgaaatttcaaccaaaaatccaactgaatggaaatggctgaggcagcctgttggggaatttgccttgaactcatgcttcaagataaacggcancgcgcgggtcgcgcgtgaaaaagtcgaggggcccggggacccatcacaagaaggggctctgaaagggctgcctt

SEQ ID NO: 186473 - DNA, 493 bp, Arabidopsis thaliana
  unsure (1)..(493): unsure at all n locations
gcacgcctgcagggaccgggccggattacccggggggaccaacccggccgaccacgcgnacggaaaaagaggggaangcccgcacaacaaaaggaagagggccaagacgaaaacccgcgagagcacatcacaaccggcgcccaaaggcggcggggacgacacaaggaaaggaccaccctcgcaatgcggggagcgcccccgccgaaccggcggaaaggaggagacaaagccagcacccggcgagggggaggacacaccgccccacgaccncggccgggcggaccaccccgcgaagacacccggaaaacccagagaaaagagcccaaggaagaagccaaaaaaacgggccaaagacaaacccacccagcgcggaaaacgcggccggaaacaacacgggcagaaaaagggcacccaccaaacccccacgagaaaacaccgcaaagaagcgaaaagaagggccaaaccccccagccacaccagcgaaagaagcagg

SEQ ID NO: 186474 - DNA, 551 bp, Arabidopsis thaliana
  unsure (1)..(551): unsure at all n locations
agccggcacgccggcggaaccngggaccctcnnaaagcggggcgaaaacccgcnnagaaagnnagaagaaaacccacaacggggggaaaaaacaaaaagcacacgggcaaaaacgacaaaccccccaaggaaaaaaagccaccggggaaagggaaacaaacaagagaaacaccggggccctctgatgaagaaggaaacccgggaggaaggcaaaaaaaaacccccncngagcgggggaggaggacaacaaanggaggacccccaaccccaacccgggaaacgaccgccaaaaaaggaaagcccccaccaaaccncaacccggggggcccaccccaacaccccacaagccccggaaaaggccgggccgccaagacaggaaaacaaacgggggggagcaaacacccaaaacncgaggggcggagaaaaaaaaaagcgaaccaggcccacgcagcccccccaggggaaacccaacggggggacccaagaggaggggacccaagcgcaacaccgcccacgggggggcgaacgcccccccccccagggaaaaaacg

SEQ ID NO: 186475 - DNA, 581 bp, Arabidopsis thaliana
  unsure (1)..(581): unsure at all n locations
cggcggggccgggaccccctagagcgggcggccaaccgttcggagaagcaggacgccgggggggggaaaggaccggggcgcaagaggacgcagaggacagaacgcagacaccgaagaggaggccgaagaacaagcaggcgaggaaacacggcagggggggggggagaagagaaagaaaacnccttccctcgggggggagggagccgaagaacaaggaagggcgcaaagaaagaaacccccccggaanaggggggaggagggacgccccaccacgacgagcgcgaaaagagaggaaaaccccggagggagagaaacaggagcacccnggggcggacgcgaggaggaagaggcgaagcggcacgaggcaagcaaggagcaggcgnncgcccgggacgggggaggggcgacaaccccggggcaagaggcgcccggcgaagaaaacgagaaccgggaggcggagaggaaagcagacggggcgcgcgggaggggagaaacaaaagagncccccagcagagcaaaggggaggagaagccgggggcccgcaggggagaaaagagacgcgggaggccggggggggaaag

SEQ ID NO: 186476 - DNA, 526 bp, Arabidopsis thaliana
  unsure (1)..(526): unsure at all n locations
cacagcgggagggggagagaagagagaagttncacaaagagtacgctaaagcggaaccaaaccgaacaacggggaccagggagaggaagacaggagaaagcgagcgcgaaaggacagggggggaaaagaagaggctcgttgnctttccgggggaggggagcggaccgaaaaggccaaaagaaaacaaaggcccaaaaaaggggggggggcgggaaacaagnagggaaaaaagaggacaaaagggaaaaaaaagcgaccagacgcacgggggaaaagcccgaacaagaagggcgagccacggaaaaggggacaaaagggaaacaacggaaaagaagggagaacacgcacaccggagaggaaggccaccccgggggggacgaaaaccggggcacgaaaaaaaaggaaacaaaaaaagggaaaaagaaggcnacaaaccgacgggagcaagngcggaaaaaagaaaaacccaccngcaaggggaacccaaagggcggaaaaggaaggaggggggagaggcaagaaaaaa

SEQ ID NO: 186477 - DNA, 518 bp, Arabidopsis thaliana
  unsure (1)..(518): unsure at all n locations
caggcacgcgtgcgnaagctgggaccctctagagcggccggccatccgttcgggtcgagtaccctcctttcagggggtagacgacccgaaaaggggccgcgggccccgaggaggacaaaagcctacggggcggtaccacaagtgaccaaacggagaaacaagggaccggcgggccctccgtttgaatgtagggaaaagaaaaacaaaccacngaaaaaaaagcccccgggggaggggggagccacccagcttctcacccaccccagaaagagcccaaccagcacccgaccgggggggggacggcggaccccagcgagcaaaagagagaacccggcgggggggaggaggctccaggggaaaaacccacggacaggaacccccccgcgggaagggccccccgaagaaaaagccaaaagcggggggcgggggggcaaggaaaaccacaaagggaaacagcgaaccccggaggggggggggaacgggggaaggaaacaccgcgaaaggggccaaacaccggc

SEQ ID NO: 186478 - DNA, 502 bp, Arabidopsis thaliana
  unsure (1)..(502): unsure at all n locations
gggaccgggccttttaccggggggggcaatcagnccaaacaaacnancgccaaaagagggggagaggggcccgnagagggcccccagcgccacaaaacgacactctttaagaacccccaaagggaaaaaagcaaaggaggcgagggggagagaaagcctncctaaaatatggatgtggggccccacagagaggggcgagacgaaaaaaaaaacccccccgggggggggggcggggggggccccaaaaataaaaagaacaacccgangcccaaagaaagagggaacccgcgaacacacgacgaaaggcgaggaagagggaagcacgcccgcgagagaacacaaaagcganacgggagcgagcgagaagaaaagacccggagaacagcgcggaaagaacaaacgacagaagaaacagcgggaggagaagaccggcgcgcggcaacgaacgaggcgagcggcgagaacagaagacggggacgagcaacgccggaagaggcgccga

SEQ ID NO: 186479 - DNA, 532 bp, Arabidopsis thaliana
  unsure (1)..(532): unsure at all n locations
gggggggggcatccgngnccaaaaannaagnnacnncaaaaaaggggggaaaaagaaacgaagaaaaggaaagcgcccggagagcgagagcagacctctctagagcagaaggcggagaaaccagaaaggacgagagaagagggcgggagaaaaaaacctgctttttggggcggtggggagaacangagggaggagagaagagaaaaaaaacccccccaatgggggggggggggggggacaccccacctataaaagcgaacagcagaagcccaaacgagaagcagggtagcccgggcgacgcagagcgagaagcgagcacgccagagataacgcgacacgagggaacagcgagcgaacacgcaacagggccgaacgcagagcacggcgaggaaggaggcaagacaggaacggaacgggagaaggagagagacccgagcaacaagcagagaaaacgcagaaggaggaggaaagcacgagaagggagacgggaggaagcagacaacacacgaccgaggaggggcgagagagaaga

SEQ ID NO: 186480 - DNA, 480 bp, Arabidopsis thaliana
  unsure (1)..(480): unsure at all n locations
ccgcacgctgtgcggagctgggatcctttagagcggccggccatccttttaattactttctccccacacgaggggagcgaagacatttactaatctagcgccggcgggagaaaaaaggttttttgggggggaacatagcaccagaccagggaggctgcaaganaaaaaaaaggctgaattttgnctgtngaanaananngaggaagggggggacaaaaaaacccccccaccgggggggggggggcccccccattcacaccaagacccgccgcacaaaaaagaaagacctgggaggacgtaacataaccaaacagaaagcgaactccccgcggggcgcacaaagaaaaaacccccggggggtcggtgcccgaagcagcccgcacgtgcgacgaaacaccccggcgggggggggggacgcccccaacgaagccgtgggagcgagcgcccgccaacgacaaagaggaaaaaaaaaccggccgg

SEQ ID NO: 186481 - DNA, 539 bp, Arabidopsis thaliana
  unsure (1)..(539): unsure at all n locations
ggcggcacgccggacggagccgggacccactagagcggccgccacaacgtgttcgcccacgcgtccacacagaagagggggaaagatgtgactggagaagccccaaaaagaccctggcgccaacacacaaatcgcagaacgcaagaccacacaccccagaaaccaaacaaaaaaaccctcgcagagagaggaggaaaccacgcgcgaagacacacactcaaaagaacccacnctgggagcagagagggagacctacgaccagccagaccaggtatcaagaaaacagaccacacccaaggagaacggggaaagaaaggaagccgagaaacacgcccaaagaggacaaggtgggcggaaacccgcgaaacccgcccccgcccgacaaacggaggggaacccccccccccccgaggaggaggaccaggggagcccgaaacggagacgagagggaaaacaccgaggaaaaagaaggggggaaagggcccccccccaaagccggaaagaggaaagagcgggtccggacccggggcgggggcgaa

SEQ ID NO: 186482 - DNA, 538 bp, Arabidopsis thaliana
  unsure (1)..(538): unsure at all n locations
gccggcacgcctgcagggaccggnccggtannccgggggggtcacccgcgnccgcccacgcgnncgcggacgcgagggggatanngngngngngnananananacccacccaaccacaaaaactcttctgattgattgctccaagaacaacggcctccatagagagcatccganggcccctgcctctttgcggcggaacccaccaggagagncagagcgcaaaaacacccccccgggggggggggggcaccccattttgcaacgctcgagncggccccctaaacccagcgggaacgagtctaatctccgagggaatcgacgggggacaaaactcgccgggaccggaacgggaataaagccggcgaaccggcccgggtgaggaaaagaggaagcccgggagcaaacacacgggcttaagccgggaccaagaacgccccgggaaacggacacagaaataggagcaggatttcccagggaaacggcgggacgaaaccttctgtagaagggaagcggttcggaaaacccgggcccggaaggg

SEQ ID NO: 186483 - DNA, 535 bp, Arabidopsis thaliana
  unsure (1)..(535): unsure at all n locations
ggcggcacgcgnacggaagccgggaccctcnagaggggcggcacaacgcgnncgacgagagccacaccanaccgggggccccnnaaagaaacaaaagggcacaaacagaaancacacgaaaggccacagccgccaagaaagcgcgggaacggcgcaagcaaacagagacacagcgctcccactagaagangaanccncngcagggaagacacaccacacaccccccccganngagggcggccagggaaacgaaccctaaccccaaaacgaggagccacaaggacgcagacggagcgcgaaggaaacccggctgagacgcacccggcaacgaggggacaaagaaactgggatagagcgcaaacaacctggccacaaaaccaccggagggagagagagccgcaacgcacaagagccttcctgccgaagaaggaaccccgaagacaagaaaatgaggcaaagccccaaccgggagatgcccgaccgcaaagagaaagcacacacggacgcgtggggcgaccccggaaaccggaccggg

SEQ ID NO: 186484 - DNA, 526 bp, Arabidopsis thaliana
gcaggcacgcgtgcgtaagccgggacccactagagcggccgccacccgttcgaggacgcgtgggcggacgcgggggtgggtctgatcctgaccacgacgagaaagacagcacgcacaacagaatcaagagcctagtgacgggggaagaaaaacagcacaagagaccagagccccccctccctgcgggggggaggaaaggaaagggacagaaaacaaagctggcccccccccaagaccccgaggcggaccgggcccaaacatccaaagggagccgcgggaaaaagcaacaccccccgaaccccggggggacgaccacggcccgggggagaacaccgcggggggaccccccaaccaaggaaaggagaatcccccccccccccccacccggggccgggagacacccccgccccaccaccccacggacccccccccccccccaaggggcaaccccccggagggccccccccacccaccccctggaaggaaaaccccccccccccccccccgggaacccccccggacaccc

SEQ ID NO: 186485 - DNA, 534 bp, Arabidopsis thaliana
  unsure (1)..(534): unsure at all n locations
gcaggcacgcgtgacggagctgggaccctttagagcgggcgccctaccctttcgtataattaaaaaaaccatgaaggggggtcagaccaaatgcacacaaatacataggcatttatgttaggcgaatacaaatatgtaggaacaactcggagaaatgactgcttcacggatacnccagtcgctcttctatgcgcggcaccaggaaggggcgacacgccgcnggcgcgcacccaagaaaccagcggcgggggcacccacactttgaaggggagagaggcgacgcctaggaggctattcggtttcgagggataactaaggcggaaacttcatagagcagtccctttggcccaaacaaccagataccaaaccgaggagatcactgcccctcctataacacatgcgaaatgggaacgtgcatgaagaagaaaagacgcaatgagagcgacaaaaataagcgagagagggtaaagggcggaacaaaaactggccctcccggcctcagaacctccccggaaacaagacgggaccccgagc

SEQ ID NO: 186486 - DNA, 544 bp, Arabidopsis thaliana
  unsure (1)..(544): unsure at all n locations
caggcacgcgtgacggagctgggaccctctagagcgggcggccaaccgcggcgaacctccgaacaaaaacaaccagaaaggaagcggcgcgggaaccaaagagccccagaaggcccaagagccggaaggaaacaacacccaaagaagcaggaaccacaaaaaacaagaggaaaaaccccttcccccggggggcggcngaaggaacgaaggaggaggccaaaaaccccccaaaccggggaaggggggggccccaggaaccgaaccgggaccgaccgccggagaaaacaaacggacacggcagacccaccccgggcaaacaaggcccagcaacggccacccgaaaccacccggccggaaaccggggggcaccggacgaagaccgccagcacccaaccagcccaaagcccgggaaccaccgggggcggggaagaccccgaggcgcgggacaacgaaccgccagggggcccccgcggcaccccccagccgcgggccccccaggagcggcaaggaccgccagaagaaagaacgagcgaagccgcgaaca

SEQ ID NO: 186487 - DNA, 587 bp, Arabidopsis thaliana
  unsure (1)..(587): unsure at all n locations
gcgcctgnaggnaccgggccgcctttccggggggacaaacccggccgacccncngagcccacaaaaccgggaaggcanaagcgcaccacagcagcaaccaccggaaccccaaaaacgggaaacaacaagagcggcttctccttgggagaggagtggcttttggcagcctctttcaataaggttgtgggncncaanaacaggagggcgggacagaaaaaaaccccccaggcgggggggagcggggggcaccacccctcaagagaagcccgganncganngccaccacgagaaagaggagaggagagccaccgcagcaggccccgggccccaaacaaaaagccaagaaaccagcaagnaagccaaacccaacagaccgccccaaaaaacccgggcaccgaaaagaaagaagagagagaccccgaagcacgcccgggaaggggggggggcccacccccccggaagagggccacaggaaaaaggcccacagaacaagcaccgccggggggcgcacaagaacgagccccaccccccaggggcgcgcccgaggaccagcccaaaagaacaaccagcggaagcaggacaaagcc

SEQ ID NO: 186488 - DNA, 547 bp, Arabidopsis thaliana
  unsure (1)..(547): unsure at all n locations
gggggggggggggggggccctggggggggggggagcagggcaaanaagnngcccggaggggggaaaaaaaaaaagaagagacccaagaaaagcacgcccttggagacggcagggggaacaggcgaagaggagaggaagggttgagggcccncctacaatcagncgtnnggaanannngngaaggggcccaaggaaaaaaaacccccnacggggggggggggggcaaacaaaaaataacggggaagcgcaaagcagagaagaggagggggagaggaggacgggagccgaacacgcgggccgagcagaggaggaggggaggcagccggggggccggcaccgagagcggcgaccaacaggggacgaacgggcagggaggagcgagaacgggacggagcagggagagaagcgacagggaacgagcaaaaccgagagataggcgcagcaaaacaggagagagaagggagaccgaggcgcagggagagtgagaacgagaccggcaagcgggccgcgcgcgcggaagaggcacgacgaaaccaggggccagcgc

SEQ ID NO: 186489 - DNA, 487 bp, Arabidopsis thaliana
  unsure (1)..(487): unsure at all n locations
gcacgcgtgacggagccgggatcctttagagggggcgaccaacgcgttcgaccacgcgtccgcgaaaaccaggggaaaagaagaagatcaaaaaaaaaaggatgtcagaagaagaaaggaaggagaaagaacttccagaccaacaacgtccgaaaaaagaaagaaanaggcattcggctgcttttgaggggaggaaaaaanaccaggaggaagaggcgaaaaaaaacccaacaaaagggggggggccaaaaagaccggagagacgaaaacaaaggtcctcagcgggaaagggaaaaaagtcaggaaagccgggcggagaaaacaataacgggaccaggccagtaacgagggagggggggcccggacacaaaaaccacaaataggtgccaagggggggaaccaagggggggctgagatgagaaacaaaaccgccctggaaacggggggaagacccacgaaagagacccggaaaggaaacgagagatgg

SEQ ID NO: 186490 - DNA, 623 bp, Arabidopsis thaliana
  unsure (1)..(623): unsure at all n locations
ccgcgccgcctgcaggnaccgggccggattacccggggcggccaacacgcgccgccaanactaccaccggaaagaccggggggccccgccggcaccaaaggcccggaaaacggggcacccagaaccgcccgcggcaccgcgcccaccccgaacccccccgcgggcaaaacaaaaaggccgagcgacgacgtgctgcctcccagggaggcgggagaccccgcggaggcgcaccagagcagcaaaaacacgcgccccacgaaaggggcggcgggagaagcgccgcccaaagggagaacgaaagacaccggggcccagggaaccccgcacacggcgcgcgccgcgggccccccacgacgggaccgggcgcgcccaccgggcgcacgacgcggcccagggaagaggggccggccccccgcaagacgcgcggagaagaaggagcaaacggagccagaagccgcgcggggagaggcgcgcccccccgggacaccgggggcggccggagccacccagggccgccgaagnagacgggggcggggacggcggccggcccacagcgcccgcggggccgcggggacccacccaacaacaccgcgccccggcgcgggaacaccacccccgcgggg

SEQ ID NO: 186491 - DNA, 542 bp, Arabidopsis thaliana
  unsure (1)..(542): unsure at all n locations
ggccggcacgcgngacggaagccgggacccacnagagggggcgaaaaacgcnnnnaagganaacgaaaccaccaagcaaggggccnacaacaaaggaaaaaggagcaaaagaaaccgcgacagacagggagcccacaaacacgccgcgaggacacaaaaaaaaggaacggcgcaagacccgctcaaaaagagaagacggnannaagaacggggggggggggcaaaaaaccccccacccggggcgggggggccacgcacaaaagaagcaagcacaaaggagaaaaggacccggaagaggaagcccaaccccaggcgggggagccccacccacngccaaccgggacggcgggggaaaacccgccggggccgccggaggcggacaaagaaagaaaccggcggcacccggccggaaaaaacacagcccggggggagcacgagagcaaancccccggaagaaggacgaaaagcccggcgcggcgaaaaaaccgagagaccgccggaaacccccgcgccccgaggaacagagaggcgcgcaggcgggg

SEQ ID NO: 186492 - DNA, 249 bp, Arabidopsis thaliana
  unsure (1)..(249): unsure at all n locations
ccgggacgccngaggnaccggnccggtatncccgggggggccaccgcgnncggnganaacgaaacccnaacggggggggcgacaacgacggagcagggaggaacggcancacagccgagcagaccgcaaacaaaggacccccgaacgccgggaagaaaccaccggcnaaaaacccctcnncccctggagtcgggaanaagaagaaggaggnnnnnagcaaaaaacccccccccggggggggggggggac

SEQ ID NO: 186493 - DNA, 368 bp, Arabidopsis thaliana
  unsure (1)..(368): unsure at all n locations
aggcgcgcgagacggagccgggaccccccagaggggggggccaaaccnnnnaaacannngnccggcggggcacgggggcgaagcagacccagaaaacaccagaaggcacggggcaaccggccgaaaaagagcaggccgagggggtaacccggaagcgccaccaaaggggaagagcccccttcacaaggnagcnaggagaacccggggggggaaaagcggcacaaaaccccccccngggggggggggagggagaacccaccaccacacgggagaggggccacccgccagcccccgcgaaggagacaacgcaggagcaaagcgacccgcccgcaccagggaagggccccaccngaaccggcggggagggg

SEQ ID NO: 186494 - DNA, 536 bp, Arabidopsis thaliana
  unsure (1)..(536): unsure at all n locations
ccgcttgcagggaccgggccggccttcccgggggggtaatccgnncgcccacgcgnncgggggggnggaggacnaaagcagagccacggaganaccacgcaccagngagagcccnggttgaagatacaagggagggagaacaacagaaagagcggacannccnagaaggtcccttcncttgggtgtgagaaaccgagggaggggcaaaaggaggaaaaacaccccccgcgggggaggggggagaaacacctttagagggggccaaaacgcaagggaagggagggaaggcaaaccaccagggtgtgaatttgccggagacggggggcaaggaattagagacccctagggagggggccgggcccaaaaaagaaaaaaaacccgggagggggagggggggatgaaaaaaaaaaaatgaagtcgagggtcccatggggggagggggaaaggaaacgggggaaaccgggggggggggggagggaccccagggagggggggccctggcccacaaaacggaagcggggggagagaataaacgg

SEQ ID NO: 186495 - DNA, 501 bp, Arabidopsis thaliana
  unsure (1)..(501): unsure at all n locations
gcaggcacgcgagacggagccgggaccccctagagcgggcgccaaccgtcgaaaaggagacacaacgagggggacacccgaaaggcccaaaagagcagaacacccaaagccagaaggaacaaaaaaaaacgagcgggcggcccgcgccgaggaaccctaaaaacagggggagaggnaaaagaggggccgaccccgcccgaagaaacccccaccaaagcggggacgaggaagaagaacacagataagaggcacagaagaggaaaaagaaaaggaggacacccccaagagaggcccgcgggggtaaacaaagctggcccacaggcgagaccacgacacaagaacccgggcgccccggacgcagcgacaatagaacccagaccgggagaaaggccgagaaaagccccggcaacaaaaaaaaggcaaggggggaaaggatccgaagaaaacagaacaaaagggggagcgcacccgcaggagaacagcaagccagcacccccaagg

SEQ ID NO: 186496 - DNA, 544 bp, Arabidopsis thaliana
  unsure (1)..(544): unsure at all n locations
ggacgcttgcaggtaccggnccggatttcccggggggaccaacccgttcgaaaaattgagaagaaaacctaggacaaatacggtcttttttttttctttttatgggtcgcgaatctctgtcttgtgtgtcctcgccgccatcggcgactgcgcccagnacctgcgggggcgtttttaacttttggtgtgggcnnnnganttcatccgactgatgagagaactccccagctattacgggaagaggaacgctcttgtgaaacctggacccttcgatgccaatggggagggagatatccacaagcatgagccctgggaattaacaggggtttcgaaggtgaaaacccggaccaagaagggacttctttagaggggtaaaaaaaaaacacggaatgggcgcaggatgaatcgagcactatcaaggggcaccggaaaggactgggacagacagaaaatccgcagggagatcagtggctcggcgagaaaaaaaccctgtctcccacaacggcgggccccaaacggcttgggacaagtggggaagcagaaa

SEQ ID NO: 186497 - DNA, 490 bp, Arabidopsis thaliana
  unsure (1)..(490): unsure at all n locations
ggcacgtcgtgcggagccgggatcctttagagggggcggcctctctttttaatcacgcgtccgcctcacacacgggcaaagggaatggacaaacactgaagaacacgaaaccacacctagtgcttaacattgatggagacccataacctggagggggatacacaaagaaaactcgcttcgctttgagggcaggnnacccaagggaggacacacgggagaaaacccccccacctgggggggcggggcaacccttatatacaacgccttaaggggagagggcaaagcacgcggagggcaacggcctgaattctcaaccccccaccaaacaggaagagccaaataaaaaatctggaatgcgaaaaaaacaacaccccacaaatccaataacctgcatcaaacccctcaaaaaagaatgaaatgaggccctgcccacaaagatggaaccccctgaaaaggaaaaaaagaaacacaaccccaacagagggcgaag

SEQ ID NO: 186498 - DNA, 403 bp, Arabidopsis thaliana
  unsure (1)..(403): unsure at all n locations
cggcacgtcgtgcggagctgggattttttagagcgggggaccttcctttttttttatctttctttcctttaggggtcttgagcttcttctccttgcgctgttcctgcagcttaaatcccatttagaaaaagaccacacggatataagagatgattagaagaaaggcanacaaattggctcctgttttgnagnngggaaacnacgnggggnacctnnacgagaaaaaccccgggncaacggggggaaggacccagagaagaaaccaggccaaacaacaaagccaaccgaggggcggcgaacaccaggcaaggagaaaggaccacaccagggcaggcaccaagggggggcacaagggaacacaacgaaggaacagccagaaccaccagccacagaaacccacaca

SEQ ID NO: 186499 - DNA, 527 bp, Arabidopsis thaliana
  unsure (1)..(527): unsure at all n locations
agccggnacgcctgcaggtaccggtccggttttcccggggggacacacgcgtccgaaagacctgagcaaaaactgagggaaaaaaaaaaaaaaaaaaaaaaagacttctcctcaaaaatggcgtttacactaggtggaagagctcgtcgtctagtctctgcaacaacagaacaacattcctgctgtttagggggcngcaacaaangggatcggaccgagaaaagcccccgcgaagcagaggcggggagaccactacccaggagaacaaacagggnncaagaannaggaaccagggaagaacccacggaccnaaacagagaaacagagacaagcgccgaacccccggaggaaangagacacaganncccggaaaccaagagacaaaagcacccaccggagagagaaaagagcaaagcccgggccacagcccaaacaccaaagggaanggcgacaggaagcgcaagaccaaggggacggccaaccaaaggaccaggaagccaacccggggaagccccaccacccgaaaa

SEQ ID NO: 186500 - DNA, 173 bp, Arabidopsis thaliana
ggccggcacgcgtgacggagctgggatcctttagagggggggcaatctgtttttaattattttttcatttctaacaaggggaaatatatatagatacggtccccctcatgggaaccatggatatattttgacacattgcatgatgatagtgccacgaataacacacacagaga

SEQ ID NO: 186501 - DNA, 572 bp, Arabidopsis thaliana
  unsure (1)..(572): unsure at all n locations
gcccccacgacngnaggnaccgggcccctanacccggggcgacagcagcgnnncaacaaaannancaaccacacaaagggggaacnaaaaacgaanaccacaaccccgccacaggaaccaacgcacccatacccgaacagcaccacaaagagaaggagacgccacccccaagggaagnccaacaagcccgcttcccactcagaacgatgagacaaacggaaaaacgaaacccgaaaaaaaaaaaaccccccccccacgagggcggagggggcaccaccaataaaaacaacaacccacacccaaagcaaaaaacacacagccgacacacaaaaccacataacccacgacccaacccccaaccagcaccacacacaccaaccgaaaagaacaccacaacaaaaccacaaaaaacaaccccaacgaagaaaaaaaacaaaacagcggcgaccaaacacaaacacccacacaagcaaagacaaaaagaccaaacacccacagacaacacacaccacaaccacaagaaacagacacacaccgcgccgacaaacaaaacagcagagaacaccacacac

SEQ ID NO: 186502 - DNA, 537 bp, Arabidopsis thaliana
  unsure (1)..(537): unsure at all n locations
gccgggactcgtgcaggnaccggnccgctatacccggggggaaatctcgtttagncctcttcttccacttccagaggaaatcgcttcctctgtttttttccgatctaaattcacagctcatttttaaatgggctcacggcaaggaccaccgaagcatcagaacaaaagcggcaaatccctccattttgnngnnggagancaacgaagacggaagcgggggaaaacccccaccagggggggggagggccccacctttttaccgatgtcgagagcagataccccggaaacgcgaatacgggaaatacaaaaccctaactggagccaccaggagtcgagaggggaccaagggaagaggcgcgggaacataccacaagggtagcgcctgggtgggccaacgagcaaaaagggggggcaaaagggaagggaacagggagaacagatgccgggaagaaatatagacgaaggagaggccggcaagaacgcgtggatgagaacttcggaaattcgggggaagaagaagagggcccccggaaggag

SEQ ID NO: 186503 - DNA, 542 bp, Arabidopsis thaliana
  unsure (1)..(542): unsure at all n locations
caggcacgcgtgcgnaagccgggaccctttagagcgngccgaccaacccnnnncaangacgccaaaaaccaaaagagggcgagcagcgcaaagaacggaacccgcgaagacaaagcacaaaagatttaaacacggccggctaaaaggacgggagacaaacaacgggacaaaaaatttttttctttgggggaggaancaacaaaggggggggaggaagaaacaccccccccacagcgggggggagccaccccaccanaacccacggcgccccggacagacaccaaaaagggggaggggggccacggagaaaccacaagggacaaaaccgcgcccgcacacccccggggagcgcccagagccgcaaccgcacgggaaggaggccgggccagaagccgccggggggcccagggcgaaccaacaccgcgcaaaaagaggagcaccggagcaagccaacaccaaaacccccccaaagaaaccnggaacaaaacaagaggacccaccggaagacgaagccccccagggaccaccccggcggcaaagca

SEQ ID NO: 186504 - DNA, 587 bp, Arabidopsis thaliana
  unsure (1)..(587): unsure at all n locations
caggcacgcgagacggagccgggacccactagaggggggggccaagcgttagaaggaaagaagccccaacaaagaggggcaaccaacagcaaacgcggcaacgacagaggaaacccaaagcccggaaacacaggagcagaccgaacagcatgagacaacaccgcgcgcggcgcgaaacaaaaaacaggaacacctacaaagagggnggccgganaaacccngagggcgccccacgggggaaaaacacgccacgccnaggcgggcgggggacggccaccaaacagcaagaacaggcagcgccccggggaacaaccagcggaacgaggccgaaggacgacaagaaaaaagggggagaaccaggaacgagccacccaaggggagaagaagacagccccggggcgccccaacaagggcccaagaagagaagacgccggccccgccaaggggcagaagagggaaggggccccgaggaaaaacaaaagggggggagagaaaaaaaacaagagaccgggcccggaaaaagggcgggcacggacaaggggaacaggggagcagggaccaccggggaaaaccaaaagagggggggg

SEQ ID NO: 186505 - DNA, 576 bp, Arabidopsis thaliana
  unsure (1)..(576): unsure at all n locations
caggcacgcggacggagccgggaccctctagagcgggcggccacccgttcgattttaaatcgacccaaaaaaggggaagcactcaaaagagagaaaaagaggcccaaaaaccgcggacgcaccaggaaccaaggccaaaacagagaagggacaagagacaggccaccggagggaaaaaggccacaccaggggcgtnggaaaaannanagagagnngngcnggaaaaaaacaccccccancagggggggggggagggcaacacaaacacagaccaggccccggagagggcgaggaagaaacgcgggaaacaagcgccgggggagacaggaaaacagcaaacagacaaaaagcaagaggncacccaaagaaggcggacaaaaaaaacggggaagaaaccgagggcccgggccaagaggggaaaacccccggacacgaggacgccccacaaaagccgggaggcacacagagcgcaaaaacaggaaagagaagaaaagaaaaggcccacggggaaaagaacgaaccacccaaaggaaggaagaaaaaaaccgacgaaagggaaagaaccaacaggggaaa

SEQ ID NO: 186506 - DNA, 533 bp, Arabidopsis thaliana
  unsure (1)..(533): unsure at all n locations
gcacgcgtacggaagccgggacccactacagcggccgcccagcctttttaaacatagttccccccaagcagggggaaaaaacaaaacgaaagagcccgacacacgaacacgcaaaacaacaggggaaacaccccaagagaaccgacacagacaccccccagagaaaaaaacccctacacaaaaggagaggagaacaccccccgacgccaccccaaaacaaaaaccccccnaggaggggggggccgccacacaaaaaaaacacaaccacacagcccaaccgccaacacaaaccccaacccacaagaccacggacagcaccaccccaacacgcagacaaagaccgagaccgcccccacaacgaacaccccaagccaaccaacgccaccccggccacaacacaacaccaccccacgcgcccccacacccgaccacccaaccccccccccccaccaacagacgaccagacaagcgcacaacagagccgaacaaccacccccaaaagagcccccaccaacgacaacacagcccccaga

SEQ ID NO: 186507 - DNA, 561 bp, Arabidopsis thaliana
  unsure (1)..(561): unsure at all n locations
ggcaggcacgcgtacgtaagctgggatcctttagagcgggcggcctacgttttttatttggtgtgtttgttgaatttggggtttatcagccaaggaaacaggcatatatacaaaagcatggtgaaatgcatattggaggaggaaaaacatgggacaaatgggcgacccaaaaaaaaatccctggcttttcgggtggggcccgcnacggggactttactttctaaacaaaccaggggtgggaggggggctactaagtgtttcccggatgggtatgtccgcaaactggggagaggaagtgacaaccgggggaccggaacgcgccttggggggccgttaaggggccgaagactttcggggacaacgaaatggggaaggatgggcttggtgatggggtaggcagggaggggggggcgcggggatcggcccgagggcgggggagagaagggaagatcggtggggggggagagggggggagggaagcagtgagatgggaggggggagcgcggggaggcgcggagggaggaggaaagtggggcagggggagcgggaagggaggggggg

SEQ ID NO: 186508 - DNA, 539 bp, Arabidopsis thaliana
  unsure (1)..(539): unsure at all n locations
gccgggacgcctgcaggnaccggnccggaaaacccggggggaccaacccgtccggcagggcgagccgccgaaaggagcgtcgaacagcacggcagccgcgggatgcaacagacagccggagcaccgccgccgacgaggagaaggcaccccggccacagaagagggggcagccacaagccccccctcccgatgaggagccgggancggaaaacagggcacccaaaaaaaaaaacacccaaggaacgggcggccgcagacacaacaaccacgngaagcaaccccgccggccagacgggcccacgaagcccacaaacgcggggacgccgcgggaaacaaaaggccccagaagcgaaagacggggaccacaagacagaaaccaancccgggcgccccaaggcgaaggggaccgaacggcgccaaaaaccaaaacgccaaccacgcgccccaaaaacgcaaccacaagacccccccccgaaggaacggacacccaacncccccacacgcggggaagaggcccccgcgcccacgaccgccgaagg

SEQ ID NO: 186509 - DNA, 377 bp, Arabidopsis thaliana
  unsure (1)..(377): unsure at all n locations
ccaacccttttttattaacacttagcttttctttggggtttcattattttcttttattttgtaacagaaataaaagaaaattttttaaaataaaaagatgggttacatttcaatgtccgtgggagcaaacccttccctcccattttgaagaagggggcnagccgccggggcagagccaaaaacaccccacagaggcgagggggggggaggggtttaaacaaacggnaaaccaaaggcccagagaaagggcgcgcnggaccccaacaaaaaagccgcggaaagaaggggaaaaaggaccagcgggaaccacaaaaggcggcgccaaggggaagacaggaaaccaaggcaccaagaacaacgcgacgggaaaaaaaaac

SEQ ID NO: 186510 - DNA, 414 bp, Arabidopsis thaliana
  unsure (1)..(414): unsure at all n locations
aacagaaanaaaagaaaataattgaaaataaaaagatgggttacatttcaatgtccgggggggcannccncgttctcctttttggcngangggnncnagccaccgagacaganccgaaaacacacaacagagcccgaaggccgcaacgganaaaaacaaacgccaaaccacanncccagagaaagggcacgccagaccccgcccccgaagcggcggaagcagcacgacaaaagaacaccgggaaacaaaaagggggcgcgaanngcaagacaagaaacgaagcgaccaagagcagccccacaggaaacaagaaccggggaacaacaagggggcccccgggggaacaangagaagggcacaagcgacanagcccgaccaaccacnacaagggggggccaaccggggcggaaacgg

SEQ ID NO: 186511 - DNA, 463 bp, Arabidopsis thaliana
  unsure (1)..(463): unsure at all n locations
gacgggcgaaccangcaaaggggggacaaattttntcgaagnaatagaggccatatttgacggngaacacggcgcacaggaatccctcctgtttggctgttaggcccccaagcgaagatttttgcgttaaaaggccccccaagaagaggggggggatccccactttttgaaaccaaaagccgctccgtcgaaaaaacgggggggaaggcctaatcaatcccaaaactggggggcgcgataccaaaaatggggcctgaaaacatgggggccggaaacgagggcggagcggaatataccgcgggacaggccaggaagcgaaagggcggacaaggggtttgggccagggcgggtacacaacgacaacctggaccggccgcgggagacgggggaagcgacaggccgcagagggaaaaacggggaggcggcgaaacagaacctagcggggggccgaggggccgaaggg

SEQ ID NO: 186512 - DNA, 326 bp, Arabidopsis thaliana
ggagggagaccctaagagcaaaaaaaccccccagaggggggggggggggaccccccccaaaaaaagggcacagaagaacacagcaaaagaggagaaaaaagcgggaaggaaaagaaggggacacacccacacgacacaagccacagcgcacgcacaacccaccccaaccaaaccccccacagcggcacgaacaagagagtacacgaacgcggaccacgccgccagaaagcgcagcagaccgacgcaccaaaacccagccacggcacagccccgcacccaccaccccccgaccgaggacgaacagcggcaccggagacaacgcagac

SEQ ID NO: 186513 - DNA, 522 bp, Arabidopsis thaliana
gcaggcacgcgtgcgtaagctgggatcctctagagcggggcgacctatcgcgttcgaaaaataaaacttgttgattagggaatataaggtgatggtggtctccccaaagggcacagagaagaagagaaacaagaggccaaaggaggagaaagggaagagacaaaaaaaaaaaaagaaaaactccatttgggggggggagagcacggaagggagttttccccggaacggccccaaggggaaaggagaaggaggcaaccatggggggcgccaaaggcggaagccacgccaatggcagccaaagcaggggatgaaagaacggataaaaaacagggggggaggtttcgcgggagagaccagacggggcggaaaaccacccacaggggagccccggaacgccggcatagtgaaggaaaaagggggggggtttggacaagggggggaggccactcaacggaaggagaagcggggctgaaaaaatcgacccagggttggcgcccacccaacccaaaaaagggcgggggc

SEQ ID NO: 186514 - DNA, 317 bp, Arabidopsis thaliana
  unsure (1)..(317): unsure at all n locations
ggcgtgcacgccgtgcgtgaagctgtggatcctttagagcggccgcccaaccttttctatggtgttttcagcgggggagagggcttcaaaaaccgggaaaagacataaggggaggacattgaataatattgctatgacaagacaccgaccccggcagaaaagagaccaagagaaaacgactgctccntttagggggggaaagncnnacgggaagactgccaaaaaagagacacagctttctgcaccgcgaaaaaaaaggagcagccacaagcgcgcngcaccaaagcccgccagggaggccacaaacaccgcagcac

SEQ ID NO: 186515 - DNA, 504 bp, Arabidopsis thaliana
  unsure (1)..(504): unsure at all n locations
acgcctgcagggaccggnccggtancccggggggaccaacccgtnccganggngtngacacgcggaggagagccaaaaagaaaaccaaaactgacatttgaggaacacaaggagagccaccggcaacattatcacccaagcaaccccaggatctggggctaaggagaagaccctcnccttcaggagcagggngncaagagggaaaaccgggaaaaaaaagcaccaaggccggggggcgggagaacacagattaaaccgcaaaagctattcccgagacccggcagacaggggagagaaacaacccgcggggccgagagggggaacccaaaaaagaacatactggggggccggaaacgggccagcggcccgaaaagcccctagggcttggaaaacccaacccgcacggggccggctgggaacaaccgacagcgggggaccccccgcccccccccctaaaaaaaagaccccacgggaaaagggggcccaggagaaagagccccaggc

SEQ ID NO: 186516 - DNA, 544 bp, Arabidopsis thaliana
  unsure (1)..(544): unsure at all n locations
ccgccacgcctgcaggnaccggnccgttttncccgggggggaaaacccctcaaanncntctactccctcgcagaggggtgattgcttgaagcaaaatctcaaaaagggagaacgacgcaggttttggcacaaagcgctacattccaaggaaaagctgggcaacaaacagaaagaccctcccatttagaggagggcannnaagcgggacaaaggagacaaaaaaaccccaagggcggggaccgggccaacaccccactaaccgcacncngcggaaccgaccccgcgcacggagacgccaaaacgcgggcggggaaaggcccgggccaaaaaagaagggcgaagccaaaacaccgggaaagacaaaccggcacaggagaaaacaccggggaggcnaaagaggcggcaaaaaaaaacaagaggggccgggcgaggaggggaaaggggagaccggcaggagagagaaaaggaagacaacccccggcgaaaaaaaaaaacaccaagggcgggagcccggggaaccccacccgaacaccaaagaaaaaaa

SEQ ID NO: 186517 - DNA, 220 bp, Arabidopsis thaliana
  unsure (1)..(220): unsure at all n locations
cacgcgngcgnaagcngggacccactagagcgggcgcccacccgnncgacnngacaaaaccccaccaggggaagggcggacggcagcncaaaacagncaaagcaaagaaacaagactgccaagcccagancaccaacaaaacagaggggccaaacaaagggccacgatcctcctctcggcggggaaaaacaaagaggacgngccacagaacaagagcccc

SEQ ID NO: 186518 - DNA, 526 bp, Arabidopsis thaliana
  unsure (1)..(526): unsure at all n locations
gccgcctgcaggaccggccggctttccggggngtcatcgnncggacgacgaaaagnncgcggggaatcancnnngngcagcaacncccgaagaacccaganngttatggtactgatcgaatcaagtgagagtgaagacgagatcctcatcaaaaactttttcttttcanctgttggnanccncaccgaagcccacggagacaaaacaccccgacggagatggggggatgggctttttactgccagcgaacgtgaaattagcgatgaggaaggagaggaagagggacccaaaatgacgccgccccagtcaaggggaacccccagcactcggaaaagaaggaagaaccacatgggctattgagggaaagaagagcccatatgcggagacgggagacaccaggagaaagccttgggaaaagcccatggaggctaacggggagggaaaaaactggtgcgtaatggcgcatataaaaaaaactttgcctaaaggaggccttcgctttaaaagcgcggacaaggggtacccc

SEQ ID NO: 186519 - DNA, 468 bp, Arabidopsis thaliana
  unsure (1)..(468): unsure at all n locations
cggagccgggacccgctagagcgggcggcccacccgtccgccaacacacacagacgagcgggggcaggccccacacgacaacaggggacggagcgcggggccgcacaaggcagggaaagaaagagaggacgacgacccagcaatcgccggccagagagaggagacgccccctcccccccggggggggagggggcgcaaggaaaccaaggcccggggcaagccccccaagcacggcgagagaggccggcaccagggcaaaacgagaagaacccaacgcgcaggggnaccgacgcgccaaggcccggggggagacagcccaccgggcggcgaagaaacgggggagcgaggaggaagagggaagagcgaggaccagcgggggcgggagaaacgcacacaagcggcggcgcgccagagaccacagagaaaacccggagccccaaaaggcgaggaggcggagaaggcccccac

SEQ ID NO: 186520 - DNA, 178 bp, Arabidopsis thaliana
tcccatgcacgctgtgcgtgagcttggatcctttagagcggccgccctttctttttttttttttaacgattcacatgtgcgcactcattatttcaccaaaagcaaagctcagtgtctattaatcaagttatagtggtggatctacacatgttcttattggatggggtccgcggccgga

SEQ ID NO: 186521 - DNA, 551 bp, Arabidopsis thaliana
  unsure (1)..(551): unsure at all n locations
gccggcacgccggcagggaccggnccggtttncccggggggccaacgcgttcgaggntatgtcgatcggattctgcaacttcaccgccaagttcaacaaaactaagatagctcacaatgacttctcgggtgctaggatgccacctctttgtaaccattgaagaactctggagctcctcctcttcggggggggcaggaccagggcggccttcttccttgggccacaccgtgttgtggggggtaaagaaccgcttctttttggattttcttcatttgggtttctatatagaccttttttctcaagattaggctttatttgcctaaccagaatggggtatcccggagaaaaggccctttttaaaaaaaaaaaaaagggggggccgtctagagggatcaaagttacgtacgcgtgcatgcaacggaaaagtctttattagggggccctaaaatcaaatgacggggccggcggttacaacggcggggacggggaaaaccctgggggttacccaactaaaacggcggtgcgggaaaacccccctttcgccggggggg

SEQ ID NO: 186522 - DNA, 475 bp, Arabidopsis thaliana
  unsure (1)..(475): unsure at all n locations
ggccggcancgcggacggagccgggaccctttagagcggcggcgcctactcctttctatgactcaataagcggagcacagggggcattccttgatcataaaaaaccaacggctaagatcagccctaaacactttccagcaagaacaaaacctattacatggaatacagaacaaacccacctcctccttcataggcgcggacccccaccnacggnnannaccacaccaaaaccccacaaagggggcggggagaacacacagcaggaacaagggaaggcccacacgaagacccccccaaaaaaaggaccaccacaaaaacaaggaagaacgnccccngggggggagcaacnccnaaacaaagaaaaanacagaaagccggccccggaaaagaaaaacaccnccgcggaagacaaaaaaacaagcccgcgacgacaagaaagaaggggggagagaaaaaaaaaaaaagcggaagcccc

SEQ ID NO: 186523 - DNA, 532 bp, Arabidopsis thaliana
  unsure (1)..(532): unsure at all n locations
cacgcacgcgtgcgnaagctgggaccctttagagcggccggccacccttttataaattagccaccaaaacggggggactttcttctggtgaccctgagaaaccggcatcggaccacggtttttgatggccgcaaaaaggcagaagccaaccgggccggaaagaaaagcccctcaaataggnggggggcaagangaggggggaacagcaggaaacacccccccanaagggggggggggggggcgcccctctacaaanggagacacgggggggccgcgagaggcaacgaaagggggccgcccccacgaggcgcggggcgacaaggaaaatcccccccccccgcagggggagcaaaaagaaagcagggcgggggggggccccccgaaggccaagaagcccacggatcccgggggaggccgccggggaccacgggagcccaagaagccaaaggacgcggagaggcgggggggcaacaccccgccgcggggacgcccccccgcccccgggggggggagaggggggcccaccgagagg

SEQ ID NO: 186524 - DNA, 464 bp, Arabidopsis thaliana
  unsure (1)..(464): unsure at all n locations
gacgccgcaggaccggccggtctcccgggcgaccaaccgccggaaaggcgcccgaattgagggcgtacgccggcgaagattcatcggaaactactgacgttacgccggcgaagattccatcggaaacttaactgacggaaggaagaaggctcctctaagcaggggaagagnacaggaggaagaagcagggaagccacagnatcggcgcgggcgccccgatcctcttcggtcctatggctcactctatttctcagaagtgcctcggggaaacccaggtgagaatggtggaacgggtgagaaggggaaaagaagcagctcgagcccatgggggacggaaaaaaacatgggacgaccccctccaggcccagggggaccaggggcaaactcccgaaatgcaccgcgaacaagccagcaatatgagagacaagggaaaccaaacctcggctgggccccggaaggggaac

SEQ ID NO: 186525 - DNA, 490 bp, Arabidopsis thaliana
  unsure (1)..(490): unsure at all n locations
ggggggnggggggagggtctcttgaggagaggcggaaacccnnnaaaaaaaaaagaaacccccagancggggggaacgagacgaagcacgcaaacggccaacgccgcagaagccggaaaagacttggggcgagggcagaggcgccgacgagcgccagagcaaggcacgcgggaggaaggcctccctancaccatgagcgtnggaanagaangaaagcgagagtcgagcgagcaaaaaagcccccacgaaagcgggggggggggaggcccacccataaacgggagaggcccgcggaggagcaagcgcaagaggcacgcggcgcgaaagcgacccgagacgaagacacacaacgccagcaagaacgcggcccaccgcgagaaccgaaacaagaccggaaggagaaggcaaacaccggcccaacaacacagcagcagcccacaacaacaacgccaagagagacgacaggaagcgcggggcgccgcacagcaag

SEQ ID NO: 186526 - DNA, 554 bp, Arabidopsis thaliana
  unsure (1)..(554): unsure at all n locations
gagctggggcgctctagagggggggcaaactnttttaaaaaanaggcccccaaaaggggggaaaagaaaaagnagaaganagaggggganaagacgggagaggacctggaggcaaacagggacaacgcgggcagagcaaaaaaggaagaaaaaagacaacttttcccttggncggangggngnnnanaaggaggggcaccgggggaaaaaaacaccccacacaggggggcggggaggggaaccgcaaaccaaaacangaaggaggggcggaggaagcagcgggcgagggcaggggaaagaggcggagggagggggggaggggggagggcggagggggcagaagagagggggggagcagagggagggggcaaagaagagaagggagaagaggagcacggacggaagccaggaagccacgacgacagcggagcagagggagacggcgagcagggaggaaggcgggaagcggaggacagggaggagcagggaggagccagcggggacggcgaagaaagcgaaacgcacacaagcaacgagagagaggagcgaggaac

SEQ ID NO: 186527 - DNA, 528 bp, Arabidopsis thaliana
  unsure (1)..(528): unsure at all n locations
aggcacgtcggcgnaagccgggaccctctagaggggcggaaacccgtttttaacctagggtcggccaacgaagggaaaagcaaccatcaccaacacacaccctaagagaatgggccaggacaaggactattgcagacagatactagacaaatgtccccacnnagaagaaagcggctttcntcttggaagaggcnnaaaaagaaaaaagaaccaaacngagaaagcccccaganccagagggggagggaaacaaaaagaagaaggacaggccacgccgcgaagacaacgggggcagacagggcgaaggggaaaaacacaaccaccaccgggggacgcaccaaaaaagggacaaaaaaacccgaacgggcccgggaagaaccaaccacacacggaaacgcgaaaaaacacccccaacccccggggggggggccaagaaagggaaaagggcccgggaacaacaacacacaccaagggaccgaagggcgccaccgcgggggaggagggccaccaaaaaaggggaagagcgaa

SEQ ID NO: 186528 - DNA, 555 bp, Arabidopsis thaliana
  unsure (1)..(555): unsure at all n locations
cgcctgnagggaccggncccctatagggggggggcatcagcgnccgaccaagggggcggccccagacgggancagacccaacgaaaagaaccaaccggagaagagagcacaagctggttgacggagcgaccgaaggcaaccggagaaggggggcgccaaacnccaccagaaacctcctttcccttagcgacggtgggnaaaaagagagcggcgccccctggcgagaagaaccccaccggctcggggggggggggggacacccaaaaagagagaactcccaaaaccacgggagaaagacaacggaaggaggggccgtgacaaaagaccgaaacaaaagaacgggatgcgggaaaaaggagccgcgacaggggagaaaagcagcagcccgagagcgggagaaaagcagcacacacggacaggggccggggagagcaaaaggggagaggcgacgacacccgcaaccagaaagaccggggcggggggcccggacccaacaacgggagggagaaaaagagaaagatacggaggaaggacgcaccagcggaagcaaggcgg

SEQ ID NO: 186529 - DNA, 530 bp, Arabidopsis thaliana
  unsure (1)..(530): unsure at all n locations
gcaggcacgcgtacggaagctgggatcctctagagcgggcggcctctttttttttttttttctgtgattaaagatggagataagactaaactataaaatgggaacgatattcgagcgaaactgattgagattatagcagagacacttgtaatgtaaacaatcgaaagcaaagcttgcctgnctttagagggngaannangngaagatagggncnagaagaagaagccgcgagagggaaagaggaaaccccattgttcttcccagaaataagtacattctgaagaattgactgggagttcgccatctgctgatacaagatcataaggaagagcatctgcgaattctgatggaactgatttccagagaagtgaaggatgccattccgtttctttaaccacgctaaatatctctgccgctactattctgctatcttgtgctgacaaatgaataccggcagagaagcaacagttttccaggcatctgctctctgaaaagcagagaagagaccaaccacttctaggccgagttct

SEQ ID NO: 186530 - DNA, 426 bp, Arabidopsis thaliana
  unsure (1)..(426): unsure at all n locations
gccggnacgcctgcagggaccggnccgctattncgggggctacaccgcgnccggagcatnncaaggaaaaaanactgggagaaacaaaaagagaaaactagtatgagaaacaaatccttaattaaggaaataacagtaatgcacgtgatgatataacaaaagggggngnnnagttcctctttttatgggggggnncccnnnaaaaagncgggganaaaaaacaacccacaagaagaggagacgagacgcccatgcatttaancncgcaccnnacgacaaagagggagagagaggancgcccaggggggnncaccnncaccggacgaaaagccncngcggngggagaaagaacggccnggccncagccccgaaacagaggaacagagagggcaggaaggagacaanggnnggacccgcgcgggccca

SEQ ID NO: 186531 - DNA, 343 bp, Arabidopsis thaliana
  unsure (1)..(343): unsure at all n locations
gcacgcgtgcgnaagctgggatcctttagagcggccgcccttccttttttttcacttctttcgtccacgcgtgggggaaaaccttggtgacagacaaattaagctctgtacttgagaggcatttgcacaagtaaccaaaatcgtttccctcgggagaacgggacaaaggaaactccctccattttcaggggggaaaggncnnccannaccaaaaaaggaaaaaaccccggcagcgagggaggagggaacaaagaaacacgccaaagccaaaaggaacaancgcggaggaggagacagagaaaaaccaggcncccccacccaaacggacacacnggcacaaaag

SEQ ID NO: 186532 - DNA, 518 bp, Arabidopsis thaliana
  unsure (1)..(518): unsure at all n locations
ccggcacgcctgcaggtaccggnccggttttcnccggggcgttcatcccgtccgcccacgcgtccgcccacgcgtgcggttctctcagtggagaagaagactcgagtcatctgcagaaaagattctcgatcggattggatcatataagattttagggatttggaaaaaatcnngatcccctgcattttagggcggcggcggacggaacggggaatccgatccctacccccgcggttttaacagcttcggccaatcatataggaatcaggtgtatgccggaaaacatggcgttcctgaaatgtaagaagaatgatcctaacccagagaaatgcctcgagaagggacgtgaccgcactcgctgtgttcttggcctggacgttcttctacttcattctcgttcaatttctctacaaggtcttaatttgagctgatcttaagcatacaacaattgttggggctcctttctgttaaaacttgatgaaaatgggagatattgtccccttggtagaattaggggt

SEQ ID NO: 186533 - DNA, 510 bp, Arabidopsis thaliana
  unsure (1)..(510): unsure at all n locations
cgcaaaaacgggaggcaaggaaggggggntcccaacggaagagggancaccgccggagccaacaacaaagctggaggagcggtcgccggagcctccaagaaacccgccgggggaaacggaccacctccgattagggtgacagggaccaaccacagggtctaccgggaaagacccccctggggggggggggggggcccacacatctacgaaggattgtgaaacaacaccacacaggaggaggggccaaccacagactacgggaaaaagcccccctgtgcccccggggggaagaggtaacccgccccggaaaggggaaggagaacggccgaacaaactcgcgggggggggaagggcagaagcaacaagggggagaaagaccgggccgacctccaacatgaaaaaaagagaaaaaacagacaaagagggggcgaccgcgacaaaagaaccaaacaaacaaacgcggggcaggggagaccaaaaaaccctgtaaagggacaccgaaacgccacg

SEQ ID NO: 186534 - DNA, 563 bp, Arabidopsis thaliana
  unsure (1)..(563): unsure at all n locations
caggcacgcgtgacggagcggggaccctctagagcggggcgcgcaaccccgttcaaactngatctaaccccgcggcaaagggaaggaaccaaaccggaacagcgaaagcaaggccccgcgaggcaccaccgaccaaaacaaaacaagacagtgcaagacacgcccgcaaggacccgaaaacatttccttctggggaggaacaagacaccgcgaaccaccgcaaaaaaagaaccccgagaggagggggggggggcccccacaaccgaggagccaaccgcaggcaaaggcaaccgcagggggcacacaaccacaaggggagcagcaaaacgggcccacaaagcacccaacaggaaaggacccagaaccggcgcaaaagacgccggaaacgccccccggagggaaacaaaacccagcaaccggcgggcccccccagccgcgggaaccccgcaaagccgacacacggcaagcgccccccggggggaaaagaccaccacgacccgccccccaagggagaaacagaagggcccacggggggaaaaaaccccccccgaccccccccccaa

SEQ ID NO: 186535 - DNA, 401 bp, Arabidopsis thaliana
  unsure (1)..(401): unsure at all n locations
ccggnccggctttccngggggcttcagcgnccgcgctgtataancgggaccgggggcgggncaggatccggnacagaagcggagcttctcgaattcggtgtttttgatgatttgagagagttcgctgaaggcttgacctctgctacannccaagctcctccttttcagaggtgaagggganngaagggccgangngaaaacaaacgcccccgaaggggggaagggagcccccggaccggcaagagagacacgccacncnggagcnaaccgcgggcaagcaaaaccccaaagggaagaaacgaaccccgggcccccggccaagaaagaaaggagggcnccggaggacccaangcacaccagggagcacccaagggccccaaaagagaggaagaccagggagg

SEQ ID NO: 186536 - DNA, 553 bp, Arabidopsis thaliana
  unsure (1)..(553): unsure at all n locations
caggcacgcgtacgtaagctgggatcctctagagcgggcgccccacccgttctactatttgttccctcaggcaaaagagcctcttaaaccacaagcgctaaaaggacaaagggggcgggattctataaactcggaaagccaaaccgcgctcccgaatccaagcggaagggcgggccatctccctcnctttggagggggaaaaanaagcanggggcaaggcggcancacacaatnccaccacatnagcacagggcagtggaagcacgaaataaaagaaggacagctggaaaagaaaaaaataggaaaacaccccgctatcaaggcgcaacccagaaccctatcagaccagaatctctacaacatcctaggggcataagaacacccccacaatcgccccttccctgggtaaaggaagcagggggcccaacaacggctgggacaacgggggccgcaaaaagggcccagacagtagggccagggcggggggccaacggaaaattgacccggctcccgaagcaggcggccgggtggagaaaaccccccgaaggggagg

SEQ ID NO: 186537 - DNA, 585 bp, Arabidopsis thaliana
  unsure (1)..(585): unsure at all n locations
caggcacgcgtgcgnaagccgggaccctctagagcggccgcccaacccgtgcgaaaagagctccccacaaaagagaggagaaatctaccagcccccctggggccccgaagaacaaacaaagggaaaagcaaacaaacaaacacacgacacataaccaacacaaagggagacgaaaaacctaaacccggggggggggnaccnccaaagagacggaaagaacgaaagaaaaaccaccccgaacgcaagcagagggggaaaaaacaaaaaaaacccaccaaccagaaaaagggagcccacaaaacagagcgcgggcgaacaaaaggcaaaacccacccccaccgaacccaaaagaaaaagcggcccccaaaaagcacacaaacgaggagcaagtgcgcacaaagaagcagcccccgggcaacgagggcggggccgggagaagagacccacccaacccgggaaaaagaggacaaagcgcagaaggatgagaaacaaaaaaagcatccggcaaaaaaggagagggagcacggagcccaggaaagggggagaaagcacccggaacagggaggaaaaaaaccgaagacgggc

SEQ ID NO: 186538 - DNA, 529 bp, Arabidopsis thaliana
  unsure (1)..(529): unsure at all n locations
ccgggacgcctgcagggaccggnccggcttacccagggggtccacccgngcggaaagagcggcgncnncnncaggggcaccatnaacnccagagacaggagggcccaaaggcgaanaanaaccataangangcacacaaccaaagcacccancgcgcagaggcgcccaaaaaaacgcctccttcagaggggggggcacccccaaagcccggcgccactaaaaaccccccctccgaggcaggggcgaaagccgatcacgaaccagctgggtactccaccggcgagcacgcgccgacgagaagaccaaggacacgggcagggaaccccgcagcgacggcggaccacacggacacggacgacctccccgcgacgacgaaccgcaccgcggcgggcaacgagggggagagccccaccccgaaccccaagcccgcggaaaaggccggccgccaccccaaccacgggagcggggcggggaaaccccgccccccccggagcccgggggccggccccgggccaaggaaagccggggc

SEQ ID NO: 186539 - DNA, 545 bp, Arabidopsis thaliana
  unsure (1)..(545): unsure at all n locations
gcatgcacgcgtacgtgaagctgggatcctctagagcggcgcgcccttcctttttttaatatctggatgctgtcagttggtgttaacactatgtagttatgaaatgtgaataaatattttacttattgtgtttgggaagtttgagatagagacgtggtacttatataaaaagaaaacatccctcccttaaagggggaaganaaaaaggggggggttccccccaaaaaaaaccaagcgcggagaggagggaaaagacatatgaggaggggcgatatgaagcacccaactgggggggaaaaggagcgaagctataataggccaaccgccaaaagaggatggcaagaagaataacggctatgcacagaaccttgggaagagggcaaaacaatttgttgaacacaaaaaaaaaaaacacggcggggaacggttcctggagagtagcccctgcgaaagagacgaacgcggaagccacgtgggtccatacttttgaaaggaaaaacctcgagaggaagggggacaaaaaaatggcctcctaaaaaccacaa

SEQ ID NO: 186540 - DNA, 524 bp, Arabidopsis thaliana
  unsure (1)..(524): unsure at all n locations
acctaagcttggatcctctagagcggcctgccctttgggtttttttcttttaacataaaaccantcccttcnttatgggaggaaaataaacccctattattttcggataaacaaaagtaaatcacaaattttcattccaaaaagggattttttaaaattaaataaatccccagggacacaaacaaaaaatcccccaatttgttttttatccggggggcgcgccccttaaatggtcagaattccctaaaaaaaaaccctatcccaaaaccccaaattttttatttaccccccccctttatcattaataagccgaacctctcttaattctaaagccccttttataacccttccccgggggggggaaaacctttttaagaaaaaatccggcttccgcaatttcttaaaaaaaaaaaaaaaacacctttttggggggccccaacgaataaacacaaaaacggggggtttttttcttaaaaaaaaagaattttgccggggtgtataaaaatcttttcaccataaaaaaa

SEQ ID NO: 186541 - DNA, 589 bp, Arabidopsis thaliana
  unsure (1)..(589): unsure at all n locations
ccttcctccccccccccctaacttnatcccctaacccccccccttttgtttttttccctaaaaaaccccctntttttaaaattatcctccccccctcacaattttaaggcacctcttggcccccattcttancccttttcttttttctaaatccttttttaaccccaaccccccacctaaaaccccttcccgccccctagggccctcaaattttttccccccttttcttttccaaggtcgttgggggcaccactttttttgggatcccncccccacaacgacgcaaacccccctcccccccccggngttttntttttccccccccctcntcccaaacccccccccccccaaagttgaaatcctctcttcccctccttttccccccctttccccctcccccaaaactccctctccccttttttcccccaaacccgccgccttttccctctcctcccacccctctttttctccccgcctacctccctccctttcccccttctacaccacaacaagatcttttcttcccccacgcgttttttccccccccccacctcccccctacccgcacctgacctcaaaccaacacccc

SEQ ID NO: 186542 - DNA, 492 bp, Arabidopsis thaliana
ggggcccttttgttcccccccaggtctcgggtgctttttttttggaaaaagttgttttaacacaaattttaacccccaaagccgaaaaggggtttttaaaaaacccctttgcccaagttgtggggctggcactttttttggggagagggggcccccatacgggggggcgggaaaagaaaagaaatcccctccctccttaaaagggaagagggtttgttcccccccctcggttccccccccggacttgagaggagaggtttaagttccccgccccccctcaaaattctgccgcgcgcgcaaggacatccaaatgtgcgcacagaggaggggggtctcccgcccccctctcgattatcgcgcgaagcagaccacgcggagaacccgtggcgcgcccgcttgaagaaaggggggtgcgggtctcccatacagaatgcccccagacgcccctggggcagctcgagccggccggcccgggacgctaaacgcccacgc

SEQ ID NO: 186543 - DNA, 503 bp, Arabidopsis thaliana
  unsure (1)..(503): unsure at all n locations
gtcgcatgcacgcgtaccgtgagctggatcctctagagcggccgcccttggggttgggcttttttaattaaatttttttttttttnnntcccctanngccaaggnnncctnncccntttaaacctcaaaaacaaggggggggcccccccggcgaaacagaaaaaatctcggggggctttacgggccccccagggggaggacccttttttgaggaaagaaggggaccntatttctgtgtttcccaaaaagataaaccccccttctntcctttttctttttttcccccccttttaaaaaacantgggggttgtgttggaccctaggcgggggtggctttcctttttttccctgggagaaaaaaaaaccaccccgaggaccaccgccggcgtgggtcgggggtatttgtggccagagaaccacaccccccccgcggggggggaaaaaaaaaagcgcttgaaaacactaccaaccgagtggtttctcccaagataaattgcgggggg

SEQ ID NO: 186544 - DNA, 518 bp, Arabidopsis thaliana
  unsure (1)..(518): unsure at all n locations
gtcgcatgcacgcgtacgtaaagctggatcctctagagcgggcgcccccnggggnaggagctttttatttaaatttttttttttnttttgtgggaattggctttttgtggggggaagggggttgcattgngggacaggaaagggggcccccggaaagcgagaggccgccacccacaacaccgaaaaaggagaaaggaggtttttttttttggggagaaggggcccccccacggcgggggncaaaaaaaacaaaattggttctttgggggggtgtgccttccgcccccccttcattttttctaaaagaaaagggaggacgtgcccgcgctatacaagaggggggggagggtgggtgttttttttttctgaatacaagaggggagaggcgggggggataaaataaaaacctctcaaaaagaagagagcactataagagcacacagtggttctcctgcccccaaaaaaaaaaaagagaaccccgccccccctcctgtccgcaaaagagagaaaaaaaaata

SEQ ID NO: 186545 - DNA, 493 bp, Arabidopsis thaliana
  unsure (1)..(493): unsure at all n locations
cccccccggggggggcccgactccaaaaacccttttgttgggcgttaaccctcccctcccccccccatttttttttcccccttcaccatttcctaacacccaaccacacttttttcttctttctggcgattgtttgtgggaaaccccctctggggggccnccctcaaatctatcctaaactccccccccccccccctttttntntccnnccgcccccctccctcttttgcgcccccccccccccccgcccctctttccccccctttttctccgccgcccctcccccccccctccccgccaaaccttcccttcccccccctcggccctgccccaaaccgccttcctttttcctctcaaacctgttttgtttgggcgccctgtcctccctcctccttctcccgcgctccttccttttcccttttatgcccccgaccgccccccctcttctcttttctcccccccccccgccccgtccctcttctctcccgtctcc

SEQ ID NO: 186546 - DNA, 455 bp, Arabidopsis thaliana
  unsure (1)..(455): unsure at all n locations
cccccccccncccccccccccccnncccccccccccccataaaaacacaccttttttcccccccaaccccccccnnaccccccccccccncccccaccccaaaaaaaaaaaacaacaccttttttttttcccaaaaaaattttcgtgggatgtggggcccccnccctctttgggcgtcaacaaaaaagcacccaactccctcccctcttttgtttgcgggggggtgggcccccccttttttnccataacccttttttggngccccttcttgtgaatttttctccaccggggattctcctcccacaccaataaaaaaaaacacccagcgcgcggccctaaaaaatttttcgcgggggggcgcgtctttttctcttcttcaaaaatgtcccggcctattttcgcccgcctgccgttcgaaagcggcggagcatggtgtgtggggggggcggtttcta

SEQ ID NO: 186547 - DNA, 672 bp, Arabidopsis thaliana
agggacggaaacccggggcccccggtcgcgtcgcagccgggcggaggacgataagaaatgaccccgaccccgggcaggacagcgcgacccccgcgcagcagacggcgccacgacccccaacggcgaccgacggaagagaggcgcgcgggcaccccgcggccggcgatgaggggcccgacactacgaccaagcaccccaaaacgcaggagaagcgcgccggcgccccgagagaacagccacagcacgcgcggcccgcgcgcacccagagagcggacaatacgcgcggggggggggcgccgcccaacacacgtcgccgcccactagggccaacagcagacacgaacgggcgcgccgcgcaggctgcagaaggggcaagaccggcggcggccgagggacgacacatgacaagccaacccgacgcagatggcgacaacaagtgacagaccccaaccgcacagccccgccaccctgtccgcgcgaggcgacgcgaagacaccacatagagctaacacaacatgccggcaacaaacgacggcgacggagaaacgaccggacggcaccacgcgtagcaggcaacacgccgtcagaacggacctccacagaccagcgaccacccacgcgcgcgcgcgcggggcggggacgaggctcggcgacaccacagaacacgccccc

SEQ ID NO: 186548 - DNA, 305 bp, Arabidopsis thaliana
aatagacccacaacatgcgaaaacctcgtctcgcgcccagggatcgctgcacaccctataagtctattcgttcttcgcgatgtgttgattaccgaactaataaataacgcgcacaataacctcctacatgcctaacagatcacctcacgtctagtccgcagcttaacagacttatttgttttctggctttaagccccgttttttttagggggggggcgtaaaaagaggtcatatctggagaatactcaagtagggttggtgacccgcgcgctatgaagctgattgaataatcttggctgcacaac

SEQ ID NO: 186549 - DNA, 150 bp, Arabidopsis thaliana
  unsure (1)..(150): unsure at all n locations
aaaaggtccagccgggggcgggtataattgggtacacactctcanaaatctatgacgtcacctgcaccccgtacctaaagccttggaatccctataaaagctgttgcgcacctttgggtggagggtggctaactaaaatcacaatactat

SEQ ID NO: 186550 - DNA, 511 bp, Arabidopsis thaliana
cccacgccaaaacaatagaattcttttttttttacttcaaaaactgtttgctggttgaaacagggcttctttcacaccttttgggggtccactacttttttaatggggttaccaggaaaatttcaacacgacccatctggggaaaaccaaaggaaaagtggttccatttttttttcaaccgggagcgggggtcccttccacccaccgtggtggtcttataaaaaaaaataaccgccgaaagatacgcatgtcttgttccaaggcgctccccgagcgaaacaactgtccgcagaagaccttccctcacgtcacattcaagaaaggaggtttcaaacaacaagggagtcccaccgtttttgcgaataacaattttcaagagaaggagaaatttttcggcccccagaccttattgcggcccgatcagagggggcccaaaaaccccacatcaattttgctgctccacgaacctaccctttctcgaggcgcgggcctttaaaccaaattggagaac

SEQ ID NO: 186551 - DNA, 304 bp, Arabidopsis thaliana
  unsure (1)..(304): unsure at all n locations
atgtgggcggggggggggngccgcggggggggtagaatcgccgggtctattcgactaatatatggaaagctggccgcctgcggaaccgggcccctatacccgggtcgacccagggggggggggaatattacacacatttacagtctctttacaaaccggggggccttgtgaccaactttcactatgcgcttaactggcgataggttttaatcaacttctttgttcggtgtgctttggcctctccagccaccatgccaaaccgagggggtcttccacctgttccccccgggggtagtcggggggg

SEQ ID NO: 186552 - DNA, 591 bp, Arabidopsis thaliana
agaccccccccacggagaagagggcccggcgcagcctttttcttccccgggggggaagggcgggtcgacacaaaaaaaaaacttctctttcttccccctgctcgtcgactaccgattattcgtctgcaatctactttgcgtgctgtactgaccccatgcgccgtccttcttgcccgcctactcgccccctctgcgcgcgccgcccccgcgttacctccccgtgcctacccagattcattccatgcttgcccctgacccctttttttttccgggtgtgggccccccccccaacctccctctgccaaaaaaaaaaatgcgcccttcccgtatcgcccgccgatagacccagttcgtcccggctgccccctctcggttcgcttatatacttctacgtccgccaacccatcccgcccgctaccctcccatcctcgcgacgcgcttccgccgcctcccatagcacactgctgtacgcttgcccttgtgccccacccctctcccaccttttagtgcgtctgcgcccgcgccccaccctccacctcgcggcgcatcgcccgtgcgcccttctccgctctgtttccatccccttcctcc

SEQ ID NO: 186553 - DNA, 115 bp, Arabidopsis thaliana
tcttccagcactatctactacttagggaaactcttcgcctcatgtcctgtccctattccggtcacccacgcgtcgaaccagactatatttactaccttacctcatcgatgagccc

SEQ ID NO: 186554 - DNA, 423 bp, Arabidopsis thaliana
tcggaccggccgattacgggcgaccagcggtcgtgatcattttacacatcacctttcctttacagggagcttattatcatcccacccagacatttggattataaaatcttctggctagaaacctcttatagcccctccttgaatatgtcaaatcacagggattacttttttgggaaacaaatatcatggaggggggggggggcacaaggatgggccccatcctaccccaggaagatccccagtgggtttgagtcccaaattaaatgtggaacccccaccagccgttttcattgtcttgacttgccgacacaccaagaaagtggggggatttttctacaaggatcatttcgggaactaaaaacgttcatttttatctcaacaaggactcttggaagaacaccccccaccattacttgggttctg

SEQ ID NO: 186555 - DNA, 171 bp, Arabidopsis thaliana
  unsure (1)..(171): unsure at all n locations
tgacgcactgcattttacgggaaaagcctggtccagctctgagggttaccaggtaccggaatttcaagggttcgacccacngcggttcggaggtacgcgttggacaggacactgtgtggcggtactcatggtggctcagcatagtctgggaagtcttggacgaacgacttt

SEQ ID NO: 186556 - DNA, 502 bp, Arabidopsis thaliana
aataatctaaatccttgcgagccaacagtttggcctgggcaatgaccaaccccacaactagtattgtcgagcggcctctccgcgttccgtcccctcggttacataaaagggaggtgacccccgtttaaagacaacatccctgccccttggttttagaaattttttttcttggggatgttagggacttctcttcagcggagtgggaatataaaaaaaagaaccccccgtggggtttcgcgtcttttgatgttacccacgggttagtaatttccatacccgcattcttcaatatagtttgaagaggaggatattcttgtctcttggcttatatagataccgcattgttttgccaagtgccaatataccttcgtcttcccatgtaagtggctccttccgatgggaatctcgtgactattttattgtttagaattggcctcccgaaattgacgagggagggggcgattcgtggtgcacgtcttaaccactcgcaattgaattatat

SEQ ID NO: 186557 - DNA, 466 bp, Arabidopsis thaliana
tctactgttttagggaaggctgtgccccctgcgggtaccggtccggaattacagggtccacctatgcgttcgatataaaggaaaatttatgaaagggtagagaaaaattacaaaggggccactcttatagtcttttttcttacttctgaccgcgataggtctcgcgagcaaaaatttacgccctctctaacgtaacgtatgcatattcctcaggggcagtagtaattatacctattgactgcggggggggggatcacatccaggatatattgggataaaattttctgttcttttttgcggacgctcatttccagacagaggtccgtaccttaacacaaatattgcaaaaagggaatattaaatgatccacctatcaataaaacgtcttccatgtgcagattcaacaacgctagaggatgcaaaaaagattcttggtaagacctcagttcacccgcttacctctatt

SEQ ID NO: 186558 - DNA, 517 bp, Arabidopsis thaliana
  unsure (1)..(517): unsure at all n locations
tgacgtcgcacgcacgcgtaccgtagcttggatcctctagagcggcccgcccttgggtttttttttttttttttttttttttttttttttttttttttttttttttttttatttttttatttgacattttttttaatatcgggagaagttaaaattttttttgagtataagaccacgaaacaaaaaagcacttttgaaaaacttttttccaggggggggggcccgcaagaaccggnaaaaccaaaaaaaaacccccggggcaaacaaaccggagggtctgccaccccccgggtgggccgcctaaccaccccgtggggattttccgttccccccaaaaacttcgcccaaccaagccagcggagggcgtcctctcccccagggaacccagaagccccccaaaaaacaaaggggagacccgcccccaaggggcctcgcataaatgggggtccgggcccccccccccccccccaaggggcggcccagaaagagggcccggactgactctttttccccccaa

SEQ ID NO: 186559 - DNA, 348 bp, Arabidopsis thaliana
caggtacattcgactaaatttagggaaagctgcgccgcctgcaggtaccgggacggaatacacgggtcgacctacgcgttcgttcacgcgttcggacacgcgtacgtaattgatttgatctttactccctactatttggagccgtagcaattaacgttaacgatcaacaactctattgtacatgtgtggtctacctctgtaatatatatacattaccacaagcttctatttcatggggggcgtcatgatgaagaaagagctgatacaataattggagcgagaaagcatgaagatgcgtcaggtggtgcttaggagagcctcgccagaggaaccttttacatgctgaag

SEQ ID NO: 186560 - DNA, 416 bp, Arabidopsis thaliana
taggagaaagcctggtacactctgcaggtacctgtgcccgaatttccgggtcagacccacgcgtccggccacgcgtactgggacgcgtgggctttcatcgtcggagaactgagtaacatattaccaaaacggcgttttgctatgagcagtagagacagaccagaatggaggtcttcttattatacgcgggtagataggagatgttagttgtgggagattaactatgtctactggggggggggcgaaattcataaacttgtgtctacaataacacagagctcgtgtaccgattttgtctaccgcaaaccatgggtctgtaggtatatcggaatttcataccgtagtcttaatctggtgaagcctatacctgatgagctgtgaggtaagaggaggtttagtcagttatcttatgggaa

SEQ ID NO: 186561 - DNA, 509 bp, Arabidopsis thaliana
aggaaaaacttgccgcctgcaggaaccgggacccaataccatggtcgacccaggggtcgcggaagatttttaacacaatgaatatagcgccgactattactgcactataagcttgaccatactatgcatgacgtacaatcaacggtcaattatctgcatctgaatatggacttttagactctactaagctaacttttcctaattttttaaaactggggcgggggtcaaaaaagatccagtacctaagaatatgctgttgtgtctcccaaatgtcggtctcccattttcaagacatgaaaactctcccaatcttgatttccagattaaattaaaccttcttcaataggggtacaacggagatcttatcatcgctttaaaacaacttataccggttggactttaaagggagagtgaaaaaaaccccacatttaactgaggggtaacataaacacattctaatgcccagaaagaaacatttgattaaacagtaaacaaccaccctcttacga

SEQ ID NO: 186562 - DNA, 286 bp, Arabidopsis thaliana
cgggcgaccggagagcgagggcagacatagaaggagaatgaggcccaccgagggggcagggcgcgaccccaccagaacacggagccgacgcgcgaacgcccaccacaaacaccaccacacaccgaagaccgagcgggcaacaccccacccacccgatgaacccaagccaccgaaggccaagacaccgagcagcgagacggcaggagcggagagaaccaacgaagcgactcacaccaaaacgagcgagtacacgaccacccacccgagaggggggggcccagacgaa

SEQ ID NO: 186563 - DNA, 461 bp, Arabidopsis thaliana
caggtctcctctacacctctatggagagctgtgccgcctgcgtgtgccgggccgcaatacacgggtcgacctacgcgttcgaaaacctcaaaaccctctgctatgtagacaagcaaccatgtaataggtttagacaacttcctcacttttctcctctcaataccaatcctcgcgtggcggaatatggctcagcagccctgctaactccaccgactgattaagatttcttcactggggtgtgatcggcatcggaatctcaatcaagatcgaatctacagctggatgcgctggagcttgctaccgtaacaggcggcttatgtggctatacctagtaggcatgcttatcatcatgcgtggtcttatcggataatcatcttcgatgacgcgggcacagatgaaggatacggacaaaccgttctcaacctgggttatactgactataaccccgaatatacctctac

SEQ ID NO: 186564 - DNA, 134 bp, Arabidopsis thaliana
cagctctattctactcaattatggaaagctcttccgcctgcatgtacctgtccccaattccccggtcgacctacgcgttcggttctttctcgaaaagagtaagagggttcttctcctccagagagttcacttca

SEQ ID NO: 186565 - DNA, 548 bp, Arabidopsis thaliana
  unsure (1)..(548): unsure at all n locations
tgtgcttacttgctccactgtgtccctttttctcatggggggaaaggggctaaaacaaaaanctcctgttcctgctctactttcacccatatctttcaacctctatattaattgatcataacaaagaatccaaaacgttccagcggttacatcgacacctcacacagctcttcacactccacattcctctcattctccttacaattctcttttgcctcggggggggggagctccccacatctaagggtgtgtcttttcaaaaaaaatatcaaatccatcattgttttcgttattctcgtccttttaagtattctattaactacacatcactccatgcttccatcccctacagcaccttcgcatccttatactcgactatcgtacccgtctactaagtccctcttccgatattactgaatactgtcttcctctattcttcaagtcaattatctccaccctacaccctccacgcttattcaactagcgtaatatacggattccatataatataaactgttcttatcttcctatattaatcacaacatcct

SEQ ID NO: 186566 - DNA, 696 bp, Arabidopsis thaliana
ggataataaaaacaccccccccatttacccgctcttccctaaattacctaacctaaaagcccattttaaacaaaagcaaagtgcatatttctcaccgccgatcccccccaacactttttttctcggggggtggtccccatccggggggcccaaaaaaaaataaaacatcttcttccgcttctgtcttctaaccctattcttatattcttatccacttctctcttacttaatcctatacctaaaacgactatttcggctcatacatctcatttattatagtcctacctttatatatttaaaaccgctaattcgcgccaatactcatcattttaattaaatttccacccaaacataattcctctactcagccactatgtacaatcccccatattcaatcaaaactaacactttacgtaatctccaccccgtctagtcaatcccaattatagctaaattatagaacataattccagtaaacaactaagaaataatttcattacatatcatacgtgtgttcatactcatttcatctactcttttcagagccacaaagtatatcatttggtctcacccccgatacaaaaacgaatctaactcataaatactgctattataaccgcactttactcttgtgactaatcactcgcacactcacttaccccgcacataaaattctgacatttctatagtaaaatt

SEQ ID NO: 186567 - DNA, 409 bp, Arabidopsis thaliana
  unsure (1)..(409): unsure at all n locations
ctgtatccgttctttccccctgtccgcgcgatttcttcgtctctttttccgcttccggccccttccgcgccttttttttttggggggtgttgtgggccccccaccagggggcgcnctcaaaaaacaaacctcattctttttcgggccttctcctcccccttttctccccctgcgttactctttatcgttctattctcccggtgtcgcgcattgcctcgtgagcgcgctgcctcctcgttcgcatctcgcttcccgtcatcccgccgctcctgtgttacttcaccgccctccccgctcgcttgttgctaccgttgcgttcgcggggttgatggtgtgtgtggccggagtctccgtccgggctcatctcgccgcgcctgtcggcgcggcgcgccgctcctctcgtggttcg

SEQ ID NO: 186568 - DNA, 638 bp, Arabidopsis thaliana columbia
  unsure (1)..(638): unsure at all n locations
ccccccccccccccccccccccccccnnttccccccccccccccaatccccccacccccccccccccccactccttttggggaacagctcccccccccccccttccccccccccccatatccnnnnnnccgcggcaacccccccccaaaccaaacacccccccccccccccccnccccccccccccccnnccccccctcccccccccccccccccccttccccccccccccccccccccccccncccacccccccccccccccacttgtcccccctcgtctcccccccctctcctccccccccccccccccctccttttttttcacaccccccttgtattggcccccccccccccnccccccgcccccccccaccaaaaaaaaaacccccccccccccctccccccccccctttcccccttctcccccccccgccccccccccccccccctcttcccccccccccccacaccccccccccccccccccaccccccccccccccccccccccccccccccccccccaccccccaatcccccccccctccccccccccccccccccccccccccacccccccttcccccccccccccccccccccccccccccccccccccccctccccccccccccccc

SEQ ID NO: 186569 - DNA, 135 bp, Arabidopsis thaliana
  unsure (1)..(135): unsure at all n locations
cgctccccccccccccccccccccacccccacatcccctcgtaatactccgcgcgaaccggngtcctctcaatatttgcgnaaagcaccaagacattccccgcaccttttacttcttcgcgtggcgccgatgatt

SEQ ID NO: 186570 - DNA, 619 bp, Arabidopsis thaliana columbia
  unsure (1)..(619): unsure at all n locations
ccccccccccccccccncccccnnnctttccccccccccccctttttantgagtcttcccccccttcttttgggggcgctttccccctccgagcccccccccctttttcccccccgggggggggggggggcccatctactttttccccccccccccgccgggggggcgtccttcttttttttccgcccctttcccccgggccgggggggctgtgttttttgtttaaggcttttcggtgtggccccggcgggccccgttgcagccccccccccccttttctcttttcggcggtttgttggggcntcnccccctcggcggttcncccctaaagagaccgcccccccacccctcccccctccccctnnttcccgtcctccctnccccgccgccgcgcccccccccggcngcccccctttcccctgctctctcctccttcctcccccctcgcccctntcccttcccctgctccttcgccgccgcgccgcgcgcccgcccccccgtcccccccccctctcttccctccgcgcgccccctgccggcgcccgctgcccgccccccgcccgtgccccgcgccccgcgcgcgccccccccgtcccccgccgcccccccccccgccccg

SEQ ID NO: 186571 - DNA, 680 bp, Arabidopsis thaliana
  unsure (1)..(680): unsure at all n locations
cccaaaaaaaaaaaaanccaaaaccccccccccccctcctcccccctctctcctccccccacccacctcccctccctactacttccttaatccacaacacacacccacccctaccccctctacatcctcaccttacccaacacaccacataatccctaaacaacccatcaacaaacaccccccaaatcccactccctctcatcccacaccacccttccaaaccacccctctccccatattaccacaccacactctcctcacaattccccctcctcccccttcccctcaaactacccacctcacccaccatccatccccatctactactctaaacaacacctctcctattcatcacccacacatctccacccactaaataatcacataaaatctatccctcctacaacactactcaatctctccacccacctaaacctctcactcatcacctcccctaaaccaccttaacataatcatctcacccctctcatctcaatcccctcacccaatctcctctcaccctttctatcatcacacccctcttccccctcatctaaccactccctaaacatatcaccctcaacactcataccacactccaatcttctncaccccacacaatcccacaaaatcttaatcacaatcctttattatctccctcccactccaccctcaccata

SEQ ID NO: 186572 - DNA, 575 bp, Arabidopsis thaliana
  unsure (1)..(575): unsure at all n locations
cccccccttgccaaccggcccccctttccaaaggggggttaggggtcattattaaaaacccccncccctccccccccccccccccccccccccccccccctcccttcttcccccccctcttctcccccccctcncccctctcccccccccccccccacctctcccccccctccccccccccttttttttttccggcttttgtttcggncnnccncggggggggccccaaaattactaaacccacaaancccctctccccgcgcgccgcccctttcctctctcctctctccctctcgtcccctgtggtttctctcccttcttgcccctttcgggtccctgtttctctctttatcccgtgctcgctctatttatactgaaattgtcgtccttatagtggttttgtttcttcccatcgtctttccccgttcgcttcttatctccgctccgagtttaattcctccgcctacctcgctcctagatcctctgctttcctctcgctcacggttaagtcgtccctcaacttatgcttcgtagctgtcacacgctggcgtgttgtgtgcagttctcgtgagttt

SEQ ID NO: 186573 - DNA, 257 bp, Arabidopsis thaliana
  unsure (1)..(257): unsure at all n locations
gtccccccaaaaacacacaaaaattatccntttcccctttccccccccccccacaacttacacgtntnaccntncttnttaccccggccccnntaaaaaaacaacaccaaattttttttaaaaaaatttgaagggaaagcccccaaccacttccttgccaaggggttttatgcaggaccaaggaaaacccccggaaaacacctctcgaaacgttaaatttttcctttcgaaaattttaaacacccccccctcaatcc

SEQ ID NO: 186574 - DNA, 465 bp, Arabidopsis thaliana
  unsure (1)..(465): unsure at all n locations
gaaaacttttccccctccgatacccttccccaaatctcccgccccccgggccggcctttaaaaaaaatctctttaataaaaaaaacaaaaaaaaatttaaaaaatatttttctttcaacctnatctttcatacttttnnattctctctttccccttccgccagaatcaaaaaatcctttcaattttctaattccgggagggggagacctttttttgagtgttcccntttataaataaaaaatacccgagaaannnaaccctctttccaagggcccccctccnccctttccctctattggtttcaaaccttttaattccttttaataaatttaaaaaattaaaaaaaaggggttcttctcaaaaaaaggggaactttcctccaaacacccaccgaaataattgggaagcgtttttttttatccccctccccaccccaccccttttttgcccctttcaatttttccc

SEQ ID NO: 186575 - DNA, 549 bp, Arabidopsis thaliana
aaaatcaaaacgccccccgccccccccccccccctcccccccccccccccccctcccgcccgcccgcaccgccctctctcttctcccccctcccctccccccctcccgccccggtgcgccgtgctcccttctcctcccccccccccccttctctgcgcgcctctcctccccctccctcgccccgtctgtcccggtcccctcgtctgccccctccccccccccccctcccccccctcccctccgcgcgccctctctagcgtcaccgccacccccccctactaccccacaaggcctccacagcaaaccatactcccccccccccccctcctccgcaagcccccacccgccacactacaactagcctagccatcttctcgtccgcagcacgcccgcgctcgccccacaacaatcatacaagcagtccagcaaccccgtacttctcccggcgcgcgcacccccacttacgccaagcacgctgcgcctccacacgcacattctgacccgaccagactcacgcagtcatgatcgacgggcaccgctccccgaacc

SEQ ID NO: 186576 - DNA, 672 bp, Arabidopsis thaliana
  unsure (1)..(672): unsure at all n locations
cccttttttcttgnggcggacccctttcccccccctttttattcccctntccccncttttatcnccncccnncccgcgcggaacctcctctttatatatatattttttttcttttttttttttgttaaccccgcattctcctcccccccctcccctttcttcccccctctttccccttngnggatgnngggtctagaggattgggtcggcccccctccccaccgtcccccccctcctctctttcattccctccttttctctttttttttccccccgttttgttttcccgccccccccccgcctccctttctcctcacacacctacctaatatcctcccactcccctcctcttctctcccccccttcttctctccccctcctctctctttttttgcgttccctcctntttctccggccccttngtctntctcctttcccccccctccctcctctctcctcntctcctccccccctctcgctcctcctcctccgctcccctctcaccctctccctgctccctccccctcctccctcctccctccctctctcccccccccacctctcctccaccctcttctctctctccccccctctcctctctctcttccgcctcctcccctcttcctcccccccccctntcttccttcctccctcctcctggcatttctccct

SEQ ID NO: 186577 - DNA, 330 bp, Arabidopsis thaliana
  unsure (1)..(330): unsure at all n locations
ccccccggggggggccccaaaaaaaaataaacccaaaaaaccncccccccccccctcttccccccttcntcctccccctcccctctctcctccttcgcttcccctcgccgcggctcgcttgcccaaggaccccggccctgccccgccgagggttcgttgcgccgggcggggggcgccgcgcggttggctggtatcccgcagccgccgccgccgcctctcggcgcacgctcctcccgcgcgaccccatcttcctagctcccgctcgcctctccacttgggccacgcgtcttctctgtctctcgtcccctgcttctgcggccctctgaggcg

SEQ ID NO: 186578 - DNA, 690 bp, Arabidopsis thaliana columbia
  unsure (1)..(690): unsure at all n locations
ccccccccccccntcccccccccccnnccccnttcccccccnnccccccnnnttaaataaaagngaaagtcttttcccccccccattttcctctcttnggagagagcttttttccccccctcacctttcccccccccctcctctttttttccccnttccccccgtgctcactctcccccccaacaataaatanncccctcccctttcctcttccccccttccaacaatcccccacccccccccacccccancctccccctttttttccccccgctccccctccccttctttctccccccctttaccttcccccccccctctctccaccccttccccccttttttttttcccctccggactgttttgctcccnccnnccccnncccctctctctcctcccccatataaaaataaacccccccccccccccctccccccccccccctnccccccccccccccctccttccccctcctccttctccccactgccccccccccctcccctcccttcttccccccccccccccccctccctccctcccctttctctccctctctccccttctctccccccctcccttacaaccatccccctccccccccccccttcccccccctccttccccttctcccttccaccctctcccccttccctccctccccccccccccctcctctcccccctacct

SEQ ID NO: 186579 - DNA, 618 bp, Arabidopsis thaliana
  unsure (1)..(618): unsure at all n locations
ccccccccccccttttttacccccaatccttcttccccttttttttagggaaaacttgtccccccttccctataccccctcccccatttccccgntcccccgcggcccctcccgtttaaatttaattcccccccatttttnaagcctctcccctacccggaacctttcccaataaaacaccaccccttnattccccttcccaccaggaattcccttttattcccccccttttgcccccaaaattcttctacccccccccttttcttttttttcctcgcgggggtgtttgctgctctcnccccccggctttcttctctcccaaaaaaaaccccccccttcttttccccccccccttttttccccccccccctctcnnttccctctctctttcccctcaaccaccccaacctttaaataattccctccccccctcaacaccccaccacaccccttctctccttttcatctcccatcttccccccccttacacccctctctcttttacaacacacccccccccccctccccccctttttccccatttactccccccccccacccccccccacccctttcttctcctaaaacatcttcctcccccccacacccccccatccc

SEQ ID NO: 186580 - DNA, 606 bp, Arabidopsis thaliana
  unsure (1)..(606): unsure at all n locations
agaagaaaacaccccccccaaattccgggnggggagaacccggccacgacagcacaagaaacccacccgccgctattcgcaacaggcggggaaaaccccgcccccaaaaacaaacgaccaaagccccagagacaacaccagaaaggcgacacgccgacaaacaccccgccccggccgccccgaaccgaccagccacgacaccccgccaaaaccccccccacccaagcgccagccgcccccgcccacgacgccccaccgcgccagcggtttttttaacacaccaggagagtgggcccaccccacccccccccccgccacgccagcaaacacaaacgacgacccacggaacgcccgccgacagaaaccccgccggccgccggcacgacgacaggaccacgcagaccccagacacagccccgcccccccacgacaccaccagacagccgccaccgaacaacccgcagcaacaaacgcaagaaaccatagcataagagcgcgccccgccaagagggacacacgagcccgccgacgcagcccccaccgcaacacgcacatcgcacacacgcgaaggaaccagaaaacgcaccacaacgcgcagaccggaaa

SEQ ID NO: 186581 - DNA, 361 bp, Arabidopsis thaliana
  unsure (1)..(361): unsure at all n locations
tttatttatctataccaaacctttattctcaatttngtaacctattggtccttaacttgaattgtaaccccaaccaattttttcacctgggggggggggggcattttttgttttttccttaaaaaaaaaaaccctnttttnncngggcgggggccccccccttttaaaagattccaccttttcctacccccttcatttccatttaataattttttttatagtcccacctaaattcatttccctgccccgtttttttaccaacttgaaatttagaaaaccccttcgctttcccccaatttatatcccttttaaaaaaattttcttctttttcccagtttggcctaaaaaaaaaaaaaacccc

SEQ ID NO: 186582 - DNA, 271 bp, Arabidopsis thaliana
atctgattggtaatatcaaacctcacctttcaaccaaaggggcgagctttcttatcatccctcttttttaaaagtggtgggggcttatttccgtgggtccaaaaaaaaaaaaaacttccattgcttttcccttcacccctcaaccaattcaatcattattcttcaatcatattttaaaaaaaaattgcctggttttcctttttttcacatatcttaaaaaagagatttttcttttaccaaaaaaaaaaattaaattttttaaaggaaacca

SEQ ID NO: 186583 - DNA, 759 bp, Arabidopsis thaliana
  unsure (1)..(759): unsure at all n locations
ttttttttatttaaagagaaaaccaagtgtgtccatcaaatgaggatcantantacaacccattctacaagtgagaaaaaaaaaaccacaccaaaaaaggggtgaccccggcaatcagtttttcaaaaggggggggataaatcttgtttgtaacaacataaatccccaacctacctttaaaactcattgtccatttaaaggggggagccccaccattaacccccttaatttggcctttatttacggttaaagagcgttcctataaaagacttcctccttttaaaaaataatttttaaccccaggttctcattttccttttttggtgaacctccctggaatttagaggttttctaactaaaaaaacacccccttttcgggatataaaatttttttttcccaagggtggggggccaaccagaatgcatcccaatttttaatggtgtttggtgttggccctaaaaaatttccggtatagcctcaaaaaaaccttttccccccaagggggaccaaactcctctatttattcctaggggagatagcttttctttttgttctccacaaacacaggtcctgaaggggggtagactttttaacttttccccctgcccgagggcccccacaagccctttttaagggatccctgttccaggcagacaaaaaataaccccttttaacaccctttttgtgggggggaaaaaaaaacctggtatcccctctaacttatgggggggggcgctctcgggagttctttcttaacc

SEQ ID NO: 186584 - DNA, 434 bp, Arabidopsis thaliana
  unsure (1)..(434): unsure at all n locations
attaaattccctctccccatttaaattttttcaaaacctttgaagaaacctcctangtanttaatctttggctcctgccccgccccatcccattntttttatcacaaatcctccaacctaaaaacctctttcctttttaaccccaaatcttttcttcacctcgggttgtaggtttcncaaattctgatggggaagtaaaaaattataaacttccaaaaaattttcatgggaagtttttcaccccccctcctcgaaaccctcctttcttaataaatcctaaaattcccccctctttccctctggtttccctttaatctccataaaatatttcgcaaccccccccaaacaaaaaaccctacccatcaaccttccttattaaatcaaccaataagcaggtggaaaggtcctcaaaaagtttcaattccccccacccc

SEQ ID NO: 186585 - DNA, 666 bp, Arabidopsis thaliana
ggggggcaaaaaaaaaagggaaaatcgcccttcccgtccccccttctctccgccccccctggggtgccccccctaaccaccggcgcttgccaaaccccctttttcccaccagccacacaccccagggaagccacccccctcccccccatcacccccccactcaccacccccccccccacccacccacgaccgctccccagtccatccgacctcacccctaaccacccccgccccgctatcaacaccccccctacccaccctcccaacactcatacgacccgccaccccataagcccaccccagactcacctcgaattccccccacccactaccctccgacctaacccctcctgcaccccaaccaccactccacacgccaacacgcaacacacccacacatcaaacgccccgcgcaccccgctgcgtcactacaccaaccgctacttagccccctacacctccgcaccagagacccaccccccatctccctcccccgccccactcaccgccgcctggatgacccgatcgccctgcgccgcccggctcgcgaaggctgggccccgcccgcgccgccgaccgaagccaaacctcatccccgccgtacctgggccccaaccaacccatcccgcacacgccgcccagcaaactaacacgcgcgcacccctc

SEQ ID NO: 186586 - DNA, 719 bp, Arabidopsis thaliana
  unsure (1)..(719): unsure at all n locations
aaaaccgccccccccgcccgccccccccccgccggccccccccccccctacctcccccacccaaaaaaaacacgcctgccacaacaacccacacatgcacacgtacagaaccaatcaccgcccacccccggccccacaccacgacaccacaacatactccccacccccacacacgaccccacgcaccaacgacacccacccgccccccgcgccgaacacgcccccaccgcagcgaaacaacaacagcctgcgcgccggcaccccaacccccaccccgcaacacatacccaacccgccaccacaactccagcgaaacaccacccaacccccgccgcaccccacgccccaccacaccgaccgcgcaggcgctcgcgcncccgaccaccgcccccaccaccccccaccagaaccgcccccgccgacccgcccacccgcaccgccgtgccagcacccccacgcgcgccccacacccgcccccgccacccgcctacgcagcccaccacgcgcacacgccaccctcacgccaccaacctcctcgacccaccgcaccccgcgcgccacaacccaccgcaccaccacacccgcgcacacccccgccgaacacagacgcccaccagccgcgacacaccgaccgataactacccgacccaccaccgcgcaacccacaccgccgccacccccgccccccccacaagccacaacaccccccccaccacccg

SEQ ID NO: 186587 - DNA, 582 bp, Arabidopsis thaliana columbia
  unsure (1)..(582): unsure at all n locations
ccccccccccccccccncncccctttccccccccccccccatttccccccccctccccccaattttttttggggggccctcctccccccctngncccccccccccccctttcccggncccgcgggggcaccgccccccaacacaaaaacaccccccccccccccccaccccccccccccactcctccccccccccccccccccccccccccccccccccccccnccccaccctacccccccccccccccccccccccccccccccccccccccccttttcccccccgggttgttaggcccccccccccccccccccccccccccaaaaaaaaaccccccccccccccccttccccccccccccccccccccttccccccccccccccccccccccccccccccccccttcctcccccccccgctgcccccccccccccccccccccccccccccccccccccccccccccccccccccctgcccccccccccccccccccccccccctcttcccccccccctttccctcccccccccccccccccccccccccccccccccccccccccccccccccccccc

SEQ ID NO: 186588 - DNA, 710 bp, Arabidopsis thaliana
  unsure (1)..(710): unsure at all n locations
cccccccccggggggggcggccccgcgccaccccccccccccccgccgccaggaattaacccggagaaacaccgttctgncccattntcccccccgccaacccccccccccccccggcggnagnnnacccgcgngcgnagcctttcccccncccncgggggggcaaacccgccccccaaaaaaacaacaaccacagccccccccgcccaccacccccccaccgccacgcccccccccgcgtcatacgcccncccgtcaccgccacgcacgcgcccccccccccgaccgacccaaccccgcgctccngccgtgaaccgagcccgacccaccccacacccccacacaacctcttttttccacaccgcgactagtttgggcagcccacccccccccaggccccccccccaaaatacaagaaccccccccacccctcgcccccttccggccccccgcaccccccacccgccccccgctcgccacaagacgagcagcgccacaacgccccacagggcacccaccaccccccgacgccccaccgccccacggccgccccccgcccccacgacccgtcaccacccaccaccgccccagcccgccccagcccgacaccagacagccccagcgcacaagcggcctcacccccgccaggcccgccacgcgcacacacacgcgccaacccccccaccccgccgcacccccccccccccccg

SEQ ID NO: 186589 - DNA, 414 bp, Arabidopsis thaliana
  unsure (1)..(414): unsure at all n locations
caaactttttnacaaacctaccattttttctaaaaaattctctcaattccctcaaaaaaggttcatacctcttccctaactttnaaagatggaaagctttcccttttgaagaatttcctctttttaaccgagggggggaaaaaaccttatggggtttttaaaaaaaaaaatacatttattttttccccttatgaaataaaccctaaatttaagttcccctgccttcctttttttaaaaggctttcattttcttcctaaaatttaaaattaccttaaaattactgcatcattaattttcccttattataaaattgcccctaaaaaattcttttttttaaaccccattcgccctaaaaacataattctttctttcttattattaaagtttcccccaaaaaactaaaaatatttttt

SEQ ID NO: 186590 - DNA, 256 bp, Arabidopsis thaliana
  unsure (1)..(256): unsure at all n locations
aattcccgggtcnaccggggcgtgcggcgagaatttatccttcatggggggttgttctttttcggtggatttctccaagcgcctagctgaaaaatctcttgaacaagggggaaatgccgggtttgggggccactgaatcctnctcccccttcgtttacgggagactgggaagttcctttttagggcgggggggctcccaatgtggcgttccatttgacgagaaaccacttcggatggggttgggctcatggggaaa

SEQ ID NO: 186591 - DNA, 432 bp, Arabidopsis thaliana
  unsure (1)..(432): unsure at all n locations
tttatggaaagcttgcccccttcataacctgccccattctcgtcaccggggcgggcggccaaataacaaactnaatncccttgcttgagttcaattgtctctaacagaaggccccccctaagaaagaacggccaggaaagaaacttataatgcccttaagacggcggacaacaattccataaacaagtcggggggggggttttntatgtggatataataaaaaacctaatccaatgggtgtttttaattgaaccactcacccttggctctcgggtttctcctttttttgcgttttttttcccctttctgaaaaagttatattataaatcttcttttcccgcgccgctcctctttttaaagggggagaacgtctttcattttcaaaaaaacattaaccccctccagcgagggtgtttttctctttttccccca

SEQ ID NO: 186592 - DNA, 570 bp, Arabidopsis thaliana
  unsure (1)..(570): unsure at all n locations
ccccccctccttccctccccctatctttttgggggaacccttttccccccttcccctttccctttccccttttttcccngtcccgcgcgtcctgccaaanaatcctactattccccttttttttttttcttctccttcccctttttcccccctcccccctatttccttatcccctcccnttccttcccttttttttttntttctcccaccccccccctttccccatttaaccccttaaaaattcaaattttttttacccccgggtggtatgctgcccccccccctttgtgtggcncccttcaaacacaaaattcgccttttttccccccccttttttttccccccccccccttgttnccccccccccttttttttgngccacttgctnnaaaccaaccccaccccttcccccctctttttccctccttaaaattttccctttcccttccaaaacccctctcttccacctgttcctttccatctcacccaccttctcctttctttccttttttcgcccccgcccccccctttctttctccttcccccctccccccgtcctctctccccttc

SEQ ID NO: 186593 - DNA, 624 bp, Arabidopsis thaliana columbia
  unsure (1)..(624): unsure at all n locations
ccccccccccccctncccccccccnnnnnccgntccccccccccncctaaattaaacccaatcttccccctaattttttattttggggaaaacctcttctcccccctccccacttaacccctctccccccaattttcccccnntccccaccccgccacctctccccataaaaaccaaaacccccaattnnccaccccttttccaacctccccttcnattttcccccccacccccccccaaatttcctcccagcatttttttatatttcctccttcccccccccttcagcccactcctttccaacctcccttcaacaaaccccccttttcccctccttgtgtggccccaccctcctccccccccccaaaaaccacaaacccctcccctctccnntttccctccctctcccccccacgcaanccccccccccccccctcctcttccccccctccccccccccccccccccctcccccccccccccccctccccctcatcccccccccacccccccccccccccccctcctaccccccctcccaacccccccccccccccccccccctccccccccccccccccttcaaaaaaccacctcttccccctcctcatatccccccttctc

SEQ ID NO: 186594 - DNA, 875 bp, Arabidopsis thaliana columbia
  unsure (1)..(875): unsure at all n locations
ccccccccccccccccccccccccccnncccccccccccccccccccccccccccncccccccccccccccccccccccacccccccccccccccccccctccagccccgtcttggcccccccccccnccactatcccccaaccccccccccccccccccgccccccccccccccccccccccgcccccccccccccccccccccccccccccccccccgggcgcnacaaccccccccccccccccgccccccccccccctccccccccccccccccccccccccacccctcccctcctccccactccccccccccccccaccccccccccccccccccctccccccccccccccccccccccccctctcgtgcccacctatcccctccccccccccctccccctccccccccaccctcccccccccccccctctctcccccccccccccccccccccccctcccccccccccgccctccccccccccccaccccgccccccccccccccccncccctcccccccccgcccccccccccccccccaccccccacccgcccccccccccccccccacctccccccccccccgcgcccccccgcccccccccccctcccctcccccccccccccccctacccccccccgtcccgacccccctcttccccccccccacgtccccccccccccctcccctccccccccccccccccgcccccccccccccccccccccccccccactccccccccctcccccccccccccccccccccccctcccccccccccccccctccccctccccctccccccccctcccccccccccccccccccctaccccccgtccccctcccccccccccccccccccccc

SEQ ID NO: 186595 - DNA, 440 bp, Arabidopsis thaliana
accaagccctaattctactctatatatgacaaaccttgcacgcctacatatacctttccccaatttaccggtcgaccgattcgtgcttaataaatatacataacaaattccgatatccttcttcctttcactaccacataacctcttttccttaacgtattctccgaaaactctctattctttgactacaaccatatcaactattatacacaagatcaattatttttaagaggggacggctacaacacagaaataataactctaaaactcatcatcttgcttacctaaaaaccacactttctaatcttcctacttaccttcttccaccaactaccaaagattaccggcaaaaatccttatataattatctaattaaactaacaacccatatcttaaacttggacttcttccaatttctttcggtttaaaaattctaccta

SEQ ID NO: 186596 - DNA, 367 bp, Arabidopsis thaliana
  unsure (1)..(367): unsure at all n locations
gcacgctgtacgtaagcgttggatttctctagagcggggcggccttcgttttttatttaaaacttagcggacataccgggggaaaagttacnagatggcctctcgccttatagagttgaattataatttcccgcaaacgcgcgccccctggaacaaacaaggaggggggcggggcacacgctttcttgaggaaaaaattactcaccatttttggggggggagagcgccccaaacaaaacacactttcctcgcgcctctgatcaccccccaataatacacgaccgcttgaaaatcgacgaagaacaaagggacgcccctcgggccgcggccaattttttattcacttttattaaccactgttctcaca

SEQ ID NO: 186597 - DNA, 531 bp, Arabidopsis thaliana
gcacgcacgcgtacgtaagctgggaccctctagagcggcgcgccaacgccggtcgagacttgtagcagccaacgaggggggaaacaaagccaaacagaagagggcaacaaaaacataccaaaaacccaaaaggaggggagaaaaaacccagggggaacaggagagagaaaacacaagcgtcacagtggagggaagggccaaaggagggcccgtacggggcgaaaaaaccaaaagagaggcaggggaccacaaccacaaaaaacgagcaaggaaacacagaacgcaaaagaaggcggggaccccaaggggaaggaccctgaaaaagagggaagcgcaaacaacaggcgcaccaggctagaccgggaaggaggaacaagaaaaccccgccggggggggacaaccaccccaggcgggagccaagcggggagaaaggcaggccacggacaccccaagggagccggcaagcagcgaggggacgaagaccaggccccaaagaggggccccacgaggcacgcgagccccccagggggc

SEQ ID NO: 186598 - DNA, 549 bp, Arabidopsis thaliana
  unsure (1)..(549): unsure at all n locations
atgcacgcttacgtaagctgggatcctttagagcggccgggctttgcttttttatattgttaaccttcttaaaagggggcccaagaaagcactaggaaattgaatatagcgtgggggcctgctttttaggccagacaaacccatataacaagaacaccacaaaaaaaagagacttccctccttttgntgaaggaaaacaggggaagaccttattgaaaaaaaaccccacccatgggggggggagggatccaaattttgcggtggtagcaccatctaaccgggggtaggctaatcacctcacgggtttagaagttggggccgggggctagagtttgaaaggataattgacctcacatgcctaaggaatcccagccgcccggacacgggagaaacaagagctaagggttttgcggaacctggaaggcaatggaagcgttggtgaggggggggggcccatgggcatggctgaggaggtttaacccccggagcacacgcggggggaaaaaacccccctggaggaccgaaccaaagcccgctggcagggggggt

SEQ ID NO: 186599 - DNA, 420 bp, Arabidopsis thaliana
gccgcagggccggccggaatccgggggaccagcgccgacagcgaagacacaagagggcgaaagacaaacgaagggggacgaagagcagacgccaagcgcgatgacggggacgccaaaacacgaacgccgccaaatcctcccaagaagcggcacccaaagaggcaaggccaagaaccacgcgagacagcgcaacgcggcccggcgccaaaacaaacacaaacgcagacggcccaaccgccgggagggcgcaagacccaagagccgcgagccaaggcgagggcaaagccggcgggacacgaagccaagcaaggggaaaggacccacaaaacagcccggaacacggaaaagcgggggacgagaagcacccgaaaaacgccacacggaggggggaccgacaaagacggggaaaaagaaaaaaac

SEQ ID NO: 186600 - DNA, 582 bp, Arabidopsis thaliana
  unsure (1)..(582): unsure at all n locations
ccgcctgnagggaccggtccggttttcccgggggggcccaggcgggccgaggacacgngggcggacgcgcgggcggacgcctggggtttgagataaaaaaagacactgtggactcatctcttcttcattactctcatcgggggggagcgccccctccaaccggctgtgagggaccgaaaatcgcttctctttagggcgacggggggccgcccccgagggccaaaaggccaaaacaaacacccgcgggagccgaggcggggggaaacccctaatatcaggcctaacggggcgcgtgaaccgaaaaaaaacaaaaaaaaaaaaaaaggggcgggcggggtcaaaaggatccaaagttaacggacggggggcggccgacgggaataacgtttctatggggggcaccgaaaatgcaagccgggggccggcggggtaacaacggggggggggggggaaaccccggggggagccccaacaaaatcggcgtgggggacaggccgccgtggccgcggggggagagcagaaaggggcccccccgtcccgctcgcagagagaggcgggcccagaggcggaggcgcccgcccg

SEQ ID NO: 186601 - DNA, 265 bp, Arabidopsis thaliana
  unsure (1)..(265): unsure at all n locations
tcaatgacccgcgttgcaacatagaccgatgtggaacacgtgtcccgcgcgactctaagaccgcgcagtcttctcaatcaatttgattgctcggcttcctgcgcatgtcgtgaccgagtagacgcaacttcatttctcactactgtcgacgataaactatctaacgcgataccagtggcataataagcacctgcatcgcctcctcgtttcggcgcacagcccgaacacttaatccgttangacgcgttgtgtacgtatacacctc

SEQ ID NO: 186602 - DNA, 507 bp, Arabidopsis thaliana
  unsure (1)..(507): unsure at all n locations
ccgcgtgcgtaagctgggatcctttagagcgggcgcgaaacctttttaattttttttataacataaaggggggaacgggggcggccaacacccctggaacggaagggccgccaggctttttgatcaggggaaacccaccaaattttttaatctaatccgaggaaaaaaactccctcaaattggatgtaaggaacngagggcccgggcaaaacccgaaaaaaccccccncaaaaaaggaagggggggcccccctcttgcacttaccagcgccccgagccggcgggaagccaacaccattttgggagaaacaagcggcggccccctagaagcgggttcgcacggccccttgcggcgacccccccccagacacaaaaaccatggcgggcaaggacccccccccgggaggaggaggccccccccccgcgaggccgcggctcaaaagggggccgaaaagggcccacccatgggtggccgaggcgcccccgaacagaaacccggggtagcccc

SEQ ID NO: 186603 - DNA, 520 bp, Arabidopsis thaliana
  unsure (1)..(520): unsure at all n locations
cgcacgcgtgcgnaagctgggatcctttagagcggcgggccagagcggttttttttataaaacctaaaagttggggtgatatcgaaaagctgaaagcaacaaacaacaaccaaatgggggttttaaacaaacaaaaaagatgggggccgacaaaaggtaatcacaccaagaggacccctccctctttgggtgggggggaaacacgcaagcggatacagggaaaagcccccaccggggggggggaagcgggaccaaaaaaaaaagaganaccgggggcccaaaacgcgaacgaaccaggcgggaaaccgggaaagggccccccacaaaaacgagaagacaacaagggcccggcacggacaaaaagaccgcaaccaaccggagggcggagaggggcccccaaaacccacaaaagagaaggngagaaacccggaacaaaaaaggcacgcgcggagaaaacgaggcgcccaccagaacaaaacggggcagaagcgcagagggagaaaagggggccgcacaaggc

SEQ ID NO: 186604 - DNA, 587 bp, Arabidopsis thaliana
  unsure (1)..(587): unsure at all n locations
ccgcgccgcctgnagggaccggnccggaagcccgggggggggggcgccggaaaaaagacacggatngggaggcctggccaaacacatacaccccattgcgccgccccaggcggcggaagaaaccaccaagaaggcgaccgaagccactagaacaagaaacagggcgggccgctgaacaacgggcgaaggggncaaggcagggggagaaacagaggggagagcccccgaaacgggggggaggggacaacccacggggagaagcgggaggggggcccgaaagggggggaggggggaaggggggcaaacgcagccggcgggcgggagacgcaggggaaaacagcagggcgggcgagccacggcggcgaagaaaggagcgagccgcgggggcgccggcgaaaggggcgagaggggggaggaggaagggaagcgggcgggggacggagggcgcagcgaacgagggaggcgagaggaggagagcgagagcagagaagcgggagaagcagcggagcagcgcgcgcccggggggcgggagcgggggagcgggggggaagacagcgggagagagcgggggggaggagcgcagggga

SEQ ID NO: 186605 - DNA, 435 bp, Arabidopsis thaliana
  unsure (1)..(435): unsure at all n locations
gggacctcaaggggggcaacgggtaaaaaaaccacaccgggggacanaagggacagaagcaaacacaacgcacaagttttgacacagaaaaatgaagaccgaggcgccggacgcaggggccccctttctctggaagccggannagagagggggcccgccgagcaaaaaagccccaaaagggggggggggggggcaacaacaacaacaaaacccagggggggataaaaaaacggaagaaccggaagagagcccggcgagagggaagaagacaaaaaacaacgcagaacaaggcccacagacagagggagaaagaccacgaagaggaggcacgccgaaccagagaagaaaaacgaaaagggccgcagagcccgggcagagacgagagggaagcgaacgaggggcagagcaacgcagagacgcgcggcgagacacaaa

SEQ ID NO: 186606 - DNA, 637 bp, Arabidopsis thaliana
  unsure (1)..(637): unsure at all n locations
cccccacgtgtgnnggagccgggaccctctagagggggggaaacggggttaaatattttcccccaaaagaggggaaaataaagataagcaccgggggaggggaaaaaacaaacgaccaccctccaaacaagngggagcgcccaggaaaaacggcaaaagagggcggagggggggaanaaccccccctanncacctagtgantgttgggggnnaaanaaanggagaggaccctaattgaagaaaaaacaacccccaangcgggggggcgggagggggggaacaaatcaaaaatagaggagcaccngggccggtggaaaaaaaaacgcaccagggagagcccaggacaggaagccaccagagcgcggaacccaacacagggggggggaagaacaaggaaaagccgccgcgcagaaaggaacggagccccgcacgccagaagcgcgcgggaggcgtcgcagtagagcagacgcgaagggaacgcaggggggcgcccgtgaagcgaggggccgcgcggccgcgcggcagggggccgagacgggcccgaggcgggagaaaagcgcggggggggggggacgccccggccggccgggccacggcgccgggcggaccgaggaaaaggacgccgggccggcgagag

SEQ ID NO: 186607 - DNA, 502 bp, Arabidopsis thaliana
  unsure (1)..(502): unsure at all n locations
gccggcgnaagccgggaccctctagagcgggcggcaaccgggccaaaagaaaggcgacgagaacggggaagaggggcaccccaagaaaacaaaggcgccacaaacacaggaacccgacgacccccaaaaaccgcgaagcaaacagcacccgcccgaacaaaacaagcactcccacggggggggggcagaaaacccgaaagacccccaaggggaaaggcccccccccgagggaggggaggccacccacaaagccggagacaaggggacgagaccgaggggagagaagcgccccgcccaccggcagggggcagcggggcggccggaacaaagcaacgcgggcgccaaaggagcgcaaaggcggaaaacgaacccgcggcccgcggccaaagccagagagaaaaaggacagccagcacaaaacagcagacagcgacagcgacaccgggaccgccgcgacaagacacggaaggaagggggagagaacccaccccaggcgcccccca

SEQ ID NO: 186608 - DNA, 511 bp, Arabidopsis thaliana
  unsure (1)..(511): unsure at all n locations
ccccgcctgcagggaccggcccggatattcccgggggggcccacgcggccgaaaagcagcgagaagacgacagggggggacggctgccataacacgacacaacgggagggaaagaaagaaaacagagcagtgcacccgaccagacccaaggaagccggaagacgagaacaaccccttcttctttaggggggggggggacacacccacggcgcccggccccgggaacgccccccgggaaccgggggccggggggccaaaaaaaaagccaccggcgaagacgccagggcccccgcggcgcccaaagaacacgagcacaaggaagggaaaccaccnccggcgacggaacacgacacaagcagcgcagaagaaaacagcggacaggagggccccgggggggagccacacgaccgcccgggggggacccgggacaaggaacggcaccagccggcgccccacacaaggccgcggggcagaggcgccaaccggcgccccttaacggggcgcaggccac

SEQ ID NO: 186609 - DNA, 550 bp, Arabidopsis thaliana
  unsure (1)..(550): unsure at all n locations
cccgcacgcaggcgnaagccgggaccctctagagggggggcaagcgggttaaacacacgaacgcccacgggggggggaaacggaagaacacacgaggacgacaaaagaccgagaacaacaggggccaagaaaaaaggacaaaccccgaacaaaaccaaaagggggaaaaaacggcctcccaaaggagagaggaccagaacaagcgcaggaccacacaaaaaggcccccanagcggggggcgggggccccaaggaagacgacacccagaaaaggcccaggcaggagggaagcgagccccggaagccaaggggagcagggaggcaagaaaacaaccggggggccgagggccaggccccgcaacaggggggggaaaacaaaggcgcgagaccgacaccggggacgaaccccccaaaacgcaaagacgagcggggggacacgaaccgaccccaaaaaggggccccgacgggcgagggagccccacccgccccgcgggcagaccccgcgggcgcgaccccggggccgccccggaaaagccgccccggcccccgag

SEQ ID NO: 186610 - DNA, 180 bp, Arabidopsis thaliana
  unsure (1)..(180): unsure at all n locations
gcccccccgccngcagggaccgggcctttttacccggggggagcaacgcgttcaaccacacgtccgcccacgcgtgggggtgtgagaagacnacagaaggggacaatagcctggagaagttgattgttccacctgcccgcgaccaagctaaccgaagctctgtaacacagcagacccgca

SEQ ID NO: 186611 - DNA, 567 bp, Arabidopsis thaliana
  unsure (1)..(567): unsure at all n locations
gggaccgggccgtttttcccggggggccaagcgttcaacaaaaaacccacggnngggggaagacnacagaaggggagantaagaaaaaaaggaagctcccaaagatttcgaagaggggggaaaaccgactctgcgcagccaggggagnnggaagggagccgttttcctttgagtggtgggacccagngggggggatttcaccgggaaaaagccccaatgcgggggggggggggacccccctttaggaagagccgggcgggaaccaaaagggggccgggggggcacaaaaggaggagggcgggagagaagcaaagcaaagggcaaagtcaacccagagggaaagggggcgcgcccaactcccctggtcctgggaaggagggaaacggcgaggagcaaacgcccgggggccccgccccgcgcgagaggagaaaaaacagggcgcgaggggcggggacgagaatcgcacgagaggagaggaagaggcgagaagagggcggtcgagggccggggcggagccgcggacggagaggggggtcaagaggcgcaacggcgggcacaatgggggga

SEQ ID NO: 186612 - DNA, 355 bp, Arabidopsis thaliana
  unsure (1)..(355): unsure at all n locations
agcagggaccctaanaggggggggaaacgggtcaaatanaaaaccccccagagggggagagatnccgggngaaaaaaaagggccgcggaagcaacccccccctcaaaaaaaaggggcgcagaacaaacaagaaaagaaggcaaaaaaaaaagcgggctggcnctctgggntgaagggaaanaanaagagggacnttttnggagaaaaaaaaccccccacgggcgggggggggaggggcacacaaaagtagaggcgctaatcgacgggggggaaacagaccccccggagcggacgccggggaaaaaccgccggggaagaccaaggggacaagaaccacaaggcgcccggaggggaa

SEQ ID NO: 186613 - DNA, 475 bp, Arabidopsis thaliana
  unsure (1)..(475): unsure at all n locations
ccgcacgcgnacgnaagccgggaccctcnagagcggccgcaaacggggnnnaaanggnngngagcngacgcgggggagaaacggacagaacgaagggacgagccagnacaacaccacagaaaaggaaaaaacgcggaaccccagggaagaaaaagacacaggcggaaaggcctcctcttaaaaagggggcgacnncaacgggcggcaccagnccgaacaagacccaccaagagccgggaaaccgccccccgaaanggcaancagaagccnngaaggancaacgcccagcaaagggccaccnccaaccccaaacggcgacacgaaancggaaagcccagnaanaggcaacaccgncagaagcgggcaacccgngagcagccagcaccaccggaacccccggacggagcaacccccgggggaaaggcaaaaaacccaaaangnaggccggcaccaggaaagacaaacaaaaagcacc

SEQ ID NO: 186614 - DNA, 188 bp, Arabidopsis thaliana
  unsure (1)..(188): unsure at all n locations
atataagttatgcgctcgggttgcggcgtgaggacctatgtggcacgatttagtcgcccatagtacgtacagtatatcatattctagattctacgtnagagtagtatgtacacgcgcagcatccatatcctgaagcacgaaagtcgtagtcggcttgcgtcgcgtcgcattttctatcacgatttact

SEQ ID NO: 186615 - DNA, 448 bp, Arabidopsis thaliana
  unsure (1)..(448): unsure at all n locations
caggcacgcgtgcgtaagctgggatcctttagagcgggcgggatatgcggtttttattgttgttatatttcttctgggaggaaataaaaacatatgtataggcgctgagtttaaacagctttaacattaaagcacaaacaaaaaaacacaaacaaaaacagaaagaaaaggaaacatcccctccctttatagagagagaaaccncacccggggggcttggtggggaatctcaccattgggggggggcggcggccacactttaaacttgagttcaggcctatctggatctacgcttggctggccttttcccttggagaaccttttccccagggtggtgtttcccgaggggagagaaaaacccaaacgccgacagtctgggggaagggggggacacccgcgggaaaactctgcctggggttcgaggggggcggagggccctcctccgggg

SEQ ID NO: 186616 - DNA, 519 bp, Arabidopsis thaliana
cccgcacgcgtgacggagccgggaccctctagagggggcgcgaaacgggttcaaacactctttccgcccaaacggggcacggactggaaggaaacaacaaaaacagggcacacagccgacccccagagcagaaggaccagagaaggacaaccgggcaggcgcgaaagaagcccgggctaaaaaaaagggggggaaggaagacagaaccccccctccgaagagaaccccccaagcggggggggggggccccgaggaggggggaaccccaaggaggaacccaccagggggagccccacccccccgcccaggaagggccgccccacccaaacgaaccggagaaacgaaaggacaccccggggtgcagaccaaaaaaaaacccccccccccggcccgggaaagacgcgaacccccccgcaggagacggcacaacagggggccgcgcaagaaagaagggcgacacccccccccggggggcccagaaaacgacacccccgggaaaagggcccggagaaacggaag

SEQ ID NO: 186617 - DNA, 449 bp, Arabidopsis thaliana
  unsure (1)..(449): unsure at all n locations
cacgcgtacgaaagcagggcaccactagagcggcgcgccgagccgtcccaacacgcgcgcacagacggaaggagcggggggacccggaaacgcgacaccggacccagaaaccgggaacaacgggggccacacaaagaccaaacgggcaagaagggacccagccaccnccttccctcccaaaaggggggagagggccccccgcaagccaggggggcaccaccacgaaaaagggggcagcgccaccaaccagccacacggggccaaggagggcccgcaagaagcaccgggaacgaccagcacggaacgacccaccgggccaacagcgggcccgcgcgaccagcggcgcgcaaaccccgccccagcgccaacccccgccacggagcgcccagccgaaccaacgggagccaaccacaagagaaccgcccaaagccccccggcgaaaccagcga

SEQ ID NO: 186618 - DNA, 170 bp, Arabidopsis thaliana
catgcacgcttacgtaagctgggatcctctagagcgggcgcttttttctttttttttttttttttttttacgctcagtgtaactgtttagagagttaacaaacctctatatagaagggaagaatctttcagactgatgagagtaacaatagcaacatataggctactaaa

SEQ ID NO: 186619 - DNA, 546 bp, Arabidopsis thaliana
  unsure (1)..(546): unsure at all n locations
cacgcacgcgtacgtaagccgggaccctctagagcggccgggcaaaccgttcgaacggttgtgagacgacaaacggaaaggagaagaagcattggacgggcccaaagaaaaggctagaagagccacaccagagttcacatacagtaaagaggccaggacccggagatnccaaagaaccctgaacaagggggagagncaaacaagcgaggacgacagaaaaagaaaacccccgcccgagggaaagacgcacccaccctgagaggccccgggcccggaacaaaaaaacagacgggtgggaaacacccccgggggggccgcacccccaagatccacctttaggaaagacccgagccccccaaaatcggaagccaggggcgcgaacgggaaccccaaaccacaaccggaaaaaaaacacaaccaccctcctggcccgggacaaagaaaaacccccacccccggccaaaaccgaaaggggaaccgagagcgcaaaaccacccccaaaaaaaaccggaccccaaaaccccgggggcccaaacccgccgggga

SEQ ID NO: 186620 - DNA, 550 bp, Arabidopsis thaliana
  unsure (1)..(550): unsure at all n locations
gcacgcgtgcgtaagctgggatcctctagagcggcgcgcgccagccgttcgaccaccttttcgcccacggaagggaactgttggaccccctctaccattggaacaaaggccaaacaggaatactgaaaaaacctcggaaaggaaaatcggggaccccgaccaggaagaacgggggaatcctttcgaaaataggggaggnggagacnagannnncaaacagaagcaagaggccccccaggggccgggagaaaccacagctccgaagcagaatcattcgctcgcaacgggaggctcagctgcgggggcataatcggggcttatctaacgagcaagctgggaaatgcccgcccctgccatagcaacatcaacacggaagagggccaagattccgggaagggcgaccatgctgggacgagaccaaaaaacaccaggggagggaacccgcgaatgggggaggaaaggaaaggcacccggggagggcggcaaagcccgcaagggtcgcaaggcaaaaaccccacggaacggcgggggccaaaaaagaaagggggaa

SEQ ID NO: 186621 - DNA, 508 bp, Arabidopsis thaliana
  unsure (1)..(508): unsure at all n locations
agctgggctcttctagaggggggggaagcggggtcaaataattttcccccgaaaaaagggggaggcaaagcatagatcagagacccggcattgagacaaagaaatttttaaccaagacggcggaggaggtgcaggaaccggagagggagaaggaaactggtttcatatgggtgtnggaaaaanaagggggagctctcggtgaaaatcccccaaggcgggggggggggggacaaaaaataaacaggcccgtgggaggggggaaaaggggaaggaagggaggaagacggaggggggagcgaagggaagaggggacaggaaggaggacggcggggaaggggcaggggggggtgaggagagagaggaggggcgaagggaggggagagggggagggccggcgggggggaagggggcgaagggagaaggggggggcggagggagggagaggcggaggggcaggggaagtgaggagggggaggggcacggaccgagagacggggacgaggaggga

SEQ ID NO: 186622 - DNA, 508 bp, Arabidopsis thaliana
  unsure (1)..(508): unsure at all n locations
ccgggccccttacccgggggggaagcggggtnccaaacaagangcccgaagacaacgggggggggaaccaccgaacacaaacacaaggcgaagacccagcggaccttcagacgcggcaccagacagggggagcgacaccacggggagagagcacggctttctctggggtgcgggananaaaaccagcaccccatgggaaaaaaaaccccacgacgcggggggggagggacccacccccacccggcgcggggngaaaagggaacggaccgccagcggaggggcgcccgacacaggagcaggccaggcggccggcggggacgcgataagaaaacgccacacaggcgacagcacccaccgcgagggcagcacgaacagaaccacacgagacgaccggacgacggggcggggacgggggggaggcaccgcacgaggcacgcagagaaaacgcccgaacgcccaagcagagaagggcgggaggcgaagcagccaagcacaagcgagaacggag

SEQ ID NO: 186623 - DNA, 466 bp, Arabidopsis thaliana
  unsure (1)..(466): unsure at all n locations
cgaaacancattattacacacagagaccagggccgtacacagatttatgaccaacgcaaaaacgcacgagaggggcgcagaccaaaaaaaaanaactcccctcccatttggaagttgggnnaaaaagaggcgctgctcaagaaaaaaccccccaaggggggggggggccccccataaaaaaaaaacccgaggggaacacgcaaaacggaggagggcgacagccgcaccgacgaagaggcaacggggaggggggggcgggaagacgggcagcccagcgccgacgggagggtgaggagcggcccccgcgggcgggaacaaacggcgcgcaccggggagacaccgagcggccagcgcccgaagagaggacaaggcgggcgcgaagcggcaagggggggggggagccgagccacgagcagaaagaaggagagagggcggcgagcgtagggagagaaagagcagagagggg

SEQ ID NO: 186624 - DNA, 237 bp, Arabidopsis thaliana
  unsure (1)..(237): unsure at all n locations
cacgcacgcgtacgnaagcngggatcctctagagcggccgcgcgattcgnncganaagacgaccgacgggggacagggcgaaacagagacacaggannccaannacagggggaaacaacgggggttacagcggannnnacaaccacaagcaccccaggggaggaggagcaaagaattcctcattttaaggggggaaccaggnccgaaggcacaacaggaacaaagagcgccaaagaa

SEQ ID NO: 186625 - DNA, 552 bp, Arabidopsis thaliana
  unsure (1)..(552): unsure at all n locations
gcaggcacgcgtacgnaagccgggatcctctagagcgggcgggaagcgcgtttagatataataccaccacaacgggaggatggccggattctgaccgaggcaagnacctggggtaaaacaagacgcgcgggtaaaaaaaacccaaacggaaaaaacagacgagggaaaagccggaagaaaacggtaaaatagggaagagggacaccccccgggggaaagagagggagcaccccaccccgggggggggggggaaacaaaaaaaaaacccccgggaagcgcgggggggnggaggaaagaaacggagcccaggaccggggggggggggggaaccccgagacccaaaaggaggggcgggggacccccgcgaggaggaagaacggcggaaaacaaggggcgagggcggggccccgaacaaggggaacncaacaagggcacaaacccggacagaggagacccggggaggaggcaccggcgccaagagaaaaaagncccgccccaaacccgaagaaaaaagagggagaaccacccccggaggaaagggacgccaccccc

SEQ ID NO: 186626 - DNA, 556 bp, Arabidopsis thaliana
  unsure (1)..(556): unsure at all n locations
gcacgccggcgnaagcngggatcctctagagcgggcggcgaaggccgnncaanacggnngcccacacccacgacaagggggaaagaaacggngaaggagagaaacgaaccccaccaacaggacaagccagagaggggagaccaaccaggagccgacaacacccggatgcggagggacattctaatactaggggggggcaccgccccagagggngcagacagacaacaccaagcagagggggggggccggccaccccgggaaagcgcagaccgaacgcggaaaaaccgcgcgcgccaggggcgaacaaccccccccccccacaagagaccggagaagggggccaaacaaaaccgcccaagcgggcggaaagccgagaaaaacccccccccagggggccgcgcccaggggaccaggcgccaaacccagcancaaggaaggagccaacccccggccgggccccgaaaaacgaccggcaaggnagaaccgcggggccaagggcaccagccccaacgcgcccagaacgaagaggcgcggaaacacccggccggggggccaa

SEQ ID NO: 186627 - DNA, 319 bp, Arabidopsis thaliana
  unsure (1)..(319): unsure at all n locations
taaaaaaaaacccaaagggggnaaaaaaaacagaaacagcggggagcccgccctccgagaaaggggaggcgcaaggaaagcgggaggggagatnacccctcggggtgggaaaaangggggggccgggaaaaaccccccggggggggggggccccacataaaggggagcggaggaggaggacacccagcgccgaacagacagagcgcacaagggccagccaccgaaggggcggcgaccggcgcaccacgcacacaggcaagccacgcccaccgcacccacacccaaggcgcaggcacgaaccgagcaacgcgagcgcaga

SEQ ID NO: 186628 - DNA, 521 bp, Arabidopsis thaliana
  unsure (1)..(521): unsure at all n locations
aaaaaaaananacccccccnaaaagaggggacaccaaagaagccacaacacaagaaaacaggggcgacgagagccgcccagaccttctaacgaaggagaaaagaccagacgacaacacgggagaggaaaaaaaggagaggctcccctancacctctcnggggaggggaaaccggcaggggcgagcgcgccgggagaaaaaaacccccccagaaggggcggggggggggggaacacccctttaaaaaggaaccaggaggagaggcgcgaacacgccgggagaccgaaccacccacaaaggcgaagcccgggcgagggcccggagagagagggagaagaggcagcagcgcggacagcagaacgggcgcagcgcgacagaacagacagcaggagggaaaacaagagaacggggagacgcccaaggagcgaggaggaaggaaccacaaagcgaaagagaacacacaccgacggaaccagagcgacgaaggagaaccgagacacccgccgagaaaagacgcgcggc

SEQ ID NO: 186629 - DNA, 584 bp, Arabidopsis thaliana
  unsure (1)..(584): unsure at all n locations
ccccgcacgcgggacggagccgggatcctctagagggggcggaagcggggtntaaaaagatgcccccccacgaagggccgaaaagacaggaacgccccccccgcccagcgccaatagcccctgtgtccccaagcagggacaaccaagagaaaaaaaaaacgagaggccgcaaggggggacancctaaccctcggaccgggagaaanagcnacgaaaccccccacggaaaaaaaaccccccccaagggggggggggggggccccaacgaaaccgccgccaangaaacaagacaaaaaaaagcggggcccgcgcggcaccgagcgccccgcaagccaaaacggggcgaaactcacaaagaacctaagagggcacggataaaggcgccccacccagcacagcggaagggaggaccaaacctcgcccccgcgcgggaagccgcaccccgcccatcagagagcggatgcacctcgcccccgagaccgaaagacggaaaagcacccgagaccgccaggaagaaggaagggccgaacccccgccagcacaaaagccgcagacacacgggcacccgaggggccccggcccag

SEQ ID NO: 186630 - DNA, 544 bp, Arabidopsis thaliana
  unsure (1)..(544): unsure at all n locations
cgccngcaggnaccggncccttatncccggggggacagacgcgnncaaacggcagcgagaagacgacgggaggggggagagccccgacgcgaccaaccaccnccagcggcgccgcatatccaaaaaagcgcggggaggaaacgaagaaccccaagacccccgaaaggcgaaactactcatgggacgtagggnanaanccagcgaacagccccggggaaaaaaccccccaacccagggggggggggccccccacaggcagggcccccaaggcccaaaaaaaagaaacgcgagaggggcggccccgccccccacaagaccaaaacgggaccgcgccccaaacactgcaaccgggaacagcccaacgccacaacaagggcaaggaccccaccgcaacgccaaagaccgccaccccccacaggcgggggggggcgcctggcccaacccccgaacacccgcggacgcacagaccgcgccaccggcagagcacaaaagacgaggagcccccgccagggggccaaccggcacgacaagagcgcccgaccag

SEQ ID NO: 186631 - DNA, 320 bp, Arabidopsis thaliana
cccccacatctctatacttttaaacttttaggacaaagcttttccccctcccagtacctttccccatttccccggggggccgggtgcttccaaaaacctcaaaaactttcatcccacaccccccaaaaaaccgattccactctcttccttccctaacctcttgctctctttctcaaatttcaaacggtttttcaagaaactccctccacccccaaaaatctctctccccttctcatctttcttccatttccactgtgggggggctttataaaaccgagggccttcttttaataaaaaaaaacttaaacaatcacccccaa

SEQ ID NO: 186632 - DNA, 724 bp, Arabidopsis thaliana
  unsure (1)..(724): unsure at all n locations
tgtctcttccccattctctagggttttcaagctcaacctcaagctccactacgatctcttcttcttctctaatctcaggtgaaagatgcaaggggtgattccatccttcttttccgggggggaggggntaaaagggggtggccttaaaaaataaaaacggtgattaacccggcaattccacccttctgtggttttgttcaggctcctgaatcaacttaaccttccacgtatgggaggaatctggattctaataccacaactatttcccagtgtcaataaatccaaaagcgaaagggctgagggatcttggctttggtgaactactgaacacccctgtttataggccttgtaaaaccataacaccacaacatgggtgggccctggtggttgaaaagcctggtgaccaaaacctccttgttggtttatttcagagagaaatttttacggaagatatttggcaggggatatcatccaataacaaagggtggaacattttagctgaaaaaaaatacttttcctgggacccccgaaccacagggttcgttctttcacctgataacaaaaccaatcagcttttcccgaatcaaaaacaaggcttggtgggatgggtccctagaaattttcccccgggggtcattacctagaagggcctnaccccaatgcgttattggggggtgcctactttagaatggaaaaaaagcccttgtggccccggtttggctct

SEQ ID NO: 186633 - DNA, 576 bp, Arabidopsis thaliana
  unsure (1)..(576): unsure at all n locations
cttcccctcttacttccctttccgtccccctctcttactctnctaccattcctttctctctaaaaccccctagttcctttttcctagactcctccgcttttaatccctttaccactcgttttctaagtgcgcctccctctcttaccataaagttatcaccctaaccccctacaacccttcccccaaaaccacccctctattcttttcaacattaccctcccctttcctccaattttttatctcacgcttttatcccaacttatactcttttattccaaaaactccctccttcccccttctattttatttttcctttaaaattcattccccccactacatccccgtccccctttaactcccatccccttctttttcattccccccctaaaaaacttccccccacctcctttatttcccccccttttataacctccctttttttccaaaaacattttttccatccctttctttttttttattaaatccccccaaaaaaactttttttttcgcccctttttcctcccaataaaacttcttcccttttttaacccccttccctcgaaataatcaaacggc

SEQ ID NO: 186634 - DNA, 253 bp, Arabidopsis thaliana
  unsure (1)..(253): unsure at all n locations
ccttaatacttactcctcacctctaactgatcttaacgccgcttttttttttatttttctttttaaacaccaaataattccttaatataatcaacggttacttaatactcacagttttcaacttcaaaaccacattcttacgagggtcctnctttattactaaaaataatctttgtgtataaactcttctaaccctaataacaccccttaagctatcttttttattccttccccctctattgttccccccaaa

SEQ ID NO: 186635 - DNA, 706 bp, Arabidopsis thaliana
  unsure (1)..(706): unsure at all n locations
acccactctctctactacttatacacttcccctcattccttccctttccccntcgcccaccgtcgattatttttttatgaatttgaccactaaccaccatttgcatttatctaactaaacgcaatattctgattttataactatcagtaaaacttttataagtgcgcctaagatccccgtacattcaaatacattttaaattccatcccatcacccttntcctttaatatggcaaacccccaaccttacctccctctttccctaacctcccccttacatcctcctctctaacacctatgctctttaacttcacatttttcttggtttccccataaaccaccctctcctacacttattcctcctccacccctttaacttaccaaacctttattacaaaccccttatttctcttaacctaccccacccctttttttcaactaaaaacttccctatcttccttcttaaaagactttcctctaaaaaaatacctccttaaggatatactaccttcacttcttcttttccccactaaacctaaattccacttttcctcttctttataaaacccctcttaccccccccttttctcccctccccctctttccttatctaaaatccttttttttttttcccaaaaccccccttctttcaccctcaacgtcaaaaacacaaccaacacccccctttatccctctccccctcttct

SEQ ID NO: 186636 - DNA, 392 bp, Arabidopsis thaliana
  unsure (1)..(392): unsure at all n locations
gcgccgcatgcacgcgtacgtaagcttcggatcctccgttnagcggccgcgttggggctctcttctgttgtgcgcgcggcgcgttggggtggagtacccaagtggagtcccttgtgaaagagagacccctctcgagggggccggtgtatggtctttcgatcgtgacgacgccggggagcgtgtacagggcccgttatnggnggggggcgggccggcccttttcttctctcggggggggggggccagtaatcttgtccgttggatccccagaaacgagggcgggggcggtgttggccggccctggcgggcgcccggggggagcggcccgagccgggtgccgcctcgtgtcgctgcggtcgaccgccgtccgggcgcggtggggcccccgggtt

SEQ ID NO: 186637 - DNA, 188 bp, Arabidopsis thaliana
gctttaatccttttagcggccgcttttttcctttaatttaattttttaaaacataatcttcctccatcataaattatcccacatgcttacaatctaactttataatcgtttataaccccatctttttaaatacttttttctaaaataaaaaccccaacgctccttctatacaggagagcattcttaaa

SEQ ID NO: 186638 - DNA, 833 bp, Arabidopsis thaliana
  unsure (1)..(833): unsure at all n locations
aaagacaaagacaccagagggagggggagacgaccagcgcgcgcccgaagccgcccccctccaaaagaaagccggcccgagaccgccggagaagggcgagcgacccggcagacgaccccggcccggcagcttctcctccaaagggggagggacccgagccaggggggngggaagaaaaaagcccccaggagcggaaggggggagagcagagcggcggggccgcccgaacggagcaagacgcaggaggggaggacggagcccgaagagggaggggccgcgcgccccagggacgcgcggggaggggaagcccgaggggcacagccaggaggagcacacgccggggccggccccgcacgcccggggccggagccggcggaccccccggccacagccggcccccgcggaccggcgcccgcagggggcgggcagcccgacgggaggcggccggcgccgagccagggcaagggagggagggcggaggcaggccagcccagggccgcccaagcacggcccgacggagcacccagcggccgggcgggcgggaaggggcgggagggcggaagcagagcccggaggcgaccggcgagggcacggagagagagcggcggagcagccgaccaggagcgcaggcagcgcacacgacgagagccagcaggcggcgaagcccgcgagacaccgagaagaggccgtagagaggccgcgcaagggcagccgcggcgccacccagacccgcagcgacaagcagcaggagagagccgaacgagcaagaagcggaaaagacagaggggaagacgaacaccagagcggcagcgaacgggcggaggagaggcgcg

SEQ ID NO: 186639 - DNA, 582 bp, Arabidopsis thaliana
  unsure (1)..(582): unsure at all n locations
actccacctctattctattcatctagggcaagctgtgccgcctgcaggtgccggtccgctattcacgggtcgacccacgcgtccgcccatgcgttcgtatgcgagagacaacagaagggtcggctgtaataagacaacggacgggggattgaagactaatctcaagttctacttccgatgggtgatggacccatacgcttttcgttatgggtaaaggaaagcgtgcttgtggtantgaagacgctccctccaagggtgaaggatttgcaaggaaagctgcacatgttctttggacatgcacttatgttaaagcatgacatgttttcttgctacaagtctggaaagatcatcgaggcctacaacatgtttcaggatggttggctgagcaacgcaaacaaggttcctcctgctaagtttggaaagattgctgcactgttctctgaggggacctctgggaaaacaggaggttatcttcgatgggtcccttaaggaaagatggctggtccatttcaagatgtcgcctttaatacacctgtttggagttaccagcgcacccttcaaaaaatgcacggatgccacatt

SEQ ID NO: 186640 - DNA, 183 bp, Arabidopsis thaliana
gagcccgcgatgccccgcgttccgtaaacttgggtaccctctagggaggcgggggggggtgtgtgtttgtcttatttttgttttctggagccaaattattggtgttttatatagaagcccaccccccagcgtggtttcccccccagaaatattatatacctgttataaagagagggagagaga

SEQ ID NO: 186641 - DNA, 253 bp, Arabidopsis thaliana
  unsure (1)..(253): unsure at all n locations
gtcgtaagcttggatcctctagagcggcgggggggggtttttattatatttnnttttcaacaaaaagcccaacatgggtcgcatatataaaacaagtgtgtccaatttttatgagagccccctaaagcttttttatacactcaaacatatctctttttttaacaaacattgccaaaggtggagggttgttctggggggccaataaaaacttttccttcccgggaatgtgtttttaaaaaccgagaattgcctt

SEQ ID NO: 186642 - DNA, 334 bp, Arabidopsis thaliana
  unsure (1)..(334): unsure at all n locations
attacttactcctgccgctctagctggtccctggcgcgggtggtttttttttttttttttttatcacgaaggctttgattcatggcctaggaaccattacatgtgctggaaaattataacatttaattttatcaaaccctcccaaaatcaacttttatacaaaaatgaatgggngctacagagagcggaaaaatttnnaaaggggtgtgggggggaaaaatataaattccttaaatgcctcttcccaggggggaaaaaaacttaaaattttaaattcttttttaccgagggggttctttcccccaccaaaacgtggtgtgggaaagagccggtt

SEQ ID NO: 186643 - DNA, 334 bp, Arabidopsis thaliana
  unsure (1)..(334): unsure at all n locations
gacaaagacccgcctgcacgcgtacgtaagcttggatcctttanagcgggcgggaggggggttaaaataaattctctccttttgggacactgatattcttattcccctgcaatctgttaactttatcttctggctaatttatcggcagagatgtctaagaaactgtacctcacaaaactagaaaccttatcttctctaatggggggggggcccncacggctaatttatccactaaaaatttgaaacttcaggaccattgaatttccagtgcctgttttacattccaaggctcggtctccatcttcaaaaattgaatttgacagaacaggattag

SEQ ID NO: 186644 - DNA, 980 bp, Arabidopsis thaliana
  unsure (1)..(980): unsure at all n locations
ccccctcctctcccctcttccccccccgctctctcccctctgctcccttctctctttccccccttcacctcctccccatctctttcattctccctcctcctcccacaccccactcaccaacacgcttccctcntttctgggtgtgttgggcnccaccaccctccggcggtcttctaaatttattaaaaactccatctcctccttcctctcctcccctcctccccccctttcccctcaccctctctccccctttcctttctcctcttctcctctactcactctacgccctctcccgtctttatattacgtctccccacctatacttttcccccactccagcttctttccctcctctcctttactcttcatctttcctcctccgcccattctcgttttcttatctctctctttctcccttccctctcccaacctattnccctttcttactccttcttctctcccccacttcccctctctctctcccgtctctcgtcttcttataccctttctctctctttactcccttaccgctgttatcactctcatttttatctcattcctcctcatcctcctctctcctcttcatcttctttctcttttctcctctctctctttctcacctctccttcatcctctctctttcttcctcttcttcttctctcccctatcttctttttcttccacctcttccttcttctcccctcctcctttcattctcttctcacttttttatcctttctctattccttcattcacctcttactctctttatccattcatttctttcttcttcttctttcattctttcctaccctcattattcttcctcacattcctacacttcctctccctctcatttctttcctacaccccattctatattcctcttaccttcctcccctcccttctcctttctttctttattctttttctccttctttcctacttcacatccccttcttacacctttcctctctctc

SEQ ID NO: 186645 - DNA, 213 bp, Arabidopsis thaliana
  unsure (1)..(213): unsure at all n locations
ccaaccttgtaattctaattaaattttatggggaggctggggtaccccctgccgtggtgccgggaccctattcccgggggggccgggggcgtccttacagattnnaaaaaacaacaggaggggactttatacagaacaaacacaaatcacatgcggggggatcatcggaaagaaaaaaaaatgggggaaagggggattgtggggtttcccctt

SEQ ID NO: 186646 - DNA, 219 bp, Arabidopsis thaliana
gtgtgttaatgtggcacacgagcgagcccgaccgagcgcgagctctttttcgcgacgactcctgcggcgcggagtctagtgaaatttgagatgctagtcatcgcccacagaacgcgcgcgcagggtgcagctaggttagcgacaccttttatttatttcgtcctcgatgccacttcaacagcttatccttttctgacaccgtcgcagtagtttctcttg

SEQ ID NO: 186647 - DNA, 181 bp, Arabidopsis thaliana
gggaaagcggggcgtctatctaatcaaaagaaaatcaaggctaggtgtctacacacagattcatctctcaatgcgagcagcgcatcggaacgaatcacaccttagcgtaaggattaaccccgaattagtcaaccgcttctttgtagcattcacgtctttacacgcccttccggcgtcaaac

SEQ ID NO: 186648 - DNA, 276 bp, Arabidopsis thaliana
gccgtatcgtccgtcattatacaagttatggacctcaacaacttatgcttcgggtgtgtaatgtcaacgattgctgtagttaccccgaaatctcgccattaggtttattaattgtgtacaagtcgcgtagtatatactacaggagattggtataggagaccgatcccgtgatgtgctctataatcgtaagcgtaacgtcgcgacatgacattgaccactatataagagcggggatacaatgcctattgatgtaaatagttatacttgagctataat

SEQ ID NO: 186649 - DNA, 322 bp, Arabidopsis thaliana
cgcggtattttgacttaatttaggacgggataagtgatgaccacgaacacccgccgccaaggtccgaccaagggtgaggagaggggttgtaagcccgagaggggggtccccgtctatgtacttgtcagggaccgtgggcacagggcgatatacggcagccaccagtcgctctcagcacgcacggaaggcgtgcgcttgtgcgggcaagacgtagggatagatgcttgagtgcgtcaggataggacgattagcagatggggcgctccaccccattgacacggaagcaagggcccgtcgagcagagaacgaggtaaggagacgc

SEQ ID NO: 186650 - DNA, 526 bp, Arabidopsis thaliana
ttttcctatgctcttttttcgcgcctactctcttatgatcatacccttcttcccctccgtcgggtctcacacccttctacccttcttgcccccacctctctcttttttcccactctatccactagcgcccctccgccttctccgtcatgcccctttcctctcttctctcgtctgccctcgcactgaatccctcccgtcgtttgtcccctctctgccccctcagtcctcccagctttttctttgactcttctcgtttattcgtacctttccctgacttcattcgcttgttgtaaccatctcctctttcttccatccatttttccttttttcttcctttctccacgccgcctgcgccttctcccctcgtcgacaattttgtttggacttttctcctcctatgttccatcactcttttctcacctgtccgtctcgcgccgcctcttctccatggccagcaatatatctcatggtcggtttcggttctgattatgtccccgtttacttcgctatttctcgccagcacact

SEQ ID NO: 186651 - DNA, 463 bp, Arabidopsis thaliana
  unsure (1)..(463): unsure at all n locations
aggccccgcggaccgggaggcaggggggcccaccattagcagcgcaagggggaagcccgcggtggaaaaagaaagcagcggcagagggagagcgacggagaaaagaaggagcaagagggccggagcagggggagagcgggacgagagcggagaaagaggccccgcagagagagcgcgagaccaccgagcgaggggagaccgccgcgccagcgggagacggggccgctttttatttaagcccacgggggggaggcgagagagcagggagggcgggagaagcgtgcgaacagacacaagagggcccgaagagacatcacagcagcgaagaagagagggngcgctaagaagaggcgcgagggccaccgcagagcagcaagaagcagacggagaggaaggagaagaaagcagtggaccgcacgaaggcggagaagagacgagaggagggagagacgcgagacagacg

SEQ ID NO: 186652 - DNA, 503 bp, Arabidopsis thaliana
ttaaagtagagcacaagcacgtgttcgcaggcgggcagttttagccaagaaccgattttgcgtcgtattcagtgtgaaatccaggctcacccagcgcgatacctacccttttaatttctctcccagcacgccacgtcgcgtccctcgtgtgtgtaacctaacaatatatctagattcgagcagcgaactagtgatctacttacgaagaactcctttttcacacatcgaaaccaccgtgatcacgatgtcacctacgcgtctgaacaccacacacccgaagtccggttgccagtacaaatacaactcgcacccaagcgtaatacaccccaccacgcggacacagtaatcttcctcataacgtgcggcgcgtgtatatagcatgcacgccatcaacaccactaccatatgttactcattcaccctgtcctcggcaactgctccagtacctcctctcatccgttaccatataaatactccatttttatgtgcgcgagatgggcgca

SEQ ID NO: 186653 - DNA, 117 bp, Arabidopsis thaliana
ccatggatatatggtttttttgctgaggcggcgggtgggaggtgcgtagataaggccaatatatcgtctgctggaacacacacatatggtagttacaagtgtgtgcgcgcaggatgc

SEQ ID NO: 186654 - DNA, 485 bp, Arabidopsis thaliana
atcccactaatatagggaaagcctttccgcctacatgtacctttccccaattccccggtccacccgggcgtgcgtgcggttacaaaccacagaaggggagactttcctaagaacataaaacgaaggagaataaaaacagtttctcacattcaagagacatagagcttcttctgcgtaaattctcttcttttaaacttacgagaagaaccagacttatgtgtctgggtgcgggattacatcaaccttctggaaataagaacctcaaaatttgggatccaccctcaggatccaccgattcttttgggtttccagcttatcctaacggaaattctccatgtacccctttttttatcccgctctttttccccgttccattcttgccagaccgaggaacatataacccccggaccctttatctatcccccccctttcataattttgaaggccccttcaatacctttcctaaaatattttaaccccccccc

SEQ ID NO: 186655 - DNA, 511 bp, Arabidopsis thaliana
cttgcccgccgtcgttaagcatgggataccacgtataaattttcccgctagggagtgggggctattatatatattttcattaaaaaacacctttctgctattgaatgtctacactttctaacctatgtttcgtcttctacaaaacgtatattctgtatgctcgactcaagaacattttataagtttttaatggtatttacattgacttcaaaagagtataaacgatcactatttcttttctttttgggggggggggggggtgactttctattacatactaacattaagagggtcggtggttctggctgtcttgtgaaaaaaaaatcttatctttttatgttttgtttagaatagagagtaaatgataaacagcataataccaacgtacttccacacccctattcttgctaggattttctgctctatactcgtcgtgtatgatattacctccagccgagaataataacaaaacacagatatgatccaatttatcgttaataaaacaaaacag

SEQ ID NO: 186656 - DNA, 530 bp, Arabidopsis thaliana
  unsure (1)..(530): unsure at all n locations
aactccggaaaggcacttgtcagcagggctggggttccactgaggggggggggaagcttatattggagtaccacactcctcaggaaatattttgatgggaacgttgggccctggcccccgccgctaccgttaaaagctcttgggggatacccttcttaaaaaagcggggggcccgcccccctttttgtgtggttttttgggggcttttttaaaacccacaaaaatatgcgcccccaattttttcttngttggggcgcgcaaatctctctcttaagaaggggggggggacacacgcacaaagacaaaccantatatgctaccgacccgcgcggggggtgtcttnngtgcgcagtagagncgctcccctcaaaaaaaaagaagccatgtgcgtccccacgaaaaagaaacaaaaaaaaaaaaaattcttttctagttcttgatagaagaaatcctcttccttttttttattttttgggggggaggaaaaaaaaaaaaaacaaagaaagtgttgtgggcgggcgcgcgggcgc

SEQ ID NO: 186657 - DNA, 505 bp, Arabidopsis thaliana
tttatttctcgtccattctcttttgggcatcaacaccctctggggcaccattttttgtggaaaaaaacaaaaacccctttttttttttctttacacaggggggggtgttgaaattcccaaatctttttttttttgaaaggggttttttttctttgggataccccaacgcgggggggtggggttttgtacgccgaggggattcctctcttaagaaacaattttttggggcccggggactttttttgtggggggggttttaaccctttggttttttgaaaagggattcgcttctaataaacacttcgggggaatatttagggctggtaaaggcctcctcccatgtgggggggcccccccccagaaatcctgtgtggctcccccacaagtggcggcctctgggggggagaaatatgtgccggcccacaacttttttacgggcggttttctccccgcccccggtgggatccttgttttgtgtgtcttccagtggtcccaaaaactctgg

SEQ ID NO: 186658 - DNA, 608 bp, Arabidopsis thaliana
tgagtagtggggggttctattaggacaacttagaagattatgacgttgcctgccgcgtcgtaagcttggatcctctagagcgggcggcgcggcgggggggggccgtttatcattttcgtcgttttataaaacctaattttttctccccgtgtggacttttaaagggtctataagttttccattaaaaatttaacatttttttgcccgagggtggcgaccccctcgaaaatgcccttaaacaaaaggaaacgggactttttttgtggggggggggggccagatttaaaacaaatacccctctaaaagggtttcggcaaacttctccgccaaaacttttcccccctttccgtccgtgatttgagttagatcgcggtggtgtttattgaggccccctcgccgatgctctctgttgtgttgccgtcgcccatcccttgagtgacgttttacggggagtggggaggtctcctcgttcgtcataggtgactttgaccctttgagtatatagaacacgtctttttcaccacatatgtgggcggggaactcgccctcactagggtattggtattaaactccgttgttgtccgccggaggtgggtggtattggtata

SEQ ID NO: 186659 - DNA, 442 bp, Arabidopsis thaliana
  unsure (1)..(442): unsure at all n locations
gcactcgtacgtaagctaggatcctntagagcgttgcgnggggagggggtagggcgnnnnaaanaaaannaannaaaggggagggggggaaccttaatactaatagagggaaggataaagaaacaacccgctaaaccagatattcacatataaaccggttaaaggggagactggggagtacaacnacattaactttcctctgggaggtggganannnanaagatactntatgactaaaaacaaccccaaattaaggggggggaggacgatacaaaaggggccggcggatggaacactaccacaaaaaagtgcccacggaccgaggtgcgactttaaagggaagtggaaaaaagcaacaactgactggtcccgaaggaggggaccaagagcaaggttttagaaagataccgttcccggaaaaagctgcacggggttataaaat

SEQ ID NO: 186660 - DNA, 530 bp, Arabidopsis thaliana
tacccctgcaggtaccggtccggaattcccgggtttacccacgggggcgggcccgcgtacctaagttttctataaacgacaaaagggctccgctccaaaaacccacaaacggcgtcgcctccaaaaaaccaccgaggggcccgcctccacaacaccacagagggggccccctttcgtttttcggcgatttttaaaggcgagggggtccccaaagaggacctctcacccaaaacgtgccgggccccctcttcgtttccaaggcccccaatcccctcccttttcccatccctcttccttttccatacccaatgagttcccccccggggggtgcggcgatctctcgcacccagacaaagacccacctctttccttcttcccatcggcttataccaaaaacgcaccctgcccacccctcccccgcttttctccgagaacccgctccccccccccccccccgctacccgcgcctctctccccgcccccactgtacccgcgctgcgcttccgcgtatcgctcggtacatcttgtcg

SEQ ID NO: 186661 - DNA, 523 bp, Arabidopsis thaliana
accggccccacgcccgtttagcaggcggcaattttattttttttttggggggggaggggcgtgtaacataaacaagtacggtgtctagacccctactttgctcgctctcactcccctctgaagcaccggggccgcagtggattgggatacagtgccttaggggggatgtcgcaatatagttctaatttacgtgtcagtcgatgagtagtgcattttttttggggggggggggtagacgcgcaacgggttctgctgttaataaaaaaaagtgcgttagatattgcgtgtgtggtgtgtgggctggggtgcgtatgacgtgtgatgatagaggacgtactgcctactttcacgacggataagttatgttcccctggctgccgggtcctactcgtatgcgtctctcgttgcggcacgagtgtcgtcgatgcggtactgtcagcctactttggctgtagtttattcgggctctaccttgtattggagtgttgtgagttagctttcagtatgcattcgctgctagatc

SEQ ID NO: 186662 - DNA, 455 bp, Arabidopsis thaliana
  unsure (1)..(455): unsure at all n locations
gtttaaaaaaaaaaaaaaaaggggaggaatctttaattttatttttttaaaaaagaaattattgtggccttcggcccttttcttggtttcaaaatttaccactactggtaaactctctttttttgggccctcttgtttttatgaaaatttttttttgggaaagaagagtcnttccaatagtggtttttttttaaaaaaaaaatttgcggcgcgaggttatatcaattttctcccccccccatcgttttcgggtagtgctctccacccttctctttactttcccgctcactcgggggacagctccggtaatacagcggactaggcgttccctacataacacatgtcgccgcattccgctaacctctgacctcttttatcggcccttcgtctcgtgcagcgcctactgctgtcatcagttagctgcccttcctcgctctctctcgtcgatcatgtca

SEQ ID NO: 186663 - DNA, 394 bp, Arabidopsis thaliana
agaaaacaaaccctcattccatcccaatcccttcaccccggtcgccccatcaccaccctcaccttctcttctttttacaacacctctctcactctaatcaaaaaacgcatatcctctaaccccattactcatccacatcctacccatttttttttgggggacctaccttcacctctcaaaaaaaacacctttacacacccctttaccccccaacccccccccaacaatctctccacacccaacaatcttaatcaaccccacaaccattcctaccctctccacaaatacctccatacccctcattaatctattcataaccaaacacaccccccaccacccccccacctccttacaccaccctccacccctagcaaccacactacaataaccttta

SEQ ID NO: 186664 - DNA, 538 bp, Arabidopsis thaliana
  unsure (1)..(538): unsure at all n locations
agggaaagagcgagggaacggaggggatgggaaagaactgcgagagagcgacaccggcgaaagagagaggaaggaaaaaacagggcaaccggagacgcgagggagggggaggacaggatnggggggggaaagagggaggagagtaagatacctcggcccaagggcgaacaaaaaaccggactnacaacttttaaaggggaaaaagcccaggggtccccccccccgggccaggggaaccccggggccccggaaaaaataccccgggggggggcggaaaccccaacccgggggtcccgagaaacaggggggtgtggntaagaaaaaaaaaaacccccacccacccaaaaaaggggggggggggggggcccccccaaaaaaaaacacacacaggcccccccgcgggggggggcgaaacaaagaggggggtgtttccccacacaaaaaaaacaaaaccagaggggggcccgccccacaaaaaaagagaggcgagaaaaagaaaaaaacacccaccctcccggtggcgggggggggggggggg

SEQ ID NO: 186665 - DNA, 547 bp, Arabidopsis thaliana
  unsure (1)..(547): unsure at all n locations
tacaattctactaaatttatggaaagctcgcacgcctgcaggaacctgggactgcatttcacgggtgcgacccaccgcggtgcgggtcactgtgtttcgtccatccgcattcagtaanagcgtgctatagaaaaacatacaaacacagggccctcgcgggcttagaattacccacccacccggggcgaattatatttatgggatcccgtaaatattttctaccttccttaggatacttgtttttggactaaaaaaaatttaaacattttcttggggggggggaagcttttcttttatggatataactaccaaaaaagaggtttccctaacgtttttcaatcctcatattgcaaaaccctcccgcggacgagttgtattcctcttgggtgggtggctcactgcccgctctgtgtaaaattttttttcgtttttttttgcgaactaataaaagagagtttgtgaatgggagaatagccgctctctttcggagaggatgattttggctagacgggtccgctctcctgtagcgcctttctttaagggtgcg

SEQ ID NO: 186666 - DNA, 505 bp, Arabidopsis thaliana
  unsure (1)..(505): unsure at all n locations
cgacccacggcgggcggggcctgcggagaaaactacaaaaagggggaanaaccttctcttgtctttaatagattgctttccttcctcccccatcgtggggggaggggaaacgagcatggctttgaatcctctactctaagaaagtgtccttattatgtgaaacatttttccccgtttctttatggaggggggggatttccttatcccaaggggtgcccttactaaaaaaaaatctgagaagggcaattttagttttttaaccaaaaggttggtccgttttttatatactcgggggggaacaatggaattgtttatttgggggtgtttttcctttatgttaaacgcccctcctatgggggaagacccaaaccgtgggtaggtgctcttacccttcgccggggcccgaatttttttgtcttgtcgcggttggtgtttcaacacttcttagtgggggggggggctcccccgcgggggggggggtaaaatgtaattcaacccactcccg

SEQ ID NO: 186667 - DNA, 553 bp, Arabidopsis thaliana
caggtctactctactactctatggaaagctcgccgcctgcgtgtccggtccgctatacacgggtcgacccacgcggttcgtttggataaataaagacgctaatctctgcttccatcaaggcatgttcagagatatgaggaaactccttgtatacctattgcgcgggctagaataacgcgtctatttgaaatgggtcaagtcaacgctgaatggcctaatctagagtgttttcgtggatggagggaatatgtccctgttacagacttatccagctacttataggagaacgaccatgtacgccctacatggcgtggggtcacttggactgggtggaaacttcttttaccgaagggatgggtttaaaaaggccttacgaaggttgccatcctggctttaggacgggccttggggggatccacaagtatccccattacgcgacaccggatgaagacatttttcctattggagagaccattcagatggggtgaatccgacactcacgggggggaggggtgttcccggggcgttttgcggtctttgggcaagtggaaaa

SEQ ID NO: 186668 - DNA, 554 bp, Arabidopsis thaliana
gggaaggctcggttccccccttcagggtagcccgggcccccaatttcccggtttcaccccggggggtggggcgggggataaaaattattaagggttcttgtgggttcttcctggaatttttaccccttccggggcccccttaaaggggcctcactttcctcggttagtggggaaatcttttagtgttaagtggaacaaccggttctttcaattggggatcccgaattttttctccagggggggaggggggttctttcaatggcggcttcttaacaaaaaaacctttttgacccggtgccttttatatcccccccctcacaggggggaggggctctttgcgaaaaaaaatatttctcccttccccccgtcctcggggggggcggcccctcccacttgcacccggccctaaaatgcggtgccctcttgccccacactcgtgggggggggggccaccccccgagatgacatgggcttcccgcctctttcacaagcgcgtcctttcctcgggccccaccctcgacgtttttcgcagcccctgcgtgggggggccgtgt

SEQ ID NO: 186669 - DNA, 146 bp, Arabidopsis thaliana
cactctgactaactctagggaaagctcggccgcctgcaggtgccgggcccctatacacgggtcgaccctcgcgttcgtgctttctttctgccacacatactggatgattatgattggccgtcttcatcattatcaccaacaacaaa

SEQ ID NO: 186670 - DNA, 541 bp, Arabidopsis thaliana
  unsure (1)..(541): unsure at all n locations
gatctaccagctctcctctactaactatgggaagctggccgcctgcgtgaccggtcccctattcacgggtcgacccacgcggtcggatggatcgttcttcaagcgtttgcagaaattgttagatccgttgcagcagagacttgcagatggatgccatttggggaagaaacaccacagactgcatcttggaagcctgttttaggggaggagtttaagcacataccttttctatgtttaggggggggttggatgacaagacctnatatctaaagacaaccttacaactaaaacttttattttttttcacttacactaaaatgattgggcttgaaatgttttgatctccctgatggcgggtttttaccaaatagaggggggaaacaaagggtgggggtggggtaattaaaaaaagattgtgtttgtgggggcccaaattgtgaaggtggaaaaaaaccttttcctccatggcgcctccttcatggccgtgttttgggcataataaaggaaatttaaaccctttttagaaaagctccaaaaaaaa

SEQ ID NO: 186671 - DNA, 464 bp, Arabidopsis thaliana
  unsure (1)..(464): unsure at all n locations
tctactaaaattttgtactgtcctgttttcatcttttcacaacacaaaaaacaaaaaatcggaggaggggcccccaagttattgttatttgttgaggtgggcgagcccctacgtcgcgcgcctgcactctctttagagcggaatttttttgaggaggaggggtctttttgtagggttgtgttaaaaaaaaaaaacgggcgttgttcttctcgcgcggcccccccccagtaggttttttcagataccacatcatctattatgcatccatctccctctagcggggccaaccgnacaccctcggtcctctctctcatgtccctagaccacatcgacggatccgctccgaaccgcgagctccccccgcttccactccgttctacaaatgacgtcccgcatcccctctgccctcgcagttctccccttctcagcctcgtctggcagcacccattagcattcctttagcc

SEQ ID NO: 186672 - DNA, 300 bp, Arabidopsis thaliana
ggattaacttctctttctcaattagaaaccaaaacggggctgcgggattttgtcctctcaccaattacccctaagtttgaacttagcccgggtttttagggcgcgcggtttttctttttttatctaaaaaaaaagggggcacttcattggggggggttcgcttttccgttttaatccgggacctctaaggactgcgcttttttcggaggggggggccccttgagggtgggtaaaaaaggaacccccccgggaccttgtcgtgggaaacctccaccggttaaaggggccctatctctgggg

SEQ ID NO: 186673 - DNA, 446 bp, Arabidopsis thaliana
aaattttcttaaaaaaaacccaaaaccttatcttcaaagggaaaaaaaacgggtaagcagaaacctattccttacccctctgccttcgggtgggggtgaaaaaaactcaccgggaggtgtctatctataaaaaatccttcttcggggggggggggattttaattgggagggggaactggaaaaaaaaaaaagccttctatttccccgggctttgggtttggcccccctcctttacgggggcgggcgtttccggcggccagatgtaaaacagacggcgaattcctttttgtaaaccgcgcgagaggggggtcgtgcccccccaccccttataccttaacccctcaataagaccctctttttttttttttcaaaaggaagaagttgcaagaaatgcttcaccccgttccacaggagcgccctccgacattcgcttccctgcgctcaaa

SEQ ID NO: 186674 - DNA, 381 bp, Arabidopsis thaliana
aaaaactaaaaaatccttttctctaaaccatatccctccctcctcaatacttttttcagggggggggttttttttattggccccctcaaaaaaaaaaacatggtgtcgtgtctttcctcctgctgccccccccctctcttctcccctctctctccccctccctctttctcggcacctctcctttcctccccccttccttctcctgaacctgcagccattcccgctctcctctgctccttctcccttccgccaccactactcccatttactgtccacttgccttcgccttttccactcctctccccgctctctcctatccaccctcactctccctctaccccatacaactccactctacccacatctctttcccactctcca

SEQ ID NO: 186675 - DNA, 665 bp, Arabidopsis thaliana
cttttattcaataacaagaaggaaaaaaaaaaggctcgtcggaggaccacattccgactaactaatatgataaaacctttacccctgcatgtaccgggcctctattcccgtttccacccacgcggtggcgggctgttattaaaataacacagaaagaacccttgaaaccacctttttattcctccccgcattccactcttcaataacatcacccttaaattttcaacacctttgctattgttttctaaaatctaaaatatgcagcccctcaaatactagacttaacacaacatacctaacattctttcctcccaccaccctttttcttttttttcttccataggggcggggggggggggggcgttcttctttcctcctcacctaccatgttgagtgtactactttcttttttattctaacctaaaaaaaaacaaaaaaaaaaaaatcgtcctgatccgatattactcaagtcacctcttatattctcgatctcactcgcacatatttaactagatcctctctcctctcacacatctactcaaactctcccctctactaatgtaacgcctttttaccctcagtcctactttcctatattcactcaatcatgatataatgtacccatcttcttctctgcctctttacctctttttcacttctattct

SEQ ID NO: 186676 - DNA, 459 bp, Arabidopsis thaliana
gggcggggcaggggacgggggggggggggtcttggggggccacccgccaacctgtgggggggacccgccccctccatgaccggtccgcatttcgggttttcccccaggggtgggggcgggtgaaaaaaaagaacaaagggggcctctaccccgcttgttccggtgctcgccttcacgctccgggagcggcgtgtctatctgcgcgcccgctgtgctttttttttcgacattggtgagagcccaggtggggacacaaacttatcgctttcttttttttgggagagacggagtcgcccttgatgggggatccataaaaaaaaaattatccccccgagtgtctgagaagattttattgcttcgttagtgtctccttggttgccgcggcgcggcgatccgcccgtgcttgtggtagtccgtctttgtgtcggtctcccgtcttctgtgccgagtgcgtgttcg

SEQ ID NO: 186677 - DNA, 450 bp, Arabidopsis thaliana
gaaagccggtacgccctgcaggtgcctggtcctggattcccattttctaccccgggggggggggggttgttatattactacctaacgggtgggtctttaatttctgacaaggactcctacacgatatttactattccccctcttttgatcctatattcattaataccaacatgccacgagagtgctgtgttcaatcgatacttatctgctcgtcttattttttgtccggggggggtgttcttttatgcgccccttcctgccagaaaaaacaaccttttctcccatcaccgtacgtgctcgtgcccgctttgcctcgtggtgagatcgatcgccctgtccctcttctttcaagcgctttgatagtgttactgaggcaatttccgaaacctctcccatatcattgagggtttgtgttcctttttgggatctgaattttccttacaccttaaa

SEQ ID NO: 186678 - DNA, 234 bp, Arabidopsis thaliana
gctaggatcctctaaaacagtcgcactgggggggaggggcgggtattaaatttcaacaacaaaaccaggcggccgtaccagtaagttggtcagataagaaagacaaggagagaaacagagaacacacacgcggacaaaaggtgattcagtgacacagggcacgaatacgacgtgaagggaccggtctatttacttcggaggggggggggggcgagtctacgcgcgggtgctcca

SEQ ID NO: 186679 - DNA, 421 bp, Arabidopsis thaliana
gggggaaaaaaaaatatctttcaaaaaccatatacatccccatatcacctctcccgctaaccgatccgtcgtagaggttcagtatcgcactgtgatgatgtattctatctgatcactatcttccccttcacaacaattttttttaaggagaagggggtatactcaaagatacatccaaaaaaaaaaattcctcccctgcagcttgcgttaacatctccacgtactcccgatctttcactctcccactacccactatgattcaaacaatttcaattgacgatcccgagaatagccccaggtaaataatcaaaaataacaataaacacctagacatataactacacgacgtcaccgatgcgcaacatataaacaaaaaaaaactgtaaaatattactactaaacacgtaaacaatcttaattt

SEQ ID NO: 186680 - DNA, 520 bp, Arabidopsis thaliana
gccccgccttttgggtaatgtttattatgcttttaaccctggggggggggggggttaaattaaattctttccatagccagcccaaacgtttcgggccacgttaccctgtatactccccagtttgaagaaatggatccgtttgcggcctcgacaaaactaggcgtagcggagtgtcgtgtccgataatgtagatcgggttttttttttggggaggaggggatcttcccaaacgggaaacaatcataaaaaaaagttcccgttctgtcgcgtgtacttcctattcgtcgtctcgggttagcgggaaatatctgttgaagcatgtcgttacctcggaggattcgactacggtgagacttaacatccgcgcctctcttatagtgtgtctgaacctttaacagagttcgtaccatgatttcgttgcatctccacctctcacactcgcctcctgtgtggtcccagcatcgggctatctatacactaattcttcgtgtggcgatgagtctatggtttgctggtacgc

SEQ ID NO: 186681 - DNA, 435 bp, Arabidopsis thaliana
ttgggggtttttaaaaagggccaagggaaaaacacaccacaacctggtttttatacgcgaatgtgttaaaaaaccctgggagagacacaccataaaccaccgcgggggtgtttaaaaaataaaagaggaaaaaggggtggccttttttttttaaaaaggagcaaaaaaaaaaattttttttgttgtgggggggggttttccccctaaaaaaagagtggcccccacacaaagaggggggggttcttcaccacacaagaggggggtgccccttcggtgggtggctctcttttattatttagagagcgggggagcgacattaaatataaatctttctttttcttttttttcgggggggggggggcgcccccaaccaaagaagaaatatatttgtgtgttggtccgctccccaccaaacaaaaaaaaaaaacaaatgta

SEQ ID NO: 186682 - DNA, 579 bp, Arabidopsis thaliana
  unsure (1)..(579): unsure at all n locations
aaccacgcggccaaacgacgcacaccccgacccctgcacaaccccccgcacccaccccaccaccgcccccccccccccacccaccccccacacccccccccgccgcccagccccccaccccacacccgcgcccggcggaacgccaacgcccccccacacagtggggaggtaacctacaatgaggtgccacctcaaaanaaaaaccctaggaccgtggccagccccccccgaccccaaagccccggggacccccccccaaaaaccccgccccccccccccagggggtggagggcaatcatagaacgcactcgaccgtgccacggcccaccaccccaccccccccgcccgccccccgtcgacgacaccagagggaacccccccaacagcaccccccaccccccccgaaggggggagagaaaaaaaaactcgccccccccccacaaaaaaaaaaaacccccgcccctagccggtccgtcgacaagccccaaacaacaaaccgcccccccgcgcccccgcggcgccgcagtcccacaccaacgaccgccccacgcgcgtcgcccccctcccccacacccaaaa

SEQ ID NO: 186683 - DNA, 309 bp, Arabidopsis thaliana
cagctctaattctactaactctaggaaactggccgcctgcaggtcctgtccccaattcacgggtcgacccacgcgtccgcggacgcgttgacacttctactatatcttctcaaaaactacacctttttttgtttacacaatttctcagaggagatcttacttgagagctcaaatccttttgtctgaatttggatactgctgaccccatctttttgcaagttggcaaatttctgccgcggggtttttctccctgttataaagatctaaactttgaccgtggggatctcaatgaatgagaaagtgccatct

SEQ ID NO: 186684 - DNA, 194 bp, Arabidopsis thaliana
tggggaaagccctgtacgcccttgcagtgaacctgggtcctcaaattacacgggttcgacccacggggtgcgggcgtgtggttaacaaaaaaaaacctctttttattttttatcctgggaaaactaagggccgcgcgggagaaaaagagggtttacctctcagctgtgaatattttacgctctgttccaggaga

SEQ ID NO: 186685 - DNA, 499 bp, Arabidopsis thaliana
gggggggaacgaccgcccgagagccgaccgaggaacgagaccggccctcgacgcacacaagaaaacgcccgcaagaagcgacgcacgcccacgcaccacttcctcctctctccgggcgtggggaccaccggcgggggcgcagcggaaaaagaacccccaaacgcggagggggggagcgcccccccagaagaaagggcccgggcgggggggcgcggccgcaaagggagaagcggccacggcccccgaccgcgcgccacagcagaggccgcccgcgggcgacgggacgacacaaggaggacggcccccgacgcgcggtagggaaccagcgcggcagacgacgccacagcgcacgcacgcccaccgcgggccccagcggccccaccccacacagcgcgcccgcgcgcgaccagacggcgcagcgcgcacgacaaaggacggcgcggaagagacgagccaaggcggcacggagagcgggcgaggcgggcgcagcgaaagggcg

SEQ ID NO: 186686 - DNA, 179 bp, Arabidopsis thaliana
gacgccccacccacgcctacgtaagcttggatcctcctagagcggctctgcccccttcggtgtggggcctttcccttacctttcccgcatgcagacgaaggaacgcacctaactcccacaatggtactaattcgcacaactgccttatagtccaaacatgacgcaattgcctaccccca

SEQ ID NO: 186687 - DNA, 471 bp, Arabidopsis thaliana
  unsure (1)..(471): unsure at all n locations
ccgcctgcggaccggccggccttccgagggaggcagccgncggagagacgacgaggggggggcanncaacnngacggacaagaccaganncccngactcttagactgcgactgtagcgaaggagcgagaggaaacggggnnacttctctatttggaggtgncacnggggggcangccaggaccaaaaccccccgcccgggggggggggacccccccccggaaaaaagngagggagccagaacccagaggggaacaccgcggggagggcgggaccggcagcgaaaaggcccgagcccgggggcaccaccagggaaccgagacnaaggaggggacgggggggaagggccaagggggagaggggcgcgagcgaaacccgggccggggaaaaggggagggggcacagcccaaggggggggggagacacaggaggggggacaagaggggggggaacgaaaaaggggcaggaagggg

SEQ ID NO: 186688 - DNA, 487 bp, Arabidopsis thaliana
  unsure (1)..(487): unsure at all n locations
ggcgccgcggaccggccggctccgaaggacgagcccgcgccagcggncggcggaggggaaaaggggagcgaagagaaaaccacaaagagaagcccagagcccaagcagcnacacaagcaaggggagggcgagggcccctcaaaaaggcggtggccganaaaacaggaggagaaaaaaaacccccggagggggggggggggccccaaagaggggagagcccaggggaggggcggaggaaacccgggcaaaaaagaggagggggcgggaaggaccccaaaagggggcaggggggaaaaagaccgggggggggggacgcacggaatagaaaaacgcggacgggcgccgcaagaagaaagcggagggagggcgcggcggggaggcgcccgaaagaggaggccgggagcgggggcaagagagggagccggaaccccccgggacggggggggacggagggaggggcggaaaagaacccccaggaagggagggg

SEQ ID NO: 186689 - DNA, 549 bp, Arabidopsis thaliana
  unsure (1)..(549): unsure at all n locations
cgcctgggggccgggccggctttcgaagaggttatcagncgacacgngnncggcgggggggggaganacagaaggggggaganaaaacccccaaagaaaaaacttttagagaaaacatcgggggtgctccaaacacacggaaaagttcgagggcctggttcccttttggntgttgggcccanaaaaagagggcnnaaaacaaaaaaaaccccccngggggggggggggggggggaaaccacagaagggaggaaccngagggggggggcggaggaaaagcggcgcggggagaaaaaaaagcgcagcaacccacaaggagcgggaaaccaagcacagggaggaacaaagggggaaggcgcaggccaaggagaaggaagcaaggaagggaaaacgaggacagaggagaggggaaacagcgagaacgcgcaggaggcacgggagggggcaagcaggaagaaaaacaggggggagaggaaagggggggaggggcgccgcggggaggcaagggagagaggaaagagagcgagaagaaggaaagagaaaggagaga

SEQ ID NO: 186690 - DNA, 486 bp, Arabidopsis thaliana
  unsure (1)..(486): unsure at all n locations
aaaagggagaaccccccgaaaaaaaagggaccaccccggcccgcacgaagaaagaaaaaaaagggggaaaccccctcctccctggggccgaagaggaanacaagcgggggcggcgccccaaaaaaaaaccccccaatcggggggggcggggggggcaccccccaaaacgcccccggggcgggcgcgccgcccgaaaaaaaacccccgcgcccagaccacaacccccccaacgacccccccgacacgacaccacccacgcaccacccccggagcaccagcgaggaacaaaaagaccccgcgacaggcgcacagcccgcgcacaaaaaaacacaacacccacgaaggcggcgacgagaggacggagcggccggggcccggcgcgcagccaacgccccgccgccaccccccagacccgccccccccccgcgggggaggagagagccacggggcagacgcgcggcaagagcagagagccagagagggcac

SEQ ID NO: 186691 - DNA, 468 bp, Arabidopsis thaliana
  unsure (1)..(468): unsure at all n locations
cgcccacgcgnncgcggacgcgaggggggcngcgagaagacgacagaaggggagggagngcngaaacactttggagacgacgaggcgggngcgccacagcagaaggaggagaacaaaanccctccttcgtttttgggatggagganngagggggaaggcaaaggcggaaaaaaccacccaattggggggagggagaaaccgctaaaggagggccccccccgatccgggcagaagctgggagaccgggaaacgagggggggcgcggttcggcaacacaagatgnagctccagaattgcggggaagtcaaaaggccaaggggatataccgaaatgggtgccaaaaagcaggaaggaagggaaaaaagaggggggggacaaaagaaatagacggggggggaagaagggaaaaaaaaaaggggatcgcggggggcgcccgagaaaaaagggaaggaagaacaaggggcgggg

SEQ ID NO: 186692 - DNA, 271 bp, Arabidopsis thaliana
ctactatgggaagctggtccctgcaggtaccggtccggattccgggtctaccaccgtcgtacggtggaaagcacagaggagctagaccctgctatggttatctcccctgtagtactcgcaatgcgaaacctgatacacatgtttggaattccttcagccttatatttgggatgcactgacatgcacctgtggaatcacgaccttgtgccggtcttgctgcactgatggacatggtccaaggtactctagctaactgtctagcgttctgcta

SEQ ID NO: 186693 - DNA, 420 bp, Arabidopsis thaliana
  unsure (1)..(420): unsure at all n locations
gggagcgggggaaccaacacgaaggccacaaggaggggaannnaagcgaaacaaacaccagagccgggcggggacaaaagaacaagacgnnancaagggcagccccccccaaacaacggtggtgggacagaaaaaggggggtatgcagaaaacaacccccaaagagggggaggggcggacacaacaaacggggaacccacagggagggccgcaaaaagcgaccggcaacaagaagctttggcacggaccacccccaaaaggagcccagaccaagggacccccaaaaggggtgggggggaaaaaaaaacggggcggggagaggccgccccccaacgaacgctaaagagccagggggggggggagccccgcccccccccggaaaaagcccaaacaaagggggccccccaaaagggggaaaaa

SEQ ID NO: 186694 - DNA, 377 bp, Arabidopsis thaliana
  unsure (1)..(377): unsure at all n locations
ccgggcgccngnggnaccgggccggctacccggggggggcacccgcncgccacgcgnncgacggggggggaagacacagaaggggaaccaaaaaaaaaaagagagnacacnctacgagaccgggagcgaaacggcgaggggggaccagangccncgccggaaagccctctccgctcgggagtgggnnggggnctnggccatcctccaaaaaaagcccccagccgggaagggggggggaacccccggacaaaacgccccctgggccaacaagaagggggatccggcgccaaaaccccaccgggccggattgggtggcggggcgaaacggaaaactccacccacggaaggggaggagcccaccgggggggggagccgga

SEQ ID NO: 186695 - DNA, 574 bp, Arabidopsis thaliana
  unsure (1)..(574): unsure at all n locations
gcggacggagccggggacccctagagcgggcgggggagccccnnaaangggngnnnnaaanggaaaagggagaaagagccgcccnaacannnnaccaaacaaaacagaacaancacccaagcggcgggacaaaggtgaaacccccgggaccacggaccaaaaaaaaaactcctcaaaacaaagagttgggaannnnaacagacaaaaacggcaaaaaaaacccccgagggggggggggaaaaccccaaagctggaaaaaccgccaaagaaaagggcagcccaaaaaacacccgcaaaagccccacccgggggcgccggacacccgaaaagaggggcgccacagaggcgggtaaagaagaaacccccgcggggaaaaaaagaaaaaacccccccccggaggaagaaggggaaaaagaaaaaagggcgccacacacggcccgaggggggagaggaagcgccacccccgcccgggagggagggctccggaagaaaaaagaaggaacacgcgcccgggggggagaccccccccccaccagggggagaggaaggcccagaccggggggaagaaaaacag

SEQ ID NO: 186696 - DNA, 344 bp, Arabidopsis thaliana
tgacgtggcatgcacgcgtgcgtaagctgggatcctatagagcggtcgacccacgcgttcgtacggctgcgagaagacgacagaccatataaaaactcgtgttgatctgttacacgttgaataatttctgagaatttcaggctatagccaaaacccagacctagtccgcgaaaacctcgcatatgcggcagacagagatgtcgactcgttacacagcggggcctggaaaaggcaccgagagaaaattcaagaaggcgctcttacttaattgctagaagaggaattggtctatccatggcgcttgtttctccacgatgaactagtctctttgggttcagacacaa

SEQ ID NO: 186697 - DNA, 508 bp, Arabidopsis thaliana
  unsure (1)..(508): unsure at all n locations
aggagacaagaaaacannngaaagaagaacaaaccgggaagggggccctgggacccaaaaccccaaacaaaccctgaaagaggcaggcaaacacagaaaaaccccctccctcctgggccgccgggaacacccaaacgaaaaaaaccgccgaaaaaaccccaccatggcgggggggggggggacccccacaaacaaaaagcgcgcccaaaaccaaaggggaaggaaaagaggggggcgaagggaacccaacccccccccgcgggggaggaccaaccaccaccacccccggagacaggggccccccaccgggagaaagagcacaggccagcccacccgagggggagcacgagacaacccgacacccgcccgagggcggagaaagagagaccaccaccggagagaagaccccggagacaaaaacccccgcgcaaaagaacgacggggccccccgcaggaaacaaccggcggaacaacagaccgcccgggggggaaggacaacatcgggaag

SEQ ID NO: 186698 - DNA, 458 bp, Arabidopsis thaliana
  unsure (1)..(458): unsure at all n locations
gccgagagaagaaacacaaggggcaggggnggaaaagnccnncaaaaaaaaaaaaacncgaaagcagcccataaacacacgcgaagcggaacaaaccggaagaaggngagccacagaaggggnccccccttccaccctgagctgcnggacgnggnaaaaaaaaattccccgaaaaaacacccncctaggggaggggggaaacccaatgaagaaacccccggtctggaaaggaaaaaaacccgggccccaccaaaccaaggaaagcagaaaaaaacaaaacacccccctaaaaaaaacaccacaaaaaagaaaaaaaacaccgtggaaaaaaaaaaaaaacaacaccccgaaaggccacaaaaaaaaggggggagaaccccaaaaaggaggaaccaccagggaagaacgaaaaaaaaaaaccagaaccacaaaaaaaataggaacacaaggaaaggcga

SEQ ID NO: 186699 - DNA, 241 bp, Arabidopsis thaliana
tatggcttaaattatagcctctgcgtcttagtgcggtttctgcactcagacatggcagttttcacacgttgctgacctttgactgtactaccagggggaaaaaggatttggggttttagactagaatgtaatgaatttatccactgaggtttgccccaaccggaaatctcggacaggggttgcatttagttgaacattgagttctattactttctcatagtgagttgcctcaaacattatc

SEQ ID NO: 186700 - DNA, 331 bp, Arabidopsis thaliana
  unsure (1)..(331): unsure at all n locations
gcccgcagtaccggnccggaaacccgggtctacccacgcgccgaacacccgancgaaggcagcgagagacgacagaaggggaagaacaaagacganncgacggaanncnccacaagagggccgacccgaanncgaaaacccgnaagaaccgaancgaagaggagcaagganggnnngagcaacgaccatttttcancagggagggaagcanncaagccanncgacacagacggcgacggcaaaancgcaccggccgagcccggaaccnnaaggcggncacncngcggcaaaccaacagaagcacaacgcagagcaaacacaacgacggaga

SEQ ID NO: 186701 - DNA, 520 bp, Arabidopsis thaliana
  unsure (1)..(520): unsure at all n locations
cgcctgcagggaccggnccgctaacccgggggggcagcgcgnccgnacgggaagacgacagaagggacagagaacaaacanagagaggggatagaccgcggncagaaanngaaggagcaggaaacagagcgcaagcncaagncncagaagccccccganacagacccctctgntatagagacggggcaganncncaagcagcaggaaacaaaacgcccacccaaggcggaaagagggccacacacagaaaagggggaccaggaggacaaacnagaaggggcagggagggcnaaaaggggcagaagcagcgaggggagggagggaagggaaagaaaccaaaaaccgaaacgccgggaagccgaacaagggaaaaancccccaccagcagggaagggaacgcgganccaaaaaagggaccacccaaaagcgggacaccgcgggcaaaaccggaaccccaaacggggacaccccaaagagaaacagccccggggcacagacaaacggaaccggaaaaggaacg

SEQ ID NO: 186702 - DNA, 433 bp, Arabidopsis thaliana
gcgggggggaccatacaaaagtttttacaaaaaaaatatttcatcattttagaatctttcacaaaaacccaaaatttcttatttttttgggtgggagaagagccccaccgtgatctcgctagaattttcaaccattgggaagttcatgaaaccctttttgactcttttttttgcgggaagaagaggttgatttttttaagcaggcaacaagcttttattggcctttggattcccataactggccaaaccaacctcttttaccgcccccaccattggtttttcctttcgcggttttagaaactttatccctgtttcaggggaaatgttggggggctgcctctttctgaaaaaacttccccaatgtttgggccccttctttaaaacccccttctttttggggcgggccctttggtttctaacaaacatttgtggg

SEQ ID NO: 186703 - DNA, 436 bp, Arabidopsis thaliana
ccccaagaggaaaaaacacaaacccgaaaaaaactatgataaccacaaaatggggggcgagggggccaaacaaaccaacaaagcaccgcctggaaacagagggtgagagcaaagcccgtgggaaaaagtcaacagacaaccaccttcagggggccgagaggaaaaccccaaaaaaccccggaaccgccccaggggaaaaagcagagggcccccgggggggaaaaggaaaatcccgccccaacacccacaaccccccgcgggggagccccacaaagcggggaaaacaaaaaaaggggggggaaaaacgggggggacaccaccggaaaggggccccacggagagggcccacgggcccaccccgccgaaaagggggccccccccccacagggggggggaaaaaccccccgcccccccggaaggggaccccccagaaagg

SEQ ID NO: 186704 - DNA, 364 bp, Arabidopsis thaliana
  unsure (1)..(364): unsure at all n locations
ggggngggggggggggggngtcctgngggggggggggaaaatcaagngggnaagggaggggggngggggggagagggggaggnnaaaagaagaggaagggaggagggcaaagggggaggagaggcggactttggaggccgagagagaggggagagcggcaaagagaacgaggagagggggaagagaggcctcccctccaaaaaatcggntgtnggagaagaaaacgaccaccgcgaagaacgggaaaaaaggcccccggggaaggggggggggggaggccccacgggcagaacgaggaccagagcgggggacagcgacgacggcacgagacgagcagcacacagcaggggcgcggacgagcgag

SEQ ID NO: 186705 - DNA, 495 bp, Arabidopsis thaliana
  unsure (1)..(495): unsure at all n locations
ggggaaacagaaaaaagacncnaccgcacnaccaaaaggaaaaacgaaacccccgccacaaaagacgaatttggggagacagggaagaagccccccgngagaaacccgctaaaacaccgaggggtgaaagaanggacaggcccaccacaaggaaaacccgcaaacccgggggggggggggaaccccggggaaaaagccgggaaccggaggcgagaacccaagcggacggagggagggagggaaaaacagagacccgggccccgaaaaagagggggggccacagagaaaaagagaaaggcagcccgcacaagcgcaccggggggaaaagaagacagaagggcgcaaaaaagaaagaaaaggggggggcgccgagaaaaagaagcgagaaaaaacaagggacaaaaacggaaaaacggggggaaaagaagggggggaagaagaaaagcgggggggggaagaaccgcaaggacgaggcccgtcggaaaaaggagaaaa

SEQ ID NO: 186706 - DNA, 378 bp, Arabidopsis thaliana
  unsure (1)..(378): unsure at all n locations
gcggggggggcaaaaaacaagggaaaaaaagggacccccccgcacaaaaaaacccttgcggagagggggcacaacaagccccaaaaccaggggacaaaaaaaaaanccggggggttctcctcctttttttagggctgtcggggancaaanagagaggaaaaatgtgcagaaagaaaaatcgccaccctactggggggagggggggggcacaccccatataaatgaccacaccagcggggtgctagacccagaaggacgccgacaatcgacgccccgtgcttgacacaccaaagagaaagaaaaaacacggggggggggaaaagtagagacccacaaacgtaaggaagtgagtatagaagatagagccgggccacagag

SEQ ID NO: 186707 - DNA, 522 bp, Arabidopsis thaliana
  unsure (1)..(522): unsure at all n locations
gggggggcgccggcagggaccggnccgctannccggggaggagatccgcgnccgcccacgcgnccggaggcggcgagagacgacagaaggggaagaacaaagacganncganggaancctccataagagggccgacccgaattcgaaaacccggaagaaccgaatcgaaaaagtcgctgagaaagatggatgaaggaccaannctgaggaatgaaggaagaaaacacgccatgcgaggggaggaggggagggcaaaaacggaccgggggagctcggaatcataaggcgggcacggggcggggatccaacagaagcacaacggaaatcaaccataacgacgggagaatcccgcggcgccggtcgattacgacggacgcctaaaacaaagggcgaaacatctgaaaacagagccggccgatcggcagcgtcgggaaggggcaaaagggcccgacaaggaagggccgggaccggtggggggggagaaccgaaaaacaacccacaaggagcgggagaaaaaggagg

SEQ ID NO: 186708 - DNA, 386 bp, Arabidopsis thaliana
ggaaaaaccggaggggacaaggcgccccaaggagaggggagagcagcagagaaggagagaagaaggccccaaaaaaagaagaggcaaaccagggggcgcagagaaaaaccccgagggggggggggggacaccccaaaaaagagaccggggggggggggcgcggccggaagaaaagaaagccgagacccgacgcgaacaacccagaaacgcgcggccaggcgcggagggagggaagaccagccaacgggaggggggaaaaggggagccgccgcacgcgcggacgcagagggacgacgacgccagaagaccgacggaacgggaagcgagacggggacgcagcggagaacgcaggaggaacagggcgcagccggccgaggaaaggggag

SEQ ID NO: 186709 - DNA, 315 bp, Arabidopsis thaliana
ttacctaagcctcgggatcctactagaagcaggtctgccctccccggttccgtttttttttttatcgctaaccgatccataggaaagtgagggagcccataatacacgtcccccaatgaagggcaagcagcgaaccaaaccccccgcaggcaactaaatggtttaaacgcccagccgaattatcttaacccaagatattctctaatcctcacccatagaccagcaaagaaaaaacttttttttcttgagcgggggccaacacaaaaacccaccactacgcacctgtttaccacccacccatatataaacccccgc

SEQ ID NO: 186710 - DNA, 610 bp, Arabidopsis thaliana
accgggcccgaattcccgggtttaccccagcgggcgggagcgcgcggaaagaacgacagaagaggaaggcggggcctttgcaggcaataagcggaaccaggcaccgcaagaaagagcaaaagcgcggagagacgaacgccgccacaagaaaacaaaaaatggagcgcaaacgcacaccgggacacatctcttaatgggagggggcgggaggaaaagggaaaccgacgcacaaacagggcggccaaaccacgagggccggcccagccaaacaaatagggaacaatcacacaacccgacccacccaacaaccggcccaccggaacccaccagacacaacagacgaaaaaccgggccccggggacaaacgagaaactctacaagagacccgaccacacccaaaaacacgggagccaaaaacccaagagggcacccggggcacccaacaagaaggcccgccaggcaccgcgggggcccagccgcaacggagagcaaccagaagctcgaaccgaacgcgcggaggaacagcacggcgcacaagccgcgcccaccgcggcaaaaaaccacacaccaacaagcaccgtcgccgaggagcccccacccggccaaggcg

SEQ ID NO: 186711 - DNA, 565 bp, Arabidopsis thaliana
  unsure (1)..(565): unsure at all n locations
ggcacgccggacggagccgggaccccctagaggggcggggagatcccccgaacngnngnnnnaanagggggggggggcacaacanccaagcaaaaccacancgatcggncacccaggcacggcaccccgcgaaccaaaaacaaggaaccgccaaaaaaacaggaaaaagaaacctcctctaaagagagggggggggccacggggcggggagcaaccaacaaaaagccccaaaagggggggggggggggaaaacccgagagaaccggccgttccgaccccggaaaaggggaacccacaaacaccaagcggcaaaaagcggaggcgaaagaaggggaagagagaagacccgcgggggacgaacggtttaaggggaaaaacccccgcgcggaaggaaggggaaaaaccctgaacggaagggggcgagcgcgccaaaaaagagaagaaaagagcaggaaggaacgggaaagacaacgcgcgggaggccccaaaagggaaagggggggggccccgcccgagcccaaccgggagagaaccgagggggacgggcaacaaaccgggggggggg

SEQ ID NO: 186712 - DNA, 474 bp, Arabidopsis thaliana
  unsure (1)..(474): unsure at all n locations
aacgagaaacacgccacggaaagagaaacgccaacaaacgaaaccagaaacccaaccccccggggaaaacccgggaaaaagaaccccccaaaccaggggggtggaagggncnccgggaaagaccaaaaaaaaagcccgaatctggggggggggaacacccccaagcctggggaaaaaggcagagcaaaaaaacgggggcaccgggggcgcaccccaaaaaacagggaaaccgacagaagggaaaccgccccgcggcaaacaaccccagaaggggcgggggaaacaggggaaaaacggggagcgggcccgacccggaaagggccaccaaagacggggcaggaccgggagaaaaaaacggggcgggggcccgggaaaccggagggaaaacgggggggagaaaacaacgcggcgagggaaacaaagacccgccaagggagcggccgcgccaggggagaagagaagaaaagagggggg

SEQ ID NO: 186713 - DNA, 483 bp, Arabidopsis thaliana
  unsure (1)..(483): unsure at all n locations
acggnngcgagaagacgacaggggggggaaccnccgacnngacggcaccgccggagcacgacgcttctctaagacgaaccaagagcggggcgaacaagacacgaggcagggaagaaagacctccttccacctggntcgtcccggccaanaaacagaaaacagnnngaagaagacccccaaggggggggggggggaaaccccagttaaaggaaccaaaaanggaggaaaaagaggagcgggggaaggaaaaaaaaagagaaggggcgaacaagaaaggcgcccgcaaacggggcaagccggaccaacacagggcgccaaaaggggagaggggcgagcgggaggggaccaagacagagcaggcgcgggggggaaggggaagggggacagaacgcgaggggggaaagaaaacaacgcccgaagaggggggaaaaaaaggaagaaagccgaaacggggaaacgggtggaaaggaagagagaaaggga

SEQ ID NO: 186714 - DNA, 341 bp, Arabidopsis thaliana
  unsure (1)..(341): unsure at all n locations
cccgggggggggggggggggccctcggggggcggggaaccacnnnnannaaaagnngggccnaaaaaggggaggaaacaacgcaagagacgcgaagcgaacacgcagccgcacaccccccctggggaaaaaaagcacagggcgcccgagcagcggggaaccgaaaggagaaaagaagccgcctacaaaaaaacgagccgtttggagagnaaaacacaggaggcgccgccggtaaaaaaaacccccccccgttgggaggggggggggggggcccccccacccaaagacagccgccagcgggggggcgaccggagacggagcagcagacggagccggacgaga

SEQ ID NO: 186715 - DNA, 384 bp, Arabidopsis thaliana
  unsure (1)..(384): unsure at all n locations
gaaagctactcgcctgaggtaccggccggatcccgggtcgaccaccgtcgacggctggagagacacagaggatcggctgnagagacacagagggtcggtgcagagacacagagggacggtggaaaacacaaagggtacggtanatatctcacggaggcaagagttgattaaaagcttggtgttacacgaaagctctaaggactanaccaattgatcatgcatgatatcgctcattgaccctctcgtagaaacggagcactangtggatgattgngtctatgtcgatatacaagaaagcatcagtcacanaaccagttacgaatatgaatcgcgatgctagagaaatcagcacactgtacttcgtcacgacgtcgtcttctctca

SEQ ID NO: 186716 - DNA, 520 bp, Arabidopsis thaliana
aggaccggccggatcccgggctaccacgcgccgacggccggagaagactacagatgaggagaccgccgaccaaccaccgaaacagtacgcacgcacacccacaaccccccacccaaccacgcgcggcgaccaacaacccccgatgacgccagggaccgagagacctgctaggagggcggaacccgacacagccacaacgcgcacaaaccacacagccggagtgccggaccaaggcagccccagcagaccaacccgcgacgcacgaatgggagacgcccgaatccgcccaccacccgcgcacacaagctcacgaccaccaaggagcacccacaaaaacacagacgaccctgacggacagcgccccagggaccggaaacccgaaccctccggccgcacccgcaggccccaccggaaacccgacgacccccggaccggagaccaacccacggcacgaaacccaagagccaccaagaaacaacaccaacaaagaccgccacaacccacacccacgcgcaaccac

SEQ ID NO: 186717 - DNA, 633 bp, Arabidopsis thaliana
  unsure (1)..(633): unsure at all n locations
gcctgcaggtaccggnccggaatacccgggcctacccacgcntcctaaagcgcgaccggaaaaggccagagaccacagaaggggaagatcaaaaacaaaggcgcacgaaccgcccagaagacggcagaccccaattccaccacccacaacaacccaaccgacacagaaccacgacggccggagttttgaccatttttttgcagggaggggagcanacacgcgacccaaaccagacaggcacctgaagagcgcaccggccgcagacgaacactaactgcggacactagccggcaaaccaagcgaagcacaacaacccggaaccctgaacaccggaccagccaaagcctccaggcggaagatcaaaggcgcctcctgcctaacgggaaaacctactggatacagcacccggccttccgccagattctgccaacgctgaaagctgcccacaaaggaagctcccggattcatccgcttggccatgggcgaagatatatcctatacaactctccgccaaaaacttccccttctctagcctacatctcatggaccacatagcgttgacccccaacctgatggcacaatgccaccttaaggaccatctgcccatgcctaggcgcgatgattagtatccca

SEQ ID NO: 186718 - DNA, 507 bp, Arabidopsis thaliana
  unsure (1)..(507): unsure at all n locations
aacatacattaaggaaagctagacaccatcacgtccaggtcctgaattgccaggttgacccacactgtacggcacaagatcagactcacatacatgcacgacatgtgtctcacagatcgtacagctgccataccactacataatgcacatcttcagagacgactacagatctcctgatctacatatgatcggctataacaatactttattgaggtgaacatcaacaataagagatctgtcacactctaatactctccagatcaatgatccattcatctcatgcactgaaacaacctatatctgtatgattccatcttctccanaccgtgttccttcaaccgattattcccctctactaacctgttcctagacactgagctgttttagatgatgctgccctctatcaacaagctttctacacattagatattgagacactgctcagactctgtccaagttatgctacactaacagcttttgcaataatactctaatgacacctactct

SEQ ID NO: 186719 - DNA, 396 bp, Arabidopsis thaliana
  unsure (1)..(396): unsure at all n locations
cggcacgccggcgtaagctgggaccctctagagggggcggcagcgcgnncgaacggnngngagaagaaaacgcgagacgaaggaagtaagcaaacaggagggagaacaacccaaaccacagaaaacaggacataaccaaacggaagccccagaggccccggcggaagagatcctgctcccaaaaaggggggggagnncannacaaacgcaccagggggaaccnaacagcanacagacaggaggcaacacacgcaggggggggacgggnaaanaaaaggggnnagggaccgggcngagacagaacagcnnccccggcaaacgagcagcaacnggagcagccggggcaaccncgggagcagcagcaggggcggcagaaaccacccccacngccccccc

SEQ ID NO: 186720 - DNA, 512 bp, Arabidopsis thaliana
  unsure (1)..(512): unsure at all n locations
ccggggcgcctgcaggnaccggnccgctaacccggggggaccagcgggnccgaacggntgcgagaagacgacagaagggggggcccaaccgcgcacacaaaccgcgacagcaaggcggcaagagcccacaagccaccccccccaaaccagggcgccggggaccaanaanccgccctatgattcacaggtgtgggaaagaaccgaaaggagnnccgagaaaaacaacgccccncggggccagggggaccacaacacgaaggccggccccaggccgggggaacccgacaggcccacgacggagggaaggggagaaanccggaaggcagaaacaaccgggggaaaaagccncggcccaagaaggggcaccgccgccccaagggggcacccggggccacccccgccagggaacgcagaaacccgagcncgcgggcccggcgagaggggaccccgaaggccgccgaccccgggaggaaagaaagggcccggaaggcgacaccgaagcccgggggggg

SEQ ID NO: 186721 - DNA, 284 bp, Arabidopsis thaliana
  unsure (1)..(284): unsure at all n locations
cagcacgcgtgcggaagctgggaccccctagagcagccggccaaaccccncaannnaanggaaggaannnaaagaggggcancncanaggcgacaaaaaccggggaaaaagaaaggaaaagccccacccnggggggaaaagagacaaagacacgcgcaagggaaagaaacaaaccctccaaagcaagagagaggggaagaaaacagccnnaccacgaaaaaaccccccccggggaaggaccgggcagaaaaacaaaaggaaacccgccggggcacaggggcgaa

SEQ ID NO: 186722 - DNA, 452 bp, Arabidopsis thaliana
ccgcacgcgacggaaccaggaccggtccacggccgtaaaccgaccaaacaaccccgggggggggacaaggaggcgcccgccaggaccacaagaccccacccggaagagaattgatctcacccaccatgtcggccaagttggccaatctaacctaccgggcagatgacgaactcttttttgcgggggaaaacaatgggaagaacccgaacagcctgctaaattcacaggctagtaagaggagtaattcataaatgcccctggacacttcctttggtcgaatagcacgaggaccttcccgggcgagaatgcaagacagcgcgctcgaagccgacaagaaaaagttcttgggaggccctagactcccttgacagaaaccaccccaaagggcgcctggaaaacccaccggaacccccgggatgtggttctgcccgcgacggggctcccacaggtcc

SEQ ID NO: 186723 - DNA, 527 bp, Arabidopsis thaliana
  unsure (1)..(527): unsure at all n locations
cacgcgtacgnaagccgggagcccccagaggagccggccgatccgtttgaggnngaaaaggggggaaaagcgcaaacacggaagcaccagcaaaaaaacaagagaaggaagtctaaaacgagaaaccaaagagatacaaggaacccccacacacaggagggggggaaaaaactccctcccacagngggaggagagacccaagaccccgaagagcgaaaaaaaaaccccgcgagacgggggggagaaggggaccccgggaggggaaggacccaacccccccccccgcagagggcccccgggaaaagagggaaaggcccccaaccccccagaaagaaaccgaaaaaggggggggggagaaaccaccaaaacaagaaaaaaccgcgcccacgncccaagaaaaccaaagaccgaagagaggaaaagcccgaaaaaagaggggcggggaaaaaaacagggcgggcaccaacccgccgaggggaagaaacccggggggaaggagacaaaaaaccccccccggggaaacggaa

SEQ ID NO: 186724 - DNA, 517 bp, Arabidopsis thaliana
  unsure (1)..(517): unsure at all n locations
ggggcgccggcggnaccgggccggcttccgnagcgggccaccngccgggcnggaaaggggggaaagggggcnagcngcgaagacgacggagcagcccgcaaacaaagacagngccaagaagaaaaccacctcccgccccccccgtgcgggtatacagtnnccaggggcgctcctttcatngggcgacggaagcaaagaggggcagcacaaggaagagaaggccccactgcgggggggggcaccgcaccaattccagaagacccgacgggggaagaacacgagggagcgggaaaagcgaacaaggatcccaaagggaagagagtacaccaagacaacggcggcggggcagcagaggagaggaaggaaccgggaacccccagcaaaggaaccaaggcggggaggggggggaacccccaaaacccaaaggcccggggaaaaaaggcaccagagggggagggtccgcccgcggagggccaaaggcccaaaaaaaccaagggggcccggaccaagacgcccc

SEQ ID NO: 186725 - DNA, 532 bp, Arabidopsis thaliana
  unsure (1)..(532): unsure at all n locations
cgcggcggagcngggacccttagagcgcgcgccaccccgnggganggnggggcangggggcgggggaagggaaaggagccccacaaaaacccaacggaaaaanccaccagggagaaaaacgcggccaccaaagaaaaaaaaaaagaaggaacccnnaaccccctccgaaaccgaggggggggcccaccncnccgggcgaaaggacaaaaagcccccacccgagaaacagaccccccccccccccgcccggaagacccccaaccggccaacccggaaggaaccccccccgcaaaggggggcaaaaaccccaaacaagagggggcccccccggggaccggcccacaagggggggccccacacccaaaaacccagagcggggagcacaccaaccaaagcccggggggagaggcccgcccccccaaacaaaagaagagccccccggaaaaagaaacaacgcgcccgcgggaaagaaaacccccccgccccggggacccggggggcccccgccagaaaccaaaaaccaaccccggga

SEQ ID NO: 186726 - DNA, 490 bp, Arabidopsis thaliana
  unsure (1)..(490): unsure at all n locations
acaccaaacgccacgcacaccnncnatttgcctacgcagcactggctcttctcctcgaacctccgagggattcaccggcttgttcttattttggngggcgngggcacaggacgagggggaagaagcgcgcaagcggcccaaagcgggggggggcggggaaacaccggganaggggcnagggccncggaaaccggacccacccgcagcggggcggnaggagancaaagccgggaaaacaacnccccccccgggagaaccacaacgagaagggggggggaaccccaacggccgaaaccgaacggaggaacaaagccccgggccgagaggggaacccccccggggggggggaaggacacacaccccgagaaaacgaaacccgccgaagggacggaaacaaacaaaggacccggggaggagaaggggaccaagccaccgcgccgggggaggaggggggcacagcccggccggggaacccaaaaggcgaaaaaaa

SEQ ID NO: 186727 - DNA, 490 bp, Arabidopsis thaliana
  unsure (1)..(490): unsure at all n locations
aaacggacaagggaagaggggaaaacnacccggggacacaggggcaaccaaaggaaaaaaaaccccacggagaaaggcacgggacagggaagacgcaaggagaggggaagcggcggcgccggctggcctccttgggaagaagggggaaanagaaaagggggttgaggaagaaaaaaccccccgggggggggggggggggggaccccaaagatcgagaggccgcggggggaggggaagacaaggggggaggggagagacaaaaaaaaaaaagcggggcgacacaagggacgaaacaaagcgcacgcaagagaggcggtccgcagggaaacaccgagagaaagagcggaggaaaaagagaaaggaacccgaggagaaagcgacccaagtagaacaaagaggagaagagggaaaaaagaaggaggggggggggaaccaaagggggcgggaggacaaaaaccgggaaaagaaaaaagaaaagagggaagggagg

SEQ ID NO: 186728 - DNA, 505 bp, Arabidopsis thaliana
  unsure (1)..(505): unsure at all n locations
tatcactactttggaagtggccctgagtccggccgattccggcgacaccgtcgaagtcatgtatgtaaacttacttcaatatattctaatgataattgatataaactttagaaccttagaactaatattagtttaaacaatatgcttatgttcatatctgacagcagtataagacatatgnatctatgatcaatctcataaatatgaaactcgatcctgtctgtctatatgatactctaatgacactcaagtacttagcctttaaaaagtgaattagctatggatgttcttcagatagaaactgtgagatgctctctactagatgccttgttacactgcctgaaacaaactagctcctctgttactataacataaaaccaagtcttcttgacttatgatataatttaagaatctgcgccagtgcttattacacttactgttttagagcactatctaggatggagatgctttggttatagcacatgctcatttcataatatgtaga

SEQ ID NO: 186729 - DNA, 428 bp, Arabidopsis thaliana
tattctcagcttatcactacttaggagctgtccctcagtccgtccgattcccgtcaccagcgtcggcatcatatatatctctataattcgatctgccaaaaagcgtggcaaatgagtctaaatccgtttggttctggttctccaattccggaaatggccctttccccttttaccccttaaaggggagtttgattttttgagggggccttttaacggggttttttttttttgaaaaaaagggtttccccccttttttttttccccccccccacgggggggaaaaaaaaattttttttggggggaacccccccccgggaattttttttggggggtaatattgggggggggggggttttttttggggggcaaaaaaaaaacaaaaaaaaaagtcggggaggaggaattttttttttttttttttttttttt

SEQ ID NO: 186730 - DNA, 410 bp, Arabidopsis thaliana
  unsure (1)..(410): unsure at all n locations
ggaagtgcccctcagtaccggccgattccggcaccaccgtcggcggctcttgttactaatgctacacacgatttcaacagatctgtgagtgtctgactatctgtgacacatcaacactgtctgacagctcaccatagtctacctgagcacgacangcaatccacgacgccatcngatgaaacctcagacacaactgctacttgtgcagtgatgaacacatcctggacaggctatcaacccaacctcttgaatcggactactagatgacggtacagaggaactcagacaccatgtgagatataccgccatcgttgcagtgatacaaccttggaatattcaaaatctagattgccaagcgcattgatgcactcttcggtgggatgatgtgcaggggccaatctagacagtta

SEQ ID NO: 186731 - DNA, 510 bp, Arabidopsis thaliana
  unsure (1)..(510): unsure at all n locations
ggcttgcaggnaccgggccgcttaccgggggggacatcccgnccggncggaaggggggcnnaccnagggggacngggcangaggggcanacagagaccagaccaaccgancattttgaccggcganncaacacncaacaagcggcggggacgngagggcnanagttgctcctagaaaggnngggggggcaaaaaagagggggacaaagggggaaagccaccccacaggggggggggggcncacaagggggaagagcaacccccaacggggcagagcaacanncgggcggaggggggggggccnccggcggggcaggcgcccggagagccaccggagagaacgggggagggaaacccagagaacgggggggaccaaagaagcgggaaagcggggaaaaacgagaaaacgggaaaaagggcgggggggaccagaaaaaaaaaggcgagggggagaaccaaggaaggccgggcaagggcggcaangagcgggaaaagcaagcggggggggaaa

SEQ ID NO: 186732 - DNA, 464 bp, Arabidopsis thaliana
  unsure (1)..(464): unsure at all n locations
aggaaaacaacaaggggggnngaaaacaaaagcgggggcccaacaaagagggggaaaaaaccagccaagcgagataaaaaagtgggagtaaagaagcgcaacaggcgagggggcaaaaaaacgctgnccaaacaaagggggagagccccaaagaaggcgggagaccggggaaaaaaccccccagaagaggggggggggggggacccccgccgaaaagcagaagagggagccgaggagggcgcaacgcgcaaggaaagaaaaagggagcacgggaggggcaaagagggcccaaaacccggaggaggcgggaanccccaagggggccaaagagggccccgcccaaacaaaaaaggacaagcgnggcccggcccagaagaaaaaacgggngccagggaaaagggaacaaaaagagcgcgggnagggccgaggggggggacgggagcagcaggggagagggaaaaaag

SEQ ID NO: 186733 - DNA, 494 bp, Arabidopsis thaliana
  unsure (1)..(494): unsure at all n locations
ggcgccgcggaccggccgcccccgaggggggagccggcgaangaaaagcgcganggggggaacanannggancggggaacncccaggaaaagaaacctcagncggggaggcgcgaagagcagaggggcaaaagaaaggaggaaacccctcctactcggtgttgcccaaaaaagggggcgngggaggaaaacccccaaagggggggggggggaccacaacagaaggagccccaaagggnaaccaaaggggggggaatgaggcggcaagggaggcaacgaagaacaggggggggggagggcagaaaccgaggggagggggggaaggggggaaangaggcacaaggaaggcgcgcaaaagagagggggggggagaaggaaagggagggggggggagaaagggggagacgggggagaggaaggggggggggaggaagaaaaagggcgggggaagaaagggggggagagaggggagcgagagggggggggagggggggg

SEQ ID NO: 186734 - DNA, 466 bp, Arabidopsis thaliana
  unsure (1)..(466): unsure at all n locations
caacgaaagcccgcanccccaaaaacggttgaccagccgggaaaaaacccnnaaaccaacnnccaacgnnacaggggggaccatatggccacacagagggcaggacaccgaacaaacagaccagaagacacgcccccgcaaaaaaaaccacgcccgcccgcaaaaagaaaaacccaacaaaaaacaangacatttttctggggggggaccaaccaaaggcaccccccccagaccaccagagcccgcaccaaacccgagcccggacacaacacaccccccccccccgaggaaaaccccaccccaccacgaccaaccacaggcgaaaaaccaaaccacgagcgccggaaaaaccccaaacacaacaacaaaagacaggaaaaacccaaacaccccagccaccccgagaaacaaaccaaaacgcaccaaacaccccacaaaagggaaacaccccacagccccccgaaac

SEQ ID NO: 186735 - DNA, 675 bp, Arabidopsis thaliana
  unsure (1)..(675): unsure at all n locations
accccccgcacgcgccgtatccggtcatggaccgcgtttttcccacgctgagcgggagcgctggtatgagacgaggctgagtgtccgtggcagtcactcgaaccacttccccttcgctcgtgcatcgtttccacggggggacacctatagctgtccaaaccaccgcgacatcaatgaaggtatatgatagccatccaccaccgcgaaaagttctatcattagggggggggcagacaaaggaacgcgaatgggctatgatgcatgacctaaaagatcgcgcacccgtagcagtatagacctacgaccagcctgccgctaaacaagccgacccccgatggacccaaggccgggctccatacacaacaagatgagagagcacagagggcgaaacgtaacgagctcgagaaactcgcacctagaagcacgcaggcaaccgctccgttgatcatgcaatgggtgacgggagcgcgagccgtgcgaaagagtttgctactaccatgagtgaggcctccgcgacctaacaatacgtgcacacacggcagcactagccgcaacgccggttgccgctccgacgacaagcgacacgacccgtgccgttatcgatctacggagcacacccaccaaaccgcatgcacgcacggcaccgacaccangttagcacgtgaaagatagcac

SEQ ID NO: 186736 - DNA, 597 bp, Arabidopsis thaliana
  unsure (1)..(597): unsure at all n locations
caggcacgccggcgtaagctggggacccccagagggggcggccacccttttaggaaaagtgcggccaaaaaagggggagagggggtccacaagatttttctcggcgcacggcagcgaagaacggggagggagcgggccacccaagaccaaaggacaacgagaaggggagagcgcctccaaaacaggaaggagnggggaacagggagagagagccggaaaaaaggccccaagggggggggggggggggccccccgagcggagggaatcgcgcatacaaaccaaggaaaccagggagggacgcgaaccccgggcgggaaaagaaaaaaaaagaggaagcggacgtgagnggcggggggggaagaagacggagagccccaaggggcggccgggggggagaagggggggagacagaaaaagaatcgcagagaagggcggcggggcggcggtgcagagaggaagagaagaggaggggaggggcggcgagcgcggggggcatagagggaacgcaaacgaagcgcgcgaacgcacggcgggcgccgggccgccggccgcggcgggagggcgggcgggaggaacgggaggcagagagcggcgggg

SEQ ID NO: 186737 - DNA, 219 bp, Arabidopsis thaliana
  unsure (1)..(219): unsure at all n locations
cggggcgcctgnggnaccgggccggtttccgnggcgggtcaacnggccgaaaaaacncncnnccaaaaagggcgannagggggncccacaaggcnnnccncgncgcacancnncncattctcttcatttcctctcctactcaagcacgaagcttacgagaaggagnaaggttttcttcgctaggtgttgnggagaagagncaagagagncggaaaaaaa

SEQ ID NO: 186738 - DNA, 528 bp, Arabidopsis thaliana
  unsure (1)..(528): unsure at all n locations
gcaggcacgcgtacgtaagctgggaccctctagagcggcgcggaatccgcgtttgtttgtttggggcaaacaaaaaggaggttataattgaatgcgggctaaaggaagaaaaaccatagggtctacgggctacaattcacagaactgggaagaggccataaatgaagaaacaagccctcccgaagtacaagggtggcanaaccaaaacacactcaggggagaaaaacccgaacaagggcaagagcaaccccacccccggggaggaccccccgggcctctcccctcgcggggggccccccagcgaaaaaggaaagcaaattcaagaggcccaaagcaacaggggcgacccccagggccagcccgggacatacccccccaccagaaccaaacggaaaaagcccaaagggcaggccgcggaaaacaagggagcgggcaaggaaccaaacaggggaaaacccacgggggggggccccaaagtgggaccacggcgcacccggaacccggaacccaacccggggaaaagaggaa

SEQ ID NO: 186739 - DNA, 542 bp, Arabidopsis thaliana
  unsure (1)..(542): unsure at all n locations
caggcacgcgtgcggaagctgggaccctctagagcggccggccaccccgttcaattntttttaatttactttggggggggggaagcggacaaaacccaggaaaaaaacccggggcaaaaagagtgacggaccaccagaaccgggggaaacaaacgacacaccacccaaaaaaggccctcccacaaagaggggcgggcaaaccccccccaaaaaagcccaaaaaacccacaaaacaggggcgaaagcgccccccccgaaagacagaggaaaacaaaggggggcggcgccccccaaaaaccacccaaaaaaaacccccaccgggagaaccgggggggaaaaaaaaaagaaccccgggaaaaggggccaaagcgggccaaaagggggggaaccccccccgaaagaaagaaaaaggccggccaaggccaacaccgggggagaaaccgggagggcgccgggggcgccggaaaaaggccccgaaaaaacccccggggagggggaggcaaaccccaccccccccgaaggaaaaaggggcccccccaaaa

SEQ ID NO: 186740 - DNA, 470 bp, Arabidopsis thaliana
  unsure (1)..(470): unsure at all n locations
gggcgcacgaaagacggcgcagaggggggaanncaaaacccaccnccggagcaaacccncgaagacaccaatctccttacggggggggagaaacccgccgaagagacggcacgggtgaaaaaaatgctttcnncgggnctgtnagaccgnnaagaaagcgggagggggaaaagaaaccccanngcggggggggggggcggcccccctaaagggaaacccacaaagcagagaacaaagcgggggggaagaaaggagacggccaaggccggggaaaacaggaagaaagcaggcggggaagcgcaacgcaaagagaagggggaggccacagggaagaaaaaagcggaggagggaggaagggagaaaaaagagggggggggggaccacaggggggagaagagggaaagcaaggggggaggcgcaggcgggggagagagggcgcaaagcagaaagaaagggggcggaaaagggag

SEQ ID NO: 186741 - DNA, 493 bp, Arabidopsis thaliana
  unsure (1)..(493): unsure at all n locations
gccacgcgggcggaannanggggggaggcancnncncaaaaannnggggagggaaaaaaacccacaccccaagagcgcgcagttattcggtgtcgggtctggcggcgtagaggggagggnnctggctgcacaattgggntgtngggncggcngncnggggtgaaaaaaggcaaaaaacccgtgagggggggggcggggacacccaggaaaagacaggggggggagcccaaaagggcaaaggggggggaaaaaaggggcggccaaacgaaacaaaacaccccgccgaacggggggcgggggagccccggccggccgaaggggggcagcacccacagaaacgcccgagagcgagcggggggggggggcagggaaaaaacgcggaccccagaggaggaaggagggaggggggagagaaagggcaaacccacagtcgcggggggggggcgggggaagagctgggaggaggggggggagggacgcgcggggggcagag

SEQ ID NO: 186742 - DNA, 571 bp, Arabidopsis thaliana
  unsure (1)..(571): unsure at all n locations
cgccgccggcaggnnccgggccgcctaccgaggggggtgagcgggccgaaaaaaaanncagagacagagggggggccaagaaaacaagcggaaagagaacccagaaaaagaaaacactccaggcaagaaacacaggagcgcgacaggccgggggcgggaagggacagacgcccccttataattagggatgttgggccacacgaaaggggggtcggggaaaaaaaaacccccccncgagggggggggggcgcccccccccaagaaaggcaaacgaacgacaagggggcgaaggggaccggcagaggaaacggcaagaagagaggaacggcgcgagccgcgccaaagagacgcgggagagcgaggaacccaccagacggcccaacgccccgagcgcccagcgcagggcgaacgagcgccgagacggaacagccgcgcaccacggacacgcggcacgccacagacgagagcggaaaaggagggaaggaggcgagccgcggagagggagcggcgggggaaaggcggagaggccggcaacgcgggggggcaggcgcccgcgcgaggcgcgaggagg

SEQ ID NO: 186743 - DNA, 478 bp, Arabidopsis thaliana
  unsure (1)..(478): unsure at all n locations
ccggccgccggcggnaccgggcccctttcgagggggggaggggnccgacaaannncggagaanagggggcccannaaaccgagggggagaacccacagagagaagcagtttgagaggcccccacgagcgcggccaaagcgccaangaaaggaacgaggcccgctccgttcttggaaagaaagagcaacaaaaaggagggggaggaaaaaacccccnccaaggggggggggggcccccccctgaagggggccgnggggaaggcggaggagaggagaaagacaaacacgagggagaagaaagggggacgacccaagcgaaaggggggacaacaaaagaggaagggaaaagagagaaggccgccgggcgacgaaggggaaaagcgagagagggagcggcgaggggaggaggagaggagagggaaagagagaggggggccccacacgagagggaggagaagggcggaagaaaacaggaagaa

SEQ ID NO: 186744 - DNA, 231 bp, Arabidopsis thaliana
  unsure (1)..(231): unsure at all n locations
caagcacgcgacgaagctnggaccactagagcgccctccaaggangttgagagccaaaaaaaacacnnnnnaaaacnaaaaagaggccacctanaaacaacaaggggaagaagaaaccacaagaaaaacaaaacaggcaacacccaagaaagaacggcacagaaaaccaccccggcgaacaagactctacacctcctcttcagggggggaggggacccacaaaagcacaaa

SEQ ID NO: 186745 - DNA, 489 bp, Arabidopsis thaliana
  unsure (1)..(489): unsure at all n locations
gccgcctgcngggaccggnccggcttcccaagcagcagccgccgccaccggcgggggggggagaaaacaccccncgggaggagcaacccccccggggagaatagaagaacacgacgggggcgccccccggtaagcagaagggcaaaggcccctctattcgggatganagaaaaaaaggggtctcttggggaaaacccccccggccggggggcgggaccccacagacagggaaacggcagaccagacaagagaggggcgggagaacccgncggaggcggaggggaccaaaagagagggccgcggccaaagcgccggggaagccaggggaagagagcaggccaaagagggcaggcccggggccaagggggggggcaccagggggggccgaggacgggaaaaagcgcgcaaaggggggggggagcccccgaaccaaaaaggggggccgggagaagcggggcccggaggggaacgcgggggaagacgccgaag

SEQ ID NO: 186746 - DNA, 476 bp, Arabidopsis thaliana
tacgactcactttgggaaagctggtcgcctgcagtccggtccgattccggtcgacccacgcgtcgccaccgtcggttggggaaaacaccttcgagaggacaacctctctgggaaaaaaaaaacacactttgttttcttttatgcaattttaaagtttgtaatttgcgttgatatatttagttttttgtgtccatattgctcattgctggaaaaaagaacaagaaatgtaacctaacagcaataacacttaacctgcagcttgaagaataaatgaagctttgtttaacttgaattctattgaaaacatgtcaagatcatctctgcactatatgtgcacttatggcagtcttactgaaaactttaagtggggtgatgctagacatattgttttgaatttgtaccagtttattggtgaacttctctttttactctaggtaattcaaccttacttattaagaccacaaccgaattccagt

SEQ ID NO: 186747 - DNA, 520 bp, Arabidopsis thaliana
  unsure (1)..(520): unsure at all n locations
acgcacgcgtgcgnaagcnggggacccctcagaggggccggccaaacccgtggaacangngggcggcgggggggggggggngacaaaaaaaaaaaaccnnagaaaccaaaaaccaaaagaaacccacccagggaagaagaagggaaagcacgccacccccaaaagaaacgaagccccctccccaccaggcggagagggaacaanagcccccaacacgaaaaaaaaacacccaaagggggggggggggngccagccaaaggagcgggccaccagccagaaagggaaaagaaaagaagccacgcaacaaaaaaaggcggaaaccccggacaaaggagcaaccgaaagaaaaaagagcaccccccagagaaaaaaagagacaacnaggcccacgccccgcgacccccaaaaagcgggaaccacccgcataccggaagacccccgccccaggagaaagcgaaaaagaagaccggcgagaggggccaggggggagaccagaggcccctcgaggcaaaaaacagag

SEQ ID NO: 186748 - DNA, 572 bp, Arabidopsis thaliana
  unsure (1)..(572): unsure at all n locations
gcctgcagggaccggnccggccttccgnnggcnagcgagcccggcgcccacgcggncggggacgcggggggggagaacaaacannnaaagcgncnnacccaaagaggcncgncnncagagagcgcaaaaagagcgagaggcggcncgaagcacccgccacaaaggggnccccctccctgaccggggggagggggagaaaaggaggcgtagaggggaaaaggacccccatcacgggggggaggagggcccccccagggggagcccggggggcngggaaaaccaaaaaccggcggcgagaagccaccagagaagggagggcgggcggggagacaagagccaccgggggggggggggaacgcgccacccggaaacgccgcaggggggaagggaaanaccctcgaagggccgaggtncggggaccacggcagggcgggaggagggaccaggggagaccacaagcgccggaaagcgggggggggaggggggggccccgccgggccccggacaagtcgcagagaaacccagccccgcgagaaggggccaaagggggcggggcccgaacgggaaaaccg

SEQ ID NO: 186749 - DNA, 467 bp, Arabidopsis thaliana
  unsure (1)..(467): unsure at all n locations
aaagaaaaaagacaaggggnnnnannaagaaaaggccaaagaagaggggccaaaagagnacatattaacagaggcaatgagagaaaagaatcattcttgcaaaatgcccaaaggctctcctctactttgagtgaagagcaaancttngcggggttggtccggaaaagaccccgcaccaggagggggggccacccccaaacccaagccaacaccggcaccaaaagaagacccgggtgtgggggggaaccatcccaagggcaccttgcaacaaccaagtgatgcctcccgccaaagaacacccacgaccaaaaaaaagaaactcccatggggaacctccgaagggaggcccgccccacataaccctcccaaaggagagagggagagaagcaaagaagaagaaccacctgggagaccacaaaggcgagacggcgacgctggggggaaaaaaaagcccaaaacggaaaaaa

SEQ ID NO: 186750 - DNA, 576 bp, Arabidopsis thaliana
  unsure (1)..(576): unsure at all n locations
gggcgcctgcagggaccgggccggcttcccgaggaacggagcagccgcngancagaagaagaacagaggagcngangngaaagcanggagaccacancccgggcgacaanagataagggagcaaaacaagggggctagaggaaaaagccacgggtggggaacaggccctcctngccgnggctgtaggggnaaaaaaagggaggggtttccgggagaaaagacccccgccgccccggcgggggggggcccccccccagaaaggcgaacccccaccaaaaaaaggagaaagagaacgcggcggtggcaaccccagcgcgggaaacaaaagccgcccaagccaaggcggggaaaaaaaaaaaaggggaacacccaaggggcgagcaacaaccaaacagggaaagcaccgcaccggagccaacataaatgcccgagccgcggccggagagcgcggcaaaaaaaagacccagagcaaagaagacccggggggagacagggcggaagacgctccgagaggggcgggccgaacccccggagaacaccggcggggagaaggggagaaacaaaaccccaggagag

SEQ ID NO: 186751 - DNA, 438 bp, Arabidopsis thaliana
  unsure (1)..(438): unsure at all n locations
caggcacgcggcgtaagctgggaccctctnagacggccgcccaccccgtttggtttattaaagtttattttgagggggttgttgggaaaaaccaatgcccgaggagggacaccggggcccaaccaccgggaggggcccgggagaaacaaaaggggggaacaaaaaaaaaccccccccaaaaaaagaagcggaaaaaaaaaggcccaccccacaaaaaaagccccccagcgcggggggggcggccccccccagaaggacccgcccagccggggacccggcaaaaaccccgcggggggcgaaaaaaaaaaacagcacacgggggcgggccaaagggggcccagcagggggaggccccacgggcccagaacccaagccacccgggaaaaggccaaagaccccccccccgggggggaccccccacagggggggcggggaaag

SEQ ID NO: 186752 - DNA, 517 bp, Arabidopsis thaliana
  unsure (1)..(517): unsure at all n locations
ggacgcctgcagggaccgggccgctaaccggggcgggcatcacgaccgggacaagaaaaaggaccataacgcgggggccaacgcagacaaacgaagcgaaaaggagaaagcggcgacctcagcaaacgagaagaacagaacgacatggaaaacnaaggaagagacgaaaatcctcccctcgcgggggggagaggacganggaagggaacgccgccggaaaaagaggccagagcgacgaagagacagacgccccaggggagaccggaaaggaaaaaacccgacgagaggccggggggccccacgaagcgggaacaggagggaaagaaagagagggcccagancgaccgaggggcccgaaccaaaaaaacggaggggagaccaccccggaggaggaacagaacgggaggagggcacggacaaaaaagaggggggacagcggaaaagaaagggggcaagaaccacgggccaaaaaagggggaaacgggnaaggaggaagaaaaaggaaaaaaaagggccc

SEQ ID NO: 186753 - DNA, 492 bp, Arabidopsis thaliana
  unsure (1)..(492): unsure at all n locations
caggcacgcgtacgtaagctgggaccctctagagcgggcgacatcancgttcgaccacgcgnncgnccangcgggggggnccncaaaaagaggccaagggggaaaaacaaacagaagcggctccaaggaccgggaaacacacaccgggaaacccaggaggaccccaaagccactcctcgaggaaaaaggggggggnagannaaaggggggcccaaaacaaaaacacgagccgcgaaagagagggcacaccagaaaaaaaacaccccaagccccccaacccccgagaaggggagcnggagccacacagaaaacaccgggggggaaagcccccacccggaaaccgcaagagggaggnnggcacaacncccccaagcccaggaaagagcgagggagggaagnccnnaacccaagggggcaccccggcggccgccaacaaaaggcccggaacgcngcggaacccaaccgaaggaacccacaggggccccccccaaa

SEQ ID NO: 186754 - DNA, 477 bp, Arabidopsis thaliana
  unsure (1)..(477): unsure at all n locations
gaaagaaaaaagagggacaggaggggggaaacttgtgtgaatattaaaaaataaaagaaaacgcaatgacaccgggggtttgcgggcctcgctcttgcttgnagggagggnaaaaaaacggcaaaaaaaaagggaaaaatcccccctacaaggggggagggggaagacacgcagtaaaacggaagggggggttaaccagaaaggaaaacgggagaaaaaaaaaaaaacctaatgatcgccttggggcaggggggacactaaagaaaaggggaaaaaaaaaaagccgcgggaggaactcacaaaaaaaagccctaagaggcggggggaaggagataagaaaggggcccgggtccgaaaaaataagagctaagggagggggagggaggcggggagaaaaaacaatagggggcgggggaaacaacgcgggcgaccaaaaaacaaaggggggggggggaaaaggaaaggcggggaaaagaa

SEQ ID NO: 186755 - DNA, 418 bp, Arabidopsis thaliana
  unsure (1)..(418): unsure at all n locations
gggaaggtgggacccctggcaggacccggcccgaatttccgggttgaacccagccgtccgaccggttgtcagaacgcttcnaaaggggcccaaatggggaggcgaatcttaaaatggggaaacaaagccgcaaagggcttttcccagctgcaacatttatagttttggatccgctcccaatgagcactctggtctcgtccacaaatcgatcattgaagagtaggacaaacgttactctcatctcgcatctaaagaccaccactatggctttaatagaccaagataacgcatggtacattgtgattactcactaatgttctaggatgtaatcatcgatgaatgttccaacatgaagaatgattctgactcccactagacaatccacctgagaccaactaaatatgattcgggaccatat

SEQ ID NO: 186756 - DNA, 358 bp, Arabidopsis thaliana
  unsure (1)..(358): unsure at all n locations
ccccccgnnnngcccgccgacgagccggcggcaacctattttcgngagcgggggggcgagggcgggtgcccgacaacaaacgacccacgcagagaagagtcggggggagttgggacgtgaggagggggagcggcccaggcgaatgtggggggcgagccgcgcaggagggagacaacgtgaatacagtctaggaggggtggggcagcgagaccggaggaggattaatcgctgcgactccccggccccccaatattatattttgggggggggggcgccagcgaccgcgagcgacacgcgaaatatgaaaaagagataccagcagatcggagcgcggcggcgaagtaaacgcgaatagaga

SEQ ID NO: 186757 - DNA, 454 bp, Arabidopsis thaliana
gaaagccggcacgccctgcaggacccggcccgaattcccggtctaccacgcgtccgtctgggagaaaaacacaaaggggggcggctgggagaagactacaaatgggtactttggcaagaggactcctaatgggggaaaaacagagagatatggctagtgccatccctcctgttcgcccatcttagaaagagaaaaccggggcttttttttagggtattgctggcgagggcaaacctccagaagatgaccttatggaactttgatttttaaggtcgtgacctgaaggcaataacatgtgccacctgattgtcaatcgggatagtggactgcatctaataaagatggcctggaaacacgtattttccgatgaatcctgttgaaaagaaaattaaatcatgggttccctgcaccttaaaggtgcagggcaacttgacttggccctgaaatggtatcc

SEQ ID NO: 186758 - DNA, 514 bp, Arabidopsis thaliana
  unsure (1)..(514): unsure at all n locations
gatcctctagatctttcgcgggggggggagggccgttttaaccaatataacgggcgcagcggggtgacttatatgtaagggcagggcgtcattgaaaacctgcacagaaaacggcgttgttgtgagtgggggggacaggaagggggcggaaaatgcacacgacaagagaggtttactaaatggcacgatgggggnggaaaaccaaccccggaggcacaaaaggaggccccccgggagagcggggcggggaccggcgccctaaaaacgcggggaccgcggggaggaggaacgccacaagggggggcgccgaagagaggcacagagcgccgcaaggaaaaacacgggcggggggggggggcgccgggaaagcgcaagcgcgggcgcaggaagggcggcggcaccccacacgaacagaagagcgagggacgcggagagcgcgccaaaaagcgggagaaccacgaaacggaccggcaaanaagagcgggccagacgcgggaggaggacccagggagga

SEQ ID NO: 186759 - DNA, 470 bp, Arabidopsis thaliana
ggcatcgccgcgtacgtaagcttggatcctctagagcggtcgctctttggttttgttctttttaaatatttttaagaaaccagcctatatactcatgagtaagctcaaggattcactcattactggtcgctaaagcgcatctgccaaagttgtcacactaccatttcagaggacggacgggcagggaaacaacccatttttttatgggggggtgacaacaaaccttaggctttgctacagaaaagactttgtaggctacagggcctggcatatcgaaacttccaaggacctggtttgattctcttgtgcaaagacacttggcttgaatgtcctgcgatcccccctagggaaccggggggtggctgccggcttttaagtggtttttttccggttttgcgcaatatcctttataaaaaggggtgcctttcggtaattccgcacgtaaacttattgcattaaatggtaactca

SEQ ID NO: 186760 - DNA, 494 bp, Arabidopsis thaliana
  unsure (1)..(494): unsure at all n locations
gaaggcgggncccccggcaggtcccggcccggaattcccgggtcgacccaggcgtccgtccggatgagacaaaacgacggagggcggacctagaaaccttgatttcactaccaaccctttatgattgctgtgaagactccgaagagttcgcaaaaacttcctatgccttgtgaagtgcctcgatggaagggctaactccggcgactttcttagtggttgtttacgacgaaggaatcctggcgcctgcacgatatatccgtgaacttcaacgcttggtgaatatgacagtaacgaagacgacaatattagctctctcgaagatgacacagcttttttggacgatcactaaacatattcttcaggggacactgtataggacatgttccatggatacaaagatggagcttcctccttctgatccgttgatgcgcgttatttctaaggggctttatagaggttggccgcaaccacagtattgcgggcgacggatgtat

SEQ ID NO: 186761 - DNA, 495 bp, Arabidopsis thaliana
  unsure (1)..(495): unsure at all n locations
cacgcgtacgtaagctgggatcctctagagcgtccgcgcgagggggtagggctttttttttttcttccgaacacttgtttgtgttattaaggggcgtgcgaattaaaccccaaacaaatcaagtaatggggcaataactcaatatgatgtaactgatgactctccctttccaaaaggtggatggaaaaccttcctcatttaggggtggcagggccntngcatgcgacttatttagcttagcctccgccttttccttggccgggacctttcttagcggctagctaagctggaatcctagcaactgcagaagctgtagcttcttctctctttttctaaagaccccctttccgaaggtggaggaatctctctgtggttcttaaaatcttgaagccgggctctctctatagaacactgccaacactagcccctttcctcggcgcacaagcaaccaattccccctggaaaataaagttgataaggggggatgcggggagg

SEQ ID NO: 186762 - DNA, 396 bp, Arabidopsis thaliana
  unsure (1)..(396): unsure at all n locations
aacaaaagggggaggcaaaccccaccgggggggcggggaaaaacaaaaaaaagaataagaggggggcacccggggaaccccgcacccgacgggaggggaggaccaaaacattttttttttggaagttaggaaacaaaccgtcganaaacctccaaaaaaaataccccccttttcttaggcacatgggtttcggcctaaaaaaacgcgctgcaaggctagaaaaaaggggggggttggggcaaagcaaatggcactcccgggggaaaaaacacttggggggaacaaccaaaaaaaacccggcggcgcccccctaaggaagttcctcaccacccgtttgggcggacgcggggagaaacccctcgcttcttgccgacagaaaaaaaaaagaaagccccc

SEQ ID NO: 186763 - DNA, 489 bp, Arabidopsis thaliana
cacgcgtacgtaagctgggatcctctagagcgttcgcccttgctgtagatcctttttaaaattaaaggagaatcaaagaacggccattaggcacacactagctaaagacatcccacaaacgggaccgagagttttagtccacccctacaacggccttcaggacccgggaactccattgcaagaaccgaagttttttttccgagggaggcaacagaccaacaaaggaccaacaaaaccacaaaaaagcacacaagggaaccgaagcccacaccgcggcgagaaaagagccacaacggaagaaggacccacaaagggccacggacgaaccagcggggggcaacaaacccacaccgccaaccggccgaaaaggagaagaccaggggcaaaccagaaaaaaagcagcgaaaagacacgaggggccagaggaaagccgcgaccccgcacggacagcccgggaaacacaggggaaacccagaagaaaaccacaac

SEQ ID NO: 186764 - DNA, 530 bp, Arabidopsis thaliana
  unsure (1)..(530): unsure at all n locations
aaaaaaaaanaccccccccacaggggggagaaaaaaacaaaaaaacacgacacagaggcaaacagaacacgccccggcgaaggaaaatttaccaacagaagccacgacacacaccagcaacacacgaaagacgaggaacaggacgagaaccacgcaccacaaaataaaaagggcaagtaaaggggcnacaaccagggcgagggggggaccgaagaaaaaaaagacccccccccctgagaggggggggggagggaaaaaacaccaaaaaaaaacaacacccgccacacgacccgagggcgagaaaaagagcgaggggggaggaaaaagacacgcagagccaggaacagaaggaaggagagagcgaaggagaagggagaaacaggacgaagcgggcacgacagggcaaagaaacggagccagaagcagagcggcggccgaagaaacaacgacagccagaagaaaaaaagaaaaggaagccaagcagaggggaaaaagaggcacaacagagaaccaaggcgggggcaaggaac

SEQ ID NO: 186765 - DNA, 464 bp, Arabidopsis thaliana
  unsure (1)..(464): unsure at all n locations
cccccgcggaccgggccggaaacccttttcggcgacggggtacgcggacgcgaccgaccagccgccgcccacgcgggcgaacggcngcgagaagacgacagaaggggcccnnagacaaaaccaggggcacgtcngaaaaaagaacgcaccgcnggcaacaaccaccgccacaacgccccggcgccttcctaattacaccgtgggggccaccacggcggcgcgcacaacaaaaggagcggcccaccaaagggacgggaggagacccccaacacgcgggcccaccagccgccaagaagagccggagaaggcgcgggagcccccaaaagcgcccaccggcgggcaacggcacggcggaagccnccaancccacagagaagaagggggggcggaaaagcgacaccgggggagccgacggccagaggccggaggagaacccaggngggccccgagaacaaggaagacca

SEQ ID NO: 186766 - DNA, 483 bp, Arabidopsis thaliana
ggcggccccgccggcaggacccggcccgaaattcccgggtctgacccacgcgtccgataacccgagcttacggttgtttaataatacggagggaaccttctgcgacaagataacacagggagtcggctgcaaaaagaaacagaaaggggattcgatggcttactgtatcatttgcatacacgcctaaaaactagcataggtgttgtttttaggggggagcttgacgggatcggattaaaccaccttgaaagatcagcttgatatagcttgggacgtgtcattgtaaccattcccctgcgtgaggacatgaccaaaaaagatcctcccacttatgttgtataatgtttctaaactgtgtgatgctcatgaccgtacggtgagattgtcaaatggtttaaggagatcccattttctgaaagataatgatttattaacaatgttatctggtcttcctaacaagacgtatactttcccttggttcat

SEQ ID NO: 186767 - DNA, 410 bp, Arabidopsis thaliana
  unsure (1)..(410): unsure at all n locations
aaaaaaanacccaaaggggcggcggacgaaccaaccagaccaaacgagnacaggaaaaaaggggaagcgacggaaaaatgaggaccctgacccaccaggaaagccccacggaaaaaagcggcggggaaacaatcctctttgggagttgcccccaaaaaaaagaaggggccccagaaaagaaaccgcgaaaccgggcgaggggccaaccccgggaccaccccggagggggaacacggggggccacggcccccccccgagcgaacccccgggggaacccaggccgggcaacccggcaccccgcaaaaacacccgaccggccccaggccccccccaccccaaaaagagcaccgacagaagggaaggggcccccaacaagcgcgaacagaacacaaaaacgggggaggcggcca

SEQ ID NO: 186768 - DNA, 458 bp, Arabidopsis thaliana
  unsure (1)..(458): unsure at all n locations
ccccgcagggaccgggccggaagncccggttcnaccgaggggtggaggcggcagcaaaaananacacaaggggacgagagagagcaacgaacagcgaagggganancgggcncgcggccacccccacgccctcttttatctcttacctacatcctccgaagagcattacatataacaagaaaaaccatctctcttttggacgatggggaacaaccggagaaaggcgaaaaaagaaaaccccccagcccggggagaagaccaaagagggcnaccacggggggaaaaaaccggcccaaccacacccaccccccaaaaaaagcccccaagcggaaacaagcgcacggggcccgccccccgcgcaggggaaacccggcgccgcccgggggccccccaccacaaacaccgcagccaaccaacacacccccccggagaaccccgggccggaaaaccgcccccac

SEQ ID NO: 186769 - DNA, 524 bp, Arabidopsis thaliana
  unsure (1)..(524): unsure at all n locations
gcggagcnggaccactaacgtcgccaggggagagggccnntaaanaanaaacccaaaaagcggggcaaaaagggatatatagaacaaaggcgaatcaaaaccaattatgaacgtggggggaagaaaacggaaacactaatagccccaaagaccggaacaacgaggaagggcgcaccaccactcctcctgggggtagcgggaaagnccccaacgcgganaaacaacgagagaaccacccccaggggcgggaagcagacccaaaccccaccaggaggcgagaagggcccccggagaaggaaaccacacgaccccnggcgccaacaccccccggggaagggccccaccccacagaggaaaaccaacccgccccggcaaggaaaaagagccggaaaaccccgcccaaaaaaaaaaggaccccaaacggcccaaaacaacnnagaagggccggggggggccggaaacccccacacaaaaagaaaccacaaaggggggcggcaacaaacccgaacaccgacgaaggggcc

SEQ ID NO: 186770 - DNA, 466 bp, Arabidopsis thaliana
  unsure (1)..(466): unsure at all n locations
ccgacaggaagaggggaatcgaaaacctggaatcctacgcttcacccaatgggtggctaatcaaggcttaacaggcccaaccttcggtgggaacaaagagggaagcctgcttggagattaggggaatttttcagggatgacaaaaagatttttttttagaggtttttatacgggncaaacaaaaacacttaatgggagttcttagatctaaacctttccggttcaagaaaccggaatccaaaggaaaattttcatgcttaaagaaaaactcaaaacctttcgtgataatcgaaccgtgaatgaattcataaaaccttctcattttgagggtttccttttcaaagccctatacgatttttgaacaggacctagctgaaaaaatattaaacaagagcgctttaaaagaaaattttcatacaagtcgcgttacaatccgaatggctaaacttgaaggatgacccctaag

SEQ ID NO: 186771 - DNA, 320 bp, Arabidopsis thaliana
ggcccaagggaaaggccgcagcgaaccacaggcaagcccaacgaggccgagggcacgaacccagcgacagacgacggacaaggaaacggcgcacgaacgcgaggagaacaggagacaaaacccgagcaggccacccagccagcgcgcggcgagagagcggggcgggcgccccgagcagcccagccagaacgattatatttacgtgcgggggcggccgcagaaaggcgcgaggacaacgccgaaccagcagacgagaaagaagggggagccgagaacggaaggggcgagaaacgaggcgaagagcgagcggcgcgggagca

SEQ ID NO: 186772 - DNA, 480 bp, Arabidopsis thaliana
ggtaaggcgggaatcttataaaaatatcgcccccgcggatacgtggggatagcaacaacataggaacagcgcaatcttataccattttagacgggcggggacaccagcggtattattcgcgcatgggaggctagtctggaccagcataattgtaaaccgcgccagacaccgcccccccccttttattattttgggggggggggccaccgccgccccggcagcgccgcgtctattcaatgccacaaccttcatacgccatatcgtggcggcgagtgcccggcctcgctgtgttgccattacgcgactctcactgtgaagcaacgagatgatgtgtgttgatatgagtgagcagctccctacccgtaccagagtcagaaattaactcgccacgagccgacgtagatatagccagcgctcacgcgcagcgccgtgaacatgcgattggtattgtgggcagcgtgtgatcactgtatgcggggc

SEQ ID NO: 186773 - DNA, 422 bp, Arabidopsis thaliana
  unsure (1)..(422): unsure at all n locations
caaaaaaaaacagccgggggagggggacanagaacgaaagaaagaaaggggaacgggaccacggcgccaacaagcgctatgcccaacggagaccccccccaagccagaggcagacaacccccacgcgcgccccantttcttaggggttgggagaccaaacgggggaggcaaccacggaaaaacaccccccgcagggggcggggggagacccccccaaaagggaccgcccccccccccgcagaaaacacccgcggggangcgaaccacccccgcaggaaacccacaaggagaaaaagaccgcaccccacaggaacccaacgggcacgacacccacccacaaagaacaccaagaccgaggaaaacccgacgcacgccaccgcacacaggcaggggaggcccacagaaagacagccccaccacac

SEQ ID NO: 186774 - DNA, 525 bp, Arabidopsis thaliana
  unsure (1)..(525): unsure at all n locations
gaccccctataattttcgcggggggggaaggcgcaataaacaaaaanacgcgcagaaaggcgggaacaataaagaggaacacgcgggggcaggaggaaaaacacggggaagagcagggcttttaaacacagcaaacaccccaccccatcacccgaagaacccgcgcccacccgcgcgggggaattttaatggggggagggcgcnagccccccaggcgccccgggacaaaaaaaaaccccccaccgggggggggggggacgcccccccaaaacaccaaaccccgcggggcgcggcacaaagcgacggggcgcccacaagcgcaagacgaacccaaaccgcggcgcgcaacaaccccaaccggcacccccacgcgcgcggcgcgaaaacgacggacccaccaacggggagcaagggaggagaggggcccaaaacccgggaacgaccgcgcgaaggcgaaacaaaccaccccgacaggaacacgaaccaaaacccccgcaggggcacccccgggaagaaacaaccaca

SEQ ID NO: 186775 - DNA, 163 bp, Arabidopsis thaliana
  unsure (1)..(163): unsure at all n locations
cggaaaaccaattacgagggcgggggaggccagaagaccacaaaagggcaccgccgcgaggggacnacagaagggcacgcgccgngagaacacgacaaaaggcggacggaaagatgttaaggcccgcaacagaccccgcgcgctcccaacacgaaaacaacca

SEQ ID NO: 186776 - DNA, 461 bp, Arabidopsis thaliana
ccggggactaaccacgccgcccggacagcaaggaaaacaacgaacaaaggggaaagggtcagcaagtggcgggaaacaaacacaaaccgagggcaaggcaaaaaccccaaaggaccgcaaagggcgaccaagaagcaagcacaccgaccggcaaccacccccagcctttatggcggggggcccccggggaaaagcgccccacaccacgaccaaaggaacaaagaagccggaacacgggggggccaaccagggccgcccacgcaaccaacgcccagacaagagcgcacaccagcctcaccagccgacgcccggacgaccaaccgccggcccaccaaaacaaaacgggccccaaggaccacaggcggccagcccgcccccccgcgcaaaacacccacgaggacagggcagggccaaccgaacacacgcacccgaacgcccacccgcaaacgacgcccccaccc

SEQ ID NO: 186777 - DNA, 490 bp, Arabidopsis thaliana
  unsure (1)..(490): unsure at all n locations
cacgcgtacgtaagctnggatcctctagagcgtccgccccagggggaagtcctattattatttatttcaaacatccaatgaattctaatcaccacgctccaatataaaaagaatacaaactttcaaataaaacctaaattttcaatggacaatgttaatcccaaacacatcaaggggagcgaaagaaacaatcctccttgggagctgtgggncngggcaggcggcccactgggaaaaagcccaccccgaggaacaaaaaagaccccctcatgatgggancactacccccagatagagcgatgcacaaaaaaacccaaatgatatcattccccagatgacaccccagccacaaccggtacagaaaggacagatctctgcaaacttctaaacatccttgaatggacccttcgaaatacaaacctcatagagatcggaacctggaaataagcctttctccaccccaataaccagaaggcctaaccgggaattt

SEQ ID NO: 186778 - DNA, 343 bp, Arabidopsis thaliana
  unsure (1)..(343): unsure at all n locations
acagaagggagccggagaggggggcgccaaaccgggaaccccgnggnggggggaaccggaancaaaanacccccctcttcaccancgggaggcnncaccacagncagcccncggcgacggaggacangacgattcctcctangaagaggcannacggcgngggggcacgaagcgaggcaagcccccgcnngcgagcggacagggggagacgcaaggagcggccccaccccaaccacgaggcnncaaacgaaccgaaaagggcagaggggacggaggcgaacgcaaacgaagggggncccaccacaacacgngggggcggcgagggggagagccgaccggcggg

SEQ ID NO: 186779 - DNA, 349 bp, Arabidopsis thaliana
  unsure (1)..(349): unsure at all n locations
aaaaaaaaaanccccggnagggggaaaaaacagaccaccgccaggaacgaaaaacagaaaacacagccctcaaaaaaaaagccaccccccaacacaaccaagaacccaggaaggcggaacccctcaaganagatagggaannnncggggggccccccaaaaaaaaccccccccnnggagggggggggggggcaccccaacaaaccgaagcacccacgacggaaggaagacggaagggaggaggcgggacggagaagagggcgcagccagccaaacggagacggagacggccaaacaacacgacggaacgcggagacacgaaacagccaaagcgaacaaagagaagccga

SEQ ID NO: 186780 - DNA, 354 bp, Arabidopsis thaliana
gccgagggcgggacacccgcaagacaaccgcccccccccgcccccccgcccttaataatttgggggggggcggacacccccccccccccgttacagaaaagacccccctcgcgggggggacgacacaccccaatctatgggcccggcccccccgcatgtaaacacctcggcgcgtgggcagagccggagaggagaacagcaggtgcagcgggggacagaataaatcgagacccctggggcagcaaatacaagtcataaacaacaatggaaacagacatgcctacatcacacgccccgagacagcccgaaaggaacgacgcgagacacggagaaggtagaaagtctagctcgcct

SEQ ID NO: 186781 - DNA, 446 bp, Arabidopsis thaliana
agccgggggacggggctcttcgttctatagacgaagaggggggaggacatttgagtgaagggataggttgacacgaggaagttgaccttgctttttgcgagggatgattgcggaaacatatgacagtatgcgagttgagaaaagggtttcaataatttggggggggggcaaccacaaagccggccgcttttggaggggatgagctcccgccttctggacggtcacggaacacccctattcgatgcacgtcgcgaacccgccgaagggacgggcggagtgcggtggaaaaaacaataaaaggggacgactgagggagctgtccccggccaccgggagaaatggcattgtccaggcaagaggcggttacaggtccacgcggcggacgggtgagagtgatgtgatgataatggggtgtacgcaaccagcgagatgtgagccgagcagga

SEQ ID NO: 186782 - DNA, 417 bp, Arabidopsis thaliana
  unsure (1)..(417): unsure at all n locations
tttttttcgtattgggaccaaagaagcagggatgcacaaggcgttctggagtaaaggtgactgggttcaggggatatagaaagatttgtcgcgctaacgggtaagggataagtgcattgacagggggggaaagcgccttaataattgggagggggaggcaacaagcggggagcgaggggagaggaacccccnacagggggggggggggcgaccccgaggaggggacacccagggacgaacaaaaacggggggggggagaacaaaaggaacccgggggcgggggcggggagccgacgacgcggaggggggaaaggaggaaaagcccccggggccgcgccacagagaggaaagaaaggggcggggggggaagccggcccaaggagacgcgagaggggcaagagaagggcaggaaaggag

SEQ ID NO: 186783 - DNA, 445 bp, Arabidopsis thaliana
ccggaccggaaaaacaattcgagccaggggtaggcgacgcagacgaacggccgccacaacgagaggagggaaaagagggacaacagccaaaagggaagcgcaagacaaggggagcagcattacaaggccacgcgcacacccccagaacgccatcgacagcgaggaacacgccgcaaataatagggggtgggaggaacacccagagcccgacgcacaaaaaaaaccccccaaaggcggggggcggggccacccacaaagcagggcaccccccccgccgagggacagaaaccggagcaccgagaaccgggggcccccggcgccgccagcgcgcggaccgcgccccaccccccgccgcaacaacgcccgcccacggaagcccgcgaagggggaaacgggagcccagacggaccccacccggcgagggacacggggcggcccggaagcc

SEQ ID NO: 186784 - DNA, 476 bp, Arabidopsis thaliana
ttaacaataatccacccacaaggggttgacttacatgattccaataacgtgatataaaaaggcattcccatatcccttttctgccaaaaaaaaaaagaaagggtataaaaaaaatttgacgcgcgaaaagaaagatttaataaatttggatgtgtgggaaaaacgcccggccccctcctatgtaaaaaaaatctcctccttgaacatttttgatggggtcgcctccaattcctaaaaaaaaaacaacttaggaataaccatatcaccgagatatcagaacaggacaaaaaatcataaaggcaacaccttaaaagaaaaatcaaactcctgttgaccttcagaaaatttttactcttctacctcattgactacacttctctaatttcaatgaattttaattaatcaacagccccatacataagccccactaaccctatttatcatttaacctcatctcccaaacaaaaccatttttt

SEQ ID NO: 186785 - DNA, 493 bp, Arabidopsis thaliana
  unsure (1)..(493): unsure at all n locations
cggaacaccaatttcgggggggggggagggcgggacaaaaaggaaagaccagccaccacgggggccacnagggcgagcgaagaggcaacaggagacagaccggcgcgcaggaacaccattgaaagcacaagcagcggaccacggaccagaaagagaccgagggcggccgggggggtaatanacaggcgttggggcccgacgagggggcgacgaggcagaaaaacacccccccaagggggggggggggcaccccccaaaagaaggggccacccaagcaaagcaagagcccgcggccgccacgcagcgagccgccggagagaaaccccgagggcgggccacccccgagccgaaagaaggaacagagccgcacccgacgagccaccgacacacaagaccggcgcccgacacaccccgccccccaccccgggcggcacgccaagcgcgcacccagcggacgcaaccacccaacaacacacgccacgacaaaccaccc

SEQ ID NO: 186786 - DNA, 394 bp, Arabidopsis thaliana
gaagacgacggaaagggacgccacacacaacgcacaagacagaaacaccccggccacgccggcaaccggcacgccgacacagacaccgaccaaacacagcacaacaccccgacggaccccctttttaaatggggtgggggggaaaaccggcaacgaaaacaacgaaaaacccccccccacaagggaggagggccaccaccccccaacggacccccccccacaccaccaccacaagaggcaaagcgagacaccaaagaaacacgaaccacagccgccccacacgccgcacaaagagagcaacccgcccagccaggaacggcagcaaaacccggcagcgacgcacacgaccaacaaccgcggggaccagcaccgaccaacaaaacgcccggaaaga

SEQ ID NO: 186787 - DNA, 371 bp, Arabidopsis thaliana
  unsure (1)..(371): unsure at all n locations
gaacctgcttatcactactattggaagctgtcgcctgcggaccgtccgattccggtgacaccgtcgccacctcgacgtggaacacaaggctaatttcttgaatatccatgcgacgtgttatgtcgtaataccacatctagtccatactgttcgtggaacgaaatacatgtcactatgtctagaagagcaaagtcttcttcttgtacatcatctcaagcagtgaccagaagcagtccattgtactttaagatcacangagctgaactgcatgctctaacggagctgcattgcgatcttcgtgtagtataactctgctgtaactatagctacaccagagcctccactcactccgacattcggtaatgggtttc

SEQ ID NO: 186788 - DNA, 518 bp, Arabidopsis thaliana
gaaacccacgcgcacagaggccatggatccaactagagcggcacgcccttagtggatgacccatattcaagatctaaaaagcctgaccgcgaacacatcgggaagctcaatggtgtactgcggatctctaccacacaacgggcgagctcaattatgctttggataatgaaactcaagtccccatgggctgcgaatcctctgttttatctctgcggtgatacgaggagaggtgttggctcatccataaatgacacccctaaacttgaggaattatccaattctctcttatagcaagataacatacgcgctggcaacttggaatacgggatccttcacccgggtgtaacaaacgggcatctccagacctctcaccgaggacaacaccaccctatccatccccggtctatccaagccctaccgaatccccttgtgtcatcaagaaaccccccccccatgagacatgactctccataccatgctcgctaagcccctaacatctacttgcgaccggcttccat

SEQ ID NO: 186789 - DNA, 325 bp, Arabidopsis thaliana
caaaccccccccgggggacaaaacacagaaaaagcagaacaaccgggaacactaagagaaaagcgaccgaccagaaaaagacaggcacgcccctttagggggaggaacacaggggggcccggaaaagcccccaggggggggggggaccacccaaagggcccccaacgcaaaaaaagcgggcggggcacccagaagcggagagacgggagggggcaagacaggaggcgagaaggggcgagaagaacacaaaaaagcggacgcgaaccgcggagcacgccaaggaaccgcacagaaggagcggccggggaaagaaagagggaggcgg

SEQ ID NO: 186790 - DNA, 526 bp, Arabidopsis thaliana
ccggcaggacccggcccggaatccccgggccgaccaaggcggccgaccggcggaaagaaacaacagaaccgggaccccaaacccgagaacgcggagaaacaagaacccggcaaaagccacccgggaccgaacccagggccgaaagaggcctgaccacacagaaaaaaggggcaccgggaaccagagccaagaccagcggccacttttattcgagcggggggaccaaaagcacccgccggaaaaaaaaaaccgaggggccacccaagagcccagcccattaggcgcggggggccgcccctcccacccaaacaaagggacagaacccgagagaacacacggaggaagcaaagcggcgaagacccaggcggtggaagaaccgagcgagaagcaccagaacgcaacgaaaaagaaaacaaaggcccaacacaccggcgccccggcactcgaaaagacaaccggccgggggccacaaaggcaaggctgaaacagcgccgcgaaagccaaaaaaacaagggaaccccgcaag

SEQ ID NO: 186791 - DNA, 496 bp, Arabidopsis thaliana
  unsure (1)..(496): unsure at all n locations
cgtaagctgggatcctctagagcggttgccccaggcgggagggtcttttttataatacgggattaatcacttcggctcaatcctttatttcttccctaatcataggtgctctctagtgaataagtaaagaaaatggctcaccctccctctgccaatcttcctgcttcccctctaagaacggggtttcttcctgggggggggaaaaaanaaagggggatcctaaggcaggaaaaccaaaggggncattcatcaaccaagcttctatttcaacaccaccatcggtctcctcctccgctgggttctccgacggggaggccccttctttaaaaattctcactccccaggagcttttcatatagcttcacggctggatcccctatctcattgaagttaaagcttccatctggactaggcatggaactggacgcccccccaaatcacccttgactagcttttggcgcgaccaggctcttcagaggagaaaaaggtttggccc

SEQ ID NO: 186792 - DNA, 350 bp, Arabidopsis thaliana
  unsure (1)..(350): unsure at all n locations
acgcccgcggaccggccggaancccggctctacgggcgctgagcgngcgagagacacagaagggacggggcgaaaacacagaagggacggcnggagaagacgacaagggaaaaggcgctannacagccagagnnaaccacagnngcccggcccgagaacgncaaagcttctccggggggagaangacacccggagacaaaaccnaaccacnccccagagcacngggcgggcaagagccagncaagggngaannnggagggacgaacaggnccaggccnaggccaganggaaaccngaaccacaaagaganaggggaancagccgggaagccanaagaaaagcccacgggg

SEQ ID NO: 186793 - DNA, 503 bp, Arabidopsis thaliana
  unsure (1)..(503): unsure at all n locations
agcnggganncnntagagcttttcggggggggggaaggcggnanaaaacancngnagcggaagagaagggaccaaaaacnnnggagaaaggcggacacaacgccgccgggagcaagcggcgcccaattcataagcgttatagaggcgtctgcagggccaagcattatgagggccaccccccgactttaaatcattcgggagtggggggacacggggggggaagccccgcgggggaagagngcccaaccgaggcgggggagagggggagcgcaccctacggaagggaggaggaacaaaaaaggccccagggggagccggacaaaaacggggggggaacgagacgcgggcgcagaaaggcgggggggggggaggcgagcagaaccgggggggggggccccacccacccgggaggacccggaaagggacagaaagggacgcgggaggaaagcgcagcgcgacagcggagaaaacagaaagggggggacggaagaccgcgcgaaaag

SEQ ID NO: 186794 - DNA, 441 bp, Arabidopsis thaliana
  unsure (1)..(441): unsure at all n locations
ccccccagnaccggccggaacccgttcgccccggaagcgccaaaacacaaacgccaggcgagggacagaacccgaagccggcaacaccggaagcgaagagacggcgagcaagaatgaaagggccgagaagggcccagcccgaggaaaagaacccccaaccccaaataccgggggagaggagcccggggcgcaccacacaaaaaagccccagaaagggggggggggcccccaaaagagagggaaggagggccccaacaacccacgacggggaaacaaacagaccaagagacagaacccaagggaagcgacgcccccccaacgggccacaacggggggccggaaccaacaccaggcaagcgcggcacacacccccggcnggcggaaaacagcagcgccccgcagagaccagccgaccccaaagagaggccccaagacgccccc

SEQ ID NO: 186795 - DNA, 527 bp, Arabidopsis thaliana
gacgtggcttgcacgcttccgtaagctgggatcctttagagcggccgcccttttttttttttttttttttttttttttttttttttttttttttttttttttttttttttttttttttttttttttttaaaaaaaaaaacccctttatttttttggccccattaatttgtttttgttacaaacaatacaagggtttttttattttttttattcgaaaggttttttggtccaaattttaaaggggggaaagaaatcttttttttccgtttaagttttagttttttttttttttgctgggggtttgattggaagttcctaaaacttttttttcccagttttgaaaatttttttcacaaaaagctggggggggcctttaaaaaaatacttatggccaaatttttatgggttggactccttaatttttaggaaaggggggttcggtcataaactccaaggaatgtttgccaaatttttttgatttgggaaaaatttttgggggaagcgtttccaaattccaacgatgaagt

SEQ ID NO: 186796 - DNA, 472 bp, Arabidopsis thaliana
  unsure (1)..(472): unsure at all n locations
ccgggccggaaacccggttcgccgcgggggacgcggatataagaganggcccgccccaacgggggggaagagccccgcccccccaaaaaggnacgnagaggaggcaaaggcggcaagttctactgtgagctatttctctcgaaatggacatcgacagcccccgcggcagcggataactcntctggaagtgggcccaagcacagcacggaccgagggaaaaaaggcccaccacggggggggggagccacccacccnacaggaaagcaccacccacagacaggaaagaggaggacgcgaggaccaacccggcggaccccggccccaaaaaggacaggccaccgagggacggaaggaccagccgccgccgcccgaaacgaccacccgcccaggcgcgggaaaccggcaacgcgccggagggaaaccacgcgcggcccggaggcaaacgccaaaccacacacgggacgacggcccc

SEQ ID NO: 186797 - DNA, 495 bp, Arabidopsis thaliana
  unsure (1)..(495): unsure at all n locations
aggggaagagaaaaactcctcgggggggggggaggcgcnaaaaaaaaaaaccaaacaaaggggggcacccagccgcgcggaaaaaacagcccggacagggccggggcgcccaccacaaacacagacccgcggacgcagccgaagagggaccgccgggcgaggaggagagcgacgagcggcggggctccctcaaaggaaagtaggggcaggccnacaagggggcgaccgaccgggaaaaggcccccccccggcgggggggggggggagggagacacacaacagaaaggcgaggcaactgcggagaaggaggaacgggagcggcgaagacgacacacgcagaagaggaaccagagagccggcccccgcggcacggagcgcgcggcagaaggacgacggcaacgggaaagggcgggggaggcggacaaaaacaagcgagcgaagcgcgcaagcggagagagagacgcacgcngagccaagcgcgacgccaccgcgagc

SEQ ID NO: 186798 - DNA, 554 bp, Arabidopsis thaliana
  unsure (1)..(554): unsure at all n locations
caaaaaaaaaaaaaaccanccgcnanagggggggaanaaagaacagaaaaccacaacaacaccccacgcagaacacacgcgcacacggcgccaccaaagttaacagaggagcngagagacagagacacgacgagcccccggaggagagggggagcaacaacgaaaaacccctccaacagagaagaaaggggacacacccacggggggggcccccgccccaaaaaaaaagccccccccccanacgggcggaggggggggggagcacaccccaaacaaaaacgaacccccgcgcgcggcgagaaaaaagaggagaagcggagggccgccacgcagaggcaagaaaaagaaggcgacgagaaacacgaagaacggagaagaagcgcgaaaccaagaaagaaacgagagagagagcgagcgaggggggacgcagcacagcccgacaggcacgcgaggcggaacacgcccggccgcccgaggaccgcccggcgacacaaaccacaggacaagaaacgaacgaccaaagaagaaagggcaggcagaaagcaacacaccgg

SEQ ID NO: 186799 - DNA, 487 bp, Arabidopsis thaliana
ccctcctaacctggatctctagagcggccgccctttgggtttttttttttttaattatttttttttttttttttttttatttttttatttttttttttttttggggggaaaataaaagggaattgtttttttttcctgttttttggtacgtagtggaggcggggaaccaaaaaggaaaaaaaaaaacctttcccaaaggggtgcccaaaaaagcgattcgacaacgaaaaaaaaaaaaaaaactgcttaggaaaaggctcccgcggaaaaacctttttttaaaaaaatggtaatcccaccttgttaaggacaaaaccaaaacccggatcattcaaagggggccacggaaaggcactttaaaagggggggcacattttcgttagctaaatcacaacggtgtaggagaaacccacaaaaaatcccaggacgaatttcgcccgggggttgcccctgcgggaaaccaccttctaaacgaacttcattttgt

SEQ ID NO: 186800 - DNA, 322 bp, Arabidopsis thaliana
  unsure (1)..(322): unsure at all n locations
gtcacaagaaaagatatttggagaatgctgggcaaactcgctcaggacgcgtagatgcgggtaacatattctaagcaaaaaacacccgccttaaacggttcaaaaaaaaacactttctgtggccaaaagaagtgatgtcgaagagcagaggctttaatanattagggggggggggcaagnaggcgcaaacacgtaaccaatacttacacgaaagaatcccgcaaacaagatggcgggtcgcgcgaggaggacggctccctgttggtgtgagctcagcaaacaggtcagcacgcacacacacgccaaggacaacatgccaccg

SEQ ID NO: 186801 - DNA, 383 bp, Arabidopsis thaliana
  unsure (1)..(383): unsure at all n locations
atgaaatattgggcattctcggggaattacggatctcgtcattaaatcttcctgatagcacggttttccattttctggttgaaaaaacccaatcttcgccggtcattcccgagccacgcgcgcttatatattcggnggtggcgcccgcccgagggagaggccgggaggagggacccccaggacgggggggggaggaaagccccctcttgcgtgtcgccccacctccgttccgggcggggacaagggatgctgtgctgacgaacgatccactccccatggagggaagcctcgcgagggcccaccgcgttgcccgcccggccggaggggggggtccaacggccacccactcaccgcggcgcgccctgatcccggaccgctcaacc

SEQ ID NO: 186802 - DNA, 476 bp, Arabidopsis thaliana
  unsure (1)..(476): unsure at all n locations
aaccggaccggaaaccattttcgggcagggtaagcgtgcgcccgggcggacgcgcggggaaaagggaagaaaagagcggganacccngccaaacgccggcaaggcccaggaaacggcacatacagccaacggccacgaacccggaaaccgggaccccccgcgcccagccccccctattatttgancgtgagcaccancccgaggcaacaagagagcagaaccccccccccaggggcgggggggacccaccccccaagggaccccccgcccaccaaagggggccaaacccggcggacagcccgaacaccccccaccccccgccgcacccccccccaaccaccacccaacggccccgcagcaggagcaaccgcaccacccgccacacccaccccacccccaccccccccccccgccacccccgccacccccccccccacccaccccaccccaaccacacccaccccccccaccccccc

SEQ ID NO: 186803 - DNA, 160 bp, Arabidopsis thaliana
  unsure (1)..(160): unsure at all n locations
ggggggggaaaggcgggtttttgnggtaactggtggctatcaggggggcataatgggggaaccaaccacatgtcggatcaatataaaggcgaggaggtgaattttatgtcacgctgccagtggaggggggacaaaggtgccggagatgacaggggcagaa

SEQ ID NO: 186804 - DNA, 522 bp, Arabidopsis thaliana
  unsure (1)..(522): unsure at all n locations
ccgcagggaccgggccggaaaaccatttccgggggggagcaggcggggagcccagaacngagcgcgaaaaggggggaagacgaggaagagccaaccacaaagaccagcaacaccacacacggacgccgctaaaggagcccccgacaacgggaaaacacagagaacaacggaggacgcaccccaagcacgcgttatanattgaggagacngggaccagccagcggggggaaaaggagggaaaaagacccgccccaggagccgggggggagggggagcaccccacgccccggagacccggaccgaaacaaaaaaaggggacggggggcagcaacagcgcggcacgcgccgcagccagacgagagagacgccagcacccgagggacaaagaaaagaggagggcgacagacacacgacccacagcgaaaagaacagaccccgagaagagaaaacggcggcacacgaccaagaacacagcgacgaccaccaaaacacccgacggccgacgacaacacacccccccgg

SEQ ID NO: 186805 - DNA, 448 bp, Arabidopsis thaliana
  unsure (1)..(448): unsure at all n locations
ccggggcggaanacccctttcgggggcgggggaaagcgganggaaaaaaaaaacacccaacgggggggnaacgcccggacgggacccacgaggaacgggacccaaaccagcgagaaggcgcaagncgcccacaagagaacaaacccacaccnnaccgaaaaacgaacaacaacaccccttcaaaaaagcaggggcaacccacccccagcccgccaccagaagagaccccccaaaggggggggagggagaaccacacccgaaaacgaccccccgcgagacccaaagcaaagagcagggggaggggggaaaaaaaaccacaggcgccgccccgaaagaaccccggggaagaaacagaggacaaccgaaccaccgcccgcggcggaccaaaaaaggccggcacccgcaaccacaacgccccgccacgcaccgacccccgaacccccgcggg

SEQ ID NO: 186806 - DNA, 465 bp, Arabidopsis thaliana
  unsure (1)..(465): unsure at all n locations
ctctagagcgtgtcgccgggggggaagggcgnacaccaccaaaccaaacaggggagcggggagaaacggacggggaanaggacaagaacccacggagcgggagaaagagacccaaaagagccnccgggcccacagaaaaagacacaagcgggggagccaaaagagggctttttctttgggagaacggacagacacccnncncnnccccgaagacagaagccggggggaacggcgaacaagacccccccaccaccccaancacagcccggggggggcacgggccgagaaggggacagggcaagaggacccaaggcggggccaggcagaaggaaggcggagagggcccgagccgcgcgccccggcggggggcggcccggcgggaagaacccgcaaaggggcgggccggcgaccgcaggggaggaggagcccccaagccccgggaccccagcggcgcacacacagaaa

SEQ ID NO: 186807 - DNA, 416 bp, Arabidopsis thaliana
  unsure (1)..(416): unsure at all n locations
cgagcgggaccacaacgtcgccagggaaggccanaaaaaaaaaacccanagaggaacccaaagccataanacaggccacaagcgcagaggaccacaagccccggcccacaaaggcgaaggcaaccccccaaccacaagaaaaaccctcttgggcgcggagaaacaagagacccccccccaaagaaaaccccaaaccaacgggagaaaaacgaggccccacccaccncaaaacccgaaaaacccccaaccgaagcgaaaccccaacccggaaaccccgggcccgacccggacccaaagccccacaccgccccgcgccccggaccccaaccacaccggggaagaaggcgccgagcaaaaaaccccaaggcccccgncccccaaccggggaacccccggggggacaagaacccaacccc

SEQ ID NO: 186808 - DNA, 463 bp, Arabidopsis thaliana
  unsure (1)..(463): unsure at all n locations
aacccccgcacggagaaggccggagcccccaaaacaaaaaaccgagaacgcaccacggaagcgcgagcgaacagggaaccgacccacccacacacgcccataagggacacacgcaacaagancacacgccaagcaccgcgccacaacacgaacaacaaaccacacgcagacaacaccaccgagcgcacgcagccgaggaacgggagccccactatttttttagcggcggcggggaacccacacacaccaccccccgacagcccgccccacaagaaagagaacgcacacacacacggaccacgcacgacgacccccgcgcgaggccacgcaacagcacccacacgcagacgcagacgcacagagacgcaacagacaagaccagaaaccacaacacagagagatactcaagacaccctccacagcgccacacacgcaaaccacaccgacacccacgagagcccgc

SEQ ID NO: 186809 - DNA, 513 bp, Arabidopsis thaliana
tcggggcatcgccgcgtacgtaagcttggatcctttagagcggtcgccctttttgttttttttttttatagaatatagttattggataccgaaattgaacaatttacaaaaaggcgcgacccacccaaggattggcccacgtttttttatacaatgatgttgactttccaaagcgttttaagagcggcttgtgagggaattcatttttcttgggggtgtggacatcctcgggaagagacggtagaaacttgactcaatgtacaggaaaaactctttttttggttagagtttaaacatgggcaggctttgataggcaaggtctgtttcactttgacacttcactttaaataaaggattgttcacggaataccccccgcttctaaacccgatgcgaaaattttagcgggggcggggatattcggttcacccgggggactaatccggaggaagggggaaaactggatggggtaaaccttgtgagagagctgcttttttttaaaaaatttgggaaaa

SEQ ID NO: 186810 - DNA, 525 bp, Arabidopsis thaliana
  unsure (1)..(525): unsure at all n locations
cgcctgggggnacgggnnggggattgtttttngagcggggggggggggcgcgtacaaaaacgcgcgggcgaagaaggacgagctcgcgataatggagtatgaggtggaggagggagtcggggggaggatgcggcagtggagacgggagcagccagccctcagactaacgaagcggggcgtcccgcgcgagcgccatttatttattggggcgtggggacacgaacccccgtccaccccgacctcacaacgccaccccccaatctagccgacctaatgtctccctctctcattgcggtgcgcgcgagcttgcgggggaggatggccgcgggagcggtgtagcaaagtctgaggccggcgcctatgggcgtcccgcgtcaggtaacccctctcacggtgcgtcggcgaggggtgtgagacaaacacccacccaactctacacacgccaccccccaaacacaacggcccgacccaccataaacacccgcggtatgggcgtcccgcgggaaacagacgaggtacgggcgc

SEQ ID NO: 186811 - DNA, 512 bp, Arabidopsis thaliana
  unsure (1)..(512): unsure at all n locations
agctnggancctatagatttttcgccttggggagggggttaaaaaaataaggttgttgactgagtgttagacattacaaaggctctgggttttggttttatatggcgattaatagataaacactattagaggatataaggcgtaagttagctaaggagaagttaaggcgtgccgaaacgagacacccacataataatttgggcgttggggaagagagacaaaaggacccgagagagagagaacacccgaganaggggggggcggggcgagaaccacgagaacacggggggcaacacgcggcnacgggcgccgggggggggggcgcacgggcgaccgaaggcaggcgaaacagaggacggaggggggaacgaggggcggggagaagaacggggggaggggagaaaacgggcggaagcgggaggcagggacgaggacagacagcgacggccggggaggcggcgggggggaacgaagaggggacgcagcgcgggggcgagcggggaggaagcggg

SEQ ID NO: 186812 - DNA, 495 bp, Arabidopsis thaliana
cggcaggacccgggcccggatttcccgggtttaccaacccgtccgggaaacggccaacaaagaaggctaagcgacgactagccactttggagcgtcagcgtctggtgatgggcaacaaaggcggtttttttcccttggtttctccaaagggcgatacacgttaggctgtaccaaccggcgcaatagcacgtttcttgtttcgcgcggtgtggggggtaagaaggaggaggtcattatacttaacaaccccccgcggccttaaatcctttttggcaatttaaaccatttgggcttttaaagacttaccaagatttaataaaagcggaaccacccatgccctccaacaaccggccgggtcgaagttgtgaccgacttacaatcaatttgaacgcggtttacctatcccctctgcaaaataccaggcaaataactaaaggaaatgaatttagacgagcttttccccaacgtcatttggaaccaacgccttagtgatca

SEQ ID NO: 186813 - DNA, 416 bp, Arabidopsis thaliana
accgccgcagaccggcccgattccgggcaccacgcgtcgttttgctaatagaagctcttcattgccgaacacacacaaccctctctgaatctatggacccgcgaaacaccacttcttcttttcttcggaggagcttctctcgatcgccctttagcccacacttctccaatacagtcccccacttctcatcgtaggcgactccgaagagagccgaccgatcaggagaccgctgggaaagccgttctcacgtagggttcaaggaatttattgatcccttacaaaagaccccgataggtttaaccccaaaagagcccgtgtgttggactttcctttaaaaaagaaataatggagattaccttttcttctaacaaaaagatctcccaatcgaaatactactttctgaaaaactcattccc

SEQ ID NO: 186814 - DNA, 438 bp, Arabidopsis thaliana
  unsure (1)..(438): unsure at all n locations
cccccgcaggaccggccggaancccattcgggggaggggtacgcgggnaaagnacaaacccggncccggggaacggacgagcgccccacaccgggccccaaacggcggaacgggctaccagacagacaaggaccgcggagaggcggagggggggcccaaccagagaacctatacggagctagggccaaccaacaccgaaagggggagaaaaccaccccaaaagcggcgccaccggaccaacaaacacggaggccgccaagaagggacaagaggggcgaagccagggaagacccggcccaggccgaaggaggcgcgacaagaacagcccaaggggagagaacaggaaacgcggcagacagcgaacaccaccgcgcccgggaaaaacaaaagcacacacccaaaaagacacgacggagaaacagccggagagggaaaaaa

SEQ ID NO: 186815 - DNA, 470 bp, Arabidopsis thaliana
  unsure (1)..(470): unsure at all n locations
cacgcgtacgtaagcttggatcctctagagcgtgccgcccgagggggaaggcgcaattatttaatataaagccttgtttgggggaagttaccggattcacccactcggggctgagagggaccgcgaacacggggcgggggtttgtacgagagcgggagcgaagaggggcgaggaacaaaacaggaggggcacaagaggagcggctcccctcaatgtgggacgcagggagcaaaaaccgggcgaagcgccccaccccgagagaaaaacccccgggaaggggggggaggggggggcacccccgggcggacaacacaaaaacacancccccaccgcggggganggcccccgacacacacacgaaaagagcagcacagaacccgaaagaagaaggacagccacgcagggcggccgcgcgaacagagaggcgcgaagggcacgaacagaaccggcccgaaaggagaaggggcgcc

SEQ ID NO: 186816 - DNA, 484 bp, Arabidopsis thaliana
  unsure (1)..(484): unsure at all n locations
gcccgcaggnaccgggccggaanncccgtttcgacccaggcgaacgcgcnaactctctatnctctggctttctctgcgtgcaggtaccggattcctccactccggctagatctccccgttcaccgccgatgacagaacgaatcagagcaagaggacccagatcatcctctggtaactctgggcctctcatcnntgggtgtaggaccncaagggggaggccccattagaagcacgacccgggaaccgggggaacgaccnccggccggctttcctagacgaagaagcagattctggggatggccatgggaacattgctggaattgatggtttgacaaatgggcatttacgcggacaggctgctcctttggcctctgctcctttttatccctgagaagaagggcctttgcgtctgtgcaaagatgcttgcagggagttagttgatccttggaaagcaggttgatgggaggctcagtccactaaagag

SEQ ID NO: 186817 - DNA, 202 bp, Arabidopsis thaliana
  unsure (1)..(202): unsure at all n locations
gccngcaggtaccgggccggaaatcccgggtctanccacgcgtgccggactacgagaacaatagactattgcgataagggccctgtaaccagatatccttccagcatataacccttagaagcaagttccgccaaggacctggtgccacaatgaagacggatagggatggacccggcggtatcaagacattttcgctcaaagg

SEQ ID NO: 186818 - DNA, 436 bp, Arabidopsis thaliana
gcgtacgtagctggatcctctagagcggcgcctacggtagggccttttttttttttggttttttcggcaccctaaagacttgatatttccacaaaaaccctcggaagcagttgaagaaaaaagaagaggcctgggaaacaaactcagggaggggcgcgtccctcctgggggggggaacaaaaaagccaactatgaaaaaaccccacaaagacgggaggggggctaagaccaaaatacgggtatggccatgcaatctttcaaaaacaggggcggaggggaaaaggttaaccctacccccgtggggtgaccgaagcggcaaccggaaaaaaaaaaagggaggagacacccaaaggaaaacgcaagccaaccgacaaacgggcggccacccgatctaacaaagacggggacccgtaaagccggaatgtcaggggcgggg

SEQ ID NO: 186819 - DNA, 412 bp, Arabidopsis thaliana
caaccagccgcggagcggcgagagccgcccgacataagatcggcaaactgcctaactcccgcgtccggcggcacaaaacccacgactcacccaattgcggcgtggagggggtccgccgggcggggcgcaagtttttttttgcgggggggcggccgaacgaccccacctccccatacaaaagacactcgtccgcgtcatggcgcacggacaacgcggataatatgatgtatcgaacaggcaaaagaagaaagaggaggcagacgctaaagtatcgcaagaagaacagccgtctaaatgattccaaagaacggaaggagcatagcgcgggcgcaagcagggtggaagggcttaagacgcagggagggcgcagggcagggagagagtggagcggacgagaagagatacagtccta

SEQ ID NO: 186820 - DNA, 352 bp, Arabidopsis thaliana
tcatactatggaagctgaccctgcagtccggccgattccggtcgccaccgtcggtgtctcttagcatatttggctaaggatcgcgggacctcacgcactccactgcggaccaaactgcaagagtactcactcacgatctaacggcatggactagagatgacttgcgaagactaaactcactgaattcaactcctaaagatccgcaaacaatgctgcctatttttcctagatctacgtctgcactgtgcattcacaccgatcattgatggatcagagactatgacatatctgtaccgcagcgtactaggaatagcaccactctatgactgatcgagatctaggaagcatatat

SEQ ID NO: 186821 - DNA, 489 bp, Arabidopsis thaliana
  unsure (1)..(489): unsure at all n locations
gccgcctgcaggnaccgggccggaancccatttcgacgccaggggtaggcggggactctctcagaactatctctctgggtcatggcgaatccgacggagaacctcgacgcgaatccacaaatccgagaaccagattctgaagaagaagttgaagaactgaacggatacgaaggtgacgagggaggatttttatttgggnggtaggacgaccacaccgggtcgaaatctcaaacgcgccacagcggatccagggtagacagaatcaaggcggaatcgctattcctgcggatgcgagctgctcctgtgccggggcgggttcacgacgtgattatcggggggaacgagaagactaagggccatatcattgaagcggaaggggatgctgtgagagaggcgaccccgtttcaaggagctctcgaaggatctaggggggccaattcgaatcttccgggcggaggatatcttgtgttcccgcaacattacgcctgg

SEQ ID NO: 186822 - DNA, 450 bp, Arabidopsis thaliana
  unsure (1)..(450): unsure at all n locations
gcggggagcctgtaaagttttcacctgggggtgaggcggtttttaaanaaaaaaagaccgagggggggggtcaattgacgttggtgcaatgtaccgccgggacgccacctattgaagcctttggggtccgaacgaagccgagccacctaagggggagcacgggcgggagcggctataataattgcatgtagggcccaaggccccggggcgggcgagagagaaagaaccccaaancccggggcgcggggggacaccccccgcgtgggcgcgccgggcggaggaccacgcgagtctggggggagcgtcgccataactgagcggcgccgccgcgaactgttaaagacccggggcgtagggatcggtacggaggcagcccccagggggcgtgggggggtgggtccctgccgagaaggggcgggactgcgtgttcgggccctctcgtagtaaaaa

SEQ ID NO: 186823 - DNA, 463 bp, Arabidopsis thaliana
agctgggatcctctagagcttccgaccggggggaaagcgggttttactataatttctcgagaaccgaaggcgccttcgtttttatttatatacaaaccacacaggacaaaagcaagccacaataaaaaaaaatacagcgctgcgaatggtggcttcatcaacaccgaagccggggggttattattgggcggcggggaggcccccccccccgaaaacacccaaaaaaccccaaaggggggaagcggagcccccaccacaaagcaaccagcccgcggcaaaaacggggcaccaaaaccccaccaaccccccacaaagccgccccacgcggggagaaacaggacacggacaaacccccccaggcgcaccggccaaaccagacccgcccgaacaacaacaccggcccagaaaccgaacagggggaagggccccccccaagggggggcgcaaggagggaaagaaaaaa

SEQ ID NO: 186824 - DNA, 471 bp, Arabidopsis thaliana
  unsure (1)..(471): unsure at all n locations
ccgggccggaattcccgtttcgacccacgggtacggcggaaaggaaagcaaatcccacacggcaaatggctcttttgccgctctcggacgaatcggctgtttccatttttcgggatataattcaaatagtgtattagtacgttgattctcttcaccacggcgtcgggacgagcgaatcaatatcgtgctgtaggcgccccacagagaccggngctgcaaaaaaaacaaccacccgggggcggcagagggagcccccccaacncccgaaccccaccccccaaggccccccccgccccgccccncaagccagacaccaaccacaccccgcgaaacaccggccggacaaagaccgccccccccccccagccccaaaaggggccgccaaccacccccacaggagacgggcccccaggcccccgccccgaaaccaccggggggcccaccccaacaacccacgcgacccaacaccgc

SEQ ID NO: 186825 - DNA, 422 bp, Arabidopsis thaliana
  unsure (1)..(422): unsure at all n locations
ccaaaaaaaacaccggggggaaaaccggggcgaacgagggaagggcagggccacccggagaaaagaagacaccaacagcacgagtttttgcttaacatcgacctctccggacaaggtggtgaagaaagactatcccgacagaacaattcctaattaagatgtttgggaagcaaacacgacccaaagaatcgaaaagaaagccaacnactgggggttgggggcgtggcccgaataaattagaaaaccaaagtcaaaaagcaagggaaaggggtgtgccggaaaagtcgataatgggcagagaaatatctggtgaagatggacggagaatgggccaaaagaggaaaacaattgccaaagaaagaatgggaaaccaaccgccgaaaagaaaaagaccaagaagagcggggccatggggggtatcc

SEQ ID NO: 186826 - DNA, 563 bp, Arabidopsis thaliana
  unsure (1)..(563): unsure at all n locations
gaaaggggggcaaaaggggggtgggggggggggctttttgtaaacgcgggcgagctcnaggcgngactngccgcgtacgtaagctgggatcctctagagcgtccgccctgggggtaagggttttttatttttttttttttttttttttgggggtggttttttttgtgtttgggacccctcaaaagccaccaacatttgtgttattgtgtggtttttagagccggggatagagaacacacacgcgagaaaaggggcctttactcttggggggagggggaaaaaacccgggggggggggggggggaaggggcccccacggggggagcgggggggggaaccctcgggaagaagaaggggcccccgggggaaaaaaggacggggnggggaaaaaacacagaggggggaaaccaaaagggggggggggggggaaaaaaaagagggagacccgggggaggggggaaagggggcgaccgagcgccaagaaagaaagggggggggcagcaaaggagagcgcggggggagaacagcaaccgcgaaacggaaaaaaaaagggaaaggggggcc

SEQ ID NO: 186827 - DNA, 475 bp, Arabidopsis thaliana
  unsure (1)..(475): unsure at all n locations
ctgcaggnaccgggccggaanncccgggttttgagcagggggaagaggcccaaaaaaanaaccanacccacgcngaaaggggaannnncaaccaacgaagaagagagggnnccaagagcaacagacaagaagaagagaangaaggcgggaccaaanngaccagcngggggccgaggccacccaacggacgattctcttgggggggtgggccngngccggagaagggcttccgaaaaaagccccgccccggggaggggcgggagggacccccacaggggcaaccccggggagcccccaaaagaagcccgggacgggaaaaaaagagggggaccgccccccccccaaagagcgggaaaacccaaacggggcccgggccaaaccggggcaggcaggacccgggaaggggaaagcccccggagccaaaaaaaccgaggggggaacaccaaaaccggggggggaaaaaaaaagccccccc

SEQ ID NO: 186828 - DNA, 654 bp, Arabidopsis thaliana columbia
  unsure (1)..(654): unsure at all n locations
cccccccccccccccctccccccccccccccctgtatcgtttttgatttcttctctcccngttcccncccccccccccccccccccctccttccgncnctttncttttttttnnccttttcccctttttgttttttggtttcntctcattcccaacnccnnnccncccccccccccccccccctcnttnncccccccctccttcccccntttcctcccttttntcctcttttttttcccccccnncctncntctttccccttttctcttttcttcctctctctcttcttctccccccccccccccccctttcttttttggttgtattgacccccccccgcgggggncctttaaaataatttctctttctcccccttcccccctttcttctcccctcttttctttcccccccccttcctcccctccctcctccccctccctttctttccttccttcccccctcttcttcctcttttttttttttctttcctcctcttccttctttttttttttcccctctctcttttttcttttcttctcttcctttccttctctccctccccctcccttctccccctcctccctcttctttttcttcttttctcccctctttctttttcctctcctcgttcttctccttccctctcccctctct

SEQ ID NO: 186829 - DNA, 410 bp, Arabidopsis thaliana
  unsure (1)..(410): unsure at all n locations
gcgtacggaagcnnnggacctctagagcggcttcncggggggnaagaagcaaagagcnnagcanaagaaacacanngggaaagggaagaaacaacncnncaagaacgcacaaagcgaancnggagacnaaaannganaggaaagcgaaagcaaaaaagcacaaacaaggaaagnaagaaacaagaancaaccgctgnnttgccgtgngannagacaaaggcaggcatgnccnngagccangggncaagnggcnnaccaaggggagaaacaangaaaccaancgcncnnaacnggggaacanncanaangcngcngccgncgaagaaaaaagccggncncggcagggggncgaagaacnncnnggaancnaacgacnnanacncgncccacncagncaaaacgcaaaccgc

SEQ ID NO: 186830 - DNA, 389 bp, Arabidopsis thaliana
  unsure (1)..(389): unsure at all n locations
tctctcctcgctctatttcactattccctcaccctccacccttttctctctctccctttccacctccccctccttcacaccattaatctctcttgcctcccctcccccttccctccccactctcttccctcccctatcgttctctactcttcctaactcctctttttctccctttctcccncaggcggcgcgggcggtgtttactctttctatcccgtatatctctctatccgtnagttcgttgtctgtctcctcatatcaataataacaactccctacttcccttctccctcttctctctccctcattcacaatctccacttctgccgccgtctcctgcccctcctcctctctctccgcccacctccatcttctccttatcccctgta

SEQ ID NO: 186831 - DNA, 320 bp, Arabidopsis thaliana
tctccctcccctcccttttctctttcatttctccatccccccgttctggggctcttgttggcgctgtgtgtgcctctcgcgcgggtgcctgctgctcggtctgtgtgtttccctcccgcccgcgccccttttttttcgggggggggttgggcaccccccccaacccccattctctctttccaagaaaaaaacccgcctttcgctttctgccgcttttgtgttgtgtcgttgggtttcttttcgtgtcggcttcgccctcctggcttggtctctgtttgctctggccgcggtggctccccgcttccggggctcgctttcct

SEQ ID NO: 186832 - DNA, 325 bp, Arabidopsis thaliana
  unsure (1)..(325): unsure at all n locations
aaaacaagaanacacacagctctatatcgntatcataatacaaagtaagattttttttgtttctggttatcaagattctgagttgagtcactgaactgctgaccttgtcnctcgggatgaaannnggaggcagaannggaaancaaacagcgnnccnnagcggagcagcagcaacgcccggagnaacggcnggngaacnngaagcnccagcnacnggagangcaggacgangnngcggangnnnccgaagannccnngcgaacncacnacangcannancaaccanncccaagaaaccacggannanaacaaacagnngaaacag

SEQ ID NO: 186833 - DNA, 489 bp, Arabidopsis thaliana
  unsure (1)..(489): unsure at all n locations
ccccgcaaggacccggcccggattcccgggtttaaccaaggggccgagccccacggcgnaanagcaaccagagaaccggaccccaaaaaagacggaggacaggggaaaaccaccgggggggcccaaccaaccgaggggggacgggggaccacatccaaagaaccggaaggccacgggacgaaagaccttgtttttctggggggggggganaaaaaacacagggggaaaccgaaccatcncaaggacaacgaaagggagcccggaacaaaagacgaccctacggacaaaccaaagccaccacgnaacaancaaaaagggcaccaaagggagcggcaaaaggaggaaaaactccgaaagaaccggaccgtacaaccaaccggggaaaaccacggaaggggcaaaggaaaancagaggcgaatcagctcgatttcaaacaaggctgggaccaggtttgggtattaagactcgaacaacgcgtaacgggcctt

SEQ ID NO: 186834 - DNA, 463 bp, Arabidopsis thaliana
  unsure (1)..(463): unsure at all n locations
cacgcggcggaggccngagacgaccgaanaaagagaaaggagacaagggcaagaacccaaccgcggaaaaaacaaccaaacaaggcccaaaagggccggcaaaccgccaaaacgcgggaacacgaaaaccaaaacccaaccaaaactcttctaaaggaggcggggcnacaccggggcgnnnggggccaaccaaaaacaacccaggnaaagggcagagggaggacccccccgggcaagaagagagaacccgccaaacaaccaggaagccgggggaaacccaaaaacccgggcaccaacccgaaagggccggcgcaaaaccccacccaaggggaaaacggcgaccaaaagcaaaacaaccagagcccaaaggacaagagaaaccaggaaaagggggccccaacacggaacaccccccaagaaaaacccacaaagaagggaaagccccgcagcaaaaaagggaaaa

SEQ ID NO: 186835 - DNA, 777 bp, Arabidopsis thaliana
  unsure (1)..(777): unsure at all n locations
ccagcctactcccncccgccgccccccccccccgggggggtaactcagttgtagtaaagaagcgccccctctcgcgattgtggggaccacccccgcgcccgcccccgcctcttcccccccacacccacccggcgctcctcttctccgccggggggtttcgtgtttcacaacaaccacaccctccctcgccccgctcctcccctctcccccctctcccccctcccccttcccgccgttctccctcgtcgccttgttacctttcgttccccctcctccctccctccctcgccccccgtcacgccacttgctcgctccgcctctgcctccctgcgccacccgcggccgctttttttttttcgcgggtggtggttcccccaccacccacccatcgccgcgcccctcaacacaacataaaatcctcctcttgccccatcacaccccctcctcccatcgtgtccctcaccgtcactccgttacttccgcgcccgattctcctctcttctacttccttccccctaccccgtcccctccgctcccccccctctttcctccccctctcctccccttcctctccccttaccgtacccttccctccgctctcccccctcctcgcctcaccttccttcctctgcgcgtgcgtcgccgctcccctctccccgtcccctctgccctctgttcctccctccctctctgcctccgctcccctctccgcgccctctcccaccctctcctcccgtccgctgtccactccacccccgctcctcccgccccccgctc

SEQ ID NO: 186836 - DNA, 338 bp, Arabidopsis thaliana
  unsure (1)..(338): unsure at all n locations
acgcgacgaagcgggaccacagagcggtccccgggggggcagagccannanaaanaaacgccacnagagaagaggggagancacccgacgcacaaacgggggagcacacacgaggggggacggggannacannncagagacagcccgaaacgagaacaaagacaacanaacacaagaaccctcgtccacganagcgcgaaaangagaaaaacannngcaagaaaaaaaaacgaccaangcggcaggggcacncccccccgccaccgaacacaccaccgcaagggacccgggaaagancgcgggaaaagagacagggagcaaggcnagaccncccccac

SEQ ID NO: 186837 - DNA, 167 bp, Arabidopsis thaliana
  unsure (1)..(167): unsure at all n locations
gcttgcaggtaccggnccggaattcccgggttgctccacgcgtccgagccctgtaaccaaaaagcaaatccagagcatggactctctcaggtcaggcccaaaccggtgggagccattctatgaccggtgaggactcggatactgtctctgtttaaaaacctgttctg

SEQ ID NO: 186838 - DNA, 515 bp, Arabidopsis thaliana
  unsure (1)..(515): unsure at all n locations
gtcgcatgcacgccgtacgtagcttggatcctctagagcgggccgcccttgtgtttgtttttcttttacttgacccttaagcttttttgtcaaccacttcttttagcttggcaaacacgtataactacttctaaaactctaccacaacctacttcgccgtcaagagcaggggcggagattcaaccaatggattctaagaacctttcgtgtttcccgggaggcnnnggggacagggatggaaccgggtaaaaatggtcaatcccattcttattatttctctcgaaaatgaacccctccaaaagccttcggcctggttgggggctttggtccccttttagatggtggatactagtttttcgagcaaccggcggagcggttaaggccctgggccaattttttggaaagaagtttttggctaaaccacggctttcgggaaaccgggaatctcgcccaggggggggaattttttttgtggaccccgggaaagggggccaaacccgggaaaatttccaggg

SEQ ID NO: 186839 - DNA, 512 bp, Arabidopsis thaliana
ccgcctccccgcccctttccctccggttggtcggtgccctgccgcgcggcccgtcgcgcgggtttggccctcttgtttgtcccccgccggccgggcgcgccgtggcttggctcggcggtcgccgcccccgcgcgcccctttttttttgcgggggtgggggcccccccaccccccggggatccctaaaaaaaaagcactgggttccgccgtattgccgtcgggcggtcggtgcttgcgcgcggcggctctcggttcctcgccgggcggcggggggtacgggcgcggttgtgtctgcctggcgtggcgctctggccgtgcggctgcggccgggcgccgcctcgtgcgtggcgggcgttccctcccctcccgtcctccgtccgcgtgggagaccctgtgcgtctcttcgccgcccttcgtcgttccgcggctagtcgtggttggggtgtgttgggcgcggccgcgtctgttggtccctgttcccctcgccgtggtcggccgcgcgcggcggcgcg

SEQ ID NO: 186840 - DNA, 334 bp, Arabidopsis thaliana
  unsure (1)..(334): unsure at all n locations
ccactagagcggcctgcccaggggggcgggcgcgcgttcgaagagaggttgtggtccgccatgcaccccccaaaccaggagaaaagccatcggcttctggcttcgggaatacaaaaacccaaagggggccgcccgtaacgagaccggcgggacccaaggccctagccaaccctattttttaggggggggggnncccccaccacgcaaagggcnaggccagccccccaaaaaagaaccagcccggggcacccccgagaaagacacagggcacaggggccaccgaggggggggcccaaacgaagaacccgcagcgggaacagcgagggccccggaa

SEQ ID NO: 186841 - DNA, 485 bp, Arabidopsis thaliana
ttgggggtcgcctcgtgtccttcgcgcctgtcttctgctcttcgtctctcctcgcgcccgcgccgacctttcccgtgcggtgcccccccccgccgcggccgtgccgtgtgtcgtcccccgcgcgctcccgcggccctcgttgtctctttttttgggggggggtggcccctccgatcgggcgccttctcccaaaaagcgtgcggtcccgtgcgcgcctcgggtctctccggcgcgctcgcgtgcgcgctccgcgtgcctctcctgccgttcctcccctgccgtcgctgtcgtcttttccttgtcgcgggctcctggttcgctccgcctcctgtccggcgtcccgtcgggctcccgttctccccccctctcgggcgtgcgcgggggtgtgggcctgtcttccggcttgcggtgcgtcccggtcttcgttcgtcggtgttggctgctctcttcctgtcttccctcgccgccggtgtcccggttcgcgg

SEQ ID NO: 186842 - DNA, 633 bp, Arabidopsis thaliana
  unsure (1)..(633): unsure at all n locations
gggggggcagcgcgccccccgggctgcgcgcgtctcgttgttttttttttttcttggagggggaggggggttttatactttaaaattttttctttttcttnttcttttttttttttccncctctcccttctctcctttccctcccttttctctttcctttccctttcctttctccctctccttcccctctctccctctcttccctcttttcctctctttctccctttcctcctctcctttttttttctggggggggggggttcttntcttttcccggcctgctttctataaaaaaaaaaatnctgcntttttttcctcccctccttcttttcgtttcccctacctgtctcgctgtctcctctgtttttttttgctcgctccgtcccccaccggcggtttggcgcctcgctctcctccccgtggtctgcgcgtccctgcggggtgccgcgcttgccggcggccgggcgcgcgctgttctttgctgcgtgcgggctgttgcctgctgcttctcctccggccggtgcgtcgctgcgccgcgcctcgcccgtctgggtgtttgctcttctgcggtctccgctccctccgctcggcctctcgtgctctgctcttcgttcgtcggctgcgctccgcgtg

SEQ ID NO: 186843 - DNA, 741 bp, Arabidopsis thaliana
  unsure (1)..(741): unsure at all n locations
ggaggaggggggggggggggagaacctggctgcgggaccaccccccccccggcctggtggggggggggcgcccaccccccctccccttccccccggtactctatttttctttccttttctccccccggggggggggggcgngtttaaaattataatttttttncgccccgtgtggggggccggcgctcttttccccttcgtccgcctcctttctcgtgtctttcgcgcctgcctccccttcttcgtccttcctctcgtcttcgccgcgcccccgttctctgtcgtcctcgtcccctgctcgcctcttctcccgcttccgttttttttttttctttgggggggggggcgtctntcctctccccgcggctcttctttccaaaaaaacaaccatcctcccccttccctctctccttctttcttcccctcccctcctttcctcctcctcccttctcctcccatcttcctttctcctcctcctccctctcccctcatttcttcccncccgcacccctcgcccttctcctccctccccgcccctgccgcgtccccgtcccgcgccccgcgcctgtccccgcctcctctacgcctcctccccctctcccctctccgctctcctgcgctcggttcccgtccccccggtctcccgcgcgccttgctcccttcgtgtgtgtcggccgctcgctcctcgtcgctgcccgcctcgtccgctctcgccccttctgtctgtcgttcgcccttttc

SEQ ID NO: 186844 - DNA, 393 bp, Arabidopsis thaliana
  unsure (1)..(393): unsure at all n locations
gacgtgcacgccctacgtagctggatctctaagcggcgccctgntttttccttttttttccccatccaaaatttttttaaaggaagaatggccaaaacaaaaaaacctggggtttatggcagaaggtttggggcaaaacttttttttttttttaccctaaactttgggaggacttggaaaaccctttttcacatgtagctggattttttattcatccgaggaatcgctgatctttccacgaatcttttcggagtagaaagcttcatggcctcctccttttttattgaccaccggcaattccaagccttgccacctagcagttatcatataggctgaggcaagcgggcccattgatcttatgctaccaaccctataacactgagtactccttat

SEQ ID NO: 186845 - DNA, 340 bp, Arabidopsis thaliana
acgttcacacgcctcgtaagcttggacctctagagcgtcgcctggtgtttgggtctcttacggtcatggtgttgcctttgagaggaaggttgttgtttgagaagggaagctcaccaacttaactctaataattgactacacaaaagtggaacaattctttccagagtgggacactgacgcttcgggtccattgatttatcttttaaggagtgcagagcaaagggggctaactaaactagctaagccgaaaaacgctttgggggcgggtttcccctggttttccattttctaatccgtgccaaacttttctccatcttactaagacgggtctccagctcca

SEQ ID NO: 186846 - DNA, 180 bp, Arabidopsis thaliana
agctgggatcctctagagcggcctccctaggcgggcgaaagctttgtagtttggagagaaattcctaacggaaagaacagggctaggacaagaataacaaagcctgaaggccaacatagaggaccgctaaaccatagaagggcgaattactcccacgaggggaaccaagggacacagaaa

SEQ ID NO: 186847 - DNA, 493 bp, Arabidopsis thaliana
  unsure (1)..(493): unsure at all n locations
cgcctgcaggtaccggnccggaattcccggttttgacccacgcgtccgatgcgntngcagagaagacgaggaaagagagagagagagagagagagagagagagagagagacagagagagagagaacgactatggtctcttttaggaagcagcttgatgtgctcatgggagctaaccgaaacggcgacgttttcgtggtttgaggggggggacnacaaccgcgacgggggacagggatacttggcggggcccggcccgcacgagcggncccaaaggaccgaaaacggccaggggaccacgcccaaagggggccccccngcagcggcggaaagaaaacccggaagaacgggcaaaaggggcagacaccaccacggggaaccggaagaggccaaacacaggcccaacgcaagagaacacgaacaccgccacggcccgagaacggccaagaaaagggaccccaaagcgacacagacgcggagcagacgagagggcag

SEQ ID NO: 186848 - DNA, 494 bp, Arabidopsis thaliana
gggggggggggggggggaaaaactagcgcggtacttcttcgcccgacctgtggggggggggcgctcgcccccctcgctgttccctgtttcccatgttttcccttttttcctcccagaggcttaaggggttttatacttaaaaatttcttttccctcccttctccttttctttcttttttcttttttttccccctttctctcttcctccttttcttttttcccacaaaacaaaaacacccattcctctttctctaaatctaacaattcatcccttccctccatctttttcttttctttttttttttgggggggggggggttttcttatttggggggcttttttaaaaaaaaacgggtggtggcgggggtcgtctcttgtttttcttctcttctgctcgctgtcgcgtccgtcctgttctcctttggtgtctttccccgttcgcgggctgtgccttctcggcgggatcgcccttccctgcccttcggttccttttc

SEQ ID NO: 186849 - DNA, 536 bp, Arabidopsis thaliana
  unsure (1)..(536): unsure at all n locations
cccccccccgagaaccagcgacaacccattttccccggggggaaggccgacaaaaaaaacccncnccccccgtccccgaccccccgccgcgacggccatacacgagacccggcgcaagaagcgcagagaggcctaatcggtacaggacggaaccacacgaatataaaaatccgataccacccacgcagacgttttttttttgggggggggggggacaaccccccggcgggccgcaaaaagaacaaaaacgtcgcatcgacacatcccattgcancacaactacacaaatacgtcaccgagaggacgaggagaatcggaattactccccaaagagtacctacacaaatacaaacaccacaatgctagaaacaaacagccaaagcgaacaagatcgaaaccccacacaggaacacactcacaagaggcgtcccgaccggaccgaatacaaccaaagtgaaaacaggtgcagagaagtatgaatgccacctccacacacctcagattacagtaaacatccaaccaataaactcaacctc

SEQ ID NO: 186850 - DNA, 395 bp, Arabidopsis thaliana
  unsure (1)..(395): unsure at all n locations
cgccgcggaccggccgatnccggtttcncggcggcgaacccgccgagaaaaaacgacccccgggggggaaacgggccgcacagagacacagcaaacccagaacaacgagaggacagaacgcgaaggggagacacaccaaggcagggggggcattcttatagggggtgggcccagacccggcagcggaaaaccgaaaaaggggcccagacggagggggagagcgccacagggaagaaccccggggagagcgagcgaaccagagggcgcgaagcgagaccgggggaacccaagacaaccaccggagaaaaccaaggccgacgggaacgagagggggccgaggagagggaggccgggaggcagcaaacgaggcagggaagaagcgagagaagaggcgg

SEQ ID NO: 186851 - DNA, 371 bp, Arabidopsis thaliana
  unsure (1)..(371): unsure at all n locations
cccaacgaaagccggaacccacaaaagcggccgcccgggggggtaaaaacctacccacacccatcctaacaacagactgagagccgaaggaccagaaacaaactccgatcacccaaccaaacggtatctgggggagggagcaataagagaccaaaccggattcaactaagaagaaggaaaagcaaaagaggcttcttgcacacggggggangcaacccacccaaggacnggcccagaaaggcacccccaccacccaaagggccggccacaccacacggngacaccaaaaaaccagaaccgaaagcgaccggccaaacccaagcgcccaaacaaacaccagcccggggcccccaggnaagccaacccaaccc

SEQ ID NO: 186852 - DNA, 178 bp, Arabidopsis thaliana
  unsure (1)..(178): unsure at all n locations
ccggaaccggnccggaaaacccggtttttcnccagcgggggagggggcgcgnacaaccaacaaaacaaaaacaagaaggggnagacccaacgagcaagaccggcncnccaccagagacganaagcgngggaccgaaccacccggcccaaacgccggcacaccaacgancncgganagg

SEQ ID NO: 186853 - DNA, 452 bp, Arabidopsis thaliana
aaaatttttttttctttttctttttctaatctattcgaaaccacaactcaactttcttcttctgcctcatctaaccattctaactacaattaccccacacaccctttctccaactctccataacctcttcaatcctctctactctttttttttcaagaggggcgtctttccccttatacactctctaaacaaaaaaaaactaccctccctcctcctctcttccttcctcctctcaccacaccctcccctccacactccttcccttcctacattattaatcttcctccccacccccctccctttacccacccatccccccaaccacccacaatccacaacaactctactcaccaaaaccccttatctcaacctctccactccatcccccctccttcttatcacctcactcttttttctatatatccatctactctacttacctcaccatctac

SEQ ID NO: 186854 - DNA, 590 bp, Arabidopsis thaliana
  unsure (1)..(590): unsure at all n locations
ccgggccccccccccccccccgcggggggttgttggggggcttcggttgggcgcgccccccccccccccgccgccccttttaccgttcnnggttgtctggggggtttacccacccccccccccccccttttcccctcttttcccgctcctttttccccccccccccccctcttgcggctgtgttgctccctcccgctctctcgtgctccgtgcctgtgtcccccgcggggccttttttttttgggttgtggggcccccccccggggggggctctttaatcataaccctctttcctcccttcttcccttcttccctcctctctccgtctgcgccttctcccctcctcccctctcttgccgctcttcttccttggcgtcgtcgtttgggttccgtttcggttggcgcctgctcgggtcgcgggggtcgcgtgtgtgcggtcttccgtcgctcctgtcgtgttttgttgcgtgcttccttcctctgctgccccgtcgccccgctctcccccgtctgcngtctctgtccgcgttgtctcttccccttctccttgtcgcccgttgtcgcgcttggccccggccgcggccgcctgg

SEQ ID NO: 186855 - DNA, 443 bp, Arabidopsis thaliana
  unsure (1)..(443): unsure at all n locations
cggcaggacccggcccggaanccccggtttgaccaaggcgnccgagcccgcgaccgcccacgcgnccgccggaaagaagnaaccacaaaaanaaccagacccgaccaacggccccggnnccccgccgganacnccanccggaaaccggcgacccncnnncggcncagnaagggaagacgngaaagggtttgttatgagggaggaggcnccaanngacaacaagggggcagangaaagggacagngaggaaaangcgancaagaaaaagnagggaggangggggccnaagaagaaaccnnngaaanccaaggaccangaacgngcgnnnnnggacncagcnganggggcnnnaggcaagcaaaagggacagaagccgaaagggccnngggaagcncnccgcccaaaaggcagccaaccccgcacaggcaccaagagcaagacga

SEQ ID NO: 186856 - DNA, 710 bp, Arabidopsis thaliana
  unsure (1)..(710): unsure at all n locations
tcccctccggggggnggggggggggggggggggggagagactagccttgatttatccccccccccccgccttggtgggagaagcctccggccccccccgttttctcttttccactttttcccttttcccccccgcgcgttagggcgctttaaaacattaattctttttctcctcccccctctctaccgtctcctctccccatctcccttccgtcttcctttcttctttcgtcccctccactcctctcattgtctcttccctcgcctcatcctctccttctctcgcctcctcttctctcctcctccttctctctctctcctcaactttcctctttttttctcggggcagcgcggtgcnctcttcccttgtgcggcctctctttctataaaaaaaaccttcgccctcctctctctcccctcctccttctccctccccccttccttccctcttccctgctctcccatcctccttcttcctctccttcctcccctctctccatccctcttccctcttcttcccatctctcccccgctcctcccccctttctcttccttcgtccctctcctcccttcctcttctcccctccttcctcctctcctccccttgcccctccctcctctccccccctgtcttctacccatccttctccctcacctgtcactctcccctccctctcctctctcttcgcttctatattcctgttcctctcc

SEQ ID NO: 186857 - DNA, 390 bp, Arabidopsis thaliana
  unsure (1)..(390): unsure at all n locations
gcctgcaggtcccggcccggaatccccgggtttaccaaggcggccgaaacgncgaccgaggacgcgggggcggacgcgggggaaannnnnncccaancaagggaagggccaagggaaaccacgaannaagccgacccccggcgaccanggggggnnccggngggnccgggagcgaaaaccnccggcagcccntttcnntgggggggggagngnccaaacggagcgaagccnnccgaaccggaggcgcgngnacggaggggcaggcaaacagangaagcaacnnncccggggggcaccaccggcgaaaccggggcannaagncaacagcggaaggggaacncccgcccggaccnncgccggacancncgggaaaaaagagcccgccgccgc

SEQ ID NO: 186858 - DNA, 697 bp, Arabidopsis thaliana columbia
  unsure (1)..(697): unsure at all n locations
cccgcctctccnccccccccccccccccgcggggggggggatcgtgttggggcgcgcgccccccgccgtttgcggccccgccgccccccccccccccccccccccccgcccgttcccccctttctcccctgtggggttggggggtccccatcccccccccncccccccccccccccctctctnctcccccccctcctttccccctcccccccttcttctctttctcttcttttcctctctttctccctccctccccctttcttcttttcctctctctctctcctcccccccctcccccccttcttcttttgggggggtgggcaccanacccctgggggggggnccctctgttcatttccctccctctctcttcctctcgctccccctctccttctcccctgtcctcccggccctcttctctctcctctctcgctcccttctcgtgcctgcgctccggtctctctctcccgctccctccctctgtctccctcccgcccctcctctgctgccgcgtcgggggctcccgtcttgccctctcctcttctctcttttgctttctgtctggcccgctcccgccctgtctccttctctccccgccgcctcccttcgcggcgcctcctcggncgcgtcctccggtccgccgcctttttccccttctgcttccccttgtttcggtcgttgcgcgtgccctcccgcc

SEQ ID NO: 186859 - DNA, 320 bp, Arabidopsis thaliana
  unsure (1)..(320): unsure at all n locations
cccccccngggggaggaataaaaaaggaatcgatttcttggccggcgcagaggctaacgggaccaaatccactgttgatcttgggtaaagttccgggtccggctcagtcaacaacaaggggggacgngtctgaggtgnttgnggagcgggggggggagaccacgcagaaaaagagagccgttgaagatctccgggaagtaatatgaaacgtccgtccattttcgccggcgacaatggatnacggatcacactcgaagnatcgcgaatccgagaggaacancaacaacaacaccaacaacaacancaaccaccaccgggag

SEQ ID NO: 186860 - DNA, 629 bp, Arabidopsis thaliana
cggtccggccgcgccgcgccgttcggcggcggcgcgcggggggactcggtttgtgaagcccccccgctccttctcgccccgcgcgacgcgcgcgggcgccgccgcccgcgccggcgccgcggccggctatttttcttgtcccgctggggtccaggtgtgccccaaaataaaaactcccgctcgccccgtcccccgcgccggcgtttcctggcttgtcccgtctgtgtcttgttttgccgctcttgtgtgtctcctggttgttggtccccccgcctgcgtcttctttcgtgccgctggctcgcccccccccgcgagtgttttttttttcggggcgggggcctccccgcccgctgcccgccctgttacaaaccccccggtttttttgtgttgtccctctccccctgtcgtcggttcgccctcccagccttcgtctccccccctcttcctctcgcgcctcctcgcggttggtcggcgttgcctattgtttccctctgctgcttttgttgcccgctcggtgccttgcttgctgttccggggcgcggctctgcgcgctgtctcctgcttccgcccgcgtgcgttgccgttgcgccggcgtccgctcgcccctcgctcgccgctgccctgcgccc

SEQ ID NO: 186861 - DNA, 461 bp, Arabidopsis thaliana
  unsure (1)..(461): unsure at all n locations
ggcccccgtgtagagagcggcaccccgcgccccccctcccccccggcgtggaggggccgcacaaaaaaaaaancaacaccnnncccgacgccaacccacnccgccgcgccacgccgacaggatggtaaggtttggtgactgcctcgcgctcctgccgggggcaagccgttacaagtcacaccccctggcacccgctcaccgccgcccaggcatttttttttggggttgttgggacaaccacgaggggggtgtaaaaaacagaaaaccccgcgagtgccggaagtcgctgcgcgtctctagttgtgaccactctggctagtggtccgcgtggattcgtaagcggaggccggggccgaccgttcgcgttgcttgcacccctctcggcccaccgccgcctccggttctcgggctcagcctccggcgcggactctcctgtgtagcgccgcccgcgcggctggtga

SEQ ID NO: 186862 - DNA, 501 bp, Arabidopsis thaliana
  unsure (1)..(501): unsure at all n locations
gggaacggcccccccgccgggcgcgggcccgccccttttttnccggcgttggggccgcacaaaaaaaccccccnccccgccccggcccgccgcgcgcggggggtgcccgcccggggggcctcttgcgttgtttgttgcggttccgcccccccgccctttctctttttttctccctcccgcccctttttttttggggggtgggcccccccccgcgggttgcttaaaaaaaacctcctcctcgtggtggttttttttattttctttctggtggcgtcttgcttgccttccggcttcctgctccctccctctgccctcccctgctttgtcgcgccgttgtacttctgcgctgcccgctcctttgtgttcccccgcgtttctctctttttccctctctccttctctgctctgtctcgtgtagtctcgtccctgattcttcgtttgttctccgcgtgcttctttttgtctgtccgctcttctcttgtgctttttttcctttgtgct

SEQ ID NO: 186863 - DNA, 682 bp, Arabidopsis thaliana
  unsure (1)..(682): unsure at all n locations
gcggggggtcgccgcgggggggggaattttttgggggcgaccgtcttaaccactttgggggggggaaccggcccccttcttaaggcgnggatcccctttacgccttcccccctttgtttgtgggtggggataatccaaaaaacctttttttttctccccccttcaacccctccccccacctcttttcacaaataaaaattataaaaccatccactcttccctctcctcacaccaaacattcaccactttcttccccctctttcctctaacccacctcccttttcttcacccttccctttttttttttgggatttgttggggccccccaccggggggggcggcccaaaacccaggtacacccccgtttgtttgtgtgctcgggtctctcctcccccctctttctttcccccagcccgcccgaacgggggtgtgggggtgttttgtagcgcggggggcggcggcctgtccccgctctgtcgagggtgtttccggcgcctttgcctgttgcgacgcggccccgcgccctgctccctgcgccgcgctctccttctcgcgcgctggctccccgggcgccctgtctctcctcggcgtcttctgcgttgtgttttgtcgcttgtggcgccgcagggtcgcccggcggtgcgctggctcctctgccgtcggcagcgcgtcgcctcgcgcg

SEQ ID NO: 186864 - DNA, 669 bp, Arabidopsis thaliana
  unsure (1)..(669): unsure at all n locations
cccccccccnttttaaagagaaaaacaggccccccccgcggaaatggnnggtctctcttcacatttttacccccctcctgtgtaagtccctttttttaaaacataaaacaccccaacccccacacaaccacaccccctcatcttctcagcacaattaaaatttactaacacccccttacccatcccacaccacgcacctccctcccacctcttttccttcctacctcccccccatatctccttccttccaccccaccacacccacccccctctttttttctccggcattgtcgggcgccacacccccccgcccgctccccctacaaacaaaaaacaaccctccccctccctccctccccctcctcctcacccccctctctaccccctctataacagtatttttattttattatttttctaccttatcctcaacccacactctcctcaccnacccccccacactcaccccaccatctaattatctcacataatcattcttatctcatacctctccctctatccttactactattctactcccctcctcccttaactccacccatcattccaattcacaccatacgcaacaccacccccctctccttcccttctccttttcaatctcacctcccacctccactcccccccataataccccccctccttttt

SEQ ID NO: 186865 - DNA, 332 bp, Arabidopsis thaliana
gtgaaaaaaaaaaaaccagaacagacgagagggccgaagggcgctacacaaagataagtagaaaaaaggcacgcgcaccagcgaaggaaaggagtagagaacacgtaaggagcaaaaaaagcgactcgagacaaagagagggacttttttttccgaggggggggcggaacaagaggaagaaagtagagaaaaaaaaaaagtcccccacaaaggacgagccgaccacagggactgcgcaaagcctacaagtcgaacgaagaagtgagtgaaatgtacagtcgcgaacaacagaagccgcggaacgagcagtactcaggaaagcgcaaacaaac

SEQ ID NO: 186866 - DNA, 483 bp, Arabidopsis thaliana
agcccgatagaaggccgccagcacctttcccccgggggaggggccggaaaaaaaaacccaccccctgaggcgacgcccgggccgtccacgtaaaaattaattagggaccccccccttgcacaaacctcccaccaacacgtcgattctatgtagtcccaccagcgaattttttttcgggggggggacgcccccacgccgtctcaaaaaaaaaaatcccagccttgcatgacacacgttgtattgcgtgtgcatctgcctcagaaggatactagatatgagagtattgtctaacgaacagcccattgcaagaccagtccgccgtcccagaagcgacatcatatcttactactcacctactctcgaaatctatcccatccgtcccacgcccatgcttataagttacttctaccgacccacctcccccctcgccactatgaagtacctgcgagactcctcgccccccgccaatcctttctttttatt

SEQ ID NO: 186867 - DNA, 425 bp, Arabidopsis thaliana
  unsure (1)..(425): unsure at all n locations
gggggggcaaacacaaaaacacccccccccccccccccccccttcctccctcttttctcctctcctcctatcttatatttttttttcctttttttcttctttcaatctccccccccccccccctcctctcccctttcctctctccccccccccccccccttcctcctttgggtttgtttggggcccaccacaccggggggggggttcaacactcactcaattaccctcggctcctctttgttttttgtttcgtttgcccgctgccgcctcccctccgcctccctttacgtcgtccttggcgtgcgccccccgcnccgttcccgctgttcgtcttcgatccgtgcttttcggcgtgccggcgcctcgcgtcgtgccgggtgtcgcgcgggtcctgtgctctgccgcccgcgcgcggtgtgtcgcgt

SEQ ID NO: 186868 - DNA, 545 bp, Arabidopsis thaliana
  unsure (1)..(545): unsure at all n locations
accccgccccccccccggggggggnnnttttttgtgacatcccaaaaataatacgcccacccgccccccctacttggatcattanaacgtctccttttgttttggttttaaaacaaaaaaaaacttttttattgattaaaaaatttccatcccctttaatacccctaaatgggggggtttttttccattaagaatttaccaaagggaacctggaggtttggtctaaaaccctaaaattttttttttaacgggggggaaaaaactctgcgcccccaaaaaaaaaaaccccccccctggggtcccccccctcccccatcaaaaaaaaaaggggaataccgaaaaaaaaaaaaaaaaaaaattaatattttttttttttaaacaccccccaaaaaaaatataaaatacgggggggggggttttttttaaaaaaaacaataatcccgcctcaaccccaacctttaaacgcgccctttttctttttttctttaaaaaaaaaagtttctgtcacatattcccccccactaaactctcaatcttttcgcccc

SEQ ID NO: 186869 - DNA, 685 bp, Arabidopsis thaliana columbia
  unsure (1)..(685): unsure at all n locations
tccttccccccccccgcgcccgcgcgcnggnngaaattttttttttcacccgttcttcccccttcccccgccgcgcccgggccccccccgcgcgcccccctccgccctccttctctcttttcnnntcggggggtgttgggtgcccctccaccccacccctcctcctcctccccccccccccctcccccccctctccctcttctctccccctttctttttcttttttttttctttcccctcttctctttttccctcctnnccccctccccccctcctttccccctcctcctccccccccccccccctttctttttggggtgttgggcccccccccccgcgcgcgccccccacccaccacccccccccctcctctcctccctttttttttcctcctctctctccccccccctccccctccctcttccctttttcccctcccctcgccctctccctttcccctctttttcctgtccccccccttcctcttctcctccctctctcccctctctcctccctccctcctcctttcttctcttccccctctccctgtcccacctctctcttccgctttcccttctccttccttcctccttctctctcttctcttctccctgctctctcttcctctcctctcctcctccctactccttctcccttcctctcttctgctttctccatctttttt

SEQ ID NO: 186870 - DNA, 480 bp, Arabidopsis thaliana
gttggggttttttaattaaaaactctttttttaataaagaaaattttatcaaacataaacaaaaaatgtccgggggcgaataaccagccaaaaaggagaggggggacctttggctttgagcttggagggcctattggttgaagcaatttttttcttggggggggcgggggccacaattgggggggggccggggaataaaaaaactctcgccactttttctatttcgtcgagcgcaggaggggagaaaaaagggctcccctaaaaaaaaagaaaaagttccggggggttagggagaaccccctggggcggcaaaaatacgtctcctctgaagacaaaaagggttttttatggcacccccctcgggttgtcggggcgcccgttattcatgtgggaggggtgggggtgttttttgtaaaaaccaagccgccgggggggaaagtgatagaggtgggggcccccgcggattcttgttagaacgtg

SEQ ID NO: 186871 - DNA, 501 bp, Arabidopsis thaliana
aaaccttggatcctctaaagacttccccctttgggtttggttttaccacaaaaaaacctttttttcctatacaccaaaaacaaatcggggtaaaaaatcaaacaacaaaccccattttgcccaaacttttttgaaaaggaaagggaaaaacctctttcacaataaaaagggaaacaaattttttctttgtagttgggcaaaaaagggggggtttcaccaaaccactaaaacccccccccccttattataagggcaacacccctcccttgtttccagtttttttaaaaatatgaaggctgtgggtgcggtaaaactcacgatcccgcaaaagccgcggaaaagatcctcttctcctctaggaaccccgctcctgtacaccgctacaatattccccttcttctttccccctttttataacccatcaacaaaccccacctcctttccctttttctttcagggattatttttccccacccacaacacaccccccccacctatata

SEQ ID NO: 186872 - DNA, 283 bp, Arabidopsis thaliana
gcgccgggagtgggggggcgccgaggagaatttttcctcccggggggagagggcccctgcaaaaaaaaagccgggaagggagtgccgtcgaggtgagcgccgcgagtgagtagctgggtggtaggagattgggagggcagcgagggatgtgagaggaggtgtgggaggaagggcgagagggggatggagagggagcgggcggaggcgtttttttttaggggtggtggggaggacagcggcgtagtcggctccagaaaaaaaataagtggctcaggtcgtgcta

SEQ ID NO: 186873 - DNA, 565 bp, Arabidopsis thaliana
ccacccccccggacgagccaccggccacgaatatttttttccgggtggtggggggcgccaaaaaaataatatatacttgcattcccgtcttctttcttaccaactttactcctattcgcttgaatatgttataagtctctttttttttttgtttgtcgccgctccccctccgcgtctttattttatcttttctctgcagacccgcctttttttttgagggtgtgggcgcgcccccgttgtctcctccaaaaaaaaatatccactcacttcctctttttttttattgtccccctcctcctcgcatctttctccgtctcttttgcctccttcgccggttttcatccaccctcgagtcgttttcttttgcacctctcccccatcctggtcttctcttttctcattcttttccccgcttgcgtgtctttgtcttgttgtctgtcttttatcgcgtttctttcttaccccttcccccgcctctgaccggttcagacttagtcttttattttttctatttctgttccacttttgttcctccttcttctctacttgttcgttcttgtcttgt

SEQ ID NO: 186874 - DNA, 644 bp, Arabidopsis thaliana
  unsure (1)..(644): unsure at all n locations
tgccccccccncccccccccnnnnnaattattccccctttcttccccctcaattggtgggggggtttctccccccccggggccccctcccccatttcccccctctccccccgtggttcggggggcgttaaccccaccctttttctctatttcttggaggttgggggggctcaaaaaccccaccccttcctccctcccctggaatcccaccaaaccccttggggcgcgggggaggttctcctccaaattgaactctacaccccctggggcgcaaccttcctccttccctgggggggtgggcccccccccccggggggggccccccccaccagcacttacngggggtttctcccccccccgtcgtggcccctcccccccccccccgggggttacctccccccgggcccccccgccgccccgtttatatatatccacccccccccccccctccccaggggggggccccattcccccccttctcccagagcgcctctccccctcccccacggctttttccccctcccttcttttctcccgagattttccctggggggtgggcccccccccctgcccccctctttttcccaacgcccccccccttgggggggtggcgccttttacacccctcccccccccttccccccc

SEQ ID NO: 186875 - DNA, 511 bp, Arabidopsis thaliana
  unsure (1)..(511): unsure at all n locations
ccccccccgaggaaggggnggccacacaacctttcnccccgtgtggggggcccctaaaaaaaaacacccccccccccacgcgccccaaccgcggagcccccctgacgaagaaaaagaagagagaggaaggacgagcgacacaatactccagacgagctcgaagacacaagtactctcccaccgtacaagcccgccccttttttttgggttgttggggccccacccggggggccgtcaaacgcagcaaccccccgcagccggggcccccctcgaccccaccacaatcattcccctcccttcaaataaagattgaaaccgtaatggatgacacaaacgcgtgtaacggacgggtgggcccggccgtcgcgcgagcaccatcgcccccggcgacagcaagaaaaagaggcagggcacccgcaggcggtaataggatatgtatggtggcatccgagacgcccagggatcaggcattcaatacgagccgctccgcgcgacacaaggaccccacaca

SEQ ID NO: 186876 - DNA, 600 bp, Arabidopsis thaliana
  unsure (1)..(600): unsure at all n locations
tccgctcccccgccgcggggggggggggggcggggggggaaatacgtttgtgaaccccgttcttnccccattgcgcggggggcgaccagcccccccccgcgggcgcccgccgggcgtgtcagtttttttaatccggtgtgtggggggcccccaacaaatcccttcttccctcccccccccccccccccaccggtgtcggtgcgtggggcccccggggtcgtgtggtgtccggtgttttgcgccgtcgtccgcccccctcgcccgcccttggcgggtgctccgccgcgccgcccgtctttttttcgggttgttggggccacccccgcgggggggcgccacaaacacatcccccccgtcccccttccctttttgttcgtggctgtcgtttcgccgtccgtggtgcgtttgtggctcgcccccgcgccccctcccctcccgcgcgccctgtctcggcctcccgtcccctttccggctctcctcgtggcgtgtctcgccgcgtgtgctcccgctctcggtgcctccgttgccgttgttgcccctcgccggcgctcgcgcctcccctgcgactgcgtttccgaccgcccgggtcgcgggcgcccc

SEQ ID NO: 186877 - DNA, 383 bp, Arabidopsis thaliana
aaactttacaatttataacctcttcccctttaagtttcccaagggaataaaaccacctttgggaatcctgatcgtttacccggttttttaaccggggggggcctaccccattttcctacgggaaaataaaaaggggtgtaattttcttccccaaaagggcggaaaacctacccacgtgttccccaaatgggtggggggggggcggttaattcccggttccggtgggttttaaaaaacatttttttcccaaagtgcccaactttgtccctaaccctaaaatttaacaggggccttgaattatttgtcctacccctttttttaaagaagggggagattccccccctctcctcataaaaccctggcctctatacaaaaaaaccccc

SEQ ID NO: 186878 - DNA, 488 bp, Arabidopsis thaliana
aacttcctttttctttttaacaacaacgagagcattttcttccccccgcgccgaacaaccgcacccttctttcacacccgttctaatacaacacaccaccctttcttctcgcctttctttcttctctccaccccccccacttttttttcccggggggggcgccccccccccccccggggctttttcaaaaaaaaccccccccccatttccctctatttaacaccaaaacaaccgcggttggcggcttccccgctctaaacaaaatatactcatctcccccccccccctcccaccaaaaaaaaaaacccccccttcctttcttctccaaaacaccccacctcaccccttttcctctcacccccttgaggggcccacctttacaacccacccgtatttttcataaaaaccaccccaaacaacccccccctcttactctcgcctccccccaaaacccccacgcccgaccgagcctccataaatccaccccc

SEQ ID NO: 186879 - DNA, 483 bp, Arabidopsis thaliana
ccccccattttttaggggaaaccaggcccaaggggcgacgcgcatcttccccgcctttttcacccggggggaggggcctttaaaaaaaatcacccctcttttgaggagcttctccctcctctcttattttgtttatttgattcttgcaccgctccccccttttcgctccatcactctatacatccgtctagttcagctcgcttcgctcaggaaccacgggccttttctcttttggggtgttggggcccccccacacggggttatttttataaaaaaaaaataccctgcctccagctctcactcttcttctcttccatcttccatatctgctcccgtttgaccggtcctagtcatattgttgttcatcttgatgccgtttcatcctccgctttattgctcgcctgctcgtgccgtgttcgtgttctgcgttcttcgtttcttctcccgctttctcctttccaggttgtgcatatcctcccctcc

SEQ ID NO: 186880 - DNA, 648 bp, Arabidopsis thaliana
  unsure (1)..(648): unsure at all n locations
tcccctgtccccgccgccccggcggggcgggggggggggggggagcctggggttgttacgccgtgctgccccgcttgttgggggggggaaccgccccccccgcgnggcgcccgccgaccgccctctctttttttcncccggtgaggggggggcgggcaaaacaaaaattccccccccccccccccccccccccccccccgtgcgcttttggtctgtgttgtgggtgttgtgtggtgtctgttttttggggttgcgcgtgcgtcgcccccgcccccttgccccgctttctgttcctcggcgcgcacgccccccttttctcctatttgggtttgctgggcgcccccncccccccggggcctcttcctctactcacctaatctctcctccctccttctctgttcttctgttgttttttttgtcctgtcttgccgcgcggcgcctttggcgtgtttctccgcctcgtcgttctgttcgcgtgtcctcgacgcccttcggcagcgtgcgcggttgtggccgcgcgtccgcttcgcgtccgctgggtcgcctactccgtgcgtcccgccccgcgccgcgccccgtgttcgccgccccgcgctccgcgctctcgctcgctctggcccgcggcgcgcggcgcccggcgcgtgcgtt

SEQ ID NO: 186881 - DNA, 465 bp, Arabidopsis thaliana
  unsure (1)..(465): unsure at all n locations
taaaattccacggatctccttttttatgggacccgaaattatttaccacaatgtgtatcaatgggttgaaaaaaccaaagattggaaccctaaaaattttgggttggggaaccacatctcatccccagttgggagttctttcatttttttcccgggaggagggggaaaaaaaaagggggtgggtcggaaaaaaaaaaaaaacccagaaattntccccccttttttctttttccccaaatatggggtctcgccccctttaattggggggtgtgttggctttttgaacccccacaccccaccaaagggcgcccctttcttttttatacactggaacaccgtttgatacaaaacgcccgcccctttttgtaattgtgcggagatttttgagcacccccttccccgcgagagggtttcccctggggggcttggaaaaaaaaaaccgcgtgtgccccttaaaaaattttt

SEQ ID NO: 186882 - DNA, 448 bp, Arabidopsis thaliana
  unsure (1)..(448): unsure at all n locations
ttttttttcctttttctttccaccacacccaaattccttaaactccccatttttctccaaccccnctccccttnaaacccaaaccggagggttgaataaacccgagattttttccccccccccttttttttcagggggggggccccccccccggggtttttcccaaaatataaaacccctttctttctgaaaaataagggcctttttttttaaaaattaaaacgggggtttttttataattttttttttcttaaaaacccaaatttttttttaaaaggccttgggggggccaaaaattcacccttccgagttttaaccaaaccctttttttatggggcgtccaccaccccaaaatttttttcccccctngacccaatacaccttatttttttttgtggggggcgcccccatcatcttttttttttttttttttccccccccgggcata

SEQ ID NO: 186883 - DNA, 551 bp, Arabidopsis thaliana
cgaggacagcagggataaaaagagatgcacacagcgcccagccgcacggcgctttttcgccacagccgggggtggggggcccacgaaaacaaaaaaaacggggaagaaccaagtccgcgcgcgctcgcgccagcccccgcccgcgggacagcgagagagatatatcaagagcagaacgcacgaccgcacgacgcgacagatggcacctatgcagggctcacgcgaccgagacggactacctccgcacatacacacacgcgaaattttttttttccagggggggcggaggcgcgccgccgacccgccctccccaacaggagaaagacaccaccccccgaggcccccaacggcgaccgcaccccgagcacacacacgccgacgacaccgggggtgtgaatataattacacctcgatgccgaccgcggagcagccacccggtccgccacagacaaaccgggcaagcgcccgaacgagcgacgaagcaccaccgacgcccagtcgacgcaggggacaaccacgaccacgcccaccccgccgactccgccccaaga

SEQ ID NO: 186884 - DNA, 398 bp, Arabidopsis thaliana
  unsure (1)..(398): unsure at all n locations
acgcctacgtaagcttggatcctctatagcggtctcgcctttgggggtgggggggtttaaaaaaaatncttttttaagccaaggaggagggataaattcccccaaccacaaaccgggggtgtaacacaagcgaccaaaataacaccgcgaaggttggggccaaaaattctgtgaataaaaaaaaaaacttttttttttttaacaaaatttttacattttttagggagtttgtaggcggaaaatttttcggggtgcggggtggaaaaaaaacaaaaaataaaacccgttttttttttttcatttaaaacactctcaaggcctttaatccaatgtttccttcttgaaaaagggggggggcacaaagggggttaaatattccccttaaaccaccgcccaag

SEQ ID NO: 186885 - DNA, 452 bp, Arabidopsis thaliana
  unsure (1)..(452): unsure at all n locations
cccccctaaagcttggaacctctaaaacggtccccccttggtgtttggtgtttttttattaacaaatacccncnaaatcttataattttttttaccccggccgggttaaccccgggaccaaaactgggccggaattttttttccgggtcaacgtcggggagaaatttaaaaaaacacaaaaaacccccggtcaaccccaaaaaacctattttttgcggggggggggganacccacccccggggnccttaattatcacgaagggcccgaacacacaaaaatatgggggggtctccttctcccccccggaaaaaaaaagaaagaaaaatgtttcccccaccgttaataaccttacaaatcccccagaacacacacccgaaaagatccccgcccggtttggggcacaaaaagagcgacccccctctctttttttctttttctttgctaacccccg

SEQ ID NO: 186886 - DNA, 540 bp, Arabidopsis thaliana
  unsure (1)..(540): unsure at all n locations
ctttggatccctcttacagggggggcgccccttgggtgggggggggttttaaaaataaaaaattttttttaaaatcccnnnaaaaattttcgggggcaaaagaaaaacccctttatgacatcttgggttttgggggggaacctccccccggttttgggtagggggttaaaaaaaaaagggagggaatttttttttttttgcggggggggggttcttcaaggagggtccttttataaaaaaaaaaaaaaatggggggggggcgtttttaaaaaacgtgtgggttttgaaagtttaaatttttccgaagtgggtgagggaacaccgaaaaagggggcttcccccgggggcgcttgggggggaccccataaatttgggggggccccccccgcctttcaaagggcgcggttgcgcttttgcccccgtttaaagacttctctttaggggggggccccaanctcttgtcccccccctctccaattaaaaacgcgttggagaaggggggaggagcctcttcccccggggtgcgctctcggagggggg

SEQ ID NO: 186887 - DNA, 534 bp, Arabidopsis thaliana
  unsure (1)..(534): unsure at all n locations
ggggggtttaacaaaaaaaaaaactcccctttatttccccccaacttttaaaaacccttttttnaaaacattttacccccctccctttaaccccncccccttccccccttatcttaaaaggcccttttattccccctcctccctttttttttataaggggagttgggacaacntnttccncgggggttccccaaaacttatctacccccccaaacttttttcaatttttttcccctctccctccccccccgtcttttttctctctctctatggagacctccacctccccggggtgtcccgcggttttttcccccctagaaagaacaaacaaaaccgccccccgcacaccaacggcttcctctcacaccaacacagagtgtcttctccccgcttctcccgacgcccccactatcccgtcccgagcccgccggtctcggaaaacacaccttcttttctttccttgcccgtctctcccgccgcagcccccgccaacaacctctcttctcccacccccgttgcggcccgcctcaacac

SEQ ID NO: 186888 - DNA, 494 bp, Arabidopsis thaliana
caaaaaaaaaaccacccctcccaacccctaaaaagaaaatttttttttaagtctatacccaaaaaaattgtgtaaattaaaaaaaaaaaaatgtttgcaaaaaaaaccccggggtttttaacctccccaaaaagttgaacctttttttttggggggtgtttcccccccttgggggagaacccaaaaaaaatcttttcccctccccaggatggcttttttgccaccccaataattttccccccggggaaaaaactaaccccgaaaccctttttttttttattgaaaccatttcccccaaaaaaaaaaaaggaattatcccccccacccccaaaatttcccgtcctctatattatccgcaacctttcttttctggaactcttcttcaaacactcttcaaaagcgggtgtttttttttttttcggagcccccctttctcccgtgttctcccctctcgtgtttttctccccccaaaactttcctcttttttaaacaca

SEQ ID NO: 186889 - DNA, 419 bp, Arabidopsis thaliana
  unsure (1)..(419): unsure at all n locations
ccccccccccccacaaaaggattatttatttttccacaaattttaaatttttaacacaccccatttctttccaattctaaaaaaaattccccaaccccccccctttttttataaaggggggggggtcccccaacgggggggtttttaactaataatccacaatgtttnaaaaattttggggggcggcccccagggggctttccgggggaatattttttaaaattttaaaaaagagcgggggggggggcttaaggggggttttaacaaatcttttacacccacgagtttttactcaaaaaagggcgtgtttttctggaccgcagaaaaaaatgaggggcgggtggtgggggaaaagaaggcataccccccctcttcgtggttagagacgggggggcacccggaaaacaaattctgccgcg

SEQ ID NO: 186890 - DNA, 366 bp, Arabidopsis thaliana
  unsure (1)..(366): unsure at all n locations
aaacccttcggttaactttttttaagggcgggcctttccttcccccggaaaaaaatttcccaaaaaaaaaaagaagtcgggatttttttcaggtgttgggccccccccgcgggtttaaaaacaacaaaccccttntcnncctctccctctttcccccccttttnctttaaaaccaattaaaaaacactcctcaccttctcacccccccccccccccccccacccncccttaccttccccctcccccacccacctaaatactcacttntcatttcctctaccccctccataacaacacaccccacacactctcttctcttctaaacccnttacacntctccccacccttccctcctctccccccccc

SEQ ID NO: 186891 - DNA, 541 bp, Arabidopsis thaliana
gggaaggaggaaaaaaaaaaccaccgcgagcggaaccgtttcagcgccggggggggggcgcgggcacaaaagacgcggacggaggcacccgcggaccgagccgcgcagccgcccagaaagagaagaagagaaggagaagcgagcgcgcgccgcgcgcgcgcgcacgcgacgcaagacctcacgcgtagccgcaagacgccgcgacacacgcgacacgagcatttttttttccaggggggggagccgcgacagtaaccgaaaacggcgaggaaaagcactctcgctcccgccgaaccctggcccagaccaacgcagcgacggaaaccgagagatcgaaagataatagagggagagcacaacaccccagcccaagaccgaagagccagacgactcggcgaatgcgcacgactagacaacaatcacgcacctcgaaggacaggggcgcgcgtccaccccaccgccccggggctgcgagaaatacgaacgcacgccccgcagccaaccacgccaagcaacaaacgccgcgagacccgccacacca

SEQ ID NO: 186892 - DNA, 340 bp, Arabidopsis thaliana
actcaatacctaccacaccaaccacattttttttttcggggggggtgggggaccaccacccccgggggggcgcgaaaaaaaaaaaacccccccccgcgggagaacacgccggcggacccccggccccgttaactgcgtgggtgagtaaatatttagagagagggtggagccgcacgcccgccgtcgactccacggtcccgcgactgccgcccgcatccctctcatgcatcgctcaccgaggcgcgcagtaaagagcagatagacagagctgcagctgcgtgacggttcaggcatggtatcgatgtaatagtgcggggtacccgccgcgtataccccgcag

SEQ ID NO: 186893 - DNA, 513 bp, Arabidopsis thaliana
ccccccgacggccgcacggggataaggctagtggagagacgcttttcagaacggggggtgggagccgcgagaacaaaagcgcgggggccagtgggacacgtccgagccgccgcaccccgatggaaaaattagggaagaagcccgtgcctcgcgcctgatgaagtctctctagaaacgcatcacacgcccgccgtttttttttttcggggggctcagggcccgcaaataagtcctggtgaaggttacatctggtaggcgaatagccgaaatgatgcaacgggcagccgacgcgcccggaaagcgagattatatatatttatgagatagatgctgcaccgagtgcgccggcacgctagaccttcgccgacacatcatacgttcggaactcatacgactcccttgcgatgtgcgcatgtcggatggtcggaggccagcaatcgcaatggattgtcttatactcgcgccgcacacgcacggtcgtccgcccacaccatagcacaaccgcccccccgc

SEQ ID NO: 186894 - DNA, 436 bp, Arabidopsis thaliana
ggaaagcggagaagggcgaccgaccgacgcgcgcgcaccacagcgcggaacacaaacaccgacggaccgagaacttctttttttttaggggggggaggacgagacccacagccagcgcggcgccccagaaagcgaaacccacccgaccccgcaccgcgacgaagtgataggaggtctcgcgagcgcccgtcgagacagcgaccacggcaagagagagcgagagagcgggcgcccgcaccgcagcgcgcgacaggcacgaagacccgaccgcgcgcacgcagcgccccgcagcgcgccgcggcagacagcgcccggcagcctgcgcgcgcgcggccaggccgcccgcccgaggcgcctcccgcaggctagagggaggacgccgcgcgaggggcccccaggcggaggagcagggacggcaagaccagccaactctgcc

SEQ ID NO: 186895 - DNA, 552 bp, Arabidopsis thaliana
  unsure (1)..(552): unsure at all n locations
caaccgcgcgccaagggggacacggcccgcgcgccagacgcacccaagaagagcgacaaagagagcgaggcggcacagggagcgcccagcgcgacccgccccgaccgaccgcggaggcgggcgcgcgaccacacgacggcgcgagagcccgaccgacacctttcttcttttggggggggggggacgaccaccccacgcaggagacgtggccgacgaaaaaaaagaaaccgcgcgacgacggcgccgcgagcgcgcgctcaccaagactgagagcgcgaccgcggggaggcggagcagaaaagagagaggcggggtgagtgagacccgcggcaggccgccaccacacggagccagcgcgccgaccggggncgcgaacggcgcgagaaagagacgcacgcgcggcaagacgcaccgagaagggtacggcacgccgagacgcccgggaagccgagacgagaggaagggaggcggagagggagaaaccgccgcgcgacgcagcgacagccgcgccaagacgcacagaggcgccgcgcccgccgcccgacgagaacc

SEQ ID NO: 186896 - DNA, 565 bp, Arabidopsis thaliana
  unsure (1)..(565): unsure at all n locations
cccccccaattgnggggggagaaccgaaccgccaaagagaggagcccagaacccccatctcacccccggggcgggagcccccgaaacaacaaanacccgggagccgccgggggcgcgccgcggcgccgcggcgcgaaaggaggcaaagaagggcgggggccaggcgccgacccccacgccccgccgcacggggcacacgagggcgccgcgccccgcgccggaccgacncgccccgggttttttttttttgcgggagtgggcggccccgcgcccagcagcgcgcgaccaaccacaacaagcagccgcccggcagacggcgccccagggcgaccgcccgcccaacgagccgcccgcccccgcgggcagagccgcccagaaaggagagaggagccgcgcgcgcgangggcacgagcccgcccgagcgcccgccgcgcccccacacccacgcgccggacgcaccgaagcggcgagagcgccaacgcaaaccgccacccagcagaggcggcgcgcaaccccaccccgccgcggcgcccgcaagcggcgggggagagaggcgcccaccgga

SEQ ID NO: 186897 - DNA, 642 bp, Arabidopsis thaliana
  unsure (1)..(642): unsure at all n locations
tctcgccccccccccccgcgggggccnattttttggaaaagctttcccaataagaaggccacacgccccccccctttacctttaatcctttttaaccctttccccctaggtttaggggcctcaaaaaaaaaaaacncncccccccccccccccccttccccccccccccaaacaaacctccaaaaaaaaaatacaacccctttcacctcctccccctctcccccccccccccccccccattttcaacaacccccccacaaccccccttttttatttgggatgttcggggccaccaaatttggggtttttaaaacctatccaaattccccctccttcctatttttatccttccccccccctcttttctcccccccctcccctccaatcacttttccatttatttataccactcatcaaacaccctctccccccactactctcttcccttcccctccaccacccccttccccacatccctctttcactacatcccaccatctccatcttttcaccctcccccatccccccactcttccttaccccctattcttcttccttcccctcaacccccccccctccttccctcccctccctcttctcactccttactcccccctcactcacattctactttattatccc

SEQ ID NO: 186898 - DNA, 667 bp, Arabidopsis thaliana
  unsure (1)..(667): unsure at all n locations
cccccccccccccccccccgggccccnnattttttgggacactcccccaaaattatacctcccctccccccctcccttagcctttgatccctcttcacccggtctcccctgngggggtagagggcccccctaaaccaaaatnnntttttcccccccttttcctttctttnnnnncnccccccnctttggcgcaccccccctccctttcctccccttctttgattttttgggcccaccccttttttcttttgggtttacccccccttttttttaaaaaacccccctttccccacctttttttttgagggggggtggttttcccccccccggggccccccctatattatcacccacccccctccctcttttttttttaaaattttttttctccccccaaaaatttacacctttctttctcgcggtgttggcgcccaccatttccctttttttttctttttttttcccccctcttatttttcttaagacaccacaaccccccccccccttttctttttctccccccctttttcccccctccccccgggtttttcccacccctcccgctttttttccccccctcccttacccttttcttttttcccctcccccccctccttcacctccttttttcccacacccccctcttttttttccccccttttttttc

SEQ ID NO: 186899 - DNA, 637 bp, Arabidopsis thaliana
  unsure (1)..(637): unsure at all n locations
tcataccccccccccccccccccggcgggncnccnnaaattantttgggggacgatcccccccacaaaattttnnncgnnnncaccgcccccccctcccctaaaccttnnatcactcttaaacccccctcccccctttttgtgtttggttttaccccaaccacaaacccaccctttttttattttttttaaaaaaaaaaaaaaaaaccaccactctccaataaccccnatatattttttcccccctttaaaaaaaaccccctttttttttttaatattataacaccacacccttttcttcccacaccctcctttttaanaacaaaggcgaaaatttaaccaccggggggtgtgtgccctttccncccccctgcccccaacacacaacaacaaaattcccccatgtttttccccttcttttctctccttttccaccacattatctttactttaaaatccccccttttaanatcccctttccttttcccggaaaacaaatttttttcccttttcaacccccccccacccaccgctcttttttacaaagctttcttccccccaccccaccactctcccccaatatcataaaccccccttccccccaccctgctcctcccccccgccccccttcccttttc

SEQ ID NO: 186900 - DNA, 294 bp, Arabidopsis thaliana
  unsure (1)..(294): unsure at all n locations
gccccgcgccgccgacgcacttccgcctgctggcctccccccacccgcacccacccntttttacaatcctggggggggtgtggggccccccaacaaaataaaaaaccncgcgcgtgacgcctcgcgcgcgcccctccccgcctcaaccgcgagggtcagagcgcctcggggcgtgcgtcgtgtattcatctcgagcgtagttgttgaagcggttcgcgtcgccgggcgcgcgcgccccacgtacccatcatctcaccgcgcgggcccgcacgcagttttttttattacgtgggg

SEQ ID NO: 186901 - DNA, 600 bp, Arabidopsis thaliana
ccccccccccattttcaccacacaccccaccaccttatacccaccccatcccatattcctttttcaacctcgggttaagagtgtacaaaataaattctcctcaccccaccctttatccacatctaaccccatacccaccctcctttacaaccttcttcttccacctctcccatcatcctatttatatttatcacatatcaataataaaaacatattttaatttttatcttatccccttaatcttctttctccccgggtgtgctccatatcccatgacacacaccctccaaaaaaaaaaaactcctttccactaaactacaacaactttctaatacacccttccctcccctttcttcctatatccatatcacatccatattttcgttcccctccaatcacctcccattataaatccccacactgaccaaacaatccctcaccccacctattatatccctccctctccatcccccctaccctctcctactcaccccccctactcctcctccaacacactcttccccttttttcccatccttaataatatttcttattacactacatttcccctttcaccccacccacccacaaacctcaaac

SEQ ID NO: 186902 - DNA, 562 bp, Arabidopsis thaliana
  unsure (1)..(562): unsure at all n locations
ggggggaacccggccccccccggggcccctccccgattcccctttccccccggggggggggggttttacttaaaataaacattcctcccacctcccttaactcctttttttttccatgcccaccccttattatgaatgcgggttcaataataacaccaaccatttttttccaagatttggctggtccttcctgaggccttttacaaaaattaataaccccttttttttttcgggttgtggggggcncccccggggggtccacttaaaccaggaaatgggcgggcgcggaaatcttttcacctgtggaggccccagaaaccttgttgtcaccgtcggcccgcccatgatccctcacgcccgccgtcttggccaacgccacttgcctgcgacccttttttctgcgtcccacgccggaacagagaccgtctggcgcggtttaaaaggtattcctcctccggaaggaggggctttcccgtccatttcgtcccggcgggtgcaggccaccgcggaacccaccggcagccgcctcgccgcccggctgtctttgtgagccccggcgctg

SEQ ID NO: 186903 - DNA, 561 bp, Arabidopsis thaliana
  unsure (1)..(561): unsure at all n locations
gtccccctctccattacctcctaccccaatttccccttttccaccccggggttgggggggcactaaaaaaattactaacaatccgcactccttttcatttttatcccatcatccccccccccctaaacttcaccctactccccattaactagatctctacaacaaaaaaatctcaaaatctcccccctcatactcccaatcagttcataaaaatttttttcccttggggggggcggctttctttgcccgtctcccncataaaaaaaaacaaatccctctctccccataacctctttctctttatttccacccactttcacaacaatttccaaaaacttccttccccctattttcccccccccaaaacaaacaaaaaaaccctcctttacacacaaaacccctcccctcccctccatccattcccacaaacaactcttctcttcccccttccttctttccaatccccccccccctctccttataaacctttcttataacacactcgtaaactcacaaaaatccaaacccttactctctaccaccaccttcactctactcctt

SEQ ID NO: 186904 - DNA, 522 bp, Arabidopsis thaliana
  unsure (1)..(522): unsure at all n locations
cccacccccgggggtagcgggggagaaaaaaaaaaacccttcccccaaaactttcctaaaaaataacaaagggggttcctaattaaagccacaaaaaaccttttaaagttgttaaaacccacacttcttttgaaaggggcattaacttaaaccacctgagggtttaaaaaatttctttttaaacccctttttctggggagaggggcannnnccaaagagttttataaaaattactaaacccccttttcctttttttatcccttttcaaccccttttcctacttcttttacctcnnccacgaggtgggggatcttaaaaatgcttttcattgagaaaacaaccgcccagttttaaaaacatcccccccaattgcccaaaaaaaattttgaccccctttaagggataaaagacgctccccccaaaagacaaaaaaaaattccgacccctgttcaataaaagccacaccttacctggaggggcgctttttttttctgggaaaaaaatttacacaaaacgatcttt

SEQ ID NO: 186905 - DNA, 588 bp, Arabidopsis thaliana
cccccccccgctcgaaggaagaaccaacgcgccagcaggacgaggtccgatcttccacttttgcggcgggggggggggggtgtaaaaaataaacaccacccagactcctcgaagacgacgatggatagtatagtatcaacgtactcactatgcgtcgcgggcgcgtcaaaagaggtcacgccgctccaccaatatatatagaatgacaaacggaacgggaccacaaacgaaaattttttttatgggagggggggggtcgcagcaggagggtgtctcctaaaacaaaagaaggcgagtgtgtctcagctagaatacacgtctgcactttttggtgttcctgcctttctctcgagtattaaaggcacgcgtccatatatgaccaccgcccgcgcgagcatatgcccacgttacttaacgtgctactggacgacgcatgtggacgcacaggtagggagggtgcattgatcgccaccgggtcggtcgagatccgtggcgtcgtggactgtgggggtcgcgcgaactagatggcacgccacacgatctcctacatgctgccacgactcggcaagcaccgagctccaccttcgt

SEQ ID NO: 186906 - DNA, 110 bp, Arabidopsis thaliana
agcgaacgcccacggagtctgagatgagaccatggatccttacaccagacgatcgacggttgcggttacgcacccacacgaccgagaagtcgacaacacacgcgaggatg

SEQ ID NO: 186907 - DNA, 404 bp, Arabidopsis thaliana
ccccccccggcctttgaccggacaaacacagcccaatacattgcatgtgactcagatcaccgcatacattataaaacaacatggggtgtgagtgggcgacacaaaaagagaagacaacgccaaccgggctcaagcacaacattacagcgccacattcccgcaatactactacctgtctctataatctgtcgtctagtgcgataatttttctttgtgctggaactgcttacgctctgactaaacactaagtcagcctaacatttttttttctcggcgggggtgggtcgaacagcattgtacagtaatttatttcacaagaaaaacacacgcacaatcaacgaccaaattacatatacttcgcagtagcctctcattcatgcatcaccggcgttctacacgataat

SEQ ID NO: 186908 - DNA, 553 bp, Arabidopsis thaliana
  unsure (1)..(553): unsure at all n locations
cgccgggcgcgcgggccgggggggggggaatangtgggaactgccccgcgccattaatatggaaacacgttgccccctccgggggccgggcccaaaattacttttgtcaacccggggggtgggggggggcaacaaaaaaaaaacccccntttttttttaacaaaaatttcccacccgcttgttttgagaagaaagtccccccccccacaactgcgggtgtgcggtgttgtggggtctacctccgagagaaggttctcttccccggttaacgttttttatatatcaaaacccattttttttttcggggtgtggggccactcccccggggggggacccaaaagacaaattcttctgcggtttaaaaaaaattggggcctcctggtcgggcttctcgcatctcctgccccttcgtcttataaattataccggggcggcccccgctaaatgccaacatttttgaaacgcttgttcttggaggaaaacctccgggtgtgagagcggagcgcacgccgctgccgccaaatgttgttttcggaaagagagcggggaggtg

SEQ ID NO: 186909 - DNA, 506 bp, Arabidopsis thaliana
  unsure (1)..(506): unsure at all n locations
tcgaggggggggggggggggggttccgggactacccatcacttatggaaagccggaccccttccagtaccggtccccaattccccggtcccccccgggggcggggtgagggaaaaatttaccccccccggccccggagggggcaaaatcaaaaaacattttatctttaaaacgcttggggtccttttttgagggaaaaagaacttatcatccgcccccccaggccttgtaacttccgcacaaaggttttctctttttcaagggtggggggcccctttggaggggggacccaacacacaaaaaggggggagggggtttcttcccccaaaagaaacccagtgttgctgctcccaaagattccaaaggggtttgctccctcctcctcttccaacccacttttgggttaagggtgcaaaagggcaaccccttatnccctccccccccctttaaagaagcagcccaccacagaaggttttatttgttttttaccacaaagcctcgcaaaaa

SEQ ID NO: 186910 - DNA, 582 bp, Arabidopsis thaliana
  unsure (1)..(582): unsure at all n locations
cccccctctcaaattaacccctgtcccccaatttacccactgttccacacccccgggtttttggtgaaatttttattaaaatannnnacttaaccccccctttaacccccctttgaaacctacccattgtttttaaaccactcccccccccctctcccacaaaaaaaataaatatatacccgaaaccctaggggctttaaaaataaatcccatttaaaaccaccgcttccttgctggcttccctcctacctttatttcaaagggaggaggtgggnaatacatattaagttaatttcccaaaagcactaaaaatactctttcnnncaatcctcccttttaaaaaacttttttccaattcccaaaaaaaaaaaaaatctttttcaaaaattctctctttgttgcgaaccccctccccaaagcaaaacctcttgtgtctgggttataaaaacctcctccaaaaattgggcaacacaaaataatttttatacacttttattactctttagtgagaccccccccccaaatattctcttttttgccccccacaataaaatttttctatccatcttccccttcccctaa

SEQ ID NO: 186911 - DNA, 628 bp, Arabidopsis thaliana
ccccccaactaatgaaaaaaaaccgccccccctcccattccccctcccccccaactttccttttttccccccacggcggaggggcttttttaaaataaaaacacccccccacacaaaaaaaccactctttttttttctccccttcccccctatcatttcctccccctttctaaaacttccctttccctcccacacaaaacactcttccttaacccacccccatcctctcaaacacacccacttattttttctcccccttacttcctccttttggcggtctgttgggcaaaccaccccctactcccgccgtctcttaaatccattcaaacaccccccctccctctctttaaaaccatctcctcccccctctctcttatttctccctctcttttcttcttcctccatcatctctcccactacaccaccaaacctccctaccatccccccttctctcttcttttttcttttatccatcacccccccttattctcacccctacaacaccctcaccccccaccctcttctccccctctactccacatacccctcattaataacacatcgcccttaacttcctacttacctaacaccccccctctcccactactctctcttccccacatactac

SEQ ID NO: 186912 - DNA, 522 bp, Arabidopsis thaliana
  unsure (1)..(522): unsure at all n locations
gcccccccccccncccccccccanggccgggctcgttgggggcggcgccgcccccttgtcccgcggcggccgggccgcccccgcgcggaccttctgcccccccttttttctcccgggttgtgggggggggggccttcacnccactcccccctcctcctccccgtccctntcccttttcctntttggtttgttcgcccccggcggccctgtgcccgttttgtggtgcctgtccgcccccggccgtccggtcgtctctgttttggtcgtgttgctcggctgctcgtcctccggtcgcccgtttttttttggggctgtgggggcccccccccggggggggggtccgttagatttattttccctttttcctttttttttgtgttcctggcgccgcgccggcgggtgcgccggctgntgggctcgtgttgcgtcgctcctggggctcgcgcgcctgtcgctcgtgtctcgtgggctgtgccccggctcggcgttctcggtgcttgcggggggcggcggcgggcgctc

SEQ ID NO: 186913 - DNA, 672 bp, Arabidopsis thaliana
  unsure (1)..(672): unsure at all n locations
tttaacaaaaacaatccatccacattaccaatattcactatttacctcttacaatccaccaactccatacctcggggttatgggtcttttcaaaccataaaccatatccccccacacatcactctataacactctattcacctccttaaaactatatcaacaacaacctaattattatccccattactcntctaaacacctactcccaattctcacccccctcctaatcctctcacacatcaccaccaaactcacttattaatattttcccctcccctggtggggtagtatcaaacatataactaattaatcctcttataaataaaaaaaacatcatcttccatcacaacctcaccatctctccctcccaaaaccatccttactccccccacctattctatacacaattcttctattcatctctcatctatcttcacctcctccctacctctctcaccctctaatactctaaacactatccacttctcaacatcaatactaccatacatgtcaattctacatcaatccatctcactcacacaaatctccacgttcactccccatccacatccaccattatttatacttaacatctcctttaacactcataaaaaaacatagatatctcaacaattaatttctatctattaatataactttactatcttattt

SEQ ID NO: 186914 - DNA, 486 bp, Arabidopsis thaliana
  unsure (1)..(486): unsure at all n locations
aaaaaccttccccttcttacctctcctatttctttcccccgggggggtggttaaataaaaaacctccctttttcccttaactcctttcccaaaagaacccataaattcttcttttatctccccccttcacccaaataatccgctcctccatattttccttttattattttttttcccccttttttttttaggggtgttgggtccaacccttcgtgttttttaaaaaccagaaaatccttttttcntttttcctttccattcccaaactctgattttccccttccctctcttcctccaatcccccaattttacctctcctctatcccttcaacttctgcaacacgcaataacttatccccttctctccgctttttcacttccgctctatatccttctcctttctccgtgtttacatagaatcccactcaccctcagtttttcccctttccctctccttcattacacccccccctcacccctattctc

SEQ ID NO: 186915 - DNA, 748 bp, Arabidopsis thaliana
  unsure (1)..(748): unsure at all n locations
gcccccccccccctcccccccccccccggggggggaattgttggggagactcccctcccccggnatggatnggggaaaaaactcttcccccccttncccttaacccctctcccccctaatttaccctttttccccccccctctgtttttatggtttgtttttaatattaaaatacaacttttaacnccaccctctctttttatattttctctcccacacacaccccctaaactcacctcctcccctttttccttacttaccccctcacaaattatattcacttttcacttacctttttctccaacttcttttctcttcctaccacaacaacccccccanacccctccacccctcctattttttttttttccaggcctagttcgccgcgctcccaacacatacagcgcccccttncataaatctcatccaaacactcccctcttccaacaccctctccccctcctctgctcccccccttttttttttcccncccctcaccgcgtttaacccttaaccatcacaccccattcttcctcctatttctctcctctcctccccaccacactccccaccacaccacccctactctcccctcccctccccctctccctcctccacccacccactcttccttcccacccccttctacacccctcctcttcaccctctcttccccctctcccccactccctccctcacccctacattcccccatatcgtctctttcacactctcgcccaccccccct

SEQ ID NO: 186916 - DNA, 537 bp, Arabidopsis thaliana
  unsure (1)..(537): unsure at all n locations
gggaaaaaaactcttcacccccttcccacataccctccccctatatattccccttttcccccccccggggttaagtggggcccccaaacaaaattttcattatcaaacaaaaacccacacctctcctccaaactttcttcctctccttttcttctctaaaactagataacaaccgccccgtcccccactcctacacattatcattcacaccaataaaccaaactctctcctctctcttcaaccaaacaccctcccacaattttttttccccgggggagggcccctttttcaaggcggtggctgncccacaaaaacaccaaacctcnttgatattttctctcctttctatcccccttccaccccctccttctcctactcccttctctttatcatacacaccccccttcttttctatacaaaccttcactcacctaccctttccccaacaataactttctatccctttccacaacctcacattccccatcccccaaaatcaaacaacactctcctctctccactcttcttatttcttct

SEQ ID NO: 186917 - DNA, 451 bp, Arabidopsis thaliana
gggtaggtgggccaaaaaaaaaccctttttttattattttctgggtataaatccttgaaatccccaaccccataaaattcaaattcaacccatcctcaaactggttttcaaacaccaacaatttttcacaatcaccttccccccaaaccatttttataaaggagagggctcccttccttggcggctttaaaagaaccaacctccaaccccttttccactccttcctccaccccttccccatctaaattgcaaaaaatctcatccaccccccaagctttttttcattcaacccaccataaatttcccaaacagacccaaaaccctctcctcaaaaatcacaaatattcctctcaaaaatcactcacatcttcctccccacacggaaaccattaccatcaaacctccacctcttcaatatttcccacaatttaaaaaaacactcctcccaaca

SEQ ID NO: 186918 - DNA, 523 bp, Arabidopsis thaliana
  unsure (1)..(523): unsure at all n locations
cggtacccgtccccaattcccggtccaccaggggagggggtgtaaatacactccatttttatgggcaccaaaagggataattttcggttgggctccacatttacgggggtttcaataaacaacccccttgggatatgtcaataacttttttaaattttttttttttggcgagggggggggcatttcaccggcgtggggtgtctttagcaaaaaaaattttaaccaatggctcatttcccctttaaccctaaacaagaagaaaacgcctttttttgaccccttctaatttttcaaacattttcccccaccgggccttgggtgtgtttagggtccctccccaatttccaaaataaaaatcttttttttgtgccccaccggagtgattccccctgggttttctttcccaaaaaaattgaaatgcgccccaccctgaaatggttccccctcacctttggcccaattttcacaccaacttgcccccttttnttcttccttggggaacaaccgcccacgggttttcaag

SEQ ID NO: 186919 - DNA, 507 bp, Arabidopsis thaliana
atcccatctcatttcatcaccctcccccccccttacatcttcctccttccggggtagtgggtttcttaaacaaataatcacctcccttcccctcacttatcctccctttctccatccttcccattaccaatttcttcattctcttatacttattatctatttcatatctctctaatatattttatcttcctcattctcatttctattttaataataatatcttattatatcttttctcatcgcgggggggggcaaaccaaactacaaattttcatctaaaaaaaaaaatattcccttctattctcccactccttctcaccccacccccccctcgtcttaatttcatcatctccacctacccatcctttctatccttacactacatatacaacccatcctctccatttaatctattcccacaatccacaatatcatactccacccaccacatacactctcaccccctcctttcactcccccccacccacttctcccccagctcttctt

SEQ ID NO: 186920 - DNA, 354 bp, Arabidopsis thaliana
ccccacaccacagaaaatactttgccaaacacacccccaccccactgatctgtaacacaccccacaacccatctcgtacccccaacttctccattcacttatcccccacggggcacggcgggtttaaataaacaaattttttacctcgacacttttccaccaccaacacccatgattgttgattatttccatgacaaccattttatctcgatcccatcaccacttcttaattcattcactgacgacttccaccacacacctaccatccacctcacaacctgtcacctctttattcttctccggggggggggttgatactctccttcatccttcttctccacccaacaaaaaaaa

SEQ ID NO: 186921 - DNA, 686 bp, Arabidopsis thaliana columbia
  unsure (1)..(686): unsure at all n locations
aaccacaccccccccccccccccccccccngngggggggggaaattgtttggatctacccccacccaatataggggaaaacccgtaccccctccaataacccatcccccaattccccttttcccccccacgggttacggcgcacccaaaccaaaaaaaattcattatccaaaacttcttcccacctctttcaaataaatattctacctcccttcccccctcttctcttttttttttactataaacccctccttcctttcttatccacctccaacccaaaactcttaattttattttccccccttttttattctcacgggggtgaaacctcctcaattgcctgaaaaaaatccccacaacaaaattccccccccaaaaagctctccccacctctttcaaccccccaatttaaaaaggaacacccccaccatcaccatcccccttccaaaagctatccacacctcctcccttctatacccccccattattattaccacccccctcttctctttttttaaattcaccccacctcatncccacaatccacaatttctacttccgccaaaaccccacccctccctcaacaaaaaaaattattccccacctttccaaatcttaactaatccaccaccacttaccactcacccaccctaactatcccccctcctctcccacccaccacaaccc

SEQ ID NO: 186922 - DNA, 718 bp, Arabidopsis thaliana
  unsure (1)..(718): unsure at all n locations
cttccccctcccaacccacgctccccccccccgccgggaaatagttttttgactaccccccgccccaaataggggggaaaaagacctggccccctcctcccaataaccccacgccccacatttccactttttcccccccgctgtgtatggcgcccctcaaaaaaaaaacnacctcttccccctctctcccctccctaccccccactctttttatcccaaacccctcttctttttctcacaacccacaaaatccttcctctcttcatcctccttcaacaaataaaacaatttncttcaaactcttccccccatcttctccacatccccccaccccttcctaattttcccggcttgtccggggcccccccnccctttgcggctctctctaaaacccactaaacacctctcctccccgtctctctccccctcccacgacccctctcttcccccttctcccccccccaccctcccccaacctctcattattatccccatcttccttcctccttcccctttctccctcacctctccacacaccctcttcctccttctcttctcctcaccccctaatcctccccttcatccccccttcttcttctacccctcctttcttctcctattccctccatttccactcatccactcttcattccatattctatccacacgtccccccccctcctttatactctcctttccatcatattcttcctactct

SEQ ID NO: 186923 - DNA, 339 bp, Arabidopsis thaliana
cccgcgccgcgacggcgggggggcggggggggggccttggttgggaacaggcccccccgaataaaagggaaagaccgggccccctttcagagacacccgcgccgaatctccctttttccccccggggggggggtggggttaaaaaaatattaaaatccaaacccgcgggtcatgccctgctcaagggcgctgcacccctgtgtcgcggcctccccgcgcatgcgcgaaacaatacaaagatggctgctgattttccaactaccacacagcgggtgtcaggaaagggcgctcgcccttttttttcttgggggagaggggggttcacttccggggggactc

SEQ ID NO: 186924 - DNA, 599 bp, Arabidopsis thaliana
  unsure (1)..(599): unsure at all n locations
acggcgcccgcgggggggggggggggggnntttgggggacagccccccccttttngaagaaccccccccctcggggccgggcccattttccctttccccccggggtgggggggtttaataaaaaaaaacaaaattcttttttttatggggggttctccgcaaaaaagatttaaaccccctctttttttttggaaaaagctcgcgtgccctcttcgtggcccccatcccccccccattttgaaagggggcccaagtgttttcctccttccgggcagttggggggccaagggggggcctctttcttaaacaaaaaaacagaaccttctcttctcccgggggcccctccccccttttttggggcgggggggaatggagcactcactcatttcttttccccacaacaacaggttctcgggggcaaaacacccccccccccccccctttttttaaccctcgacccccctccataaaccgacgcttctaagttcccccggcgccgcgcgcggctgtttccccctacggccacacccgaggacttaagacgtctgcccccgcttcgcccgctacgtcgcgcaagcgtcgtgtgttgggcgcgagaa

SEQ ID NO: 186925 - DNA, 490 bp, Arabidopsis thaliana
  unsure (1)..(490): unsure at all n locations
cccctctccgggcccccggccccgatttcccgttccccccggggggtaggggggaccataaaaaactttctccccacctctctaatctccccctttcccttttttttnctccccaaaagcagagggggccttcaaacttcccccatttaccccttttaaggcccccccgcccgatttcacgggtttttctcttccatttttttttttttgggggcggtcggcgccccccccctagggggcgcgtcccaaaacccacttaactctcctccccccccgagaaaaaccatttctcttctccttgttttccaaaaaaattctccccccccccccgcgttttgtggagccgcccttctcccctatcaacagtgcgcccccgtttctttttctctgtccttaaaacattataccgggtctcttttcctctctttctccccccaatgagacaaccacccccctctgtccgccaccccccctgtctcttcttcccctt

SEQ ID NO: 186926 - DNA, 664 bp, Arabidopsis thaliana
  unsure (1)..(664): unsure at all n locations
ccctcctctccccccccccaccgggggggagagaatacnttgggaacccaacccccactcattttagggaaaaacccttccccccttcaatataccccttaccccaatttccccttttccacccccggggtgggggaaatttcaaaaaaaatcctcactacccacgagaccttctttttttttttccctaccgtttctcttatccatttttgacatcctcccaccactcatattttatatccccccgttattaaaacacatgttttccttatttatttttctcaacacaaaccgtatttcccatttccaaaatccttttttataaactggggcgagagaaaacctcaacatttggagttcccaccctaagaaaaaataaccaaacccccctttctcttttctttttccaaacccttccctcacccttttgacccctacatttccccctcttcccacaataaccttctcgccctttccaaacctcaaaaatcctaataaaaaataatccccccccctcgcttaatgaatcaacatttaacattaaaacccccccctttttttaaccttccccccaatccctcacacctccttcctggtttccccaaaaaatactcaaaaaaagcatggtttttcactaacaacccctccccccctttactctcca

SEQ ID NO: 186927 - DNA, 296 bp, Arabidopsis thaliana
gttggctaccgcacccggggggggggggggggatttttggatactaactcccctcactaaaggggaaacccggcccccctccgggacccggcctcaattcccctttccacccagggggggggggcatttagaaagaacaacaaaccttctatctataaccatgggatccttccaaggaatcacctttaagcccggacaacccccctttctacacccaaaaacggggggtgcttcaagtttccaaaccaatattttttttcctccacccatccaaaatattttctcggcgggggggg

SEQ ID NO: 186928 - DNA, 488 bp, Arabidopsis thaliana
  unsure (1)..(488): unsure at all n locations
tgtggccccctttccgggccgcggcccccgtattccccttttcccccccgggttgtagggggggggaaaaaaatatttatcaattaaaaccccccccttcccgtgttcccaaaaggggccgcaaggttggcgagattcccctcccagcccattgcctgtgttgttttcctgccggggggggggccctcctcgccccgttcggtgatctccctctaacccccctttttttttggggatgctgggccnccatcggggggggctcaaaaaggacgaactccgccggccaaccccctccccccgctcccgctcaggcgtgcccggcgcctcgcacggggccgtcgaacccttctccgtcccacggcggcggggcgttccgcggggtgcacggcagccccccgggttttgtcacctggagcccggctgggctcgctctcccccctcccccgtccgctgtgggagcgccgcgtggcgtcggatggtcgtgtccg

SEQ ID NO: 186929 - DNA, 506 bp, Arabidopsis thaliana
ccaaaattaataacctctccccccggggggggggaggtggtccaaaaaaaaaccccctctttttttcttttctttttggggggcgagcaaggccgtcgggaatcccccccccccccgaagaaaattcccacttaaaaccaaccccccttaggcgggggcgcgcccaccaacaccacacaaatttttcgccgccgccgacccccttaaccccccaccctttttttcttgaggggagaggggccctctcattaccggcggggcttcaaaaagcgacaaacacccacaagacctcgtcttctccccaggggggagacaccctccccacctctcctaccacaccaaaacactccctcccctgcaagcgcaccgcgcccccccccccacaccacaccccccccctcttttccaagggcggcggcccgacattacccgaaacacaggccgaccctccctccacaaaaaacccccatcccccttttccccaaaggacccgcggaccccccaca

SEQ ID NO: 186930 - DNA, 496 bp, Arabidopsis thaliana
  unsure (1)..(496): unsure at all n locations
aaaacctctcaacattaaatgtgatcctacaaaacctatttcctcttngaacttgttttaagagggggattttctttttccaaaaacctgaaaaaacttttttaaaaccaaattttaccacactgaagaaccttattttggggagggactcccaatttttaaaatatccaccctacaaaaaaaacttttttgaaattcttaacttcacccggttaaaaaccaaaaaccttaaaccttttattccccacttttttaaagcaaaataaaggaaaaacggcaaaatttggtccttatttaacaccaaataaaattagccccattttattcccccccgaagcttttccggggggttatttttttttaattaaatcccagtcttaaaccacttttgtgtattaaaaccaaatttctttttcttccaaaaaaaccctataacatattgtggaataggaaacaaaataaaaactttctttttgaacccgcgaagggtcccccg

SEQ ID NO: 186931 - DNA, 518 bp, Arabidopsis thaliana
  unsure (1)..(518): unsure at all n locations
aaaatcttccccccttccataccccgcccccaatttcccctttccccccccgcgtgaggtttttaattaattaannaaaaaacccaaaaaccaattctttaaaaaattttgcacaaccccccaaccctcttttcacttggcccctttacatttaacccacctcctttaaattccccttacccttcccccccccttttttttttggggtggtgtccccccccccccgttttcccaaaaccatatacccctcccctcccttttttcttctccttcccccaaatattctacccccccaagccctccctttttcttaatccataacccctctttttcttcgcgccttctcaaccctcctcgtctataccccccccccaaaaaactcccccccacacaaaaaaacccccccccccatctaactcccattctctccccctcactaaacaaaaactctcttattcactcccttaaaaccactttcccccctatcttccccccctccctctccccacaactccttt

SEQ ID NO: 186932 - DNA, 241 bp, Arabidopsis thaliana
  unsure (1)..(241): unsure at all n locations
tgtgggggtacgggcgggacaacgaaaacaggaaacatatatactcatcgtcctgaattgtgatacacacttacaagagacctcgcgagcacatacaatgtacgactaagactacgtanatcacttgtagagatcctctcttgttacattttgtgttaatcaccacgcgacccgctgacggctatgatggaggagaagaatggagtggaagagaagatattttttttacgcagcggggggg

SEQ ID NO: 186933 - DNA, 480 bp, Arabidopsis thaliana
  unsure (1)..(480): unsure at all n locations
cacccccctctactttccccctacccacacacttataccctatatactactataatcattttaccctattttttcctattatcaactcacttctcatttctttccactatccatcatctcctttccctattttttctcccggggggggtttattatataatcatccttcatatttcttcacaaaaaaaacaatcacttcctcaaccatatactttcactctccttcccataccaattctccctcacctccatcttcttcctcttccttttccttctttcagtatcttatctttccnctatacctccactctcttcataaacttatttatcttacttaactttccctttccttctattataatctatacctccatcattaacactcatcaaccacttctcacacttatctaccaacactcccccctactttcttctctctctaccaaccatattacaaaatcttttaattatttctatcac

SEQ ID NO: 186934 - DNA, 218 bp, Arabidopsis thaliana
atgtatagagaacggtgagaagagcgcgcttcatgcgtccgcgcaaacttctacatacatcatcctctactccatatccctacgcgataaatatatcactcaagcgcaccacccatccaccactcccacagccttccctctccccccgcccacactaagctacctaaataataatagcgatcgtgcccttgctatccaccgctagagcttgtcacaca

SEQ ID NO: 186935 - DNA, 570 bp, Arabidopsis thaliana
gaagtccgcggccggcgagcggttccgcgcggcggggggggagatgcgtgcgggtaccggccccctcgcgcttttagggcgggaggcaggccgacgcttgctgtgcgtacgcatcgcagagactctgcgattttcccgtgagggtggtggagagggtctcccaaaaaccgtatagtccccggccccaccccttggccccgcggccggcgctcagtcgacggcggtctggggcacgggcggacggaaccgttatgggcccgtggcggccgttgtcttcctcgtctactcaccgcgccgtagggccggtgtagtgtctacgtcaatgcggccgagaggttttttttcgagggggggggggagccgaacagacgtgtcacagttcggcttccgaccacaaaacacctaccgcggcgtgcgtgggcacacgcttcgttctcgggctctcgatctctgccatagcaccgcatgcatcctaggggcgacagaaggcggtaacgaccccgcgtgcacagtgcgcggcggctgcggcgcgtcccactacggcctacgaggctcgtgagggatggttaa

SEQ ID NO: 186936 - DNA, 648 bp, Arabidopsis thaliana
  unsure (1)..(648): unsure at all n locations
tccctttcccccctcggtttgggggcttaaaaataaaaaccccattttaaattttttcccttcaaaggggaataacctctaaccccccttctaaaaaaaaaaacttccacacccttccccgttgattctcacccaaaccaaacccctcttttataaaaaaaatattttatccaccccgtgttttcatttcttttctctttctctccaaaattatttttttctttcgcggaagctgcggcctcttatacccccagtgtatgtctcccctcctatataacgacttataccaccacacccactcttttctcttgtgctctctctttaaaacacaaaaatccctccactccttctctctttttcccaacacatttttatccacacacaaaccacaatatctttctccctttcttctataagcaaaccaccctctcctctattctttttacattatctttttcttcccccccccgaacaataaaacacaccnccaacattttccccccctctccttctctcctctcttattataatacacccctctacttttttataccaccacaatctatgcgataatataatataaataatatctacctccaccaacaaaaccattaaactctcttctttcatataccccctctcctctta

SEQ ID NO: 186937 - DNA, 624 bp, Arabidopsis thaliana
  unsure (1)..(624): unsure at all n locations
cccccctcccccccccgcgccgggggggggggttggttggggcgggttctgccgtttcggccccgggccggcccccccctgggcggcccgcgttccccttttccntggggttggggggttccaccaccccccccccccccccccccccccccccccccccccctccccctccttctccctccctctcctcctcctcttctctctcctttctctcccccccctcccccccctctctccctcttccccttttctccctccctcccccccgcnctttttttttttgggggttgttcgggggccnccccctcggggggggggcntcatcctcggagtgccccttctcccttgtctttctctttcttctttttnttttttctcctccnttncgtcctcccgccccgctcccctccctccggccgcgcgcgccctgtcgtcgcgggtggcgggccttcgcgctgccgcgcgcgtctgtttgtgtggtgcccctctcgcctcgctccgcgccgcgcggcgccgctctttgtttctccgtcgccgcgcgctcccgcctgcctcgcccgncgttgtcgtgtttctgttctgcgggtgcgggcgcgcggccgctccccgcgcgnccgcgtcccg

SEQ ID NO: 186938 - DNA, 594 bp, Arabidopsis thaliana
ccccctccaattatcaggaaaaaacccccctccctactaaatcccataccccaaataaccatttaccccctctgggattaggggttcctcaaaaaaaacacaccccacatccaccttttttacttccctacctcaccctctctccatagaaattttttttaaatctccaataccattttccaattccttacacaaaaacaattttccttttctccatatcaccttctcttttttcacaatcaacccccattttttttttttccccagggtgggggattccttccttcatgcacatcatcataaaaaaaaaaataaacacctcccatttactactacacatcaccatttctttctaatctatacttctccttcaccttaataaacaacaccccccaccctatttatactctttacacacctcaaccctccttcactttcctttcctttatacccctacatcttattattatattaaacctctccatcatcctctatctccatttaccatctccatccaatcttcatcatataaatcataatctttactctacccaccctatcctcctctcaaatcaatactttaaaaaaaaccaa

SEQ ID NO: 186939 - DNA, 550 bp, Arabidopsis thaliana
  unsure (1)..(550): unsure at all n locations
cccccccccccgccccccccccgcccccccgggggggggagaggattggtcgaggtacaaccccccccnaaatatgaggggaagaccccttgccccccttcccattaccccttcccccaattcccctttccaacccctgggttaggttttataaacataaaaattttccctttctantatcattttcataatcccttcaatctncaatttcttccacccccaaccctccctttttacccttttttttttcccacctttacttcncctttattnttcttccacccccatattctcaaacggtgcccttacaagccccccccctttttttttcccggggtggggggccnctcttttctggggttcttatcaaaaccaccaaaaccccttttcccccaattttatttcacttaaaaaacctncctttctttattcaccactctttaaacaaaaacactttttatttccgcccctacctcttttcttaccaaaacaaaacccacattttctttctaaccccccctccttcccatcctcccacaaaccttttacc

SEQ ID NO: 186940 - DNA, 555 bp, Arabidopsis thaliana
  unsure (1)..(555): unsure at all n locations
ggggggggggggggggaatatggggggacggcccctcgattttggggggaaccgccccctccggggcccggcccaattcccctttccccctgggttgggggggtataacaaaatactttttccaccaaccttctttcccaaaacaacactaattcctctccaaacaaacctttttnttccgtttcccttttttttcaaaaccccacacacttaacatcctttcccccaatttttttttgggggttgctgggnncctnccccgggggggaggcaccagggagggaagctttttaaaaaatttgccccttgttcngagtgcgttttccgtctcccctggtctcccccggggatacaccataacgccccgtttgggggggggggccccggaatgtcccgaaaaggtggggtccctttttttgggcggggtgggggtagaagcgtcgttccttttttcccaacagggtttggtgcggagtgctcctgacagaccagttttcgcgcggccgcaggctcgccgaggggggctccggaagagtgcgcgggggcaaacgtgcg

SEQ ID NO: 186941 - DNA, 558 bp, Arabidopsis thaliana
tttaaaacaaaaaaccctctacccccaccttccccccccttcttccttttctccactcttcctttcctcttcgccctgccttccactcctcctctcattcagttgccctcgctgtctttctttccttctcttatatttgtctctttgtattctcagcacctcttcgtctcgcccttacacatccctttctctttttttctttcgggctctgttttgtggtgcctctccactccggtggttcggtctcaaacaaccaccaaaaatctctctccgttctccctttctctctcccctccgtcaccgttcccccctctctccttctgcctattgttcctctccctccccacaactatccctatcctctcctctctttcctccaccgtctcttctagtctttctctttttttattatccatccttctctaccttatctgtcctacgccctcctctcccattccctccctttgttctcatcgtttcctctttttcctccttcctttcatctattaactccttctttcttctctctttaccctccatttttctactcattctctt

SEQ ID NO: 186942 - DNA, 318 bp, Arabidopsis thaliana
actcatccgtaataacccactcgataacgacaccttattaagagctcacgccgacccaccggaaggaagaggttttttttttcgggggtgggggacccccgcacggctttttaaaaaaaaaatctctccgctttagaccggattgaaactctcactatatctctatataccctagcgcctccatcctataatcccattcattaaacttgcctactcccgtcctagcgtgccatcttcaatacatcatcctcatccaatttttacttgcatactacccgactatcatcccacgcgccaagtcattcaggtctattttgc

SEQ ID NO: 186943 - DNA, 512 bp, Arabidopsis thaliana
cgttcccccggggggggggtttttaaaaaacctttcccccttttttaaacattttcttacctcaaaacctcttaccctttggggggggggtatcttccttccaaaaatttaattcccacgcaccccggggccccaaatttgtttttaaggggcggaaaattttctttttttccgggggggggggcgcccaatcctctctgggtttcaaaaaaagcaccaaagctcccggggttttttttttttttaaacctccaatctcccctccccttttccccccctttttaccccccctcccttaaaaaaacctttttcgccgcttttacaaaaggcggaaaaacaaccaacctctcccaaaacccccttttccccccgccgcttttttttttcttcaatttgcacgcccggcgcgcggtttacacccaccccgcgggtgtgtttttttttagggacccaaaaaaacaccccccgcccgaagaggggcctctgcccccccttttttttcaccccccctc

SEQ ID NO: 186944 - DNA, 195 bp, Arabidopsis thaliana
  unsure (1)..(195): unsure at all n locations
ccctccaggtcccgggccggaattcccgggtctacccagggggccgtgcgggtaaaaaatctatccnactcccacaaattaaacatctcctttaaataaaacttttcctaaaaatcgggaaccctgtaaataatatcggacggagactacgccaacatcatacattaactaagatactgcttgaactaaaacaaa

SEQ ID NO: 186945 - DNA, 485 bp, Arabidopsis thaliana
  unsure (1)..(485): unsure at all n locations
aaaaagaacgaacaacaccgacacgcgccgcagcgagacgacaaaagagagacgcaggacaggcgagaagacaagagaggcagaaccgaaggcacagaagggggggcgggaaggcgcgcacggacacaacacaaccaaacacacgcaaggacgacggccgaaacgaagaacgcgaccaaggcacncacgagagcgagagagcgggaaaagaccgccgcacgcaaccacaccccgcaacaacagacgcacccagccggagaggaagacacaagacacacgaacaaacagcaaaaaccagacgcagaaccaagagacaccgaacaagacagagacaagacaagaggaaccagaggggcggaagagacgaaaacggaacaagcagaggacagacaacggccaacaaagcgggagaggggcgagggagcgtcaagcaaagaacccgaacagggcagacaacgcgcgccgagagaagaaaaaacagagaa

SEQ ID NO: 186946 - DNA, 529 bp, Arabidopsis thaliana
  unsure (1)..(529): unsure at all n locations
cccccgggggggggggttttaaataaaaactcctttttaggggaataaaaaatttttctgggggaaaacccgcctaagggggggtttttcccgagggtgttttaaactaaggggggggcgctccctagttctcctcccccctcccccctccccttgaatcaaggggaaacctttttcccttgggggggcccgggatccctttatcttaggggggggcgccccaaaaaaaaaaacattttcccggtgggggggggcccctggggtggcgtntattaaggctttcggcgcgcggcggaggttggaacccccggccccttgggtttttagagttctcccccctccgcgcgtgtggggaaggggattcctcctctccctccgacttcctcgttggttttggggggggagcggactccccgtaggggggaaatccccgcgggggagcccaccccccaccctttttttttgtggggggacgggccaccccgccgggggggaggaggaacaaatgtaaacccccccgtcgttggaa

SEQ ID NO: 186947 - DNA, 588 bp, Arabidopsis thaliana
  unsure (1)..(588): unsure at all n locations
cccccccccaaaaaccccanagcccaaaataaccccctttccnccccccggggttaagggccggaaaaaaaaaaaaacanccccccaaaccttcncccccctttttataaccttatttcccccccccctccctcccccaccctcccacaactaaaaaacccctccccttaaatgatctcaataccacaccacaccgccccttctcttctttttactcttcccgaacaataccagacaccttttttctttccgacattgtttgtggaaaanaaacaaattgccgacgtgctctaaaactttatgctaattccccccccataacattttctcccctcccccctccccttcaccccaacacctctttctccttttttttaattcccaacccccctttttccacacccccctaccattccacttctctcaccctatcttccccccttcccatcacccttccccctcttaaaccactccctccttcatcacccccctcttcaccctccaccaccctcctccccctcttcccccataaaacttttcccctttcccccccacctcctccactcccgctccacccccatcccccct

SEQ ID NO: 186948 - DNA, 514 bp, Arabidopsis thaliana
  unsure (1)..(514): unsure at all n locations
acgcgtacgtaagcttggatcctctagagcgggcgtccctggggggtgaaggctttttcttgtgttgggcaaaaaaagcattaacaaaactatttttaccaacttccaaagagttcataaaaacgccaacttgaacacctttttaaaaattaccacaaaacacccaatagggccacaccaaataaaaaaggtnatgtcccctgcttggagggaaaaaannaaaaaagatnnnatcccaaacaagaggggaggtaaaaaacacccccaagaagaaaccgcccttccgaggaagttcctaaaaaccggtatggacataaatggaccttcgggaaagggcgaatgatcaatcgactaaccgccaatgaggcgtcgggacaagccctgaaaaaataactccgctctttggagaggcccgaggtttgttcttaagccttcggacacaacgagctgggtggtgggtcctggcccccaaaggtagaggacgttacaccggagctccggtggagttagaaag

SEQ ID NO: 186949 - DNA, 461 bp, Arabidopsis thaliana
aactttatacaataactagagggaggctgggccccctccaggtaccggtccgaaattcccgggttaacccaggggtgcgagagattaccttattttttgtgacccacttatctaaagggggactttgattcttttattatgtgaaaatttctcggtcatactgtagggattatatcctccacagtgtccctaataattaatggatcttaaccaagattgttaattcttttgggggggggataaaccatacaaaccatatgatcaactatgcctaaaatcacacccaatacattttaggagtccgtttttatggtgagatcttatccagggagactcaataataggacccccacgaggcaataatttattacacgggcgaattccacttaataggattggtaatcgcgtacctttacacctggggggcctccttagctcaaatgactgggaaattattttgg

SEQ ID NO: 186950 - DNA, 446 bp, Arabidopsis thaliana
acctaagcttggatcctctagagcggccgccctttgggtttttttttcaaacaaaaaccaaaaaagaaaaacaccttaaaagttcaaaagatttgtcatacttttttttaacaaaaaccagaaaaggggattttaaaaagatcaattctcccacttcttgagctccatgccatctggtggagtgctctccactttcgggagggccaacttctttccagtttttcaacaaaaccaacccattcaactttgcaaatgatttgttcattgccccgcttatgtgtttatctgaactcaaatttatgtcgctaaaaaatttggtcaatagcgtaatctccaataagcttctcatccttgtcctgtttctttacttaaacttcccatctggtcccaattctttttctgggtttaaaagaatgggtccacttggtctttgcaaaaaggcctaa

SEQ ID NO: 186951 - DNA, 643 bp, Arabidopsis thaliana
aaaaatcttttgacttgcccttccccccctccctaaaacttttgcttccctcttaaagcccgccccccccttaagcgtaaggggggggttttttaaataaaatttttttaaaaaaaagggtgttttttaaattcttatttttcaagaaaaggggttttatccactcaccccaaaaccgtccctttttaaaaaagctttttaattgcctcaaacacttcttgtttttgcccttttttttttgttttaatccattcctttcaaaccaccatttaacgccttttttttcccgggggtggaggggaaaataaaaattggggcctgttttccaaaaataaaaaaaaaaaaacctgggttaatttctccaaaccttacctttttctcttttaaaaaattttgaaaaccttaacctttaacttgaaaaccctttttcaccccccccacccccaaaagttttgaccccttttgatttgtctcttttcctcttccaccaaaaaaaaattcttctccccctacctttaagccgcaaaaattttttccccttttttttggcgccccgctaaaggaatttcactccccaaatgggtctttttctcctggggggggcctcccccccaaaacataggctcccttaaagggggtcccc

SEQ ID NO: 186952 - DNA, 458 bp, Arabidopsis thaliana
  unsure (1)..(458): unsure at all n locations
ctcccccttggtgttggtttttttattaaaaacccttttctttttaaaaataaaacaaatttttcccaaataaaaaacaaggaccctcccaaaaaatcctttttttaccaccgccgtttcccttttccagaattatcttataagcccattttttttttagggggcgcgctttacctttcctcggttcccacacaaaaaaaaacnaaacttttttgataattcccattgccctatttttttgtttaaaaaaaaacaaacccccccccttttttctataaaatttcccctttagacggggttcgggaggtctcttctaacacaaaaataaatacatcctcaccccccgcccctttcttagattttttcacacccccgccttttttttanaaactcccttccaccctccactttcccccccttcaacttcgctttatcttctcttaaatccttctcaacac

SEQ ID NO: 186953 - DNA, 155 bp, Arabidopsis thaliana
cactctatacactactataggagctggtaccctacagtaccgtccgaattccggtcaccagcgtcggcggctacgaaccctgggcgaccctggcacccactatggatccatgccaaaaagtacaaacgcgtgactcaacgaaaaacatttgtccg

SEQ ID NO: 186954 - DNA, 601 bp, Arabidopsis thaliana
  unsure (1)..(601): unsure at all n locations
ggtggggggnggggggggtagctagtaggtccactttcaacactcttacttcctcccccccctccctaacctttgctcctctaaagcgggccccctttggggggggggggtgttaaaaaaaatttttttttatctccgcggtgatgtccgggtccggcgcgggcgtccgaagggcgcgcgggaccgcgcggaaccccgttttcgttgtggtgggcgggtcgggtggggcagtgggcgcatgatccccatagttttttttttttttgggggggaggcgttctccctttggggggttcttaaaaaaaaaattgatgcctggcggttgggtctttcctcgttacgctatctcggggctttgcaaagggtgtgcacacggcctggtgggtcgcgtgtaggggtgctctaacgtttatcgtccctctgtttgaaagttagggtttcgtggccctctaaggtgatcgtgtgttcgccgtttgtcgtgaggttcttggaatggcgtatgttttaggcttctttccccgcggagggtgcgttccggcggtggccgccggcgccattggggtttcttcgctgacaggcctctgatcgtgttggcttctat

SEQ ID NO: 186955 - DNA, 505 bp, Arabidopsis thaliana
  unsure (1)..(505): unsure at all n locations
acgtcgcaagcacgcgtacagtagctaggatcctctagagcagccgccctttgtggttgtgtttttttttttttattttttttaaatccagaggaagttatggttccccaccgtgcccccgccgcggaccagaacccccaaaagcccatatttcggtaaagaacgtgtgggaataaaaagggcccaaaaaaaaaaaaaccccttttcttttcttgggggggaaaaangaaagaggggaaaagggtttaaaagcaaaaaagaacacnggacttttggtgcccacacccttggggttcttaaaaggaggaaatgctggctggagggttttaagggctctaaagttttaaggccctttattcaatcggagttttggacccgctaaaaaaccttgggcccggaaaaaccctgaacccctaaaaacccccagtaaaggggcgtagaacgaaaaaaaccggacccaagagggcctttgtcaaaaagctctttcccaaaaaacccttaaaaa

SEQ ID NO: 186956 - DNA, 443 bp, Arabidopsis thaliana
  unsure (1)..(443): unsure at all n locations
ccccccccccttanggggagagccccggcccccctcccggggccccggccccaaattaatttccctnnntccagctgtgctaggtggggccaaanacaaacacttttttttttttttttttnggggggaaggagtgcgtgtggaattcccccacccccggagaaaatttccaattaaaaccccgagcctcaaaaggggctgtccacccgtaaataattttttccccaatgaccccttaaccccaaacccattttctttaggggtagttggcggnccccttttctggggggggttttaaaaggcacctaacccgaagggcgngtttttcctctcccgggggcgcccacctttcccctgccttaaatggataaaaccttccttcggtgcccagcccaagccgtgtttttttatttataccccccgaataactttccccgaggggg

SEQ ID NO: 186957 - DNA, 535 bp, Arabidopsis thaliana
cctaaacctggaacctttaaaacggccccccttttggtttttgtttttttttttaaacaaaaaccaaggttaaaaaacccccccctttcttatttgggcctttttcccaaaaaaaacccaaaaaaaaatttgaaaagggggaatttataaaaaaaccctccccaaaaacttaattttaacaccctctcccaaaaaaacaaaaaaaacccatttttttttagggaggggggggcgttttcttgccgtgggtaaaagaaaataaaaaaaaaaaggggcacaatatgtgggagaaccccttaagacatcaacctctctttttggccccccacaccaccctgtgggaacccccccccaaaaaaataacagctaacttttttcccctccagaaaatcctagcggcttttataaataaaaaaaaaaataaccccccctcctctctctttgtaaaaaaacccatatagaaaaccaacacacgcccccccacacaaaaaaaaagaatcttttgtgttccctgcaaaacacacatcgacaaaaa

SEQ ID NO: 186958 - DNA, 637 bp, Arabidopsis thaliana
  unsure (1)..(637): unsure at all n locations
gtacggtcgggaggcgagtggaaggggccatcgcacgcgatttaaggtgtcgcccacggggcggaccgagtttggcaacnaagaggagggggggggggaaaactcttctatattggagggggggaccacactccttcaagaaaanatttttttgaccgttcccatccccacccccttcccttaaaaccccttggattcccctttaaaaaagggggcccccgccctttttggggtttttggggttttttaaaaaaaaattataaaaaccctttcccctttttcttttttttaaaagggtgtgggggcccaaaattggttgtgaaaaaatgagaatatttgaagttctccccccggtgggggaaaacccctttccccactttttaaccccccaaaaagggccctcaccccccctcaaaaagaatttttcgcccccctttctcccccccccgaaggggggggaaaaaaaaaaaaatacaactccccgccggcggggagggggggggggagcaacttccccctcctccttttgagaaaagaaagacaccacctttttaaaaaaaaacacccgggtagagggagaggagaaacaaattactctagacccgccaccattatgtataggagagaggcacccccc

SEQ ID NO: 186959 - DNA, 346 bp, Arabidopsis thaliana
ggggggggggttttaaaacaaaaccccccttctttaaaaaaaaaaaaaaatatgttttttgtataacttgccaagaggagatctccccccccctaaaaagtacttcccccttctcttcctccccggtaaaaaagacccgaacccaatccccgaccccttgtcgcggggctgttgttttcccttttttgaagcggaaagataacttctcctatggccccccccggggagaaaatttgaaaagtgcaaggggtttcttcaagaataaccccccccaggggcgccctctcaaaaaaaggccaaaagggttgtgtctctctcccccccccacgttttttatcgcggggtg

SEQ ID NO: 186960 - DNA, 286 bp, Arabidopsis thaliana
  unsure (1)..(286): unsure at all n locations
gggaactcccccttcctagccttgatcctttaaacttgcccctttgggtggggggattaaaaaacttcatntttttcaagggggccaaaatttttttcctttttacaaaaaaaagtgtttagagggttgtcctccgcgtcgaaatacccccccctttttattttcgccttgttcctgtgttaccgggttctccagttcttgaaagccccgtctccatctctctttgtgggagaagaaagggggttctnttttattgggggagtttttttaaaaaaaaaaaaagagc

SEQ ID NO: 186961 - DNA, 414 bp, Arabidopsis thaliana
  unsure (1)..(414): unsure at all n locations
ccactctatccatacttaggaaactgtaccctcagtccgtccgaattccggtcaccccgcgtgcggggatttgtgtgagtagtaaatcccaaaatctaaatggctcacggaagctatcctatcaccgctttctccttttactcacaattcctttttcctttccgacactttctcgcttcctctaggggatcttgattanctttacctgcatctccccttacaggggaacttcctattacaaacaacctcaccccctacaaatgatagatatgtgaaaataggagcaatggangaatcttttctttgcacctctcctgccttttagcttcgggaccttcactgcgaaatgctaattcgcttctatttcggacctaaagacagttttataaccatcactgtatatttcttcaaaca

SEQ ID NO: 186962 - DNA, 225 bp, Arabidopsis thaliana
ccttttttccgtatttatatcccccttaaacaattcgtttcttgccatctcaatctctctgtcttaattctcctacgacctgcttattatatcatcctttactacaacttctccaaataaactcccttatcatctatacatcctatggttgttcatctattctttattggatttactctacgtcatgtctattttcatctatatgtcttatacattcaagacaat

SEQ ID NO: 186963 - DNA, 369 bp, Arabidopsis thaliana
  unsure (1)..(369): unsure at all n locations
agctggatcctctaacgtcccctcggggggggataaaaaaaatttccctctaaacaccaccccccacctcgcccccccgcaaaactatcctcttttactcaccccccccccacgccgaaacgaaaacacctcttttttttatntcccctccaggagaggggtgtcttgggggggactcaaaaaaaaaccttttgtttgagcccccccgcgcggcggggtcgggaccgctccttcaacgatgaccacccgtccctctcctttttttcgatggggtgtatgcacccgtcccctcttttggggtgtaccgacactcccctccttccccttttgggcacaagctcccggttcttctacgaacacccggcgcga

SEQ ID NO: 186964 - DNA, 339 bp, Arabidopsis thaliana
  unsure (1)..(339): unsure at all n locations
tttttnnttatatccattacattcttcttttngaattaaatccncatcaaacccacttttaaaatcaaaactccacaaaaaatncccaccctatttcatggtgtgaccatccacctttcaataaacatatttccaaggccttccngactcttaccaagcgtgttttcaccttctttttctttctaaacctttcctttcaacctctaagttccttcttaacccaaaattcctcctaatttcatttaacaccagaaaattttctcacctttaaaaaatcttcaatccttcttaacccttattcttttttaaacctatatacctttattgctcatcccaccc

SEQ ID NO: 186965 - DNA, 305 bp, Arabidopsis thaliana
cctaaagcttgggatcctctataagcggcgcgccctttgggggagagggggtttttaaataaaatatacattttcacattagtcaccataaccataaaagaggctgtctagtcatattcgccgcaacaaaatcaaaggcttccactgtttgtgaaaaaaacggcggggggcgtacccactttctctcccaccgggcgagaagaaacgagaaaaaaaaaccctatttttttttctggggaaagactaggcctttcttatagggggggtttccaaaaaaaaaaaacacgggcgcaatctgttttttt

SEQ ID NO: 186966 - DNA, 493 bp, Arabidopsis thaliana
gtcgcatgcacgcgtacgtaagcttggatccttctagagcaggcggcctttgtgttttgattttttttaaattggattattttgaaattgaacattataaaaatagttttgtgtttttaagcaaaaaattaaaactttacttttgggaaaaaaaggggggggattttttttttcacggattagaaaaagaaaaaaaacccaatttttctcgtttgaaggaaccaacggaaaagaaggggacaggggcccccgaggggaaaacggtttttgaagtgtgaaaaaaatatggattacaaaagctctgaaaatgaaggaagtaaaactttttttattcatttgtgagggaggcggttttaaaaggggaccaaaaaccagaggattgaaggggttgccggttttggcgtcttttggaacattattgactacagggccagaaaggggagactctatgggattaattaacttcatggtttaaacaatgcaaagaactaga

SEQ ID NO: 186967 - DNA, 498 bp, Arabidopsis thaliana
  unsure (1)..(498): unsure at all n locations
aaatatatatcttttttcccccccgccaaacaatttcccaaacaccccccttttttttggctcaaaaacccccacctttaccttttcccttttcccaaacttaacaaatttaaatactccctccctctctaaattttaaaaaaaaacaaaatcctttcttttggccgatngggcccccaacccctgggcatttccaaaaaatcaattttgtcccttaacctggagaaaccttgacactttttttatccccccttcttttgttcaaaaaaaaaaaacaacaaaaaactctttccccatccccctctttcccctttataaactaaacaaccctcctctttttaccccccatttttttcccctttttttaaaaaccctcttggccccgttttctccttttttctatcaaaccactaattttactcaccgcgttccttcacttttttttgttaaaaaaaaaaaactccacaaccctctcctcccctcttcttcccccccccc

SEQ ID NO: 186968 - DNA, 745 bp, Arabidopsis thaliana
  unsure (1)..(745): unsure at all n locations
ttttctccctctcgtacccgggccccccacccccccccccgaaaaaaaatcctttttcttccgctaccccccccaacttttgggggaacaacccccccccccccctccccttcccccccccccaatttttcccccttcccccccccccggggtccgagcccccctccacaaaaaaaatacaccccccttctcctccccctctaacctcttttccccaaccccctcttcccctcctcccctctccacaccctatccccaccccccccttcccctttctcccccgcaccatttctcctccccctttttccccccctataatccccccccccccaccgcttccctttttccccggtgttgtttgggcccccccaanncccccgccctctcctcaaaattcagtaacactccttcccttctcccaatctccctccccttccccccctctcccccttcccctcctctcctacaccctcttccttattcctctttttctcctcccctttcaaattacttctctcatatttccagatccacaccctccttcctcctctctcctccctcctaccccctccctccctttttcccctcctctcctctctctcactcatcaccccaccccccccacccccgttcacatacatcccacctcctcacatcctctcttttcaccctccttctctcctttaccctcaccccaccccttcctccttctcccctctctcccccctctcccctctcctctctc

SEQ ID NO: 186969 - DNA, 458 bp, Arabidopsis thaliana
ttggggggggggtttttttataaattttatatttaaaacacatctttcattaatttgggaccaagtttgaggcccaatttttccagtttcttaaattttctttccaaccaaaaacaacctttttttcttccgtattttatctggaaaaaggtctttcccggagggggcttttccttttttccccattcaaaaaaaaaatttggctaccaggggttcccaacacaaactttccaatttaaaaaaaaccattttttttttcccccgaacccccttttggggtgttacccttacccgcgcggattaaacctctcatgtttttccccccaaaactttccttcccctggggacaataaaacccgggtggggggtttttccttgtttctttcccattgtgcccccttttattgcccggaaataaaaccaaaatttttttgggcctcctaggatcaaaaaaaacc

SEQ ID NO: 186970 - DNA, 183 bp, Arabidopsis thaliana
tcggcctattctaactttttttctccaaacaactattatttacccaattctataaaacttacaaaaaaaaaaaaaagggggttacctatcaaaaaattttcccatctcttacatttacaactacgcttttataccttctacgaacttatctacttcccacaaacaactcttactaactcagct

SEQ ID NO: 186971 - DNA, 482 bp, Arabidopsis thaliana
ttctaacaaaaaaaaaattttgttgtgcgcgaatccaatctcgttcgagaggaaaccattattgtgcgtgtttgttaaaaatgggggaggttatcaccttttggaaaacgccagcgtgttgtttttattttgttgggggagagagggggcctcttgtgaaatttctctctcttcatttttgccgggggggggggggaaactattttataggggggggtaggatttaataagaacgttgggccgtttgggtttgggagcgtttctaaaagacggggtggtgagcccccttctccaagctctgggctaatggtgggggtgtgaacgtgggggtgttgtgtgggggcacacgggggtggggcgcgcgtgtgtttggttagccaatggcgtttttgggggaggaacgcggggtcttttgctttttagcgggggagcgcgtgcctcgcgttctttgttgctggggtggtggagggcgcccacccggc

SEQ ID NO: 186972 - DNA, 510 bp, Arabidopsis thaliana
  unsure (1)..(510): unsure at all n locations
cgtaagcttggatcctctagagcgggccccctttggggagggggggtnctaataataaaaaaaagttctgtttgcccccgggaaacccttgtgtacacagtacaaaagacaatttttttttttggcataaggttggggaaagaattgacttttccatttaaaaaggggccaaaggactttcctggttgtttttcaaaggggagagggaataaancttcttctcgtggccctttaaccaaaagcttaaaggggggggtgtttttccttttggggaaaaaatattgaaagactggttttctttaagggggggtgcgggcggccacccccttttttttttttgaaaaaagggggggggtgggccccgcggagggcgcgacgcgcgttttttgggaaaaaatctccttcgcgcgggttattccctctatcttttgttcgaaacggggagggtgcccccgggggcattcttctcgggggtgtcccgggacaaaaaccgcgcgggggagcgctctg

SEQ ID NO: 186973 - DNA, 536 bp, Arabidopsis thaliana
cttggcaacttaacataacatgaggatccctggtgcccaagaacaaacattaaacacgaccttgctggaaaaaaatgggtgaaatcccccccctccctaaaccccaaaataaactaaagaaaccctctttttttttttaagggaagaaggaggcccctttaccgggggtgttttaaaaaaaaaaaaagaggtggggcacacccttttgtaggggagggtgggccccccaccgttgagtttcctcacacgacccaaccgtgtttgatgtagatttaaacattaatatttctttttctctcttccatggggggggggcgtgtcccaggcggagaagacctccaccgccaaccgtggggggcgctgggtttttccaaagctcttttcccaatctttaaaggagaattttctgcttagcgaagaacaacctttggggtagcacacgatcttactcccttttaaaagcacacggcgaagggggttgcactcctccgagaaaaaaaacgtggagatcgttcctctcagtaagggtcgccaat

SEQ ID NO: 186974 - DNA, 377 bp, Arabidopsis thaliana
  unsure (1)..(377): unsure at all n locations
ttttcggggggtggngggggggnnnnngnnggggggggggtaaccctaattggggggacccctcctctccaaaacttgcttgacgttgccactcgcccgcccctgcccttaggcctttgggatccctcttagaaggcgggccgccccctttgggggggggggggggtggataaaataaaaaattttgttttgccgcccggcgaaaaaaaaagcgctggggttttttctttggagaattccctccccggggcaccctttgcgcggagagtgacctttccactctcttcaacacgttttttccctcttatgggtgcggtgcgcaatctaactgttttctttaaaagcgggggaggagggggttcttcgaaggggggggg

SEQ ID NO: 186975 - DNA, 486 bp, Arabidopsis thaliana
  unsure (1)..(486): unsure at all n locations
gcggggcccccttggggttgggggtttttttttttaaaaggggttttttcgggttttctcccatttttttttataaaataaacgtgtgggttttaacctgaggggagggggcgggaaaaaaagggggttaaaaggcgaaagcgcccggggtaaagggaacaaactttatcttacttaattttnggggaagaaggagaatttttcttggggattttaagaaaaaaatttttttcggtgcggggggccccccttaaacccctttttccaccaattttattgtttggggggccctttttttttcgaaaaaaaaaattcccccccgggaaaaaccctcccccgaaaaaccggagcagggtgggcccggagactttaggtgggggaaaatgtcccttattttttaaagggcccccccagagttttctcccgcgagagaggagacctcagaatcctcccgccgcgcggagggcgggcccaaaccttcgtttc

SEQ ID NO: 186976 - DNA, 450 bp, Arabidopsis thaliana
acgtcccctgcccccttcctaagcttggtcctctagagcgggccccctttgggtttgtgggtttctgtaatttaaaaaacaaactaactgcgggcttgtgcactaaatttatatatatatcgtctccctaaacaacccctattatggcggagttggaaaacaaacctaatttggtgtttttctattaaattaaattatgaatcctctttttataattttttgtgggagaggggggcgaaaacctgggggagctttattaaaaaaaacctttaccagggccgggccacttttttttttttcaccaaaccccctcccatgaacctgggggttaatggtttgggctcaccgggttccttcggccctcgagggcccataaattgcggcccctcccccttagaaaaggggaatcgccccctcggtttgtggggggttgggtaaattcacctttct

SEQ ID NO: 186977 - DNA, 659 bp, Arabidopsis thaliana
  unsure (1)..(659): unsure at all n locations
cccccccccttccctttaaaccttttnaaatccctcttanaaacctcttcccccccttttgaggttttgtggtgttgttaaaaaacaaaaaaaatataatttttttttaacacccccccattttatataaaaacaaaatttccccaacccccaacctcctcttttttattttcaaaaccctttatttcaaaaaacccccccccttccgaaatttccttttttcaccaaaaccttatttcaaaaaccttaaaacctttntttttttttttttattaagggagagagccctttttctccccccgcaacacccccttaaaaaaaaacaaaaattttgcttccttttaaataaattgctcccataatttgtaacatctttgtcataatttccccaccctcccccttaataaactatccttcttactttccctccccctcttccttcccnacaccatacaaataacataaaattcctctctctccccactttcaaaaacacccattttattattcccccccacctctccttctcctctctctttaccttcctaccaaaaaaccaaaataaaaaataatatcaccacatcctctacttctttctctctctcccatttaattatttcttactacatatcaccactctctaccatccctattatacc

SEQ ID NO: 186978 - DNA, 501 bp, Arabidopsis thaliana
  unsure (1)..(501): unsure at all n locations
gggggaagaaagaagaagnnggagaataggctacatgtgtgtgacccacccctccccaagaacctctttggaccttgggccctcgcccccccttcccctataaccttgtattccctctttaaaaccctctcccgccttttgtgggttggtgtgtttttttacaacccaaaaaaattattaactccccttttctcttttcattgtttccaaaattacctccccttattaaataaaacctttctaaaacttttcttttttccccccccccgcccttttaaatttatttttttctatacccactctccctagggaggaatttttccaacccctcaccattttttttttcgcggggggcggtgcccctttttccccggggtttcttntaccaaaaaaaacacaacttttctcttttttttttctacaagagacctatccctctttcttttaataaagacccctcttattcttctcttctaacccctcaaagaatatctctttttt

SEQ ID NO: 186979 - DNA, 395 bp, Arabidopsis thaliana
  unsure (1)..(395): unsure at all n locations
aaaaaaaaaattttaaccaaaacgtcttttcttcggtcccaaaagaaagtcttattaaaggcgcttaccaaaacctttcctccgggtccgtttttgggccacccagcccacttccgagggggggggtnaaaaaaggggtcctctaaaaaaaaaaggcggggggcgacgaccactttttaaaacgcttagtcgcacagctgcccgcggtgtatttttcaaccgctttgttgagaaggggtttggtcctccccccaagtaagtaaacaaaccgccgtctgtcttgtccacacggccgggtttcctcgctggcgttgagggcgctgcctcccccgccctgctagagggccacaaagtgtcgcgcgcggagcccgctacgcaagtacagcaagcgcgcc

SEQ ID NO: 186980 - DNA, 470 bp, Arabidopsis thaliana
cctaagcttggatcctctaaagcgggcccctttgggtttgggttttttaacccaatcaattaacttgaaagggacaatacttaaaaccagaaaaagggtttcccgatctaaaaaacaagttatctgggccctgttggaaagtataataccaagccctttggacaatttctaacttcgggcggaggttctttaaagcacggggctaatataaaaaactgaattctcgcctggcctcgtttcttctcctttggtccataaaaatctccaaggggtgctgatacccctaaaaactctgcttgacctccggtttaccaaggcggtgtggggttaaagacaagctccccccggccttttttccaaaatggtcagaaccccaaattggccccaggaaacatcaccaagtgagaactggggagaccctgtctagcttccattttttgttattcttatccccctaagggattaagctc

SEQ ID NO: 186981 - DNA, 663 bp, Arabidopsis thaliana
  unsure (1)..(663): unsure at all n locations
cctattaggttgnggggggaaaagaanagggggggaagccgatttaggtaaccactcctccaaaaactcctttaccttcgcccccccgcccttccttaacctttgaatccttctaaaacgttcccccctttggggttttgtttttccaaaaaaaactaacctatataaattttcctaaaaaacccgttttttcccctgtttcattaggtaaaattacccaatttaaccgtcaccaatttttttttatacctaggtttggaatcccaattcctctcaaaaggggtaaaatttttcttttaaaaggaggagggctcttntntttcttgggggcacccataaaaaaaacaaaaggggtggggggaaaaaacacccccccttttctcccatactctaaataaaaagagggcttaccatcccacaacatcttttgattgcctctttaaaaaggtaactctctggtaacacccctcttccttcccattaaaacaaaaacggcggggagaccccctaataaaactcccttcctttttcaccccaaaataccaaccctccacttctatataaaaacactacccttacttctccccaaaaaaccgtctcttatctttgggtctctccaactcctctaagagaaactccattcctcgtcgttatacaaaaaaa

SEQ ID NO: 186982 - DNA, 461 bp, Arabidopsis thaliana
gctgggcccctcggtacgggtccggatttcccgggtctaccacgcgtgcgggggcaagcaaaacgctggttgtgttttaaaaaaaaaactttttttttcatttccggaccggacttgaccgggcacctcctgtaatctctgctcacctgtcttcttcttcgatctaactcggcgacggtgcaccttataatgggggggcggcaactattccttttcggcgggatcttcccgaccttcgccggcaactctttttcttaaaattggtggagcagggaagctaccttcactctcatccaagcctggggtaatcgctacgtctacctcagctcaggtaatctgcgtcaaaaacactggcaagggggagtaacgccgttacgaccggactacaacaccggtcggaacgtttccggcggcaaatcgcagccgtatcgcacctgcgttattgtgaaaaccggatcgat

SEQ ID NO: 186983 - DNA, 278 bp, Arabidopsis thaliana
cgggccccccttacggtgcgcccggtcgagagaattcccggttcttcatccccggggtgtagggggcgggattcatcccctattacgccctaactctccaagaaagtgagataaaagcataccgcccaatcgaagaaattgctatgcgcgtatcaccctgtgctcgtggcgtttttccgacgcggaaacatcttttcccgccaccacccgaatacgcgcgttctagcctagttacgggggttcttatatttgggggtggccgcagggcgtcccgggta

SEQ ID NO: 186984 - DNA, 378 bp, Arabidopsis thaliana
  unsure (1)..(378): unsure at all n locations
ttcaaaaatcccattccatttacccaaaaaacggactcttataagacccccaacccatctgttcttttctgggggggggggggccccctctttgggtgtntccctaaacaccaaagcccccccttttctgttttcttaccacaccctcctttggataaaccctttctggaaaccccaaaaaacaaaccccccctgatttctaacaccccttctttcctccaaaaaaaaaagcggcaagggggcttttggtaaaaaaacctaaaaacccccaaggaaaccccccaaactgtctctttttcttcacgccccgtccttaaagtgttttaccaccctttcccttttgcgggggttgaaccacctccccaaatgtctctcccc

SEQ ID NO: 186985 - DNA, 473 bp, Arabidopsis thaliana
ccccccctccctaaaccttggatccctctaaaacctttccgcctctggggttgggggttttaaaaaaaatttcaaataaatctaaaaaaccttttttttccaatattttttttttaaaaaaggggaagggacgttaaattttttcccctcccgggaaaaaccccccaccccttttctccaagaggaaggtaaatttttattccctgaggagcgggggccataattttagaagcggccccccaaaaaaaaaaaaaattagaggaccgttttttcgaacaataaaagacccttttccctccctccaataaatttgcaggggctttgagaaaccactctttatatttaacccacctttccttcccccccttaggccaaaatgcgtcttctttattaaaaaagaccaccccaaaatttttcttgggtgcgtcttttctctcttcttaaacaccccctcccgccctctcccctatttt

SEQ ID NO: 186986 - DNA, 380 bp, Arabidopsis thaliana
ccgcgttcgtgagcttggatcctctagagcggtcgccctgtgggtttaagcctttatcaaaaaaaatgaaagaaccaacctgtggaaccttgcatttggaaatgttggcacatatgaaaccttacaacatgggttgaagtaacatatacccaaccaccttacataagaaaccaaccagtgtaacctataatctttctttttgagaagaaagcccaaacccagaaacaaaagcccaagaggaaggaaaccaaggaccgcccggcaccacccccccccgggagaggacaacaaaccaaggggaaacacggggaccgaagaagcccaaagcggcggcacaaacaaacggaggggggagccacgcagggaacgccaaaaccccc

SEQ ID NO: 186987 - DNA, 358 bp, Arabidopsis thaliana
ttcttatctacataccaatttaaaatataaacatttctctacttttccaaaacataagttcttaattttttcaaacaatttctcccaaaatataagcttttttaggaggggtgacccctaacccccccaattttaacgacactttaatcctcggtttctttccacctaaccactcctaacacaacccccatttacactttctttcctcccctattaatccggttaccctccctaaccctctattccacccccttcttcaacctaccactcacttcaacccgattttccccctccaaccaaaataatttccacttacacctcatctcaatttccaccacccttccccccccaatccccc

SEQ ID NO: 186988 - DNA, 489 bp, Arabidopsis thaliana
tcctaacctttatcccctagaccttccccttgggtttttgtttttttcaaaaccaatctttattccctaattaaaaaaaaaaccccccccctccctttaatccacacaaaaccaaaaaccccactaagaaaccttttttaacacctaatcccaacacaaactttttttttttttttctgaggcggagggatttttctcttccaattctttaaaaaaaaaaaaattttctcctcaaacctctcccgaaattaaaaacccccttttctccccacttcaacaaaaactattctctcttcccctccccctctccattttaaacaaacaacacgcataaccctctccctcccataggctctgcatactcactctaccccctaaaccccctttcccttcctcaaacacaaaccgtaaaaatgttccttcaactttttcttttttctcaaccaatctagtcctagaattctcattatgcctaaccaccctacgccc

SEQ ID NO: 186989 - DNA, 519 bp, Arabidopsis thaliana
  unsure (1)..(519): unsure at all n locations
acgtcgcatgcacgcgtacagtagctagtatcctctagagcagccagcctttgtgtttttttgttttgtttttttttttttatttttgttttctggtgggtgatcaacacgaaactaaatcggttatggggagaaaagggaaaaaaatagaaacttggggagaggaaaaatagtgttatttgcgacctagggaattttgacgattttcctccttagggaggaagnnatgttnaggaagaaaaagggtctataacatggtttggcttaagacagtgaaaacggaaaacaaggtacaaagggggtatggtggtgtattcagcaagacaaaaaccctttgaattggcaggaaaaagactggattttcaaaaaaagaaagaatgtggactttatgccaaaaggcacttcaacgcaattttccaaagtaaagacctaggtactttttggaaagggcacactaacgtgattctaaaaaaacccttttgtgcagtaaatagaagactcaccggtggggcctcaagg

SEQ ID NO: 186990 - DNA, 302 bp, Arabidopsis thaliana
ccccccccccttagccttgttcctttaaagcgggcccccttgggggtgggggtgttaaaaaaaaaaaaacccttttgtttaggtgtgcccaatccccttacgcccattttgttaagaagggaacaacttgtttccaagttttttcccccccttaatgggtgccttttactttcaaggcaaaggaagagtcctcgagaaattctttccaataaaaaaaaaacccgctcttttctttaagggggggggagggggccccttttttggggaccgcattggaaaaaaaataaagaaaactgtggggg

SEQ ID NO: 186991 - DNA, 427 bp, Arabidopsis thaliana
cccctcctagcttgatcccctaaacgccccccttgggggtgggtttttttttaaacacaacggtagggtggttttcctttaaccccatttttttttttttttatccggggttaatccccgacctcccggggttttaaaaaaaaactttaattttagggcttcggaaaagattatctcccggggagagggggacccccccggggcggttttccccaaaaaaaaattgttttgttttacccgggaaaatttttccccctctgtgcccacccttcttaaaaggctgggggagccccccgggaaaacggcttctgaaaccctctgcctcttggccacgctggtctctgtagaaaaaaaacttcccccccagggggggtccggggcccttttcatgtgccccccacaagctttcccacggggcccagcgacc

SEQ ID NO: 186992 - DNA, 522 bp, Arabidopsis thaliana
taaccttgatccccttaaccgtccccctttgggtttggttttaaaaaatatctaacccaaattagatatttataaaaagagggcgcctttcctttattttttggggggttaaatattaaaaagggggagaggtgttttattttttttccccctggaaaacacacccccaaacctttttgacttccaaattttaaaaatatttcttttggggaagaggggatcctttaaagggcccccccttttaaaaaaaaatgttcctaatttaaggggggttaattggaccccccttaaaaatcctccccccatttggggcaccaccccccgggggctttgcgtcgtgcttttccacaataaaaaaacccctacccttcgtgttgggggcctctcatccaccttgttaaacccttcccccaggacctggccaaaaccgcccctgtggcttttcacataaagacccaatgggatcttttcactggtgtgcaaattaaaaaaaccttataaccccgtgttctcgttttgccg

SEQ ID NO: 186993 - DNA, 130 bp, Arabidopsis thaliana
caggtagaagtcgagagaggagagagcctatttttttaacattcccccccacattttttgagcccggatatcgggcggacccaggtgcgcctgatgcaaaactcgatagctacgtttctaactagagggg

SEQ ID NO: 186994 - DNA, 474 bp, Arabidopsis thaliana
  unsure (1)..(474): unsure at all n locations
tttataaaatataaattaatccattccccgacccttatcctcgcaatcccaatataccccccatacacccgagttttttttttctagattgttttggnccacacaaatcacgcaacttcttcctccttccaccctataaaatccccccccccttctttcttcaccctacgtctctcttcccctttccaccacccacacacattttcctcacctcaccactctttcccccccctttccactcccatctccttttcccctccccaccaccttatattctgttattccccccccctcatctctcctcctttctcacatatacccttttttaacatgaatctaactcaccctcctactatcaccctcccccttcccccttcttcacctctccttttacatattttccccatttatccgatttccacaaccactattctctttcccacctacctttatcctccctcctcatcttccccc

SEQ ID NO: 186995 - DNA, 664 bp, Arabidopsis thaliana
  unsure (1)..(664): unsure at all n locations
ggggggagangggggggggaggaagctgacttggggacaccccccccaaacctccttngggggggcccgcccccccctcccttaaacctttgattcccccttaaacacctcccccccccctgggggttaggggtgtttctttaaaaaaaaaaaaaaattcttaaccctccctttttttttttaaagttttttgcaaaaattctttgaaaatttaaaattcaacctcccccccctttgggaacctctcttccttttttttacctctcaaaacgccttcacccccttttttaattttctcgccttttctccttttgggggagggaggggcttccctactattcccgcggctctcaaaacaaaacacaaatttttttccccgttggtcctcacctcaccttaacttcacaccccctttaaattacacctgaaccccccacacacttttccgaaaaaacccccacacctttttttaacggggctttccccaaaaaaaaccattgcggcagcaccttaaacatttttctaaccccctccccgagcttctctttggtccctttcttccctttacaaaaacccctactttcccaacggcttctcttcctcataatctttttccttcacaataccccctccctatatatcccctccccacgcctccctccca

SEQ ID NO: 186996 - DNA, 499 bp, Arabidopsis thaliana
  unsure (1)..(499): unsure at all n locations
tggggggtgacaaaacccaaaaaaaattcctaactcttgtgtagaacctttcacttcatcttttattcccacgggggttagccccaaacattttaacccccatttttgtttttccaattggaaatggcatccaaccgcctcaacagaatttcccacccctttttccccggggggggggccanaatccaagggggggtttaaacaaaaacaaaaagcgaatgggggggaggggggggaaaagcagacccctcttnccccnttttctccctggtttgttttctttttcagtttttctgcccggttgcgcgcccccccagggtgtctgctgtttccgtcctatgtggggggaggtgtatggcctcggttctgaagtttcgtttctgccgagttctctggtggtgcgtgcaagtacttttgcctggcgagcggttttcgccgccgcggccggcgggggtggtacatttctgtgcggcgcgcgcgttgccgcgggggcgcgggg

SEQ ID NO: 186997 - DNA, 478 bp, Arabidopsis thaliana
  unsure (1)..(478): unsure at all n locations
aggggaaaaagggggggggaacctcttttgacaccctccgaacctagtacaaacaacccccccctcctaaccctaatcctctaacccttcccccttaggttggtgtttataaaacaaccactnaattactattgacaactttaaaaccatctccccctttcctccccacaaaaagttcctataaaaaacccccacttaaaccattccctgcgcattattctccactcaccaaaccccttttctccaagggggtatctacctcccgagttccttaaaaaaaaacccacccctttatttccatcacaccaacacactcacaccccccccccaaactacactacccacgccaacactcccctccttctcttctctacttctcatctactcccacaccacaccccaactaaccaaaaaacacaccatcccttacccaaaaaccacccccccctccacacaattcatccctaaaattatcaat

SEQ ID NO: 186998 - DNA, 543 bp, Arabidopsis thaliana
  unsure (1)..(543): unsure at all n locations
aaaacaaaaacaaatttgtttttttctttgaattaaagaaaaccccagcccccctttccagggttttccctttaaactaaggttctttctctttttttacaccttgtttcccccccctaacctcttccagaacattgactttttttcccccccaaaattttttttccccgggaggggcggggnatagaaatttgtgccccttggttcataaaaaaacaaaatataggtatttccgcccagggcgcgagaccctgttggcgctcttttttcctgcttttacctagtaaaaagcctcttgtgcattgaaaaaaaaaaaatctctctccttttttcttgtttgggcagaggtaactatacaaccctcgaaactcccgcgcgcttccaatcctcccccctcgtgggttttttcccttcggggggacgaccacactggagttgtgttcttcgccctcgttgcctatacctttgtgccatagaaattctattctcgccttttgtgtaggcgcccgccgtgcgattaccatgccccacgttctgtgcttt

SEQ ID NO: 186999 - DNA, 193 bp, Arabidopsis thaliana
  unsure (1)..(193): unsure at all n locations
taagcttggatcctctagagcggcctgcctgggggggtgaagccctnaacaaaacaaatttggatttatgaaggagatacaataagcgcgagaccacgattgacactaagtggctatgaaccaaagttcctctcttttaattttaacatgaggccaccccaaaacctctacaaaaacatggcaatataaaccc

SEQ ID NO: 187000 - DNA, 499 bp, Arabidopsis thaliana
  unsure (1)..(499): unsure at all n locations
aaccccctncatcctacactaaagaaaaaaatcaaacaccccaaaaaactcccttcccctcactctccaccctccttccccccttccacacttaaccttcctccaccacttcacctccacaaactccccaaaccttccttacncccacctatacaatttttttttttggggggggggcccccnccaacccccattaacctctacccacaaacctaccaaccccaccctaagcgcgggggcggctgtcccatttctctccaaccgcgccaccccccccctcacaaacttcacccccattccaacccggatccccgaccccccccccacaccgaatcaatttttcccccctccccctacaaccggcggcgccaagacactcctaaacggacatctttatccacacctttctagaaaccgctgcccccacataccccacctgtgcgtgagttccccagttcccctcccccccctacacaaaaaccccctccccctacccccc

SEQ ID NO: 187001 - DNA, 534 bp, Arabidopsis thaliana
  unsure (1)..(534): unsure at all n locations
tttttggggggggagaggggggaaaagngggggggaaccctagttgggaacagccctcccaacctcgttgggggggaaccgccccccccttctttaaccttggttccctttaaacttttccctgggggggggggggcaaaaaaaatttttctttttctttattcttattatgttcctttatgtggcacatatatttctgcggccccacaccctttgtccaaaatttagatgtcataaaactacctttcctgttttaatttatttctcctttttggcctttttttttaagggagaggggggtncttttttgggggttttttttttaatcactaaaatttttctttgggcgcggcccctcgcttttttctttcgtgcgatttcgtgtaaaacccgtctttaatgtccgctgttttcttttctttcaaccctcctccgctttcctttttcacagcttctttctcatcgttttcctctggttgtcttctctttccaccttttttttatctcttctcccaatacctctcttttcttttt

SEQ ID NO: 187002 - DNA, 483 bp, Arabidopsis thaliana
  unsure (1)..(483): unsure at all n locations
aaaaaatgattcgcgggccctccccgcgtcgtcctccctggtctgtgggtctcttttccactcccccgtgcgccctctggagtgcccagacagccctcctttccgctgctccgagtccacctcctcatctaagtggcatccatttttttttagggggggggggctgcaatcttcccgtacgcttctataaaaaaatcattgggctttggcctatgtaccgtccggtgctctttgcccttttgctacgtgttttgcccggctcggtactggccccccatctcctgccccatgccttttctgtcttctcctataccctcccttcgtcccttgcggctatcacgtgcacgagctcccgctcagccccccagactcctccgcggtgtatggcatttcctngtcatcgttgcctctgggaagctgcacttgccactcatgtctctatcgtctttgtgccgctatcagatatgtagatccgtaatcata

SEQ ID NO: 187003 - DNA, 317 bp, Arabidopsis thaliana
  unsure (1)..(317): unsure at all n locations
acgtaagcnanggacctctagagcggctgcnnccggggggggaggcccngaacgaaaagacgaacaccangagaaggggacaaaancgcacagcgcggagccccnccggaacgaagaagccaagaagaaaaaagcgcagagaccaccgggcaaggccgcaaccgaggcccaaagagaacgccngaaacttgtgttgggcagtaggaaaaaaagccgcagnncaaccanccaaaaccacacaccccaggccagcagaacgacccccgcccaccaaggagaccgaaaagacgacagcgagaaaccgggccgcgagaaag

SEQ ID NO: 187004 - DNA, 470 bp, Arabidopsis thaliana
  unsure (1)..(470): unsure at all n locations
gcgtttttaaaaaaaaaaaagagccgtttgagagaaaaattggaaatcctgtttccaccccatttttcgacgtgtggtggccggggttgtgttttgaccaaacgcctttttttttttttttttacacctcttttgtttttttttcccgcggggggggggggttttccccaggggggctnccaaaattcacntaagtggggcggccgcgcgtgtgcgtttttccccccccccgcgcgggggggggggagtcccccgcggttctctcccccctctcttttaatgtggtgggccctctttccccaaccgacgtggttgtgggcctgtattaaaccgcggcttccgcctgcggaagggcgggtcccaccgcccgccttctgcacccccgagttttttggtctgtgcccccgtcgcgggccccgtggggggacttcttctctggggcggccgtgcggctccccgccggcttattt

SEQ ID NO: 187005 - DNA, 361 bp, Arabidopsis thaliana
tcggccttttttctttttttttaaaaaaaccggaggttaccaaagttccctccctaaaaaacacttaaaaatgggcggccccaggccaccactcgccccgaaaaccaatccaattccccaaaaagggggggctccctttaattcccacagaaaccgcgcgcgaaataaggggccactttttttttatggggggtgggacaagagaacgtcccatgcccccgagcccctaaaagaaaacaccgatagtaacactccccatggagtgcatccgaaaaacaaccccgccgacaccaccccacacctgggcgccccgtgagggcacaaagacaacctcgccccaagagcccgagtctggaccctc

SEQ ID NO: 187006 - DNA, 555 bp, Arabidopsis thaliana
tatacatcttataggaaagctggtccctgcagtccggccggatttccgggcgaccacgcgtcgaacgtacatatcggggcctgactaggtttctatacaacggtacatacagggtggacctttaccatgggcgttcaaccgaataacgggaaatcggttttatccggggagagaaaaaccgttgtggccactaatggtggggggggcataaagcttttacccttctgggccacaattaaaaattttttgagaaacggagatttgaagaaagtcccttcgtactttcaaaagcaaacaaccggggggtgttggttctcccctttttaaaagaaaaacccatcttcttttccccgggggggtggcgaacactcaaagcctaaaatactgtgatttcaacctttcttggccccaaaggcctaaaccctgaattagggcagcaaaaaaggccaatccttatgggagtttaagacccctctggagaagaactattcgtcctttttttttgggggtgggaagaaccaaaaaagactttcccaaggatctgaagggtggcta

SEQ ID NO: 187007 - DNA, 580 bp, Arabidopsis thaliana
  unsure (1)..(580): unsure at all n locations
agaccggcccgaacccgggctacccacgcggcgacccgcaaagaacgaggaccagaccaggcgcaaacaaacgaccgcgacagcagcacgagacggaccacgacgcaccgacanaccacgccaagagcaccgaggcacacaaccccacccccaccccccccacccggtgcaccgagagcggccaccacacacagaaggcccagcaaaaaaacccaccccccccggccacccaaccccaacggaagaccgcggaccaaaaaagcaccaagggacccaaacccccacccccaaccgccgcccccacacaaaaaacacacaccaccacaccccacgcacgccacataccacaaccaaccaaccccaacgcccccaaaagaaaacccccaaaagcaaccaaacccgaacaaagaacccaacgaacacccacccaccagcagcacccccacacggaaccacaccgccgggccaccccgggcaacccaacaacaaaaaccgacagcaaccgcaccgcccccccaaaagaccacagacaccacccaccccccgccaggagcacccacccccccacaaacagcccccc

SEQ ID NO: 187008 - DNA, 338 bp, Arabidopsis thaliana
aggcggcgcaacggagaggacacagacggaaaagggggaggcaagagggcacaaggcgcggggaagagattttttgggggggtgtacaagaagacgcggagagatccacaacagaccgcgaagaccgccgaaaggagtattttggagctcttcgcgatgtattttgagtcggaggggtagacagagtaaacactttgcagtggggcgattttcggggaagacagagtgtggagggggggttaaggaatacaaaaggtctctgggaggggcggtggggcagcgaacacggagcgtggagcctttcgcaagtcgatggtgtagggtatgggagaaaggaa

SEQ ID NO: 187009 - DNA, 446 bp, Arabidopsis thaliana
ccttttttttttttttttttttttttttttttttttttttttttttttttggggggaaaaaaaaaattggtttgggggaaaaggattctttaaaggggagggaaaggaaaaaagcaagccccctttttttgggaggcaacccgcctttttttttagaccccccaaccccaccccctgttttaacaccctccccgccggtaccacctccccgggatgagtccccccccacgatgggtcccccccaggaaggacgggcccctgccggaggccgcccttataatgtgggggccccccccaaacaggcgggctgggtccttccgccccgacggaagaacctccccccccccagaaacccccctgcccccgtcctttctggggagaccaacccccccccccgaaaaacccccccctttttacaaaacctcccctcattgcttgcaaccccc

SEQ ID NO: 187010 - DNA, 642 bp, Arabidopsis thaliana
ccccgacctcacaatacatccggcccgggggccgttttcatttttcgcgaaccagaatttaggacgtatgccggcccccgagcatatccgccggaggcctaggcagcgagcactattgcgccccccgccatttaatacgcgccccgctattgtttcggcggacggggtgcaaagaaacgaatggcgaaactacaaaactgaaaagcacaacacatgaaagagaataatgccaggatacgccatcacaagtaggtcgcaccagccgcacagaaaccacccgtagtgccgcatcattgaaatccatctcagcgcacgacccgcataagtcccgggcgcggacccccgggttacgcacaggttggataagcaccgccatcgatctactagatgaatgaagacgggggaccaccccccgacgggtgccgcgcggcgagaagagcaaaaaaagctgcgcagcgcgcgcgccagaccatcgcacccctgatgtcagggcgcgtacagcgcttggaggaaatggagggcgtaatacggagtaaaaaaaccgaccggggggcaggggaggaggggcggagggggactaaagaagaggcagtcccgtgcgagtcgaaaaggtgggtgcataacggggaaggggataggaag

SEQ ID NO: 187011 - DNA, 592 bp, Arabidopsis thaliana
  unsure (1)..(592): unsure at all n locations
tgaacgaatttgacggcgaagcccacccccagcaagcccgcacgacaaaaaagcggagttgaacgaacgccgcccggccccgaaaaaagccacccacgaaaaaaaaggcgcatcccggaggaaaccacggacaaacggtccacagaggagagacgacgcagcaacgaacaagaagacccaaaaagaaaggggaaaaagaaagcgccaaacaaagacaaaaaggaagaattttttcacgagcggcaaaacaaaacccacaaaagagccgcgcagcacagccccaggcaaccaaaggagaacgacagcgccggaaaacgcagaaaaaacaacagacacgcggcgcacggcgacatgggaacgacagcgaaggaaaaaaaaaaaaaagtggcaaggcacgcgaccaaaaaacgagcaaaacccggaccaaacaagaaagcaacgaacagcgggaagtccaagagagagaacaaaagggaaccgcgagcccccgggcgggggacggcggggcgaacaacagacgacgaggggngaagcgagggcgacatacaacggagaggggaggaaaagagaaacgaaaacgagaacggaaaag

SEQ ID NO: 187012 - DNA, 190 bp, Arabidopsis thaliana
acaccaccaaaagagaaggagggttataaaaaaaacaaacccccccgcatacaacaaaacaagagcgccgacgcggcgcggagcagaggcacaggccacacgtttcaagacaacgaggggaggggcgcccccacaacaaaaccaacggcagacaccagacaacgccaacccgacacgacagcccgagccc

SEQ ID NO: 187013 - DNA, 671 bp, Arabidopsis thaliana
  unsure (1)..(671): unsure at all n locations
aggaaaaaaagagggggcgccacaaagtttttttggggggggagggggaggctttgaggggcggaagcaaccccaaccacaaccacgccaccnaaaagacggggcccgccgnaggaggggggcgcgcccgaaacaacccccgcgacgccccgaaagcgcggccggacccgaccgaccagcaaccagcgcaaggaaacccaccagaggggacgacgagcacacggccggaccaccgaggaacaacaacgggcngagccgcgagcaccggacaacagcgacgacaagcgggagacaaagacgcctttttcgtttcacggggggaacgcaaaaagccgcgaaagggccaggcaaagagagcacgaggcagaaagaggccgaccacgaacgccgcggaggaaaccgaggagaatggaacagggcgcaagccagcaaaaccgcggacgcgacaacgcggacgagagcacacaaagaaacgaggggagcaggacaaacgcgagaaggagaaagacgcagggcaagacaaagagccgggaggcaaacgcggcgagccgccagagacgacaaacagggggcacgggaacaaccgacgagggaagagaggcgcacaaaccaaggggcgcggaagaccacgaaaagggggcgacacgaagaggggaggggaggggacaggg

SEQ ID NO: 187014 - DNA, 118 bp, Arabidopsis thaliana
cctgcaggaacccggccggaataaccgggccgtcccacgcgttcgcaaaccccgacgcctagaccggatctagacacagaagccacacacgcggcaccccctgatgccacccccagaa

SEQ ID NO: 187015 - DNA, 471 bp, Arabidopsis thaliana
cgccccaggcccccgtccgtaacctggaatcctttaaagcggccgcccttttttttttttttttaaaaaccttaccctttttaagttttagttgtccccttttttccggaacaggaacgaggggaaactcttacaaattttgctggcacaacataggtcgaccaaaaaaacggaaacctttcctttttttacagattttttttttataacctcaaaactcaaaacaaaatttaaaactttgtgcccaaaaaatctaaaaataaaaattgtgaaaaaagacagatttttttcatttgcggctgaaaaaaccgtgggggggcgtaaaaaaaaccccccccgagatttttttgtggggtcccccacccaacccagggccaaaagggccattttccttacaacggggaaaaaaatgggtttcaaaaattcgatttttcctaaaaaaaaaaccttccttttaccggtttcaaaaaa

SEQ ID NO: 187016 - DNA, 441 bp, Arabidopsis thaliana
ccccccccctcctcctcccccccgcgcctcgctccgtgtttcccgccgcgcgtgtctcgtgtgcccgccggcgcccgcctgtcgccgtcgcccttcgctcccccctgccgtcccggcatccgttccgtggttcgcgtcgccccctttttttccgcttgcgggggtttggggctccccctccctcccgcgtctcctcataaaaacatcccctccgcgttccgcgttgcctcgccgctgcgcgcttccctcgcccgtctgcgcgtctcctgctccccggctcgttgtcctctcttttctgccccctcgcctctcgcccgcgtggcgccctcctcctgggccgcttcttgttcctccctcgtccccctcggccctgcccgccgccccccgctcgcctctgccctggtcccctcgctccgttgcgcggttcgtctctctttttgc

SEQ ID NO: 187017 - DNA, 316 bp, Arabidopsis thaliana
atttattacaaatgtccctccccctaaaggtaacataccttgaaaattaaaaaaaccccccctttttaccaatccttattccatatttgggtgtatttaaaacctacgttccaaaaaaaaactccttccacctttttttttccccctttcccaatttttttttttaaaccttccctttaaaacaataccttttttccaaaacctataatctaatgcttttttctcccaacaaaaaaaaaaaaactctcccaataccaatttttcttttttttaaaaaaaaatttcaaaaaacccggaaaaccctttcttttctaaa

SEQ ID NO: 187018 - DNA, 258 bp, Arabidopsis thaliana
  unsure (1)..(258): unsure at all n locations
gggaaacccggccacagaggaaacaaaaccgggccaccccgaagggaaaaacaccccccaaccaacatggaaactactaagggcccgacaaaggactccggcaaggaacaccggatccaaaggggcgtaaacatccccacaggaaaacttcccgcacccgaaaggagggataggantggaagggccaggaacaaagccccaagcccccccccccaaaaaaacaggaaacacggccaaggggggcttaaagagtaaaac

SEQ ID NO: 187019 - DNA, 272 bp, Arabidopsis thaliana
aagcacgcacgcctgcaggaaccgggccggaagaacggctggagcgcgagccactactcggcggccagcctatgaactctatgtctacaagtcttgcaagaaccgggcaaccgggaccattctaaaaaccaagcgcccgaaacaagaaacacacacacccaaaaaaaaaaactcacgccacaagaagggaacaatgcgcctactagcggggagagaatacacaacacacaaaagcactgagatcaaacgcatgatttcaagagacggagaac

SEQ ID NO: 187020 - DNA, 576 bp, Arabidopsis thaliana
  unsure (1)..(576): unsure at all n locations
aaaaagggatgttctggggcctctccatttattagggacgctgggcgcctgcgggccggccgattctggggggcccgcgccgaaagaaaacccaacaccttactcagcttctaatttttcctcgcttccggacttgcacgcatttgcattcacaagaacccatattgaagattcatcctacatatatttttcttgggtgcagggggtggggcctctttttggccggatacttcaattagatataaacttttgggggttactccgttggcgggtcgaaaaaagatccccccccactaggtgctgtgggtggagaggaattaanaacccaagttagtgcttgagaagcaaaaatgctctccgagagatgccatactttgagtgggggcgaccacctccaaccgcttttggaggaaagccactcttattgggatattcgttaacacaggaggcgacagcttcccgcgggagggggtcccaatgaggccctcgccaaagagaacgctaatcccccggggggagaagggggacgactttcaacgcgtccggatttttaggcggggcgcttgcgcggagagt

SEQ ID NO: 187021 - DNA, 482 bp, Arabidopsis thaliana
aaacacacgcccagaaagcgacggaccccactagagcgcggcttcccaaaaagcgaacccgcccataacaagcccaccgaccgacgcaggcccgcccacccgcgcatctccccggccgccagaaaccccacacccgaagagtaccacacacgcgaacgccagaacacggggagcaccgagggaacaagaagccaacacaggaaaagaaccggcgaagttttttctccgcgggggccgcgaaggcgccccccgccgaccacaccgccgaaaacacacaccgaaaaaagccgcagaggaggagcacagagaagccgcagagttgaaagggagaggcgcggctgcgcgcgagaacgccgcaggagcgcgggcagaacaaggcgggcgggggcccgcacacacaacggacgcccagcagcgcgacacccgaacggccgcggggggcgggcgcgcgcacgccgaccggcgcaaaaccggcccgcggg

SEQ ID NO: 187022 - DNA, 375 bp, Arabidopsis thaliana
  unsure (1)..(375): unsure at all n locations
ccgcaggaaccggnccggaagaaccgcggctacccacgcgccgaaacccanacacccacgcaccggacaagaagacgcgaacagagcgcaacacccgccagaacccacgacaaaagccagaccccagacaaagcgcagccaccgancgaaaaaaaccacgacaccacaacacaagaacgcaacctccctgccaagaagaaaaaaanacccaccaccaaccaaacaacaaaaaccaaacgcgcaaaccaaacacgccaccgacaccaccgcacaccccccaccacaaccaaaaccacacaaaaaaacagaccgcaacagagaaacaccccccgcagcccaacacaccaaacaacacccacacaaagagcaaaaaac

SEQ ID NO: 187023 - DNA, 360 bp, Arabidopsis thaliana
ttttttatattttaattaaaaaccacagaggcggggggggttatttttgaaacataacaccctttttttaaacccggggacccttttagttcgctataacgccccccccccttttacccaccccaggggggggacctatttttttattttcgagggggggggaaccccccccaggggagcctccttaaaaaaaaaaaccccttcccccccgtaacctgggtgctttcccacccaacaccccacctccccccggcttcttcttctctttcagaaacccctctcgaaaccataaaaacccccttttttagcctacacaacaccagggggcggaaagacgattccacgtcccccccttcgcca

SEQ ID NO: 187024 - DNA, 444 bp, Arabidopsis thaliana
ttgccgcatgcacgccccgtacgctggcacggtatatacgggattggctgacctgtgggcctgcaataaaccccccgtgagtttaggaggcccatcccaacaataacacccacctgtagtttaactatgagaatcttcacaacccgacccccgtaatccaatgatgttaccaaaaacgtgtcgggacaacaaattggatgaacatattggctttatcatttaacaggaaaaacgaacgggactaaatgcgcaaaccaaaagaacctcacaataacacagctttatgactcgccagaagcacatatcaaaactttctgttaccacgtccgcgcacctccctctagaaaacaaaaaaaaaaagacgactcgcaaacaaaaggacgcgaaccccagacggggccccacgaccggagacacctcggcagaacacgaatgaaataaggt

SEQ ID NO: 187025 - DNA, 442 bp, Arabidopsis thaliana
ggacgggggaggagcaggggggctttaaaagggaaaaccagatacccttccccactccctccacacaacccccccccaacagcaattaaaatcaccccgccgcggcggcagaaagaggggcgaagaacaaccagacggcgacagaaaagagccaccttttacaacacgagagggccgcgtaactgccgcacaacacaaaagagtagagtggacgagaaggacgcggaaaccaaacgcgcaacgagagggaagcgaaagggaagcaaagaggataaagcagagacgcgcaccaagacaggaagccacccctaagcgtacccaaaccaaccaacacaaaacaccaaacgccaaacacacgcccgacagcacgcaaacataacgccacagagaacacacacccacatagtaaacacccactgaacacacaccacagaacaaaaca

SEQ ID NO: 187026 - DNA, 294 bp, Arabidopsis thaliana
  unsure (1)..(294): unsure at all n locations
gcccctcattaaaactgtggaccccggcctgggccgccctngcgctgagcctttggatcctcttaaaggggggggggccggggttttnttttttataaaaccaaaaacccccatattnaacctactccatatcaaaaaaaaaaaaaacccctcttanttttcatggcgggcccacaccccagggcccaccgcacctcccctcgtgaaaaaggcggagaaaccacccgcgcccccggtcgtntccacccgggcgctttgttcctttgaaacgggggggggaggtttttttttttt

SEQ ID NO: 187027 - DNA, 473 bp, Arabidopsis thaliana
  unsure (1)..(473): unsure at all n locations
ctacatagggaagctgtaccctgcggtccggtccgcattccggtgagcctgagcttggacacactgtcgtggagcnctgctcgctntgaaatctgtgatttgttctctagcatctatctcatctaggctaatcactgttgaactcagctacatagccctgagtcttacgaagattgaggagccgcgtggtgcatggagaccttattatctgtggactaccgttgagacctatgatcanaaacttcatgaaacannntcagcgcatatggctgtacatacaagatccnnngactatgtcacatatctcaggatgcaacatctctcttcgctattgcactactctgtagagatacacttagggatcagatcatcgtgtactgagaattgcaaggactctgagtcgtcagcgcgatacagaagaccagctcttctcaacgttagactatgagatgttggagcacgatcactcatac

SEQ ID NO: 187028 - DNA, 467 bp, Arabidopsis thaliana
caggaccggcccgaatccgggcgcccaccgccgaacacaaagcaaaagcccccccgggacaagacacgacgcggagcgcgacgaccaccaagcgcacagcacaggacgccacaacacgcgtcgacaaaaatccaacaccaaaaccgctcgagcggggaaaggcagagagccacccgagccaaaccgcccccaacgaggccagaacgacgacaagcggcgcagaaccaccacaggcgcaaccgaaccacgacacggacacaaagacgcaaacaggcccacacgaagcacacacgggcccggaggagacgagcgaaaccagacgcgaaacacagcccacagagacccacaacacccccgcgcacgaccccaaccagcaagccagaaccacggagaggccatggcaagccagaccaaccaacccgacgccacaggcggcccaccacagagccccgacggccaacaaagca

SEQ ID NO: 187029 - DNA, 365 bp, Arabidopsis thaliana
  unsure (1)..(365): unsure at all n locations
gcctcggcgcagattacagggggcagccgtaacttacccgcggagaggattttttttgtaggaaggggggggggaaaacaaagaaacaagaatggttgagaaatataatagatcctccatggaatggataactaagacaatcacccaattaattggaatataggccgttggtacacagtctaggtaaagcaagaggcgactagnctaggttagatagtgttagaggtaatgcgaggcgtggattgaaagtgaggtaggaggggtgtagttagaaaagtagagagtataacgcggaaatatggacagtagctagagatagatggtgtaagagatgtacggcagcgaatcttaagtctagagagaga

SEQ ID NO: 187030 - DNA, 458 bp, Arabidopsis thaliana
  unsure (1)..(458): unsure at all n locations
cgtcgcatgcacgccgtacgtagcttggatcctctagagcggcctgccctntttgttttgttttttttaaccagggggtggtgganagnggcggggcccgcgcctccaacgccccgngcacccccgagaaaaggaaacttcgacaagacccaatgggggcaaaccaaaaccgcgcaggaaaaaagacgaacacacgggacgcaccaggaccatttataatcacgggggggggnaggaaccgccccattccaggccaacaaacggcgggaaaacagaacaccaaataagggggtctctccaaacgaaaaaaaaaccctgcaaccgctcttccccctaaagcggggcggggcacccaaagtccttgacgcccagactcggtaaacgcacaagggcaacccggcctttggggaggcctgagcccagaattaaccaaatactctgggaacggggcaccccac

SEQ ID NO: 187031 - DNA, 319 bp, Arabidopsis thaliana
  unsure (1)..(319): unsure at all n locations
acgggcgccgaacgcaacgaaaaaaaaaaaaggaaaaaacttcgagggttggcgggaaaaaaaaactttaaagggggnaacacccacccaaccaagaccccccgacaaaaaagagggcatttacgagaggggcggcccagcccaacaaaacaccgccgaccgaagacagacgggcgcggcgcgcaagacaccgacagaagagcggcaaagacacgaacaagagaagacagcgacggcagcgggggcggaagcaacaagggacgccagagaacgggcagacagacgccgagaccacaagacgcagagaaaattttttttt

SEQ ID NO: 187032 - DNA, 594 bp, Arabidopsis thaliana
  unsure (1)..(594): unsure at all n locations
gggaaacgacacaagaggaacccccacanagggaaacattgttgtgccacaaaaaaaaattagaacgccgcacgcaccgcgtaccggcaagcgtggaaaactcaagaaagcggtccgccctattcttgttttttattaccgccgcgaccacaaagaggcggccaccaccccaagggaaaatcacagcctggggggaaccaaagaaaaggaagcctcaccaccacctctcgaccaacacaaaaacacaaaggacagctcacgataaacggagatgcggccctcagacgagaaacaagcgcgcaagagagcaggaacctttcttgtctttcaaccgcgggggggaaccaaaagcgccgcccacccgcgaagcgccggcgaacatctgcaggacattggtcggacagtgcgaggttgagctccgctagactagtaaagacgcgggcggccggaagacgcgcagagagagcgatgaacacaagcagcgtgagaaacacaaagaagcgcaagagcagcgcaccgggcgcacaaacacccaacacgaagcacaatgcacgcaagggacccgaccacgcgccaacagagaagacagacaca

SEQ ID NO: 187033 - DNA, 459 bp, Arabidopsis thaliana
  unsure (1)..(459): unsure at all n locations
cgacaaactctagnagaaagcaacgcacgcccgcaggcaccggaccggaataccgggtcgaccacgcgcccgaaccacagaaagaaggaggacgcgaaccaaaagacgcaagcgacgccgggaagagaaggggagaggcgccgaggcgaccggagcaacgaggaccgagaggagccggcgaagaaacccacagcagcaccaagagccacgagcgcccaatgcctgcaaaggggggagcagccaagcccacgaaggggaacaaaaacagcgccaggccggacccggaaagaggccccccacccggaacaaaagaccccacgcggagggaccccgggacgcaggccgccgacggcgaggcgggacgccaccgcgagccgccagcgacgcagacccgcgcgcacaccccaggacaccggcgaacaggggacccaccccggcggcacgcggacacccgccgag

SEQ ID NO: 187034 - DNA, 349 bp, Arabidopsis thaliana
aaaaccggacaccccgggggcgcgacaagccaacggcccccagggcgaacaccaggaaagcgacgcagagcccgcgcccagaggaacggcacccgggacgaagcaaaaccccccacccagaccagcgccacgccccccccgccccgtccccgcgggggggaggggagcaaccaacgccggccagcacccgcgcgaaccccggggacgccccgcccggccgccagcgcccccaccaacccggggccggccgggccccggccgcaaaaacaacaaaggccacgcgcccccgcgggaccaaacgacagaggcacgcgcgcccgcgccccccggacccgcgccgacacggggg

SEQ ID NO: 187035 - DNA, 420 bp, Arabidopsis thaliana
aaaaaaaaaacttcttttcaaacgctaaaataaaaaatttccttatttttcccttcaaattattccacaaaaaatttttttcttttatttgaaactgtcggaatttctaaaaacaaaaattaattttccttacaaaaccctcccctctacccccccctttaaattaaaatggtgtggttttttcccccccaatgaatttttttaaaaaaaaacccaattttttttaaccccacacctcccctccaaataatcctctccacccctaacgttcccctaacaattttccccttttctatccccgccgtttcccttatttaactctcaccaccctctaatccccattaacaccactcccccccaccaacacccacccaaacctttccccccccactctacatttctctccccaaaaaaaacccc

SEQ ID NO: 187036 - DNA, 459 bp, Arabidopsis thaliana
  unsure (1)..(459): unsure at all n locations
tcactacttgggaagctggccctgggtccgccggattcgggcgccaccgtcgtctttttctgcaccatgtatgcttctgactctgcaccgattcattgcttaccagagttcaattaaggggcaaaccgtagggatggcttacgtgcttcatgctaagattatttgattattgaccatgccacctgtatgncattatcctctatgatactgatttatgacctgctgagactctatgcgaactacatngatcaaactttgtcatcttactgatcactatactgatagatgtgtcactcattccaccctgatcaatgatacttacaactgtgactaagatctcatcagtctgtcaatctctgtgacaatgactatgcgaaatgacattcctctggtgtatgagtctagattcttgtcaatcactcatagatatcttgcatattacaatgaatatataacttg

SEQ ID NO: 187037 - DNA, 179 bp, Arabidopsis thaliana
  unsure (1)..(179): unsure at all n locations
gccaccccaccagccacggcgcgcacgggcagattcatatataaatacgaacccccccacgtttaacagcaggaancaatgagtgcctcggtgtgcttctgttgaccgtaagtcgtacattttcatactaccgcgggggctgatacgcgtcatcacacgagacaccaactacgctgtcc

SEQ ID NO: 187038 - DNA, 304 bp, Arabidopsis thaliana
cccccgccaaaacacctatcaacgctacccagccttagtccaagcgttttcaaaaagtcgagccgttcatgaggcgaccaacgcacgcgcgagacccagaaaacacccccttatcttccgcagtccttctcgaaccgtcgccgacatatgagccgttttttttacaacgggggtgggcgaacaacccagtgtacgacccgcgacctgtattgtgtgtattaacggttccagaagtcacaatcacggagtaatatgatgaaaattgcagagggtgggaagcgatgggcggctgtgtgccgccgtg

SEQ ID NO: 187039 - DNA, 395 bp, Arabidopsis thaliana
  unsure (1)..(395): unsure at all n locations
ggaaccgccaccgcaaacgcacacgccgcaacgaaacaacgagcgaaacacacccgggggcgccgggaaaaacgacgccgaccanaaaaacaagcccacccggaggaagcaccggcgaggcggagacgnacggagcagacggcgggagccgccacacacgcccagcgagaagcccacgagaacnagggcaagacaacaaagggagcgcgaaacgacacagaaagagaccggccgaccaaaacaacgccgcaagacgaaggattattacacacggagcgggggcggcacacgaagacaccgcggaacggggcaaagagcgcgaagaaacagcggcgaggaaaagaaacacgagaagacagcgacaaaaaaaggaagaaggcggagagagcgcgaaa

SEQ ID NO: 187040 - DNA, 514 bp, Arabidopsis thaliana
aagaaccagaccgagcacaacaggaaactacaaaacggaacaacgccccacacgcaccacaaccacaacgcgacgaaacacaaagaacaaacacgagaaggataaaacgagaccagggaagaccatatcttttggggggggaccacaaaaacaacaaacgggcgaacaggcaaagaaaaagcgcagaccaccggggccgcgcgacaaataagcaaaaaaaccaccaccgccacccaacgcaaacgcgcacaccaaaaccaaggaagcgagaccaagcacgacccaaaagagaaaaaaccagggacaaggaggacgaaaagtaagaaacccaaagaaagacaaagacacaccgcagagacaaacaaaaaagcccaaccacagaacatgaacacagaacaaggccccaacaaggagagggagccggagcgaaccagaagcaggagacacccacccaggaaaacgcgcggcagaccaccctgggacagcagcacaaaagaggcgggaagagaaaaaa

SEQ ID NO: 187041 - DNA, 136 bp, Arabidopsis thaliana
tccatgtaatcccttatctctggccagggagaatatggcacggcgtattttttttttatagcgggagggggagaatcgtccccaccaacatttagccaacatgaaacttcattcctaaattccgcaaaaattaaaa

SEQ ID NO: 187042 - DNA, 408 bp, Arabidopsis thaliana
  unsure (1)..(408): unsure at all n locations
tggatttaggtgcacattttagaagaactttgacgtcgcttgcacccgtccgtaagctgggtatcctttagagcggccgcccttttttttttttttttttttttttttttttttttttttttttttttttttttttttttttttnttaaaaaacatgaatttttttattttggaaagattccttggggttgttttcccgggcagggaaaaagacttttttttttgttcccagtcctttgaaatccttaaacaaagcttgaagccctttttttttgctcccattggctgcaaataaaaaaaccaattaaggggttctttccaaaccaaaaaaaaaacttttaatgctttttttcgaaaccggccttggttccaaagtttttgccccaaatctgtgaaggaaatgggcct

SEQ ID NO: 187043 - DNA, 401 bp, Arabidopsis thaliana
ccaacggcactacagagtcgaacgcaagctaacccccgcaacaccgagctcacgtcaggagagaagaaagacacctaatattaaaaaaccaaacctccaaagtttcacaacgcgaaaaaagaatgactagatagtaagaaatgaaggaatcgtcacataatttgcccttcccaaagggggacgcgcccccccccaacacaacaccacacgacgtggcgaccaatacaatcgatagattgaaacaaatgcggctcgcacaaccgaatatcgaaagagactacacagtgtcaacccaccggtggcgcaaccgcaccgctacccaactgcacaagacaccgcacaacgccgctcacacatgaagagcacgtatatcagcgagccacgacggggccaccataccc

SEQ ID NO: 187044 - DNA, 322 bp, Arabidopsis thaliana
  unsure (1)..(322): unsure at all n locations
acgtggcttgcacgcgtccgtaggctgggatcctttagagcggccgcccttttttttttttttttttttttttttttttttttttttnctttggaancttctaacgtttcaaaattttttgaagttccggatcattgggtgaaaaactttaaccgccaaaaaaattttagccttaccgacccaatggggaagtgattttttttttcaaggaaaataaatcttaaacgcgccattttaaagggggttgtttattttggggaaagaaaatttgaaacggcccttttctggaggggaataaaaaaatttgactggtggaaggggg

SEQ ID NO: 187045 - DNA, 510 bp, Arabidopsis thaliana
taaagagctaggacgccgcaggcacgcgtcacgtaagctgggatcctttaaagcggccgccctttttttttttttttttttttttttcggcgtttttttccctttggaaccttttaacgcttcaaaattttttgaggttccagattattgggggagaaaccttaacgggcaaaaaaactttgaagtttccggaccaatggggaagggagggtttttttctgttttaaagggacttaaaacgcccttttcaggggggtggtgaactttcgggacaaaaaatttgaaaccccccttcctttgagaggaaaaaaaaaacttccctagggaatggggggaacaccccacaaccgttggaattttctgaagattaaaaggaagtggggggggggtttaccaccctgcgcaaagggggccagcagggagttttaaggggggggtctctaattcccaaaaagggggggaccccccgcccgcttgtggggcgggaatccgaaagccattttttggccc

SEQ ID NO: 187046 - DNA, 545 bp, Arabidopsis thaliana
cgcagaccggccgaaaccgggcgcccagcgccgaaaacgccggaacggaaagaaccccaaagggcagaaagcggcccagaaagaacccacaaaccacaagggcaggcgagcccagcggaaccacgcagaacaagcaacacgaccaacccaccaccctcgagagggagagcacccacagccagccaaacaaacaaaaaaagaacgcaaacaacccacacacccaccaaacccaacgaccgcccacgaaaaaccaccgcccggccgcacggacagacgacaacagacacacccaacaagaggagacagacacccacgcccacccaggaagacaggcaaaacaccgccacgcacaaacagaccccacgaccagaccgacaaacacaaacaaaccgcgaccaccacccaagccacacccaagccaggccacaacacagggcaacacagccacaaaaacaaagaacacaaagaccaaaacggcgaacaccaaagggcgcacccggcagcccagcccaacaaacacaaccgacgaccacgcggacaccacc

SEQ ID NO: 187047 - DNA, 408 bp, Arabidopsis thaliana
ggggccggcccttatgggcggcccgcccaaaagccaccccgtccggatatgcgccacgcgtcccacaagtaaatcgcgcggggggtaagatgcaacgatgacgaaaggcagcggcacaacggcaccgaaaaaggggaagagaaggcgcacggaaaaatcggcaaacgataaggggggcgcggaacaagaaggcacggtgtattcattaagcgggggggaacccgaaccctaacattcggaaggagaaagagcgcagcgagaaacccgagcttgcgaaggggggcagaaagggtacgaagagaaagataccccacggcgagggcgaaggacgcgacgcagaggagagggcgaggaacaaaatgagacgtgacgtgggagagcacgaaaaaaagaaatcgagaaaagcag

SEQ ID NO: 187048 - DNA, 612 bp, Arabidopsis thaliana
  unsure (1)..(612): unsure at all n locations
gaaaaccgggtcgacccgcgggccgaaaccacacggaaacacggggcccggccccggggacaaaaaacagagaaaaagggaacagcaagggaaccacaccacacgccccggcggagagaaccgggggaaggacaccaaacagagcacccgagcaccaccaaggagagccctcgaaggggggggaaacaagcgcagaggcacgagggggaaccaaacaagcggcagagggggcgggcagaacagcccggggaccccgccgccncacacagcccagggagagccaacaaccccccggcgcgcacgccacaaacgaaaccaccgacggccacccgaacagaagcaaggcgaccccccacgcgcggggacggccaagacacaacggagagagaaagagcacaaccgcagcacacaacaacccacccacaggaaaaggcaaacaaaccccaaccaaagaccgacaaaagcgaggagacacacacaacaccgcgcaccaagaccgcggccgaccgagaggcgaagcacggcgacaacgaacccgccccccggcccaccgcagccaacacccaccccccgaaacagcgagcgcaaaggacccagagagaagaccccaag

SEQ ID NO: 187049 - DNA, 626 bp, Arabidopsis thaliana
  unsure (1)..(626): unsure at all n locations
ccccccacgccaactcgccccccccacccccacccacnngcaccannnnnnnnccgttgtacaaactgaggccgcacctctcagtttgagctatggacgcccgcctgccacccgctaccgtaaggcttgggatccctctaaagcggggcggggctttttttttttttttacctggggactaaattttggagtcaacccttcgagacaaaagggggaacctcgagagtccccccccccaacgagaaaccccagtttggatccacaaatcatcgcggggaaatggccttaaaaccaccctggaacaccccattaagggggggggccatcnactaggctaaaagaaaaccctcgtaaaccaaanccccccgccccacaccccgcgccccagccgccccccccgcccatcacacgcccgcaccaccccctccacccgccgcaccaccactccctacagcacacacacaaaaccgaccaacgccccccgcgcgcgaccacaccgacatcaccacgcaccctcgctcgaacacacacagctgcacccccccgccggcccgcgcctccagcacgcccacccccgcccaccccctccactcaccacccgccaccgccgccccggacacgcgtcc

SEQ ID NO: 187050 - DNA, 545 bp, Arabidopsis thaliana
ataccacgcccgcgcaccgccttcactttttatcagagagtatcttgaaacgttagtagtgggcgtgacgggccgccgtcgacagcggctgggttcttattttttgttttgttgtcttgcctctctctttcgtcttcatgtcgcgcgcgccctcgtaccgcctctcctccggcggtctgctggagccgcttcctctcccttaaccccccgccggcgcgcgacgaagagtttcggatcgtggttcggttctctccacttggattcttcgtccgcccgggggtccggcgcccgggccgcctttgtgttccccgccttggttgcttttctgggcgccgcctgcgccctattgcgccctcctcccccgcccgctgcttcccagtggccagcgttagctgtcgggcgtcgtccatcgcattgcgccgtgatggtcgagaggaggtgacgagcgttgaagacaaccaccacagtgagcattaatttcctgatactagctcaacccagtcgatcctatggtttaatacagttgcattatttttatggtaata

SEQ ID NO: 187051 - DNA, 323 bp, Arabidopsis thaliana
aacagagaagaaccgacgaagacgcaccccaagaaccaaaacaaaaagcccaacagaggagttgaaaaaaaaacaaacacccccaacaacaaacgaagaccaaaccgccccaatcaggcagcgagcagccccaccagaccacattttagaaaaaacaagggggcaagcgccagcaccaccaaaacaaaaagtagagccggcaggcagaccagccaacagactgaaaagccgcacaccacccaccacacccacacgaaaaagagagaaaaggcaagcaccaagcccgcacaaaaaaacacacacgaaacaggacgcggcggacc

SEQ ID NO: 187052 - DNA, 260 bp, Arabidopsis thaliana
gcgcatgcaggtcgcgcccgattacttagacgcgtactacgaatacgcgcccccccgcaatatatcccccccgtcttcatatgcgggcgcgacgcgacagattgatcacggacagttgcagtccacccgcacgcaagaagattggcgcccaccggcgaagcggaatcggagagaagtttcacgcgtagtatcgtcccgccacaccgcccgcagacgccgcctatgccgtgctatataaagtatacagaacgagagagccg

SEQ ID NO: 187053 - DNA, 574 bp, Arabidopsis thaliana
aacagaagaggagcagcaagggccaaaagacaacccagaacagccgcccaaacagagagagaagaacagacgaaacgcgagagaaaaagaaccaggcccaaggcaacacaaaccaagcgaaaaactcctctagggaggtggaccacaaccaaccagccccggaacaagaacgagccaacacaccacacacgacaaaaccgcagaggacgcggcgaaaaaaaaaaaaaacaaagaaaagcagggacagccggaaacaaagcgaaaagggaaggaaccccccgaccaccggaggggcgacagaggaccagcacccagcgcgagagggaaccgaggacaaccgcgaggcaacgagagaagaccccacccggcacacaggggcgaacaacaggacgggccgcgagaagcccaaccaggggacgagacgcgaccagagaaccacaacgaagaaccagcacaacgagccggccgcaacacgaaaagagcaaacgcggacaaaggcgaggagacgaagaggggcgggggcaggacgagacgacccgagagggcaacggcggggccacaaaagaagacaaca

SEQ ID NO: 187054 - DNA, 408 bp, Arabidopsis thaliana
gaaaacagacttgaaagggcaaggcccgcccccgaaacataggccccaaaaaagggcttccccgttctcccgcccccgcaaaaaacccgccacccggatgagcgccccaccgcagaaaaccacaaaaacaagaacaacccggaaaaaacgcagagacacccggcgaaccccacgagagaccccgcacttgcgcaaccgcggaagcacccaccagatttttttctaggggaggcagacagacagcgagcagagaggcacgcgcgaacaggcggggaacagcgccagaaaaaaaggccgcgcagagacaaaaagcatgtgaggcaccccaagccgccaacgcaaaacaacaaacaaacaaaaaccaaaagagcaaggacggaccccgcgacccaaacaacccgacgacaa

SEQ ID NO: 187055 - DNA, 599 bp, Arabidopsis thaliana
cgcaggaaccggaccggatacccggggcgcccacgcgcccggacctcccacggagaggagaagaaggggaagaccgcgcgaccagcacaggagacgacgaagcggcccgccgcgccgcgcaagagggccccggggcagagggacgacccaacgggcaaagcggcgagagagccaacccacgcctaacgagggggggaacgaaccaaaagacagagccagaacaacgacccgccccagaacacgaaacccgcgaacccgcgagggccaaaagaaaccgagaaggaccgacagcacccggaacgcgccgcccaggaggaaaaacggacaccccagacaaagagacaccaggacgagcccacacagggaagacaaggcaacgcccagagagaaaagaggaccgaaagcggcaaagagaaaaaaaaaggggacaaagaagcccgccagaaacaggccgcgggggcaacccaaacgcagagggcacacaggcaacccgggccaggaagagcaccagaacacgaggacagcaacccgccgaggggcaaaggcgcgcaccgacagaccgcaaaaggccgagacggcgcaccccaaggggcgacgcc

SEQ ID NO: 187056 - DNA, 526 bp, Arabidopsis thaliana
taaaaaattttgacgccgcatgcacccgtacgtaagctgggaccctctagagcggcctccctttttttttttttttccaaggaacctcagaacggttaattttttacttttttagaacaaccaaaacaacaatcggtccacgggagaatggccagaaaaaaattaaatacctttactaaaaaattttctggaaacaccaaacaagtcaaaaccctcttttttttccgggggaaagccacaaccccctaaagattaaaccctcgccccggagccccccccctcaccttttccccttggaaagaacaaaacaaattgttgctaaaacccctctctctcccggaaaaaacccctcacacactcggggggcacccttaccacccaccctgagcacctcaacggagagcggactttccacctcactttttatacagtacatttagttgtaaatcccgacaaacgacagctatcatatgaatatccacacacactccctaatctctcaggattcatagcacctcaaatttaa

SEQ ID NO: 187057 - DNA, 526 bp, Arabidopsis thaliana
  unsure (1)..(526): unsure at all n locations
ggggggggcccccncccccccggcgccgaggagggaaacctttaaagccgggagcgggggggtttttaaaacataaaaacaaaacccttaaacctgtcccaagacggaattcgggggggacgaggggcgccggagagattccaaaaacccgtcggacccctcctcacaagcgcagccgtttcggcgcgcggggcgggcgacgcccccacacgcgcttctatacccccggggggggtggcggcccaccacagagcggcgcctcgtcccgaaaaacaaaaaccgccgcggcgagaggcgagtccgggcgaccgccaccgggcggtgcgccgaggcagaccggatggcgcgagaggagggagaagccggggtggccgcctactgcttgccgcggcgccgccgcgcgcgggcgcgctggaagctagccggcgggtgcggccccgcagccgaggcgacgcgcgcgaccgggcgggcggcggcccggacccggcccaagcgcgagaccgggccgagagccacggggacgcgc

SEQ ID NO: 187058 - DNA, 515 bp, Arabidopsis thaliana
  unsure (1)..(515): unsure at all n locations
ggggggggagggattggacccgggggaaggcccaacagcaaaccaaagcncgcgacaccaaacaagaacgggggagtgccaaacgaccaccccgcgggccaaaaaacccgccccgcccacaaaacacacgccgacgcgccgaagaaacaaccacaaacgaaagagagacgaaacaagcagagcaaagaagcacgcacacccccagcagaaaggaagaagcaagaccacgacaagacagaacgaacgaacagggaccgggagaagcagaagaacgaccgatactattataacgccgagcggcaaaacacgccagcaaaaagacggcccagcacgaacagcgcgcgaagggaaagcgccgaacagaggcgaacgcgcggaagacgagaggaacaacagaaaaaagccggaaacgaaaaacacacaggaagaacgccgaggaaaacacaaaaaaacaaaaagggagagagagagagcgagagctagcaagacaagcacaagcgacgtgggccggacag

SEQ ID NO: 187059 - DNA, 155 bp, Arabidopsis thaliana
tatgtgcatcacagacccgttcacccacgaagggggggtgtcattttatataacaactccgcaatttttgtagcctgacccatggaactcactctctcttcagatgcgtggtttttgattattgtggggtgtagagggtcttctctctcaaccac

SEQ ID NO: 187060 - DNA, 451 bp, Arabidopsis thaliana
  unsure (1)..(451): unsure at all n locations
gaatttcgtgagggcgtgaggccgagtgtttccgattaatatattattactcgacgcacagacaacaagatgaccaactaactcgtgtaaccacataactttgttgggatgtgtcgagcgagagggagagtgagtagggacgatgggaagaaggtggctttttgaacgagaggtatgcgcgtcgaagacaacaaggagaagggcgactcgtccacggaaggagacgttgttttcaccatatgaatgaataaactaattaaaaccgtgagtaagantatgagtaggcaataaaagtaggagagaatagcgaagggaggaagtgtgggggtagagggggggagaacaataggggaaggtgcgggagggcagtacggtaggaccgggtgagtcacatgaacactacatctctgttgtggtatgacaggtgtacgaaacatgcgatagtcatctc

SEQ ID NO: 187061 - DNA, 621 bp, Arabidopsis thaliana
agcaacgcacgcctgcaggcacccggccggaataaccacctggccgacgagcacaatagacggcggacgaccggacatatcagaagtgagcgaggacagcgaactagaccagaaccccggagctctgacgcaggcgacaacaaaagaatccgagaaacaaagagaggccggcaggaaaagaaaaccaccccggacagacactagctgactggagcgggcggagcacgcaccccagaaactgaacagaacgggaaacaaggaaagaataaacccacgggcacagcgacgacgcaaagcccgaggaggccggtcaagggagccgagcatccgaaaacagagcccaacgcaccacccgaaaggaccaagaaacgccccagacgcagggaagaacaggtgaagccacgaccggcaccagaggtgccactggccagaagcaccacacacgccggacgcccggagccgcggaccagcgccaagaaccggagcgacaacccgccgccaggaaacaaccaggacccccaaaaacacgggcgagccagaaagcacaccggccgcgacaaccgaggccaagggccaagcaagtgaccgacccgccccccgggcaaagggcggaacaccgac

SEQ ID NO: 187062 - DNA, 380 bp, Arabidopsis thaliana
gggtttccaaacgtctccgcctcggcccgcacagtcgcggcggtcccgtcgtgcggtcgggggtcgtgctccgcttattttttgcggtcctggcggggggggaggatctccctctctacgtggggtctggaggagaaaaaaaatcgtgcgatggccggcgcggtcgccagtctggatggccggcttccgtgcgctcggctccgcgccgttgctgggcgtgcggtggcggtgctgcgccttcgcacggttcggagctgccgcgctccgcgctagcgcgcggcggggagtgccactctttcttctccctgcgatgaccgcggcggccgctggcggcggggcggggggcgtgtgggatgcggggctgttctgctgcttcgctg

SEQ ID NO: 187063 - DNA, 592 bp, Arabidopsis thaliana
gacacacaacaacccccaacggggcagagacggccgagggcccggaaaaaacccccaccgacccgaacacaaagcaccccggaccgcgcccaataccgccggggaaacggtaacgcacgagccgagcaggaacgccagccggaacgcggccgaaagaaacgggggacaaaagacccgggaacaaaacacagcaagaccacagcgggaggcacggtaacgcaccgggcagagggaatattctaaacaacagggggacgagaagaacgcggcagccacacagcagcgacaagaggcgaccccagacacgaacgcacaaaaaaaaaaccaacaaaggcgggcagcaccgcaaaggcggcggcggggaagcgcgcgacgagggaacaaacagaaacggggaaggcccgccgccagaaaagaaaacaacgaaccagggagaacacaggagcgagggggaaagaggggcgcagaaagagacgaagaagcggacggccgcaggaaggcggcgcgggaacgagagggccaaaaaaccaaggcggaggcaggaggcgcaagagaaaaggacgcgaggagaaagcgagaagagggaggcgac

SEQ ID NO: 187064 - DNA, 359 bp, Arabidopsis thaliana
  unsure (1)..(359): unsure at all n locations
gcaggaaccggnccggaaaacccgggttgaccgaggcgggcaaggccgcaaaaaaaacagatcacgccaagggggggggaaagcgagccaccaaggcagagcaggggggaaacgagaagacaccagcagcagttgaaggagatgcgagaaccagactgcaaacaacaaggcgaggccccacaaaacagctccgaaaagttggcacangacaccagaggggagaagaacaaaaacaccccccaagaggggggggagaacccccccccaaaccgaagaaccaaccaaaaaagagcnncgacgcacgagcccccgccaagaagggggaaaccaaggcgacacccaaaaaacgacgcagaagg

SEQ ID NO: 187065 - DNA, 337 bp, Arabidopsis thaliana
cccgcgaacgaacgatcttattttatatataacaaaccccccaccctatcacacacacccacccccatccagccacttcttactacacctaccttatatcacgactttttcatacccccccgggggtatccacctccccccaaacaacaaacatcaccaaacctctccctactcaatattcctaccatctctcctactatacacacatcaatcacacacatttccaacacacatataacacacacttactaacgcgcccgtaccactacaatcccaccctctcccccataaactcattatacacaatcactctttgaactataatatattttattag

SEQ ID NO: 187066 - DNA, 644 bp, Arabidopsis thaliana
cggggaagacgacaaggacaacggagtggagcggcgggggggcgtcaatacagattttttggaagccccgagaaggagacaatttcgggcgaagccgacgccgagaaagaccgggcagctagagagccggagctttaaataacggaccaacccgcgaaagaagcccgcgcgcggctacggaacgagaccagccaccacagacgcacggcgaacgggaacgaacagaggagagggagcgcgccgacacccacgcggaagcacgaagagacgcacgaaagaacacggcgagacagggggagggaaggcagaagggaagagatttttttttcccacagggcaggcccgccctgaagcgcagagggaaagggggcggaggaagcgacgataacaaaccgcgagcggagaaacgaggagaagtcgagcgcagcaggacccgacaggagacgacggagagggagcaaaacaacaagggggacgaggagggaggaggcagcagacggcgagaagaaaaagactcgcgcaagaggggggcgtaaagagagaaacacggacggggggaaggggaggaggcggaggcgaccagacgaagggagaggggcggggcgacaaagggaggggaggcagggggagggagaaggaacgag

SEQ ID NO: 187067 - DNA, 530 bp, Arabidopsis thaliana
cgggccaaagccccacacaaacgcagaggggggggttaaaaagaacaacccccgcctttaacgagggaaccggggcgagagggacgaaaagataccatttcacccaggggggggggggggccaaaacaaaaccgccaacagacgggaagcgcgacgcgacacgaacggccagacgcgcgcccgcagcgggcgcacgggcgcaagagcgggaaaccacaccgagcaccgaccggacgaagacaagagccccacgccccactttttcagagcgggggggggcacccacgcacccccgccgcgccgcggacaacacaccccaccccgagggaggcaacggccgacacccccgaagcaaacccaccggggacaccgggcgccatagcaacccaccgcctaagccggagagacaccgaacaggagagagggcgccgcacccccgcgcccgcccgagacggaaacggcccgacgcacgacccggagaccgacaacatcccacacaagcccgacacaggacaagagatagcccaccg

SEQ ID NO: 187068 - DNA, 422 bp, Arabidopsis thaliana
cagacccggccggagaacagagcgtccccgcggcccaaacccgccagcaacgaaaagaaaccccagggcgcagaaaaccagaacgcagaagaacaaccaggaccaccaggccaaagggcccgacagccacaaaccggaaaaacaaacacaaaccacaacacaacaccctgaaggagcgaagaacaaaacccacaaacccaaccaaaacaacaccgcgcagccacccccgccacccccccacaccacaaccacacaacgacggccgaccaaaacaaagcgcgaacagacacaacaaccaaagaccagaccgacacaggcacccacaacaaaacaccacacaagccaccaaccaccaccacccccccggggacaacgccaaccagagccccacgcccaaacaaaaagaccaaaacccacacacc

SEQ ID NO: 187069 - DNA, 587 bp, Arabidopsis thaliana
  unsure (1)..(587): unsure at all n locations
cccgccgaccgggccgaaaacaagcgacacgcggccaaaacccccagaaaacaaagaacaggggggaggacaaccaacccacaacaggcacacggggagccagcaggcgcggcgaccgggcgccccccagcggcaagcaaggaagggacggagaccaacccgtgcgggggggggagaaaaacacacggagacacgacagagacccggaaaggccgccgccgcgacggaacccaaaacaaaacgcggccaacgaggcaccaacaagaagagagagacgcaaagggaacgaaggcagcaacggcggaggggggcaaaccacaaaccacaaaaacgaaccaggcacgcacgaccaagcacacacacaaccgagggcccccgccagccggagaggaaaacaccacacgacagccagaacaaaacgcccgaacacaaccgacgcaccccaccccncaccngaacccacgagccaaagcccacaccacgaagcggcccccaagaccgccaaggccaccgggaaggggccgagcaagaggcgagccggcaccaccgagggcccgaaccccgaacccaaggcccacgaaaacaga

SEQ ID NO: 187070 - DNA, 596 bp, Arabidopsis thaliana
ccacacccacaacgaaacacgagaagaagagggttcaataaaaaaacaaaccccccaccttcaaaaaaaaagacaaccgacaaacaaaaacagacgaccaacagaaacacctttagaagaacaggggggaaggccgacacccaaaaacaacaacaacaaaaccacgatcacaccaccacacaggaaaggcacaacacaccaaaaaacccgcccacaccgacgacgacaacaaacacacaaatagccacaacccagcaaacaccacccacgacaccagccacaaaagccaacacagtagcccagattttataacagaccagaggggggggacaacccggcacccacccacgccccccaagaaaaaacaacacaaccaaagagaaggagagaggcacagccgaccacccacaacccgccaagccaacgacacagaaacacacggcgcaccaaatcaaccgaccacaacaaaaacagaagcacaagacacacgccccacacacaaaaaaagacaacaaacccctcgaacaacaatcagagaaacgacacagcacacacaaccagcacagacccacccctccccaccaccccaaccagaa

SEQ ID NO: 187071 - DNA, 253 bp, Arabidopsis thaliana
aaaaccaaaccagccaaaacattcgaaccacgaacgctgactagtatccagacaggaagccgcgaaacgaaccaaccatccattttagtactgcagagggggggacacggaacacactaccacaaaccccccgacactactcgcaatacatagaggaatacgaacagcatagccttgcgtgtcacgcgaccacaatctctatcgagcacgacacccgaaacagcgagtcaccaggaatgccgcaacgctatat

SEQ ID NO: 187072 - DNA, 474 bp, Arabidopsis thaliana
  unsure (1)..(474): unsure at all n locations
agggagcccccccaagccggaccaaaacggattacaggggcgcgccccgaaaaaccccgccgaaagaacaccccggacaaaaagagaaccagaacaaaccacacggagaaagccgcgcccgaccacaaagacagcggaaagggaaaaggacccagaaccgcccagacaccggaaaaccttattatcgaagggggggaggaaccgcaggccgagagaacccgccagcgaaaaagcaaaggaaacaaggcagacaacgaagccacgaaaagaaaaaaaagaagaacagcggggccgaaaacncgagagggggaaagaagagagaaaggaaagaaaaaaaaaggggggcagagagaacacgaaaaaagagcgggacaagaacagaggaggaaagcgggaaagcacgaaaacagaaaggaaggagaaaaagcgagagaaaaagagggaaaagaagaagcgggagcgcggagcagaagg

SEQ ID NO: 187073 - DNA, 533 bp, Arabidopsis thaliana
caaaccacgccccacccagaaaacagacgaccgcgcggcacacaaaaacacccaacaaacaacaaaccaacagaccaaaagaaacgacgcagacccgcccaccacaaaaacaccagacaaggaacacagaagaagagggcccaccgacccccagccacgcagcccacgaaagcaccgacacattttttaccgagggggggggacgccacacaaacccgcccccgaccgcgcaaccgcgcaaaaacagggagcgcagacaacagaaggccgcaaacaaaacaaacaacaagacgaaggggggggcgcaaaccccccgaacaaggacaaaagaaacgaagagaacagaaacaaacggcgcgagaccggcccgaacccaagacacagaaaacagaaggacagacaacgagcgaggaacgcaaaccagcgcgaacacagagaaagacacaacagaaacgcaggacaaccgcagagcacggaagggcgagacagaccacaaacaaacggcgcgacgcacgcaccgccacaaacaaaac

SEQ ID NO: 187074 - DNA, 428 bp, Arabidopsis thaliana
cccggaagaacccacccaccccggaaacaaacccaggccgaaccgccagccgccacaaacccgccgacaaaagaacccccgcacaccaggacgcgaaaggaaacaacaggagaagaaagcaccagcgcagcgaacgcaagacccccacaacagagacgcggcggcacccggaccaagaagacaaccaactatcaccaagggggccccacaaagacacgagccaaaaccgaacaaacaaaccaaacaaaagcgcggagaacagagaaaaagaagaacggaacgaaggaccagacgaaggacggcagcaggaaaaaaaaagggagggagccaacagcagaagaaggggggggacgcaagggggacgcaagaggcgcaacgaaaaaggaaagagcgggaggcaccgaagcggaaggcacaagacaaaacac

SEQ ID NO: 187075 - DNA, 224 bp, Arabidopsis thaliana
  unsure (1)..(224): unsure at all n locations
acgcgaacgaaagcncggaaccccagagagcgccctggccggggggagccgaacccaacaanaacacccggcgacccagccagccaacgggcggggcagaagaaaaaaagcatcccgacaagggagcaaccacggagcaaagccccaacacacccgaggagggaacacaacccgcaacgaggaacaggaagacaagacaggccaaaaccgatgccgacccacca

SEQ ID NO: 187076 - DNA, 545 bp, Arabidopsis thaliana
  unsure (1)..(545): unsure at all n locations
gctctatcgactcactagggagctgtacgctgcagtaccggtccgggatatnccggttcgacgagctacttgccgggggccgccttttttttttttttttttttttttttaaaaaaacccgaaaaccttaccccgcagtgggacctttccacgggtttttgagaaacttttttttttttaaagaaaatatatctttggaaatttttttttttcctctttctccaccaaaaaaacctcgtttggggaagagattttttttgaaaaccctttgggggtgggggccccttttttatgagaaacaccccgccccgaattttttttgtgggtggggccccccaaccaaaaaagaaccaccaaacccctcctttattaaaacacaccttcctccaaaaaaaaaaaggaaaaaaaccccccccccacccccccttcctcttttgggggggggggggggacaccccccccccccccccccctccctccccagtttttttgtgggggngggagacgcgccccccaaaaaaaaaaaagggggggggggggggggg

SEQ ID NO: 187077 - DNA, 528 bp, Arabidopsis thaliana
aaaaagctcttcgggctcactcgatctcttggaaactgggccctgcggtccggccggatttttgcggggcgcgagccctatcggggcgccccagtagcttctcctttcctcatgaaaaatctgtctaaaccggaccaacacttttttgaaacacacttagtgccctttttttagggggggggccacacaataatttttaacaaaaaagcgcattttgtgctgttggcgtttcacccccccttcaaccaataaatttcccttgaaaaaaaaggaaaaacaaaggccccttttctgtctctttctcccctctccttggaaaaataccacgcctttcaaattttcccggtactgacaatcctttctggcgcccttttttcccccaagaaaattctcatgatccccgtgtcccaaagtataaagctcttggtgggcacgccctgcaagatccccgttcaacccgcccgccctcatattcctgcccaatgtccgggctcggcctcagatacctcttgtcgaaggcccccataa

SEQ ID NO: 187078 - DNA, 380 bp, Arabidopsis thaliana
ggaagctggtcgcctgcaggtaccggccggataattgcggtcacgagtagtatggaggacgccttgtaagactgtcttcctgaagaagaatatgttttaacggacatacacgtctataacaccaaggacagcacttcacagctataaggtcacaccccattgtagacttagcctcacatattctgaaggagaacagccgttggtatcaactgaacacgacttaactatgtgacacttgtctgtaccaagaataatatccatcagcttctcaggacttcaactctaccctgatttttcgatctgcggctagcacgatgacacatgatgcacaggtgctccgaccacgactgggatccaagcaacgcgacaatgcactaccg

SEQ ID NO: 187079 - DNA, 413 bp, Arabidopsis thaliana
  unsure (1)..(413): unsure at all n locations
gggggaggggggccgctcgtccacggccgggggacagcgggttttagaaacagggggggggaggaggcgcccgaacaacaacggagccaggcgctgtcggccagacgcgcccccgagccgagagataccacacggagtcagcncgccggggcgaagagatgggggtggtgaggggaccggcgcgccgcgcacgagctcaaatcaggcactgggcggaggatcccccgatacacgcacgcagacgcgcggctgttttagccaccgatggtgggtgggggccccacgacaccacacgcgccacccgcagcgacacaaaaaacagcctcgcgccgtcgagacgactcacacctgcaagaacaaccacagacgccccacgcggaccgacacagaccgcacacctccgtccgcgcgcc

SEQ ID NO: 187080 - DNA, 527 bp, Arabidopsis thaliana
  unsure (1)..(527): unsure at all n locations
cgcaggaccggcccgaataccgggctaccacgcgccacgacccgaaaaaacagaacaaaaacacccgccgagagaagacccgagagccccacagggagacaacaccggcgaccaaaccgaccgccccggcccccccccccccgcaccaagcccagccaccaaacaaagcctaggcggagagaaaaaccaccgccgcccacaagaccccccagcncccccccgccggaaacaacccagaccccccccgacgaccaccgcacccaacggaacaacaaagaaccacaccaccacaaagccaacaacaaccgagacccaacaaccaaccacgagcccaaaacacaaccgaacccaggaagacccaacaaacccacacccaaccaccacaagagaacacacaagcgggacaacacaccaaaagccagcgcaccccccccccaaccccgaacccccaacacaacacgaaccccaccaccaacccacaccaccaagcacgcccacaacccccaagcacccaacaccacacaaac

SEQ ID NO: 187081 - DNA, 522 bp, Arabidopsis thaliana
acggggcacgcacagcgaacgccagccacggatccacccgcagcggttgacacgcgggcgcgcgaacagccccgccagcagagaacaacccgcgccgcgacaaagacccactcgaaccgacgcaacaagacggaaaaaaaagacgcaaccacaacacacgaagaccaacagaagagaccgaagaacacagacgcaacacagaccgcaacgcacgccgagagaacgcgccagccaagctttttttttcacggcggggggggagaaagaacgaacggggcaaaggagacagaaaacacggcagacacacaagccgcccacacaaaagaaaaaatgaacgcggagcaccagaggcgcgaccgggcaccgacgaagagaggaagaacaagaaaggacacgaacgacgaaaacgaccaaaacaagacacggggaaaggaacgaaagagaggcgaaacggggacacaacagagagcaacagcagacagcggggacaccggcgcgcagaagaaacgccggaacacacaa

SEQ ID NO: 187082 - DNA, 601 bp, Arabidopsis thaliana
  unsure (1)..(601): unsure at all n locations
gggagacacacacaaagaggagcgcaggaggaaaagaagacaaagacacacaccgcccgcccgcaccccgaggaaaaagaccaaacccaaacaagagagcccagaaacccacgaagaagcgagaaacagccccgcaccccaaacaaacaaacgaaacgccccgcaccgccacgacgaaaaacacagaccacacgccgaggaacccacgaagaaggggggggccagaccaaaaagcacaagcagaagaaggcacgaagacgacaaaaaaaaacaccccacccgcccaaaggaaagaaaagcacagaaaccgacggcccgcaaagacaacccgcagcggccacgagagagggccgcacgagagaccgagaccaaacaaaaagagcaaagaccaagccccgagcacaacaangccaacggagggacgagaacaagaagcgcagacgcgacaaacaacacccacaccgaacgcgccgcaccccccgggggaagagcccggagacccgaagacgcgaaaaaacggggggaaaaaagcacgccccacgccccgaaaaaaagagacagaacggcgcaagcgaaccaccaggcaaggcgccccccacgg

SEQ ID NO: 187083 - DNA, 751 bp, Arabidopsis thaliana columbia
  unsure (1)..(751): unsure at all n locations
ccccccccccnccccgcccccccccatccccctccattcccccccgcccccccccccccatccccgccgcgcgcccccccgccccgggcccggcccccgccccagcaccccccctctttcccacgcgggggttttgggcgcgcccaacaaccccacaccncccccccccccccccccccccccccctcnccccctccaccccatccaccaaccgccccccccctgccgcgcatatccgcgccgcgctgccgctcctcccccgctcccgcgctctcccgacccccctacccttccgcccccactcccccccccccccctcaccccgtcccccgcgcccgcgccccccgcctctttctcccggcgtgtggtggtcgtccccacaccccccctncacgcccccccccnccccaccccacacacacacaccccnccccncncnccgcnnaaanancccccacacccccccccccaaaaccccaccccacnacncaaccaccccccccccccccccgcctccccgcgccccgcccacctccccccccgcacaccccccgcccccgcccccctcccccgccccccggccgcccccccaagccgccgccccccccccccccgggccccctccctcttctcccccgcgctcctcccccccccccgcaccctccatccgccccgccgcccccccccccccccccacgccattctccctcccgccccccgccccccccccgacgtccccccgccccttcct

SEQ ID NO: 187084 - DNA, 458 bp, Arabidopsis thaliana
cccccccccccccaccccccccctctatctctcggcgtccgcgtcccctcgccagtgcgggttccactcgtcctccgccgcccctccctgccccacctttatcccccgttcccctcgccgcttttgttacgcgtcgccgcgcgggcttttttttcgggggggttttcccccaaccgccgcggctgccaaaaaaaaaggcccgggggtggtgcgagaccgcggatggccacgggcgagtggggccgtcctgtttgcgctctgggcgtttgttttcgtagttcgcccgccatgatccgagcgtgatctttggtgtgtcatttccgcctgccgtcgccgcgcggcccgccgcgtttttcggcggtttttggcccccgtcattcgccttctctctgccttgcgccgctctctggccgtttttgggtgttgcgctcaccccgccatgctcgcgcccgcctttc

SEQ ID NO: 187085 - DNA, 533 bp, Arabidopsis thaliana
ccaaaatttacgggaacatacaagcagccggagatccccccctgcgaaaaagcctccccgggggggccggggttagacgacagaaagacacgaggaaagaagaggagagcccgccgcgcggcgaaacaaaaaacaccgaaaacaaggaagaccgccgagaggggaggccgcgccccccccagagagagccgccgcccgaagcggagaacagcggcagctaagtttttggggggggggccaccggaccgacgccggagagacagacggaaagagcagcccaccgccacgagaagggagacgacgctgagcccaaggggagggccggacgagaaaagacggaaggaagacggaccgcgacagagccgacccccgcccgccccacacccaagacagacaaaagaaaggagaggccaggacacccagaggagagggccccccgggaggagccgagaccgaagggaagccccggcgcgagacgcgccgcccccccgaaaaaacaacgacccaccgcgcgccccaaagaaccccacaag

SEQ ID NO: 187086 - DNA, 383 bp, Arabidopsis thaliana
ccccacccccccccccccaccccacccccccccccccgcaccccactttttttggggggggtgttcccccacaacccccgcggcgcccccgcaagcacgtccccgtgccgcggcgccgcccccgcccgccctccttcgtgtgggtcgcttccgcgcccgtttccgccctgccctggcgctgttcccctgtccctccgcatccgtcctctcgctgggcgctcgttcgccctttctccgcgctccggtgctggggtgtcctctccgcgcttttctggcggtttcttggccccggtctgtcgtggttttggggtgcggcgccggggtcgtgcggtcggttgttcgcgtttgcccccggcctcgcccttcaccgcggcgccgcgttc

SEQ ID NO: 187087 - DNA, 567 bp, Arabidopsis thaliana
gctaggcccgcgccacccgcccccggccctcgagtttgtcggggaaacgccccccggcttcgggcgggggggccccgcgccgacgagcggcggccgcggcccccgcaggatttgggcaccgcggaccacgtccggcgcgagggaccatcagacgcgaccagcaaagagaccgcgcgccagcgccgagggcccggacctcagcggggacagcgtcacccaacgcagagcccacacccaggtacaaggccgccggggccggcgccccccgccgcgaccgcgcggacgcgggtcacggagacgagagcggctccgggcggtgagcggcacgcagccgcaacgcgaccacgcgcaccagcggacgacccgcgcgctcacgaggacaacggacgcgacccctcacccgcgcggcccgcgcggggcagcgcccgagcaaggggggaggtactcacgggcgcgtgccgccacagccggccgaccggcccggcgcagcggcgcccacacatatcgcgcgcgcgacgtcgaccttagcccggcccgtacagagcaaggcatcccgggcacggcgag

SEQ ID NO: 187088 - DNA, 549 bp, Arabidopsis thaliana
  unsure (1)..(549): unsure at all n locations
ctccaccatacatatttttattctcgtgttccccgtccttcaattcccccccttttctatccccccccttttcttccgcccatctcttgcttttcttccttgctctttccgctttctctacatcgtcttcttccctctatcgggggctgtcgtttcttccaaaaatttcttctctcttctcttttttctcgtccctttttactcgctctcttctatcattcttcgtcttccccgtcccgtttttccctctcttccacccttcctgctctcccccctttctttcccccatatccctttctctcttttatattccgctatctccccgtctttccctttccccttctccctcgggggggtgtccccttatttcctcttcggtcttcttctcaaaaacaatctgtgtgngtcgacttttacctccccttcatcctctatctcctttctgttctcctcccctcgtatttccccctctactgtttctatctcttcctatttcttccgctctctctccctcactaccgtttctcccgtctgcccctcttttctctt

SEQ ID NO: 187089 - DNA, 216 bp, Arabidopsis thaliana
  unsure (1)..(216): unsure at all n locations
ccccccctactctacggacgcacacccccattatccatctccctccacccactcgcctccctccccttaatcccccctttcccatacacacttattatcccctgtcccccaaagtcgaaccccctctttttacggtggggtgttggcaanaaaacacctatgggtccgtgctcccaccaaaaaaatatcgtatacatactcgcccacccgcctacg

SEQ ID NO: 187090 - DNA, 436 bp, Arabidopsis thaliana
cgcttttccccccggaggcagaccccccggcccgcccccccccccccccagccgcggagtggagcgagcgggggccatgtcggtcagagtatgccgccccccccccccctccccaaaaataactgcgtccccatcgtccgcgccccccccttttcgagagcaggcgaggtcgtggtcgcgtgaccgcgaccggccccgctccacccggcagtccgtacggcggtaaccggcaggcaggaaacgccgacagacccccggcggcggccccggcgagccacgcgagtccgcggcacgccttgctctcgtggtgcgccggcaccacccagcgcggccccacaccagaggcgacaccgagcagtatagcggaggcagaggcgatttgacctggcattgctgattgcgagggggagagaaaaggacggcacaggggggggga

SEQ ID NO: 187091 - DNA, 612 bp, Arabidopsis thaliana
  unsure (1)..(612): unsure at all n locations
ggggggaaaacaaaaacccaaaaaccaccccaaggcagggaaggcttgaggaaggggccccgggcgcaagcgcgggggggaggggacggagaaaagggaggcgaaaagccccaccggaggaggaaaaaaaaaaccacccgaaccgaagcgagaaaacacccacgggaagagaaggggccggccccgcaccaaaggggcgcagagccgcgccagggagagacagacgcggcggggaagacgccctttttttagagagggggcaggcacaggaacgaaagacgagcccgagcgagggagagaaccgccgccgcccggagaggaggagggggacaggcgagaggccgcaggaaaaagggacggacgacagaggggaggaggcgcaggagaagcggccccgaaaaacgaaagcggaggccgggcaacaacagagagagacgcgacggagacaaaggcgcgggagagagagggcgcggagggcgggagcggaggagcccgcacggccgnacagaaaaggcccaaagcccagaaagagaaagggccgggggcaagacgccccgcacgccggccgaaaaaaaagcgacccccggcaggagccacccaaagaaggcaccg

SEQ ID NO: 187092 - DNA, 669 bp, Arabidopsis thaliana
  unsure (1)..(669): unsure at all n locations
agcccaaaaacaattaacggggaaaaaaacaaagaggcccccagaaaaggcccccgcagggccggaaaacaacaccccacagaaacacacgcgggagaagcgcggcgacggcggcgcggcggggagagaaggagcgcaaaccgcccccccgccaccgcgaaaagaaaaagaaacccgaaaccaaaccaaagcccccgaaaggaagaagagccgacgccccacacaacacaagcaagccggccccgcgccacacagaagaaagcgcgacgacaacgcgaaagacatacaagaagagggggccaaccaaggaagccaaggaagagcaagcgagagccgcgagaaagaaaggacccccgccgcccgcacgcaaagaacaaacccgcacagcggaggccacaacgagagcagcgaggagagagacaacaggaacacgagaagcagacagacacccaaagcagaaaggagaggcggccaggaagggacggacgagacgccgacaaagaaaaaagacgaaaaaaagagagccagcaaaacgcccccacagganagcgccccgcggcggcgaagagacccaagagccgaacccgaaaagacgccgcagaagacacccccccaccagcgaaaaaagaggaggaggccgccgagggaggggcaaagagaccaccccac

SEQ ID NO: 187093 - DNA, 418 bp, Arabidopsis thaliana
ttttatagcccccgcatcccctccgcctaccttttataaccgccaatcccacacactcatcctataccctctccatccttccttttcttctccgtgtttcccccccacaccacccctctctcccccattcacatcacaaaaaacacacgtactctccccaccaccctccccaccaatttgtatatacttctccctcccccctatatcacccctccaccactttcttattccattctaattttcctcccccctcccacctcactactattcagtccatacagtcctccttattctcccttatccttgtcccctgtctctctccgacccacttacacccaatcttttttctccccctctctatcctcattcttctcaccccttcattatctctctccacatttatatctcttttcttccc

SEQ ID NO: 187094 - DNA, 360 bp, Arabidopsis thaliana
  unsure (1)..(360): unsure at all n locations
cccggcccccaccgcagcgctactgccgccccctagccgcaccctgggcagcccacaaccccccctagnttttttgcacacccccccccccctttctctncctctacncccccccccccccccacccccctgcccctcccccctcccccttctccttatctcttcacgtcctccccccctcgctcagctctcctcgctcgctctttttcaccctatctcgcctcccccttcctaactctccacgtcgagtgtctacccgcaaatgagcgctcagctcacccctcacggccccccagcaccttgctgccgcgccacgaccaatcatgtctaactacgacgcgcgacgactacgccaccccc

SEQ ID NO: 187095 - DNA, 531 bp, Arabidopsis thaliana
  unsure (1)..(531): unsure at all n locations
ttgcgccccggccccccctcctgcggtcnctgtgtttgatgttggggttggggtttcgccctcgggggcccggcccccacaaaaacacagtccgcacctcgtgtgggcccccggtctcgcatccctgtccgtattcgccgtgcgtttgacgtttcctcttcttcctgctcgctttctgcgctgtcatcccgtaacttccgccccatttcccatcctcccttttactttcgccgttcaccgccgcaattgtttttttcaccctggggggtatttatttcccgcctacgtgccgccccccttggcacctgtaacacccgttcgcctcgtgctctggtcttcgaacgtcgtggctctgtttgcttgtttgtgtgtctgcatattccctcccgcgttatccgccgctttgcgccacacatccatcctatatttgtcctctgctcttcagctcgcgtagctgggtcgtcattgggtccctcctttccgtccaaatcattgtccgctcgcccccgcccgcacgacttcctcccggca

SEQ ID NO: 187096 - DNA, 614 bp, Arabidopsis thaliana
tttttccatttcccttccatctttttatctttcatgtaccgccccctttcccccggagccttgagtcgccctgtgtgtattaggatcttgtgtgtttttactcgggggttgtattttccatataactttgacagaatattcgcccctatttcgctcctacatctatttgacgtctctttgtcgttttcctttatatttcgtcgcatccgtctcgcatccctattttgcccactttcccgttcttctttataatacgctatctccccgcttataattattattttccgcgggtggtttccccatattcgccctcggatctccccgtaccacagaacccgtagaattgagcttatccggtcgtagtcttctgttattgtctttgttcgccccctggttttgcggctgtggtcctttattggtttctattatgccgcgggtgccaggattaatctccagatcgcagtggttcgcgtctattttgcgttaccgtgccctagagttcccgggagcatcttagcgggcgtatttttgcctcgcgtagttatgcatatatagcgctggttaggttgtggctccgctttgatttttatatttttcctcctgcacccgctatt

SEQ ID NO: 187097 - DNA, 292 bp, Arabidopsis thaliana
cctccactctacatctcttccgtttcccttcaatttcctccttcctacccctatttccaccacgccccacttcctcccagtatctctacacaacttttttttcactggggttatattgcctaaaaaaaaatatattccaaccatcatccccccactattctagttcacattcttatcctccaccattctatataccttatttattccaccacattcctaattatccccttatatatacacatttctccaaacaacattattactccaccatacccccaaaaatttttttccc

SEQ ID NO: 187098 - DNA, 409 bp, Arabidopsis thaliana
cggtcctgggggtggcccgtttttacccggggggggggggggggtcgcaaaataaccgtgtggatgctcgcgccataactagtccgctgggcttgtcggtcgcaattcgcgaatggagcattctctcgtcccagccggagggccctcccttaggttccgccgtgagcttcccggccgtgtctgcacgattcccgccgcggggcgcgcctctttttggggggggggggcaaacgccgccgggcgggcgcgcgccacaaacaaaacgttggccaagcggtcccgcccggtcctccttgggtgtgtcgcgccccgccctcggattcgcgcacgcgggttgagtgcgcccgggttgtgcccgccgcgtatccgagcacgcgcgagggcggggcggatggcgcgcttctatcgg

SEQ ID NO: 187099 - DNA, 622 bp, Arabidopsis thaliana
  unsure (1)..(622): unsure at all n locations
gccccaaacaanttccagggggcaaaacacgcgggcccaaagaaatgccccccaggagcaggagacacaccccgagaagaccacaccaccacaaggagggaagagggcgacgcgacggggcgcgcagaagcggacgagaccaccgccgcccccgacgccgaagaaaaaaacaccacccaacgccggaaccaaaagccggccacacgaaagagacgcgcgcgcccacaggacaagagggggcggcggccggcgcagagaaagaaggcagaagagcgcccggaggagcacacaaacagagagaggcacagcagcgggcaaacagggaaaaagacagcgaagaaaacaagagaaacgccccgcgcccaccgggaaagaaaaggccgcacgccagaggccgcagcgacaacaaccgccgagacggaaaacgaagcagaacacgagacacacacgcgccgaacgaaagagccggcggccagacccgcacccccgcgcaccgcgacgaaggcggagagcgagagaggacacgcgcccaagccccccaccagcacacgacccaccacacgaccccgagaaaacgccccagagacggaaagcaggaaaaagcgacgccgacacagacccg

SEQ ID NO: 187100 - DNA, 517 bp, Arabidopsis thaliana
cttctcacctctctccccacacgctttctaaccaacgcactgcgggtctatccgctcatccctccagcaccattctcttattatcagcgctatcagacttctctatctcttgtgtctcgtgcaagtgccaagcacggtcgcccgtctctccacccccgtcctaccgcgagcgacgcggcagtctcgagtccgccgcacccacttctttctgagcaccagcgattgcaatgtgacgggatagaagaatggtccccaagaacagcagatacatcgtacgcaacgcggcgtagagagtggcatattgcgcgggaacagcgagaactaaacagcggtatgagaccaagcagatcagtactcaggcggtgaggggaataatatgataaatcagcaagaaccactaataaatcagacatctcttcgacacaatgttaggtagcgtcgacctgtcacattcttcatagtataatttgtttctaactcagtcactactcgcatgaaagttgaaagtaaaatgaaa

SEQ ID NO: 187101 - DNA, 588 bp, Arabidopsis thaliana
  unsure (1)..(588): unsure at all n locations
ccccccaaaancttttaaggggggaaaaaccagacccccaggaggaccccccaggcgccaagaaaacaacaccctccaaacacaacacgggcaaagagccgacacgcagaagagaaaacacgggaagaacaagcgaaaagaacccccccccccgccaccgccaaaaagagaagcaacgcgcgcgacgccgaaacccgagaacacacccggagaacaaccgcgccgggcgcccccacccccaaagaaaacacccacagcccccacacccaaacaaagcccacccgcaccgcgaaagacagagnctttcttttctaaagcggcgggaacaacccccgccgcaaacacacacccccgaaaaaggcaacaaaaaccccccgccccacaagaacaagaagagaggacaagacccagacgccacgaaccacaaacgccggacacaacaaaagaagacaaacaccagaaaccccaccccacaagaaaaaaaagcaacaccaccccacacacacccacaccccagaacaaaaaaaaagcgaaaagaaaagagagcccgaacacacccacgccacagcacccacgcccgagcaagaa

SEQ ID NO: 187102 - DNA, 660 bp, Arabidopsis thaliana
  unsure (1)..(660): unsure at all n locations
ccctccctctttactatttccaattccccctcccttcgacttcccccacttccatccacgacccccgtcatttcnccgaggcagccctgggcgcgctcgcctgttcttggtttttgtggtntgagcgtgtttttttatccggggggttgtgttctttcgcaaaaaacttgccttccgcttcgcccggccgcttgttctcctttcccgcttcgttggtcggagcgggaatcgactttgtccgtcatttcctggcccgcattctgtctgccctccgcctttcgcgccccgcgtctccccccgccctctttttccccgatcgctccccgtggctgatcttttttttcgggggggggtaccgcctagactgctccgtgggccctcctacgaaaatcgcccgatgtctgtctcgttgcctcccctgtgatgtcggccggtgcccgtctcccctcccatttcgggcttgcccttttcttcgccgctcttgtcccgcgcccttgacttgagcttggaggctcgggtgccccctactccgtgcttcccggcctgcgctgcccctggggtattcccgtgcgttttttgggccacggtgtttgcttatttggcccggcttgtccggcgtgcgtgtttttttccctttttgctttggtcttccgtttcatc

SEQ ID NO: 187103 - DNA, 608 bp, Arabidopsis thaliana
  unsure (1)..(608): unsure at all n locations
catttccccatacaccttccccccgatcaccaattccttttcgccccgacagcacccagcattttaccatcacgctncacaacatcctctcttcctatatctgcgctttactccccttttctccagtggtgttctcccctatcaaaatccgctcgtttccccccctttcccctttccactcataaccgcccattctcttgtccccccctatttttcccactttctcctctctcctatttactcccttctcccttcttttcctctcctcatcctcctatcttttattctcattacctcccccgtcgctcctctgctcgctttccacctttttcgttgtttttacccgccgcaataatctctttcttctctctgttctccctctcgttttcgccctttttcatctatttctcttcttttcccccctcctccatccgtctcttcttctcccaagaacccgtcatttctcccactcctttctctttttcccccccgcctttctctcccctttatttacccctcctttgtttctatatccctcctccttcccgttcctccctctttctatttctcttttctcctcactctcccatttactttcgtcccttttt

SEQ ID NO: 187104 - DNA, 645 bp, Arabidopsis thaliana
  unsure (1)..(645): unsure at all n locations
ccccanccaacccccccccgngaaccgaaaacacaacacccanaaaagaccaccggcccgagaagacaccaagccacagaccaacaggacaacgaaacacaaaagggcaccccccgcgcgcccaccaggggaaagagaagcacacggcaaaaccaaaaccgagaaccccccccgcaagaaaaaaaccccgccccacccccccacagaaacgcccccgaccaaccaccgcacagaaacgcgaccaccgcacaaaaaacccacaatttttatacaggggggcggggagcacagcacaaacaggcacaccaggcgagccaagagaaaacccccccccacccgcacaaacaagacacccccacaccaaaaccccgcaaacggacaaaccgacaccgcgaaaacaaacagacccacaaacgccgcccgccggaaaaagagaagcacccgacacgaaacaacggcaagcccggagaagaacacagaacaaaaaagacagaacaccgagcgacccggaagagcgggcgccgccgcgacgagaggagaacgcccccaaccccaaaacacaaaagaaccggggcacccagaacccgcccccacgcccccaccaaaaaaaccggcgccgcgcgggcgggcgccaccaaaaaagcc

SEQ ID NO: 187105 - DNA, 481 bp, Arabidopsis thaliana
gacaccccattacccccaacccacaccccacccaaccaaaagggaaacacccccgccccacaccaaaaaacaacccccaaaccaaaccaaaccccccaaaccaaaaaccacccccccccaccaaaaacacccccccaaccccaaaaaacccaaacacaaccaaaattttttttttttagggcggcccaccagcaaagcaaaagacacaccaaaaaaccacaaaaacccccgcccaccccaccaataacaactccttcaccacaacccctacaacatcaccccgacactaactaaaatataccagacataacttcacccccgaaataacatacatcacaccccccttccccccatcctatacatcactataaccaactatagagccaccataaccccccgttatcaatcccgccgcccctattataaaaaaaaccagagaacattaaaataaaagacccacccctcaaaatcgccccccctt

SEQ ID NO: 187106 - DNA, 566 bp, Arabidopsis thaliana
  unsure (1)..(566): unsure at all n locations
aaaccaaaaaacccccaaaaacacccccccnggcaaaggaaccaccccagagaaggccaccccgcgcgacngccacgagaccacaggcacacaggaaaaaaaaagggaaaaacaccccccgcagcagcagaggaaaaaaaccaacacccgaagcaaaccccccaaggagagagggacggcaccccccgccaagagggccccggcccccccgaaaagaacaggacgcccagcggaacaccttctcagaggggggcacgcggaccgcgcaacaaacggacagacacgaacagaaaccgcccccgccccggaaaaaaaagcgaggaccaagaccccgaagcagaccgagaaacggaagagggacaacaagcagcgcggccgcgaaggagacgacaacacgccgcaagacccgagccgcgcaaagcgggacagaaggagagcggggagccgagggccggggggcgcgaacagggagggaaagggccgggaccgaaacggagagcaccgccagaaaacgcccacgcccccgcacaaaaaaagggacgcgacgaagacgggcaaaaaaagac

SEQ ID NO: 187107 - DNA, 239 bp, Arabidopsis thaliana
  unsure (1)..(239): unsure at all n locations
cgcccaccccaggggcgcgaaggagaccgccggggaacggaccgcccaccgcacccacggccagncgggcccggccgaggcggggcgccccgacaaggcggggggccatgccgccgggccgagacaaacgcggtggccgagaaacggaggcgagagggcagcccggcacgaggcggagcacaaaggacccaagcgccgcgccgggcggcgacccggaagcgggacgggtgggaacctcg

SEQ ID NO: 187108 - DNA, 649 bp, Arabidopsis thaliana columbia
ccccccccccccccccgccccccccccaccccccgcccccaattccccccccccccccccccccgaattcccccccgcccccccaccacccccctccccccacccccccccgcccctttccccccgggggcagcggcccaaaaaacacccaccccccccccccccctacccccacccctcccccccccccgcgccccccaccacccccccccccccccccccccacgccccccctcacaccccccaccccctcccccccaacccccccacaccccccccagaccgaccccctttcccccggggtggttgcacaaaacccccaccacggccccacccccacaaaaacaaacccgcctagcccccccaccccccccctatccccactatacttaccacacccccccccctccccacaaacccccacacccccacccatcccccgcaccaaccccccccccctcaccccccccaccccaccactccctccaccccccccctccaccccctatcccgcgccaccccccccccacccccctcaacccccacacgaactcccccccgccccatccccgcttccgcccccctcccccccccccccccacctaaaacgctacccccaccaccaacacattaatccgcccccccttat

SEQ ID NO: 187109 - DNA, 327 bp, Arabidopsis thaliana
ctatccccccgcgcgcgcgtttacaaaaaaacgtgctcccgtggcgatcgcgccggtgccccttcgctttcgttcctcgctcgcgtgcggctctccgcgccgccgcgttgtccccgcctcgcggctctcgcggcttctgtatattcgccggcgcgccgcgcccgctgctgttgcctcccctctggctcctcctgtctcgccggttcgggtgcgccggtgtgctctcgcggcgtcatccgggcggctatttccgcccccgctctcgcccgtttttcgtccggcgctgcgcctgcctctcctctcgactctctgtttcccgtccccccc

SEQ ID NO: 187110 - DNA, 674 bp, Arabidopsis thaliana
cccccccccctccattttttcccccccccaccccaacatacatcaccaacccttatatatctttcttttttttccaagtgttcccttccctacatacaccacccatccactccaattattcccccctttttctccctcccccttcctttatcactccacatttctctattcccccatccttctccacccccaccctctattcgcttcccaatttatatccccctatttccctatcactcccgtttattcatcccaatactaccctccctaattttttttcccatctttgtttccctcataatctccccatttatccccctcatctcaccaaaaaatacacccatcccctcaataattatttaactcttctacctccccttatattcccttcttctatacttctcctcccctctccataatccaccccatctaccattgtctcactactatatatttcctccctccctcttctcttcaccactcttattcgtcttatcctcctatttctctccatatcctatcactctcacatcccccctactcctctatccatccaactatattcccccccaccctctttcccatctttcctctctacatctcacttctctctctctattattttataaattttctcccaccatcctctccctatccttatctcctccccctct

SEQ ID NO: 187111 - DNA, 194 bp, Arabidopsis thaliana
  unsure (1)..(194): unsure at all n locations
taactgcccccactctctatctcattctcatatctcgcccccctcacccaaggangacaggaacgagtttgatttntgggnacccatcgcgccgagctttcgcgggtcgccgctgccgtgcacccacactcatcatgctccactcgagcgcagacgcgactatgcggcggggagagcgatggaccgccgatact

SEQ ID NO: 187112 - DNA, 521 bp, Arabidopsis thaliana
  unsure (1)..(521): unsure at all n locations
aagggccaaagacaaacggagaaaaaaaagaacccccccgccgaaacagaaggggaagcggaaccaaaccgaaaacccacaagaagaaaaaagcgccccccaccccacgaagaagacaccccgcccgaacaggagaccagagccgggcagcgaaccgcagtttttttacagcgggggcaggaccaagagaggcgagcaagccccggcgcaaagaacacaccgccgccccccgcgggagagaggagcgcgcgagaagaagagcggcgagagagaaggcagancgcgaacaagcacgcaagcacaacgaacacggagcccgagaaaagacgcggacgcacaccacgacaccccacagaaccaaggagaaaagagaacaggaagagaccgcccccacgcccgcccgagcggagccggggaccgagcgacagaggacgccgaaacccaaaacaacgaagaagcggggacgacagagcaccccccccgcgacaaaaaaagaggcgccccccccgcgccgccggccc

SEQ ID NO: 187113 - DNA, 556 bp, Arabidopsis thaliana
  unsure (1)..(556): unsure at all n locations
tatatcccccccccnctcttctcccctttttccgcctccgcctcgttgtcctctccccctctcctccttttctcttttattttgctccctctccgtcttcccccgccttttatcccccgtttccccctccccccttttctnttccccttttctccccgccctccttttttttctcccggggtgtgtgtcatccccatatccccccggcgggtctttacacaaacatattctccttcgtttatctacctctttcctcccgtatctttctttatcttttattctgttccctctcctctttttccgctcttttgttttgactttcgttcgttcactcccgccgcgcccctccgctctgcccgctgcgctccttctcgttcactctcgtttctcgcctttctcatgtctctgtgtgttcctccccgctcccttcttcccgtgcccttttcttcctcccccctgttctttcgtcttattcccctctccctccgtcgtctttcttctgcttgactattcttctcctttcgtccctcctctccctctcctatttccttgcttc

SEQ ID NO: 187114 - DNA, 390 bp, Arabidopsis thaliana
atctcgcgtcgcgcgctcgaaaccgcacgccgatcgcgaatagacaacaatgacggcagcaccgcgagagcgactgaatggatgcgccagtccgagctcccgacgaatcccaatccacgcgacattttttggggggggggacacgaaagggggcgggtgaaaaaaaaagcgcaagagataagcggcgcagcagtgatcgcggtgatgacggccccctgatatcgcgtagcgctcgttgatctatcattggggatgggagtaagggggggggggagggcgtaattggcgtacagaaacaaggcccggggctttaggggggataagagccggggaagggaataggacagggcaaaggccaggatggaaaaggatgtcgctagatggcatgag

SEQ ID NO: 187115 - DNA, 161 bp, Arabidopsis thaliana
ccgacggagaagcaacgcgcgccccgcacatttcatcgacgccgggatactgctcactcgcgaggaggcgaactaaccaggcgccggagaattgattgttatacgtgtcgatggacccccgtccatgtctacatatgtgtatttggggtatggggggttgc

SEQ ID NO: 187116 - DNA, 758 bp, Arabidopsis thaliana
tccccttccatcccctcctttttattccccctatcaccacaccatattctttcccctctaccaccccccccccattttttcctccacagaccccccagccctcccgtcctcttttttcctatttcttttttcccttttttttcccaccggtgtgttctttctccataacaaccaattcttccttcctccttctactgcccccctcattccctttcccaattcatatatccctccctctatccctttctcatcatctacatattccctcctttctcctcattccactcccctttctacaccacctattttccatctcctcgctattattttaccccatcttcctccttctctttccttctttctttttcccgcgttgtttgttttattacacctttacctcctctcctctcgtctcataatacaaaaatattcttccttttatcttatcatctattcttcttctctatattactcttttatctctattacactatttccctcctcctttaatcccacctctcttcttttgttttacttatcctacttctcctcccatgtctcatcctactacatcactcccatctccattcatcctctcttaattctcccttttcctcctctcttcctcccctctcttctccttttctctttcattatttttcctcctcctccttttctctatttttctctctctatctctcttctctttctctctcttttattcatttttccccttctccctttctctatctttctcc

SEQ ID NO: 187117 - DNA, 399 bp, Arabidopsis thaliana
aaaaacccaaagaaccccccgagaaaaagaattttagaggagggccgggatcacacgagcagcacacaagagaaaaaagggggacacccacccccaaaacaaaaaaaaaccccaacagctaacataccaccgagagcaaaaacacagccccaacccaaatgcggcccaccccccacgaaggaaacaaagcaacgaaaattttttttttgggggggcaagaccgggccgaaagaaacctagagggaaaatagacccccgcccagaaaagaggaagccagaccaaaagccaggctgggtcgcgggagccaagataacagagcgaaaaaagagcccgacgaaaataaataccaaccccattgcaccccagcgacagaatacggaagacgcaagagacaaacc

SEQ ID NO: 187118 - DNA, 678 bp, Arabidopsis thaliana
  unsure (1)..(678): unsure at all n locations
accaaaaaaaanntttaagggggaaaaaaaccaagagcccaaaggagacacccacggagacagaagcaccaacccccgtctaagaaaaccccgggagaacagccaccaaacgcacaaaacaaacgaggaaaaaagaagaacacaccccgcccgcgccaaaacgaacaaccaacaaaccccgaacacccaagccgaacccccgcgcagagggaggagacaaccccccccaccgccagagagagcaacaccacacgagccaaggaaaaaagagagcgcgacgagagcggagggaaaagaaagagcttctctacagagggggccagaagaaaaacaacaacaacaaagacaagaaggagaccgcacaccacaaagagaaaagagaacaacaaagccagaagccacgaacgaagaggacgggcagacaaaaagacacgaaagcacaagagaacgacgccgaagaaagaacacacccacaggaacaccacgcccacacgaacaaaaccaaaaacaaaaataagacgcagaacagccgacccacaggaacgccggacgccacaaaagagaagccgccaagcacctagacaccaaaacggcgccccacaaacacccggccccagcgcgacacaaaagaacagaaaagcccccagaggagccccccaaaaagaggcccccccacac

SEQ ID NO: 187119 - DNA, 203 bp, Arabidopsis thaliana
cttttatccccatatacgatcgttcgcattatttcgcgatacatcacactacacatactttttctccggggggtttaccaccaacaccccgcgggtgctctcacaaaaaaaagaacccgtattagagtcctatctcctctttacattacttattttatgttcatgccctctactcttttcgcccaacttcttatttttcaatc

SEQ ID NO: 187120 - DNA, 596 bp, Arabidopsis thaliana
  unsure (1)..(596): unsure at all n locations
atcccccaccgagacaaggaaatttttccgaggcgggcccgcggtacgcgaacaaacaaaccacacgcgcaacgacgaaaaagagaagaacaacacccgcccacccccaactacgagaatagatatacccaacccgtaaccaataaccatagaacccacgcaagagtataagagcgaccgaccccacaaacagagaaatagagaagacagaacaacaagaaaaccaagacacagacaaaatttttttttttaagggggggccaaccaaacaacaaaacacaaaacaaagaacaaaaaaaagaaagaccccccccaccacaccncataaaaaagcacccaaccaaaagcccaactcagaaaccgcaccacgagtagaagaacgtagcccaaaatctcccccgacacaaaagagagagtacacacccgcgacccacaacacgcaggcagcctcgatgcaccgtgaaacgagaccaaatcactccccaccatcgaacacgccccccccgccacaggaaaccgccatacacagaaaccaataaacacccaccgacagacacccccgcaccaccaacaaaaaacaccaccccccccccccc

SEQ ID NO: 187121 - DNA, 264 bp, Arabidopsis thaliana
  unsure (1)..(264): unsure at all n locations
ctctttgtctttttataacttctttttaccctgggttatagtcctctaaaaaatcttctttcctattatcctccgattctcaataccccatctcttctcccacataccatatcatccaataatcctcatatatattatccaccctttatacccccactaccatcaactctttttatccacatacccccgacccattttttccggggggtggttttcctttattcgcccgctctccaaaaacaaacaacaacctncccctatcat

SEQ ID NO: 187122 - DNA, 308 bp, Arabidopsis thaliana
caaactcctcattacggatttcactctatatgatacaagctaggtaatcgcttgctaggtaaccggttacacgattattttctggatttcgatcgtccgtctctttcattctattctatctctcatagtttgtccctattcaccacatgccaaaaaatacaccatcattttattttctataacatatctcagcatcgtcctccaaacaactcactatattcttattttgttctatatctgatctttttcccaccgactatcatttttaatattataattttatactatttcttttttcctcctttcta

SEQ ID NO: 187123 - DNA, 467 bp, Arabidopsis thaliana
aagctaggtgaccgcccttgccaggtctcccggtgccggtctatttcccgggtggcggcccactctttttctctcctactgcgtacggtacgatagaggatattttaccatcatttttgcttccacacccttgcttttttggctttgaaaaaaggaaagatgggatctcggtctctgttccttcccgaatattcgtctttgggagatgccctcagggtggtttttttttggcgggggggtgtgcccttgttccaaattggaatcacccccaccatttctcctcattgggggtgcgaaatctgtgcttcaatatcgtgtctcacattttaatatttgttttgcacgacccacacattttgtgcgtatgtattttttccgtatatcgttttctcttactacatgttagttgattttcctaagtggttttctgtgtgttgccttcttattgcttttttcttttctttttt

SEQ ID NO: 187124 - DNA, 584 bp, Arabidopsis thaliana
ccctccacattccccacacccccacccccatttccccacactccccacttcctccctaccacgtccatatactctttttctcctcgggggtagtttccctacaaaattacccctccttctatcccccctatacccccccgctcccattcctcaccttcgtttatcctcattcctcccccatacttttatcccccattcttacccccttctccacccctccttatttccccattctccacccttaacttttttctccagcggggttttttaccctattgacccccgttcccataacaaaaaattctgtcttcgtatggcgtccttttccctagacattatcacatgttactgccattccccacctcccttaccccccttcactccttcgttactacattccctcgcccactcactgttccctctactcttaccccacctgctacctcatactcctcttccctgccctccactcccccctatcctttctcctcccacatatttgccccaccattttttcattttttctccccattctacatctccctcatcctaaaaccctaattcccctcaccaccgccatattc

SEQ ID NO: 187125 - DNA, 104 bp, Arabidopsis thaliana
  unsure (1)..(104): unsure at all n locations
cccacagcacgcgtttttgcagcagaggcagaggaccccgatcacacgcgagcgaaacacgggcnacacaccgcgaacgcacaggcccgttgtgcggacccgga

SEQ ID NO: 187126 - DNA, 315 bp, Arabidopsis thaliana
  unsure (1)..(315): unsure at all n locations
ccacccaattttcaccctattaccaccaccacttatatacccanacccccccaatctttttctttcgggggggttaacccacaaatagccttccgcgctcaaaaaaaacggacatcggagctaagagctcatcaatataacatgggatgtagagacccccgcgaattccacttgtaaatcgagtgttataaaacgggcgcgacggtatcgacgagaagcgcgacacgccgcaaccaccaatcatgacagtgacacaccggtgcatcttacggagatatttagccccggtaagttaaaaataagccctagtcaacg

SEQ ID NO: 187127 - DNA, 586 bp, Arabidopsis thaliana
ccccccgcccccccggaatccgtcccttccgctgatctttcaccctattttttccaccggtgggtcagttattttcaaatattacctccgtccttctattcccgccctatttacttttccctttcatcttgtccgccctactccttatcgctttattttttctcccttctctctttgtcatccctttatttccccctatccccatccctcgttttattgcccctctccccccaaccgattttttttcagggggtgtgttccccctaaagtcccccccgtccctattcaacaaaccctctttttccttattttatccccccttctttcccctattctcttctcctctccctccttcgtttccgccctcctaggtctgatttcatccgttttctcctcgctttccttctctaatcttttccctgttggtcctcattacgtccttttgtctcttccgatgcccctggcctctttcccctcgtgtttttgctccccgtactttttcttttttctctctcttacccatcttcccccgtcatttaatcttgttatccccctctctcccaccttattcctccctccgtctatt

SEQ ID NO: 187128 - DNA, 381 bp, Arabidopsis thaliana
aaaacgatccccctccccccctattcacactggacagcatcaacccatcacatactctattttcccccttacaatacccccatataccaactttaaactcccatacttcacttcccctcactaatacctttttagggggggtgaaaccacccttagcggtctcaaaaaaaaaaataacataataccaataattctctattattattaccacacaataacctgacatagatcatcaaacaccacccccaccaaccacatcacactccctacacaacatcctgcgactatcacgcgcatcactagatttatcccacaaagtccatattgcacaccacccctcccataatacgatattcccctcttccataataatcccaattt

SEQ ID NO: 187129 - DNA, 534 bp, Arabidopsis thaliana
  unsure (1)..(534): unsure at all n locations
ggggaaaaccaaaccccccnaaaaccacccggggcaagacgcaaaccttcggaggggagcccgcgaaacccccacgccacacaaaccaccaaaaacgaggaaaaaccgcccaaaaaaaaaaagaaccacaccccgacccaacccccccaaaaaaacccaccccccccaaaaagcaccgacacaaaaacccagccaacacaaccacttttacacgggggcacaccacaggaaggagccggaccacaaaaacacccccccacagcagaagacaacgggacaacaaaaccccaaacccagacccagccacgaaaacgaaacggacgcaaaccacaacccccagaaaagaaagagccacccaccgacgacgccgacaccagagagagacaaagagaaaaaagagggcaggcgcagccccccaaggggcgcacgaacacgcgagaagaaccccgaacacaaaccccaagggcgggccaaaaacccccccccccaccaacaaagaaagacaccccccgagagccccacaaaaagcccccc

SEQ ID NO: 187130 - DNA, 555 bp, Arabidopsis thaliana
accaaaacccaaaaaaccccccgaggaagaagacagccccttaaaacaaaccgcacagagcgagcaacggagaagaagggcacgaaacaagagaaagaaaccccccccccaaagcgaaagcgggacgccaagcccaggccgaaacccccgagagcgggaagaaagaccgcccaggcaaaaagcagaccacacgccgcccaaccaaagaaccaagcagacacagcaaaagagggagtttttaacaggggggggagaagccaccgcgcgcgcaccagccgccgaaaaggaaaagccccccaccaagaaaggcggaccgcgagcaaaacccaaaaacaaaagcgcagagagagaagggaggcacgacagagccgacgccgcaaagaagggaaccccacccgagccccacaacccgggggagccggaaggggaaaaggccccaaaacccacacgagagcccgccccgcccggaacccccagccgaaacggaaccccggcacgagacccccgcacccggcagaaaaagccagcacaacgaacccccaaaggcccgccgca

SEQ ID NO: 187131 - DNA, 519 bp, Arabidopsis thaliana
  unsure (1)..(519): unsure at all n locations
cttctttactatccattttcccatcattctcaccccccactctccccccttctttccccacccacaccccacctcccaggcttttattggttatgacgcctttttttacttgaggtttaaattcncnataaaaaaanccttcctccccctctcccccccttttcccctcccttatttcttccctttctttttcctttttttccccctaccttcctcctttttccccattacttctcccttctcctctcccccccctcttttttcactgggtgatctcccccaaaccccccttaaaaaaaaaaaacatcctcccatactttcaccactccccctcttatttccttcttttcatccttccctccctaattccccctcctctcttctttttatactatctcctcccacacacgctcattcatattcccatcaactcccctggtggcctttccccacacatcttctccctctcttattcccgcctcattattcccacaaatattctctttaccccccttccct

SEQ ID NO: 187132 - DNA, 430 bp, Arabidopsis thaliana
gaccgtacgggacacaggaaagggacgcaggcgcaggcgggaagaaagggggcagggaagaaagaggacgaacgcacagaagacacagaaagcggagcaggggagaggacgcggaccggcaggcgcagcgtccccccaaggcgagaggccgaacaaaaaagcgcgaccgaaaggcccacacaccgcagaagcgagaaaacaagagcaggcggggaagaacagacgaagacaggaaagaacacgaccgcgacggcggaaccgcgcggccgacgacggggagccacgggaaggcccggaagtaagggggagacagagagcggacgaagcgacggcgagacacggccggggccaggaagaaagaagaagaaagaagcggcgcgggaggaacgacggaaggggcgggcacaggagagaagaaaacagcacgcac

SEQ ID NO: 187133 - DNA, 510 bp, Arabidopsis thaliana
cccgcgttcccaccttttcccctcctcttctcgcacctcttccctgacttgctcctccttctattccccccttttcccctcccctccgttttcttcattcccgatttcttcgcctatacccttttcttttttcgggttgtttgttcttacccaccaaaaccggcgccgtgtgctccataaaaacatcttttctcttttttttgctctcttttccccctcgctctctttcctttcttccctttttcgcttccccccccgattttcccctcttgatttatctctctccttcttaattatctctccccctgtctctgcgttcttcttagtcttctctctctcctttcttccgctcattcctccccctctttttccccgtctatattttctctgttccgttttttctcccccgttcttcctctcttgattctccttcttttttcccttcctctccgttctttaattttggcttatccctccgtcctcctccattcttcgctcctcccgcttttt

SEQ ID NO: 187134 - DNA, 346 bp, Arabidopsis thaliana
aagagacgagagacgcagggtaccgcgaggaggcccggggggaaaggacaccgcggacgagaagaaagaaatatggaggagcagtacgcggcaagcaacgcgggaagacacgagagcggacgacacgaagggagggagtttttcaggacgagcagcgggggggggcggcgcaacgacaggcccaacagcgcgccagcgagacgggacgaacgcgacggagagaagagaagcggcgagggcactaaaggggacgaaggagacgaagaaaaacacgaacgaacgggccacgcagcgcacgtagcacagcggcgcgcaagagaggcagaacggagcgacgcaccgcgac

SEQ ID NO: 187135 - DNA, 506 bp, Arabidopsis thaliana
agcggaccgggaggacaagggggcgcggccccgcgcgcgcgaacgaaaaggaaacagcgccccacgccgggggcagagcccgcgcagacgagagaacaccggccccccacgccagagcggacccagcaccgcgccaggggggaagacggcggggagggagaaaccttttttttggggggggggggccaagacccccgcgaagcgaggcgcgcgccacaggagggacaccccaccccccgggaaagagggaggcgaaagacgaagaccccgaacacacccggagcgaacaagagaggaacggacagcgagaacagcaccgcgacagaaagggagcggccaagcccgcacgcgccacgaccgacgaagggccgaaacggaggaggggaggcacggaagccccgcgccggaacgccgcgccgcgagcccagagcaccgaagccccaagaccgaagaaaggcggggcggacagcccccgcaccgacgccgaaaaaaacaccgaccccgcg

SEQ ID NO: 187136 - DNA, 621 bp, Arabidopsis thaliana
  unsure (1)..(621): unsure at all n locations
ccatactctcctcttccccctcctccatatccccggatccacccccccancctttcccccaacccctcactccccccctttccctcccctcacatttccatttcattccggggtcaaatttccccaaaatacattcctctactcccctttcaccctacccattatctcccccccatcccttttccttcttataccccccctacactacctcctcccaattaccccatatccaccctccctttatttccacttccccccctttctttcccacccttttttctcttggtttgttattccccaccacatcctctcctcctcctccataaaaaaaaaattctccactcaacccctctctcaattcctctaatccttctccccccccccctctcttttcctccatacccattacttcatactttatttcccccccccctctccttccccacataccctctccttattcattccaccctttccctcccccccacgccctcctccctcttcttctctctcctctacttcccctcaccccatttcccttataccacctacatacatccaatcctcctattatataatacatctttcccctcctctaccctatcttcaacccctcccttt

SEQ ID NO: 187137 - DNA, 616 bp, Arabidopsis thaliana
  unsure (1)..(616): unsure at all n locations
caccaaaaaaanttacaggggagagaccaggcccaaggaggccccccggagcgggagaacagcacgaaaagaacaaaccgggggaaacgacgcaccgcgcggccgacgagaagagaagggagagggcgcaccccgcccgcgggagggaggagaaaagacccaagcccagaccaaagcacccggcagaggaagaaagagggaccacccacaacaaaagaagaccgccgcgacacacaagagagacgaacagcacgaagcaccagcgacctgaccaccgggagcgacaccgacgaagaggccaggccccagaacgagagaaaccccaccacgacaagaaagaagagcgcaggaccaaggcccgcagaaaacagccaacaagagaagcgagacaacgaaagaacacaacccganagagagaaaagacgcaacacccccacccccgccccagaaagcaagaaagaggagaggggaggagccacccccccggggcgggacggcgcgcggcgggcgaaggaccaaaagccaaaaaacaaacaggggggcggaagaccccccgccaccccgccaaaaaaacaacgcgcgcgcccgcaggccccacaagagaggcccccaaaag

SEQ ID NO: 187138 - DNA, 550 bp, Arabidopsis thaliana
ctccactacctaccccacctccgagcccccgcgccctcaccctaatgtcccggggagctccaccgccgcgcggcgctccggcgccgaacctcccgccgcgcctagcccagcacgggacggcccgcggacaaactcgcgacccgtcagccggcgggcagcgggcgcggcgcgcgaggcgaacgacagagcggcaacaaagaggagggccgacgggtgggggcgccccccccgcgagccggcacgcgggcccggcgaggggggcgcacgccgcgacgggccccgcgccccacgccgagccgacgcgcgccccccgcggtgcgcgcccagcgtgcggcgcgacccccccggcagctcggcacactcccgcccggcccgcgccccgccagcgaccggtggagcaccgcgcgagcaggtccgccagtggcgaccgtgcccgagcgcggacgcggcgctgccggctgctaccggagcgcgtgcgtcgcggagccgcgcgcggccggaaccccgctacgccccaggaccacagcggggcacgccccgccgcggcgga

SEQ ID NO: 187139 - DNA, 511 bp, Arabidopsis thaliana
ctcttttatttccctctccccctactcatccacccactccaccccccaccttttcccccgcctcacccctttcccctctatttatgttctctcacttacttttctccctgggtcatatcccccaaaaactttccatccactccctctatccccccccacctccattcccccatcctctccctccccctatactcataatcctcttcttcattcacacacccaccccgctctccctcccctatttttctccccatttcacctcctccccccatttcctccccctcacccctccctaccctttccccccccgttttttcccctcatacccaccttttaatccctccactcttcccaaacacacaccccctctcctcctcaattagttctactaatccctttcaccataatatcacataccatcttaattctattacactccctccctatatcgtccccactctgctacttataacctatcctatactaccccctcatcctccacatccttcta

SEQ ID NO: 187140 - DNA, 579 bp, Arabidopsis thaliana
gcaccgccgcacggcgagaatgtagaggctcagccagcagggggggggagtttctttgaaacaccccacccaagtagaaagggagctaacgaaacacggatacagaaaaaacgcagattcgacggaggaagagcgcggggagcgggcgggcgggggggacgggcagcggggggggcaaggagaaggaataaacgaagaacgagcgggggagcaggagagggagggagagcgcggcaaaccgcaagcgggcagggagacgcgggggcggagggggcggcccgggagataacgaaggggcggggagggggaggacgggggggagaggccgagagagaggtcgacgtagcgcagacggaaacgaagacaagtgggggaggggacggaagagatgaagcagagaggaggagcgggacgacacgacgcgggcggagggagggtgggagagccgcggcggactgccaagcgaggggaagcgacagccgagcgaagacacgcagggacgcacgggagagcagaccgaaacgtcgagaagcgcagcaagcggagcgcaggagagtggaaaaaaggggcgccgacgtg

SEQ ID NO: 187141 - DNA, 367 bp, Arabidopsis thaliana
gcccccccaaacacagaccgcccccttagaggaaacccgggaaaaggccgaagaacggacccacacaaaagaaagaaaggagaacccgccccccaccagaaaaaagaaaaacaccgcaacccaaaccaagagcccccgcggagaaagaacacgcagcgccccccccggaaccaccccccgcacagccacacaaagagcacgacgcgcacgaagaaagcagaatttttttagcaggggggggaaccgagcgaaggacgcgaaccgaacgcagaaaaggaccccgccccccccaacacaaaaaagacaccacgacaagagccccgaggacaaacgccaaacaaaaaaagagaacgcacacaggaagcgc

SEQ ID NO: 187142 - DNA, 438 bp, Arabidopsis thaliana
tttgggggggagccgtggcgcgaaaaaaatatgtgggaaccaattgagtgcgggatgcccatagtgggcctcccgtatggctgtttattgccccggtgatgtatgcatcccgggggtagttggggacagggggagatgacggcaacattgtaatatgtaaaaacacgcgcccgacggatttgcgtatatttgttatcagccactttatcctatcccttaacccctgtctatgacgatttgaatgttgtcctcgcacacgcaaggtatcgttactcggcctcctgcgaccagcaaggaaaccgggttgcgctcgcgggggtagcatcgggatcgtgagcgacagggagcgcggagggagggtgggtgatgtctgttagacctatgtgtgcgagaagagacgcgcgccccccgcacaggaggtagtgaaggcgacgcaga

SEQ ID NO: 187143 - DNA, 376 bp, Arabidopsis thaliana
accgggaggcgcgcgcgggttttcagaggagggagcccacggcgccacgccccgcacagcaagaccagaaagagaaaaagaagcgagagcacaacggaggggaagagaccgcgcgcagaccaaaccaaacaggaacgcccgacaccaggccccgcctttctcacagaagtgaggggcgaagaagaaagcacccacacaccccacgaccgacgccgacgacacgcaccaaggggggcaggccgacagagcaagagccgggagcaccagcagaccagacgaaacgccacacaggacgccggagcacacggacaggaagagacccgacaccgacgcgcagggcccactcgggacggaagcagtaagaccccgcgacaca

SEQ ID NO: 187144 - DNA, 469 bp, Arabidopsis thaliana
acacggaccgcaagacgcccgaacaacgtcccccaacaaaatgcccgacatcgaaaaccaatcattacccccacaaccaacatcaacctaataaacacccgtacaccaccctcgagtatcatcccatacacccgacaatacaaatcttttccacgggggtggtcatcaccatacccacagaggtgcactaaaaaaaaaagagattcaaaatacaagcatactactcccaaagtaaataggcgagtaagaggatcccacacgaaaatcacccaaaacagctcgttacgcaccttattaaccgcaagcacaaaggccccgaacgatgagccacaatgtgctacccattctgcgcaatcagggcacaacaaaagcccccgacataaataacgaacgaaaattacccacccaaacaaaacaacatatcacgcgcgcacaacccatcctccgaaattcaaaatagatactccct

SEQ ID NO: 187145 - DNA, 530 bp, Arabidopsis thaliana
cttccctccccacctgtctcctcctgttcctcagccatcattcctcccgtttcgtcccgccctttttcgccctggggcccatgttgcttcctgttccccatctacgcgccggggttttcccctgggggttggtctcactaaacatacgtttatccttatttcgccctgttcccttcccttcgcctcgcgcctctccctttttactgttttcccccaatcctgttgctcccgattatcccccttttcctctcctcgtttttttcccctttcccctgcggcggaccgttttcctcgtggggtgctaccccatatccgcaccgctgtcccacttcacacctgtgcgcttctattttgtcgccaccccggtcttaaattcttgcgttgctctgagttccgccccgcgtattggccgtagacctttcaatatttatttataccgtgcccgccgagcactcgaattggtgtggcgtggcggcttgtttttcggcgtattcctgtctgctctcttcccccttgcgcttttatctcgg

SEQ ID NO: 187146 - DNA, 226 bp, Arabidopsis thaliana
ccacggtgcccaacgaccaacctattctttgtattgtcgtggttgttttcaaatggggggtgaggagtaccgaagaaaaacgcagctttatattcccgagattatccggcacgcctacaattccgcacacatcagataaatacatttactacccccaaccgtgtatcacgccattaagccgccgaaaccgaattcccttaatacccgttctccccggggatatcct

SEQ ID NO: 187147 - DNA, 437 bp, Arabidopsis thaliana
  unsure (1)..(437): unsure at all n locations
ggaaggccngcaggnaccggnccggtttncccggggggggacccgcgancgaccacagcgccgcaagggaggggangagccacaacaacgccccacacccagacacaggaccagaaaagggcacgacggaacgcggcacaccaccccaacacaaaagacccacaagccaaaagcccccagcgcaccccccgaaggaccagcggggggcgcaacatggcaaaaacgcccnaacaccaccaaagaacacacccgccagaacgggaacacgcacaccagccaaccgcccgcccaaccccgccaacacagcgacaacacacccaaaaacaaccgagaagagggacacgcacgaggagcagaaaaggaagcgcgccaaacaccggcccacaccgacacccacaaacccaacagagaccgcagcagaacagacgtaccaacaa

SEQ ID NO: 187148 - DNA, 613 bp, Arabidopsis thaliana
  unsure (1)..(613): unsure at all n locations
accccccccccccctatttccccacgccgccaaggagctccgcctccccactccatccgcctacacgtttttcatacgtggggtttgtgttcgctntacacaaatctttcgcacccgtacttctcgcacctttctcccttcgcccctccccatcccccccccattccccatcgaccactatttgtttgcccgcccacccctctatcccccgcgtttatttcccccatttttcctctcccttcttcttatatcgcgctatccccgccagatccttttttctttgtgtggtgtgtttgtcacaccatttctctccgtcccctctctcaaagacaactaccccttttgtttgtctatcatctcctccccattttccgtgactctcctcattccctccctcatttctccctcccctttttgtttttctttaatttctccttccctctctcttcttctcttttccccccctcccactttcttcccccattctctcgccctcggcccccccctcgcccttccctccctgatattctcccccgcttatttttttatttcgtctcttcttctgctctctctcgcttgtttatctctgtttcctcccgtccttccctttcat

SEQ ID NO: 187149 - DNA, 488 bp, Arabidopsis thaliana
ggggcgccgcggcaacaataaatttgtcccacgcatgaggggtgtcccggtgttccacccgggtctgtgacaaccccgtgtgttcaaccgcggtgccggcgagggcggcgcgcataacaggagatgagaagtacgccgccctcaccgcctcctagtaagaatacacacggatagcctaacgatatacctcgagtgacagaaggtgtgctctgccaccgcaatgtattttcttcgctagtcgagaagaaagatcgatcccgacggagatcagccggacagacagccaggccacacgatacagtgacgggtgaagagaacgacgagacgagaggagagccccgccgccgaggaaggggaagacatgggagcgataacggacgacgagccgccgcaggctcaaggaaagaagtaaaaggaaaagtatcccagaagaggggacggagcccaccggtcgaccccccgcattcacgatggatttcctatgtcga

SEQ ID NO: 187150 - DNA, 302 bp, Arabidopsis thaliana
agccggcacgcccgccggcaccgggccggaattcccgggtttacccacgcggccgagggatcctaattaacataagctatgagtgcgacctacctatatctcactatttgcaaatgagcataaacgtaaacctacacttatacaatattcaacgggttgaacaaaggtactgtctaacgaaagatttctcgatgggacgatgccttttttctttgtggtgtgactatagctcagagacataatgtacaaaataaaccgggcatatcataccgggaccgacacacaaacaggggctaatgtac

SEQ ID NO: 187151 - DNA, 578 bp, Arabidopsis thaliana
agcgggggacccccaaagcgggctgccccgggggggcggggaccaaaaaaccaaaaacccagaccgcacccgcgggaacagaccggcaacccgacccaaagagccaagaaccaccaacgaaaaaacgagaaacaaaacccaccccaccacacccagacacacacccgagccaaaaaaaacaacatcctttttccggaagaaggagaaagaacacccgcgcccgccaacaacgcccaccaaaccaacagcaccaaaagacgaaacaccagaccaacgacacaaagagccacccacccgccggacgaggaagcaagcacacacacggcgggaacccaaccacgacgaacaacgcccaacaacgacccaaaacccaccaccaagccaccacgcgcgagcggggcgcccccacacaccaaacacccgcaacaaaccacgcccgccccgcgccgaacgaaagaaacgacagcaacaacacccccagaacccgcacaaccgaacgaaacgcgagaagaacaacaacacaaccccaaggacacaaaagcccacagaccacacaaacgcaacgcaccgcgagacgc

SEQ ID NO: 187152 - DNA, 425 bp, Arabidopsis thaliana
gaggacgcctgccggtaccggaccggaatgtaccgggttgagccacgcgaccgatggagcgaaggaaaagttagttaaggaggtagttgcgcgtgcaaccgaattgatatttcttttgattggatttgataaatcgtttaaggcaaagacacaagattgcatctagcttctcttacctgcctattcacaagagctactaatctttttcgcggaggcttctagaaggcctctcatgttacaccttctaaatcagagaccagtgcatttaggccccgctgaggatgttctaagggttgcaggcatccttagggctggatatcctggaattagcgggttgagctggcatcggcaataacatgtgaacttggtgaacaccaccggatgtatactggctagggaccttggataagaccagaataagcctt

SEQ ID NO: 187153 - DNA, 475 bp, Arabidopsis thaliana
ggggagctggccccccgcggaacccgggcccacatccggggtcgacccgggttccgcccaaatattcacgcattttaagataattgtagggcacagaataccgaaacacgaccgtgtggtggacacttttgtacctcaaatcatggctgaaatacacggaacctctctcattgacacgggcacaaattgtgtcgatgcctttattcgcgaggggtatcacgcccagatgaccattgcgcggtgccacatggagcgccgacactcaccctaaagctgggcagaactctcgcggcgtgcgtgcagctcagactctcttttggacagggctcttgtatatatcatgcctcaatctcaacgacgcgctgcatatgagaacccaacacttcgaacagggtgcaacccgtaaactgctttgtacaacacctaaaagcctacccctaatctcttgcgcgagcgcgctccctctcctcgtgat

SEQ ID NO: 187154 - DNA, 734 bp, Arabidopsis thaliana
  unsure (1)..(734): unsure at all n locations
tctccctccccccgttctctctccctctcgtcttcccctttctttccctcttttctcttttccccccctctttctttttcccctaccatccctcttcctcttcctcttctttctccactgtccccttctttttcgcctcctggggtgtaccctccttcctaataatttctctcttttctcctctttttctctatccccatactcattctcccttcctctccactccttcttctctcctcatcacccttctttcttctcttcctctctctttcccttcccgccccccttcccttcccttccccttttctctctcttctttcctcttctctccccgtccgctcgngtccctctccttccctgcttacattctattcctccctcccggtggtgtgttactccccttccatctcttatcgcgctctctcctcaaaaaataaaatattctctctctcttccccttcctttccccatttccttgtcttctcccctcttcttccccttcttcccactgcctattcccctccccatactctcctccttttcttacttttccccacccctccctcgactctttttctttccaccccccctctcccttctccctttctccctttcttctccttttcttctcccccccttttccccctctttcttcctcccccctcctacctttcctcccctctattttctttttcccccctcccctctttaaccctcatttttatcctcctcct

SEQ ID NO: 187155 - DNA, 387 bp, Arabidopsis thaliana
ggagagcagcggcccacgcggatctgcccgataattctaggatagatgcaggggagcagcagcccctatatgagctacgtacgggtggtccctgcgcgcatcccgacgctggtactacttatgctgaaggtcgagctgagcgagggaagagctgcctcagagactaagttgacgcctgctatctaaccgcaaagtagctcttcttttttcaagacgtgccccccattgtggtcacaagaacagaagacctacaccacatgtgatctacagacagtacaggggaataaaggaggggtcgcaacgctgcgcgccaccgtggaggaagcgctttgccagagctgcatgatctttgatcatacatgggaaaccatggcaccatcgtggtta

SEQ ID NO: 187156 - DNA, 289 bp, Arabidopsis thaliana
agcccaccccacacataaaaaaaggcgccaaggatttgaacacacgcaaacccccctaaagggacatacggacatccccggagaggcaatatcccccaccgaacaaacaatcgaaactatcggcttcaaacccgggagacacacacgaggcgggtatacacacagtaagccacccacggggactcacgcgcttccgcacccaaggagaacaggaggtaactgacacatatccgaacggcgaccggacccctacgatcttacaaaagcccaacaccaaggagccccagaa

SEQ ID NO: 187157 - DNA, 602 bp, Arabidopsis thaliana
cgcaacaacgacaacagaaacgcaacagcagaccggacaccccgcaagaaccggacggcagggaaggaaggttcagagggggggcaggaaacccaacgcagagccgcacaaatttccaacacccgccagcgaccccgacgcgccagcgccacagacaacaccacgcgaccgcgggcgcagagacagaacgcaacagagcatcgacgcacaacaaaagggagcgcgaacaacgagcaacaaggaacaaacaaagcaaaaacagacagccaagcgccaacaacacgcagcgccgcacagccacagcaaaaagccacgcggagacgcgccagcccgagcgcagagaaacgcaccagacgacacgcccccaaacaaaaaagcgccaccgaccgcacaaccgacccaccccaccgagacaccgagaaacgcagcacacaaaagcgggaggccaacagctagcacacccccaaagaaaaccaccacagacccaacacgcgaggggcggacacaacaaaaacaaaacgcgcggaagcgcgccgcgaggaacgacagagaaaagagaccccccggacagacgccacaccacgcgcacaaaagaagagaac

SEQ ID NO: 187158 - DNA, 341 bp, Arabidopsis thaliana
  unsure (1)..(341): unsure at all n locations
acggaaacaaaaacaagcaaggatgattgcgaacaggctcagaacgagcaaaccacggaatcgtgcccttctctttgggggggcnaaccccaaacagattcactgcgtccttgcgggctgcgcacccaccgaccttttagcacccaacgcaccccagatcacaactcgcactaatccacgcccgcatccccataaccaaacagactagcaccccccgataatacggttagacaaccgttgcacctccccaataccaactcgacagctaaacgcaagactgcaacgccaccatacaaaagccaaataccaaaactcccacccaaccaaatccgcaagacaac

SEQ ID NO: 187159 - DNA, 409 bp, Arabidopsis thaliana
ggggaggggccgcgcgggggccggaccggaatccccgtttaccagcgacgtggcctaaatggtgctgattaaaagaacgcttttttctcggcccaggccagtagaaaattttggagatagattcggatttagtggaaaagaactttttggaaccttacaatcggggtctcaccctatggaagttgtttcggtggctaataacccaccaaactaaaagttaggtgtcccagacccgtgcgatgaaggccataacatcaatttcgcgagttagcgatggaaactggcccttttaagtccggcgggatcaaatccacgtttggacacgaattcgtgaacaaaaatcggatcctgtgttcgttgtaaagggcggtggcaacttgtagtcattgcctgtgaccggctcccgggg

SEQ ID NO: 187160 - DNA, 429 bp, Arabidopsis thaliana
gcacggaccggaacggaatacccgggtttgcccaagcgtacgtccacgcgtccgagaacaactagagggatattacacgtgtcaaatgaggggaaccgaggaacctcctactcggtttagggatctactgccttttgcaactaactaattacccattctccttcattgatggacacagagattgaacttttttttgtgggggtaacccaagtatggccaaaatttggaaatgaggatcagaaacgaagacttatagaaactaaatccgtacggtagagagactcttaggtcgatgatttatcgctaccttcgtaaaaaacggctcacagaatgggtcccagtttttgtgtgcacgtgatccaattccgaaatggttgatgaattcgtttgttaagaaattggtgttattttaagggtctaggggtttgg

SEQ ID NO: 187161 - DNA, 407 bp, Arabidopsis thaliana
cgcgctggtccggggcgcgtctcttcctctttggccttctgtcccccctctcgtctcgtgcgcgggttcctttcttccgggggggggggcgtcctcctccctggggggcgcctctcgtgaaaaaattggtcctcgcccgtgcgctgtgtgtttgttctgcgttgtcgctttttgtgtctcggttccttctcgcgtccccgctctgtgcgtgcgcgttctcggcctgcgcgctccgccctgcctttctgttctccctcttcgcgctcggccgcgtgggcggtgcgtccgtgcttcgtcgcgtttcgcttttggcgcggctctgtcccgtcgatttcctttcctgcttctttcgttccgtcgggcggcgtgtctctctcttccgcgcgccccccttccccccgtttttt

SEQ ID NO: 187162 - DNA, 494 bp, Arabidopsis thaliana
  unsure (1)..(494): unsure at all n locations
aaagggcgcccccccgctcgtgccgagcagaatccaatgtatcccaaattcccctggcacttcggacacaggtaaaaaatacactggtgaacatctcctccacggaagcttgcatagacggcaccnccgctccgttgattctgggacagatatcaactggcggttccgtnttagactgaccggcgtacataggaaagaccaacacacgagaccttgttttttattgtgggaagatgtggagaggaacaagacacctctagagacctgttagctttcgcgccattctcattgaggatgtgttcgtgtactcactgtgtgcgcacagcacaggtgggcccacaagatctaggaccgacacatgtgcaggagtaaaggtgtatatgtaacatagagcgtgtcgccctaagaggactcgtgcagagactcgtgacacagcgttctgtagcggccatctcaccgcgtcttgggtagcaaaacgtgcccaaaagagtagt

SEQ ID NO: 187163 - DNA, 391 bp, Arabidopsis thaliana
ggccgcgaaagggacgccggccggcagagaagccaacgagaaccccccagacccacccaacgccacagaccacgaaaacgcacacaacacccccgccgccaaggaaaagcagggacagcgcgggagcccgaggaacgacgaggaacacgcgagccgcgacgagcggagcgacgaacgcccaccaacacccccgcaccacgcagaacaacaaaacacaaaggcggcgggcggcggcgaaaggacacaaccacagactgcaggggacagaagcgcaaaacaaaagagaggcccgcgaggacgacggcccagcgcggacacggcaaagacaccccgccgaggagacacagcccgagagcagagggcgcacgccagagcgccggacacgccaccg

SEQ ID NO: 187164 - DNA, 606 bp, Arabidopsis thaliana
  unsure (1)..(606): unsure at all n locations
gacaaagccggaaccggccaggatacaccagagctcaccccggcaccaaaacacggcgccaggacgacggcaccgacaacagaccgaacagacaacacagacgcaacagcccaaaacccaacacacaacaacccagcccgccccagcccgaaaacgccaccaaacaacaaacccttctcacgggggggggggacccccccacacaccccaaaaaacccagcgggtcccaaccaggcacccgccaccccagcccacgctaaagcccaaccacacaaaccgcacaataaatcccccccaagcacacacaagacgaaggagaacagcgcgaaacaaaaacaaaggccaagagacccgcaaacgcaacagaagctcacacacgaggcacggaccccacaacaaaacacacacaccacaccgacgcacgcaaaaaccaacaaaaaacgcccgggggacacaacccncaacccacgaccacccacccaccccaaagccccgacccaacgccgcgcccaaacaccacgccgcccccccgcgcaaccaccgcccaccactccacaagacacacacccggaaagcgccccacaagcaccacaccacacccccgcg

SEQ ID NO: 187165 - DNA, 501 bp, Arabidopsis thaliana
ggggacgtgctgcgcccggcaaggcaagtacggtaatagcctactgtttgatggggcttatttttaggggaaagacttatgtttttgaattttgaccccattttcaacccctctacgcaaagttagaggcttgggcatcgcataaggaatggaggatcgctgttggtgcgacttaaaagccaaaaccggcggaatgagccaaccgttttttttatggttgggtggaaaaggcactcctccaaaacccacataataggtggcctagggtggagccgtgaatttggcccttttggtctcctttagacatagcctaaggcttggttagggcctgagatgagcaggaggccatccttcctaattacgccgcatatatcgaggaaatgaccctccggtgtggggcctgtaatagaacagcacgagagctatttggttcagaaacttgagaggacccttaaaagagaacgagttctctccccccatacgcaattatgtattgttatg

SEQ ID NO: 187166 - DNA, 402 bp, Arabidopsis thaliana
  unsure (1)..(402): unsure at all n locations
agccgagcggtcgcccggggggaaaaagcccagccaaagaggaaacaaaacccccgagagggcgcaggacgggaaaaaacccgcaaagggaaagaaagacaaacacccagcgcaagaaaaacgcaancccccagcacacaaacgcaaaaaccccaagcaaaaacacaaccacaacacgaacaccaccttttttccgaaggaggggggacaaaccacaccaccccacaacaccagacacagcaacaaaaaccgcccacaagcgggagcgaacccccccacaacaacaaagaacagaggccacacccaaaaaaacaaagcacccagcaccacaaaggacacgccaacggcgacgcaagaggagaacaaccccaaaaaaagcaacgcgacccgcaccaccagccg

SEQ ID NO: 187167 - DNA, 397 bp, Arabidopsis thaliana
acgctactctgcccgcgtgctccagacgagaatatgtgctttcgcctagtggacaaattgcgctaagaccgacaagcatctgatacttgctatgcttgttgaccccctctccactgctagaacctcatcacattattcatgggtatttcattttcgatattagatttttcaaaaccaacattacagaacttcggagatcttctattgtctatgttatacctggcagcctttaaagggctcttagaccttgtaccatgccctaccgttagcagaaagtctgatgctttacggcaaaaacactcgaagtgaccaattcctagctggttgctccctctccctataaggcaggaccgccatgttatgagacctggcctgaggctcaatgattccccactct

SEQ ID NO: 187168 - DNA, 457 bp, Arabidopsis thaliana
  unsure (1)..(457): unsure at all n locations
ggagagcagcaacgccggcaggtaccagtccggtattaatgtctatatccactagctcactatttctttgagcgaccttattactgggtgatgtcatgtacacacgagccttgattcatacactggccacgagatctttatagccccatgtgctgaaactggtccacgtacagactaagatcaaatgggtgaaacttaccctaaatttttttgaaggatcttcataactgtgactctcctgtccatgacaaactttgctttaaatacactgatgattcctactgtttgcattgtcacttagtcgcatggtgagagcttgcatctagcaagagactatggcacaggaacttgtctcaaactttagtggtggcgctctctagcttcgctanatgcaactgtacaacctgtgacagccactatcgtgattcctgggtgagaaatcttggcgcgggattct

SEQ ID NO: 187169 - DNA, 619 bp, Arabidopsis thaliana
agccagcaaagcgagaacggcagagaggcgcggaaaaaagagggagtttccggagaccgccccccaacccgccaagcccacaacatcacacacgcagcagacgccagacaacccgcggcaagaaaacagaagccgaccgaggcgcccgaggagacaaaccccacacacagcacccgccaaaggggggcccacacacgcccccatagacagaaaaaggccagaccggcagccatccgacaccgcgcaaaaggcgaggacaagccgccagcgccgggcacagaaccccaccgcacagcaccggacggcccgaaagaggggagaaagacagcccgcacccgaccgaagagaacaccggcagaggcgaggccaagacgccgaaccgcgaggcgcgcgcaagccagccgaaaagcgacgcgcggggacccagagggatcggccgccgccccgagacgcgcaacagacgcccagggggggggggcagcgcacacaccaccgcgcagcgagcccgagggccaccaaccgcacgagagcaaacccgcaaagacggacgagcagacgcagcagaaaacgaccccaccgaaagccccacccccgaccaaccgcacaccgcaaccaagcg

SEQ ID NO: 187170 - DNA, 520 bp, Arabidopsis thaliana
  unsure (1)..(520): unsure at all n locations
ccagggggagggaaaccaagagaagagaggcaggaacaggcgggggactgagggagcggcaggggggcacgagaaaacaaagcgacgaaaaccggagccgagggccccggggggcccacgacaacaaacggccaaagcccgactctttcttgggaagcagacacnaacacagcaaccacggagcagaaaaagcacggaaacgcgggaaggggggaaccgcggggaaacaaacaagagggccagaagagcccagagagacacaccgcgaaagacggggggagcgggggaagcagcgccagagagggaacacagcaacgccggaggagaaagcggcaacaacaggccgcaacgaggggcaagaaccggaaaaacacaggccccgaaaagggcgcgcaaaacgcacacaaccacgacgaaagcaaaaggacaaagacgcggaggacggaacgggaagacccgggaagagccccgaacaaggccggagccgacagggacgagcgacaagacaaaaggaaccagc

SEQ ID NO: 187171 - DNA, 407 bp, Arabidopsis thaliana
agtcctcgcgtcgcccgccagcaccacacccgcccaccacctccacccccccaagggggggcaccgcgccacccccccccaaaacccccaccgccctgcgcgacacgaccacgcacgccgccgcgcgcgccgcacacatcacccagatgtcccgcacgtcactgagcccgctcgcacagcaacaagcacgcagcacactcccgccgccccacgctagaatccgccaccacaccctcgcaggccgccacacccccctcatgctatcaccaccaacgccagcccacaccccaccaccaccgcctcaccgctcaccaacgccgcccgcacgtaacacccaccatcccccccaaaggggggggtgggcgccaccaatctcccccaccactcacgccacccctccccccccc

SEQ ID NO: 187172 - DNA, 426 bp, Arabidopsis thaliana
gccccctgcggaaccaggcccctaatcgaactttaacctcacggtctattaaccgggagcttgcattttgggtaaaattgcttctttggctaataccccggttaacgaaatccctccggggccagtgagccgttggttttgtatggctaaccccgatcggggatgaatccattttgaatgcccagccccggcccgttttctgtggatgacgccaaaccggaaacccgtaacaatttttgttcacgaaaggcctgtgcccacgcatatcctcaccacctttgcttgagggtgcgggtccccccccttgtccctggaacatacttggagttgataacaattgtacagccccaagccctgatcggtagaaaattcctccaaattattataccgccagttcctccactcctctcattcagccctattggg

SEQ ID NO: 187173 - DNA, 412 bp, Arabidopsis thaliana
cgtttatctcccccggccttccctggtagattgcggcatctttttctgtgctgtcctgccgcagctcctttttcgtctccatcggtgaagcgtgcgttttgtggtttttgccgccttcgaggtcgtcgtagggatttttttatcggggggttcgggtcgccgtaaaaacctcgtcccctgcgtgcggagtgattgtacatagcattcgattcaccgtagacggcaccgtgtctcgcttgtccccgcaggcccatgcgtgttgtgcttttgatgtggcacgggctccgcactggcggttccggtcacatgccagagtagctatgagggcgcacgtgaccatcccgcccgatttttgtttagggtgggcttatccaatcggtccactcccgatcttgacccgcccacggtcggc

SEQ ID NO: 187174 - DNA, 445 bp, Arabidopsis thaliana
gtccaagggggggagtgtcagaggcgacagaatttaacgcggaggtctcttggagtagttctttaccgtgttgtactctattctggctttactacgaggtactgactgccaatttttgctctccgggcaaaaacataccaacggaaacaattttaaccaggtgggtgtaagtccacaggggggatgcaacttaatgttttttcgggggggcaccggtcctggatctcaatcgaccaagctcctgtagctgagattgtttacggaacgtgcttgcgttacgcttgaatgaccgcagcagtttttcctatgaatgccttgcagattcttatttttctaactactgaagcatcgacctgtttagtttccaactcaaattacggtacccaatatacgttatataaacttgattacttttgtcttttactgaaaaacccttcgtttgacc

SEQ ID NO: 187175 - DNA, 491 bp, Arabidopsis thaliana
gcccattaagcgaggctactgcctgggcccagggcagtccgtggacaaaaaaccttactgcatgacctcccgctatcaaggaactgtatgatcaagtcgatgcacagagtgctgcagatgagactccgtatgccactagatcaggacaccccagttctatatatccatgcagcacgatcctgcattccactgaccgataaatgactggaccaccttttattttatggccaggagaccaacccacactcacttatctgagtacctggaccccatgtcccagcgaatgaacctacacactgcgacatgaaacttggtatcacagacagatctgcttaccacctataggcctcgctgaaaaacactccgtccccaagaattgtaaagcctgccataatttgtaccagttcgccgtgctgtgcagcgggcgctccgccctgagactacctcacgccctaatgcctgccttccgccgccatttcccgcgcttaagt

SEQ ID NO: 187176 - DNA, 492 bp, Arabidopsis thaliana
ggaggctctacaccggctggcgccgcgtcagcgtgaccaagcttgactacgctgtacgctaatcctccgctgcatccatgacggaaccagtcttcatttacagcattcatggaacatgtgttctgagaagatgctggttctatttctgcagctgcacaagagtaggtttgtgctccgaatgggttagagctgaatgagactctcttgtttccgggggagatctgtggggttccttttagacccgtggaattgcattcgggttgatacacggacaatatctcctcctgtgtctccaaactcatatctagggatcgcttggaaggcactatatcttggccccctaccaatgaagctttatccatgctgcctggactccgtcgacgccatgcagtggttttcttccctcactgcagggggatcgctatagttaacgatttctcctggggttcccccttttgcaaatgtattttttacacgagataacccaggatt

SEQ ID NO: 187177 - DNA, 115 bp, Arabidopsis thaliana
tacaccggtctggccactcattaccagacaccatccgctgcgaagactgtcatgtgctgcgcggattctcgtgcacctcgctaagacaagagcctccgtacattatctcaagtca

SEQ ID NO: 187178 - DNA, 586 bp, Arabidopsis thaliana
gacccacagaccgctttcccgggggaagggtcaacaaaagaaaaaagacgacaaaaaggggggcaatacacgccagaacgccaaaaaaacgggacccccgagccaaccccaacaagccaaaccacgccccggacaccacgacgaacgcgcaacaacacaaaccagtttttttacggggttggggaaccaaccaccaccacccccaacccaacggcgcacaccattacgccaataactcgcgaccccatccaatacgacaaaccagcggcccccaccgacgaaaagaccaacccctcaaaaaacaaacaaaaacgaaaacagtgagaactacacacacccgcggcgcgctccccacccacctgacgacacccggtaccacactggctacaacacacccaccacctaatgacccataatcaacagcaaacccaccaaaaccctcaccaaaacaacacagcgaaaaacccagcgaacacaagacgcccagaatctacaatagaacaaaccttcaactaaacaaaaacagagcgacaaggcacgacccttccgcgcgaacggacaacaaccttcaaaccccacgccaaag

SEQ ID NO: 187179 - DNA, 710 bp, Arabidopsis thaliana
ccccccctatccctcaactcccctcccccctccctcttttttttttttcctcacctcctccctacttttttcccactcctccctctctccatcccccccccctctcaccctcacaccctattctattttttcccctccccggggtctccatacttcctctcacaaatacgtttctctctctccttcctatctccatctttcctcttcccttctcacttcgttttccctcacccctcccgcaccccatacttccacatcatcctcctcctttcatactccactctctctcttcatcctataccaccctccctcccctccctcaccaaccttactccctactttccccttccttcatccgctgtgttattacccttatctctcctcctctccatcctgttcccctaaccacacaatcctccccctcttattcccctcctatccccacactcccctcacttctaactcctattcctcatttccctatcctcccccattatactccttccttccctacacctatctccccccccccctctcttctcattttaccacaccttatcccctaatcgtcacccccatcccaccctcgatcccttttccctcttcatcttctcctctacatccctcgactctaattcccctcaccctctatcctctcctctcctccccattacacatcccctttccctctcccttatatttcttcctct

SEQ ID NO: 187180 - DNA, 507 bp, Arabidopsis thaliana
gcccgcgccgaacgatcaccctggcaagcttttaccaggccacggggccaaatcgttggtttggtcggaaggagcggtttggggagtctgaagtcccttttcgtgcctatagaatacgccgattaggggcccttgcaaaccacactggtctctagcaattcctgaaagaaaacacattccaataaaggaggttcattttttatcggagggtcaatacccaatccggcgagttggtgaatttacatgttcgatccaaccctcaccttggttcttcgcgccctcggccccaccgggcaagaggaaaggggcccttaggtccaagccccgagctaccggattggaggaagccgagtggaatgccgctcggaacctccatgccggctgccacacagatcttgggcccatttgtgaaacaatctcccaccgtgcttgagcaacccggtgggcctggttgcctggacccaccgcctcagcgggcaaatgtaggccagttatcctaaagggtgt

SEQ ID NO: 187181 - DNA, 477 bp, Arabidopsis thaliana
agagtttccgacggaacgaaacaccacacagcacagacacaccacacgaaacaaacaacccagacgccgaggccgagtgaaacaagaacaacgagcgcacgcaccaatcacaaccacaacgggggggcaccaacaacctcacacaaccaagaaaacaaacacacgcccaagcggagcccagagaacggcaccccgcgcagcgaccaccaaggagagcacagaaacacggaccccgcgccccacacggcgcgacaaagaaagacgccaccgccaaaaaaaaccgaaacacaggcccagacgcccaggcccggagaggcggcgcgaccacgccagggaacgccggagcggcccgccagacagcgcccaaccgacccaaaggaacagaaagacacacgccagcagggggggggaaacacccacccgccgccgagaggcaacccaagccgagaaaaacgacccacgagcccaggccagccc

SEQ ID NO: 187182 - DNA, 535 bp, Arabidopsis thaliana
gtgcacccttttcccccgggttccaaggaccgttttcagtgctccgccgtactctacgtccgtctgttaccttttctgttcttacggtattttccccgggggtatccgttaaaaagcgttctttggtatttctgcgtggacccgccttgcctcctggtcgtcccggtcctggcgggtgttgttttcctctctttaccccttttctcgatctccgtggcccgtgctctgtgttcttttccccggggggggtgacatccccggggcccgatggtctgcgagtatcttcttcctctgcgtgtgatttgtgcccttacccgcgtgtagagacctctcccttccgccggctcgatcctgctactttctacacccctcctcccggtttagtgctttgtgctcctctgcgtcaactaattgtttctttcgccggcattccggttcccccgctttacgcccgtgtttcttgtagctccatacgataccaagatcctgcttttctccacctctccccctctcttcgcccttttgtatccccccc

SEQ ID NO: 187183 - DNA, 524 bp, Arabidopsis thaliana
  unsure (1)..(524): unsure at all n locations
caagccaaaaaggggggggggggccccaccagaggagagggacaggcgggcaagggggcggaaaaacttggagagacacaccaacggggggcggccccgggaaactctggggggcagccgaaagaaagccgccgaacgacaggagccagcccccacgacaagcagaccgagccgcacaaatatttaaaaaaaaaacgggctgaaggaagaggggccccacccaaaaaaaaaaaaccccccccccaccccgaggcgcccccgccgccgccggtgccgggcggggccgcccgtcgcgccggggcgcgggcggcggggggggccgcggcccgggcgcgggcgggggggccggcccccgccggcggggggggcggcagcgggtaggcaggaggaaagcacggagcgcaaagaggagggccgagcggagggggcgcgcgcaagagagagccgaggcccgacaaccccgggggggggggggaaccacacacaccgaacacaccnaaccaaacancccnacaaaaaaaaag

SEQ ID NO: 187184 - DNA, 321 bp, Arabidopsis thaliana
agaccattctccaaaatgcctagtattccatagagacttggcttcttttggacccaggggcttggattcggggagccccgactaaccttcccggattttgataataatggaagcgtttgacgtctatgcccaaataacacaggagtgccttttttttgacccgaactaatgcatccaaactgcatcttctggtatttaagcggggggccataggagaaccaatagtcccctagttgaacctcaacgccttacctttttttcggtgagctcactttagagcaattcttcgggagactcaaaaagtaaccttcatcggagatt

SEQ ID NO: 187185 - DNA, 426 bp, Arabidopsis thaliana
tctaaggtccgcagggaagctgcgacggctgaagtcctctgtcggagtcccaggctggcccacgtcgtccgatgcagctgaccaactgctatagatggtgctattccggacgaggctcgtgtgtcagatatgcacacaactatgagttcagcacccgccaaccctctatcgcgctgtctgattgcacttcgaggctcgaggggatatcagactgatatcagtgcgggcacacgtgctgggtaacaacggaacactgatgagcttttcttgataggggcgatcgaaaagccctcatcatccgtgatgctcatggcatccaggcttatcccacggcgaaccatgaccgcggcgacttgtaggttgtcgattgtgcgatgagacgcgagagactcaatgtgggtgtatgtataagctgtccatgacaga

SEQ ID NO: 187186 - DNA, 488 bp, Arabidopsis thaliana
ctaaaggtccgctaggggagggctcggaacgcctgcaggaaccgggcccgatttcccgagttgacccacgcgtccgtctcacgctacaaggaaggttatttccaaaggcatgaggctgaccgggctgtagcaatagcaaggtcaaaaggatctataactgtacctactctcttgccattggactgacactgtcttagtcgtatcaaacacaccttcctccattttagaagagagatcaatcatgactttcgtggtgctcgaacagagaaacgttctagagctgccaaatcagccatcgcctggagggcgcagatgactatcattgtatgcatcgccaaagcagtcatcatacacgtgcataatgtcttagacgagcgctgcatccacccatatgagcaagacgcactaaattgagctcttacatagcagacacgaagagctggattaagatcgtgacacaccggtgttgacagggcgtttgcttacct

SEQ ID NO: 187187 - DNA, 468 bp, Arabidopsis thaliana
aggaaacggtccgatataacagccttgaacaagacgagctgtctgaagttactgaagacagtcagaatcatccgaccgggacatctagccacgctcaataaccctctgtgactgactctcactgtgagacactatctctcttgagcagcgcccacgtctctgttctcggatggtgaaccagagctttttctttagggggcaaatgaagcaaccgcggcgcatgtgcgttctttattcctccagaggtgagcggggcacgatacattccgaggggccgcaaataaggattacccggcggtctgacctattatttggctgggggcgatgagggaattccttggtgcattggagatccctaatacaaaactgtgaaagcggcttgaagggaggtgcgagctcttttatataactgtcgatgtcaatatcgggaggtatgaacggttttggagcaataaaacctcacgcatt

SEQ ID NO: 187188 - DNA, 292 bp, Arabidopsis thaliana
  unsure (1)..(292): unsure at all n locations
ccccttccgtaagctggaatcctttaaagcggccgccctttttttttttttttgaacctttgtccaatagggcttagagcgcgaaaataaggggtcgcgtcaattgtaaaaaggctntttacttccccaaccgaaaaggcttaattgcgacgtcatattggcactattgccacgtctcaatatcaattatccataatcttatattagctgtcatatataacgactaatagcctccagagccatccaactaatattaggcgtcgaggcccatggaagaaccaagagacggccg

SEQ ID NO: 187189 - DNA, 589 bp, Arabidopsis thaliana columbia
ttcccccccctctccccccccccccctttccccctttcttttttctttcccccatttctctccccccccccttctttcttcctctttcctctcccccttttctcgctggttgtttccccaaactatccctcttctctctttcctttttttcctcttccttctttctccctctcttcttttctccttctcttctctttttctttcctctcctctttctccttccttctcccctctctcccctcctccccctttttttgggggtttccctctctctccttttttccaaaaaaataatctttcttctctcctcctccctctcctcccctcctccccttccctcctatcttcctcttccctattcttctcccccctttctccctcccttttctttttccctctctcctctctttttctccttctctctcccctctctcttctttcctttttctctttcctcgtcctcttccttttttctcctctttttttcctctctcatttcctctttcatctccctcctcctctcctcttctctcccttttccttcttctcttctccccccttcctttctctcctcttcttcccccctttc

SEQ ID NO: 187190 - DNA, 572 bp, Arabidopsis thaliana
agatgcactactggggaaaacacagcccgacactgctctatgcgcagaatagcattgttcgatgtcgctgctctctgccaatgtgatacgtactcgagctcgacaccgattatacaggtcctgatagaaactcaacaccgtagtgcgagaaccaagcgctgatcggtggcaacctaaggaagaactggtgattccttatggtttgaaggcagccaggaatttgccacatttatagtgttcgcttggaacggagggcaccttaggccttatataattcaagtatgatactagtggacctctaatgtctgctaagaacagtcgtaaggacatgttggcctcaaccagcgtgccatacttcggcaaccatagtttcacgcttagcaagacgataaaaaccttgtaaccttaaacaccctccaaccgatgtattacgagaaacctctgtctcaaatctcgtaagggatgtattgtccagaacattattttccacccctcttttgtttatgctcccatcaaattgctcacttcgctaaatctattcatcaacgagataacatcatcgggttagattc

SEQ ID NO: 187191 - DNA, 572 bp, Arabidopsis thaliana
  unsure (1)..(572): unsure at all n locations
aaccaacaaagcgggcttcccaggcgggggagaaccccanaaacagcagggacgaggcgaaagcgggccgagggacaagccggacacaagcgaacaaggccgacacgcaccccccgccgaaaaaaccaaggaacccgagccggccccccaaagcgcccggccttttttaacggggggggcaaagaacccgcgagccccgccccaaaaaaacccacacaaaacgagggcgcgaagaacacagggaagaagccggggagggacggggcaacaggagcggccacagcaccaaccgaaaacagcgggaaacccgaggaaaacgcaacgaaccggacggggcgaaacgggaaaggaaggcacccagagaaaaaccccgcagaccggccgcccgccacccccggccgaaaaccaaacgccagagcaaggaccaccgcagcgagccaaacacgggggaaccccgagagccggacacccgcaagggggcgacaaagagggcacaacaccgagaggaagggacggcgagccaaaggacgagcgcaggcccaaaaagccccaaaaaaaacaggggaggcaaa

SEQ ID NO: 187192 - DNA, 518 bp, Arabidopsis thaliana
  unsure (1)..(518): unsure at all n locations
agagacgaggagaggagaaagagggcgagggggcagccccggtcatgtgcccaaagacaccattagggaggcaggcccgcccgcgagaccccgaaccgaaatccccggttcaaccaaccacgtcgacgcacgcttgggacccaaaaacccgagatgagcgctcaatcccaacaaaaacagcccccagctgccgagcgcaccgcgcaaggaacacgaggaacgagcacgaaagccagaacgggaccggaacaccttcgacagaagcacgataaaggcctcncacagacaaagcaaaccaaactgcgacacggcacgaccgcaccaggaaaaacacccatgtaaaccaggagctagatcatggaacacagcgtgagaaccccggcaagactgagagaccaaggcccgcacggaggaccatagaccttgccggagggagaccaacatcccggcgcgctcacaagccaaagacaacccagagagctcgagagaccccagagatgcacgcggagcgaggcaac

SEQ ID NO: 187193 - DNA, 394 bp, Arabidopsis thaliana
cccgcgcgcacgaaccggtgcgaactcccgtgttgcccaagcgagcgataaccagaatgacaagcatatactactaagtgacgaacacgaacctggaagcctactatcaaaaacccggactgagataaagccacattcaacatgcaacgggcagcaagggctgtgccagcagaccacatgatgactgtcttccaggggaacagacgggccctaggctatgtaaggatctttcatacgacaatacctatggaactgatgacggaaccaatggggcagaccctgttcttcactgtgagagggagacccgacgttaaaaaatgtgacagaagacatgggaaaactcctactacctggaggaaggattcccttgcccagcacataacaaatcataaga

SEQ ID NO: 187194 - DNA, 443 bp, Arabidopsis thaliana
tttcgtacaataaggaagccactagtatggggtaaagtgacgagtactggtgaccacagcagggcccttattatgaatgaccaaaaattgatccaacgcagcggacggaaaattggtgcgtccagctaagttgctccttttcaacaaagcaggttttttagtgggtggggacattaacagacggggagtacgaaatcattccgatgcaccggcgttgaattgacttctgccgtccccctgtaacacaatacacgagctggacttcacgtgcgccaccccctgcattggtcgagtattacggttgtctagcatcccttagattgctacagaagccctccttaaagaacatgtacttaaggttctaggtgaaacctgaagacggcgaaacggtcaccttccccgaaaaaactccctcggattttgcctagggaggcataccccgg

SEQ ID NO: 187195 - DNA, 454 bp, Arabidopsis thaliana
gaacccttgggagttgcacttactccgcttatttaggcgcgtaagcccaccacattaataccgactggaccgatgacaatatattgactttcggtcatcgacatctgcctgacaagagctaacgatataatgctatggcacaagcccaccctcgcatgttggttcccttcaagtgtgcttggctcggatatatgtttatcgggggcggtaacacacaggagaacacttttcgttccgcataattaaaggattgtgagagagaacaatttgggacacccctgcccaacttcccttgagcataacgcctggtgccgcattgctttcacaaaattcgaggtttacgggattatgcgattcaccaccagtattacgtttagcctctgttcctcattgattccagaaaccccgaaatgcgcttgagcacagagaaatatataatctcccaatccaaatc

SEQ ID NO: 187196 - DNA, 424 bp, Arabidopsis thaliana
aaaagggcatagaaagccacagcagcccagaccacgacagagcaaacgagcaagcgacaccacggaacaccgcaagcgaacacacagaccccagaaagcacagaaaacacgacgcaacgggcaacccccgacaacaacagaccacagaaacagaggaagaacagcacaacccaaacaagagcgagcgaccacagaccccgagcacttcaacgcggggagacacacacaaggcacccgacacgcccgggggcaaacaaccacaacacagcagccagagacggaagagccgcgacagggcacaaacgagccacgaacaacggccccggaccacaaaccaccggaccacggccacggccacaaaaagggcgccagagcacccacaggcacgcacgacacaacccaagcccccgacccaaccgcgcaa

SEQ ID NO: 187197 - DNA, 632 bp, Arabidopsis thaliana
cgccgccgcggtcgtcgcccgatatttccttttttgtatgtttttcttcccggcgtcgttatgctatatcaccagtttgtcccgtgtttccccgtactaccaaccgctcctacttacgcgccgattttttatcccccgggcgctaattcgctctaaaagattctgctattggctgatggcgggccgttagtgctcgtgcgtcttccgcttttttttgccggtatttaccttttgcctgtctattgcgggtcgggtgtggcgcgcactttgcgtggtctcatcccacggcacggcggtcctcgtatttttttcccccgggtgttgttgcttcaatattccgcttgtggtgggtcggcatattggtgttccccgggtggtctatggctctgtcgctcatatatttcaatcacaaaagcctgatcgacccccgttccgccacgggctgtgagcttgcccgcccccccccgcgcttaatccgcttcttccgttccctcgaacacgatgctcattggtcttctttctacttacatttaatgatccgcccggcaatatctggcgccatattcgtgattcgccccactgcgaaaccgatgcctcgtgcaatgatgcccatccgcccccctcccgcattt

SEQ ID NO: 187198 - DNA, 164 bp, Arabidopsis thaliana
tctaagatcacactagagggaagcagcgccgccagcacggacacggtgcggaattgccatggtttgcccgcgcgcgttttttactcaatacactattagagggatctcagtcctgtgatctcacattgcgattctgacataacgcacgttatctggattctgtg

SEQ ID NO: 187199 - DNA, 455 bp, Arabidopsis thaliana
ccccccggcgggaaccggcccggaattacaggttttgccaaccctgtcctgactaccttcttaccgcatcaacttgacatgcttgtttatagtaaacttcccaaataaatttcataccgacaattatggtggatgggctccctgaacacatagttcctaatgattgagcaacttcaatccttggtctttcaattaatggcagaatattatctgagcgggtccatctaccttctttaacagatctttgatttggatatattgacactacagcggtaaatctaatataactaacaatggttaattccttggcgtcaaaacatccggaaatcatgatagataaacaagctcttggagtagtgaccagtcttatcgataattgccgaattttatgggagtcctaaacagcatgtggccatgttaggtttacttccctattctaaaagactataactatt

SEQ ID NO: 187200 - DNA, 465 bp, Arabidopsis thaliana
  unsure (1)..(465): unsure at all n locations
ggggcggcgccccngcggaccggaccgaattccgggtttcccagcggacgttaatcgtttgggctattgagggtgtaagcggagattagtacttacagtgacaacattcccggaatggggttaacaactttcatcgattgagagtagcttacgccctttggttggcatatagaggagttttttttgggggggggaaccatgcttgtagttcttgagaacccaatgccctgggtaagccagaaccgcaattcttaacaaggaaatttcctttcataaggccctgatctccattctctttggaaagaaaccctcctacgagtggaaccctgggacaggttgccatattacttactacgtgatagcctctgggtgagtccggctttaagcgggcgattcgagattgttagggtccctcagtgagcgaggccctcgaagccttttgtaacattgtggggcccaattaaa

SEQ ID NO: 187201 - DNA, 528 bp, Arabidopsis thaliana
aacagagagacaagcgacccccacggacccccccaacgcgcacaaccccccgctccacccgccaagcaaagccgccccctcggtacaacacaccgcacgatccagaaacgaaacaacacaaagagggtctttgaggggaagaagagccgaaaagagcagagaggagattcagcaccgagaaccccggaccgacccgcgtgccagtatccgaggaccccagcgtccgaagacggagagccacagccgccccaacaaaacaagggggggcaaccccacccacacccaaaaaatacacatgaaaataccccaacacccacacgcgcccgaacgcggaaaaaaacgaccagaacaccaccccaaacaaacatcagccacaggacggcccacaagaaggccgacaaagcaagaaacgcaaccaacgatcgacagacagcaccaaaagcacgacccgaccgacaagaaaacccacgcacccagtcggcaacccaccaccgaccacacaaaaggggaagaaaaacaactaccaga

SEQ ID NO: 187202 - DNA, 475 bp, Arabidopsis thaliana
gggagcagcgacgcctgctggtgcccggtccggaaattcaggatttttccacacatgcaaattccttctagtgagacgagcaacttaatccgatgattacagaacgtggttagtaccttggaacattggagcctatggactcattctgactaccatggttcctgtatgaatgtggtgttaacacacggcacttacagatagaccatatcttttgttacaagagaacacatatctgattaattacacaagcataccgacctatgttcttgcgctccatctcacacataaaagggactacgaacttactttatccatcaaaggaactttctgcagatgaagtggacttctgacctaagacctatgactggcagaaaacgtggccttacaagcacccttcttagcccagtcattggccctttttaggttggccattttttataaggaaaaaactgggtatttctcttcctgagtttag

SEQ ID NO: 187203 - DNA, 472 bp, Arabidopsis thaliana
acgcccgccggtagccggaccggaattcccgggtttgcccaagcgttcggccacgcgtgcagaatgaatgtacatgattgggggttggagtgaaaaaccctgtaacctggggcattgatgaggaattcctgtcttatcttttggatacctaggaaaaacgctgcgtaaagaacagatttgggacagggtggccggcttttttttaccttgtgagaccggataatgttcattccgtagaggttgtacacttgggtttcgaacttagagactctcccttaggctatttccgggccgaggaaattttggaggaaattttcttttaacaagtgggcaaggttcccaaaccaatggggggtcctataaggctacggagcggtttttaaaaatttttatatggaattgaacatgggtgattcattaagcctgtgacaaataggaaggaaggcgggcctttttaaggaagcaaggctta

SEQ ID NO: 187204 - DNA, 617 bp, Arabidopsis thaliana
gagcgagaggagcccaacagcggcccgggaaaaaaggcggcccccggcccagaggcacggcgggccagcgacggcaggagaggcaggagcggcctcagcgggacgagggggccagagaggcggaaaaaaatttaaggggggaggggcggggaagcgagccgggcgcgagacgggggcgacgccgcagacacggaaagacgcagccggcccaagccccacacacaacccggggggggggaggggggggctcccctcgaaaaaaaaaaggggccgggggcggcgcgggcgcgggggcggcggagggcgcgggcgggggaggcggggcgggggcggggggggggaggaggcgggagggcagcggcgcggcagaggacggggcgggggagcgacggaccgggcggcggccaggaggcgggaggggggggcggggaggggggcggggagagagcgccgccggcagagaggagaagaaccacacaaaccggggggaggggaaacacaacccaacaaaaccccaaccccccccaaaaaaaaaaaaaccccctccccccccccccccctttctcccccccccccctcccccccccccccgccccccccccccccccctccccccc

SEQ ID NO: 187205 - DNA, 364 bp, Arabidopsis thaliana
  unsure (1)..(364): unsure at all n locations
agacctatagaacttgagcctccctcgtagctgtcttacgcgctttttttttaacaactatctataatcatgaatgacatgaatacaactgaccttaatgtatttgtggagaagcaagatatactnctgtcacagacttgccacacagtatcattcttacaatcagtggaaccttaaaaaataatttaatttccaaatgggcctaaattaataaactttgttcacaacttttcgggaaaaccctgggggtttgtgaaaaaaaggccttaaaaaaaaaaaaaaccttgaatattccccccgaaaaaacctttttaggaaaaaaccccccaaaaaaagaaagggttttgcccccccccccccccca

SEQ ID NO: 187206 - DNA, 532 bp, Arabidopsis thaliana
gggggcccccccggcgaaccccgaccgaaatacgggtttaacccagccgccctcccaacaatccagtcggaggtacatacctaataccttgcacgataccttgctgcgtgattggattgggggacacctacctggttattctgggacagtgattatacgtcgtgcgatatatcatagtgaggaacatactcgtcacagaagaccagccttttttttttggggggcacacactcatgcacacaaggaagagcagcggaataagccgcacataggtgtgcttacacaatggtatatccctgcaccttccccccctccatgagacgaacagcatccttgtgtcgcctatcttgtacattcctcctcagacgcagagtttaatgagccgtcgggaagaacctaatatactagggtagtctcgcccactgcccggtgacactcacacatccatgtaccccagacacgcgatcggaagccatgttcataacggtaagactcacatcatccagtcgtttctcggagagtaagatagcgc

SEQ ID NO: 187207 - DNA, 516 bp, Arabidopsis thaliana
  unsure (1)..(516): unsure at all n locations
ttgagacttgacgccatgcccgtcgtagcttgatctctaagcgcgccttttttttttatagacagacttatcgntatatccaggcgtattggatcattgcatatttcaaacctgaaccatgtaaactgtgattttgtagtgagggaagccacaacgagtaatacccttacttgttctacataactttggtcgacaacagtaatcaaaaatcgttagcatatcaacttgtggtacacttgacatagattacatctcactctataccgaacgatggagtactacatcattactaagacctttaggctcacaccgactctgcttcngttatgtaccatctgtgaggtcttctgtcaagaactgcagctcttaaatacacgatctgctcacccttgagtatagataccctcctgaaaaattgctctactatacctgctaacactttcctttatgaactgacctagggtctctgttaccatatcttccataccatcagatgtgccgaactggacttgatcg

SEQ ID NO: 187208 - DNA, 449 bp, Arabidopsis thaliana
cgaagctcccgccccagcaaaaaccacggccagaagttcagtgataaccggggaggttcgtaataacaagccaaattaaacaacccaaggtcgatgacaaacaaacgggcttacttccaaatcaaccgttaccctgcgggccttccccaaccggcttaaggcaccggcctcgttagagaacgccaggacacgaaacgatccaaggctttttccgagcgccctagtgggagacccctttcgggcgaggagccaactgcccaatgccttgtgggccgcggggatccgaatgaagcacactttcatttgcgaatacaagggctcgctcccggaatgaagtatggtttgcataatgtcaagcaaaccggttttcttagctcatacgacacacggtaacaggaatgccaagcccgtctgttgacccccaactcacgaaagaacacaaacggcgg

SEQ ID NO: 187209 - DNA, 313 bp, Arabidopsis thaliana
  unsure (1)..(313): unsure at all n locations
gtaagctaggatcctctagagcggcttttcctnggggtggtgagcccaagcaaaaaaacctgtcaatcaaagcgggggccccctttgagcaccagcaccaattttcaatatggggtgggttaaagagttgtgactatactaattccgagcatgcggaggccgctatacaaaaacaaaggcgaaaacaatttttttttatgggagtcagacacagccacgcgcaacgctggccccaaaacagcaaaccgacgcgggcgagggggaaacccgcccaccagagggccggcggcagccgagcccacaaagggcgggg

SEQ ID NO: 187210 - DNA, 485 bp, Arabidopsis thaliana
gcccccgacccaacaaggcctggcccgacacgccacagtttgcccccagggcctttgcagaggagaggcacattatgggttctgcatagatgcggcaaccatgattccgagcccgccttgaaacttcaacattgggatccttcttcacaatggagaacatggcaaaagaactttatgctgcgacactaagggtacccgtttatggttttttcacgaggtcaaacggttgtcaaagataaaggaacccctaacgaggatccataactagcttaaaccgaagctcctgcttaacttttcgagtgcaccctctgctattggagccttctcccagttaagggattatttccttcgctgttctgaatcccgaaccgacaatgacgccaaggttgatttgttgaaatctaggagccgcaaggcgttggttccgtaaaacccttccacactactggggcaccgccatacagaccgccttgaataattctaaa

SEQ ID NO: 187211 - DNA, 545 bp, Arabidopsis thaliana
acttttggaccgcccacaccgcagagcagacaaccagaacagcgcgagccgggaccaagaaacgagaccagaacaccaccccaaaacacccgggggaacccaacaaagaccacccaccaacaaagaccccgaccgcacacgagagcaccgaacacacacggagaacagacgacagacagggcgcgagagaggcgggaccgcagcgggccagcgccacggagcgacagacagcgcaaaccccccaccccaaaaacgaaaacccagagcagccccagagaccgcccggccagagacaagaaggggaagaaacacaacggaacacagacacccaacaggaacaagcgcgaccaggggcagcgccagcgcccgaacccccagacccggcggggcgaccggccacgaaccacccacagcaagagccaaccccgaagaaagcacccgacacgacagcaggccaggacaacggagaagcaaacccccccgcaaacaccacggcagaccaccgaaaccgaagacgcgcggaagcggcagagagaagaagaagg

SEQ ID NO: 187212 - DNA, 389 bp, Arabidopsis thaliana
gggaagctgcacgcatgcggtaccggaacagaatgcgggttgtccacgcggtcccgaaactggagcccgcttttagttggttatggcgatgttgtggggttcggccctaagatccactaaaggcttgacgatggtctacgccgcgtagggaataaaaaaagtaggcagaggccctatgagcccttattggcagacgaatgattttttggaagcatggtgccggccatggttctacctttatggaacaaaaccaaggatcttgggcttatgccgatatgagaagggactactacactaaggtgaacccttatatgcatggcccgccacgaggctccaacggcttttatgaattaaaacggattcctaggtttctaccctcccgaaaaaaa

SEQ ID NO: 187213 - DNA, 488 bp, Arabidopsis thaliana
  unsure (1)..(488): unsure at all n locations
caagaaccgcgccgaaatacacgatgtaacccaagcggacctatcangcatactctacgcaaacatatgtggttagcactacataaaggaagggaagatctcttcgattaaccatgtttagataacctatctgcatcactgtgagaaagacctgctttggactactgtggataagtccgatgctaaaccttatttatggaggtgacagtaggtttgacaaaatactcacgttatctatctgcatcatatgagctctcttcctgacattataacatgtgactcactgccggaacctgatctgatgcaaaaatggatgaggatggacgtagtgaagacttacttgcagagaaagttatttgacattcgggcccatggactcaaaacgttcgagacctccctgtccacaggaaatgactcactgcgataggccctagccgctaaatgcaccagaaactctggccaccgagctgtgtggaattggtcccttt

SEQ ID NO: 187214 - DNA, 154 bp, Arabidopsis thaliana
cccgcgaaccaaagcaacaaggcacagcagcagcgacgagacaacggaacgaacggcacgccccacgaacccggggcgggattttccgcaccgcaacgccggaagagagcggcacaagaggcgcgttctagccccagcgcccgcacaacacgaa

SEQ ID NO: 187215 - DNA, 409 bp, Arabidopsis thaliana
gaagcgccgcacagcccgcggaaaacccagaattccagactggcgcactgggggaggatcctagatcgcgatagaaccgtgttcgttcggtggtttccgatactctacgcaatatggggggagccgcaaaacacgtcccaatgataacactgcccatgagtttgcggattatttggtggtaacccaacgggaactgggtaattttctaaagggcggtccacttaagccgccacccggatctgaaaccacgtctaagcagggatctgaatctgaaataaaggggaagatggttcgatatcctgggtaaaacagttcgcataacccaacaaaagaatggttggggccccaaccaggtagaacaaacccattaaaggaaagaatccgttacatacccccttaaatcgaagac

SEQ ID NO: 187216 - DNA, 467 bp, Arabidopsis thaliana
ccgcaccacgaccacaccacacgggcgggaacttcgaaacgcacaacacacaacaaaacagccagggcggttcgggcacccacagaggccgcaaacaacacgcggaagggacacacaccacgccagccaccagacgcaacaaacccacaccaaccccaccaaacacggggggcaaacaccccactccccccaaacaaccagaagctccaacccccaggcgcgacaaacagagcaccgcacccccacccgacgaacacccacccacaagccgcccccacccccacacaacacacacccccacgacccccgccccgcaacacaggccccggaccaacccccccaccacgcaccccccctgcgaacagcagcggagccccgcccacacaaaccagcgccagcggggagcacacccccacaccaaccaacacaaccaccccacacacgcggggggggaccaacaaacccca

SEQ ID NO: 187217 - DNA, 497 bp, Arabidopsis thaliana
gtcctggacttcaggggtttaccaaccggtcaactattcggaacccccttggagcattacacgcatttgggggtccattggccggtttattaggaaaaggtccgatctgccccgtaggttggtgctaattaaagagtggtaaatcttcacaggtacaaacgtgtggtcccacacactcaacttttgttttattcggcgtgcacatctatcccgggtgattctggagtgatgtcataacatggaagatctgatataggctatgtgactagaccatgactcaaagatctagaatctccaacgtatcacggacggggagggtggtttggccctctgtgtattatgtcttaaatagagacaccttagagccttcctgtttaaaatgcttctcggaaccggatggtgtccaggcgtaacgttatcctgaggctacaattccccccggccggggaccttgttcatcccataccgtccttacacaggaaatgattgaatacggc

SEQ ID NO: 187218 - DNA, 441 bp, Arabidopsis thaliana
tatccgatccccttcttttattctctccctccactgttggcacaactaccaaatcctaatcccccgctccgctcagccaacctatacagctttaaccccggggagtatcctccaccaaatatatcccctattccttggtacatattcacactcgtcgcactatttaccccacccactactttactctgttggccataaaaaaaagctcaccccgcgctttcgcgactctactatctctatcataccccgtccaccctccctaatcatttatatctctaccccctttctcgccgttcgcatacgctttacgttcatagttccattccttatatccccaacataatccccccgcgattctcctaaatcccctcattccatatcgaccctccgtcttatttacttattatcttcccccttcattttctctctttttattctccc

SEQ ID NO: 187219 - DNA, 209 bp, Arabidopsis thaliana
ggataggcaggtacgccggcaagtaccggaacggaatagccggttcgccccacgcgtccggtacgggaaaataaagcaggacgtatagacttgctgggcgagatacggctgacatgggacccatgatgcatgaaagacactcgctatgggagcggaatcctcatggaccctgctcggtgactcatagacactttggcagactatcagat

SEQ ID NO: 187220 - DNA, 409 bp, Arabidopsis thaliana
aacaaggccgaggccgcgtggatctattttctgagagatacagactaaacacgctcgcaaacgtatggtccaccctcatagattaagcggataaactggcttatataatggctattagcctgactaggccgcctaggatcaactggagctcgctcatcttttttttaggggtcaccctggcagaaccagtctcactgaccaccggtgttatcagcaaatactcgcccggcgcccagccacagatacatagcatggtccatgtctggctgaccaacccgtggtaggccttgtgcccgcgacgctgccctaccgcgaaccctcgagatgcgggccctcgcccccactgccgataagtttcaagacacgcccccgagaatctgccgagccgttagcgcagatgcacttccgc

SEQ ID NO: 187221 - DNA, 371 bp, Arabidopsis thaliana
cgtcctggccagaccatgacctgcaggctctcacatgaggacttgatcgtcgaagattatttctggaacagctgccgaacgacgtttgagcgcttccacacgacactcttctcacgtgatcgaacatgctatgtctcatctccggctcttctaagggatagatctccttctgtgagaataacacgaggagccttagcattttctgaaacgtagacagctaccccacatatttatgcggaggctaggcgatctcctgagccaccgagatagacaactataggccgagaccttgaagctctgcttaaaatatcaaaatattcaccctcgagactcaccatagatcgcaatttgcttagaccacagaccgagga

SEQ ID NO: 187222 - DNA, 331 bp, Arabidopsis thaliana
ggggaggcggggacgccagaaggcacgcggccggtttagcaggttctagccacgtaacagatacttaacaggctaaatgtatagttattcagcatggcacaggtgtggggatatatcccgtgagctatattatcatcttaagtataagagcgatgctggatcgagagggacgggcacaggtatatggatgatatcacaggccttgcaatttttcgtcgatcgatgcatgcagaatgaatctatgctagttactaaaacatatatgatgatgacaacttcagatacgaaacacagatgtttatccattcacgatgactcgtctcttaggaca

SEQ ID NO: 187223 - DNA, 613 bp, Arabidopsis thaliana
cccttcctaagcctggaatccctaaaacgggctgcccttgggtttagagaccccattttatacacagacatttaaggacaaactttctttattttcaaaataccaatccataacaaaaatcctttcaaaccatccaaggtccaaccctatttacaactggggggaccgccacccgggaaaaaaataattcaaaaatttttcttcccgagggggggaaaaaccggcccagaagttttcagaatgtggaagaaccacaaattagaccccgccgggaattctaaacctcgaaccaacgcccaaggccaaacccttattagaagatccattgccatccgaacactaccgcggtttaacaaaaacaaacttccattgaaaaaaatcccccccaaccattccccgtaaagggggaaccccttaacaccttaaataaaccccaccttccaaccgtcaaccccccaaaccttttgaatgtctccccctaacaaccggagaagccgctcgggtcaaataattcccagaaaaacccccgggccccggcaaatataacacaacccgcgggggcaacaaaaagcccaaaagcagacgtttaaggggaccccaaaacaacttgccc

SEQ ID NO: 187224 - DNA, 416 bp, Arabidopsis thaliana
acgaccgggggacccggtccgaactccccgactttgaccggatgcgtctgacttaatcccctgtacatgtccactttcgttatcttttaggggattgagaatccgttaatctgttttcctacgtgaacctccgttgggcgaattggaggagtcgagctaaggtatatgtacctgccaacaccagaacgatctgattttggttccgtttgttaccagatctcataccatctaacgacgagtactagcgtctcagggtcatcgacagatcggatctagcttttgaagagcacaggatgtacgcttgtgaatatccctcggcgcgagtatttgacgggaacctctaatctaattggcggtatgcctctagacggagacgaacgtgctgccattagctgtgatcccagcttcatacgaat

SEQ ID NO: 187225 - DNA, 467 bp, Arabidopsis thaliana
taagacccgtaggggggcgcccccccgcgggaccgggcccggactcccgttttgcgcagatttcgccccacgttgtggtacttaccatttgttgcacttttgactattgtggcttgtcaccgtgctagagctttgttcgaaggcacatgagtggactgaacgcctctacatggcttggttccataaacgtacggtttgatttctgtggaatgccaggcctgagaaaccacaagcggtcactcccttacgtcctcaatggaggtgatcatgcttcatttacaagctccgtgcgcccaagctctcctgagagactttgcacctgggtcgggatgagctccgtatggatcgtaatctaatgccgagcggataagttgggcggctcttacggatggactcatgcccttctattcactgatcgcgctgcatatggagggtatccccctcagtgctgcttggaacctgcatac

SEQ ID NO: 187226 - DNA, 207 bp, Arabidopsis thaliana
ggggaacccgccgcggtcgggatgaaggcagatttgctacgactaatgtacagacacaggatataatgtaatattgagacgagtaaactgtgggtacactatacctgccaatccgaccgcagtagacgccccttcaaatgccatggtgttgccaaaagtcgagatgcagtctaacctgtattgctgtttatagagggtcaaatcgat

SEQ ID NO: 187227 - DNA, 362 bp, Arabidopsis thaliana
  unsure (1)..(362): unsure at all n locations
ccaagaaccggnccggaagaaacgccctggncgacgagcgcagtctcagcaaccacacttttttgacatgggagtacggagaaagcatcttatcagttgtatgatccaacactactgtaacaatacttctgctgatccaccgcggtttatgaatatgattggatccttctatacccagtccagtttcgtcttttttttggggggaaagactgttcacgccaacgattcatgatgttatagaaaagctaatgacgtaatttaatacacaaatgtataattgacattcatcttgaaccacatgaacccaaacatttcttggctttttcccatttggaaataacggggtagaacttttactcttt

SEQ ID NO: 187228 - DNA, 149 bp, Arabidopsis thaliana
  unsure (1)..(149): unsure at all n locations
gccggaatcggtcggcgtttcgggngactgaacctcngaccaagcnccagggcncgaggaggttctgcngacgagcanagggacaaggagcaaagaagagttttcttcccattgatgacgattgcttcgttgccaaggtccagcaggca

SEQ ID NO: 187229 - DNA, 247 bp, Arabidopsis thaliana
gggggggcaaaggttctcccccccaaaaaaataactcccacccaccacccaacccatcaccacacacctacccaagaatggcccgagagccgaccaccacaacggaacacgacacaccccccgcaccaatatgaccccaaactccccacgacccggagcacggtacaacgccttaaaactacgacgcaaacgaaccagcacataaaacaaccacgcccccctagaacacaacccctccaccgggggg

SEQ ID NO: 187230 - DNA, 580 bp, Arabidopsis thaliana
  unsure (1)..(580): unsure at all n locations
cgcggtccggcccggcgctttccccgctatattcgggtgttgttcattgtttcggccggcgtttcgaccggtcgtcagccccgtctccgtttcttcttgtccgtggccgctcgaactttcctcctgggggtttattcctataaaaaatcatgcctccccgcttttttgtctttggttggtccgcgatgcgtgtcggctgcctcgggctttgacctagcttatgggcctaatttgctcgggttcctgtccggatagcgatctcaancttgggtcacccttgccgcgctgaggtgctcacccacttttttttccccgggggggctgctagctcgccgcgggtgcgccagtggtacggagccggtttccacctgggggccgctggcgcgtcatggctccgcttcggctggtgtcggagtaactatagcccgaggcgcgccgtacgtgtgcccgataggcggatagccccgcccgcggcgggattagtggtatataatcggcggtatggacggggtgtgggccagtattggttcatcgctccgtatgcttaatttcgcgggcatcttcgccccccatatgctct

SEQ ID NO: 187231 - DNA, 416 bp, Arabidopsis thaliana
ccccgctggaaccgttccggaataacccctggatcgcggactcaacaaaacggcggacgtcaatgtttgggatttagtcctaccgatactgcacgggaacaaccaaaacttgggcccttaattggccctattaagatggtagcgatcaattctgggtaccgaccagtccctgattggactagtggaattgttgtaattaccgaaagaaagcctctcacagggatgatcgaagagattgaggtatttaacgacgcgaatcacctcttttactttcgtggtatctggccgaggaccgcccttcctttatacatgcatggcaagatggcgcaaagcatgccttctcttacgcagaattatttgtgttatgcgaaggagccaacgtcgtggacttgtcttactgacttgaaaacaagctc

SEQ ID NO: 187232 - DNA, 505 bp, Arabidopsis thaliana
  unsure (1)..(505): unsure at all n locations
ctctaaagagtanttgttgcaggtaacaaattacatttctattagaaaaggtttatggttgatgatatagttaaacaaacttatctaaatataccatttccaactgcatattgcatcagagaattacttgctcaaaattacatcattgacaaactaggattttttaaatcttttaagcttaaattatcatcataaatcaaatttcattttgaaaaccaagaaaatataaacccgtaaaccttacacaaaaatgcttctcatgttgttgtagctgttttcttatttttctcttttggaacagatcatctttttgtttagttccgataaagtcataagtataatttgggaacatatactgttatcataacatccttgaaatttanaaatagattatagcttgaccaccaaaactatttgataagttgttgtctagaaacaaaagcatatttataatattttgataagacgtagtaactatgacgcgcactaatccgaaatccacagt

SEQ ID NO: 187233 - DNA, 360 bp, Arabidopsis thaliana
  unsure (1)..(360): unsure at all n locations
agtcgcgcgccgcccgaaccacgcaggcgggccggggttttttttttgttttctctagcgcgatcgccttttttccggtggccggcttttccgcccgttccgcttgttctctctcgtgttctgcgcggtttttttgtttctcgggggtctgtccggtcgaatatatagttttgcgccctgtctgccgggtgttcgttcattttctcttccgctgtcgggtatgcgttgagctcctctgtctgcttgcctagcctcatcgtccgatgctttagtgtccttgtgtctcgttccgtgtcgtgtgccgtgcttttatctctcttgtgtatgctgtgcgccgagcccgcgntgttttttttttct

SEQ ID NO: 187234 - DNA, 276 bp, Arabidopsis thaliana
  unsure (1)..(276): unsure at all n locations
caaacagggacaaccccacacnaagcaaaccaacaacaaccacaggaaaaccgggacaaaaaaaaagagaagacggcaaacaacaagaaaatncctcctttttttggggggtggacccgaaaccagaaaaacaacagaaaacaaagcccagcgacaagcggggaacgagaaagcgnaaccccgggaccaccccagcnaccaaaagcacaggaaccgccacgccaccaccaaccccaccaacaaacacaaccggagaacccaagggcggcaacaaaa

SEQ ID NO: 187235 - DNA, 712 bp, Arabidopsis thaliana
  unsure (1)..(712): unsure at all n locations
gctacgggcgcgcgcccccccccctccacatcccacgccgcgccccgccgccccctctcttttctttctcgccccccaccccgcccttttcacccccccccgcgccgcccgcccccgcccccgccacccgcccccgcggcgttttttccgcccgggggggaggttccccgaaaacaaaacgggcccccccccgccggcacacagtctaaccgcagtcgtggccgcgcacccccccccccccccccctcgccaccccccccctctccgcgccgcggtcggcggcccctcgccgcacaccccaccgcgcgcgcagcccccacgccccgcgaagcccggccttttttttctcgcgcgcgtggccccccccccgcgcccactgggcgctgtccgcgcaaccatacgtccatccccggcctgccccgcccggccgcgtcgcgccgcgccccggcgcccgcccccgccacccgcggccacccggcgcgccggccacccgcgcgcgcgccccacccccccccgcgcgcgcgcgcctcgccgacacggacagacccacgccggcgccccccccgctacgccgcgcccgaggacgcccggaccccttctcaccccggcgcgtccccngcgccgcccacgcgccgagtaccggcgagacgccctcacgccgccgcgcgccggccacgccacgccgccccgccccctgctacctcgcggcccc

SEQ ID NO: 187236 - DNA, 652 bp, Arabidopsis thaliana
  unsure (1)..(652): unsure at all n locations
ccccgccccgccccctcttctttattcttccctctcctctcgcccacatttttttcctctcctccacaacaacacgccaccatcagcatcctccttcccttcccnccctctctttcctatcgggggggccagttctctctccacaaaaaaaatgcgccactccactcaccatcagttctcatactcccttaattcactaccacacacatataaaccttctatctatccttttccaccatctatcattttatcctcattcctcccctcttctataacccacccttcaatctcatctcttccccctccccccaccctttttcttccgcgggttttcccccccccttcactcgcccccccccctaaaaaaaacattccatctccccgccttcacccaccccactcctttcctcatttccacttttcccacactccccctccgctaacaccgacccgtcactccaccacgcccgcccaccactccctcctctacctcctacccctaccgcaccccactgtcactcccactttctccatcattccaccagtcaacaccaccaccacccacccatcctgctcccctgtctcctatcctctcattatttgaccaccttatacttcccttatcttcatttctctcacttacatttcatct

SEQ ID NO: 187237 - DNA, 601 bp, Arabidopsis thaliana
ctctcgcgcccgcggcgcgccgccgctcgtcttcgccgccgcgcgtaattgtatcgttttttttctccgcggcgtggggggggcccccatacacccaccccgcccccctcccgtgcggccggcgcgttttgtgtgggtgggttgcgtgtgcccgcccgcgccctccccgctctgtccccgcctccctctgctctccgcgcccgcgccgacgggtcggcgtgcctgtcggcccgcgcccccccgcccgcggcgccgcctttttttttccggggggtggggcggcccccccccgggcccgcggccgtgctcgacaacaaactctgcgtcctcctcgggcgcgcgccgctgccctgcgtctctgttctgttcgctcggccgcgtgccgcgtggtgctccgcccggccgccggcctccgcccgcccccccgcctgcgcgccccgccgcgccgtccgtctcgtcctgcccttcttccgctcgtgtccttctgtcctctgcgcgggtgcgccctcctcgcgccgcctcctgtccgcgtcgtgtttggtcttcttcgctggcatccgcgcgttggtgtcgcgtcgtcggtgctgtcgctctcgcgtcc

SEQ ID NO: 187238 - DNA, 515 bp, Arabidopsis thaliana
  unsure (1)..(515): unsure at all n locations
ttttgaggngaaacgcacgccggcgtaagctgggacccactagagcggcctgccgacgggggagaggtcgaccaaaagaacaacggaatccggggaggaagggagacagaccgcaaacagcggcgggaggaccaaacaaagacgccaaaaaagacaccgccagcgacacagaagcgcacgacagaggccctacgcccgcgaaccaaaaaacacagcactcttcggggggggggagcacaacacnaacaacaaccgggacaaacaaggccccgccacgaaagcaaacacgaaccaaacgaggcccaaagaccggaccaacaccgaaagccacagcaagccgcgcacagcagagcacaaaagaggccacaaccaccggcagcacacacggaaaacagcccgaagccgacaccaacaacaacacccacgccacgaacggccacgaacgagaagaaagagaaagcacaccccccagacacgaccacaaaagcagccaacagggacacaaaaagccacac

SEQ ID NO: 187239 - DNA, 428 bp, Arabidopsis thaliana
caagacagagcgcgaaacaacttttcccccgggcgtgggccccaccgaggaagaacacacataaaaggggaggcccgatatgcggccccaagcacccaccaggacctcagaaagattaagacacgtggatgcagcacaggaggaagagtaacggagcgaacaaccggcaaaccaaacgaagcatttttttttcgggggggggtggagcgcaacaccaacagccctccaaacgcgtcaaagtaaaacgtacaacaaagaacaacacaccactccctcgaccaactgagccgctcccgtcttcggctcgagctgcggacccacgagcgtacggacatatacccacccacacttacctacacaaatcaaacacaagtaaagagccgcaccaccagcgcacgtggagtacgagacgccagacccgcgcccac

SEQ ID NO: 187240 - DNA, 572 bp, Arabidopsis thaliana
cgcgggcccccttttttgttcctttatagcgcggcttttctcccgcggcctcgagccctcccgcttggccacggacgagcgccggcctctttcctgccggggggcggggttgctacaaaaaaatcacgcgcgcccccctacgttctcgccctccaagctgccctggcgcctctcctcgccgcgtctttgttgctgcaccccgcagatctcctcgcatgtctcggtcgccgcgcccccccattcgtcccgcacgtcccccgatgcccgttttttcccgggggggggtgcccccccgctttttcccggttgccccacaatttcttcttcgctccttcttccctctcccgtaccgttttcgtttccgccgttactttcgccctgccctcgtttctctcttgccccccccagcccgtctccgctcagcgggccggtcttccccgtttctcccccctgtcgtttcactctcgttgtgcctggccgcgtagcccgttcacccagtccccggtcgggggcgcttttcttgcctcctatcttgtctctctgcactccttcacggtttccgccccacgctt

SEQ ID NO: 187241 - DNA, 599 bp, Arabidopsis thaliana
ttgacggggcaagcacgcgtgcgtgagcttggatcctatagagcggcctgtccatgcggtcggggttcttgagcagactaataccagaactaagatatttccataacaagaggggtcacaaacataaatattttgccatggggtatgcctgagaacaaccgaaccaacagaagaagatcatatgcctccacgatgctctaaacattttataggggggcctgcaagaatctcctgcggaagacccaatatacccaaaagcacctccaaactttccttaaagaccctcttagaaattggagccaagcttctacgttggaaaaaaagcgtgtttataagaaaacaacggttaatgttgaagacccccccctacatgaaaccccacaaggcatctgccaatcctaaggtacccatcgtaaacataaagccagaggtcaaccgggacgcaataacctcccccgcgccaagcaaccaactccccacccatggttgaccagaatccgaccggccctgagctgccatatccctatggggcactaagccggtccaataggcaagcgtttctccaaaggagaagcccggttccccccaacgccccgata

SEQ ID NO: 187242 - DNA, 262 bp, Arabidopsis thaliana
ggccccacccctcagaccgcgaccccctcgcctcgccgtcttcccctttttttcttttcgctttcacgtccgctttttctctcgtccggattgtagcccacactttctacagccaccctcgtatcctacctttttcctcgcgggggggccagcggtctcaaaaacaaaacaggcgctctcccctcccccgccttcttctcctcccgtcctctgtcccactccctactctctcctctgtctctgtcttctcctcccgtccctc

SEQ ID NO: 187243 - DNA, 191 bp, Arabidopsis thaliana
gtgcgtgagctgggatcctatagagcggccgtcctacgcgtgcgagcatctcaaatcaacattatcctctgcgtaacatttctgcattttacataaaaaggacacacttagcatcacatctatatcaacattaatgcacgtctagtaataagctaacccatgagatgatagaggctaaaaacagtgagtca

SEQ ID NO: 187244 - DNA, 269 bp, Arabidopsis thaliana
aagcggcgccatcgtcagcctcacacctgaagcaacgacgaggccgccaccggccacaccgaaacagcccgagaccgacaaaggacgcaccgacacaaggccttagcggggacaacgccaacgccaagagacgaaccagagcaccaccaaccgaaaccggcacagaagaaccgagaaaacaagggcgggacccaaaacggcaaggaccagaacgcaaactgcaaaagcaacaccagcacacccaaaccaaacccggaaaagcaaaagaa

SEQ ID NO: 187245 - DNA, 511 bp, Arabidopsis thaliana
cattttccccccaggggacgaggacacgcaacacaaacacaaaaaggaacccagggggacccatttcacgacccccacaacccgcaccacgccaacaccaccacctcacccccgcacggaaaagcacacaaagcagagagagcagcgcgcctggtccactacacaagaacaaactttttttttctgggggtgacaccccaccatcatttatatcaataataatcccaaatgattatataaaagacctctcctactaacatattataataatagaaaccaccatattaacaactcagatccgtacttgtaaacattgcccccgtcctgaagaattcaaaatatccaaaatatcacggcacctcgactaccatcgctaaatcccattcataattaacccccctcctctcgctagacataccaatatgtaatacctaccatacctctcccactcctccccctactctacctacttatacctccagatcagatcccgtaccctttcacataataa

SEQ ID NO: 187246 - DNA, 577 bp, Arabidopsis thaliana
gaaccgcacccccggaagaaagcttttcccgcggaagaggaaagcgcagaacgaagacaacaggagagaagcgagggcagggggcgacaaaaccacacacagaaacaaaccgcgcacgcacacggaaccgggagaaacgagccgcgcggcggcgaaagcaagggaacgacgggaagacgaccagaccgcgcacccgaagcaaaagcaacacgagctttttttacaggaggggcaccacacacacaaaacgcggcaacgggaggaagcgcacggaagacgacacaagaacgaccaacgaccgacagagacgcgacgaccgaagccgcgagacaacgcaccgacgcccgcaccgcgcgcgtaaacaccgcgacggccgcgcgacccacgggcgaaacgcacgagcagcacacccggcccccacgaaagaccagcgacgcggacgcccgccccggccacaaggtggcggaacaggccccacgggcgggcgagcaacgacagacgccggaaaaaagacgaaaacggaccgccggccgagggcgagccaaggtacccgcgccgaaacaggcggacgcagaga

SEQ ID NO: 187247 - DNA, 513 bp, Arabidopsis thaliana
ggcccgtcctctttcgtccccgcccccggcgccgccggcggccccttttttttttttcttttccgctcccttttttctccgcagccggtcccctaccccgctccccttgccttgcttttttctctggggtctgtgccttctacacaaccttcccactctcccccactttccttttcccctcgttcccccgcccctctatccttcccgtctcttccttcttcctctctcccctgccccccccacccatccctccagtcttgccttcttcctctactatcgaccttcgcccgcgcaactacctctttttctcctgggtggtgtgcccccccacctctccttctcctcctttccctccactacttctccattatcccccccatcacgctcctcccactctttcctttttcctctttctatcttcactgttccctccatccctcttctcgccctcatcccccctccttcctctctccctctccctctcttctcccttcctctcacttctcctctctt

SEQ ID NO: 187248 - DNA, 576 bp, Arabidopsis thaliana
  unsure (1)..(576): unsure at all n locations
acccacacacccccccacacgaacctctttttttatcaacacagaccccccctttcttccggcaaacacaccaaccccctcaccccccgcaatccaacaaaaacaagaaaagacctttttccaaccgcccggggcggacaggtgcccgcccgaacaacaaaacgacncgcgacccagagcagacagcaacaacatataaacagagaagaagaaataacgacacgccacccccacccccgcgcctacccctaaccgcaacaaccaaactaaaaacaaacccgcccagcaacagcagaccgagtaaaagtgagacaagatcctgaccagaaaaacgacaccccattatttatcaacggtgtgtgcaccagcccaccctcgagacagacagccgcacaacaaaaaaaccacctcaactagcgccccaaccagccccacacctcacgaccaccacaccacgcccccagaccaccacgcgcgccacaccaccaccacaccctccatgacagccaacccaccacgacgcgctccgcacaccacacgagcaacccccaacctccacgcacctcacccacacgc

SEQ ID NO: 187249 - DNA, 338 bp, Arabidopsis thaliana
ggggaaagacgcgcacgcctgcagggaccggaccggaattaccgttcttagcggcggctaaacaaagccgaggacccacacccgcaggagcatgcgggggcaccacatacatacatgcccgcccatacagcgttatcccctactcgaaaaatctccccagagaaatacagagaaatgaagagcactcacggaaaactaagggattttttttttggggagagaccgacaaacccgagcgtcctacccaccgcactcgcgatagcaacgagcccaataatgagcactagactgtaacaaaccccaaagaagatacaccctctagaaagaggaatctaaca

SEQ ID NO: 187250 - DNA, 614 bp, Arabidopsis thaliana
  unsure (1)..(614): unsure at all n locations
gaagcacggaaggcagctagagccagataccaccgactgcgagacatncagaacaccaacaaccaaacacccaagaggaaaagaggaaaacaaagaagaggagccgaaaaaacgacngccgataaggacacgctagccatggccacacacagacactctggatagaagaggacagcaccaccacacttcgtcacgcggggagagaagcaaagggcaagcgcaggagaacaactacacgcaaaagacacacaacaggccaacacccgcaagagaagcggcgccctgcaacactaaccacgacaaggcaagacgcacgagccaaaccaacgggccgcccgcaacccaacggacaagcgagaaacacccgccaggcaccaccaccgcaagcgggtaacaatccaacacagcccagaccagccccaacgagacccgacccaacaggccaaaccacccacacccccacgcaggcgcccccgaagcgcaaaacaacagaaggccaagccaaagccccaaaaagcaaaaccagagcgccggagcccccccagcacaaacaaaggaacaccgcggccccacccacacccaacaccagccgcccctcacgccaaccaaagaga

SEQ ID NO: 187251 - DNA, 229 bp, Arabidopsis thaliana
ttttcccccggggggggaagcgcgcacaaaaaaaaagcggcaccgaccatgagacgcaagggttagagtggatttgtactatttcggccccggcgccctcggaatgtaaggccatgcccccacatatgaaacactgagagaagcagtcaggcgcggagtgccgaagggaggcacagttttttttttccgggggggggtgcgcccccgcgacgcgcgcgatgagcgaaaa

SEQ ID NO: 187252 - DNA, 526 bp, Arabidopsis thaliana
gccagcagggaccgggccggaaaaagatgtaggaggggcggggaagcccgacgaggggaggccacagcgaagacacaaggggacaaaaaagcgcaacacggaaccagagcagaagaaggcgagagaaaaacacgagcacgcacgagaaccacaagagaaccaacacagacacacacgccgccgacaccgaccggatatttttcggaagggggggggagaagaacagaaacgagaaaccggagagacagccaagaccccgaacaacgcgcggggagagggcgaagagggagagaggagcgagcgacacgcggcaaaagggacgccggacgagccacaaggccggcaacgacgcaggcgcaagaggaccgaggggagcagaaggcgaaaggccgctcaaacaacgcgcgaagcggagagagagaagaggagggaaaggcggcgcgacgagcgggaggagagaccgagaaggacaaacgaagccaaggacaacccgagcagcaccaacacaggcaggaccgagagaggc

SEQ ID NO: 187253 - DNA, 182 bp, Arabidopsis thaliana
  unsure (1)..(182): unsure at all n locations
cgcgtacgtaagctgggattctatagagagatttaactgtgtgattctgatctgaccaaaacaaccttcactttaagtgcatgttggttgttcatncggtgactcaagagtgtcagcaccataaatggaatgtagcgatagagtgtgacatgcaggagacagaaatgtggtgacctgagctt

SEQ ID NO: 187254 - DNA, 497 bp, Arabidopsis thaliana
  unsure (1)..(497): unsure at all n locations
tttttttttttttatctcctctcctctttcttcaagcgccccgaagccagcgcgtaccttcctgatgccgctctctctagtatttttcccaccgcggtgggtaatgggtctcaaatataaaaaatgccggacgcacgcgtgcgatagattgaaatatgttagctaggctggacgcggtacgtcccgccgccgtcgtccttgctgatcttccgctcccctcggcggtgtacgtcgcctatcatcgtattgcagcctctagggcataagacctattgcggcagcgacgacatctttttttatagggggtgggtcgacgncacgtgggactacagtatgtcatagaacatataaaacgtcgccacgatagtgtccgacccgtccctccggagtcgcctactgctagcaaccaccgggccgccgtggctccctggccttgtcgggatgctctggggtgtacactcgatgagtgtttaatctggcggactgtatcctccttc

SEQ ID NO: 187255 - DNA, 339 bp, Arabidopsis thaliana
gtaagcttggatcctctagagcggtctgcccttggggttgaggcctcatcttgaacactagcgttaggcaatatagggtgcttctaaaatgacagaatgtgggatccacaaaccgtacttagcaggcaccctcaagacgttcttcaccctacaaagagatcctaagcttagtgtaaatgcacacgcagacacgaaccaacgcttgctacttcgggggagtacagcacctcgggccaaaacaagaaaggaacaccaccctttaaagcaggacaaaagccaatggcccaaaatgggaggccccaccccccaaatggaatcctctagtccgacccgtcattc

SEQ ID NO: 187256 - DNA, 478 bp, Arabidopsis thaliana
aacccccaaggacccggccaccaacaacccgggtttaccaaggggggcggaaccccccacaaacaaccgggacaaaacgcggagggggaaccacacgccagaaacgccagcccgccccgcaacacagacgaacgcagagggccaaagccccaccccccccccaggacaccacacgcgaacccacagcaccacccaaaacacaccaaaaaacgttttttttggggagggggggaaacagcacgaacaccacgcaacaacgacccgaaaacgagagcccgaccgaagacgccgacgaaccggaggagaacaacaaacagagaaccagagacagacacccccaggggcgacccccccgcccgccacgccgcgggcgcgcaagagccagaacccccagccagccggaagcgaagcacacacgaccgcacccgcacccccaagcccacgaacccagacgagacggaaggacaagaagcaaagc

SEQ ID NO: 187257 - DNA, 616 bp, Arabidopsis thaliana
  unsure (1)..(616): unsure at all n locations
ttatacgatccgataggacttttagactcgggtcgagtcgattccctccgagccgactcaccggaccacctaattgggtggttctccgcccgcaggaaaaccgctaaccggccatcaatgagagagttagccgacacgtcgtctctctcgtctgaatttcactcaccaagcgaggatttttttttctctagggggangaacatggcttcatccgtgttctttcttcctactatgccattgacggatcagcgcattcacacgcacgagtaccgtgcgcaccagttccgatcctcagaacaacagatcgaacctagatcccgtggtaaacgcaacattggaccagcgtctccagacccttactgctccgctaagaccgaactcggactccaaccgtcgatcacccaaccagagtactcaaccatgatcgcccaatgccataacagcaccttgccacccaaaaaagcaccccccgacagatcagaaggagatccatcctgcacaccaggggttacaggcaccatgccccaccctattccgtaccacctcacctcccatctcacccgggggtccgctaaccgtacccaccacccggccaccatgggcgtcggccgccccc

SEQ ID NO: 187258 - DNA, 395 bp, Arabidopsis thaliana
ggggggaaaaccgcaggccccgacggcgcacggccacgaagataaaattaagcgggaagcagggggggagcacggggagggggacaggcggacggaggaggggacagccgcatacacccgcaacagcacaacgacgcgcggcgcgcgcgcggagcagcgcgagggtcacggcgcgcacacacgagagacccacgatcgcgacgacgtgatagctagaataataccaagccgcgcacgacacgccctccacacaagggattttttttttacggcgggcgcgcgcgcaaaacaaacatcaagccacataacaaacacaacacaacagcaacaaacaaaaccaacacaaacgactcaccaccacaccccaccacgaacacaaacccgacgcagcccag

SEQ ID NO: 187259 - DNA, 643 bp, Arabidopsis thaliana
ggtgcttcctccctctcccccccccctcccgtccgcggccaatttttttttttaaatttcccccctttttttccgcaaaatgccaccacaccactaatcatcttaccccctttttttccgggggcagcgtcttccaaataaaattatccactctccttactgcatcataactttacattctctttcatttctctgttcacctcctttcgatcttattacttcctttttctattttacatattccctcttgtttcattttcctttccctatcccacaatctcccaactcatcctttttcttttttcttgtggttccgcccactttcctaaatccagtcttttccgcaacaattccctcttcccttacttctcctatcttctctcattaccctatttcgtctttcctactcatcttcctcatctatttctctactttctcatattcctcttccttccttcttccattatcctcctcttacccgttccccattttatcctctctatcctcctcatccttttaattcctctctgttatttataatattttccctctatctttctttacaaacttctctatcactttctgccattacccctttaccacctcgttttacttcagatatcacactctcctctctccctcc

SEQ ID NO: 187260 - DNA, 480 bp, Arabidopsis thaliana
  unsure (1)..(480): unsure at all n locations
gcagcgaccgaaagcaaagcacaaaccacggacaccaaacacccgaaccgaaagcaagcaccaccaccacatcgtcacaaggaggccgganccccggacgaacaagaccagacccgaccagccacacaacaaaaaccgaagcaacccaacagaacccaagagaaaccacggcaaccaaggcaggcaaaagggaacaaggcgcaacgaggacacaccccccccgccccccgacaccaaggcaccccaccgcccccccccgacgcggaacacacaagcaacccacccccaaccacggaaaaagcaacaggaacccagcagccccaacacaagaaaccgccaccggagagaaggaaaccacacaacacaaccgccgaccacaaaaaccacacccccgaacaacaacacgcacaacaaacacaaacacagaggacaccaccaacaacacccccccccccggaccacaaggccggccacaccacc

SEQ ID NO: 187261 - DNA, 571 bp, Arabidopsis thaliana
  unsure (1)..(571): unsure at all n locations
tccccacccttctttcctccataacaccccacaatttttttttttctacacacccttttttaccgcataagcaaccaagcctcgcataacctctacaagaattttacccacggggacatgttcccaaaaacaaataccccccccccccaacactaatctttatagttttatgatacttacctcgccgaccacgcgcctagccttttcttccgctttcccccctcttcgttcactgccttcatctctattcaccctactgtattgatagccatctctaccaacagagngagcaacttctcttttccggcgcgggggttccacccagccttacagtccgcgccctctagacgacaaaacaaattgcccacaccacgccgcgcgcaactttcgctctccccccaaccagtcacccctccttcatctgtatgtacttgaacttcatttattctcttgtgattatcccctcatctatccctccccttctgcaaccattctactacgctagccccaatcgtgcgttagtcagcctacgtatttatgccctcattccgttggacacgtcattccagct

SEQ ID NO: 187262 - DNA, 204 bp, Arabidopsis thaliana
ccccccccccttcttcacagccacaaagcgaccacacgccccgcaggcgcgacgcatctctttttcaccgggggggtagggggtccacaaaaaaaaagacacaccgccgcctgcggacgagggcatcagactgtagagatattggtcaccccccgcgcccgccactatgtatcataggcgagctgaaagcgacaagcctctcgg

SEQ ID NO: 187263 - DNA, 522 bp, Arabidopsis thaliana
aggggaagacgggcgcctgcaggtccggtccggaattcccgggtcgacccagcgtccggtccatgcttgagccatatctgaatgaggacgatcgagagcgaggatgaggactcaggcgcggaggagcacgaatgcgacgccgagagaggaggatgatggagggcgagattgcagaggcggttcccgggagaggaaggagagattttttaacgtgggaggagggtcacgaaataaggagatatcggacgagataaccgtacttccccaaaacgaaccaccacgcccgcggtcttctcttgaatctcgacaataacgggcgacgaaaggactcgagctcgtgacgcggcatagaagagggtgaaagaaagtagtacgggcgccgccggcgcggaccccgcggtgctacatggtgcccgccgccctttcgatctggtggaggaattatagaaaaggaacccacccccttccacccgacacacatcgggaggagcggaccgcgtgtcgacgggcccgggagcgcga

SEQ ID NO: 187264 - DNA, 547 bp, Arabidopsis thaliana
gcaacacaggcacggcaaaccagaaagcaccgtgacgcgcggagcaacccacacgacgcaagaaacaaaccacggcacaaaaggccgggcgagcccaaggaaccccaacctctcaacgggggagggcaccaaaagcgccaccaaccacaagaagcaaaccccaaccagacacccgcaggggccccaccacaacgcaagggaaccgccgccccaccccgggcccacaagggggccacacccgacccaggccgcccccccacggacaacacccaaaaacgaacaaagaaaccacccacaaaccccccccccaagcccgcggaaaccaaaaaggacacgcccgcccaaaacccacacagcccaaacccccgaaacggaaaaccacaccaaaaaacaccagcacacaaaaaaaagaaaaagccggacccacaccacccccgcgcaacccgcgccaaaagaccgcgggaccacccagagacgacaccacaaacaaacgaccccaacccacccacaaacacccgccacaacccacgaccgcccagaaaaaaag

SEQ ID NO: 187265 - DNA, 291 bp, Arabidopsis thaliana
  unsure (1)..(291): unsure at all n locations
ttttattaccccccctttccggggggagagggccccgggagagcccaaccgcctcnccttttcctgggggtggggggcctacaaaacaacncctcaccccctgtggcgtgcttgctccgtgtttcgtccgcctcgcagccccggctgttagtcgccctctccttactccgtccgctgtgcacccgtgcgccaactctccgccctttctaccacctagaaatctttttttcgggggggtgcatccccacttggtccagtctctaaaatagttcctcttcccctcttgcctgt

SEQ ID NO: 187266 - DNA, 555 bp, Arabidopsis thaliana
acatctctggtgtgatcacggctacgggaccttatttttgttcaagcccgcactgaccatacgaagggactgcactcgccaacgaaccactttctaacggcagccggacgcgcttatattactccgcgcatgatccatcccacccacaacataagcggtgacacgtctcacaacccaccgccacgggccaggaacacaaaggggctgactgcacaatattcttgagacatacgcaccgcacccgaacatcaagttattttttttttgggcgggggggagggacgccccactgggacctaagaacttgaacacgctttgcgtcaatgctcccgggccccatgcgtagagatgagactacatcatcatttgagcaacggagagtcaccgctcttatggcaaatcgcgcggtggagagccggtgggagtaggacgctaaccccagaggcaatacgcccagcgagcggaggatagaagatcggcacgccactgagagattcatataaagtggggatgcacagccgcccgccctccgccctcacggcgccacacaattaa

SEQ ID NO: 187267 - DNA, 191 bp, Arabidopsis thaliana
acgcgtgcgtgagcttggatcctctagagcggtcttcctacgcgtgctctaatgtgaatgatgaactgcactgagaccatctgagctgattttcgactaggtagatggacaactatagtcactcacattcaatatacgtactgaagctgcgactgaataacaaaaagaggttggactatgggctaaacagc

SEQ ID NO: 187268 - DNA, 520 bp, Arabidopsis thaliana
  unsure (1)..(520): unsure at all n locations
tttttttattacccccccccccttaccgcagaagcgaaagacccccccaccacccccgaagcaacgccagccacacattttcnccgcaggggtaggggggcccaacaaaaacccaagcaccgccggacgcgccagccccaagtacgcagagcagcagagcacccccccccccccacagaacaaccagacccaccacaagcgcagcagcgccgcccaccccccgccccgccacccggccacgagcattttttttagggggtggcccgcccccctcgctttgccggcatagaaaaattaagcccaaacctgccggtcccctctgcatctcccttctttcgcccccgccttcagttctagtcgtctgggcaacaagcgaccccccgctcacttcgtcaagctttctgtcccaggctgttggagttgtgcatctcgtgtgtctccgccgcatctcttttcccgcccatagtcgcccagcctagttgtctaccttaccccccatgactcctcacctctatgaatc

SEQ ID NO: 187269 - DNA, 479 bp, Arabidopsis thaliana
  unsure (1)..(479): unsure at all n locations
aggggaagatcgnacgcctgcaggtaccgggccggcatttccgttttgacccacgcgtccgctaaaatgaccactcgaccggccttgaggaacatgggctactcacgacttgcccaccgagaagcccccacgatgggaactatcgcggtaccactctgactggccacagacacgaacgctgtaaaaaacaaacgcgccaacgcaaaacacagacaacttttttttttaacggcgagaggagggtctcagacgcactgagaatgattaggatacgacgattcggcgcggagcacgagcacacacgaaggtagtgatgcggcatgaacaggccacacgttaacagacaaggctgagggagcgagaggacacagaataacccagacgagaaccgaggatatggatggagagaaaaaggagaccgcaccagcctggtacaagaaacaatacgatagacgattcacgcccacctcacccatcga

SEQ ID NO: 187270 - DNA, 564 bp, Arabidopsis thaliana
aaacaaggaacccaaacacacgaaaaggactaaggccgatcagagcaaggggggaaaaaaggaaccacaagaaaacagcggggaaacaaaagcaccataaaggagtgcaacccaagaggcgaaaccgcccacaaaaagaccataaacaggggcgaaaacagcccaccagcggaaagccacagcaaggaaaaagaaccacccggctcctggagacgagccaaaagagcaagaacagaagcggccggaaaacccggaggcccaaacaaaacaacggaagagcacggggagagaacagacagaaccccacaaccggcacgcacaactgcaagccaccggagcgaaacccgcgccccccccaccggacaaacaaacgcacccccctccaggaccccgacaaccaccggaacagcagcaggggcgaggagagactaggaggcaaaaccaagacccgaaaaggcatccacccaagcgaaagcggccccgcacacaacggacccgaaaaagagaccgcccccccacgccaggcgcaaccgggaaaacacgcacgcgaaacagaagaggccc

SEQ ID NO: 187271 - DNA, 350 bp, Arabidopsis thaliana
cgcggggaccgcccggattcaggccgacagacggcgcccccgagagacccactcagaaaaggccgcacgagaaaaggccccaaacccgccgcgagaaaaccagaggcgcccacaaccggggggcgggcaaccgacgctcccaccccacaaacttttttcccggggaaaaccaagaaggaagcagcacaaagcccgacgccacaaacacgacacggaaaacaaaaaaaaaataagcccagcagcgcaacacaacaaaccccaccgccccagaccccaccccggagcgcacaacgccacagacaccgacccaacaaaacaagaaaaaaagagagacaccccacccgacaaga

SEQ ID NO: 187272 - DNA, 240 bp, Arabidopsis thaliana
ccggacattttttttttagttcaccgaatttttcgcggagagacgccacatcaggagcaagcaacgggacgcctctgggggggggtagggggcgaaaaaaaaacacggcgggctccgtggggactaaacacaaggacacacagccccgttcgtcatagcagatctaagcactgaaacatcaaagactataccgcctcggcgcggaccccagcaacctgcgcaccccgccccgcacttttt

SEQ ID NO: 187273 - DNA, 504 bp, Arabidopsis thaliana
ttcggagggggggcagtgtgtgccaaaaaacgagagggcaaaagtaccaaacgctccttgagacgattgtaaaataaaacttcctcccaccccctacaagacctatttcatcatcctgagcctacgccgaccgcgccagcgtcaccgcgcgccgcaagacccggaagtttttttttccgggtgtgtgccagcccccaaagcggcaacgttaactaaataaacctactcacattcgaccccatcgcagcaccccctctcccatcccgctgccactgacaccgtcagcctagcaactggcccgcacccggatccacatactttgtcactaccaggcagatagcatctctgtggatctacgctctgctccccgcgactgtggcacgcgcccccgctggccgcccgtccaccggcgaccaatacagaaaacatagaacaccaccaccgcccgcccctctccatccgtccgcctgtgagcatcttatcattgggctgtaagcgacgctg

SEQ ID NO: 187274 - DNA, 443 bp, Arabidopsis thaliana
  unsure (1)..(443): unsure at all n locations
accgcccaccccattttttttttttttttatctccccccttttttccnacaagacagcacccgccccccccacccacacgcagtcccttgctcgaccctttttacacccgcccgaggaggccagggccccaacaaatacacaaacaatctcccgccctccctaccgagtgtcccagatttccctcatcccccatccatcctaccttcatgcttctactcactcatgcccttttctcctcctatacgttctcttctctcctgtcctccctccttctctcctcttccctccctctccactcattcccttgccccatcttctttttttttcccgtgtgttttagtggtcgccctcccttcctctctttctctctcttctccacatcatcatctctttttcctcctttttcttctcctttctctctctaatctcctatactctctcc

SEQ ID NO: 187275 - DNA, 454 bp, Arabidopsis thaliana
gacaaacaaagcacacgagaccaggaaggaggaaagacagagagaggagggacaccaaacaacgacagatctcagggaggaggaacaaggaaacggcgcaggccaacaagcccccacaagacaacaacaaaccacgccacaaaaagacacaaacacgcaccgacgcgacggggaaaaaacaaacgcacgccaagcgaacacccgaacagcaggggaaccccacacaacacacacaaccaaaccccgaaccagagagagcagcaacgcccaaacagcaaaaaaaaccaccacaaaaaaggacacagacaaccgaaagacacccggcgagacggagcagcgagcccacgccacagcaacaacaccagccacccagggccgcgcccgcacacacgaacgaacgacaagacgagacccaccgcagaccaagccagaaacccaacccacaaggacgcag

SEQ ID NO: 187276 - DNA, 536 bp, Arabidopsis thaliana
accgcccgccccacaccaacgcccggacaccagaggggcggctttttttttattcccccccccttttcccccaaccaccccccgcaaaataaccgcaaccgacgttttaacacgcgggaaggccgcccaaaaaaacgcacccccaccccccccaccccgcccaccccgcccgcacccccccccacaaagccccccccaccaccaccctcccgacgcccagaaacacacaaacacaccaccaaccgccacacgcccaccgacaaaagcccgctttttttttctaccgcggggtggtcccaccgcacgcacaggccccgcgcacaccaccccctacaaccatgacgccgccacgccacacccacccccacacagcaaaaaagcagtcacgcaaccgccgagaccagataacgccaccgacaaacaccgaccaaaccacacatcccacacgccgaacctacccacctaacagcccgcgcaaccccccacaccagccacataagacacatgctacccacacccccagttccccgctcccc

SEQ ID NO: 187277 - DNA, 524 bp, Arabidopsis thaliana
ccatacacaacccacacagacacggagatttttttttttcttagcctccgttttctgcacgcctaacgcgcgcggccgcccccggagccagagattgaaagttcctttttccgcggtggggggaagtgggtcgcaaaataaaaagattcctcacccatctgtggtaggtacacttcttgttcgattatagtattccatcccacccccgcccatggtgccaccgacccacccggtgcccgttcttgttcctgtctttaccgtgtactgctccccgcgcaacgcaaccggctttttttacgcgggtgggccgtcccggcgccgcggggccccgccaaaacaaaacgttttatcgcgaggcatggatatgtcctgatcctgtcctcttcccctgtcctctcgtaccctctccctcgctttctcctaaccgtctattcacgactgcagtcattgttgacgtcggccggccactctgccggtgggtcgccgtgctcggggctcccccactaccgcgcacgcgttcttga

SEQ ID NO: 187278 - DNA, 531 bp, Arabidopsis thaliana
caagaagcacaacggccgcagaagaacgacggtaaccagaccacacgacaccgacgcgcgcccgaccagcagcggcgaacgcggaggcagacgccgcgcgccgcgccagaagaaagccgccagccgccacgagccacccagaggagacacaaagaggcagcgagggccgcacaacgaggggagcggacacacacgaggcgcccagcaggggccgcgcgaaagcactttttctcgccggccgcggccgccccccgcacgggggccgcccgcgggaagaaagaaaaggacgagccaagaaacacgcacggagagaacgagccacagccgccaccagccccggaacaccaccgccccccgccgggcgcgggcaccaccacgcgagcccccgcagagccaggaagcaaagcacagcaaccggccacgcggggcaccaggcgcgaggaaaggcagacacaagccggcccgacgcccacaccaccggaaaggccacaccaaggggggagagaggggcgagccgaaggggcaggaagg

SEQ ID NO: 187279 - DNA, 648 bp, Arabidopsis thaliana
  unsure (1)..(648): unsure at all n locations
gagccaacccccccttcccccccaccgagccacccgggacgcatttttttttttccacctcccccacatttaccccaacgaaaaaggacaccctcatatccccactcacttgcgntttttttcccctggggggcacgccgcctcacaaacacaccctccagcccttccccacaacgccgaccattcaccccgtcaccacatacccctccaccctcacctgccctatcaaatcacaatccacaacacatcaacaccaatcatcacatacccagcaagccgatatatcccccatcttcaccccgcgcacacagcgcagcaattcttttttcctgggggggggaccccacctccccacctacgttccacccaaacacaacaatcctcccatcatcccccatatatcgccacacacccaaatcccggctttcttcgctccgcccactatctcttatccgtatatccgactcacgtcccaagcttcgtctcccttccagctccccccactaccccgctcctaaacgacccccgccatgactccctacctatcgaccacgcccctcatcgacgcaacctaaagttgccacctgtagccaatgctcacttctattcccctgataccacaaccatacttacactacgcttatccca

SEQ ID NO: 187280 - DNA, 517 bp, Arabidopsis thaliana
gaagccgggacccaatagagcggccgtccacgcggacggcaaccgacaaacacgacgaagaacccaaacgcacaaagcacacgagaaggagcagaggcgaaaaaggaacccgaccaaagagggcaaaacaacgaaagcacaacaacgccgaggacacagcagaaacaagcaaactgttgacgggaaccaccacagaccccaaaacaaacaacgacatgacaaacaagggaaccagaacacggcacaccaccccaagacgcacaaacaacgcaaccaaaccaaaaaaaaaaaaggccgaacgggaaccaccgccaaaacagccaaccaggagagcaaaccaccagacgcgcccacgagaacaccccaacggaaaagcccccacccccccaacccccgaagaaacgccaccccacccaacaaccgacacccaaaaacgccacccccccacccccaaacaaccacaccccccccaccgaacaagcccagcccaatgaaaaaccacgccccaacacgaccc

SEQ ID NO: 187281 - DNA, 273 bp, Arabidopsis thaliana
tccccctacccccccgaccttttttttttttttttatcccctccaccttttttccacaccccaaacaacccctccatactttctcccgatactcacttacccatttttctcccacacctgggggtgtatattgtcttccaaaaaattaaatctacatcttcccacaccattttctttcggtttagatttaatcccatgttattgtttattatttccacctttcctcctcctctcccttccttactctcttgtttattctctatacttttccta

SEQ ID NO: 187282 - DNA, 601 bp, Arabidopsis thaliana
acccaagcgcggccacgcggccacccccccgcacgatattcggggacaacccgccccatttaagggaaaaaccgaacgcctgcaggaaccggccccgaataaaaggttcgacccacgcgtacgaccaaacacagtgacgacatccgagaacacccccaacacacacagaaccaaccgaagctgccaacacacaacaacgaacgacgcagaccccagacgaactccaggcccacacccggaggaaagcaacaccccgagcgcaaccgacaaagaagtttttttctcaaggggggagacaacagaaaaacaaacacaaaacgcaaaacgcccgcgcaccaacccaaccaacgaaaaccaactccaaggacagaccaccccaaccccaaaaaacaaccagaaagcgagacggcgcagaaaaaacacaaaaaccaagacgacagagaacacaaaaaccaccaacgacagacgccaaaagggggacaacataaaaacacaacccaacagcccacaaccaacaaaaaacaaagaggaccgagacaacaagcccggacaccagaaccacaagacccaaaacgcaaacagacggccacgcaacaacaca

SEQ ID NO: 187283 - DNA, 287 bp, Arabidopsis thaliana
cgcccctcccctcgtcgagtaggccgggcgccccgttgttttttaataaccccactttcccagcagagcagacgcccagcccgaccgcgtaatcatattttttatttcggggggggaggggggcaaaaaaaacacagccgctcagtcatcttatcatctattgaagtgttattgtgtatttgagtatattatcgctctactccccgtcatttactgttactgtccttactttattgttctggctttttgcgatgttctctgggtggactggttcagagctttctttt

SEQ ID NO: 187284 - DNA, 461 bp, Arabidopsis thaliana
agctttttttttaatcccccttttttcccgaagaggacctcccgcccgcgcggccgttgtgttttttccatgggggggggggggttcataaaaaacacggatcccgcttccccgatgttcggtctttggtctctcgtcaatcttctgtaatacttgtagctttgtaagtgctgtgctctattacttctgtatatctccgttggccgtatccatgtctggtcttttcagtgcaccccttttttttttctgtgtggtggcgacccgccccgttgtgtgttacgttatttatctatttttttcattttcgtcttatatgttgcattctgtgattgttttgtttcgcttgagttgttatgtactcagtccttgccagcgattattcttttttcacgctcctgtatgtcgctctcggttttcatattttgtatatatttctatctttttagctctctgccacgctt

SEQ ID NO: 187285 - DNA, 535 bp, Arabidopsis thaliana
tgtcgacccacgcgtaacggcctatggtatgaatacatcctctctcgactctcaactgtccgtcatcggagtttcgacaatactatccgcgctcggaatgtaacatgcctcagccacaaagtttatcaggttccggcacaacagcgcacagagaatttccagcccgaccgaaacccaacacagacactttttttttttgcggggggcgtaacggccacatgctgcgttggcatgtagctgatgacagaccgccacaccccacaccgcaagacgagatgcgtgtagtgtgtgagagctccgcttgacttcctccccactctcagcgctccagctattaactatggttctttaggccctctacttaattcccatccccctcctcaactccccccttctgacaccttgtatatgctagctaacttaagacttgcatactttcgttattgtcttatgttctccggtggtaccggtatcgctcacgtttaccgccagctatgattatgaatccgttagcagagtgcgtgcaacaaaatat

SEQ ID NO: 187286 - DNA, 521 bp, Arabidopsis thaliana
cctggggcaccggcccgaatcccggtttaccagcgtccgaacctcccaggaccgcaagggcgaaaagcacggtggcacaaagccgcggaccacgagctcaccgcggggcataacacacagagcagctccgccgcccacgagcagacgagcaccgcagggcgagggacaccgaacacaaccatgtttttttttcccggcggggagaccaccgacgcggcgggagcaagcgaacgcggcaccaactcaacgaagagatacgaggcccggccacgagttgatgcgcgcatccccggagccaagccaacaaaaccaccacacaccagacacgccaaacgaaggagcgaaagagcaacggacgaataccacgcgaaaacccgcgatgtcggacacaaggcccccgcaactccgcgtgcgcgcagagggacagatcggcgccccacgccgcgcagcggagggggaaccacacagaggcacggcaaaaaacgcaacccccaccaaccaacggcaccgcacccggagtg

SEQ ID NO: 187287 - DNA, 387 bp, Arabidopsis thaliana
tctaacccccgctgtctccccccaggagtcgctcttttttccgggcggggtctcgctccgtctgctctccggcttaccccacatattccgtcctccgcccagtacgcccccccgcgtcgcgcctccccgttctccatccattacgctcgggtgacaccactcgtgatctcctggccccatctcccgcaacgacctttcctctcctttgctatgcctcacgtctcaccgtcgaccgctctcggttgcccctgggagcgcatccgatccctctcccccgcgagtcccttcccccacccccgccgccccgccccctctctctctcgttacttgagccacggtctccgccctccttttcacctcaactctcgtccccgtctcgtcccccct

SEQ ID NO: 187288 - DNA, 558 bp, Arabidopsis thaliana
gacacgcacgcgtacatgtgcttggatcctctagagcggtttgacctttctgtatgagcattaaaacagatcaaaccactactctggagtggctgcgcatgcatctaggacgaaaagagtgttgactcgctatgaccaaacatccggatggccgggctttgggttccccaccgtactgcagaacgcataacagtctccaccgtttttttttgggggggagccaaacaggttaacaagacaacgcctccactccataggctacgggcccaaatcagtgtgaccggatgactacaactcggaatatattacctcctctgaaatgcgcgtcatgtttatgccaataaaaaccacactgaaatcgtgaattttcactcacccaaacccacccctacatgaatgtgcaattcagatagcctcgctcactctccaccctggtgttatgatgcccccccttgtcccacagagcttgtgttgcccgaaagagcaccgcggcgtccttttagacctgacccacgggccgccttctacctgcaccatccacacctatacggtccacaa

SEQ ID NO: 187289 - DNA, 337 bp, Arabidopsis thaliana
agcttgacgccatgcccgtcgtagctgatcttaagcgcgccttttttttacttctaaagaatatatatatattgacttaatctcatggcatgaaaaatatagctctcgaattgatctatatcttcttctgacttatttttgatagttgtatatagaagagattagactttcgtcaattgcatctattacatagaaatatattatgtcacattagatgtctcctatacgtatagtactatgacagatgtatcatcgtcatttctttcagatagctaacaaataaattacttcatcacttatgataccttatttggaagactcataaaaagattgccgc

SEQ ID NO: 187290 - DNA, 622 bp, Arabidopsis thaliana
  unsure (1)..(622): unsure at all n locations
ccccnggagcnnggacccaaagcacgggcttcccggggggcggaaaccccaacaaaaangacagcaaaagagggggaaggtaagaacaagggggggggggccaagcaaaaacgggaagaaccgggagacgccaccccggacgaggcggccaaggcgaggacaggccgacaggaaccgccgcaaaaacctcgaaggaagaggggacccccagggaccggaaangggacagggaacaaccaagcaaccccggggggcccgccaccgccagaaagagaaaaagcaggaccaacccgcaggaaaagaggagagagaaggggaaaacagcaggaggagaagcaaacggacagccaccacgaggcgccggcacgggcaggagccaccacgcggcccgacaaaggaggcggagacagcggcaaagagacccagagaccccgcgaccaagagcggaccagacgggcacggaggaccagcgggccggcccacggcccgacggccgcacccccagcggggccacgagaaccgggaccggaccgccccaccacgaaggcaccgggaccaccccggaagcggggggaccaccccggcgcggcgcccgaacaagcgggcgacacgccgcccgacg

SEQ ID NO: 187291 - DNA, 504 bp, Arabidopsis thaliana
  unsure (1)..(504): unsure at all n locations
cgtgcatgcccgtacgtagctgatcattaacggcgccttttttttttttaacaattaatcttatattattgataggatatgaatataaacttgacctttagatgttatttggtgggaggaaagcaaaaggataataaccttacttgtcatcaagactttntcagcnaacagtaatcanatatcgtttacaattcagttgtgatacacttagatcaattacatttacattctcccacattcggttctagacattattagaccttctatctcacacagacttcttcngntattaccatctgtgagactcgtgaaaagaactgcagctctataaatacgaagatancatcaatctttgaagtatcatacccttctgagaaaatgctctcatacaggatgacactcgcgttcaaagctgaagtaagtcatctgtgaccatatccatcataccaccagatggaccgaacatgaatctgatcgagacccatgccctccaagacaatcagc

SEQ ID NO: 187292 - DNA, 619 bp, Arabidopsis thaliana
  unsure (1)..(619): unsure at all n locations
tacctactacccccctctgtttccatcaccaccaacaagcgcacgaaccattttttttttttcttnccacctcccttttcacacaccaagaaccgcccacctttcccttatgcacttaattatatatttctcccccgcgggtgaaattctcatcaaaccaaaattccacttctccgtcactaagaacgccttatccgttttattgatctagtgccctctccccccccccgctctattcagtacgacccccccagccaacacctccttcctcctgccctccctcctgctcctcctcccctctactggtcactctttttttttgggtggtttctccacctcctatctcattcttttccatcaatcaaaaccaatacttttcgtatgtcgccatctatctttcccactctcccaactcctctctccccttccccccctatcccccgcccgctcccgcgctccactcctctcaaacctcatatcttcctctttgctttcttttctcattttgactctccttcttcatctttttctctctccctctcccccctctctccatccccttttcttttccttccctctgtttcactatacttctctctaatcctcccacgcaattctt

SEQ ID NO: 187293 - DNA, 239 bp, Arabidopsis thaliana
gggcgcaccaagtgcactagtctcgttgtatgacgccggctccttatttatttttctccatcccgcgaccttttggtagacagcaagcgaccctgaccgtcatatggtccgcggtgtgtggtcttttctccctgggcgtgggtgcggtggtagtatcaataaaaacttgcgtccgccactccaattagtatatagctctccgctggtcatcaggcggcgccgcttctcgctcattattt

SEQ ID NO: 187294 - DNA, 507 bp, Arabidopsis thaliana
cccccccgtttttccccagcacaacaaagagacacacaggcgtacaaaaaacccatagccctttttccaaaaacgggggccaaggggcccatacaactaaacaataaaacaactactatatattaagtgctgacacacatagcaactaaatccaacacaacaattatagtatatttcaaattaccacaccccgcaccaacttaactcatcaaagaaacacccacaccagtacaaacaccgcccacaaataacacttttatccacggggggaacaatccttcatgatgtaactatctttaatcacactaaccacattcacccccatctcaccaatcacacgaaaacaatactcactaatagcacattacgacttcagtattaatgtcactacaaacgatacaccacctcaaataatagtatgtcaccattcttatggcccccataatacagctacacaccgtaatcccagtaaactaatactaatagcataatttctcacactcacat

SEQ ID NO: 187295 - DNA, 330 bp, Arabidopsis thaliana
acgcctgaaagcaccggaccggaattcccgggttgacccacggccgtccgaggtacacgcaggcatcgactccccgccgtctgctcgaggtgattcgttcaggagactgacagaacccgagcccgcaagccagattagagccgagcgcctgcacgcccgcgcggaaggacgccggactcgttaagaagagtagtcgggcctacgagattttttttttacaggcgggacttgattaagacctcagactaggcgtcctagtgcgcaactcatatgcatagtagcagaaaagccgtttcgcggagacattgtcctgaaggtacgcgccctttc

SEQ ID NO: 187296 - DNA, 665 bp, Arabidopsis thaliana
  unsure (1)..(665): unsure at all n locations
cacccgcccccgcgcgccccaccctttttttttttttaatcccccccccctttctcccccccccccgccctcccctcttcccccctccccaacttctcatttttcccccccgtggtgtccttctcttcccaaaaaccaaccatccgcncacctcctttctgcccgctattgtttttttgttgttttttaattctccctccctcctccgccgatcgtctttccttacctcttctccttcttctctctcatctcccatctgccctccttctgttcatctcccttcctactacgcccactgtttttcttctcgtgtttttttccccccctccgttctcctcttcctctcgtctccatacattccgttcccttcctgctctcacactttctacaccctatctccctatctctctgccctccgtcttccttcttttcctgcacgcccctcattcgtctcgcttgactactatcctacttctcccttcccctgccttccctaccccctctcctttcccctttttgtcctcttccactctcgctcctcctcccttcccctccgtgttctttctttctacctatgcccctcctcttcttgcgtttcttccttgttctcgtcctcttactccgctctgtatttcttgatattaccattcctatttcttgcttct

SEQ ID NO: 187297 - DNA, 429 bp, Arabidopsis thaliana
acgccagcaggaaccggcccggaataacggggtctacccaggcgtccgaggacaccgaagacggacgcagagggcgaggatgcggcataacgccaacggaacaagcgcacacacaggaagagaccagtgaaaagaagcgcccccaaccgcccacgaagacacacgagcgagagcgtagaggaccagcaaaagaaagatcgggcctttttttaagagggggggagccacctagagggacagagagcgaacccatggggagcagaggagggggacgggcggacggaaggacacgtacgaaggagcaagagaacctgcgcaaagggcaaccgcacggaaccacacaagatccagcgagacacgccaagagggaaaacggaagaactgaggggaactcaggagaagacgccggaacgcgagaccaggagagat

SEQ ID NO: 187298 - DNA, 436 bp, Arabidopsis thaliana
gaagcgggaacaggaagagctgccacgagaagggccaaaaaacaccaaccgcaccaggggacataaaaaagcaagagcgggacagcgaaaccaacaacgaggcccaccagggagacacaagccaaaagaccccccacgaagccaatttttagaggagggcccaaaaaaaccacaaccaacaaacaccccccaagccgcgaaccccgacccaaggaaagcaacacaacgaaaagaacaccaaaagaaaccaaacggcgcccaacaacccacccagaagggagaaccacaccaaacacacaagccggcagaaggacaaacaaacagaacccccacaccacacgaccaccagcacgaaccacaaccgcccgcaaccagagacccgcgcgccaacggaccagacgcccccgccaaacgccagaccaccagccccacaaga

SEQ ID NO: 187299 - DNA, 512 bp, Arabidopsis thaliana
cggcgcgggttttttttttttttttcttccgaccccctttgtcccgcccccagacgagcacccctaagcctcggcgaccaccccgagcagatgtttttccgccgggagtggggaggggttcaaaaaaacaaacggcgctgaatgcctgccgaggattgcgtttgtgtttgtatagttttgatatatggcttccggcgccccccctcactgcttctctgggaccttccacgatatctccttaccgtgcggcacgctctcttgcgccgtacgagcacccgcgaccgggggcgttttttttttgggggggtggtgacggccccgcctagggttcccggcacgaaaaaactcccggcctacctctcgttcgcgcggcgcttctccccccctactcgcacccttgtcactggcgccccggcgcgctcgcttctccgtcctgtcttccggttcacccccccgtagctcagctcgccatggtgttgttatatgtgcgaaagtttgtgttgtcgctcatc

SEQ ID NO: 187300 - DNA, 474 bp, Arabidopsis thaliana
  unsure (1)..(474): unsure at all n locations
ctatagagactgcgtcctccctcgtaagctcgattcggtgagtgctatcttgcagctcatgagaggaaggtgattcattctgcactctagcacaaccnatgtgacttgatgactggtcttactaaattgttgccagctcgagtccttagaaaaggaaaaccgttaagtggtttttcgggccgggacttttgcagccattcttgaatccgggagggggttcccccggattttaaccttaaggtaacccttgagacccccttccatttttgagggggaaaaaattttgggggaaaaaaactcttttttttttttttttgtggcccgcccccccccccttttttttagagagtgtgtgttcccccaaaagtgtgggtggggcccccaccttttttataaaaaaaaaaagacccccttttttggggggtttttaccaacttttggaaaaaagttttaacaaatttttttttttaaaaa

SEQ ID NO: 187301 - DNA, 394 bp, Arabidopsis thaliana
agcccacgcgcgccgggcaggttttttttttccccagccccctttcccgcgcgaaccagcctccgcccccgcgaccccgcggggattttcccgcggggggggaggccccaaaataacccgccacccccggcagcggaggaaatggttgagtggtgtaagatcctccgcgcgccgcctctgtgtcgcgctgccgcccgtgtggccgcgccgggcgcggcttctcgtcgcgtgcatagcccgcggcgcgcacgggcacgctttttttttggcgggggtgggcgaccacggcgcgccagtcgtcgtcccgcgaaaaatacgatctcctcgtggcccagtctgactcgtctcgtcctagctcgcgtgcctctgggcctggatgcgcccggcgcgcgga

SEQ ID NO: 187302 - DNA, 644 bp, Arabidopsis thaliana
  unsure (1)..(644): unsure at all n locations
gtagtaccccccttatccctcctcccacccagcagggagccaatttttttttttttcttctcctccacttttttcagagaagaaacacaccccccccgccaccatccctcccatctccttcctttctctctggggggcaagttgtcttacaaacaaaaccacataccccgcacagtccttagttttctccacataacccatacctccccccttctacctcccccttctcctatttcccctcccttttccccttccaccctttctcccttttctaaacactcgtccttccactcacataccccaccancattttttttttcccggggggtcacaacctattcctcatcatccacctatcaaaaaaattctccgtctccccctcttcttcctcctattttatatatacccattcctcatacatcactatccttttccactctcccctacctcccttcctccattcccctccccccatattccccctcccatgtcctcctccttctcccttctcctcgtctcccctcctccctctccttccttctctatttctctatctccccatccccaactcccccaccatcacccacttttccacctctcctattctctcacttacctccaattccctctcaccgctcccccca

SEQ ID NO: 187303 - DNA, 486 bp, Arabidopsis thaliana
cgggggccgggacggaaaaatttaaggggggggagagccagaggcgagggaagaagaaaacgggggcggaaggaagcaccgacaggacaccccgacggcgaaagaacaaacggggcgcggggcggcagcggagcaaaggcagagaacggggcgccacaggaggaaaatttttttttcgggggggggcgacccaagagcacaagagcagggcccagcaagaaaaggccgacggaagacgcgcacacccagacaccaaagagagaagagccgggaagaggcgggagggcgggagggagagcaacggcgcggcgcgggggaacggtgagccaagcaaagggcgcggcacaccagcgcaagcaggaccgagcggcgcgcacgcggaggcgacgggcggacaaaacgcgccggcagaagcaggcgcgcagtagcgggaagagagccgaaggcggagaaggcacaatggaaacacggggaacgaggggagag

SEQ ID NO: 187304 - DNA, 379 bp, Arabidopsis thaliana
caacgcccgccccagtaataattatagacataagccgcagcgttttgaattgtcaaagttaaaaattacacacaccgccgctttgtcttataccttcctttcgagaatcattattgtccactagagcttcccacaatttttttatggcggggtggggccacccggtgagcggtccaatcataaaaaatgactcagcgacccccacaccgcgcctccagcactgttgtttatacgtttcgtcaatgatcttatcttttactcttcggagatacaaatgcgtgtactccaaataccatgtagttttatcgcgagtcgccgaatatctaatccaccccccctcgcacctctggcgacagcattgtaccctagtcgttttgtt

SEQ ID NO: 187305 - DNA, 356 bp, Arabidopsis thaliana
  unsure (1)..(356): unsure at all n locations
cccaaggaaccaggaacccgccaaaagacgggaccccacccaggcccggaagcccggacaaaagcaaaaccccggcccaaaccacgccaaagaccccaaagagacaaaacaacacccagcacccaaccgcgaccacgacgaagagacaagcccaccaccccccacccgggcccgacacaagaaagccccgggaccacagccacccggcaccagccacncaccaagccacaccaagacagacccacgaaacaggcccccaacacccacgagagcaaacccccacaaccgcgccacgcacgcaaggaaccacccacagaacgccgccacaaacaccaaaaggcacacccgccacccac

SEQ ID NO: 187306 - DNA, 544 bp, Arabidopsis thaliana
acgcctgacggtggccgggccggaataaccgggttgagcgacgcgtccgctaatttggcaaagagcccctcagatttcgtcgcggcaacggcacatcgagattcggcgcccggacagaggagccggtaattcacccgcaagccgaggacccagcaggaggcgaacaaaccgctcgcaattggatgccacgcgatgcattttttttgagagggcggcgggcgcgacggacagttaaaagtcaactagaccccgatcagcagacgcctgaccgcgcaccgacgctcagagcgtctgatagtagggagatcgcgcgcgaagacccgccagaggatgcggagggtgagcgttaactccgcaaacgaagatgggaggcgatactagaacccagggcgcccggagccgggatcggtgcccttcgcgtatctccgcacaacaaacaccaaacaattagaagggagcaactgagaatgaaagaagacgggccggcaagacgagcagaatagaggaggtcagacggaggggacagagaggaagcgaagaaatt

SEQ ID NO: 187307 - DNA, 510 bp, Arabidopsis thaliana
caaaagcaccaagagggggcctaagaacaacgggccaaccaaaagaagagacaacagcgacaaagacacggggccagcccaaaaaccagacaaccaaacgccgccctcctcctgagggtggccacaacaaccaacgacaaccacagaaaccacgcacgcgaggggggcgccgcgcggaccggacaacaccacggaaagcccgaccaaccagacacaaaagaacagaacaaccaaacaacaaccggaaaggggaaggcggaccacccacgaccacgccaggaaacagacacaaagaaaaaaacccgacccaccccacacagacaacgaccagacgaacaaagaagacgcacccacaccacgaccccccaagaccaacagaggaaaacccggccaaaaaagacagacccgggcgaggaaaacacaccccgccggcaccacacgcccggagaaacaaaaacaaaccaccgcagaaccaaaggcgaggcacacaacccccaagggaacaccgga

SEQ ID NO: 187308 - DNA, 577 bp, Arabidopsis thaliana
ctcagtgaacgccagccgccgcgccctttttttttcatatccccccgtttcccgcggcaagggccccccgagcacctcgcccaacgggccgtttctgtcgggggggaggggggccaaaaaaacgcgtggcccttctgtagctcgccgcctatgcctcttttatcgcttctttgtctatatttcttcctgctccgtgcctcgtccatctccccaccccgctccatcctctcacctctcgcgtcagccctcagctcgacggctttttcaccgggggggctcaatctatccgcgtcttgtccccccgcatgattagtccgcattactgtcctgacatttccattttctcgctccacttcctcttttccatctacactcctagttttataccccgacgaccctccgaccaactcccacctttctgaaccgcctgatctcccctcctaccgtcacctacgcgtggctcacggcccgttctctattctgtgtatcgcctttccagttatgctcccatggatccaccggtggcttcctcttcaatacctccttctttttccggaggtgatggtgtaacctcctg

SEQ ID NO: 187309 - DNA, 321 bp, Arabidopsis thaliana
gggggagcccccagagccaaaacgcgacaccccaaacattcttttttattcccccgccttcgcaccccaacacagcgcccagcccacacataaagaaatatatttaccgcgggggtaagcgcaaaaaaaaaccttcatccgagcgtaaatgagtattggttagtaagtagatcacggcgtcgccgacagacgagcaccacgcaacaaggcgtcagacggattatcgttgctgtggtatctacctaagacaacagagtttttttccaggggggtccccgtcccccgtcgcgcaccagacgaaaaaaattaggggaaacaatc

SEQ ID NO: 187310 - DNA, 464 bp, Arabidopsis thaliana
ccccctccggcccggacggaatccagttttacccgggttgagcccctacgattactctcacaatgcggccattttacttaccataggtatgggctgagcatttgacgtagactatcgtaccagctagcaaaggtgtaaattaccctgaccccgaaccacacattttttttttggcgggggacagccgcccaacacggagcctcccacctcaccccacgccaaacaaggaagacgcggtatgcttgccccgcccttcagaaaactccttctacccggtagaagttgtttcccctaacgtcgctgccaggcgaatttccagcaaatccacgaaccactaatatttgtactttttccccccctcctcctctagctatattaacaacaccacccattaaccacgccacctcacctcccaacgagcacgaataataaacctaatacaaacaccaccccaccacaatttt

SEQ ID NO: 187311 - DNA, 430 bp, Arabidopsis thaliana
  unsure (1)..(430): unsure at all n locations
caaacatttctttttttttttttatttatccccactcaccacctttcctcaagccacccaacaaaaccactcccccactcaccccatcatctacccctctcctacactattttatctccctcggggggtaatacttccatccaaaaaaaactaatcagtcccatacgccctactatatcactatttatataaatcttattagttgtaatccactaaccncctcccaccccccactcatcttattccccccccccccctctcctattcctctacactcctttcatttacctccccactccccgcctacctcttccctcaccccgagacacctcttcttttatctagcttttgttgtacccccctcatctcaatccacgtgacagtacaatcaaaaaaaccttcacctacaatcacatatcccaacactcgc

SEQ ID NO: 187312 - DNA, 302 bp, Arabidopsis thaliana
actcgggggggggtggtcgcacccaaaacaaaaaatctatgcacccctccgcgttagtctatcacacccgttccttcatttttctctgggaccaccaacaccaccacccttcttgctcctccatcgtctgttatcccactcgtgttacctctccctctcatcgatcttctctcgcgctcatcatcccatttttttttaccctgtggtttgcgcgggaacatcaccccacattctatcccccccttatcacctactgccccacctcattacctctctcaatatccaactttctcccctccctc

SEQ ID NO: 187313 - DNA, 512 bp, Arabidopsis thaliana
gggggcggtcgcgtcggcgggccaggaggggagggatttttttttttttccccctttttcgcgacagagggcccccgcgcgtcccattccaccactcttttcccaggggggggggggtctcaaaaaaaccttcgcgcccctgtatcaccctttccctcggcagaggcgccctgtttcctcttgctgtttgttacacgcccgtgcttcccgtattcctcgcgcctgtgtccttcccctcttggctccgcgacgattttttttccggtgtgggttaccccccagtgtggtccagtttaaaaaacttttcactcgcccacaccgccccttcggttcttttacgcgtcgccactgctctcctttctcccactttacctaactctccccctcatccatcctcctcgcacgtctcctagtctccttgtctcttccgcctcattctgttgtcttgttctttcccattcttgctttcgctagtccttcctctctatatctcttcattcctctaatatccc

SEQ ID NO: 187314 - DNA, 417 bp, Arabidopsis thaliana
  unsure (1)..(417): unsure at all n locations
cgaccctttttttttttgttttttccctcctccatcttttttccaggcacccgacacatccccctcatttttcctccatatatcttcagtcgactttttttccccactgggggtttatgcttttcctataaaaaaaatccactccacctactcttttatacatccctactgttgtttgattttcgtgttttatttcttttctcnttccgtcctctccccctntatcctgtctcttcccatacctccctcttcgttctcactcatttttacctcccttccttccccttactttcctttagtaatcctctccgccccacatgactttttttttcttgtctctgttggttgagctcatctctctctcctctccttcttgctntctttctcattacattattcttctcttctcttccttcc

SEQ ID NO: 187315 - DNA, 565 bp, Arabidopsis thaliana
  unsure (1)..(565): unsure at all n locations
acagcggttcgccgggggggaaaggccgcacaacacaaaacagaggcgacagggggggancagtggagcaggcgaggggacgagacgaaaaccaggaccaacagcagggaaaagcagagcccacggaggaaaagccgaacgaaggagagcagcccaaagcgaacccgtgagagcaagtacgcaanagaaccgcgcacaaagacagaaccgaaacaccaccgaagggggggcgggggagggaggcgacccaaacacgacaccaaaaccacagggcgaacagaagagacgacgacaaccccgaacaccagcagaacagagaaaccccgagccggccggcaaccgaacaggcaccaaaagcagcgcggacggacgcaccgggagcgcccaaccagaccagaaggaagagccccccacaagagcaaaggaggcgggccacgacacgaagaacccaggaaacgcaaaaaggacgacaaagcgaaggggagcccgacaaaaaagagaccacaaccaacggcggaccaaccccgcaccacaacgcggcgcggaaaccaaagcgacagcacca

SEQ ID NO: 187316 - DNA, 237 bp, Arabidopsis thaliana
tgacgtccatgccctcgtagctcggatcggtcagtctcttacgtaccctacaagcaaatcttgtatctttatcatcatctctttcaaagccttaacacgagggaatacagcattttttaagaattgttgcatgttcagtaaagcctttcagcactactttgatctaaaatcttggacactcactgacgcacccgtgggatcagcatctactagactttaacggggtgtcccccatct

SEQ ID NO: 187317 - DNA, 210 bp, Arabidopsis thaliana
gatctctcatatatcacgcgtgcccatatctccggaatactctcacctctattcgtccctcttatttctcatcgtgcatcctgcctcacacacaatcacattcagatggcgtcatatctcgctctttcttcttttcctctctttgttctttttatctacgtaagttcaaactaatgagataccgctactccccatccgtatgagacgcag

SEQ ID NO: 187318 - DNA, 597 bp, Arabidopsis thaliana
gggggggcgcgcgcgcgagagcgcggagaggcgcccgcggctcttttttattatccactccacacgaatttacgccgggcgaggaagcctactaggaggagcgcgcgcagcgctccttttttatgcggggggcggggcgtacaaaaaacttagcacgcccagtcggtgtccgaagactgggatgcagtagtcgtaaccttggcatcggccatgccgcgtcatttcatatccgatgctctgtatattagtagcaagcacactaacaagatgtaaaatggaagcacaccatttcacagcggggtggtcccctatccataatcagctattcgcctcgttacgactacgtgcgaccacccagacagatacacatggtccgacacgccacttacttacagtacaccgcagagatcacattacgactgaactcgcatctagcaaaccggctccgtagcggctactacagcgactatgcatcccgatcacacctctgccatcgagattcgaaacttgttcagacgtgttcgcgtccgtcgacgcgtaccgtcacaaccacggcccgtgctatcgtagcagtagcccatacttcgtggcctacgg

SEQ ID NO: 187319 - DNA, 468 bp, Arabidopsis thaliana
  unsure (1)..(468): unsure at all n locations
cacacgcctgcgtaagcncggaccccatagagcggttgacacggggggaagatccccatatcaaacaacccaaaagccacgagggcagagcttttcgacagacaccgggaggcaaacgacaacgccaacgaccagagagggcaagaagacaacagcagaacacatattgggccaggcaaaccacacaaccaaccattggtgatagggggtggggagaccacccccagacaaacccncaaaaacccgggaaaaaagcggcgacgcggggcagcaaaacgaagaaaaacggaccaanccaaaaaaaccaagacagcacaggacgggccgacaaacacaaaaaggcgcgaggcgcacgggaaggaccgcaaggcgcaaaccaccccagggcacggagaggagaaggaaaaacacaacgcacccgcaggagacgacccaagcacgaacccaacagaccagaaaccgcagaaa

SEQ ID NO: 187320 - DNA, 652 bp, Arabidopsis thaliana
cccccccgacccccccccccccgccccgccattttctccgaccaagcccccccccacctttccgacgcgcgcagagacgcccccggagccccccggaggaccccgagccacaagttttccaaccgggggggggcagggcggcacagaaaaaaaccggcagcggcagagacccagcgcggcaccgagataggcacacgagggcgaaaaaccggctccccccccgcccggcacggccgaccaaggacacacgacagacccacccgcgcgcgcccccaccccaaccgccgcccccccgcagccccggcccgacaccaccgcccccacgaccgcctttctcacacggggggtgggcccacgccaagccacgcgccggcgcgaccgcaccaaaaactccacacaccgtgacgcccccaaccccgacgccaccacagtccacgcccacccaggcggcgcgagccagcgccgccgcgccccgccagccccctccagcccgccccacacgcacaggccgctccgagccgtcgctacgcaccacaccgccgcgctaccagaggggcgcggcccaatgccaccagacggcccggcagcgagccaggcgaccacgccagcccgccgcccccacggcccaccccccccggcgccgccaaccgcc

SEQ ID NO: 187321 - DNA, 415 bp, Arabidopsis thaliana
cgttactgtttgcgaccgttatgcatcggatcagtataaagataaacatatacatgcgaaagggacctggagttactgacaaaaaagagtgatttgggaggggtcggcggtaacgtcgtacacatgaataatatattttttaaggggaaccactgcctagcggagcgtaatatgaagatgtgtacacagcttctttacagacaactatgcatatttgtgtcttctctgaattacggtgcctctaatctattcattcgtcacatactcttcaatactctattggtgccgccggatacacacgctcgcttttcttacgtcaataaaactgtataccgttactaatttctcaacatacgtggagtattgaaagcggacagcacaactttcgcccatcacacgcacccttcttcacggt

SEQ ID NO: 187322 - DNA, 539 bp, Arabidopsis thaliana
cccccccccccccatttcaagacaaacaacacatcaccacaaacaaactcatccataaaccgaaatttttcacacagggggacaaagcgtcataaaaaacaacaacacaatatttacatcactaaatctcctccaccccccaataacccacccacatcaaatcccacacacacatcaccaaacaatcacaacaccacaaacccacatactaacatcaaaccaatataaaaacactctctcacacccaccacatttccaaggggggggacacccacacaacaccaccacccacaaaaaaacactcactatacaaaacttcacatccaccccaccttcaagcagaccatacacgcacaaaccattattaaaacccaaacaacaaccacccacctcatctaaacaactatacctccacaccacacccccattccaccccctcccacccccacactccaccctcccccctccataactcttcctcacttccctcttatactaacactacactattctctctcttcatcaactacaccccaccc

SEQ ID NO: 187323 - DNA, 346 bp, Arabidopsis thaliana
acatactcccccatcatatgtctaatgatcggcataatcgcgtacccgcgcggacgcaagcttcaccacgtctgtcgtacccaagtccgctctccgttcgagtatagcccatagaggagtccttcattaaggataaagataaggccagaagacccatgagagagactttctatgattttctctttccaaggtcgaaaggcgtcgcatggagtgctcctatatacgaccgttagtctgtatgttaccttggtcgcatcgtccttccatgaggtatgagactatcctttctgtctgctaggtcagtcagcagtcatataggtagggtgggctagtgtccgctcgtctt

SEQ ID NO: 187324 - DNA, 421 bp, Arabidopsis thaliana
  unsure (1)..(421): unsure at all n locations
cccccgccccccggcaagaancaccgggtatattttcaccccccgctggggccggccacccgggagggaagataaaaaaagtttcgaagtcggagacgacaaactgttacggcagacaaccatcctattctatagtctacggcaacgaaagacgtgtcagactgaagatatggagttagtcacagaggtggttagaccctgcaacatcttaacaactttttggtagaaacaggcaaatatgctcctattctcaaacagaaccactacgcaacaccacgcgaactaccctacaatcctagagacgcacggcgaagggctctcaagagagaccaacgaatgagagtgactaggtgaaataaaacacgcggaacgcttaacactaaaacgacgagaggactatcagcactacgcagttaccgtc

SEQ ID NO: 187325 - DNA, 111 bp, Arabidopsis thaliana
aaaaggtgtatgcacttcacgatcataacccgacccaagcgggattatttttgtataccccacccccactctttagggcgacacaacacagccacgagtaaagagcggacc

SEQ ID NO: 187326 - DNA, 363 bp, Arabidopsis thaliana
ggggagcgccaagaaagttttttttttttccaccacccgcgcggattagagggcaaggaggcgagggagcgcggcgggcgacaggacacggcgacgtaacgagacttgcaacacgaggcggagggggctcacgtcgactcccacccaccacacaccgccgtcggcgagcaacaaggcggcacaaagcactcgcgcccgtctagacgaaagacccccaccagggcgtacgtgggtagaaagaagagatgaagcggacaggcaccgcaagaccggggtgtgagcgacatattcgcaatatcaaggcagggagtgcgcggagggggggggagagaggaacgcacggcggggcccaccgcgacaggt

SEQ ID NO: 187327 - DNA, 317 bp, Arabidopsis thaliana
ggggaatgggcgaatccgcggcttttcagcggggggaaggggcacgaaacgcggtcgacgagggcaaccaggaggcgcgtaggaaagcgcgggagcgacgcactagaggacatgggctgtccgggagtgaggggccgacacgttagacgaggagcggagacgggcgcgtgggcagcggcgcgaccacacgagaacaaagtttttttacgggggggcatccgtaacgagtgagcccaaggcaatatcaaagatgagcaagaactaaacgaagaacggagagggcgagagaacggagtaaggaggacacgaaacgcgag

SEQ ID NO: 187328 - DNA, 374 bp, Arabidopsis thaliana
  unsure (1)..(374): unsure at all n locations
gggcaggcgggttttttttttttcactcccccccctttttagggaagaaacanagggacggcaagggcaagatgagcggcggctgattttccccggggggggggggcgccgaaacaaacccaagacgggcatcaactaacggagcacgaaaaaggaccgcggccgcgagcgatcattgggactcggctgaggctaacgcaaaccacgaagcagcgaggcgcccaaacagccgagattccgagcggagaccggtggacgcacggcgacttttttctcggggtggggccacgccgaccgctgcgacgggccggcccaatggacggtcgcccacgaacagtattcatgtccggggcccgccactcccgacggacaca

SEQ ID NO: 187329 - DNA, 544 bp, Arabidopsis thaliana
aacaccggggggaagggggcgcgcgcaagggacggaggaacggacccgacgtaacggccgaaccgcggagacggggagcaaccgccacggagcgcacgacaagacgcggaacacaaacaacgggacccagcgcgaaggcagagaagagaaaacgcgacgtagagacggccgccggagagagaagcaaagagaaagggacgagaagcccgaaacaaaagaagagtttatcgcaggggggggcacacccaagccgaaagccgacggcagcaaccacgacaagccccagcaccccggcggccccgggcagcggacacgcggagggagcaccagggcgcgggggagaacgccgggagacgaaaaagcggcccggagcggccaagacgaggcgaccggacgacacccccacgccaagccggccgcgagaccgacgacaccgacggacccgccggcggaggaacggaagcacaccgccggcgatgcaggcacggccacgcgcgcacccaccggcgacgccacggcgcggccaaccaaggaagcggagcgg

SEQ ID NO: 187330 - DNA, 540 bp, Arabidopsis thaliana
cgacaaaaactggaaaaacccaaagagaacaagacactttttttttacccaccccccccattttagccaacaacagacacccgggagaaaacaaaacaagaaaacacaatttttgaacaccgggggaggcggtagcacccacaacacccccagattaccaacaaaagacaaatataatcatcccacccaccattgtactcccacacagatgctcacacaaaacaaacacgaccagaatcaaataagcggaacagtaactacaatcaaaaactctaaaacaaaacaaaattttttaccggggtggaaaaaaacgcagccaccaccaccacaacaccaaccacaccccctaacctccggaaacacactcatacacccccctaccaatatcacaaaacagaataaaaaatctcacagccaacacacattagccacccccaattcgatattaagacactgagacaacatgacaaccacctcccctacccaacacaccccactatgcgccgatcctcaaacagtaccaactcccacacgccaccc

SEQ ID NO: 187331 - DNA, 544 bp, Arabidopsis thaliana
  unsure (1)..(544): unsure at all n locations
aaacggacaaaggaaaaaagaaaacgggaatcttatttattaacccccccccccagggctagagaaaagagagcagacagacacggccggaacggaagagacaacgcgaaggaagtccagaagccccagcaaaaaagtccgcaacagcggagcggaccgaacaggataacgaacgcagggaggcggggggaagggagggcacagcgcaagaggcggagacacacagcgagacacggacggacggaccagatcccgaaacagaaggggttcaaggaagagagcgagagcgagaaggagacgaacacacacggggcgcggagntgccataccaaggtagaaaaacacgcagcacaagtacggcagcagacacgccgcaagccccaggacacaaacacacaatacacgccgacaacccgccgaaacgacagacccgccgaagcggaaacgaaaacgcgagaaaaagcgacacgaaagacgagagaagagacagcgaagagaagacagaagagcaagacaggaaaanaagaaagagacggaacggaga

SEQ ID NO: 187332 - DNA, 582 bp, Arabidopsis thaliana
  unsure (1)..(582): unsure at all n locations
agaacgggaaagggaaaagaagnngggggggatataaatgaaccacccccccccggtttnnnnggggaacccacgcagacgggaaagaaggaaccgcagagaggttcaacgccgggaaaaagaccaaaaagaagaaaaacgaaacacacgaagagggccggaaaacgcgcgaggagagcagggaacacggagaccgcgaaaggcacagcgccgacggaaaagggagcgggggggaaggaagggaaagagcaggagacaaagagaccgaaaaaaaggtttttcagaggggggggcaagcaggaagagaggaaacggaggcagaaggcgcaacaaacgcggaacaaggcgcccggaagacgaaaaaagcgagaccgggagacggcgcacgcgggaaagcaggcccagcaaaacggaagaggaagaaaagaagcggaaacgagaggaggaggaggagaaccgcgaaaaggcgccagggcgcgagacggcgagaagcaaacagggagagagaaacaagagcgagaagcggagaggaaaacgagggggcaggaaacaccgaaacgaccgcaagcaggggagggggag

SEQ ID NO: 187333 - DNA, 526 bp, Arabidopsis thaliana
actcattttgggaagctcggcgcctgcggtacccggcccgaatattccggttggcccccgcgtgcgaacttgattcttaaggaggaaaacaatttatttttttgtggggggggcccacgctaaaggagaaaaaccccccctccttattgcggttttcttttgtgtggggaatgaaaagtttaaaaaaattgggctgggcgggtggtgtttccttttttttttaggggggggtgggaaaccgtgttttctaaaaaaaatcctttatgttttggaaaaccctttgaaaatggggggggagaaaaaaaatctggggggccctttgttttttttgggggggggccttctcccggagaagaaaatattataaacttgggggtatgggcccctccccagtcttttccccgggtgctttttgtggggaaggcgcctcacacaatttttttccccccccttttttgtgtgctaaaaaaacatcttatgtgggaaggagccccgccccctggggcttgcctcttctctatggggg

SEQ ID NO: 187334 - DNA, 544 bp, Arabidopsis thaliana
gcccccccgccagggaccccgggcccgcaaaaaaacagggttaaaaccacacgcacaaaggcgaaccaaaagaaaaaaacttttttttttttttctaattatataaagaaaagaaaaaaaaaaaaaagctgaaaataacggcaaccaaaaaaacaaaataatataaaaaaaaaaaaaaaaaaaaacaaaaacaatcaggagaaaacaatttttttatgggggtggggggaacaaacaaactaagatcataccaaaaaaaaaaaaacacccacaaaacaacaacacaataacaaaccaccacacacaaaaacaccgaaagaaacaaaaataaaagtgaaaaaagaaagaagaaagaaactacataataacgaaagataatgaggagctggaaaaaatatatgacaggaggaaaaaaacaagatgtagttgagcgagcaaaaaatagaagagtaacacagaaaaaggattaatgaagaagacactaaaaaaaaaaaagaaagaaagtatggatgaaggtggacgacacgaacaaagctgagaacaa

SEQ ID NO: 187335 - DNA, 551 bp, Arabidopsis thaliana
agaccaggaagagaaggggacggggtcaataatttaccccccccccccgttttaagaaggaaacagaaaaggagggaacatacgtagaggacgcgttttaacgtccggaattagaccgatgtgctatgacgatcatatagcccagaccggccggaaaccggccaccggtccttggagacaccgggcccacgaggcggttcgaagatattatgtattgaattgctctttttgctcatcgcacgatccaaccaaatggtactgtgtttttctagtggggcacacttgcgcagatcagccgtgaccctgaaacacgcactccccccagacaccgaacaggctagcacgtacggcgagttcgtaccagacgtcgcgcgcggcgctatgaggacgccgatcttattgaacgatctggggcgtagagctatttctttcggtcttcgatcgcacattcaagggaaacataactctctcacttttagaccataccgcacagataccaacgacatccgtgcagacggataaacacgactattctccatccacctcgcact

SEQ ID NO: 187336 - DNA, 332 bp, Arabidopsis thaliana
gtccaagaaaacgtttttttttcttacaccaccaccaaccttaagcaacccaaccaaaaacacctgagaacgatataccccccacaccccgtggtttaaattcgcgggggggagcacaaatcataaacaatacgagagattagtggacgcactccgcatacctaactccgtccaaaacaaaatgcagtaaacgcttgattcatagtgcgccgctcaaatcatcggctacaccaagcgaccacaacccgacacagagtcaggagagtgcacaatcacgaaaggattcttttcaggggagtttatagagaacagaagacctagctgccccccac

SEQ ID NO: 187337 - DNA, 378 bp, Arabidopsis thaliana
gcgaaacaggcccaaaaacgggaaaaaggaaaagagagggggaggtatataatgaacaccccccccccttgtgggggagaccggcaacgaggagagaagaaggagaaagaaaacgagttacccacgggggaaaaggccccaccggaagcaacgagcggaaacgcgagaaccccgggaaaaaggagaacgcggagagagagcaaaagaggacaaccaaaagagagagaacaagaagagagagagcagccgcaaggaaccgcagggacgggggagaaacaacggcaaaaaatttttacaggggggacaagacccaaaaacccacagaaaaaaaaaaaaacagaaaacaacaaaaaaaaaagaacgaagagaagagaaaac

SEQ ID NO: 187338 - DNA, 471 bp, Arabidopsis thaliana
cgggaaaaccccaaggacgaaggaaaagaagcgagcccccacgcgcgttatacccagcggggggagggcgccatagacgaagaaacgaacgaacgacggccggacagcgccaggaaaagcgcgagagcggagcacccgcgcagccacgaggcgagacgcgcgacgggcggagaagaaacaagagacaggcgagagccaaggagccccaccgggacccccccgccaaccacagcagaacgaagcagattttttcagaggggggagcgacaacaacacaacaaacgaggagaactaggaggaagacgagaccacacgagtcgacgcggcggcgcaaggcagagccgaaacgcgacaccggcgcgcacacgagaacgcacgacaagcgcgccaacaacggccgacccgaagcgagccgacagcgagggagcgacgcgaccgacggacgggaccggcacgaacaccacccggcac

SEQ ID NO: 187339 - DNA, 481 bp, Arabidopsis thaliana
tcgccacacaaacaaaggcgcgcgcggatctattttaccccccccgtttgggcaggccacacaacacggaacaagtccggaaagattcaaccccggacgactcatgaggtgataagcgacacaagggccgcccacaggcaccgcgccacgacgacagcactcgagaggatgcgaaaagatggaatcgggggaaggcgcagggcactcggtgccggggacgggtttttgaaaaaggaagcgaagaaagcgccaggccgaccacgcacccacgccaccccccagaacagactgactaccgcgctcgcggaggacccaccaccaacgatgacgaatgccacaccaggcaccgcgatagggggagcgaagcagagacaaaatgaacctcggcgtggacccgtgcggtgttacacccacgggcccagaaaggcacacgatactatgtcggtaagtatgcaggcttgacggatcaaggcttcgcgcg

SEQ ID NO: 187340 - DNA, 473 bp, Arabidopsis thaliana
tcaactatatgagtaagaaggaggagtttctttttttttcttccactcccccactcttctaccaagcgcaaagaacccacccgcgcagccagtgacactggtatctgatagatttttgtgtccgagcggggccggggcgcgctaccatttctacacataacgtggctcgcgcctaatggtctgcctatcgaagactggcatcaaacacgccatacaccgtcgtatatgcgctacatgacatgactataaatctctctttccctacattacgtagctaatatctctgcccacaaccgctccgcgtaaacagtaggggcagaacaagaacgcaaccgatccctctttcacataggggtagagggcgcggcaggatataacggtccgacagagtaccacatggacatatcttcccacgctctctcattttagtacgacataccgtcaaatcataaattggtcgcgcacttattcct

SEQ ID NO: 187341 - DNA, 372 bp, Arabidopsis thaliana
  unsure (1)..(372): unsure at all n locations
tccccccccccacggctttccngaaggggccggaccacgcggcctggaatggagcttttatagagccgtttccacgcgcggggtggtccttccaatcaaattaggagaaccgctgttgccatagcgacgcggacaccgcgcatctgttacttccgggagatgctccccaatagcagtactgctacatacgtactcataatttgtcttgttgaccgccctactatcattgtgccaacaacacgaaacaatttttccgtgcgtgggcgcgaatcagtctaaatttcttactttactcatgttgctttgctaccagcaatcaaatcaactgcgctactcgtatattatgtacacccattccttacttcctttagc

SEQ ID NO: 187342 - DNA, 605 bp, Arabidopsis thaliana
gtactattcctccccatatcactaactctgcagacaatgacttttttttttctcactccccccccccttctcgccggagcagccccccccacacacgaaccctgcgcctacatctaccatttccacccccaggggcgaggacccctcaaaacaaacaaacacaccggacccccgacacccccgataaatacccatcacccccaaccaccagcaccgccaaccgtcggccgcatccactcgcaccaccaccctcacccatataaccactcgcaccatcaataacaaaaacaaccaacctcacactttttttttcggggggtgtcccacccttactataacttactgcacttaaaatatcgtcaaatacactgatatgcaagacgtaacggaacctcatcttatccataacaccgcaaatataaacataacataataggtcaaccacaactatacacatccaatatgcgttacaacattaccaggcactactcccgactcacaacaaactccgtacaaaccactcacttctatcctacctaaaactaaaactctaagtcctacaaatactatcccttcacccccatcccataaataaacatcttacc

SEQ ID NO: 187343 - DNA, 522 bp, Arabidopsis thaliana
cccacacagggagagggagagaggacggaaaactatttttttacacccccccccgcgttagaaaagcgaccgcacaccggggacgaccgtgggaaacccagcacggtttgaccgcgaagggaagagccacgaaacagaaacgagaacggacgacacagagagcacccaaaacacagacagagaaaacgccggaagccagccagcacgacgaaacagaaaaacacaccagcggtcgcctcacaccgacgccccagaaaccaaaaaagacaaacaccagcaaatgtttttctgggagggagcgagagggcagcgagaacaaaggaggatgcaaatagagcagaagcacgcgcggaggaccgccaaggcaggcgccacgggagcgcggacgcgcgcacgcacgcacggcccgcgccgacaacagcggccaccacagcgcacgcaaggcggacgaagacaaacacagagaggcagccgccccggacggcgaagaaagcaccccgacagaaggacacgagggagaag

SEQ ID NO: 187344 - DNA, 471 bp, Arabidopsis thaliana
  unsure (1)..(471): unsure at all n locations
ccacgggggcaaaggcccggccgaaaacacaaaacacgctccgagaacnaagcacaagaccgccaccgacccgagagacaaacaaaccaccaacccaactaacaaccgagcccccccacccccatacccccacacttaacgcaaccccaccaaccccccgcaccacacacccacaccagcacatttttccaagggagggcacaaacccgcagtcgcacgcccaaaaaaaaaccccctctcacaccaccatcactccaacaaccccaacaaaccaaccccccaaaaccaaacccgcatgctatccaatctaacaccaacaccaagacagccaaaccacaccacgccccctcaggctcccccccaaacccctaaaaacaaccaaaggaaaaacccccaccacaaccatcacgacgaacctacaagacacctatgccccgctctctccccccccccccaccacacccaccccac

SEQ ID NO: 187345 - DNA, 387 bp, Arabidopsis thaliana
  unsure (1)..(387): unsure at all n locations
ttttttttttcccctcgccccccccttttctnggcccgacaccaccccgcacaccacgtcatactccacaaaacatctccccacctttttccaccccggggggaaagtgtcccccaaaaaaacaaaacataaactctctatcacccccatattcctctccagttatacctccatatccactctgtcattctcctaacaccctcccgcaccactggttcatctatacataattccatctcattatatattttctttcctacttacccctatcattaacaatctctcaataactataacatcacatacatttcttatcgaggggggtacacctcccattactataaacactcctacccactcaaaaacacatcattcattatcctccta

SEQ ID NO: 187346 - DNA, 463 bp, Arabidopsis thaliana
  unsure (1)..(463): unsure at all n locations
ggagccgtccctcagtccggcccgaattccgttcnaccagggtggggcgcgtacaaaagtttaccttttcttttttagggtttgtctttgtaagagggaacaaacataccacaaacttggattggaaattaaactgtcaatacttaaactcctattttttaggggggggggatnatctcactggttattccctaaaaaaaatccgcggttctcttgttacccaaatggttccggtaaagattttggaacccccctcaaaacattcaggagccccaattccttccgccaattttttgtttggggcgcccttaatttttgcttcagaaaagggggtaaaacttttacaacagggggcccctcctaagggggtttttcccccttatactgggaaccctttgttaagggggggtggggaagggaaaagaaaggttcctttttcctttttacccctttcaacacccct

SEQ ID NO: 187347 - DNA, 448 bp, Arabidopsis thaliana
  unsure (1)..(448): unsure at all n locations
tcccccaattcccctttccaccccgcgtccgcctaatcataactaaacttcttcctcacccacaaaaaactacttttntcaacctctaaaaaaattttccccatctcantattgtgatatcctccctgccccttttaaaacgagaaaaaatccttcccaataaattaattttttaggggggggcctatctaaacactttcccccaaataaaacctctcaattctcnaaaaatttccccccccccctttttttcattnaacctcantatntttttttcttcctccttaacacacccaatttnnttcacctccccccccttttttttcttttaaaaaactaanccccctttttttttttttttaaaaaaaaccttcccaaaattttctttttttttccctccccctttttttttttcccataacccaacatttttttcttccatcctctt

SEQ ID NO: 187348 - DNA, 581 bp, Arabidopsis thaliana
gcgtgcgtaagcttggatcctctagagcgggcgcccttggttttttttttttattttttaaaagaggagctcaataatttaaacatatattttggacacacataatttgaataaggatattcgcccccatccaatcactaataggggtacattcattaccccccccaaacttaaaggaaagagagaaaagaaaaacacctacattttttatttagattgcgggatgggcaaatgacttacttagcggtccggccaaggaagcgtttaacccccgtaacttcgaacgaaaccacaaattccgggaattccggtatcccgggattccaaagacccaaccaagtttgtggaaaagcacttcctctgagtcctcttaaaaccccaaaggtaaaagatcccgcaggggtagattccccaattatcttcaagggggaatattttggaaaatagcctctatttttctccaaaccataccaatatacgaaacccggttaattccgggtaaaactagtgaacaaaccagccataagtgttttgggctaaaccgtgatttttatttatgcaccctaaagtgtccggggggg

SEQ ID NO: 187349 - DNA, 484 bp, Arabidopsis thaliana
gcaagacagcgagcggcgcgcgaccacatagaagaataaagatacgggagggcgcgagcggcacgaacacggcaggcccgcccggcgcgtgcacacaccccgcgacacaagcgcgagagcagaagaccacgatttttttttcaggggggggtgggacaccgacggagaaaacgcgcacccgagagaccaaagcgaggacgccgcgcaggcgcggacgggagagagaagaggcgtccgagaacgtcagcgccgcaacgcccgcgatcacggacgaaccagcacgaccgaagatatggcacagcgcgtgggcccggccacagccagcgagcgcgccgcgaaaggcccacgcgagccagccggcacgcggcagaggccgcgcgcgagagagcgagggagagcgagaagagaaagaggagaggcccgtgtggtgccgcccagaggcgcggggcgagcacacccgcgccgtagacccgcgccgcagcac

SEQ ID NO: 187350 - DNA, 206 bp, Arabidopsis thaliana
  unsure (1)..(206): unsure at all n locations
acgagagggtgtgcgacaaggctttgggggccgatgtgccggtcacccacgagacgcgggcgaattatcggggggcacgggacacggagaggagtatgcaggaacgctaaatntatcatggtacactaatgagtaacgtagtgattcgagtgagaaacacgaaaagctatgggggagagtagcaacagtagtggcggccgatccag

SEQ ID NO: 187351 - DNA, 676 bp, Arabidopsis thaliana
  unsure (1)..(676): unsure at all n locations
aggggggcgggaaggggggggggctcnttggtaacaaccccccaacagtttcttgggggggaacccgagtagtgggaggggcgggagacaacttataaagtttttgacatgggtggggaatcccacaggaataggaagggacgtaggattaagatgggaagagtgggtttgggcgcatggaggttatgtcagaatcgggaaggggttgtggggatgaagtagtaaagcgatgatagtaggcactccgcgcgcccccgtgtttatggtcgcagaggtgctgggaggaggatttttttttatggagggggaggagagaaccccgccgcgatactaattgcgcgtacggcgntaatgtgtatatggaaaacaaaggcagacgagagaacgcttttcagatcgcgatagagggtgtgggggaggtgaaagtgatctagaatgagaaaagagcagagaggagtgataaaaggagcgagtgtcaggaatttgaggagacggatggtgcgctcggagagggtgttgttggagacgagtataaggagtgagcaggagacagaggatgaagagataagaggaatgggagtggagtggtttaagtagtgaaggagaagataatgaataagtgctcggaaggaggaaggtgatgtaaggcgggagtagagagaagagaaagtaatag

SEQ ID NO: 187352 - DNA, 401 bp, Arabidopsis thaliana
cgtctcatattagaagtcccccagtccgccgatcgtcacaggtcggcctatcaaccaacctacttaagtataccaaattccttttgccagaaataaacgaccaaaaaacacctcgggggtggaaaattttgggggggcccccaccaaaacaaaaaacgccaccccacttttttttcccccccaaaaaatggaacttattataaccgattgggccctacttaaaaccatttttccttcggttcaaccggggggggaaaacaaaatccctttttttacgcccccccctttttttttaggagggttggaattcagtggggggccccccttgtccccgggggcgtaaatttaaaaaccctcctccttttttcgactcaactttagcaaaaaacggcgcggaagaa

SEQ ID NO: 187353 - DNA, 325 bp, Arabidopsis thaliana
ctcacctcaccaacccgcccgataaccccccccgccccgccgcgataccgtgggctaccacctcttcacaagaatttatgggattattacattcactgcctccgctaagcatttggttcctttatcaaccggccggccctcagtttgttttctcattatatctcactttcgtctttttacattctattcttattcgggcgcccaaaactaacacttttgtggaggaaaagatgtaacaaacccatatttttcgcataacacaattttcgcttatttggcgcattcacgcacccccccaaattgcttgtttatgagcttctttttt

SEQ ID NO: 187354 - DNA, 544 bp, Arabidopsis thaliana
  unsure (1)..(544): unsure at all n locations
ccaagctacaatacccactcactttaanggaaagctcgttccccctgcaggtaccccctccccaattcccctttccacccacgggtccggatgaatcatacaaaactctttcccccacccattttcaaacacctcaaaattaaaatttttccaatccaacgagactcttttcattttttttaaaaaattaccccaccggggcctaaaaaaaggagcctttaattcaaaccctcatttttcggggggggggagaaacaacttttaatcccctaaaaaaaaaaaacccccctttttccccataattccccccaaatacttttttaaaaaaaattttcccatcacaaaccctccccccttttcccacccccccttttctcaaaaaactcttaacaccccttttttcacacaaccccccctccaactcctttttttcttcgaaaaaaaaaaaaaacatttatattcctcccccccaacccactatgtggcccaccacccccaaactcatacccacctctcaacttctcccccccaccaccaaacacta

SEQ ID NO: 187355 - DNA, 613 bp, Arabidopsis thaliana
gggcgcgggaaaaaagaggagagcgagatactattttacaccggggggagagggccaggaaaagaaggggaagcggcggagacgcccgggcgccgagcgggggagtaattgattgtgtgtgtcagggagcgccccgcggcggaggagaggcgagaggacagaccagagaaaaaggggaacagagaaacgccggaagaaacccacgacgagtttttttatcacgggggggtggcagaacgacaacgagaacaagacgtgtggaaaagaactgacaccgagacagcgaacgaggcgagagacgcggcgcaaacgcagatagaaccatgccctcaccacagtgcgcggacaggactagcgcacggtgtagggcgcaggccgcacccgtcgccacgaggacacggagtacgggcacgatccgggccgaggcacgagcggtgggcgcgatgcgcgacggcgcgaacgtaaagagagaggagagaaagagtaaagagagaggaggtggaacagagggtcgtcgaggagggacacgacggccgggcgcttagaccactgagccctaagggccaaaggtcgagagcggaggatcagggtgcagcacgagcacgacaagcat

SEQ ID NO: 187356 - DNA, 492 bp, Arabidopsis thaliana
  unsure (1)..(492): unsure at all n locations
gcacgcgtgcgtgagcttggatcctatagagcggtcgccctttgtttttttttttaattaataaaaatctcatttaaaaagattgtacccgcggaagaagttgtcaccagactctacgaaagaccaacaacacgagcccttgttttagtgcctgggtcatttcgcataaaaggggaccttgcgtctataaacttttttttcaaaagcgggccaccaacaaggggtccataagctacattcgggtttggtccatccgagataagccccttacacccatttttggctcccgggggtggcatcacctgggatttgagctcctctatgaggcacaaattttggatattatttcaccatatccccacccaaaagctaattttttttcgggatttntccctaccatgttaacagcctgagaatcacacgaaattttttgtaaacagaagggttaaaagagtctgggcactgcaagaaagttcctttaccccagggggg

SEQ ID NO: 187357 - DNA, 506 bp, Arabidopsis thaliana
  unsure (1)..(506): unsure at all n locations
cccctgccggtacccgggcccgaattcccggggttgacccacgcggtgcaggggccgcgtaaaaataaaaataacccaaaactttttgccctcttctaaaaaggatcccccattggaacattttgaagatccactctacccccctgttttttctttttaaaacacaaagtggcgcgcaaaaccacaaggccaaaatggtggttgctaacaggcgggctcctttggggggggtggggctacacccccttgagccntcccttaaaaaaaaacccaccccacaccttttaccaccccccctccacccccaagaggggcccccactagtaaaaacaccccgctaagtggcacacaaaacgccgtttgtccctccctttcgcgaaacccgacaagcgcgcgggcccgccagcaacccgccgcggttcttcgggggagcgacgcctcgacctcttaacagagggggcgcgaaagcttgtttttctttttctttcagaggggctctcccccca

SEQ ID NO: 187358 - DNA, 480 bp, Arabidopsis thaliana
gggaaaccccccaaaaaaaaaaagaaaaagcgaccgcgaccgacgagacgcaagggagaaacaaagaaaaagaaaaccccaccgcgcaccgacacagaagagccgagacagagggcagccagaccccgccacaggcgcgagcgacaaccactttttttcggggggcgggcggacccacgcgcgagcgagcaccaaccacacagaacaaaacgccccaaacgcgcaacaccacgacacacaccagcacacaccgacagcgcgagcgccaagagcggaagcgccatgaaaggcaccaaggcgcacacgagagcgccccagcgcgacgagacacccatccagcggacgccacacaccgacctacacacccagacacacccacgcaccacccgggcgcgcgccgaggctgcggagaaagagaatagagtagagatataaatgagaggagtggcggacgacgacacaccagacgacgacgacgct

SEQ ID NO: 187359 - DNA, 516 bp, Arabidopsis thaliana
gtaagccttgggatcctactaaaagcgggcgcacctttggttttttttttttttttcttttttgagacacacaaacgcatttatatgcggcactatatattggatacctgggggatgaaacccaacaaccaaataggtaaccggaacatctttattcttcggtcacttcgtgcgcggaaaagggctctccaattaccaagaagaacacagaaacacacaacactttttatttataagaactctctttttgtgccaggggggggggcggggcaagtctcttcaagacgcgtttttgggagacaacacaacattgggattcttttttcgcgaggggggaaggaacaaatcttataaaaataagacccaagccctatctataatcttcctgtgaagaaggtgcttgtgtaacagcgggctcattttaagaacaaaaaagagagactctggacgtggggttaaacaccttgggaaggcaaaaactacccaatgtcgctctaataagactcaaccgcaccc

SEQ ID NO: 187360 - DNA, 522 bp, Arabidopsis thaliana
  unsure (1)..(522): unsure at all n locations
cccctcccggtacccgtccgcaatttcccggttcacccacgcgggcggggcccccacacaaaaaaaacaaaaatnaaaacctccccctttctcttccctcttttttttaccaaacccaagaaccggggctctctctcccccattcaaattcccccctaagatatccaacacacctgactcttttttatcccatccccccaacttttttagcgcggctggggcgctctttttccctctcctctttttcaaaaaaaaaaaaccacccttttttttggggcaccctcccccccaaaaaaaatcccccccccaatttaatctaaatttacgcctcccccccccccccccctgaggagaaaaaccctttcttttttatcggcaaaaaaaccccccccccccttttcacccaccaaaaaaaatagggttttctttccttttgtccgtgggccacaccccccattaaccccccacttcactttccgccccccccccttttctttaaaaaaaacccccctcccccccacg

SEQ ID NO: 187361 - DNA, 546 bp, Arabidopsis thaliana
gcacgcctgcgtaagcttggatcctatacagcgggcgccccacgggttagctcttttttttatctcctataaagaagcaagagttgggacttttgtctttgggcccccccccccaaagaatttttttatttgaaaaaaaagggaagaaaaaattgcttattcccccacgacgatgggcagataatgattcatttttgcccccgcctttttttaaaaaaaggggggagaccagacgggagagggggaccactcggagccatctgggcaacccccctttttttaaaaaaaaacacaaaggggcgggggagcgccccctgtttcttccccccttgggggggggatagtgaccgtgtaagaggaaaccgtgaaatttgttttgtcaaaaaagtggttttcttagagaaagccgttgtacacaaacattctttttgtggattaatggaagtttttaagagatttgttttttttttgagaaagcccacccattcgttaaggaaaagaggattaacaaaaccttatttgtggggggatatgatataaccagag

SEQ ID NO: 187362 - DNA, 471 bp, Arabidopsis thaliana
cttggggtaaaaaaaccaacaaaaaccccgcgttttttttttgcttttttccagcccccgaaagacaaagagaagggccctccactttctccatcccgggggggttatttattaggggggggtgggggctccttttcttcccccctcccccccaaaaaaaaaaaacccaccccgggggagcccgcaattctctgagaccccgccaacccctaatttctccaaaactcctggggggaggagggggggggtcctcccttcctcccgggcggggtggcgggagcctaaaaacacggggcggcgctgggaatagaggcccccccgcaccgcaagaccaccacggggggggggggggggtgtttgggggaggaaaagaaaccaaaggggcggagagcgggtggggcccccccggcgcgggaggggacggcgcggcgcacgcggggtggtgatgggccataccgacgggcgcgaacc

SEQ ID NO: 187363 - DNA, 525 bp, Arabidopsis thaliana
cccgcacgcgtacgtaagcttggatcctataaagcgggcgaccttttttttttttttttggagataaaaaccgacaacggatccgcccgaaaatgttcccataagagggggaaacattcaaagggaaaaaggagacaaaaaaaaggacctaaaatggccggctcccttgcgggctatcctaaatttcacagcagagatttttttttggtgggtgacccccactaaagaaaactacatccatatcctcatacttattaaggaagaataccgcgtaagggggccctcgataatcaagtaggaggaagtaggaccccctgcaaagtaggttcgcgggggatatacaaaagctttgttcaacaggggcggaactttttaaaaaaagtaggctgggtgtctcctgggagcgggccgaataacaactacttggacggagaaaaaggcctgaacaaataaccctaagtcaacttaaagaaatgggagagtctgtggaagggttccgggtgttacaaacaaaaaacaccaggg

SEQ ID NO: 187364 - DNA, 580 bp, Arabidopsis thaliana
  unsure (1)..(580): unsure at all n locations
gaaagctcctgcccctgcaggtaccggtcccgaattcccgggtcgaccccggggtcgggaattaaaaaaaaacctacaacaaaccccggctttttttttttttttatggggaaaaaatatccggctggggggccccccccccccccggggactggcccccancctggggggggaaaacaaacctcccctgcgccccgcgcttttttttttgggggcgcggggacaaanaaacccccccaacccccctcaacaaagaaaagggaaagggtctggggcgcaacccctcccgccccccccccacagagggaggagaggacaccctctccccccgcgcgggccccgcctggaatataaccgcggccgcttacaagcagagaaccctcccggacccccaggatcgctctctcctccgcgcccgaaacaaaaacaaaccgcgccgggaggggggggtagaaaaaaaaaactgaacacatgagagcgggcccgcgcacgcccccgcctcaaaacaaaccgcaacccccccccgccgcgcctctcctcggtgccgccacacagaaacacaacgcgtccctgccgcgcc

SEQ ID NO: 187365 - DNA, 170 bp, Arabidopsis thaliana
caagggggggggaagcccataaaaaaaaaatcaagaggaataaagaagctcgaccacgggagctaaaaattattattagcgaggcgggctcccacaaatagaagagagaagccaactcaccacaactgaccccccacggcgataagttgtccgcaaccattttttttttg

SEQ ID NO: 187366 - DNA, 348 bp, Arabidopsis thaliana
ttctttttaaaaaaaaacatatagaacccgaataaaataagatgggtttatagacggagaggggggaatcgctttggttttcgtcttatagcgacaaaacaatttatctcgggaacaggaagaaacagagggggcattttctaaaagaaaaacaggggccccactttttttttaaaagggcgtttgagagaaaaaaaaaaagcccttccaccttctcttacaaaagatttcaaaaggggggtcaatagcacgccgagtgtggggcataaaacaacaaacggacataatttctttaataagaaaaaaaaagaggggcgcgggcccttagaaggagaggggggaaaaaca

SEQ ID NO: 187367 - DNA, 509 bp, Arabidopsis thaliana
gacgtcgcacgcacgcgtgcgtgagcttggatcctctatagcggtcgccctttttttttttttttgagcaagctgccttgcagcgataggttcataactaagataataatatttaagtggtgggtcgctactctatagcatctccagaatacaaaagatagattgactatttcgccgctttaatacacggtttcttttgaacaaacaccatccttgcaagaaaacaattttttttaattttctgggagatgcggccctaaaaatctgcaatctatcatcccgtaagagaccgaacatatccgaaccattgacgggaaattatttcacatcttggaagcggaagaaaaacttgccatggccacccgtggaaaaatataaaaggcgaaagatctttgaaagaagagcccccaagggggcctggtaaaagaaggcaaaaaggggttccctttcccccccaaaaactaaaaacgcgttttctttggaaaccgggggggacctccaatagctgg

SEQ ID NO: 187368 - DNA, 537 bp, Arabidopsis thaliana
  unsure (1)..(537): unsure at all n locations
aggaaagtcctccctgcagtacccgtcccgattcccgtgtcacccagggggcggcccccctacttacannntnaaaaaaaaaaacaaaaagggcttataaaggaaattttcttctggcggcgccggaggtttaagacccggcccttacaccttaaaaccataatatccccttggaggggtgaagattcctttcaaaagaaataattttttcccgggggagaagggaaaccaacacaaatttttggtttcccaccaaaaaaaaacctctccannccccccacccccaccacaccccccctaaaatttttctaattcccaaaccccccccccatatttcccacaccaaacaacaatccccccttaatatcccaaccccccattctttccaccccccccacttcctcccaaaacaccactctttttaaaaaaacaacattccaataaaaaattnctctccccccttcccccccctcacccattcctcctaccaccccccccctctctctctcttccaacccaacatccctccaacataac

SEQ ID NO: 187369 - DNA, 455 bp, Arabidopsis thaliana
cgagggggggcaaaacccccgcaacacagcataaagagactcgcaccccgacctaccgcaaagacctgaatttttttacacgaccactggcccgcgcaagacataaaaattcatgagacgataagacccacacacaaccccgctaataaacaaaatacaaaccaatttttctaaccgggggagcacacgcgccaaacacccccacactgcaaccacaacacaccacacccagtcccacccacaactcccgaacacgggcatcggcctaacaccacacgacgtgacaacaccgacacgaccccccatacatccccactctcccctacccttaaaccccgggagccactattcgacccgcgagaaagataatacaaactcacgcgtaagacaaagccacgccaggggctagattagaaagaagtaagctgtagaataattagagaatcgaagtaaac

SEQ ID NO: 187370 - DNA, 188 bp, Arabidopsis thaliana
  unsure (1)..(188): unsure at all n locations
gggggagaaaccgagaagagacgagagcggcagncgacgtcgagtagcacacaccgttttccaaacgcgtaccgacgaatgagtcccagggcactcaagcgccgaataccgtaggaacgtcgtgcacacaacccgacgacacttcgtacgtagatagcgccctgctcgcaggatagtaggacagcaaa

SEQ ID NO: 187371 - DNA, 555 bp, Arabidopsis thaliana
ggaacccggacgagaatgtgagaacggccgtagcgattatgacgcggtttggagaccgtggttgaagatatctttataaagaaagtggcgagtcgccgacgagtacactgggtcgtgttgcatgatgtatcgctttgcacacactatgttacgtgatctgtttagatgtactcactgggattctcgttactgcgttttacgatagtgtcgtcgggccgcccaaccccatattaatgcgagggagtgggccgccagatttttttttttaggagggggagggagtgaagatgagagcgataatttctacgataacacatcatcacctcgtatacggtgcatgcggtattcgtgataacttaaatgtcttgttgatgatgtgggtttattatatgtgttgcttagctcactcgtagtcgtccttcagcaaatactactgatctaaactttgacgtgtaggtaggtgattggataaggtgtgaacgggccatctcagtggagaactaggaattttcgcgttggacattcagaattaataccgcgctatgtagttttgct

SEQ ID NO: 187372 - DNA, 394 bp, Arabidopsis thaliana
cggggggacaggccgtaagaggatcgaacgaagttttgagaaaatgcgactgactatcatcccccacagaacagggcccaatccatacagatcaaaaccataaactaacagaatctaattccacgagaaaaatatcacaaggagcggcccgccgcaaatcaccaaaaaatggatcactagcgatttttttaatggggggaggggagccaccccttttcatctaaagccaccaacatcaatcatccacgccacaagacaaaaaactgtgaaagcacccccaatacaccaccgacaagacaatatcgcctcttcaggaccgccaactgagcggagccactacatcaaccatttaccaaaaaaggggagcgagggatgtagcaccgactcggggccg

SEQ ID NO: 187373 - DNA, 411 bp, Arabidopsis thaliana
ggagaggagaagatgaagtggaagccgccccccgcccgccgacacggcgagaggcgcgcgagacccgccggccgcgacgcccgtgcgccgcgcggcgacgccgagagaccctttctttttcgggaaagcttgcccgccagagggagagcggcgcggccgaaaaaaaaacccgccccggcgcgggcggcgcccggacagcgcaccgagcggacgggacggccagcgcccccacagcagccgccgaacgagcgcaccaaccgcgccctccggacccggaccgctctgctcgaagggccgcgcgcgccgccgcaaacggagaaggagcgacgccgcgcgccgcgcgcaccgggcgagtagagggaaaagacataaaagagggagagagaggcgcgcgaacgcggacgagacgct

SEQ ID NO: 187374 - DNA, 610 bp, Arabidopsis thaliana
  unsure (1)..(610): unsure at all n locations
accactcacatatatggaaagctggcacgcctgcaggtacccgtcccgaattaattcccttgttccacgggggtcagtggccaataaacaaccttttttttttttttttggagtgagaacgcctgtcaattccaaaaccaaaaaatattcacatcacccccgagactgtggggggttgttcaaaacaggaataaattctttgaccattaacacctaaccccanaacccaatatttttattacagggttggttggggccncccctcacggggggtggcccgaaaaaacacaaaaaaacaccacatttcttcccctccctggggggggacccccccccctgtgcttataaagactaaacacatccctccggccccgggcgaaagcgtttttttttttctctacccccgcaatctctttcgcgcggggggcttggcgatcattcccccccacacaacaggaaaatctccctcccaaacacccaccttttctcttttgtgggaaggaggagagaggctctcccagagaaatgggcgcaccctcttcttgcgcctcccgccttaaaagggaaacccatctcttagaaaggagagacgcgtctttcgcaaaacgcc

SEQ ID NO: 187375 - DNA, 557 bp, Arabidopsis thaliana
tggtgccgtttccgtctttttctagttcgggggttttcctacagtacataatcttcccctcttcgcccgttgtgtatacgttaccacccgaccgttagagggacacgctgggctttaagatatcatgtgaccacgcgcataattacagagctgccgttatccgccacgttctttcgccctcgctcctgtcctttcgtcgttagaggcttttttttcttgtggtgtttttcggaaccacgacgcgctcgctatatgataaaaaagtaccgctttgtatgtcgtcaattgtgtcttcttttcttcttttggtgcgcattctcacgcttgttgttagatgctagtgaattcctgttcttatgttcctgctttcttttcatcttgtccgcttagagcctttgctccgagttaccggctttcccagttcacatccgcactctttatgtcgctagttaacggtactgttattcggcatgtaagctccctctcgactctggcgtctcttcacctcgttctcgttgctcgtttttgtcgtttgtgtgcggcgcgatactaggact

SEQ ID NO: 187376 - DNA, 202 bp, Arabidopsis thaliana
ccctcttgttttcttcaagagcagaacagacggcgccgtgctgtatcctggtggacattcgcgctcgtcacttttttcttctcacgggggggtaagagtttagtcatataaaatatcgttcgtccgcgtcttcgcattctcacttgtctcacgctctcacgtctctgggagtgtgtctagcctcacttttatgcactatcct

SEQ ID NO: 187377 - DNA, 284 bp, Arabidopsis thaliana
  unsure (1)..(284): unsure at all n locations
cggggggttgagggcccccctaaaagaaacccagcccccnccaccccccgcttaccagatagatatgtcttcctctcgttggcggtaggcgcggcccgtgagggggagccgcgggggggcgggggacggcgccgggcgggtggggctgcgcgcaggtccgtgcgcccgctacgccgatacgggccggcctttttttacggattgtctggggccccgcccacccaaccggccgcgcgcgagaaaaaaaaaagcccgcccgggtgaggcccaagatgagtcgcctc

SEQ ID NO: 187378 - DNA, 449 bp, Arabidopsis thaliana
  unsure (1)..(449): unsure at all n locations
aaaaaacaacggccaccccacacgccgcccacaagcacaacgctncgaaccacaaccaccagctacaaaaccagaaacaaggaggggcgccaactccccccccccgaccccaacagcataaccaaacaaaccgcagaaccaaaaacacctcccgaccactacacgacacaccgaacacacaagtgacacccacacaagaagacacacacgaacgaagcacgcaccagcactccacccctcgcacaacagagagaggagggaggctacctcaacacaaaacggaaaaaaagaggaaaagacacacgcaactacaaacataaacaaacccaagaccatcccagccccccccctcccaggacatcacgcccctaccgaaaacacgcacaccaagaaaagagtacgatagagacaaaaccaaaagaacaaaccacccgaagacacaacaccga

SEQ ID NO: 187379 - DNA, 238 bp, Arabidopsis thaliana
tgctgtttaataaaagtcgtacgtcttcttattgataattctcacaacactaattttagtagttcaccaccattatccccctctcactactcttcacttcaataatcatctaatatacttaccttccataatcacctttaacttaatgtatcttattgaggaggtgtgttttgttactctcctcatctttcctactaactaacaataaatataatatccccattatcgctcttattcc

SEQ ID NO: 187380 - DNA, 501 bp, Arabidopsis thaliana
  unsure (1)..(501): unsure at all n locations
atcgactgactttagggagctggtcccctgcggtaccgggtccgagattcccggtcnacccaggggggcgggtgtctataaatatctaantatcancaaaaaaacananatttatagggagagaaaaaaactgtggctgacataaagatgtaacagagacagggggataggcccacttccccaccaccgaaggttggatcatcatcataatcatcatcatgggaggggggggcggatcataacggggggcccaattaaaatatacagcgtntggattcttctacctgctcctcttccactggcttagggataatctctactactgggaaacgtaactccgaacctaaaaagcctccctcttaaagaacctttactaaagaggggacccccaatgtgaggggggagggccgtntgatcccgattgctggcatgggggctgaacgggtttttaagtacaaggggaggggggggccaaaggcgggggggaacgtggggaggggg

SEQ ID NO: 187381 - DNA, 715 bp, Arabidopsis thaliana columbia
  unsure (1)..(715): unsure at all n locations
ccccccccccccccccccactttctccccccccccccgctttccatctttttttttttttctttttttcccccctcctccccccccccccccccccccccccccctcccccccncctcccctctccccccttttcccccctttttgttttgttttcttccccatcacacccccctcccctccccccncncccccccccccccccccccccccccctccncccccctccccctcccctttccntccccnccctccccccccccctccccccccttcccctccttcctctcctctccctccccccccccccccctccccccccccnccctccttttttttccccggttgtgggtccccccaccccccccctccttttccttcttaacaaataacccccccccttccctcctccccccctctccttctccccccttctcctccccccctctcttctcccccccccctttttctcctctctctcctcttcctccttttcctcttcccctttccctccctctcccttcccttccctcccctcttttcctcccccccccctttccccctttctcccccccctttctcctccctccctctccctctcttttcttctcccctcttcccctccccctcctcccctccccctctccccccctccccctctcttccttccccctccctctctccctctctcctccccccctcccctccctctccct

SEQ ID NO: 187382 - DNA, 629 bp, Arabidopsis thaliana columbia
  unsure (1)..(629): unsure at all n locations
cccccccccnnngtttcccccccccccncttttctttttttcccatttcttgaacttttttcactccncccctcccccccttcctnnncnttcnctccctcttaccccttccccttttttggtttaatttctttttatactcaacatnccccnnccnccccccccccccnccnnncccnncccccccncccccccccccccccccccccccccctcccccccccccccccncccccccccccccccccccacnnncatcccccccncccccccccccccccctcccccccctccctatttgggtagtgggcccccccccccgggccccccccaaaaaacaccccccccccttttccccctcctcccccccccccctccctcccccccccccccctccccccccccctccccttccttccctttccttccctccccccccctcccttncttttccttctccccccctcctcctccccctctccccccctcccccccccccccctccccccctcccccccccctccccccctcccctcccccccctccccctcccccccccccctcctcttcctctcctcctcccccctccctccccctccctccccctctcccccccccccccccccccc

SEQ ID NO: 187383 - DNA, 406 bp, Arabidopsis thaliana
  unsure (1)..(406): unsure at all n locations
gctctcattacccacttcacttttangggaaaggctcccttcccccctcccccggtaacccccgtccccaaaatcctccggttttttcccccgggggggccggggggggaaatacaacacaaaaacggttcctccgttccaaaaaaacacccaccacaaaggggtgtaacatcttccgaagtgtttttcaacatttttttctgtgatcatatttactcccacgttcttgggaaacaaatgggtttccaacattacccaaacattattgttgctttttctcttanaccccctttctttttgagggggggcgggaattntctctcttttaaaccttcttttttacaaaatataanttntctcttcaaaacgttattttctcttccccctccacccctttttcttcctc

SEQ ID NO: 187384 - DNA, 510 bp, Arabidopsis thaliana
cacccaatttttacaaaaatttgccctccctcccaatggggggcgatcactttccctcaagtttttcccatttgctgaataacggatttctgatcgtcccttaaaaaaaaaaaatttaattccctaaagcccttaacgtgagactaatatttttgtgggggggggggtttccacaatacgagaggccggcaataaaaacaaaaaaatttttttcttttttctttttcttggaacagcctcttgctcttcccttatttattgtgcgaaaaggaaatttaaagaaaccctcacatcatttctcttacaaaaaaaataaaaaaactttccgcccctcaataaaaaataacatcccacaacctctctcccaccgctttctacaagtttttaaaacacatgcccgtcacctttttgttttcaagacttcttcaaaaaaatttcacaaccaacacaccgtttaccttccgcgaatatttatttaacgtattcttcgggggttctgtaattttttca

SEQ ID NO: 187385 - DNA, 558 bp, Arabidopsis thaliana
cactcattttaggaaagcaccacccctgcaggtccggtccggaatttccggtttgacccagggcgcggccccctttcctttcgttgttaaaaaaccaccgaagggttcggcttgttaaaaaaactaccaaaggtgctggctttctaaaaaaccacccagaggggccccccttctttgcgtcgtaaaagaatactgcgggcttcaacaccttggacccctttttctttttgggggggggggtgttcatctcggcgcttcgtgccttcaaaactattggcacttccctccacatccacaaaaaaaagtccccacacaagaatcaactcttgccctcttgtatagcggtatttcgttctcgcggctcttacgtcgtcttttaagaaaaaattctaccctactcgtcgtccttcccgtgagccttgactgactcggtgcacctactttcgcctaccttttcctcctatatgatataattcggtccgcctcctactgttcccgctctcttgttgtgtaccatcggtacgctctcttaccacctttttgatcgtcgatacgaca

SEQ ID NO: 187386 - DNA, 634 bp, Arabidopsis thaliana
gacccgaccccgcccacgcaagacgcgccctacaaaaccgcccacagacaaaccgagacacgagcaagagagcaccaaacgaaagaagggagacgacgtttggcagagaaaacaaaaacccacaaggaattttaaagagagggaaaaagacccccaaacaccaggccgagaccgccgcagcggtggcagcgacagcactcaacaaccctctaaccacctcccggggaagaggggaaaaagcaccacccccccacaaaaaaacaaaaaaaaaaacctcccgagggggggaagggtgcgaaagggagacaatgacggacagcggcaaccagccgacaaagccggccaatagagggagggaagcgagagacgctagaagacagggcaggacagcgcagagaagacgcaaagcaacgcaccacgcggggaacgcgctccaaccaccaaggaacgaaagagagtcggacagacaatcgaacacatgacagacgaaagagcacgaggacgagaaccacgcgaacaggcaaggcagacgggacacaacaaaaaaatagcaacatacccaaaaggggggggggggaggggcaccaaacaaccacgacaaacgaagaggggggggggagcggacgaaccagga

SEQ ID NO: 187387 - DNA, 389 bp, Arabidopsis thaliana
cgggggggggatcggcaaaaaaaaacccggtcctctccccggtgtccctgcacacgcgagatagcgtaagacgagacgcgcaacagaatccaaagacccgcgaccgacctagctcaatatgcgacaagatcaccgccacgcccactccgatcacttttttttttggggggggcgccacaaccaaaaaccgtcagcgtaaaaaaaaaccaggccacagtgacgcggcatccctcgcctatgtagtcgcacgcctccacgcatcagagctgaagagtacgcccgacacatgaaccgctcattcaccattacaatgcacaacacaaggactaacttacgctgcagcatccaccgcacgcgcgccacaacacccgcctgccgggacggtttcg

SEQ ID NO: 187388 - DNA, 428 bp, Arabidopsis thaliana
cccccatcggagcccaacaattcaggccgcccacacgccaccccccaggggtgcgagaggaatgcacagggaagactacgtagccgggcgagttgaagtcggagtctcgacacggaaggacatttttttcgggttgttgggcaccacaccaacgcacccagagaaaaaaaacacatagcctcatacaccgcctgccgcgcgcacatagcagcccccgcgatccgccgccctctatacaacgctcccggcgacgacacctgcctgacaggcgatatcctccgagcccagaccacgactacacggcccgcgatgccaccgtcacagcgcaaatgtcgcagccgcccaccgtggatcgtacacgacgcaccgcgcaccccccaggctgcgagcgtccaacaccgcacccccctcaccaccgcacgtacagg

SEQ ID NO: 187389 - DNA, 530 bp, Arabidopsis thaliana
  unsure (1)..(530): unsure at all n locations
cccccccaatcccgccccaacccccccccccactatccagnacaactcccccattttaccccggggtaagcgcccaaaaaaacccaccccnccccccgaaactacatagaaaacccttcaacaccataacctccatatacacattacacaccccacaccttcttgccacacccgtctcacccattccaacccccccaacccaccgccacccctttttttttgggttgttggccccncccactcgccctccccaaaaaaaaaaatcacccgattgtctaacttccccctccttcttcatctttctctcacacaccccgatcctcccaacaacattaacctcacaactactaactatacacctcactactactcccgcacccactcaaccgtcctactcctgctctccactcctaatgagcttatctacaactgccacccactctaccaattaccgaaagtacgccaacacccaacaacccaaacaacacgtcacacctatatagaacaaacttgatcacaccacccgcccc

SEQ ID NO: 187390 - DNA, 664 bp, Arabidopsis thaliana columbia
  unsure (1)..(664): unsure at all n locations
ccccccgccccccccnctcccccccccccccgccgcggggattgcgttctgggtgcggtccctctcgcgggttttttcggggcccccccggccccccctccctttgcggctttcgtctcttctcttcgcccgctttccccctcttgggggttggtgttctctccatcccatcttccccccctctcccncccccccttttttcccacccccccttccctctcccccccccccccttttccttccccccccctccctttccccccccccccctttcccccccctccccctcccctccccctccccccccctttttccggggggtggggccccccccctcttggtctcccccccaaaaccccaccccccccccccttcnccttcctccctctccctccccccccctcttctcttccccccccccccccctccccccccccttttctcctcccccgcccctcccctctcccctcccctctcttctccccctctcccccccctccctccccctcccccccccccccccccctccccccctcccccccccccccccctcccccctcctcccctcctctcccccccccctcctcnccctctctcttccccctccttcccccttctccccctctccccccctctcccccccccccccccctcccctcccccc

SEQ ID NO: 187391 - DNA, 558 bp, Arabidopsis thaliana
  unsure (1)..(558): unsure at all n locations
ggggggggggggggggggagggactagccaaggtgacaaaccgacttgaccttagggggaaagcctcctgccccctctcatgtacgccgtcccggaattccccggtgtccacccccggggggcggggtaaacaaaactaccaaaaaaaaaaccccgaaaaaccctttcaggtctcaacctaggaatgggaaaaaaaaaaatcgcctgccgagtccttttccgtgctgctttcctaaccccccttttggctccaaagctccgaaccaccttctccataacggggggggatnnnacccctccaaacttttcccaaaaaaaaacttctttacattcaaccttccccttttccccccctcnccctaccacttaaactataccttttctattcaaaccaaaaaaaaaaaacaaccgccgccccccctcaaaaaaccccactcttaccttccctccccttcaacctcactacccctcctctacccccccccaaactcaatcccctctccctccctttcccaaactcacaactaaaaaacccctcccctcccccaccaacacccc

SEQ ID NO: 187392 - DNA, 471 bp, Arabidopsis thaliana
  unsure (1)..(471): unsure at all n locations
caccccccccaccccctccttcccttttagcccgaccctccactctctctccccccctctttctctccccctaagtcgccccgcgtccctcgtcccttctcattttcgttcgcccaccgcctcctcacccaccacccggcactccccagcagctttttttttcggggttgttttggcgcaccnccaccggggcggcgctccctccaaaaaaaaaccccctccaccccggcgcccgtcccttctcctgtctctttctctcttctccgcacccccccccattccgactcccgtcccgcattagtctcctctgcctcgttgctgcccgcatcttttgcacacatgtcacatcacgccccctctctgcttgcccctctactgctccctccatctcccttcccctccttctcttacgccactccccccctccctcccccccccttctcggtgatcgcgccgcccccctcgctcccc

SEQ ID NO: 187393 - DNA, 147 bp, Arabidopsis thaliana
attagatcacttttcaagcgaggggggggagaggcccttgattctaaaaaatctccccccaagcctattaagacgagatatactttcttatcgtaagaggtaatctccaacttacgtgcttaccgtgcgaccgcgtacggtagcttt

SEQ ID NO: 187394 - DNA, 426 bp, Arabidopsis thaliana
aagaagaagagaaaatctgttagttacaaacccctaattttaagggagagtgcccccccctccgagcgacacgcgtcccaaattttcatgtttcacccaggaggggggggggcggggttaaaaaacaaaaatccttcttacttaaaaagtttctttcttcttttcttttggaaacaaaacccgacattttgcccacgcgttaacaccgcgaaaatagccgaccttgctatacctctgcctttaaagcatgggcgctctcgtcaatcaacactctttcattcgggggggggaatctccaaccccgttttcagaaaaaaaaaacaacccccccgcgttctccccgtttccagctcctccatataaaaagggtgattacactacctctcctatgacgcctctctcctctcctctcggcccacgcgcccc

SEQ ID NO: 187395 - DNA, 539 bp, Arabidopsis thaliana
ggaactcccccctcagtccgtcccattcccgtcccccggggggggattgaaaaaaaacctacaacaaattcggggttttttttttcttttttatggggcccgaatctctggcgtggggtggccctcccccccatcgggcgacgtcggcccatgtactcggttgccccgcttccttcgctgagctcctggctttttttttgggggggggggggattaacaaaccctcgcgaccttttcaccaaaaagacaaagggtttttgggacaacctcttgcctctgtcgagctgtatggaaaacttgcatttcctaccaccgcggccccctcgggttggcggcgggctttgcccaaccttgacacacgtctggctcaaacgccgcggcccttgtttgatgcgttgttaaaacacaaagcgtgcgtaacgttccctcaaaatcaacccggatataacaaacgagtgggggccgagcagggcccccggggagtgaaacatataaacccgcgcgcgtatttgctatcggttcgccgtgtagaaaaaagt

SEQ ID NO: 187396 - DNA, 516 bp, Arabidopsis thaliana
  unsure (1)..(516): unsure at all n locations
gggcggtgtctcgtcgcgttgcccccgctcgcctagcgcacgttcctccgcgctctggcgatggcggcggctaccccgcctgttctcgttcgcgggtcgcttggtcttgcatgtctgcacctctccctcctcgccacccgcggcctctttttttttggcgttcgtatgggnacccaacccgcgtctcggtccttcgctgctacaaaaaaatctccgcgcctgttctccgcgacttccccgctcgggccgcgccgtcgtcttccgcctcctcccgggctttggcgccccgcgccttgtgtccgtgggcggcggcggctcgcgccgcgcgtccctccgctctcgctccttggcgtcccggatcgtgcctcttatctgcctccgcggctcctccctcgctccactctcccgcccaccgcctttccgccgcggcctccccctgtgcttgctcctcggcgccagtcctccccccgcgccgacgcctctcccgtcccgttcccctccttcccggcgctgcgc

SEQ ID NO: 187397 - DNA, 545 bp, Arabidopsis thaliana
  unsure (1)..(545): unsure at all n locations
ggaaagctactacgcctgcaggtacacggtgccggaattctccgggttttacccacgcggcgcgggcgtgatgggtttttttccatacaccaatcancactcaacgaataaagtacccaactgggaagaaagaacatcaccaaggggagtgacagactttacaaaaggcaacgggagaatggtgttccctttcttccaccgaaaaccacaaaggaaaagctcctattcttttttatatttgcgggggggggataaaaaccccaaggggtcggaaaatcaaaaaaaatctcaaaaagggtttcttcaaaaattaggggaaaaagaccattcgaaatcggccgtgaataacggcccggaacaaaatttccgttcgatggaaaaggggccttcgatggggacaaaaaacccgccccctgacttggggggaaaccgcggttttcggagctttgcgctctcggcagagcttcaacgcctccggaaacagcacccttcttatttatatatccgcctatcggggaccggataccaaaataccttaggaggaa

SEQ ID NO: 187398 - DNA, 539 bp, Arabidopsis thaliana
  unsure (1)..(539): unsure at all n locations
gtaaaaagggggagtactcctacttcaaaccaccaccaagggaaagctcctcgcctgccagtaccggtcccgaattcctttttacccagcgtacggagcagctaaaatcttcttaacttagtcccgatgactttcctacaaacacctcctaaaaatctaattgttcatgtttcttgagttaaaaaacctttcttttttccctcttccacaaaaaaacttggtttatttttttcttaggggggggcnncaaagaagaattttcttttaaaaaaaaatttcccccccccaaagtttcttttaacacaaaatttttcctcccccctcctcacaaaaaaaaaaatccctaagccccccactcctttgaagcttttttcttctcttttctcaaaaaaaaaatcctgtgcaaaaacccacttttatccccttcttaattgcactatctcccttaaaacctccccaatcacctccatcctttttgtctcacaatttttctcctccttcaaaacaaaaccacaatacataaaattcatattttttaa

SEQ ID NO: 187399 - DNA, 409 bp, Arabidopsis thaliana
  unsure (1)..(409): unsure at all n locations
ggggggggggggggggggggggacctgcgaaggtttcaataccccctggacctttaggggaaagctccctcccccctcccaggtacaccggccccgaaattttccgggtttccacccccgggggggcgaggcgcgttttaaaaaaaaaatctaaaatttttctccccgcggaaggttccccccccaccccaggcacccttccctttctctacttgcttgtggtgttcttttcttgggcgcgcaggggggcgtttaccctcgtgttgccttgctaccccaataccacaaagaaaacgtcgcttttttcttttccccccttttttttttggggggggggggggttntttnttcctcggggctgctttccctccaaaaaaaaattttccacgaagggttgttgggagggcta

SEQ ID NO: 187400 - DNA, 425 bp, Arabidopsis thaliana
  unsure (1)..(425): unsure at all n locations
gggggaaccgggccccccgtcttggggcgccccgggcggcgccccctttcttccccgccatgttgtggtgttttacttaccaaaattccccccccccctcccctcgtcggtgttttcccctctcgcttggctgtgcggctcgtgtcgtcgtctgtgtcccggtcgcgtcgttctgctttcgggttgtgccgcttctgcgtttcgtgctcctgccccgtctgcgtgcgcgccgcgnaagccgcggcggctttttttttttgcggctttgtttttggggnccccnccccccgggcgcggccgcgccgcggcacaaaaaaacgcgccgccgcgcgcgccgcggtgcccgtccgctccggtcttgtccgcctcccgcttcttctcctctcccgctcgttgtgtgccgcctgtctcccctgctccgtttc

SEQ ID NO: 187401 - DNA, 225 bp, Arabidopsis thaliana
  unsure (1)..(225): unsure at all n locations
acttcctcgtcctcattctccactctcctaaaacaaggacacactttcttcccttttttacattaagacaataacttactctttttattatcttctcatcaaaacttatctatttataaaaataaaaatcnngttcttattaaacattctactttattaatacttctcataatctatcatctcaatgttatattcataactttttaaaacctttccatacaaatt

SEQ ID NO: 187402 - DNA, 330 bp, Arabidopsis thaliana
ctacctccccccccccccacaaaaacaagaaaaaaaacgttgattagtaaacaacccccccaattctactaagagaaggaccagacctccgagatccgcaccgcacctagtttgctctttttactgtaggggggttaagccctgaacaaataaattactcttttccgcccccctcacgccgagacctactcttttctctctccgccaattgttctctaccttctacgtcccacaaaccacacaccctgtcgtcgcacatcctcacccatctttctcttaaccgcttctctccttactctcctctcgcattagtacctattttctcttttt

SEQ ID NO: 187403 - DNA, 299 bp, Arabidopsis thaliana
  unsure (1)..(299): unsure at all n locations
aatttgcgagggaataaaaaaaagaaaaagccctaacacctcaagccgaaaagagggngtggaggagaaagaaccccccgagcgtcctgttcgtctcgcgaaaaaaaagaaccccctcaaaaacgaaaacccccgcgcccgctccatttattcgactaggccgttaaacgcgggaaaagaggcaccccttatgcgaacctccccgcccgagggcacgctccccgcataacaaaccgaagaacaactccccataagcgggtctgacacaacactatacgaacacccacaccaaggcgccc

SEQ ID NO: 187404 - DNA, 476 bp, Arabidopsis thaliana
  unsure (1)..(476): unsure at all n locations
ccccgctttacccccagggcaaaaaaacaaataaaaaattgncgcatttcgtttcccccacttttctcttctcaacattctttttatactcttaatttcccctccaacccaagacgaaacttacaaaaattattaaaaaatcctacccctttttgttccctctattattgaaggagggggcttattacaccccccattttaaaaaaaaaaaaacctacacntttccctccatttcttcccccccccctaccaacaaaaaaccacccctaccacaaattccctaaacacacaccatttatctcacttcacactctctaaacacccccaaaaccaccaacaccctcccaccaacttctccctcttaaccaaaaaataaatataacacacctcacatcccctcccaccaaaaaaaacacactcctatcncaccccctttatttacttcaaccccacctcataccctacacccacctccc

SEQ ID NO: 187405 - DNA, 526 bp, Arabidopsis thaliana
  unsure (1)..(526): unsure at all n locations
gggggcgggggtaaaaaattttccttccggctcttctaaatttttggttgggaaaaaacccactcaaagaagctctcattatttctgctccgtttggtggttaggggggcggctcccctttaccccggatcctttttctcccccttctcaagggggggaagggccctnnnaaaccaaggtaacccctaaataaaacaactattcccccggttttctcccccgggggtttttcccctccaccgggtgcctgtttgggccgggacgggggggggtgtttaaatccaaaactcgacccctctcgcgcagggcggggggggcgtgagtnccttcttcccccccaggaggggcggcaccgccttccgcggccgccgttttctttcgggggggggggcgcgcccccgcctctagcttccctgcgccgttgagggtcgcgaggcgcggcacggcgtgtcccgcgggccggtccgccgcgttctgtcgtgcgcgcgcgcccccgccccgctcctccttcgcgggggagggtttt

SEQ ID NO: 187406 - DNA, 519 bp, Arabidopsis thaliana
  unsure (1)..(519): unsure at all n locations
tttttttttttttttttnggattttagactcgctctnaatctcccaaacccanaaaaangcattccaacattaaaaccccaacccctaaaaaagggcctgcttccaaaacaagataattaattcctttcccccctaaaacccctcaaacccaaaaacccacttactcttaaaagcaagggggggccgnttccttccctcaaggtaggttttgagccaccaacacaccggaaaacccttgttttttcctcccggagaggttccccccttccccatttctcaaataaaaaaaaaccctccttcantaccaagccaagccttttttttccattcctaccaccgctattccttttcaacaagggggctcccattccttctcccaaaaataaaaaaaatttcccctcaaaaaacccccctccccccccctcccccaaaaaaacccccgcccacccaaaaaaatgggccccctttcactttcttcccctctttaaaaaaaccctctcctttaaaaagaaaacccc

SEQ ID NO: 187407 - DNA, 376 bp, Arabidopsis thaliana
gggccgggcgcgggggcgttgaatcatttggggacgggggggcggcgcttttggcacgcggacacccgcaccgcggggtgcgccgacggacggccgcccagctttttcccgcgcggggggtttgttgcggcccaaaaaaacaccccccccgcgcgaccggggctcggcgttgtccttgtcgagtcatggcgccttcgccggctggcgccttgcttgtggctcgccttccggcgcgtaccccgacgggcgtctgagccggcgctcgccttgcgccacgtcccggcgggcggcccagttcttttttttggggttgttgtgtgccccaccccgtgccgggcgcccccgcgagaaaaaaaaggtccccccgctcctgctg

SEQ ID NO: 187408 - DNA, 434 bp, Arabidopsis thaliana
cgcgaggggggggagaagggacgtgagaaaaaaatgctctagcggccctatgtacgcacgcaggcttaagacagataatgcgccactcgaaagtcaagtacagtattccctaataaacacgctctgccagcggctctcctgctttcagcctctttatcttgtacggtagcaagtctgttttttttgggggggggttgcaacgcgtatttccaaaacaaaataaatttaagacaagtgatctccattatcgtcgcctgcatcatatgatccatttggtcgcaattactcattctaccgcccctcccccctaacatttcgtcactttccatacctagcaaccgacgctatctactctctcttggcgtaccgtgcctcagacctggggcccagtaactcctcttactgcccgaatgaccactccaccgtacgtacgt

SEQ ID NO: 187409 - DNA, 412 bp, Arabidopsis thaliana
  unsure (1)..(412): unsure at all n locations
tttcttccaatccttataaacaaagaacctggaagaatcctttcaaagggaaaaaaaactaaaaatggccactcttttcaacaaatttcaccaggctgttggaattcttcccagacaccgggttttctaaaaaccccaaggcactacaaaaaaaacccccccttaccaacttttttttttcccacctataacccnnttnaaaccaaaaccttanaaacctatccaaaaaaaacccttnacatcgcttgttaaaccccccttttttctgaacccacaaaaaccctttcccaaaaaaccctttcccctcccacaatttcaaaatcctccccctctcttaaaagaataacactcctcctctccctatattaaaaaaaaaccaatttgaagtacccattaacaaacccctttttcc

SEQ ID NO: 187410 - DNA, 483 bp, Arabidopsis thaliana
  unsure (1)..(483): unsure at all n locations
tataaaaaaaatatttttttccataaacccctacctttttacaaaaaaacatatnaactcttaatcttattccccaaaatgtcccccattccttttatacataataccactaaacctttaattcccactacaaaaaagcattttcctaatttttttttttgggaggaagggacaaccccccaggggtctatataaaaaaataaaacacaatgtttcttggttagtcttcccatttttttactcaaacccccttgcacccctagagcttctcccgctaaaaaacacccaataaatccgttgctaaacaacctcttctttcctttaacaacccctctcttctcttctcccataccttatttttctcaaatcaatcacctgtttgcttccttaactctcttctttctacaaaaactattttcttattagaacctactaacctttcatttttatacccccctttctacaatcctttttgactcttac

SEQ ID NO: 187411 - DNA, 523 bp, Arabidopsis thaliana
  unsure (1)..(523): unsure at all n locations
ctccgtcggggnaggggggaaaaaaagggggggggggacctattgggggacgcttctccaccctatggggggggtccggcccccctttggcgtttgccgctttttaaatcttctcncccagcgcttgagggcggtccaatttaaaattttttcgcttcggtggcgtctcggctcccggccctctcccccgcccgtgctccgccgcgcggacggagcgcgccttcttttttttttctcggtctccaggagcgcccgagcttgtccgccctctttcccccctcgttctcttttttgggggcgcgggggttttnttcccgggggggcgntctcaaaatacacaacacccccctccgcggctgcttccctccttctccccccgcccggtcttgggccttgccggtcgtctccggtctcgtctttctcgttcccgctcgctcgttcccctcgcgcgggttcgcccccgttgccttgccctctctcccgctctctcttccgccccctctcccgctcttcccctggccgc

SEQ ID NO: 187412 - DNA, 417 bp, Arabidopsis thaliana
  unsure (1)..(417): unsure at all n locations
aaataaaatacaaacttaaattaaaaccatctcccaatttcaaaacaccttcctctaatttcttttnnccccatacttttttttttctcgagggggggaaaaatttcaaacgtttttttaaaaaaaaaaaaaaaaaaaaaatttttcctttctttatttccaacaaaaaaaaaacacgtccgttcctcccaaccctacacaacttcacaatcttcaccttcaacaccccatcccattctttgcccacctcccaaaacttttttactcacaaacatttccccttttatatccacccgaaaacactccctttcccccccccttctttaacccccccctcccaattttcaccccaacaacacaacatcctttacttctacccccccaccccttttccttccaccctcctcccaaaaaaaa

SEQ ID NO: 187413 - DNA, 312 bp, Arabidopsis thaliana
  unsure (1)..(312): unsure at all n locations
ctctttaaaaaaccccataaaattccaccagtccttcttgtcttttttttttattttccctaaaacacaaaccctctacgcatactgtttcttttttttctttgaccatcttttacacaaaaaagatttaagaatcccccccccccctcctccttagntcgtccttcccccagccataagattacttcttttctttcttaggatcttcccctttagaaatctcactccccctctcaaaccccccttttttgaacaaaacatccctttacccctccctttctcagacactgtaacacccggtttttctccaaa

SEQ ID NO: 187414 - DNA, 440 bp, Arabidopsis thaliana
  unsure (1)..(440): unsure at all n locations
tccctttaggggtggggcttttaaattatatttaaaaagagaccctttcttgaactttcccaccccctggggcccctttcccaaaaatcacaaaaggcgttttaacacattgggcttatttggttttggacaattttttccacctataaaaaagtcctataaaccaacttttttttaaaaagggggggggggttctcctttccccggggcgactnaaacacaaaaataaaacaaactctccgtttgtcactcctttgcggggcgggagcgttcttttcttttcctcaagcactacccatattacagggcctggtttttgtctattttgtatttttcccaagggagctattcttccccccttttcttctcccaattacaaaatgagtaataatctcggcgcgcttgtcgtggcgacaagagaaaacaaaaaccgcctcctt

SEQ ID NO: 187415 - DNA, 262 bp, Arabidopsis thaliana
gaggggcgggcatctttccggggggccacccgcgcaggaacaagagccggggcacgggcgtggaggcatggcgatccccgcggtcgggctgctactacttgccggcggatgcacatgtggcgggaaggaggatgagcagagaaaaattttcttccacacgggtaagtagagacacgtaccgcgaaaggcacccgacacccgtcgagacgtgcgttgagcccgcccactctaccagaatcccgcggggggaaaggaatcgccg

SEQ ID NO: 187416 - DNA, 514 bp, Arabidopsis thaliana
  unsure (1)..(514): unsure at all n locations
agaaaaacggagagcgcgtagagagaaggtaggagaagctaaaaattcttttaaagcgagggggagaaagagcggttaataaattaaaaattattatgaagatgaatggagaggaatgagtgaatgagggtggggatttagataattagatatttgtgtcatttgaaagaggtggagaaaggaggggggattagaatagagaaaaaaaaggggagaaagagaagaaattttttttattgggggggggggagaaaagaatgagggggaggaagaaaagaaagaaaaagagatagagaaagtggaggagaaagaagatatagtagatagaggtagcaaaagaaagagaagagagagatgcgtagaagaaagaggaatgtgcaggatggagaagaagatgttgaagaaagggagagaaagagaaaaagagtaaacaagaacaanggaaagttcagacgaggagggaattaagaaaatataagaagaatgaggtgcagataagggtgatagatagaaa

SEQ ID NO: 187417 - DNA, 670 bp, Arabidopsis thaliana
  unsure (1)..(670): unsure at all n locations
caaggggaggnagaaaaaaaaaaaagggggaaatagcctacttaaggtaacactctccccaaaacctctgaaccttcgcatccaccccccttcccttaacctttngatccctcctaaaaacctttccccctttagaggttttgttttttttaaaattatttttttaaaaaaaaaatttattttcattaatcacaaattcctaccaagttctttcaattttccctctttaaaattttaaacccttccctcccacccttttctttcttcctactgccttttaactccaaattccaaaaatcctttttataaaacggggagagggcccccctttaatgaaaccccttttcttcacataaaacacaaaaaaccaactttttttttttccaaaacccccccctcccctctttttattacacccttcatcccccccccaaattctcccacccagactcttttttttttcgccctccctttacccactcacaccttgtctttttatcccaacaaacttccccacccctaaaaaaagccccatccccctcttctctcccctttctttcaacccctcccttcacccttttcaaactccccacanaaaaaccccttctttaccctctcttaccccacaaccccacttccacttcccacccctccccccccctctatttaa

SEQ ID NO: 187418 - DNA, 441 bp, Arabidopsis thaliana
atctaattgtgggactacctcccctcggcgccccccccgtggacgggttgtaaaacattctctcccaaccaaaaccattttttcttttcttggtggggggaggcggggccataaaacaaccgctggttgcctttcgcacaaaaacaatggagggggggtggggcccgcctcctgacggacacccccgtctaacggcgtgggcgggtcgaccgctccctgggagaactcgttcgccgggaagttccctttctgctttgcccctggtggaaggtctccgagtgcgtgagcacgcttcgcctcgcccgaacccagtgggtttatgtttttcgggcggcggagatcgcgttcgtacgtggggcggtcggcctgggagcccgccggcggtgggagttcggcctccttgctcggccgcctgcccgcatcagccgcacctgcgcgggg

SEQ ID NO: 187419 - DNA, 532 bp, Arabidopsis thaliana
  unsure (1)..(532): unsure at all n locations
aaaaaaagaagggggggcctgttggggaaccccctcccaaactctngagggacacgcccccccccctaaccttgaccccctaaaccttcccctgagcttagggccttaaaaaaacaaaaaaattccttttccttcaaaaaaattaacaaacctgctttttcaaaacggcaaaggaaccttttctcccttaaaaaccacaaatttcgcgaggaaaggccgcaaccctcccccatacccttttttaaagggggggggttctttttttgtggacacctctcaaaaaaaaaaaacctcctaaactcccccttcntcccccccccccccctctnacaaaccccccccccccaaaataactctccaaccacaccttttctctcctacaacaacatcacacccttatacctccttaaacaaacccttcccactcaacccccaccttcccacctactccccaccactatcacacctctcaaaaactccacctccaccctcaactcctcacccccccaaacacatccaccctccccacatc

SEQ ID NO: 187420 - DNA, 330 bp, Arabidopsis thaliana
ggggggtgtaaagaaaatatctgggcctcctttgcggcccgtctgtgggtacacaaaactcggggccgccccgcttggggcgggggggggaaaaacaagacgcccgcgtttccctcacctctaagaggcgggggcggtttttgcgccacaactcgctttcgcgcggggggggactaccccaccggggggggggggggtcatattaaaaaaaaaaaagtgtttggagaggcgtaacgagatcttctgcccaggccgccatttgggctttaagcgccttggctttgagaagggccatttttccctcgccgggcgggggacccctgaccggat

SEQ ID NO: 187421 - DNA, 634 bp, Arabidopsis thaliana
aaagtatggcgggacaaaaaaaaaaaaagaagctatgaggtaacactctccaaactctgaggcgcacccccccctccctaaccttgatcctctaaaacgtttccccttgagtttagggctttaaaaaaaaaaacccatttaattttcataattttgggaaaaccctccccaaaaccatatattttcacaaaaagtgtaaccaaattcttctcgggaaatcactttttaattacaaaaaaccaatgcttatacatgcgatacataatcacaaacttttcttaaaagaggggggttattttaaaaaaaaaaacctttttctcaaaaaaaatcatcccacacacctctttcttttcgtttgttttcccaaaaaagcacatttttcgctcctgaaaaaaattcgcttttcccccggtccaaaacggaattcagggcggtatatcctttctcttccctaaagggcgtttaaactagagcacaggccttaattgcagttggagacttctttatcctaaccacatacctccccaccttcggtcttggagacttcctctttcatacctatgcaagaagagctagcttctctctttttggtgtcttccatccagcgcaaaacctttccccctattacacttca

SEQ ID NO: 187422 - DNA, 528 bp, Arabidopsis thaliana
  unsure (1)..(528): unsure at all n locations
agaaaaanaaaaagggaagaaacgctacttaggtgaacactctccaccaaacctangacgttcctatccacgcctacctaagcttggatcctctanagcgttttcccttgggggtgagccttaaaaataaaataccacaatggatcacccttaaattttttcccaaagatggcggaccttcccaagtaaaaagggtttaatttgaaaaaccctagggacttgggctccctttccgttttttcttaatttaacaacaagaattttttttttgggggggggggttaaaaaaaccggcgttcctttcataaaaacaatgaagattttttcgttttaaaggccctcacccaacgttaaaaggaattgcgctctttggacaaaatcgtggaggggttaaacccaatcggtccagtgaccttttttttatttaaagcttctgcgatttccttgaggctcgactatttttcttgaatggaaaatagttttttttaaccctgggaactcctttttgcatttttgaaggtgtttttt

SEQ ID NO: 187423 - DNA, 510 bp, Arabidopsis thaliana
  unsure (1)..(510): unsure at all n locations
gatgtaaggagagaaaaaaanngggggggctcgttgggacctctccaaacttttactggcaccccccttcctaaccttggtcctctaaaacgcttccccttgagtgttgggtcttttttttaaaaaaaaaaacctctttaccaaaaaccctgtttttccaccttttttgttcctacatgtgggccccagcgtgaagggggggggtcccaagacccaacccttgaaactcccccctaaattaatccctttcttatggtccatttgaggggggggggacttaggtgtgggggtttcttaaaaaaaatcattttcacctgcgagggataaattcccccccgggtttcaaaggcttgagcccaaaagggggttttaaaaacaaaacccgcttttttcaatcttttaaaaccttggggttacccctttgccctcctaggcttcttccacccccaatatgtttggggtgtccctgccccctcaacgagagacgcgggtttcttttttcattttaac

SEQ ID NO: 187424 - DNA, 580 bp, Arabidopsis thaliana
  unsure (1)..(580): unsure at all n locations
gggggggggtcccgcccccccccccctaaagctttgtttccttttaaaccctgtcncccctgaggcttgtgcgtttttcacnaaaanatttttttttttttttctgggggttcttatccgcgggggcgaaaaaattcttcccccttttcccgccaactctccttccttcctaaaaaaaaaaacacgtcccccgcggcctcttttttttttcaaaaaaaccacaaaataaattttttttcttttggggagcaggggcccccaccttcgggggggttttaaaaaacacaacaccgcccgcggcttctctccctcttttgccccccccccccctgctgtatccgggttctgcccttctcgccccctctctcctgggagattcaccgcctccctcccctcttgtcgccccccccgtaaacgcccctcggctcttcccgccgtcctccctcaccaactctcgtctccgtcccccccctcaccccctcgctagcccgtctcctctcacgctcgctcttcgtgcccgtccgcgccctcactcctctttctcccccgctccctcgcctccccttctctcctgctcccc

SEQ ID NO: 187425 - DNA, 430 bp, Arabidopsis thaliana
  unsure (1)..(430): unsure at all n locations
tttttcttttttccgaggtggggccttttccctgtttaaaattcccctcttttttatgacgagggggtggtgtttgtttttacggcctttgttttcctgcggttttcctctacgaccgggaggttggaaaaattttttttttgggggaaagcctgggtntttacataaggggggggggtcttttaaaaacacaaacgtgtgcgctcctcttcctttgtcttgngcgtgcctcccttcgcgcggttgggcgctcccccctcctctcttttcgctctcttcctcgcccggtcgaaaggtcggtgcccgcctttggcgcccgcgtctcttcgctcggcgtgcggtgcgccccccgccgcggctctgcttccgagcgggagacgctcttctctcttctttcggggccgtcgtgcccctcgtttcgcgccccgcg

SEQ ID NO: 187426 - DNA, 494 bp, Arabidopsis thaliana
tacctaagctttgatcctctaaaccctccccttagtttaagccggaaataaatacgacaatgatcacctgaaatgttccaaaagatccagaacttccaaagtaaaaaaggattataaaaaagacctaggtgggtgcctccgttccgttttatcctaattttacaacaaacattcttattttttgtggaggggggtaaaaaaccgtgcttccttacttaaataatataaagaatattcccggtatgaggcgcatgaaaaaaaaaaaaaagaaaaaacacccccggagagaggtggcggggggttaaacagcttggccaatgggggtcttcttcttaaagggccgcgccccctacagcaaaggaattgatttttgagtggaaaatcgtaatattagcctgtgaactcatcatttggaggcctgagagtttcttttttaaaaaaatggggggaacctttttctgaaaaaatttaaccttttctcaaggaaatccaag

SEQ ID NO: 187427 - DNA, 550 bp, Arabidopsis thaliana
  unsure (1)..(550): unsure at all n locations
tttaaaaaaaaaaaaaaanannaaagagaaggggcgtncgcccgcgtggnggggcgcccgtgtgcgccgtcgcccctgcccgcgtgctgtttaaagagaaaaacgcgcgcctgccccggcggggtttgttcttccctctttcataaaaaacaaaaaaaaaaccgtttttatttatggcggcgggtgtttctttttttttgggggggggtggtgtttttttatgggggggccgctcttccaaaataaaagggcccccaccttcttttctcgcacaagaaaatttcccgcccctcatcgcacccccggacggaccctctgccccccaaggcggaggggcgtcttttttttgtttccttttcgccggaagagtggcttggtcggcgggcgcgccgcggggcgctgtttgtttcttccgagagaaggccccccgttcttcggaaaaaacgcgctgtgtccgccgcgagggcggtttccccgcctctggggggggggggcgcttctttgacgggcagcggaaccctccatctcccccgcggggcgagaaacctct

SEQ ID NO: 187428 - DNA, 554 bp, Arabidopsis thaliana
ctatacgaacttacttaaggaaagctgtcgctgcagtccggtcccgattccgggtcgaccacgcttcgtggttcatccaagtgctttgttttgggcaacaaacatagaaatttttggttttggagaaaattttttggccccggggggggcctctaaggggaaaatggggggtttccaaaaaagggtttcacggggattttggggaaaaaaatttttttcctcccttgtggggggaaagttttttttggccccccttcccaacacgggggttttttttttttctcacaaccaaatttttttttttttctcctccgccacaaattttttttataaaaaaaaaaagacttttgggggctgttttttttttttttaaaacacacccccttttttttttttgggacaaacaacaatattttttctttcttcttttggggggggaggggggggggaaaaaaaatatataaaaaaaccacccccccacaaaggggggttacccttcttaaaaatagacaaaaacccccccccccccctcgagggggagggggggggggggg

SEQ ID NO: 187429 - DNA, 688 bp, Arabidopsis thaliana
  unsure (1)..(688): unsure at all n locations
ggggggnnngggggggggaaaggggggggggggaacctacttgggggacacttcctccaaacactccttggnggggggtccgcgccgcccccgccttaaggctttggttccctcttaaaacctttccccntttgaggtgtagggtggttttttatattaaaaaaaaaggggcactctgggagattttcttttgtgccccaaaaaaaaattccctaccaaaagcttgttttttgtggggggccttttttttatttacattcctgcggggggggcgtgggttccctcttaacaaaaaaatgggaatcgtgggctcttttctttaaaacttttcttctgggggggggtgggttttnttttcttcggcgggggggtgtttaaaaaataaacaacgcgttggggccgggggttgggaggtagaaagagatccgcgttgacagatcgcgcgctcacacaaaccctctcggttggcaaaaaaacctcttctctccccctttctaagcggagcagaccggcgtctccccaggggcgtcttttcgcgcaacccccgcctccgcgagaccgccttgtggtggcgcatgtacgcgccttctccacggacggtgaccgtccattcctggagcgggtgttttttcgtccctgcactccccgcgcattctttcttttttttgggccgccccgggcgccttcg

SEQ ID NO: 187430 - DNA, 336 bp, Arabidopsis thaliana
  unsure (1)..(336): unsure at all n locations
tttaaactcacttttttaagagaaaaaaaagtttctctcaccctttgttggagaggacgtttttgtttttggtgtttaaaaatctcgggcgggggagaaccttttttttttttggaaagttgggtnncnnnaaggggggcccnttctaaaaaaataaaggttttcttctcgcaaagggcccaaagtgttttccctttcttttttggaggttttgtggtggggcgtggctttgggggggtaagccgcagacaattttttttgtcggggcgggtgtgggaggcggccccgggcagggaagtgggctcgccggggggcgtgtgtttgtgttagaggggg

SEQ ID NO: 187431 - DNA, 413 bp, Arabidopsis thaliana
  unsure (1)..(413): unsure at all n locations
tttttattaaaattttaaaacacaaggggtgggctcctaaaaatgaagagaaccnaaccggggaaaaacaaaaagaatttctctaattagtataaattgtagggttgagcttttcaaagcttaatatccactgttgggtttcattccaagaaggggggggggattctttttgggggttttaaaaaaaaataaggctacatttgggggagaaacttcctttcctcagaaggtggggcggtacttctctgaccctttgaacaatgtgttttttaggcgtcgtacaagggggggcgcaaaaaagaaagggggagtgtcttgagctttctgcctgtgtgttggccccaaaagaatggctttgggagtggtgcggactccaaatgatgagagtccggctggcgagggggtggttaagc

SEQ ID NO: 187432 - DNA, 407 bp, Arabidopsis thaliana
cccttcacgcgccccttggccgtcttttccgctgtgtattcttttaaaattttcctccctcctgtgtcattttttcccggggggggggggcttttcacatggccgttctcactaaaaaaacaaaaccccctttctcttccaccctccctcctccggccgtgcccccaccctgcctaccctttgcttgtgcggttctctcgacggaatcccccccgtcccgctctcttatcctgatccgatcggctcccgtgtcgccccctgctttcctttatcgtccctctgcgacccgtccctgcctttcgccgttcgctccctctctcccatgtctgtccgctcacgttctcctttgccctgagcggcgtttgcgcttcctctcggtcgcggggtgcggtggcctttgcgttccc

SEQ ID NO: 187433 - DNA, 649 bp, Arabidopsis thaliana
  unsure (1)..(649): unsure at all n locations
ggggngggggggnnnaaaannggggggggggccctattggggcacccccccaaactctnggcggcaccccccccccccgagcttgatcctttaaagctcccccttgggggtggggggtccnaaaaaaactttcttttgtttttggggtctccttaaaccacccgcctttcgcccgggaaccctccgctttttttttttaatttttgttggaagaacaagaaaaaaacggtgggagcgggaaactttcggggtttctaagaattaaaagaatttttttttttcggggggggggggcccccctttttaaggggtctctctccaaaaaaaaaaaaactcccctcctttttgcggggcggctttccctcttccgcgcggggcggggcgggggggcggccccccccccccccccgttgttttctgaaccgcgcgtccctccctctatcctctcccaggcggggccggccgtcgctcctcccctgcgccagcggggggcggccgccgcccctgcgtccccccggcggggtgggggcgccgcccacacccgtcgtgcgggtggcccgcccctccgcggcgtcccgctcggggtcccccgtggggaggcgggcgccccctcgcggtctttgtttagggcggcggggcgccccctccg

SEQ ID NO: 187434 - DNA, 454 bp, Arabidopsis thaliana
  unsure (1)..(454): unsure at all n locations
gagccccccccaagcgaggaacagagagggaaaaccctccccgggaggggggtanacccgggccaaaaaaaaaggaggagggacagcgagagcacccgagacacccgcgccgcgccaccggagagaggacggagcacacgccgggaggaggacgcgcgaggcgaggcgacgggcacaagggacgggacagcagcgcgaggaaagcgcggcacaacttttctttatgggaaggggtggagcgccgggcgcccgacgacgcgtcgcgagaggaaaatgtcatcccgcctgtctcccgctaggcatggtcacccgccgacatccctccaagcggttctcatagtctgagttcgtcttattctcgtgaggagtcaagttgaactggttcaagggcgtgttcgagtgcactactcacatggaatcgttcgaggtgcgtgggtgcgccgtaagggagtct

SEQ ID NO: 187435 - DNA, 538 bp, Arabidopsis thaliana
cccccccccccttttgttgtaaaaaatgggagggtagaattctctgggtactcccccccaaaatttagggaagaccgggccccccccctgccagtctattatcacatatttttactccttacgtttctctcgtatccacttaccgaagcttgtagtctcttggaacccaggcgccacgccaccacggtcatctggccagcggctgctggatatgtctccgaagcaggcctgcggcgcttgcccgaggaccaccgggccgcgcggacaatggttgtgagagtattttttaactgtgttataggtggggaccccgggccaccgcgtccccacaccccatcgcacggtatatccccattccctcgcggacggctcgtcatattttgtcctccccgacggtacttcaatctccctttgtactcttcttaatcccatgtcactctcgtacataccacatcgtcatttccccctccccatccacctattattcttctctgctctatttctacgctaccaccccacaggtcagcgccacctctcc

SEQ ID NO: 187436 - DNA, 328 bp, Arabidopsis thaliana
  unsure (1)..(328): unsure at all n locations
cccccccccgaagctggcaggaaggatgagatctgagtttttcaccccgggggggagggggtgcctgcaacaataaaacnacccccctcccccgcctcgggggcgctataggatagccacgcgggggcgtatcctgattgagggacacgcgacgagtatctggaatcaaccggcgctcttcggctgtcggcgtcagtgactcactcacggtcaccgccccgaacggagccggcgccacaagtaaaagcattttttttttttccgggggggtggggcgcgggcggtacgcccgccgtgtcctcagcgagaaaaaaataccggttgctat

SEQ ID NO: 187437 - DNA, 457 bp, Arabidopsis thaliana
  unsure (1)..(457): unsure at all n locations
gacgtcgcacgcacgcgtacgtaagctcggaattcggctcgaggaaaaaagaggggttggggttttgggcttttagagagagaaaaaggccaaggcgtttttcttctctcgggcctccattttctacagagagatatatcaaaaattccattttctccananagagagagagagagagagagagagagaggggccaaatattaatcatcgggggggggggttcaatncgggaaaaaatccatgaaaaaaaactgggggatgggatggggaatcaaaggggtttgggtagtgggggaagacnccgatcttctaattcgattcggggaataaaaggagtgggggaggctcacatcctaaggggtgggatnccaaaatggggggggggttatcctaaccccaaaggccaaaaaaaaaaaaagggagcggggggggaccaatgccccttactggggggccc

SEQ ID NO: 187438 - DNA, 576 bp, Arabidopsis thaliana
  unsure (1)..(576): unsure at all n locations
ccccccccaacttcgnagggccgaaaccccccgccgcgacaagggccgggagcggccggggggttttcggggcggagggggaaacgcggcgcaacacgcagtgaggggacgtggcgaccctctaaaagagggacacacccgaacacagagcagaaaagaacacacgacaagagaccggaccaggaacacacaacagaaggaaaaaaaaccaagacgaaggggaacggaagaaagaagaaagcagggaggacattttttagcgcaagaggggacggagggacgcatacacacgcccccaaggggagaaaaaacgagaacaaccgcgggcgagcgcaacaaagcgcaacaccccgtccccaagtcgggcacagacccctccattccggtaaaaggagacagcggcccgcacaaaatggcggcatacacaggagataaacgtgcgcaccgcacacacacgagacaggggcagagcggccacagcaccgacagacgatggcgcaactcgcgcgaggctaaaccatccaccatccacaaagcaggcgataacatacgtacacaagcaagaaagcccgcccc

SEQ ID NO: 187439 - DNA, 514 bp, Arabidopsis thaliana
ccccccccaaaagaagaagaattagcggacgcctcttggcaccccccccccatttccgacgaagcgacacctacgattcaacggaccggaccctttcgcccgtcatcgacccgcgccgcccgctcccgcgtccatcgcttaagtaccgcggagtgcctcccattttagggtggggcaccaggagtacacagcaggaagaccaccgaagggcccacaaagcgcggaacagcccgtagtgaaattataaaaaagaataataaatgaacaaaaccacagcccccacaccaccctacaataaaacaaaaaacccatctatccacatatcaaaacctacataagttaatactaccaaaatatatcacacaacctcgactagaacactcaaaaccacactgccaccccacctccatctaaataaaatattaacacaagaaacacaacaagacactaccacaccacccccacccaacccaaaacataaaatgtcacccatctcaatctaccccccccatac

SEQ ID NO: 187440 - DNA, 285 bp, Arabidopsis thaliana
gggggggaacgcgcgcacggggacgcagcggagcggaagagctcggtttggcgggcggagtgcgtcgcctagtggcgacgctcacgcccgcgacagttcgaggaggcaaggaaacctctacgcaaagcgacacgcgatacgacaccagggtcgtcagccactgctctatcaccagaacagtaccaagatctgcggagagtcaagaacaaagtgaggcaggcagggattttttttttagaggtagtgataaagtagatagtgtggaggactgcggggggcgccggg

SEQ ID NO: 187441 - DNA, 502 bp, Arabidopsis thaliana
gggaaaacaaggagggaggggaggaggggaagggggggcgttttgagggagggggggtgatcggggtagggtcgagcctcgctcattgtgctggccgtcgcgagggcaggggtggcacggatgcagtcacgtgcgatagaataggaggctgaactcgtgcgcggggtggccgggcgcgagtgtggagacggaggtggaaaagagggttttttgggggcggggggtaagaaataggcgaggggggcaggaagtgggaggaagtatggaggtgtgttggtgaaagggcggtgggtgcggacggctgagtttcagggcgctttgggcgtttgatcgacggatgactggggatagggacgggcctgtcttgcggctaagtgtgtatctcgaaggaggcaagcaggattatgtccaagtagttggggcttaacccgggggttgaggcgcgggggtcagcagtttctacgcgctcagcgacgcgagggcgttgtgttagaaaaggggt

SEQ ID NO: 187442 - DNA, 286 bp, Arabidopsis thaliana
  unsure (1)..(286): unsure at all n locations
ggcccgagaacaaaaaacgggaaaaaagcaccggcggagggagaaagaaaagaagacccccgcccgaaggcaaggggagaaagcggccacgaanaaggaagagacccgccacggcgggcaaacgcagaaagcggacacaacgagcaaggcgagaagcggacaaagggcaggagagaaaagaaaaaattttaatatttctcgcgggggggggggagagacgcgacacgggagagaacagcgccgccgcggaaacaaaaagcagagaccacacgcgccgcgccggcag

SEQ ID NO: 187443 - DNA, 391 bp, Arabidopsis thaliana
  unsure (1)..(391): unsure at all n locations
cggggtttaaggggggggagaacgaggaggagggangggggaaagaggaggaggggatattaattgttttagttgggggagtgcggagacgatggggtcaacctacgtgtgtggaatggtatggtaatgaggtgcgcatgcgttcggtggatatccgcgggatgattgtcggttctggagtggtgtaagcggcggtagtcggagggggaggggaggacaagttggggggactaaattttttgggggtgggcgtagggggagtggtgaatgcaaggcgaaggcaacggccctttactactatttgagcctcgggggtaaaaggtgagagggtggcttaagggttaggtagtaggaaggcgtgtgaacatcggcgccaaggatcgctgcttag

SEQ ID NO: 187444 - DNA, 580 bp, Arabidopsis thaliana
gggggggggcgggagcgagaggcggcggggggggggcccttttttggaaacaacccccccgagggtttgaggggggaagggccggggcgcggggaaggaaaaggggggggaaaccgcaggttgcggaccagggggggcgggggcagaacgaaacaggagagcggcggaggcagaccactaaaagcaggacgcgccacgagcaaacagcaacggagagcgcaaagaaagaacggggaacagagcgaaacggagacggggaaacacaacaagcgaaacccgcgcgggaacaggtagaaaaaaaagaaggaagtttttggacgggagagggggagagagagcgagagaaaagaggggcaccgggggagcacgccgaaagcaggggggggagggaggaacagggagagaggggagagaacgagggaggggggggggacggggacggcgcagacgcgcgaggccgcggcgggcccgcccgagctcgggcagtgcggagagaaaaagacgcgccggaggaggagcgcggcgggcggggggcgggccgggcgcggcgcgggggagggcgggccgaggaggggcggga

SEQ ID NO: 187445 - DNA, 596 bp, Arabidopsis thaliana
  unsure (1)..(596): unsure at all n locations
gttgttttccccccctcccggaggaacccctccccccgcgggtgatattatatatattaatagggggggcgggagaaaaaatttttattattagggggggggcctttctccccaaanttgtttttatatttttatttttttctttgctggcagccacacctctagtttttttttttttttttttctcccccccattaaaagaaaaaaaaaatttttaagggggggggtttttttttttttttttttgttgccgcccccccccccccccccctctcggtggtggtaaaaaacaaaaacaaataataaggacgctcctgtttttctctccccctccttttcggtggggtgggggaggctgttttttctttcttctcttcttctctctacaaaagaaaaaatgaaataatgtatggcgccccccccccccccgccccccccggggggcgttgttttttttttttctactaatacgagagacggtatgggntgagagattattttttctctttttctttctcctcccacttattaaacatatgctctcttttttctccttaggaataaaaaaagaccacccaccctccctttcttgtttt

SEQ ID NO: 187446 - DNA, 282 bp, Arabidopsis thaliana
acgcggaaaccacgcccccaagagcacggcaaacgaggacagagcttaaacccaggggagaagaaccgccgacagaaaaaaaaccagcccagacaaggcggccgcgcgagggaaaagaagaccaggaagcgcgaggaagaaccccgaagccgaaggaacggacgcgaacccgcccacgaacgcgcgcaggaacgcacgcggcacaagcaacagacagaagaagaagaaaagatatttttttataggggggggggagcgcagcaggccagaggggaggaggag

SEQ ID NO: 187447 - DNA, 243 bp, Arabidopsis thaliana
agaaccggccgccaggaggaacggggcagcagagcagtttagacggggggggggagcggagagaaacaggaggcgcagaagcgcacgcgccacaaagaggccggcgacaacgaagacaacaagacaacctccggaaacacgaggaggggccgaaatgataataagagaagaacaccgccaacaccggcagagagaaaaaaaggagaatttttattataaagggggggaccgagaaagagcaac

SEQ ID NO: 187448 - DNA, 511 bp, Arabidopsis thaliana
ccccccccaaagaaaaaaaaaggtttttgtcacccccgccgttcgggggaacgggccgggggggggggcagcaacggtttacagagggacacccagggggcccccggcccgcagcgaaagaaagcggggagacgggcaacggagggcggaggaaggcacagacggcagacagacgcaacaacacgcacaccagcgaccaggaggaacgcacaagatttttagagagggaacaaagacggagacaggcggggaccgggcgcccgcggaccaaccccaaagaggaagccaacaacaccggggccccgccgcccgcaaccagcaggcgaccgagcccgccacagaaagagacgccccggcaacaccacgccgacagaagaagcacacacccacgagagaggagaagaagaaggcgacgcggccgacgaaaagcgacaggcgcggagacaacccgaacgagacccagaacaaacacacaaacagcgcaacacgcacacaaccaggcagcgacgga

SEQ ID NO: 187449 - DNA, 397 bp, Arabidopsis thaliana
tttcaaaaggcggggggggaggcgccgaagaaacaaaaaaaggagagaagcgagcgagcgcggggggggaggcaccagcaacgcaacaaagaggaacaagcaagcggacagccacgacgagcaagcgcagacgaacagaagcgagacgacaagaacggaacgcgctagcgcacacaaccgccacgacggaggagaggaagaagagaagagaagaaaaaaagatttttttttcgggggggggggggaaagagagagaaaaggaacaaagaagaagcgagaaaaacaccagcgagccgcagaggaccacgggccaggacgaccggcacacgccaagagaagaaagacaggaggcgaagcacaaggccgggaagaacgagaagaaggagaggagcgcgcc

SEQ ID NO: 187450 - DNA, 296 bp, Arabidopsis thaliana
agacccccagaagggaggatgaaggcaggtagggttttttgcgggggggggcgggggccgaaggaactaccgtggcggtagaggaagggtgcgagggagaggagggggctgttacgttgtagattccgctagcgatatatgggccatacgtccgcatggcaagaggctggtgcgatagccggctgcatgctagggggggaggagccagaaagggatgagtatttttttttgtggggggggggaaccaagcaccagaaagcgagagcagtggcgagcgagcgggtgagcgtgaatac

SEQ ID NO: 187451 - DNA, 506 bp, Arabidopsis thaliana
cccccccccggctagtaaggtaagggggagggttttttggggaccgccccccgggggtgaggggggggaccgagcgagggcgaacaccaggagagcgaacgggggtagcaagtagggcacgcagccgaggcgtgacgccgcaccaccgcagatgaacatcatacggccgacgcagtcagggacggaggcagagcgccacgcccaccgactgaacgttcgagcggcgccagaggagggcctcgccgccgagagaaactaaggagagtcgagaggggaagttttatttaaggaagtgcaaccgagaatcgaggcaatgggtgagcgccggcgctcccccgccgcaacacgaggccgagagtacattagacggccgccgtgccgccgcgcacccaccgagatggccccccgccgagcgaccatcgccaacgtaagctgtggagggatatcgggccggacacgcacccacgaaggaggaccgagaaaacgatcgccacacgcgcggcgct

SEQ ID NO: 187452 - DNA, 321 bp, Arabidopsis thaliana
  unsure (1)..(321): unsure at all n locations
ggtgaccttaaaagttgacgcgatgccgcgtantaagctcggaattcgtcaggggctgtcggtctcatcaggaggacaaacaacggtacggtacacccggcaccaacacaacaagtccggagcattgcgccgcaatatacagctatgtacctatctgtgggaggcatggacactggtttgttgggggcaagcanaccaggcaatgccgtttgaccacattgaccttgtgtacatttggacaatagcanagtgatggtgaaggagagagacttgcctctgggacttcatgacttattgtgatgccgcttatgctctactggg

SEQ ID NO: 187453 - DNA, 397 bp, Arabidopsis thaliana
  unsure (1)..(397): unsure at all n locations
aaccgcccggcggggggggcgggcgggattattttggaaacacccccccccggatttaaggggagggaaacggggcccgcgggaaggaggtggggaaggcaaggaggaagatttttcagccggggggggtgaaagcccgcacacaaaaggacggaggagcgcaaaccaagcggaacaaccagggcgcacacggcgaccgcgcaagagcgagagaaggagcaaaccgcgacgaacaccgccgcgcaacggcaagaagagcgccaggaagcggaggagggcgggagaccgccagggagaagaggaaaaaaatttttttatgagggggggggagggggaggacgcccgcaggnagggcgccgacccgaccagaaccgcacggacaccaccgaacgcgacc

SEQ ID NO: 187454 - DNA, 116 bp, Arabidopsis thaliana
ctcggaattcgtcagacaattaggttggtggcttataaaaatctttcttaatgaaatgggatcttatgttccaggggtggagctctgaactctaattctttggattaaccaccagt

SEQ ID NO: 187455 - DNA, 400 bp, Arabidopsis thaliana
  unsure (1)..(400): unsure at all n locations
gaacaccccccaaagcaggaggaaggaagaaaaaagattttcgccccggggggggaggggccggacaaaaaaaccncaaaaaacgaaaaccaagcggcgaaaacggagacgatactcgccgcaccacaacgaacagaaccaaacacgactaagaaacagcagcaggccgcacagaaaaacaaacagaaagcgacgccgaagngaagcgggaaggaaccgaaattttttattcgagggggggggggaggaaggcccangagcgcgctgaacagagaaaaaacagcaccacataaagacacaccatgaccgcgcccgccaaacacacaaaaggataaggaagccgacacacgacgaacccgcgccaaccgaccgacagccgagtcagagacacaactgacga

SEQ ID NO: 187456 - DNA, 648 bp, Arabidopsis thaliana
  unsure (1)..(648): unsure at all n locations
ccccccccccccccattatataatgaaatgatagacactttggggggcccccggccgcgccccccccggggagcgagagggcgcccgcgcaccggcaccgcggccaaagtaggtatttcgcgcgggctgctaataccggacctcacttttagggggaaaagctcggttcccccccgggcgaggacccccgggccccggaaaataaattcccgcggggcgaaacaagctcacctatagcgcggggggcccggcccttttttttttttttttttgggaaaaaaaagaaacactttgtttttttttttttttttcagaaaaaaagaggtgccccccaaaatttggggcgcgcgctctttttgaaaagaaaaaaaactttctcaccaaaaaaaaaaaaaatctttggggggggggccccccttttgggtgggcaccaaccccgcgttgggggggggggggggggggnaaaaattttttttttaaaaccaccacccccccccgcgttcttttttttttttataaaaaaaaagaggggggggggggcaagctcccttctacccacccccctcccataaaaaaagggggggggtgagggtgttgttttctttttcataactaacaaacacaaaaaacaaaagaatagaaccgagt

SEQ ID NO: 187457 - DNA, 601 bp, Arabidopsis thaliana
tggtatgggaaggggggggggggggggtcttgtggtacacccccggcgattaaggggggaacggccggccatgggggattgaaaaaggggtgttttatggatgggggaaggtcttgacaataaagaagtggagttcaatgtgtcagcagtgggggggagtattgggctaatgagagagttatagatgtctggtctaggagaacggtccgctcattgaaaaggagttaagtaggcgtgtcgagagggggaattaaagaaatttttttttggggggggggggagataagatatgtttatttatgtagaaaaagtgagttggtaaaggacagtagatgactgtgtagatagttataagaagtgtgtatgtatgaggtttaggtgcaggaaaggtaatgagtagtaatattaagtgacgggagccagattacaagacaattaatggattcatgaatggcgcttgtatagaagaagaagtaactgcgagtacggaagcgcaagttaagtaagagtgtgagttgtgggctgcatagaaaacagatgcgggcgtgtgagagaagtttagagatttaattcttacacgcgtacgcggcatttgagtatt

SEQ ID NO: 187458 - DNA, 281 bp, Arabidopsis thaliana
ggggggaaccgccgccgggtgggcggcacgaggaccttttttagacgggggggggggccgccagatagacaggccggtccgcaccacggcccggacggtacgcctggatgtagtagtgacctaggggccgactgacagtttgttagtgtatcgctgactggtccccgccgcacgcacgcactagtgagacacggggggcgagaaatgttttttttttctcgggggggggggcgcacccgtccgacgccgggcgccagcgaaagaagagtagtcggcgtttg

SEQ ID NO: 187459 - DNA, 505 bp, Arabidopsis thaliana
  unsure (1)..(505): unsure at all n locations
cccccccngaatttaggggaacgaccgagaggaaagaaagatagtggaaagaggagaagattttgagaatgggagaaagtgggcggacttagagcacagtaaaggcgctaaagagcgacgaagcacctgtgcacggtcaaccgacataagggagcgacgcctagcgtctacgcccgctcgcgctgcggtagaacgcgcgaattcgcggttgttcatggggccaactggcgctgccgcacagccggatattttttttcacccgcggcccgcccccangtcacgatgttgtgattatatggacggccggtacggctatgagaggaacaagcggacgggaggacgatccttcgtcttgcgtctcattgcgccctcggctcggtgccagtgcctacgacgatatcataattggtcgatctataagagagaccaccacgcccgggtggacgcgatgatacgtgtatctccgcgcccggtcggggcacatcgtacacctccatcgtgaggc

SEQ ID NO: 187460 - DNA, 583 bp, Arabidopsis thaliana
ccaattaaggggaagacccacccccagcagccggcgccagacaaccacattcaaaacgggggaaagaccccaccaccacgaaaggcaagccaaagagtcgccacccccaccgcccgcaccgaacagaacacaagaggccgagcagaccgaaaaagacacaaaatagggaagaaggagggcccccccacccacacgccagacacaaaagggttttttttaagggagggaaaaaaaacccccggcccggcaaaaccggaaagaaagagaggaaagcgggagacatcggccgcccacccaaagagtacgagcgagaggagagcagagaaagagagaagaaggagagggcagcccacgcgcggagacactaacgcagagagatgagagaagggcgaacacccgccgccgcacagagggaaatgaaagaaaggatagacgccccccgagcggccgaacggcggtgaggacaaggggagggaaagataaggcgaggaaggggcggagaagaaaaacgagcgaggaaaacgagcaactaccgaagcgcggcagaggccctacgcaaggacgcatcgaggcccggacagcg

SEQ ID NO: 187461 - DNA, 587 bp, Arabidopsis thaliana
ccccccccaatccggggggggaaccacaagcggcgaagcggaggaggcgcgcgaggcttttgcacggggacggattccctcgaatgacctaagcaggaagggagtcgtccatgggtctacgcgagagaccaagttaaactgtgatgcggagcgtacgggcgcgcaaaaaggtgtaccgcccaagcctacagcacgtgcggcatgccggcatactcgaggtgaacaacagacccccgaagcgggcttttttttgcgggcgtgcgcggcgggggagaatgttatagaacaaataatagaaagagtggaggtgggtagtagaaggggagcgccgcgacggcggtgaggggaccgtgtggcggcgatggacggagaatacagaagccggcagcgacaaaaataaacatacacgcagggggagacggccggcgcgacgagctccttagtttttagaaatatctcatcagaactatatcaacagcaatgagagtattagagaagcaacggatatagggcgagaaggaacctctaaatcgtatcagtacagggtgaggagactggtatattgaaagagagacacagaactgtgg

SEQ ID NO: 187462 - DNA, 433 bp, Arabidopsis thaliana
  unsure (1)..(433): unsure at all n locations
cccccgccccaccacacccctttcctcgggtgagccttaaaccgactgccaatcttttcgtcctcacacctgcgcccagaacgacagaaagtggccacccccatacccccctgatcacccccaccaaacctcaccaccttgcacaccccacacagctttttttctggggggggcgcgataattatatcttttaataagaagttatatgcanatagcactcgaggcctattttaacacgtaccacgtctctaccctcgcaaccagttgtcagaatcgtctgaagccgtcccccaccccaccagagtggagatagccccattcaaaaatatacattataaataacacataaactaccccacactattacaatatactaaagaccaaacgcagaacaataagtataattgtaataaaaatataacgataaaaagac

SEQ ID NO: 187463 - DNA, 381 bp, Arabidopsis thaliana
ccccgagggggaggaaagattgcggggaaaaccagaaaaaaaaaacacagggggaacacgggacaaaagagggagggaggcgccgcgaagacgcccacacggacgcacaacgggaagaaacagaccacaaaccctttttcccggggccccccccgccaaaaaaagaagcgcccgcgcgacaaaagcgagagcccgccgaaaaaaacaccacggcaccgaggcagcacaaaacaacaaaacgaagacacgccccaccgccacaaaagaaaggaaaacgaacaaaagggcaagagagaccaagccacgccacgggaagaaccaggcagccccgccagcgaagagcaaaaaacaaggggagaacagaacacccgcgcgcagaga

SEQ ID NO: 187464 - DNA, 640 bp, Arabidopsis thaliana
ccccccccattaagcggggcggacccggcgccccgggggggcggggtagcgggcggcgggggtttttggtgaccgggcggcggcccgcgtcgcggagggaggagagagcgggggtcggccggccggttgcccgtcggagcgaagagagaagttaccgagagagaatgcatcaccgatagctggagtgaggtatatcgcgggagctaagacccccccgacgaccacctagacaacacgagtgcgcccgtagattttttttgggtgggggtggtggagctggagatacggcgcgaggtgttggatgtcggttttgtacggattagtggcggccccgaccgcggcccgccgcgggggcactgatggtagggaggagagagggttatcggtaataggtgagtccccgcgccacgctacagagggcggttatcgaacgagagggctggtgactgaagcgcctgccctctcgcacgcgcagagagattgttagaagtgataggcgacacacgaggcgtggaggcgacgtcgacgtcacaggagctgaatgcgacacacggagagaatagggggggcctctaccacgtgggtccgagagctcggcgtagtacagaacacgcgggctgacacgtggggatcgtgcggg

SEQ ID NO: 187465 - DNA, 623 bp, Arabidopsis thaliana
  unsure (1)..(623): unsure at all n locations
caagatacaattgccagaacataagagggacgcgaggaggggttctttttgttgacgcccccccangattttggggggagaaacacacaccgcgaggaagggggaggcgagaggaacgaggttttcgcgagagaggggaagacccccagaagggagaggggggcggggaacggaggcagcgagaacgaacaagaaagccggaaggggggcaaaacagggcggagggagcatcgaccggaggcccaagggggtgatgtggcgagggaggcgcgaggagagcgggacgtgtttttttttggggggggaggggtggataaagggggagagtacgaggagaggggggagaggaggagaagagagggaagggacacgagtggcgaggcggaatagaagcgagagcgtagaggatctaggggaagaagtgtgcggagggccgcggcacggaaacgagaagcgggaggtggcgggggggacagagaacagggcgaaagggaagcgaaaccggcaggagcgcggagacggnaatgaaaaggagcggaaagcgcaggagggcggtctcggatgatggtacgaagcgccaatttggaagggtgagggcgggcggggacggcggcggcggccac

SEQ ID NO: 187466 - DNA, 561 bp, Arabidopsis thaliana
gggggagaacaagacgcccgctgggggaggtatggagattacacccctttgtgctggggggagggggcccctcaagaaaaaagaaaagagaaatagatggacggccggacgccgacaaggagagaagccaagggacgagagacgtggacgagggagaagaaggaatgagaaggacttgagacgccgtccacgggggtagagcgggcggagtatttttaagggggggggagagaaacggaccggcgcctcggtaaagaaaaatagagtgtaaattttggcctccccgaacgccaacgagaagggagggccccgacgccgaaagaggaatgagtgaaaggggaaggcttggcgataacatgacgggattaggcaggagagataggaatagccagagctacaaaagaaattaatgttttatttacggtcggtgccggcggtggtacaggaggaagggagactgatgtatgacgaatagtcagacgcatcgagaagtgagagtaaaagagtcgacgcagggggaacgtgggaaagaacagataaaagaggagaacaacttacccc

SEQ ID NO: 187467 - DNA, 344 bp, Arabidopsis thaliana
ggggggggggtagggattttttggtgactgcgcccccgaaaataagggggaggaaccgcgcccggatggaagaagggagagactaactttttctaggggggtggggggcccggagaaataatattaatgttttatgtgtggagccggccgacttatctgcgtggtcgtacataaattcagcggtgttgccggtgaatattaattatatatttttggagtgtggcaagggccctgcacgggagattcacggggcagcggtttttttttgggggggggggcagggccgaggtgaaaccgcaggagaaaaaagagttcttgatgtgttgttgaccccggcgcaggcc

SEQ ID NO: 187468 - DNA, 501 bp, Arabidopsis thaliana
  unsure (1)..(501): unsure at all n locations
ccccctcccccaacttttaacgaacgatagagcctcctccattccacctcccgcaccctcctcttcctcccctctcactctttctcccccccacacccctcggggcgggagtagcttccacttatcctacaataaaaaacaccacttctcaatcacctgtgttcgccgcgtccctctccctctccactctcttctctgtttattttaatatattaccctccaccacctcactcaacaacaccaactgttatcattatactactttccccctcccccacccccctccctccctcccagtctttcttttactatttctaccctccactttttccctccgcgggggggtatagtatataaattttttttctctcaccctgccccccccaccaacattttatcattactttntcctctctacctccctccatctctcctcctactcctcttcctctctctactccccccacccctcccctgctccctccccgtcctcccatcgcc

SEQ ID NO: 187469 - DNA, 139 bp, Arabidopsis thaliana
cccccgcccaaggggaagaaagcagaaaagggatttttaagggcgggcgccgaaaaccccactgccgcaacccgccttagcacccatatgcgtcaagcactaacccgtcaccctgcgagctcccgttcctttgacactc

SEQ ID NO: 187470 - DNA, 288 bp, Arabidopsis thaliana
gcggggggaaaccagcccaccacagggagcgggccggacgggaggaggggttttttaccgcgggcgcgagggcgcccgtgcgtcgagaaaggtgggagaacgcgaaaaaagcgaagtgaaagctatataccgcgactcggacacgcagccccggcagaagccgcacatacagcaggaattagagcgcgcgccccccgcgccatccacggcgctagcatatagtgaaagaacgtctgccggccaccccccacgagcaccttttttttgactggggggggtagcagcgac

SEQ ID NO: 187471 - DNA, 673 bp, Arabidopsis thaliana
cacgctctctcacatacaaaccaaccgccgaagaggcagcttcttagggaccgaacgaacaacattttaaacataaaaccaacagggcgaacagagaggctacggaggccactttattcgcaaagggggagagacaacaccgccagcaatattggatagtgtgattagtttatacgagtcaaccctctatgcctccaggcccaacccagcatcacgttataagggtagccagatagaccatagatagccacagccggagggacgccagtcctgaccatacccgtcgcacgcgacaaccccgggcgccgtgttttctggtaggggagcacgaaaccagcattcgtgaaccgcgatcattgcagaacgggcacgcagcgtagcgagtatctcatacatccgcatgcccagaacaccagatacggacatactgcagcgccatgtctcccctatgtcccacaaaaggatcgccggataacaacccgaccgaagatgtatgccctaccgtgatagcaggttaccttgagccgcgcggcatgtaaaacgacctctcgtccgatccccgactcgctctatctccatttcccccccgctcacacaatacccaccgcaagatagtacgtacccgcatgctcccgccgactatgcccatacaattgtacattattgtatgcag

SEQ ID NO: 187472 - DNA, 374 bp, Arabidopsis thaliana
  unsure (1)..(374): unsure at all n locations
gaaggtttgaggaagattgagaactgtcgatcggtctcaggcaacgcgactatagtactcttttccccacaaaggccgtaagcccaacgaagtgagtgagggacgaggtgggatgagttgggagggagtcaacgagccgcgcgccgcgacgactgccacaaatatagaatagaagttggcgcgcgcctcgtcgccacccagagtaaaatggagtatgatgacagggggacgcgctcaaagaactcctaggacattatgtttttatgtgtgtgagatcagaccccgcgccccgncacccgtgggtgtgtgagtaattgtgtgagtgataacgagatactcgtgctgctcccaatatagttattaatttaggggta

SEQ ID NO: 187473 - DNA, 336 bp, Arabidopsis thaliana
aggccacgaaggagagaagcagggcacaagcacgaacttttagaacgggggggagggggcccggagaaaaatgaggagggaggtggagaaagagaggagcaggcgaggggtggagggagcagggagtcgcggccacgcgagcccgaggaaagagaaaggatgggcgggcgcgcgccggggggcgagcgtctgagggaagaagagtgagaggcagacgagacggaacgcgcttttttttacgagggggggggaaagtaagcggaagggacatgggcgagaagggaaacacaggaggtgatagacgggttcgagcgagaccgcgaccacgcggcgcca

SEQ ID NO: 187474 - DNA, 404 bp, Arabidopsis thaliana
ggaggaagggagaaagagagggaacaggagggagggaggaaagagagggacaggcggacagcagaccgaggaagaaggagaaggaggcagggaggagaaagaaaaagaggcagcgagacgaacgacgcggcaccaggcaaaaagaacggcgcgcggagacggaggagggaggacagcggaggaggggcgagaaaggcgaggcgggggggggaagaagaaaacggtacagagagcgccagggggcagaggagagggcggaagggcgttacaaggcgaagagagcggacacaaggacaaccgagcgcgaagcaaaacaacgacagacagagaggagagagacggcgagagcgagaacacgaagcagaagaacgagcagacagcggaccagacgccccgaccagcgg
